United States Patent Application Publication US 2005/0255487 A1 - sequence listing, part 64

SEQ ID NO: 1755649 - RNA, 19 nt, Homo sapiens
  misc_RNA (1)...(19): siRNA sense strand
gccaauuucuggguacgau

SEQ ID NO: 1755650 - RNA, 19 nt, Homo sapiens
  misc_RNA (1)...(19): siRNA sense strand
caagaacagcauccacuac

SEQ ID NO: 1755651 - RNA, 19 nt, Homo sapiens
  misc_RNA (1)...(19): siRNA sense strand
ucuacagccauaagaaauu

SEQ ID NO: 1755652 - RNA, 19 nt, Homo sapiens
  misc_RNA (1)...(19): siRNA sense strand
gcuaacauucaugaacaaa

SEQ ID NO: 1755653 - RNA, 19 nt, Homo sapiens
  misc_RNA (1)...(19): siRNA sense strand
gcgacuggaucuugcuaac

SEQ ID NO: 1755654 - RNA, 19 nt, Homo sapiens
  misc_RNA (1)...(19): siRNA sense strand
ccuacgggauccgcauuga

SEQ ID NO: 1755655 - RNA, 19 nt, Homo sapiens
  misc_RNA (1)...(19): siRNA sense strand
gaagauggggccucuguca

SEQ ID NO: 1755656 - RNA, 19 nt, Homo sapiens
  misc_RNA (1)...(19): siRNA sense strand
ugauucccaccauuauuaa

SEQ ID NO: 1755657 - RNA, 19 nt, Homo sapiens
  misc_RNA (1)...(19): siRNA sense strand
cagccugauucccaccauu

SEQ ID NO: 1755658 - RNA, 19 nt, Homo sapiens
  misc_RNA (1)...(19): siRNA sense strand
agccugauucccaccauua

SEQ ID NO: 1755659 - RNA, 19 nt, Homo sapiens
  misc_RNA (1)...(19): siRNA sense strand
ugacgucauugugcaugga

SEQ ID NO: 1755660 - RNA, 19 nt, Homo sapiens
  misc_RNA (1)...(19): siRNA sense strand
gaucuugcuaacauucaug

SEQ ID NO: 1755661 - RNA, 19 nt, Homo sapiens
  misc_RNA (1)...(19): siRNA sense strand
ucacagagcucgcacacaa

SEQ ID NO: 1755662 - RNA, 19 nt, Homo sapiens
  misc_RNA (1)...(19): siRNA sense strand
cuacagccauaagaaauuu

SEQ ID NO: 1755663 - RNA, 19 nt, Homo sapiens
  misc_RNA (1)...(19): siRNA sense strand
gcacagacggguaccugaa

SEQ ID NO: 1755664 - RNA, 19 nt, Homo sapiens
  misc_RNA (1)...(19): siRNA sense strand
ggcgcugugugcccuauua

SEQ ID NO: 1755665 - RNA, 19 nt, Homo sapiens
  misc_RNA (1)...(19): siRNA sense strand
ucaccauccucaucaagaa

SEQ ID NO: 1755666 - RNA, 19 nt, Homo sapiens
  misc_RNA (1)...(19): siRNA sense strand
gauccgcauugacgucauu

SEQ ID NO: 1755667 - RNA, 19 nt, Homo sapiens
  misc_RNA (1)...(19): siRNA sense strand
cugauucccaccauuauua

SEQ ID NO: 1755668 - RNA, 19 nt, Homo sapiens
  misc_RNA (1)...(19): siRNA sense strand
aacaaggucuacagccaua

SEQ ID NO: 1755669 - RNA, 19 nt, Homo sapiens
  misc_RNA (1)...(19): siRNA sense strand
gacuggaucuugcuaacau

SEQ ID NO: 1755670 - RNA, 19 nt, Homo sapiens
  misc_RNA (1)...(19): siRNA sense strand
gccaaauacuacaagauca

SEQ ID NO: 1755671 - RNA, 19 nt, Homo sapiens
  misc_RNA (1)...(19): siRNA sense strand
ggcuacaacuucagguuug

SEQ ID NO: 1755672 - RNA, 19 nt, Homo sapiens
  misc_RNA (1)...(19): siRNA sense strand
ggucuacagccauaagaaa

SEQ ID NO: 1755673 - RNA, 19 nt, Homo sapiens
  misc_RNA (1)...(19): siRNA sense strand
ccacagaccccaaagguuu

SEQ ID NO: 1755674 - RNA, 19 nt, Homo sapiens
  misc_RNA (1)...(19): siRNA sense strand
ucaagaacagcauccacua

SEQ ID NO: 1755675 - RNA, 19 nt, Homo sapiens
  misc_RNA (1)...(19): siRNA sense strand
ccaaauacuacaagaucaa

SEQ ID NO: 1755676 - RNA, 19 nt, Homo sapiens
  misc_RNA (1)...(19): siRNA sense strand
agguuuggcucaacucuga

SEQ ID NO: 1755677 - RNA, 19 nt, Homo sapiens
  misc_RNA (1)...(19): siRNA sense strand
ccaaauuccacuucuccaa

SEQ ID NO: 1755678 - RNA, 19 nt, Homo sapiens
  misc_RNA (1)...(19): siRNA sense strand
uugcuaacauucaugaaca

SEQ ID NO: 1755679 - RNA, 19 nt, Homo sapiens
  misc_RNA (1)...(19): siRNA sense strand
gggccucugucagccaauu

SEQ ID NO: 1755680 - RNA, 19 nt, Homo sapiens
  misc_RNA (1)...(19): siRNA sense strand
ggaucuugcuaacauucau

SEQ ID NO: 1755681 - RNA, 19 nt, Homo sapiens
  misc_RNA (1)...(19): siRNA sense strand
guacgauggccccaaauuu

SEQ ID NO: 1755682 - RNA, 19 nt, Homo sapiens
  misc_RNA (1)...(19): siRNA sense strand
gccauaagaaauuugacaa

SEQ ID NO: 1755683 - RNA, 19 nt, Homo sapiens
  misc_RNA (1)...(19): siRNA sense strand
gccaauuucuggguacgau

SEQ ID NO: 1755684 - RNA, 19 nt, Homo sapiens
  misc_RNA (1)...(19): siRNA sense strand
caagaacagcauccacuac

SEQ ID NO: 1755685 - RNA, 19 nt, Homo sapiens
  misc_RNA (1)...(19): siRNA sense strand
ucuacagccauaagaaauu

SEQ ID NO: 1755686 - RNA, 19 nt, Homo sapiens
  misc_RNA (1)...(19): siRNA sense strand
gcuaacauucaugaacaaa

SEQ ID NO: 1755687 - RNA, 19 nt, Homo sapiens
  misc_RNA (1)...(19): siRNA sense strand
gcgacuggaucuugcuaac

SEQ ID NO: 1755688 - RNA, 19 nt, Homo sapiens
  misc_RNA (1)...(19): siRNA sense strand
ccuacgggauccgcauuga

SEQ ID NO: 1755689 - RNA, 19 nt, Homo sapiens
  misc_RNA (1)...(19): siRNA sense strand
gaagauggggccucuguca

SEQ ID NO: 1755690 - RNA, 19 nt, Homo sapiens
  misc_RNA (1)...(19): siRNA sense strand
ugauucccaccauuauuaa

SEQ ID NO: 1755691 - RNA, 19 nt, Homo sapiens
  misc_RNA (1)...(19): siRNA sense strand
cagccugauucccaccauu

SEQ ID NO: 1755692 - RNA, 19 nt, Homo sapiens
  misc_RNA (1)...(19): siRNA sense strand
agccugauucccaccauua

SEQ ID NO: 1755693 - RNA, 19 nt, Homo sapiens
  misc_RNA (1)...(19): siRNA sense strand
ugacgucauugugcaugga

SEQ ID NO: 1755694 - RNA, 19 nt, Homo sapiens
  misc_RNA (1)...(19): siRNA sense strand
gaucuugcuaacauucaug

SEQ ID NO: 1755695 - RNA, 19 nt, Homo sapiens
  misc_RNA (1)...(19): siRNA sense strand
gaacacaaaucaucagcaa

SEQ ID NO: 1755696 - RNA, 19 nt, Homo sapiens
  misc_RNA (1)...(19): siRNA sense strand
guacuuauguugaggaaau

SEQ ID NO: 1755697 - RNA, 19 nt, Homo sapiens
  misc_RNA (1)...(19): siRNA sense strand
aagaggagaugauacauaa

SEQ ID NO: 1755698 - RNA, 19 nt, Homo sapiens
  misc_RNA (1)...(19): siRNA sense strand
ucacagaccuuccuaucaa

SEQ ID NO: 1755699 - RNA, 19 nt, Homo sapiens
  misc_RNA (1)...(19): siRNA sense strand
gacaagaaguuagaagaaa

SEQ ID NO: 1755700 - RNA, 19 nt, Homo sapiens
  misc_RNA (1)...(19): siRNA sense strand
ucauuaaugucucugguua

SEQ ID NO: 1755701 - RNA, 19 nt, Homo sapiens
  misc_RNA (1)...(19): siRNA sense strand
gaaugggauuuacuuaaug

SEQ ID NO: 1755702 - RNA, 19 nt, Homo sapiens
  misc_RNA (1)...(19): siRNA sense strand
gauccuauuugucuauuug

SEQ ID NO: 1755703 - RNA, 19 nt, Homo sapiens
  misc_RNA (1)...(19): siRNA sense strand
ggaaagacuugaagaacag

SEQ ID NO: 1755704 - RNA, 19 nt, Homo sapiens
  misc_RNA (1)...(19): siRNA sense strand
gaaacugaacucauuaaug

SEQ ID NO: 1755705 - RNA, 19 nt, Homo sapiens
  misc_RNA (1)...(19): siRNA sense strand
uuaaaugacuggucucaga

SEQ ID NO: 1755706 - RNA, 19 nt, Homo sapiens
  misc_RNA (1)...(19): siRNA sense strand
gaagaaauucccaaauaca

SEQ ID NO: 1755707 - RNA, 19 nt, Homo sapiens
  misc_RNA (1)...(19): siRNA sense strand
gaaagagcgaguggaauuu

SEQ ID NO: 1755708 - RNA, 19 nt, Homo sapiens
  misc_RNA (1)...(19): siRNA sense strand
uaaugucucugguuaacaa

SEQ ID NO: 1755709 - RNA, 19 nt, Homo sapiens
  misc_RNA (1)...(19): siRNA sense strand
guagacagauuagcaggaa

SEQ ID NO: 1755710 - RNA, 19 nt, Homo sapiens
  misc_RNA (1)...(19): siRNA sense strand
gcacuacagagcaauauau

SEQ ID NO: 1755711 - RNA, 19 nt, Homo sapiens
  misc_RNA (1)...(19): siRNA sense strand
acaaugaacagucagauuu

SEQ ID NO: 1755712 - RNA, 19 nt, Homo sapiens
  misc_RNA (1)...(19): siRNA sense strand
gccuagcugugaaggauua

SEQ ID NO: 1755713 - RNA, 19 nt, Homo sapiens
  misc_RNA (1)...(19): siRNA sense strand
ggaagaaaauacagagaaa

SEQ ID NO: 1755714 - RNA, 19 nt, Homo sapiens
  misc_RNA (1)...(19): siRNA sense strand
gcuaugaggcuaaagaaug

SEQ ID NO: 1755715 - RNA, 19 nt, Homo sapiens
  misc_RNA (1)...(19): siRNA sense strand
gaaggcaagauuuauguug

SEQ ID NO: 1755716 - RNA, 19 nt, Homo sapiens
  misc_RNA (1)...(19): siRNA sense strand
gauacucuacgaaugguua

SEQ ID NO: 1755717 - RNA, 19 nt, Homo sapiens
  misc_RNA (1)...(19): siRNA sense strand
uaucuuaguugcaguagug

SEQ ID NO: 1755718 - RNA, 19 nt, Homo sapiens
  misc_RNA (1)...(19): siRNA sense strand
gacccaaggauccaaauaa

SEQ ID NO: 1755719 - RNA, 19 nt, Homo sapiens
  misc_RNA (1)...(19): siRNA sense strand
uagcaggaauuaucaacuu

SEQ ID NO: 1755720 - RNA, 19 nt, Homo sapiens
  misc_RNA (1)...(19): siRNA sense strand
gaauaaguggugacaagaa

SEQ ID NO: 1755721 - RNA, 19 nt, Homo sapiens
  misc_RNA (1)...(19): siRNA sense strand
gcaagaaaauuaacaccaa

SEQ ID NO: 1755722 - RNA, 19 nt, Homo sapiens
  misc_RNA (1)...(19): siRNA sense strand
caugagggauccuauuugu

SEQ ID NO: 1755723 - RNA, 19 nt, Homo sapiens
  misc_RNA (1)...(19): siRNA sense strand
agaaagagcgaguggaauu

SEQ ID NO: 1755724 - RNA, 19 nt, Homo sapiens
  misc_RNA (1)...(19): siRNA sense strand
ggacuauggaauggaauua

SEQ ID NO: 1755725 - RNA, 19 nt, Homo sapiens
  misc_RNA (1)...(19): siRNA sense strand
uuagaauaauggccaagua

SEQ ID NO: 1755726 - RNA, 19 nt, Homo sapiens
  misc_RNA (1)...(19): siRNA sense strand
acacaaaucaucagcaaga

SEQ ID NO: 1755727 - RNA, 19 nt, Homo sapiens
  misc_RNA (1)...(19): siRNA sense strand
ggaucuaucuguugaugag

SEQ ID NO: 1755728 - RNA, 19 nt, Homo sapiens
  misc_RNA (1)...(19): siRNA sense strand
gaaaucacagaccuuccua

SEQ ID NO: 1755729 - RNA, 19 nt, Homo sapiens
  misc_RNA (1)...(19): siRNA sense strand
aaagaggagaugauacaua

SEQ ID NO: 1755730 - RNA, 19 nt, Homo sapiens
  misc_RNA (1)...(19): siRNA sense strand
ccaaagaggagaugauaca

SEQ ID NO: 1755731 - RNA, 19 nt, Homo sapiens
  misc_RNA (1)...(19): siRNA sense strand
agaagaaauucccaaauac

SEQ ID NO: 1755732 - RNA, 19 nt, Homo sapiens
  misc_RNA (1)...(19): siRNA sense strand
gagcgaguggaauuuauuu

SEQ ID NO: 1755733 - RNA, 19 nt, Homo sapiens
  misc_RNA (1)...(19): siRNA sense strand
aaagagcgaguggaauuua

SEQ ID NO: 1755734 - RNA, 19 nt, Homo sapiens
  misc_RNA (1)...(19): siRNA sense strand
gaggagaugauacauaauc

SEQ ID NO: 1755735 - RNA, 19 nt, Homo sapiens
  misc_RNA (1)...(19): siRNA sense strand
uaaaguagacagauuagca

SEQ ID NO: 1755736 - RNA, 19 nt, Homo sapiens
  misc_RNA (1)...(19): siRNA sense strand
uggaaagacuugaagaaca

SEQ ID NO: 1755737 - RNA, 19 nt, Homo sapiens
  misc_RNA (1)...(19): siRNA sense strand
agauuugguucaccgaaua

SEQ ID NO: 1755738 - RNA, 19 nt, Homo sapiens
  misc_RNA (1)...(19): siRNA sense strand
aaagaaagagcgaguggaa

SEQ ID NO: 1755739 - RNA, 19 nt, Homo sapiens
  misc_RNA (1)...(19): siRNA sense strand
caacaugagggauccuauu

SEQ ID NO: 1755740 - RNA, 19 nt, Homo sapiens
  misc_RNA (1)...(19): siRNA sense strand
ccgaauaaguggugacaag

SEQ ID NO: 1755741 - RNA, 19 nt, Homo sapiens
  misc_RNA (1)...(19): siRNA sense strand
cagauuagcaggaauuauc

SEQ ID NO: 1755742 - RNA, 19 nt, Homo sapiens
  misc_RNA (1)...(19): siRNA sense strand
ucucucaaaucuaguaguu

SEQ ID NO: 1755743 - RNA, 19 nt, Homo sapiens
  misc_RNA (1)...(19): siRNA sense strand
uagugaagaugugcuauga

SEQ ID NO: 1755744 - RNA, 19 nt, Homo sapiens
  misc_RNA (1)...(19): siRNA sense strand
ggaauggaauuaagaaaag

SEQ ID NO: 1755745 - RNA, 19 nt, Homo sapiens
  misc_RNA (1)...(19): siRNA sense strand
ccacacuuguugaggacua

SEQ ID NO: 1755746 - RNA, 19 nt, Homo sapiens
  misc_RNA (1)...(19): siRNA sense strand
ugacaagaaguuagaagaa

SEQ ID NO: 1755747 - RNA, 19 nt, Homo sapiens
  misc_RNA (1)...(19): siRNA sense strand
ugaggacuauggaauggaa

SEQ ID NO: 1755748 - RNA, 19 nt, Homo sapiens
  misc_RNA (1)...(19): siRNA sense strand
aaggcaagauuuauguuga

SEQ ID NO: 1755749 - RNA, 19 nt, Homo sapiens
  misc_RNA (1)...(19): siRNA sense strand
ccgaagccuuucucucaaa

SEQ ID NO: 1755750 - RNA, 19 nt, Homo sapiens
  misc_RNA (1)...(19): siRNA sense strand
uggcacagcuucuggaucu

SEQ ID NO: 1755751 - RNA, 19 nt, Homo sapiens
  misc_RNA (1)...(19): siRNA sense strand
ggauuacauucgaacacaa

SEQ ID NO: 1755752 - RNA, 19 nt, Homo sapiens
  misc_RNA (1)...(19): siRNA sense strand
gcgacugacuaaaacauua

SEQ ID NO: 1755753 - RNA, 19 nt, Homo sapiens
  misc_RNA (1)...(19): siRNA sense strand
ggcaagauuuauguugaaa

SEQ ID NO: 1755754 - RNA, 19 nt, Homo sapiens
  misc_RNA (1)...(19): siRNA sense strand
cuacagagcaauauaugau

SEQ ID NO: 1755755 - RNA, 19 nt, Homo sapiens
  misc_RNA (1)...(19): siRNA sense strand
gagggauccuauuugucua

SEQ ID NO: 1755756 - RNA, 19 nt, Homo sapiens
  misc_RNA (1)...(19): siRNA sense strand
gaugugcuaugaggcuaaa

SEQ ID NO: 1755757 - RNA, 19 nt, Homo sapiens
  misc_RNA (1)...(19): siRNA sense strand
gacaaugaacagucagauu

SEQ ID NO: 1755758 - RNA, 19 nt, Homo sapiens
  misc_RNA (1)...(19): siRNA sense strand
ccuaucaaacuucgauuaa

SEQ ID NO: 1755759 - RNA, 19 nt, Homo sapiens
  misc_RNA (1)...(19): siRNA sense strand
caaugaacagucagauuug

SEQ ID NO: 1755760 - RNA, 19 nt, Homo sapiens
  misc_RNA (1)...(19): siRNA sense strand
guauacaggcagaaaguga

SEQ ID NO: 1755761 - RNA, 19 nt, Homo sapiens
  misc_RNA (1)...(19): siRNA sense strand
uuaccgaaggcaagauuua

SEQ ID NO: 1755762 - RNA, 19 nt, Homo sapiens
  misc_RNA (1)...(19): siRNA sense strand
gcacagcuucuggaucuau

SEQ ID NO: 1755763 - RNA, 19 nt, Homo sapiens
  misc_RNA (1)...(19): siRNA sense strand
ggauccuauuugucuauuu

SEQ ID NO: 1755764 - RNA, 19 nt, Homo sapiens
  misc_RNA (1)...(19): siRNA sense strand
gacaucccguaucuuaguu

SEQ ID NO: 1755765 - RNA, 19 nt, Homo sapiens
  misc_RNA (1)...(19): siRNA sense strand
gauuacauucgaacacaaa

SEQ ID NO: 1755766 - RNA, 19 nt, Homo sapiens
  misc_RNA (1)...(19): siRNA sense strand
ugacuggucucagaaacug

SEQ ID NO: 1755767 - RNA, 19 nt, Homo sapiens
  misc_RNA (1)...(19): siRNA sense strand
guccgaagccuuucucuca

SEQ ID NO: 1755768 - RNA, 19 nt, Homo sapiens
  misc_RNA (1)...(19): siRNA sense strand
gugaaggauuacauucgaa

SEQ ID NO: 1755769 - RNA, 19 nt, Homo sapiens
  misc_RNA (1)...(19): siRNA sense strand
cagaaacugaacucauuaa

SEQ ID NO: 1755770 - RNA, 19 nt, Homo sapiens
  misc_RNA (1)...(19): siRNA sense strand
uaaaugacuggucucagaa

SEQ ID NO: 1755771 - RNA, 19 nt, Homo sapiens
  misc_RNA (1)...(19): siRNA sense strand
cacagaccuuccuaucaaa

SEQ ID NO: 1755772 - RNA, 19 nt, Homo sapiens
  misc_RNA (1)...(19): siRNA sense strand
cgacaucccguaucuuagu

SEQ ID NO: 1755773 - RNA, 19 nt, Homo sapiens
  misc_RNA (1)...(19): siRNA sense strand
gguggaaagacuugaagaa

SEQ ID NO: 1755774 - RNA, 19 nt, Homo sapiens
  misc_RNA (1)...(19): siRNA sense strand
cuaugaggcuaaagaaugg

SEQ ID NO: 1755775 - RNA, 19 nt, Homo sapiens
  misc_RNA (1)...(19): siRNA sense strand
gagcgugcgcgacugacua

SEQ ID NO: 1755776 - RNA, 19 nt, Homo sapiens
  misc_RNA (1)...(19): siRNA sense strand
cagauuugguucaccgaau

SEQ ID NO: 1755777 - RNA, 19 nt, Homo sapiens
  misc_RNA (1)...(19): siRNA sense strand
guaucgacaucccguaucu

SEQ ID NO: 1755778 - RNA, 19 nt, Homo sapiens
  misc_RNA (1)...(19): siRNA sense strand
agacagauuagcaggaauu

SEQ ID NO: 1755779 - RNA, 19 nt, Homo sapiens
  misc_RNA (1)...(19): siRNA sense strand
gccuuucucucaaaucuag

SEQ ID NO: 1755780 - RNA, 19 nt, Homo sapiens
  misc_RNA (1)...(19): siRNA sense strand
cgaagccuuucucucaaau

SEQ ID NO: 1755781 - RNA, 19 nt, Homo sapiens
  misc_RNA (1)...(19): siRNA sense strand
uugcuaaaguagacagauu

SEQ ID NO: 1755782 - RNA, 19 nt, Homo sapiens
  misc_RNA (1)...(19): siRNA sense strand
acaaaauggugaugugaaa

SEQ ID NO: 1755783 - RNA, 19 nt, Homo sapiens
  misc_RNA (1)...(19): siRNA sense strand
gacagauuagcaggaauua

SEQ ID NO: 1755784 - RNA, 19 nt, Homo sapiens
  misc_RNA (1)...(19): siRNA sense strand
aauaaguggugacaagaag

SEQ ID NO: 1755785 - RNA, 19 nt, Homo sapiens
  misc_RNA (1)...(19): siRNA sense strand
gggauccuauuugucuauu

SEQ ID NO: 1755786 - RNA, 19 nt, Homo sapiens
  misc_RNA (1)...(19): siRNA sense strand
ugagggauccuauuugucu

SEQ ID NO: 1755787 - RNA, 19 nt, Homo sapiens
  misc_RNA (1)...(19): siRNA sense strand
ugugaaggauuacauucga

SEQ ID NO: 1755788 - RNA, 19 nt, Homo sapiens
  misc_RNA (1)...(19): siRNA sense strand
acccaaggauccaaauaau

SEQ ID NO: 1755789 - RNA, 19 nt, Homo sapiens
  misc_RNA (1)...(19): siRNA sense strand
uauacucggauaacaauga

SEQ ID NO: 1755790 - RNA, 19 nt, Homo sapiens
  misc_RNA (1)...(19): siRNA sense strand
uagaauaauggccaaguau

SEQ ID NO: 1755791 - RNA, 19 nt, Homo sapiens
  misc_RNA (1)...(19): siRNA sense strand
guuagaagaaauucccaaa

SEQ ID NO: 1755792 - RNA, 19 nt, Homo sapiens
  misc_RNA (1)...(19): siRNA sense strand
uaaguggugacaagaaguu

SEQ ID NO: 1755793 - RNA, 19 nt, Homo sapiens
  misc_RNA (1)...(19): siRNA sense strand
uaagcacuacagagcaaua

SEQ ID NO: 1755794 - RNA, 19 nt, Homo sapiens
  misc_RNA (1)...(19): siRNA sense strand
caaaucaucagcaagaaaa

SEQ ID NO: 1755795 - RNA, 19 nt, Homo sapiens
  misc_RNA (1)...(19): siRNA sense strand
gaacacaaaucaucagcaa

SEQ ID NO: 1755796 - RNA, 19 nt, Homo sapiens
  misc_RNA (1)...(19): siRNA sense strand
guacuuauguugaggaaau

SEQ ID NO: 1755797 - RNA, 19 nt, Homo sapiens
  misc_RNA (1)...(19): siRNA sense strand
aagaggagaugauacauaa

SEQ ID NO: 1755798 - RNA, 19 nt, Homo sapiens
  misc_RNA (1)...(19): siRNA sense strand
ucacagaccuuccuaucaa

SEQ ID NO: 1755799 - RNA, 19 nt, Homo sapiens
  misc_RNA (1)...(19): siRNA sense strand
gacaagaaguuagaagaaa

SEQ ID NO: 1755800 - RNA, 19 nt, Homo sapiens
  misc_RNA (1)...(19): siRNA sense strand
ucauuaaugucucugguua

SEQ ID NO: 1755801 - RNA, 19 nt, Homo sapiens
  misc_RNA (1)...(19): siRNA sense strand
gaaugggauuuacuuaaug

SEQ ID NO: 1755802 - RNA, 19 nt, Homo sapiens
  misc_RNA (1)...(19): siRNA sense strand
gauccuauuugucuauuug

SEQ ID NO: 1755803 - RNA, 19 nt, Homo sapiens
  misc_RNA (1)...(19): siRNA sense strand
ggaaagacuugaagaacag

SEQ ID NO: 1755804 - RNA, 19 nt, Homo sapiens
  misc_RNA (1)...(19): siRNA sense strand
gaaacugaacucauuaaug

SEQ ID NO: 1755805 - RNA, 19 nt, Homo sapiens
  misc_RNA (1)...(19): siRNA sense strand
uuaaaugacuggucucaga

SEQ ID NO: 1755806 - RNA, 19 nt, Homo sapiens
  misc_RNA (1)...(19): siRNA sense strand
gaagaaauucccaaauaca

SEQ ID NO: 1755807 - RNA, 19 nt, Homo sapiens
  misc_RNA (1)...(19): siRNA sense strand
gaaagagcgaguggaauuu

SEQ ID NO: 1755808 - RNA, 19 nt, Homo sapiens
  misc_RNA (1)...(19): siRNA sense strand
uaaugucucugguuaacaa

SEQ ID NO: 1755809 - RNA, 19 nt, Homo sapiens
  misc_RNA (1)...(19): siRNA sense strand
guagacagauuagcaggaa

SEQ ID NO: 1755810 - RNA, 19 nt, Homo sapiens
  misc_RNA (1)...(19): siRNA sense strand
gcacuacagagcaauauau

SEQ ID NO: 1755811 - RNA, 19 nt, Homo sapiens
  misc_RNA (1)...(19): siRNA sense strand
acaaugaacagucagauuu

SEQ ID NO: 1755812 - RNA, 19 nt, Homo sapiens
  misc_RNA (1)...(19): siRNA sense strand
gccuagcugugaaggauua

SEQ ID NO: 1755813 - RNA, 19 nt, Homo sapiens
  misc_RNA (1)...(19): siRNA sense strand
ggaagaaaauacagagaaa

SEQ ID NO: 1755814 - RNA, 19 nt, Homo sapiens
  misc_RNA (1)...(19): siRNA sense strand
gcuaugaggcuaaagaaug

SEQ ID NO: 1755815 - RNA, 19 nt, Homo sapiens
  misc_RNA (1)...(19): siRNA sense strand
gaaggcaagauuuauguug

SEQ ID NO: 1755816 - RNA, 19 nt, Homo sapiens
  misc_RNA (1)...(19): siRNA sense strand
gauacucuacgaaugguua

SEQ ID NO: 1755817 - RNA, 19 nt, Homo sapiens
  misc_RNA (1)...(19): siRNA sense strand
uaucuuaguugcaguagug

SEQ ID NO: 1755818 - RNA, 19 nt, Homo sapiens
  misc_RNA (1)...(19): siRNA sense strand
gacccaaggauccaaauaa

SEQ ID NO: 1755819 - RNA, 19 nt, Homo sapiens
  misc_RNA (1)...(19): siRNA sense strand
uagcaggaauuaucaacuu

SEQ ID NO: 1755820 - RNA, 19 nt, Homo sapiens
  misc_RNA (1)...(19): siRNA sense strand
gaauaaguggugacaagaa

SEQ ID NO: 1755821 - RNA, 19 nt, Homo sapiens
  misc_RNA (1)...(19): siRNA sense strand
gcaagaaaauuaacaccaa

SEQ ID NO: 1755822 - RNA, 19 nt, Homo sapiens
  misc_RNA (1)...(19): siRNA sense strand
caugagggauccuauuugu

SEQ ID NO: 1755823 - RNA, 19 nt, Homo sapiens
  misc_RNA (1)...(19): siRNA sense strand
agaaagagcgaguggaauu

SEQ ID NO: 1755824 - RNA, 19 nt, Homo sapiens
  misc_RNA (1)...(19): siRNA sense strand
ggacuauggaauggaauua

SEQ ID NO: 1755825 - RNA, 19 nt, Homo sapiens
  misc_RNA (1)...(19): siRNA sense strand
uuagaauaauggccaagua

SEQ ID NO: 1755826 - RNA, 19 nt, Homo sapiens
  misc_RNA (1)...(19): siRNA sense strand
acacaaaucaucagcaaga

SEQ ID NO: 1755827 - RNA, 19 nt, Homo sapiens
  misc_RNA (1)...(19): siRNA sense strand
ggaucuaucuguugaugag

SEQ ID NO: 1755828 - RNA, 19 nt, Homo sapiens
  misc_RNA (1)...(19): siRNA sense strand
gaaaucacagaccuuccua

SEQ ID NO: 1755829 - RNA, 19 nt, Homo sapiens
  misc_RNA (1)...(19): siRNA sense strand
aaagaggagaugauacaua

SEQ ID NO: 1755830 - RNA, 19 nt, Homo sapiens
  misc_RNA (1)...(19): siRNA sense strand
ccaaagaggagaugauaca

SEQ ID NO: 1755831 - RNA, 19 nt, Homo sapiens
  misc_RNA (1)...(19): siRNA sense strand
agaagaaauucccaaauac

SEQ ID NO: 1755832 - RNA, 19 nt, Homo sapiens
  misc_RNA (1)...(19): siRNA sense strand
gagcgaguggaauuuauuu

SEQ ID NO: 1755833 - RNA, 19 nt, Homo sapiens
  misc_RNA (1)...(19): siRNA sense strand
aaagagcgaguggaauuua

SEQ ID NO: 1755834 - RNA, 19 nt, Homo sapiens
  misc_RNA (1)...(19): siRNA sense strand
gaggagaugauacauaauc

SEQ ID NO: 1755835 - RNA, 19 nt, Homo sapiens
  misc_RNA (1)...(19): siRNA sense strand
uaaaguagacagauuagca

SEQ ID NO: 1755836 - RNA, 19 nt, Homo sapiens
  misc_RNA (1)...(19): siRNA sense strand
uggaaagacuugaagaaca

SEQ ID NO: 1755837 - RNA, 19 nt, Homo sapiens
  misc_RNA (1)...(19): siRNA sense strand
agauuugguucaccgaaua

SEQ ID NO: 1755838 - RNA, 19 nt, Homo sapiens
  misc_RNA (1)...(19): siRNA sense strand
aaagaaagagcgaguggaa

SEQ ID NO: 1755839 - RNA, 19 nt, Homo sapiens
  misc_RNA (1)...(19): siRNA sense strand
caacaugagggauccuauu

SEQ ID NO: 1755840 - RNA, 19 nt, Homo sapiens
  misc_RNA (1)...(19): siRNA sense strand
ccgaauaaguggugacaag

SEQ ID NO: 1755841 - RNA, 19 nt, Homo sapiens
  misc_RNA (1)...(19): siRNA sense strand
cagauuagcaggaauuauc

SEQ ID NO: 1755842 - RNA, 19 nt, Homo sapiens
  misc_RNA (1)...(19): siRNA sense strand
ucucucaaaucuaguaguu

SEQ ID NO: 1755843 - RNA, 19 nt, Homo sapiens
  misc_RNA (1)...(19): siRNA sense strand
uagugaagaugugcuauga

SEQ ID NO: 1755844 - RNA, 19 nt, Homo sapiens
  misc_RNA (1)...(19): siRNA sense strand
ggaauggaauuaagaaaag

SEQ ID NO: 1755845 - RNA, 19 nt, Homo sapiens
  misc_RNA (1)...(19): siRNA sense strand
ccacacuuguugaggacua

SEQ ID NO: 1755846 - RNA, 19 nt, Homo sapiens
  misc_RNA (1)...(19): siRNA sense strand
ugacaagaaguuagaagaa

SEQ ID NO: 1755847 - RNA, 19 nt, Homo sapiens
  misc_RNA (1)...(19): siRNA sense strand
ugaggacuauggaauggaa

SEQ ID NO: 1755848 - RNA, 19 nt, Homo sapiens
  misc_RNA (1)...(19): siRNA sense strand
aaggcaagauuuauguuga

SEQ ID NO: 1755849 - RNA, 19 nt, Homo sapiens
  misc_RNA (1)...(19): siRNA sense strand
ccgaagccuuucucucaaa

SEQ ID NO: 1755850 - RNA, 19 nt, Homo sapiens
  misc_RNA (1)...(19): siRNA sense strand
uggcacagcuucuggaucu

SEQ ID NO: 1755851 - RNA, 19 nt, Homo sapiens
  misc_RNA (1)...(19): siRNA sense strand
ggauuacauucgaacacaa

SEQ ID NO: 1755852 - RNA, 19 nt, Homo sapiens
  misc_RNA (1)...(19): siRNA sense strand
gcgacugacuaaaacauua

SEQ ID NO: 1755853 - RNA, 19 nt, Homo sapiens
  misc_RNA (1)...(19): siRNA sense strand
ggcaagauuuauguugaaa

SEQ ID NO: 1755854 - RNA, 19 nt, Homo sapiens
  misc_RNA (1)...(19): siRNA sense strand
cuacagagcaauauaugau

SEQ ID NO: 1755855 - RNA, 19 nt, Homo sapiens
  misc_RNA (1)...(19): siRNA sense strand
gagggauccuauuugucua

SEQ ID NO: 1755856 - RNA, 19 nt, Homo sapiens
  misc_RNA (1)...(19): siRNA sense strand
gaugugcuaugaggcuaaa

SEQ ID NO: 1755857 - RNA, 19 nt, Homo sapiens
  misc_RNA (1)...(19): siRNA sense strand
gacaaugaacagucagauu

SEQ ID NO: 1755858 - RNA, 19 nt, Homo sapiens
  misc_RNA (1)...(19): siRNA sense strand
ccuaucaaacuucgauuaa

SEQ ID NO: 1755859 - RNA, 19 nt, Homo sapiens
  misc_RNA (1)...(19): siRNA sense strand
caaugaacagucagauuug

SEQ ID NO: 1755860 - RNA, 19 nt, Homo sapiens
  misc_RNA (1)...(19): siRNA sense strand
guauacaggcagaaaguga

SEQ ID NO: 1755861 - RNA, 19 nt, Homo sapiens
  misc_RNA (1)...(19): siRNA sense strand
uuaccgaaggcaagauuua

SEQ ID NO: 1755862 - RNA, 19 nt, Homo sapiens
  misc_RNA (1)...(19): siRNA sense strand
gcacagcuucuggaucuau

SEQ ID NO: 1755863 - RNA, 19 nt, Homo sapiens
  misc_RNA (1)...(19): siRNA sense strand
ggauccuauuugucuauuu

SEQ ID NO: 1755864 - RNA, 19 nt, Homo sapiens
  misc_RNA (1)...(19): siRNA sense strand
gacaucccguaucuuaguu

SEQ ID NO: 1755865 - RNA, 19 nt, Homo sapiens
  misc_RNA (1)...(19): siRNA sense strand
gauuacauucgaacacaaa

SEQ ID NO: 1755866 - RNA, 19 nt, Homo sapiens
  misc_RNA (1)...(19): siRNA sense strand
ugacuggucucagaaacug

SEQ ID NO: 1755867 - RNA, 19 nt, Homo sapiens
  misc_RNA (1)...(19): siRNA sense strand
guccgaagccuuucucuca

SEQ ID NO: 1755868 - RNA, 19 nt, Homo sapiens
  misc_RNA (1)...(19): siRNA sense strand
gugaaggauuacauucgaa

SEQ ID NO: 1755869 - RNA, 19 nt, Homo sapiens
  misc_RNA (1)...(19): siRNA sense strand
cagaaacugaacucauuaa

SEQ ID NO: 1755870 - RNA, 19 nt, Homo sapiens
  misc_RNA (1)...(19): siRNA sense strand
uaaaugacuggucucagaa

SEQ ID NO: 1755871 - RNA, 19 nt, Homo sapiens
  misc_RNA (1)...(19): siRNA sense strand
cacagaccuuccuaucaaa

SEQ ID NO: 1755872 - RNA, 19 nt, Homo sapiens
  misc_RNA (1)...(19): siRNA sense strand
cgacaucccguaucuuagu

SEQ ID NO: 1755873 - RNA, 19 nt, Homo sapiens
  misc_RNA (1)...(19): siRNA sense strand
gguggaaagacuugaagaa

SEQ ID NO: 1755874 - RNA, 19 nt, Homo sapiens
  misc_RNA (1)...(19): siRNA sense strand
cuaugaggcuaaagaaugg

SEQ ID NO: 1755875 - RNA, 19 nt, Homo sapiens
  misc_RNA (1)...(19): siRNA sense strand
gagcgugcgcgacugacua

SEQ ID NO: 1755876 - RNA, 19 nt, Homo sapiens
  misc_RNA (1)...(19): siRNA sense strand
cagauuugguucaccgaau

SEQ ID NO: 1755877 - RNA, 19 nt, Homo sapiens
  misc_RNA (1)...(19): siRNA sense strand
guaucgacaucccguaucu

SEQ ID NO: 1755878 - RNA, 19 nt, Homo sapiens
  misc_RNA (1)...(19): siRNA sense strand
agacagauuagcaggaauu

SEQ ID NO: 1755879 - RNA, 19 nt, Homo sapiens
  misc_RNA (1)...(19): siRNA sense strand
gccuuucucucaaaucuag

SEQ ID NO: 1755880 - RNA, 19 nt, Homo sapiens
  misc_RNA (1)...(19): siRNA sense strand
cgaagccuuucucucaaau

SEQ ID NO: 1755881 - RNA, 19 nt, Homo sapiens
  misc_RNA (1)...(19): siRNA sense strand
uugcuaaaguagacagauu

SEQ ID NO: 1755882 - RNA, 19 nt, Homo sapiens
  misc_RNA (1)...(19): siRNA sense strand
acaaaauggugaugugaaa

SEQ ID NO: 1755883 - RNA, 19 nt, Homo sapiens
  misc_RNA (1)...(19): siRNA sense strand
gacagauuagcaggaauua

SEQ ID NO: 1755884 - RNA, 19 nt, Homo sapiens
  misc_RNA (1)...(19): siRNA sense strand
aauaaguggugacaagaag

SEQ ID NO: 1755885 - RNA, 19 nt, Homo sapiens
  misc_RNA (1)...(19): siRNA sense strand
gggauccuauuugucuauu

SEQ ID NO: 1755886 - RNA, 19 nt, Homo sapiens
  misc_RNA (1)...(19): siRNA sense strand
ugagggauccuauuugucu

SEQ ID NO: 1755887 - RNA, 19 nt, Homo sapiens
  misc_RNA (1)...(19): siRNA sense strand
ugugaaggauuacauucga

SEQ ID NO: 1755888 - RNA, 19 nt, Homo sapiens
  misc_RNA (1)...(19): siRNA sense strand
acccaaggauccaaauaau

SEQ ID NO: 1755889 - RNA, 19 nt, Homo sapiens
  misc_RNA (1)...(19): siRNA sense strand
uauacucggauaacaauga

SEQ ID NO: 1755890 - RNA, 19 nt, Homo sapiens
  misc_RNA (1)...(19): siRNA sense strand
uagaauaauggccaaguau

SEQ ID NO: 1755891 - RNA, 19 nt, Homo sapiens
  misc_RNA (1)...(19): siRNA sense strand
guuagaagaaauucccaaa

SEQ ID NO: 1755892 - RNA, 19 nt, Homo sapiens
  misc_RNA (1)...(19): siRNA sense strand
uaaguggugacaagaaguu

SEQ ID NO: 1755893 - RNA, 19 nt, Homo sapiens
  misc_RNA (1)...(19): siRNA sense strand
uaagcacuacagagcaaua

SEQ ID NO: 1755894 - RNA, 19 nt, Homo sapiens
  misc_RNA (1)...(19): siRNA sense strand
caaaucaucagcaagaaaa

SEQ ID NO: 1755895 - RNA, 19 nt, Homo sapiens
  misc_RNA (1)...(19): siRNA sense strand
ucacagagcucgcacacaa

SEQ ID NO: 1755896 - RNA, 19 nt, Homo sapiens
  misc_RNA (1)...(19): siRNA sense strand
cuacagccauaagaaauuu

SEQ ID NO: 1755897 - RNA, 19 nt, Homo sapiens
  misc_RNA (1)...(19): siRNA sense strand
gcacagacggguaccugaa

SEQ ID NO: 1755898 - RNA, 19 nt, Homo sapiens
  misc_RNA (1)...(19): siRNA sense strand
ggcgcugugugcccuauua

SEQ ID NO: 1755899 - RNA, 19 nt, Homo sapiens
  misc_RNA (1)...(19): siRNA sense strand
ucaccauccucaucaagaa

SEQ ID NO: 1755900 - RNA, 19 nt, Homo sapiens
  misc_RNA (1)...(19): siRNA sense strand
gauccgcauugacgucauu

SEQ ID NO: 1755901 - RNA, 19 nt, Homo sapiens
  misc_RNA (1)...(19): siRNA sense strand
cugauucccaccauuauua

SEQ ID NO: 1755902 - RNA, 19 nt, Homo sapiens
  misc_RNA (1)...(19): siRNA sense strand
aacaaggucuacagccaua

SEQ ID NO: 1755903 - RNA, 19 nt, Homo sapiens
  misc_RNA (1)...(19): siRNA sense strand
gacuggaucuugcuaacau

SEQ ID NO: 1755904 - RNA, 19 nt, Homo sapiens
  misc_RNA (1)...(19): siRNA sense strand
gccaaauacuacaagauca

SEQ ID NO: 1755905 - RNA, 19 nt, Homo sapiens
  misc_RNA (1)...(19): siRNA sense strand
ggcuacaacuucagguuug

SEQ ID NO: 1755906 - RNA, 19 nt, Homo sapiens
  misc_RNA (1)...(19): siRNA sense strand
ggucuacagccauaagaaa

SEQ ID NO: 1755907 - RNA, 19 nt, Homo sapiens
  misc_RNA (1)...(19): siRNA sense strand
ccacagaccccaaagguuu

SEQ ID NO: 1755908 - RNA, 19 nt, Homo sapiens
  misc_RNA (1)...(19): siRNA sense strand
ucaagaacagcauccacua

SEQ ID NO: 1755909 - RNA, 19 nt, Homo sapiens
  misc_RNA (1)...(19): siRNA sense strand
ccaaauacuacaagaucaa

SEQ ID NO: 1755910 - RNA, 19 nt, Homo sapiens
  misc_RNA (1)...(19): siRNA sense strand
agguuuggcucaacucuga

SEQ ID NO: 1755911 - RNA, 19 nt, Homo sapiens
  misc_RNA (1)...(19): siRNA sense strand
ccaaauuccacuucuccaa

SEQ ID NO: 1755912 - RNA, 19 nt, Homo sapiens
  misc_RNA (1)...(19): siRNA sense strand
uugcuaacauucaugaaca

SEQ ID NO: 1755913 - RNA, 19 nt, Homo sapiens
  misc_RNA (1)...(19): siRNA sense strand
gggccucugucagccaauu

SEQ ID NO: 1755914 - RNA, 19 nt, Homo sapiens
  misc_RNA (1)...(19): siRNA sense strand
ggaucuugcuaacauucau

SEQ ID NO: 1755915 - RNA, 19 nt, Homo sapiens
  misc_RNA (1)...(19): siRNA sense strand
guacgauggccccaaauuu

SEQ ID NO: 1755916 - RNA, 19 nt, Homo sapiens
  misc_RNA (1)...(19): siRNA sense strand
gccauaagaaauuugacaa

SEQ ID NO: 1755917 - RNA, 19 nt, Homo sapiens
  misc_RNA (1)...(19): siRNA sense strand
gccaauuucuggguacgau

SEQ ID NO: 1755918 - RNA, 19 nt, Homo sapiens
  misc_RNA (1)...(19): siRNA sense strand
caagaacagcauccacuac

SEQ ID NO: 1755919 - RNA, 19 nt, Homo sapiens
  misc_RNA (1)...(19): siRNA sense strand
ucuacagccauaagaaauu

SEQ ID NO: 1755920 - RNA, 19 nt, Homo sapiens
  misc_RNA (1)...(19): siRNA sense strand
gcuaacauucaugaacaaa

SEQ ID NO: 1755921 - RNA, 19 nt, Homo sapiens
  misc_RNA (1)...(19): siRNA sense strand
gcgacuggaucuugcuaac

SEQ ID NO: 1755922 - RNA, 19 nt, Homo sapiens
  misc_RNA (1)...(19): siRNA sense strand
ccuacgggauccgcauuga

SEQ ID NO: 1755923 - RNA, 19 nt, Homo sapiens
  misc_RNA (1)...(19): siRNA sense strand
gaagauggggccucuguca

SEQ ID NO: 1755924 - RNA, 19 nt, Homo sapiens
  misc_RNA (1)...(19): siRNA sense strand
ugauucccaccauuauuaa

SEQ ID NO: 1755925 - RNA, 19 nt, Homo sapiens
  misc_RNA (1)...(19): siRNA sense strand
cagccugauucccaccauu

SEQ ID NO: 1755926 - RNA, 19 nt, Homo sapiens
  misc_RNA (1)...(19): siRNA sense strand
agccugauucccaccauua

SEQ ID NO: 1755927 - RNA, 19 nt, Homo sapiens
  misc_RNA (1)...(19): siRNA sense strand
ugacgucauugugcaugga

SEQ ID NO: 1755928 - RNA, 19 nt, Homo sapiens
  misc_RNA (1)...(19): siRNA sense strand
gaucuugcuaacauucaug

SEQ ID NO: 1755929 - RNA, 19 nt, Homo sapiens
  misc_RNA (1)...(19): siRNA sense strand
ucacagagcucgcacacaa

SEQ ID NO: 1755930 - RNA, 19 nt, Homo sapiens
  misc_RNA (1)...(19): siRNA sense strand
cuacagccauaagaaauuu

SEQ ID NO: 1755931 - RNA, 19 nt, Homo sapiens
  misc_RNA (1)...(19): siRNA sense strand
gcacagacggguaccugaa

SEQ ID NO: 1755932 - RNA, 19 nt, Homo sapiens
  misc_RNA (1)...(19): siRNA sense strand
ggcgcugugugcccuauua

SEQ ID NO: 1755933 - RNA, 19 nt, Homo sapiens
  misc_RNA (1)...(19): siRNA sense strand
ucaccauccucaucaagaa

SEQ ID NO: 1755934 - RNA, 19 nt, Homo sapiens
  misc_RNA (1)...(19): siRNA sense strand
gauccgcauugacgucauu

SEQ ID NO: 1755935 - RNA, 19 nt, Homo sapiens
  misc_RNA (1)...(19): siRNA sense strand
cugauucccaccauuauua

SEQ ID NO: 1755936 - RNA, 19 nt, Homo sapiens
  misc_RNA (1)...(19): siRNA sense strand
aacaaggucuacagccaua

SEQ ID NO: 1755937 - RNA, 19 nt, Homo sapiens
  misc_RNA (1)...(19): siRNA sense strand
gacuggaucuugcuaacau

SEQ ID NO: 1755938 - RNA, 19 nt, Homo sapiens
  misc_RNA (1)...(19): siRNA sense strand
gccaaauacuacaagauca

SEQ ID NO: 1755939 - RNA, 19 nt, Homo sapiens
  misc_RNA (1)...(19): siRNA sense strand
ggcuacaacuucagguuug

SEQ ID NO: 1755940 - RNA, 19 nt, Homo sapiens
  misc_RNA (1)...(19): siRNA sense strand
ggucuacagccauaagaaa

SEQ ID NO: 1755941 - RNA, 19 nt, Homo sapiens
  misc_RNA (1)...(19): siRNA sense strand
ccacagaccccaaagguuu

SEQ ID NO: 1755942 - RNA, 19 nt, Homo sapiens
  misc_RNA (1)...(19): siRNA sense strand
ucaagaacagcauccacua

SEQ ID NO: 1755943 - RNA, 19 nt, Homo sapiens
  misc_RNA (1)...(19): siRNA sense strand
ccaaauacuacaagaucaa

SEQ ID NO: 1755944 - RNA, 19 nt, Homo sapiens
  misc_RNA (1)...(19): siRNA sense strand
agguuuggcucaacucuga

SEQ ID NO: 1755945 - RNA, 19 nt, Homo sapiens
  misc_RNA (1)...(19): siRNA sense strand
ccaaauuccacuucuccaa

SEQ ID NO: 1755946 - RNA, 19 nt, Homo sapiens
  misc_RNA (1)...(19): siRNA sense strand
uugcuaacauucaugaaca

SEQ ID NO: 1755947 - RNA, 19 nt, Homo sapiens
  misc_RNA (1)...(19): siRNA sense strand
gggccucugucagccaauu

SEQ ID NO: 1755948 - RNA, 19 nt, Homo sapiens
  misc_RNA (1)...(19): siRNA sense strand
ggaucuugcuaacauucau

SEQ ID NO: 1755949 - RNA, 19 nt, Homo sapiens
  misc_RNA (1)...(19): siRNA sense strand
guacgauggccccaaauuu

SEQ ID NO: 1755950 - RNA, 19 nt, Homo sapiens
  misc_RNA (1)...(19): siRNA sense strand
gccauaagaaauuugacaa

SEQ ID NO: 1755951 - RNA, 19 nt, Homo sapiens
  misc_RNA (1)...(19): siRNA sense strand
gccaauuucuggguacgau

SEQ ID NO: 1755952 - RNA, 19 nt, Homo sapiens
  misc_RNA (1)...(19): siRNA sense strand
caagaacagcauccacuac

SEQ ID NO: 1755953 - RNA, 19 nt, Homo sapiens
  misc_RNA (1)...(19): siRNA sense strand
ucuacagccauaagaaauu

SEQ ID NO: 1755954 - RNA, 19 nt, Homo sapiens
  misc_RNA (1)...(19): siRNA sense strand
gcuaacauucaugaacaaa

SEQ ID NO: 1755955 - RNA, 19 nt, Homo sapiens
  misc_RNA (1)...(19): siRNA sense strand
gcgacuggaucuugcuaac

SEQ ID NO: 1755956 - RNA, 19 nt, Homo sapiens
  misc_RNA (1)...(19): siRNA sense strand
ccuacgggauccgcauuga

SEQ ID NO: 1755957 - RNA, 19 nt, Homo sapiens
  misc_RNA (1)...(19): siRNA sense strand
gaagauggggccucuguca

SEQ ID NO: 1755958 - RNA, 19 nt, Homo sapiens
  misc_RNA (1)...(19): siRNA sense strand
ugauucccaccauuauuaa

SEQ ID NO: 1755959 - RNA, 19 nt, Homo sapiens
  misc_RNA (1)...(19): siRNA sense strand
cagccugauucccaccauu

SEQ ID NO: 1755960 - RNA, 19 nt, Homo sapiens
  misc_RNA (1)...(19): siRNA sense strand
agccugauucccaccauua

SEQ ID NO: 1755961 - RNA, 19 nt, Homo sapiens
  misc_RNA (1)...(19): siRNA sense strand
ugacgucauugugcaugga

SEQ ID NO: 1755962 - RNA, 19 nt, Homo sapiens
  misc_RNA (1)...(19): siRNA sense strand
gaucuugcuaacauucaug

SEQ ID NO: 1755963 - RNA, 19 nt, Homo sapiens
  misc_RNA (1)...(19): siRNA sense strand
ucacagagcucgcacacaa

SEQ ID NO: 1755964 - RNA, 19 nt, Homo sapiens
  misc_RNA (1)...(19): siRNA sense strand
cuacagccauaagaaauuu

SEQ ID NO: 1755965 - RNA, 19 nt, Homo sapiens
  misc_RNA (1)...(19): siRNA sense strand
gcacagacggguaccugaa

SEQ ID NO: 1755966 - RNA, 19 nt, Homo sapiens
  misc_RNA (1)...(19): siRNA sense strand
ggcgcugugugcccuauua

SEQ ID NO: 1755967 - RNA, 19 nt, Homo sapiens
  misc_RNA (1)...(19): siRNA sense strand
ucaccauccucaucaagaa

SEQ ID NO: 1755968 - RNA, 19 nt, Homo sapiens
  misc_RNA (1)...(19): siRNA sense strand
gauccgcauugacgucauu

SEQ ID NO: 1755969 - RNA, 19 nt, Homo sapiens
  misc_RNA (1)...(19): siRNA sense strand
cugauucccaccauuauua

SEQ ID NO: 1755970 - RNA, 19 nt, Homo sapiens
  misc_RNA (1)...(19): siRNA sense strand
aacaaggucuacagccaua

SEQ ID NO: 1755971 - RNA, 19 nt, Homo sapiens
  misc_RNA (1)...(19): siRNA sense strand
gacuggaucuugcuaacau

SEQ ID NO: 1755972 - RNA, 19 nt, Homo sapiens
  misc_RNA (1)...(19): siRNA sense strand
gccaaauacuacaagauca

SEQ ID NO: 1755973 - RNA, 19 nt, Homo sapiens
  misc_RNA (1)...(19): siRNA sense strand
ggcuacaacuucagguuug

SEQ ID NO: 1755974 - RNA, 19 nt, Homo sapiens
  misc_RNA (1)...(19): siRNA sense strand
ggucuacagccauaagaaa

SEQ ID NO: 1755975 - RNA, 19 nt, Homo sapiens
  misc_RNA (1)...(19): siRNA sense strand
ccacagaccccaaagguuu

SEQ ID NO: 1755976 - RNA, 19 nt, Homo sapiens
  misc_RNA (1)...(19): siRNA sense strand
ucaagaacagcauccacua

SEQ ID NO: 1755977 - RNA, 19 nt, Homo sapiens
  misc_RNA (1)...(19): siRNA sense strand
ccaaauacuacaagaucaa

SEQ ID NO: 1755978 - RNA, 19 nt, Homo sapiens
  misc_RNA (1)...(19): siRNA sense strand
agguuuggcucaacucuga

SEQ ID NO: 1755979 - RNA, 19 nt, Homo sapiens
  misc_RNA (1)...(19): siRNA sense strand
ccaaauuccacuucuccaa

SEQ ID NO: 1755980 - RNA, 19 nt, Homo sapiens
  misc_RNA (1)...(19): siRNA sense strand
uugcuaacauucaugaaca

SEQ ID NO: 1755981 - RNA, 19 nt, Homo sapiens
  misc_RNA (1)...(19): siRNA sense strand
gggccucugucagccaauu

SEQ ID NO: 1755982 - RNA, 19 nt, Homo sapiens
  misc_RNA (1)...(19): siRNA sense strand
ggaucuugcuaacauucau

SEQ ID NO: 1755983 - RNA, 19 nt, Homo sapiens
  misc_RNA (1)...(19): siRNA sense strand
guacgauggccccaaauuu

SEQ ID NO: 1755984 - RNA, 19 nt, Homo sapiens
  misc_RNA (1)...(19): siRNA sense strand
gccauaagaaauuugacaa

SEQ ID NO: 1755985 - RNA, 19 nt, Homo sapiens
  misc_RNA (1)...(19): siRNA sense strand
gccaauuucuggguacgau

SEQ ID NO: 1755986 - RNA, 19 nt, Homo sapiens
  misc_RNA (1)...(19): siRNA sense strand
caagaacagcauccacuac

SEQ ID NO: 1755987 - RNA, 19 nt, Homo sapiens
  misc_RNA (1)...(19): siRNA sense strand
ucuacagccauaagaaauu

SEQ ID NO: 1755988 - RNA, 19 nt, Homo sapiens
  misc_RNA (1)...(19): siRNA sense strand
gcuaacauucaugaacaaa

SEQ ID NO: 1755989 - RNA, 19 nt, Homo sapiens
  misc_RNA (1)...(19): siRNA sense strand
gcgacuggaucuugcuaac

SEQ ID NO: 1755990 - RNA, 19 nt, Homo sapiens
  misc_RNA (1)...(19): siRNA sense strand
ccuacgggauccgcauuga

SEQ ID NO: 1755991 - RNA, 19 nt, Homo sapiens
  misc_RNA (1)...(19): siRNA sense strand
gaagauggggccucuguca

SEQ ID NO: 1755992 - RNA, 19 nt, Homo sapiens
  misc_RNA (1)...(19): siRNA sense strand
ugauucccaccauuauuaa

SEQ ID NO: 1755993 - RNA, 19 nt, Homo sapiens
  misc_RNA (1)...(19): siRNA sense strand
cagccugauucccaccauu

SEQ ID NO: 1755994 - RNA, 19 nt, Homo sapiens
  misc_RNA (1)...(19): siRNA sense strand
agccugauucccaccauua

SEQ ID NO: 1755995 - RNA, 19 nt, Homo sapiens
  misc_RNA (1)...(19): siRNA sense strand
ugacgucauugugcaugga

SEQ ID NO: 1755996 - RNA, 19 nt, Homo sapiens
  misc_RNA (1)...(19): siRNA sense strand
gaucuugcuaacauucaug

SEQ ID NO: 1755997 - RNA, 19 nt, Homo sapiens
  misc_RNA (1)...(19): siRNA sense strand
ucacagagcucgcacacaa

SEQ ID NO: 1755998 - RNA, 19 nt, Homo sapiens
  misc_RNA (1)...(19): siRNA sense strand
cuacagccauaagaaauuu

SEQ ID NO: 1755999 - RNA, 19 nt, Homo sapiens
  misc_RNA (1)...(19): siRNA sense strand
gcacagacggguaccugaa

SEQ ID NO: 1756000 - RNA, 19 nt, Homo sapiens
  misc_RNA (1)...(19): siRNA sense strand
ggcgcugugugcccuauua

SEQ ID NO: 1756001 - RNA, 19 nt, Homo sapiens
  misc_RNA (1)...(19): siRNA sense strand
ucaccauccucaucaagaa

SEQ ID NO: 1756002 - RNA, 19 nt, Homo sapiens
  misc_RNA (1)...(19): siRNA sense strand
gauccgcauugacgucauu

SEQ ID NO: 1756003 - RNA, 19 nt, Homo sapiens
  misc_RNA (1)...(19): siRNA sense strand
cugauucccaccauuauua

SEQ ID NO: 1756004 - RNA, 19 nt, Homo sapiens
  misc_RNA (1)...(19): siRNA sense strand
aacaaggucuacagccaua

SEQ ID NO: 1756005 - RNA, 19 nt, Homo sapiens
  misc_RNA (1)...(19): siRNA sense strand
gacuggaucuugcuaacau

SEQ ID NO: 1756006 - RNA, 19 nt, Homo sapiens
  misc_RNA (1)...(19): siRNA sense strand
gccaaauacuacaagauca

SEQ ID NO: 1756007 - RNA, 19 nt, Homo sapiens
  misc_RNA (1)...(19): siRNA sense strand
ggcuacaacuucagguuug

SEQ ID NO: 1756008 - RNA, 19 nt, Homo sapiens
  misc_RNA (1)...(19): siRNA sense strand
ggucuacagccauaagaaa

SEQ ID NO: 1756009 - RNA, 19 nt, Homo sapiens
  misc_RNA (1)...(19): siRNA sense strand
ccacagaccccaaagguuu

SEQ ID NO: 1756010 - RNA, 19 nt, Homo sapiens
  misc_RNA (1)...(19): siRNA sense strand
ucaagaacagcauccacua

SEQ ID NO: 1756011 - RNA, 19 nt, Homo sapiens
  misc_RNA (1)...(19): siRNA sense strand
ccaaauacuacaagaucaa

SEQ ID NO: 1756012 - RNA, 19 nt, Homo sapiens
  misc_RNA (1)...(19): siRNA sense strand
agguuuggcucaacucuga

SEQ ID NO: 1756013 - RNA, 19 nt, Homo sapiens
  misc_RNA (1)...(19): siRNA sense strand
ccaaauuccacuucuccaa

SEQ ID NO: 1756014 - RNA, 19 nt, Homo sapiens
  misc_RNA (1)...(19): siRNA sense strand
uugcuaacauucaugaaca

SEQ ID NO: 1756015 - RNA, 19 nt, Homo sapiens
  misc_RNA (1)...(19): siRNA sense strand
gggccucugucagccaauu

SEQ ID NO: 1756016 - RNA, 19 nt, Homo sapiens
  misc_RNA (1)...(19): siRNA sense strand
ggaucuugcuaacauucau

SEQ ID NO: 1756017 - RNA, 19 nt, Homo sapiens
  misc_RNA (1)...(19): siRNA sense strand
guacgauggccccaaauuu

SEQ ID NO: 1756018 - RNA, 19 nt, Homo sapiens
  misc_RNA (1)...(19): siRNA sense strand
gccauaagaaauuugacaa

SEQ ID NO: 1756019 - RNA, 19 nt, Homo sapiens
  misc_RNA (1)...(19): siRNA sense strand
gccaauuucuggguacgau

SEQ ID NO: 1756020 - RNA, 19 nt, Homo sapiens
  misc_RNA (1)...(19): siRNA sense strand
caagaacagcauccacuac

SEQ ID NO: 1756021 - RNA, 19 nt, Homo sapiens
  misc_RNA (1)...(19): siRNA sense strand
ucuacagccauaagaaauu

SEQ ID NO: 1756022 - RNA, 19 nt, Homo sapiens
  misc_RNA (1)...(19): siRNA sense strand
gcuaacauucaugaacaaa

SEQ ID NO: 1756023 - RNA, 19 nt, Homo sapiens
  misc_RNA (1)...(19): siRNA sense strand
gcgacuggaucuugcuaac

SEQ ID NO: 1756024 - RNA, 19 nt, Homo sapiens
  misc_RNA (1)...(19): siRNA sense strand
ccuacgggauccgcauuga

SEQ ID NO: 1756025 - RNA, 19 nt, Homo sapiens
  misc_RNA (1)...(19): siRNA sense strand
gaagauggggccucuguca

SEQ ID NO: 1756026 - RNA, 19 nt, Homo sapiens
  misc_RNA (1)...(19): siRNA sense strand
ugauucccaccauuauuaa

SEQ ID NO: 1756027 - RNA, 19 nt, Homo sapiens
  misc_RNA (1)...(19): siRNA sense strand
cagccugauucccaccauu

SEQ ID NO: 1756028 - RNA, 19 nt, Homo sapiens
  misc_RNA (1)...(19): siRNA sense strand
agccugauucccaccauua

SEQ ID NO: 1756029 - RNA, 19 nt, Homo sapiens
  misc_RNA (1)...(19): siRNA sense strand
ugacgucauugugcaugga

SEQ ID NO: 1756030 - RNA, 19 nt, Homo sapiens
  misc_RNA (1)...(19): siRNA sense strand
gaucuugcuaacauucaug

SEQ ID NO: 1756031 - RNA, 19 nt, Homo sapiens
  misc_RNA (1)...(19): siRNA sense strand
ucacagagcucgcacacaa

SEQ ID NO: 1756032 - RNA, 19 nt, Homo sapiens
  misc_RNA (1)...(19): siRNA sense strand
cuacagccauaagaaauuu

SEQ ID NO: 1756033 - RNA, 19 nt, Homo sapiens
  misc_RNA (1)...(19): siRNA sense strand
gcacagacggguaccugaa

SEQ ID NO: 1756034 - RNA, 19 nt, Homo sapiens
  misc_RNA (1)...(19): siRNA sense strand
ggcgcugugugcccuauua

SEQ ID NO: 1756035 - RNA, 19 nt, Homo sapiens
  misc_RNA (1)...(19): siRNA sense strand
ucaccauccucaucaagaa

SEQ ID NO: 1756036 - RNA, 19 nt, Homo sapiens
  misc_RNA (1)...(19): siRNA sense strand
gauccgcauugacgucauu

SEQ ID NO: 1756037 - RNA, 19 nt, Homo sapiens
  misc_RNA (1)...(19): siRNA sense strand
cugauucccaccauuauua

SEQ ID NO: 1756038 - RNA, 19 nt, Homo sapiens
  misc_RNA (1)...(19): siRNA sense strand
aacaaggucuacagccaua

SEQ ID NO: 1756039 - RNA, 19 nt, Homo sapiens
  misc_RNA (1)...(19): siRNA sense strand
gacuggaucuugcuaacau

SEQ ID NO: 1756040 - RNA, 19 nt, Homo sapiens
  misc_RNA (1)...(19): siRNA sense strand
gccaaauacuacaagauca

SEQ ID NO: 1756041 - RNA, 19 nt, Homo sapiens
  misc_RNA (1)...(19): siRNA sense strand
ggcuacaacuucagguuug

SEQ ID NO: 1756042 - RNA, 19 nt, Homo sapiens
  misc_RNA (1)...(19): siRNA sense strand
ggucuacagccauaagaaa

SEQ ID NO: 1756043 - RNA, 19 nt, Homo sapiens
  misc_RNA (1)...(19): siRNA sense strand
ccacagaccccaaagguuu

SEQ ID NO: 1756044 - RNA, 19 nt, Homo sapiens
  misc_RNA (1)...(19): siRNA sense strand
ucaagaacagcauccacua

SEQ ID NO: 1756045 - RNA, 19 nt, Homo sapiens
  misc_RNA (1)...(19): siRNA sense strand
ccaaauacuacaagaucaa

SEQ ID NO: 1756046 - RNA, 19 nt, Homo sapiens
  misc_RNA (1)...(19): siRNA sense strand
agguuuggcucaacucuga

SEQ ID NO: 1756047 - RNA, 19 nt, Homo sapiens
  misc_RNA (1)...(19): siRNA sense strand
ccaaauuccacuucuccaa

SEQ ID NO: 1756048 - RNA, 19 nt, Homo sapiens
  misc_RNA (1)...(19): siRNA sense strand
uugcuaacauucaugaaca

SEQ ID NO: 1756049 - RNA, 19 nt, Homo sapiens
  misc_RNA (1)...(19): siRNA sense strand
gggccucugucagccaauu

SEQ ID NO: 1756050 - RNA, 19 nt, Homo sapiens
  misc_RNA (1)...(19): siRNA sense strand
ggaucuugcuaacauucau

SEQ ID NO: 1756051 - RNA, 19 nt, Homo sapiens
  misc_RNA (1)...(19): siRNA sense strand
guacgauggccccaaauuu

SEQ ID NO: 1756052 - RNA, 19 nt, Homo sapiens
  misc_RNA (1)...(19): siRNA sense strand
gccauaagaaauuugacaa

SEQ ID NO: 1756053 - RNA, 19 nt, Homo sapiens
  misc_RNA (1)...(19): siRNA sense strand
gccaauuucuggguacgau

SEQ ID NO: 1756054 - RNA, 19 nt, Homo sapiens
  misc_RNA (1)...(19): siRNA sense strand
caagaacagcauccacuac

SEQ ID NO: 1756055 - RNA, 19 nt, Homo sapiens
  misc_RNA (1)...(19): siRNA sense strand
ucuacagccauaagaaauu

SEQ ID NO: 1756056 - RNA, 19 nt, Homo sapiens
  misc_RNA (1)...(19): siRNA sense strand
gcuaacauucaugaacaaa

SEQ ID NO: 1756057 - RNA, 19 nt, Homo sapiens
  misc_RNA (1)...(19): siRNA sense strand
gcgacuggaucuugcuaac

SEQ ID NO: 1756058 - RNA, 19 nt, Homo sapiens
  misc_RNA (1)...(19): siRNA sense strand
ccuacgggauccgcauuga

SEQ ID NO: 1756059 - RNA, 19 nt, Homo sapiens
  misc_RNA (1)...(19): siRNA sense strand
gaagauggggccucuguca

SEQ ID NO: 1756060 - RNA, 19 nt, Homo sapiens
  misc_RNA (1)...(19): siRNA sense strand
ugauucccaccauuauuaa

SEQ ID NO: 1756061 - RNA, 19 nt, Homo sapiens
  misc_RNA (1)...(19): siRNA sense strand
cagccugauucccaccauu

SEQ ID NO: 1756062 - RNA, 19 nt, Homo sapiens
  misc_RNA (1)...(19): siRNA sense strand
agccugauucccaccauua

SEQ ID NO: 1756063 - RNA, 19 nt, Homo sapiens
  misc_RNA (1)...(19): siRNA sense strand
ugacgucauugugcaugga

SEQ ID NO: 1756064 - RNA, 19 nt, Homo sapiens
  misc_RNA (1)...(19): siRNA sense strand
gaucuugcuaacauucaug

SEQ ID NO: 1756065 - RNA, 19 nt, Homo sapiens
  misc_RNA (1)...(19): siRNA sense strand
ucacagagcucgcacacaa

SEQ ID NO: 1756066 - RNA, 19 nt, Homo sapiens
  misc_RNA (1)...(19): siRNA sense strand
cuacagccauaagaaauuu

SEQ ID NO: 1756067 - RNA, 19 nt, Homo sapiens
  misc_RNA (1)...(19): siRNA sense strand
gcacagacggguaccugaa

SEQ ID NO: 1756068 - RNA, 19 nt, Homo sapiens
  misc_RNA (1)...(19): siRNA sense strand
ggcgcugugugcccuauua

SEQ ID NO: 1756069 - RNA, 19 nt, Homo sapiens
  misc_RNA (1)...(19): siRNA sense strand
ucaccauccucaucaagaa

SEQ ID NO: 1756070 - RNA, 19 nt, Homo sapiens
  misc_RNA (1)...(19): siRNA sense strand
gauccgcauugacgucauu

SEQ ID NO: 1756071 - RNA, 19 nt, Homo sapiens
  misc_RNA (1)...(19): siRNA sense strand
cugauucccaccauuauua

SEQ ID NO: 1756072 - RNA, 19 nt, Homo sapiens
  misc_RNA (1)...(19): siRNA sense strand
aacaaggucuacagccaua

SEQ ID NO: 1756073 - RNA, 19 nt, Homo sapiens
  misc_RNA (1)...(19): siRNA sense strand
gacuggaucuugcuaacau

SEQ ID NO: 1756074 - RNA, 19 nt, Homo sapiens
  misc_RNA (1)...(19): siRNA sense strand
gccaaauacuacaagauca

SEQ ID NO: 1756075 - RNA, 19 nt, Homo sapiens
  misc_RNA (1)...(19): siRNA sense strand
ggcuacaacuucagguuug

SEQ ID NO: 1756076 - RNA, 19 nt, Homo sapiens
  misc_RNA (1)...(19): siRNA sense strand
ggucuacagccauaagaaa

SEQ ID NO: 1756077 - RNA, 19 nt, Homo sapiens
  misc_RNA (1)...(19): siRNA sense strand
ccacagaccccaaagguuu

SEQ ID NO: 1756078 - RNA, 19 nt, Homo sapiens
  misc_RNA (1)...(19): siRNA sense strand
ucaagaacagcauccacua

SEQ ID NO: 1756079 - RNA, 19 nt, Homo sapiens
  misc_RNA (1)...(19): siRNA sense strand
ccaaauacuacaagaucaa

SEQ ID NO: 1756080 - RNA, 19 nt, Homo sapiens
  misc_RNA (1)...(19): siRNA sense strand
agguuuggcucaacucuga

SEQ ID NO: 1756081 - RNA, 19 nt, Homo sapiens
  misc_RNA (1)...(19): siRNA sense strand
ccaaauuccacuucuccaa

SEQ ID NO: 1756082 - RNA, 19 nt, Homo sapiens
  misc_RNA (1)...(19): siRNA sense strand
uugcuaacauucaugaaca

SEQ ID NO: 1756083 - RNA, 19 nt, Homo sapiens
  misc_RNA (1)...(19): siRNA sense strand
gggccucugucagccaauu

SEQ ID NO: 1756084 - RNA, 19 nt, Homo sapiens
  misc_RNA (1)...(19): siRNA sense strand
ggaucuugcuaacauucau

SEQ ID NO: 1756085 - RNA, 19 nt, Homo sapiens
  misc_RNA (1)...(19): siRNA sense strand
guacgauggccccaaauuu

SEQ ID NO: 1756086 - RNA, 19 nt, Homo sapiens
  misc_RNA (1)...(19): siRNA sense strand
gccauaagaaauuugacaa

SEQ ID NO: 1756087 - RNA, 19 nt, Homo sapiens
  misc_RNA (1)...(19): siRNA sense strand
gccaauuucuggguacgau

SEQ ID NO: 1756088 - RNA, 19 nt, Homo sapiens
  misc_RNA (1)...(19): siRNA sense strand
caagaacagcauccacuac

SEQ ID NO: 1756089 - RNA, 19 nt, Homo sapiens
  misc_RNA (1)...(19): siRNA sense strand
ucuacagccauaagaaauu

SEQ ID NO: 1756090 - RNA, 19 nt, Homo sapiens
  misc_RNA (1)...(19): siRNA sense strand
gcuaacauucaugaacaaa

SEQ ID NO: 1756091 - RNA, 19 nt, Homo sapiens
  misc_RNA (1)...(19): siRNA sense strand
gcgacuggaucuugcuaac

SEQ ID NO: 1756092 - RNA, 19 nt, Homo sapiens
  misc_RNA (1)...(19): siRNA sense strand
ccuacgggauccgcauuga

SEQ ID NO: 1756093 - RNA, 19 nt, Homo sapiens
  misc_RNA (1)...(19): siRNA sense strand
gaagauggggccucuguca

SEQ ID NO: 1756094 - RNA, 19 nt, Homo sapiens
  misc_RNA (1)...(19): siRNA sense strand
ugauucccaccauuauuaa

SEQ ID NO: 1756095 - RNA, 19 nt, Homo sapiens
  misc_RNA (1)...(19): siRNA sense strand
cagccugauucccaccauu

SEQ ID NO: 1756096 - RNA, 19 nt, Homo sapiens
  misc_RNA (1)...(19): siRNA sense strand
agccugauucccaccauua

SEQ ID NO: 1756097 - RNA, 19 nt, Homo sapiens
  misc_RNA (1)...(19): siRNA sense strand
ugacgucauugugcaugga

SEQ ID NO: 1756098 - RNA, 19 nt, Homo sapiens
  misc_RNA (1)...(19): siRNA sense strand
gaucuugcuaacauucaug

SEQ ID NO: 1756099 - RNA, 19 nt, Homo sapiens
  misc_RNA (1)...(19): siRNA sense strand
guacaaagccgcucugaaa

SEQ ID NO: 1756100 - RNA, 19 nt, Homo sapiens
  misc_RNA (1)...(19): siRNA sense strand
caacauaccucagauucaa

SEQ ID NO: 1756101 - RNA, 19 nt, Homo sapiens
  misc_RNA (1)...(19): siRNA sense strand
gugcagaucaugauguuua

SEQ ID NO: 1756102 - RNA, 19 nt, Homo sapiens
  misc_RNA (1)...(19): siRNA sense strand
gcaauaaggagaucaugga

SEQ ID NO: 1756103 - RNA, 19 nt, Homo sapiens
  misc_RNA (1)...(19): siRNA sense strand
gaucauggagcacaucaga

SEQ ID NO: 1756104 - RNA, 19 nt, Homo sapiens
  misc_RNA (1)...(19): siRNA sense strand
gugcaucugugaaguggaa

SEQ ID NO: 1756105 - RNA, 19 nt, Homo sapiens
  misc_RNA (1)...(19): siRNA sense strand
uaccucagauucaauacaa

SEQ ID NO: 1756106 - RNA, 19 nt, Homo sapiens
  misc_RNA (1)...(19): siRNA sense strand
gggaagaggaggaggagaa

SEQ ID NO: 1756107 - RNA, 19 nt, Homo sapiens
  misc_RNA (1)...(19): siRNA sense strand
gggugcagaucaugauguu

SEQ ID NO: 1756108 - RNA, 19 nt, Homo sapiens
  misc_RNA (1)...(19): siRNA sense strand
ggaagaggaggaggagaaa

SEQ ID NO: 1756109 - RNA, 19 nt, Homo sapiens
  misc_RNA (1)...(19): siRNA sense strand
ucauggagcacaucagaaa

SEQ ID NO: 1756110 - RNA, 19 nt, Homo sapiens
  misc_RNA (1)...(19): siRNA sense strand
guggagaccaagagcaaua

SEQ ID NO: 1756111 - RNA, 19 nt, Homo sapiens
  misc_RNA (1)...(19): siRNA sense strand
gugaaggucaugacaguga

SEQ ID NO: 1756112 - RNA, 19 nt, Homo sapiens
  misc_RNA (1)...(19): siRNA sense strand
ucaugacagugaauuacaa

SEQ ID NO: 1756113 - RNA, 19 nt, Homo sapiens
  misc_RNA (1)...(19): siRNA sense strand
caagagcaauaaggagauc

SEQ ID NO: 1756114 - RNA, 19 nt, Homo sapiens
  misc_RNA (1)...(19): siRNA sense strand
cagaucaugauguuuaaga

SEQ ID NO: 1756115 - RNA, 19 nt, Homo sapiens
  misc_RNA (1)...(19): siRNA sense strand
ugaaggucaugacagugaa

SEQ ID NO: 1756116 - RNA, 19 nt, Homo sapiens
  misc_RNA (1)...(19): siRNA sense strand
acauaccucagauucaaua

SEQ ID NO: 1756117 - RNA, 19 nt, Homo sapiens
  misc_RNA (1)...(19): siRNA sense strand
ggagugcaucugugaagug

SEQ ID NO: 1756118 - RNA, 19 nt, Homo sapiens
  misc_RNA (1)...(19): siRNA sense strand
ugcagaucaugauguuuaa

SEQ ID NO: 1756119 - RNA, 19 nt, Homo sapiens
  misc_RNA (1)...(19): siRNA sense strand
agaccaagagcaauaagga

SEQ ID NO: 1756120 - RNA, 19 nt, Homo sapiens
  misc_RNA (1)...(19): siRNA sense strand
ccgugaaggucaugacagu

SEQ ID NO: 1756121 - RNA, 19 nt, Homo sapiens
  misc_RNA (1)...(19): siRNA sense strand
gggagugcaucugugaagu

SEQ ID NO: 1756122 - RNA, 19 nt, Homo sapiens
  misc_RNA (1)...(19): siRNA sense strand
gaucaugauguuuaagaac

SEQ ID NO: 1756123 - RNA, 19 nt, Homo sapiens
  misc_RNA (1)...(19): siRNA sense strand
gccgcacccugcaauaucu

SEQ ID NO: 1756124 - RNA, 19 nt, Homo sapiens
  misc_RNA (1)...(19): siRNA sense strand
gaaggucaugacagugaau

SEQ ID NO: 1756125 - RNA, 19 nt, Homo sapiens
  misc_RNA (1)...(19): siRNA sense strand
ucaacauaccucagauuca

SEQ ID NO: 1756126 - RNA, 19 nt, Homo sapiens
  misc_RNA (1)...(19): siRNA sense strand
gagaucauggagcacauca

SEQ ID NO: 1756127 - RNA, 19 nt, Homo sapiens
  misc_RNA (1)...(19): siRNA sense strand
ggucaugacagugaauuac

SEQ ID NO: 1756128 - RNA, 19 nt, Homo sapiens
  misc_RNA (1)...(19): siRNA sense strand
cgccaggaaguuuguguuu

SEQ ID NO: 1756129 - RNA, 19 nt, Homo sapiens
  misc_RNA (1)...(19): siRNA sense strand
cgucacccuuccugcgauu

SEQ ID NO: 1756130 - RNA, 19 nt, Homo sapiens
  misc_RNA (1)...(19): siRNA sense strand
ccaagagcaauaaggagau

SEQ ID NO: 1756131 - RNA, 19 nt, Homo sapiens
  misc_RNA (1)...(19): siRNA sense strand
cacaggagcuucacaauaa

SEQ ID NO: 1756132 - RNA, 19 nt, Homo sapiens
  misc_RNA (1)...(19): siRNA sense strand
gcaagugucccaagauuua

SEQ ID NO: 1756133 - RNA, 19 nt, Homo sapiens
  misc_RNA (1)...(19): siRNA sense strand
ccacagagcuccaaaguag

SEQ ID NO: 1756134 - RNA, 19 nt, Homo sapiens
  misc_RNA (1)...(19): siRNA sense strand
ucaaacagccuucucauua

SEQ ID NO: 1756135 - RNA, 19 nt, Homo sapiens
  misc_RNA (1)...(19): siRNA sense strand
caaacagccuucucauuaa

SEQ ID NO: 1756136 - RNA, 19 nt, Homo sapiens
  misc_RNA (1)...(19): siRNA sense strand
gcacaggagcuucacaaua

SEQ ID NO: 1756137 - RNA, 19 nt, Homo sapiens
  misc_RNA (1)...(19): siRNA sense strand
ggagaagacuguauugaag

SEQ ID NO: 1756138 - RNA, 19 nt, Homo sapiens
  misc_RNA (1)...(19): siRNA sense strand
gagcaagugucccaagauu

SEQ ID NO: 1756139 - RNA, 19 nt, Homo sapiens
  misc_RNA (1)...(19): siRNA sense strand
gagcaucacuacaagcaaa

SEQ ID NO: 1756140 - RNA, 19 nt, Homo sapiens
  misc_RNA (1)...(19): siRNA sense strand
gaaauagaacugagaguga

SEQ ID NO: 1756141 - RNA, 19 nt, Homo sapiens
  misc_RNA (1)...(19): siRNA sense strand
aagcagagcuggaaauguu

SEQ ID NO: 1756142 - RNA, 19 nt, Homo sapiens
  misc_RNA (1)...(19): siRNA sense strand
gaacuaaugcaacuggaaa

SEQ ID NO: 1756143 - RNA, 19 nt, Homo sapiens
  misc_RNA (1)...(19): siRNA sense strand
gcaaagccucccucugaua

SEQ ID NO: 1756144 - RNA, 19 nt, Homo sapiens
  misc_RNA (1)...(19): siRNA sense strand
gaagaaaaggugcauguua

SEQ ID NO: 1756145 - RNA, 19 nt, Homo sapiens
  misc_RNA (1)...(19): siRNA sense strand
cagcugaacucugauauca

SEQ ID NO: 1756146 - RNA, 19 nt, Homo sapiens
  misc_RNA (1)...(19): siRNA sense strand
gauaucagcgccaucacua

SEQ ID NO: 1756147 - RNA, 19 nt, Homo sapiens
  misc_RNA (1)...(19): siRNA sense strand
gcaaggaauuucugcaaac

SEQ ID NO: 1756148 - RNA, 19 nt, Homo sapiens
  misc_RNA (1)...(19): siRNA sense strand
ugcaacagcugaacucuga

SEQ ID NO: 1756149 - RNA, 19 nt, Homo sapiens
  misc_RNA (1)...(19): siRNA sense strand
gcacucaggccaacaacuu

SEQ ID NO: 1756150 - RNA, 19 nt, Homo sapiens
  misc_RNA (1)...(19): siRNA sense strand
gaagagacugcaggagaua

SEQ ID NO: 1756151 - RNA, 19 nt, Homo sapiens
  misc_RNA (1)...(19): siRNA sense strand
gagaagaaacucaaacagu

SEQ ID NO: 1756152 - RNA, 19 nt, Homo sapiens
  misc_RNA (1)...(19): siRNA sense strand
ggagggaacuaaugcaacu

SEQ ID NO: 1756153 - RNA, 19 nt, Homo sapiens
  misc_RNA (1)...(19): siRNA sense strand
ggaccagccuccugcaaca

SEQ ID NO: 1756154 - RNA, 19 nt, Homo sapiens
  misc_RNA (1)...(19): siRNA sense strand
gaaggugacaggaauguuc

SEQ ID NO: 1756155 - RNA, 19 nt, Homo sapiens
  misc_RNA (1)...(19): siRNA sense strand
caacagcugaacucugaua

SEQ ID NO: 1756156 - RNA, 19 nt, Homo sapiens
  misc_RNA (1)...(19): siRNA sense strand
uggcaaagccucccucuga

SEQ ID NO: 1756157 - RNA, 19 nt, Homo sapiens
  misc_RNA (1)...(19): siRNA sense strand
aaauagaacugagagugaa

SEQ ID NO: 1756158 - RNA, 19 nt, Homo sapiens
  misc_RNA (1)...(19): siRNA sense strand
ugaagagacugcaggagau

SEQ ID NO: 1756159 - RNA, 19 nt, Homo sapiens
  misc_RNA (1)...(19): siRNA sense strand
gguagaacgucaaccucaa

SEQ ID NO: 1756160 - RNA, 19 nt, Homo sapiens
  misc_RNA (1)...(19): siRNA sense strand
cuauggaaagcuacuauua

SEQ ID NO: 1756161 - RNA, 19 nt, Homo sapiens
  misc_RNA (1)...(19): siRNA sense strand
caaagccucccucugauau

SEQ ID NO: 1756162 - RNA, 19 nt, Homo sapiens
  misc_RNA (1)...(19): siRNA sense strand
ccucugauauccaggaaau

SEQ ID NO: 1756163 - RNA, 19 nt, Homo sapiens
  misc_RNA (1)...(19): siRNA sense strand
gagcuggaaauguuaaaga

SEQ ID NO: 1756164 - RNA, 19 nt, Homo sapiens
  misc_RNA (1)...(19): siRNA sense strand
aaacagccuucucauuaag

SEQ ID NO: 1756165 - RNA, 19 nt, Homo sapiens
  misc_RNA (1)...(19): siRNA sense strand
gcagagcuggaaauguuaa

SEQ ID NO: 1756166 - RNA, 19 nt, Homo sapiens
  misc_RNA (1)...(19): siRNA sense strand
gcagugagaacuacagaag

SEQ ID NO: 1756167 - RNA, 19 nt, Homo sapiens
  misc_RNA (1)...(19): siRNA sense strand
caacuuugcccgguccuuu

SEQ ID NO: 1756168 - RNA, 19 nt, Homo sapiens
  misc_RNA (1)...(19): siRNA sense strand
uaagggacauggagaagac

SEQ ID NO: 1756169 - RNA, 19 nt, Homo sapiens
  misc_RNA (1)...(19): siRNA sense strand
gcacggaugguggcaaaga

SEQ ID NO: 1756170 - RNA, 19 nt, Homo sapiens
  misc_RNA (1)...(19): siRNA sense strand
ggacauggagaagacugua

SEQ ID NO: 1756171 - RNA, 19 nt, Homo sapiens
  misc_RNA (1)...(19): siRNA sense strand
cgacagaugggagaugauu

SEQ ID NO: 1756172 - RNA, 19 nt, Homo sapiens
  misc_RNA (1)...(19): siRNA sense strand
ggaacuaaugcaacuggaa

SEQ ID NO: 1756173 - RNA, 19 nt, Homo sapiens
  misc_RNA (1)...(19): siRNA sense strand
ggcaaagccucccucugau

SEQ ID NO: 1756174 - RNA, 19 nt, Homo sapiens
  misc_RNA (1)...(19): siRNA sense strand
caucacuacuuggcugaaa

SEQ ID NO: 1756175 - RNA, 19 nt, Homo sapiens
  misc_RNA (1)...(19): siRNA sense strand
ggacauguuacaggagauu

SEQ ID NO: 1756176 - RNA, 19 nt, Homo sapiens
  misc_RNA (1)...(19): siRNA sense strand
aauggaaggugacaggaau

SEQ ID NO: 1756177 - RNA, 19 nt, Homo sapiens
  misc_RNA (1)...(19): siRNA sense strand
uggagaagacuguauugaa

SEQ ID NO: 1756178 - RNA, 19 nt, Homo sapiens
  misc_RNA (1)...(19): siRNA sense strand
uacaggagauuucaaacag

SEQ ID NO: 1756179 - RNA, 19 nt, Homo sapiens
  misc_RNA (1)...(19): siRNA sense strand
ucagcgccaucacuacuug

SEQ ID NO: 1756180 - RNA, 19 nt, Homo sapiens
  misc_RNA (1)...(19): siRNA sense strand
aagaaaaggugcauguuau

SEQ ID NO: 1756181 - RNA, 19 nt, Homo sapiens
  misc_RNA (1)...(19): siRNA sense strand
uauaaaccacccuauggaa

SEQ ID NO: 1756182 - RNA, 19 nt, Homo sapiens
  misc_RNA (1)...(19): siRNA sense strand
ggaggcagaaggcucaugu

SEQ ID NO: 1756183 - RNA, 19 nt, Homo sapiens
  misc_RNA (1)...(19): siRNA sense strand
gcauguuauugagaagaaa

SEQ ID NO: 1756184 - RNA, 19 nt, Homo sapiens
  misc_RNA (1)...(19): siRNA sense strand
caacgugagcagcaaggaa

SEQ ID NO: 1756185 - RNA, 19 nt, Homo sapiens
  misc_RNA (1)...(19): siRNA sense strand
gaaaaggugcauguuauug

SEQ ID NO: 1756186 - RNA, 19 nt, Homo sapiens
  misc_RNA (1)...(19): siRNA sense strand
cagcaaggaauuucugcaa

SEQ ID NO: 1756187 - RNA, 19 nt, Homo sapiens
  misc_RNA (1)...(19): siRNA sense strand
aaaggugcauguuauugag

SEQ ID NO: 1756188 - RNA, 19 nt, Homo sapiens
  misc_RNA (1)...(19): siRNA sense strand
uaaaccacccuauggaaag

SEQ ID NO: 1756189 - RNA, 19 nt, Homo sapiens
  misc_RNA (1)...(19): siRNA sense strand
gaagcagagcuggaaaugu

SEQ ID NO: 1756190 - RNA, 19 nt, Homo sapiens
  misc_RNA (1)...(19): siRNA sense strand
caagugucccaagauuuaa

SEQ ID NO: 1756191 - RNA, 19 nt, Homo sapiens
  misc_RNA (1)...(19): siRNA sense strand
ccaagaaccggaggcagaa

SEQ ID NO: 1756192 - RNA, 19 nt, Homo sapiens
  misc_RNA (1)...(19): siRNA sense strand
agcaaggaauuucugcaaa

SEQ ID NO: 1756193 - RNA, 19 nt, Homo sapiens
  misc_RNA (1)...(19): siRNA sense strand
gagcagugagaacuacaga

SEQ ID NO: 1756194 - RNA, 19 nt, Homo sapiens
  misc_RNA (1)...(19): siRNA sense strand
gguuagcgagugccaagaa

SEQ ID NO: 1756195 - RNA, 19 nt, Homo sapiens
  misc_RNA (1)...(19): siRNA sense strand
ucacuacaagcaaauggaa

SEQ ID NO: 1756196 - RNA, 19 nt, Homo sapiens
  misc_RNA (1)...(19): siRNA sense strand
ggagcaagugucccaagau

SEQ ID NO: 1756197 - RNA, 19 nt, Homo sapiens
  misc_RNA (1)...(19): siRNA sense strand
auaaaccacccuauggaaa

SEQ ID NO: 1756198 - RNA, 19 nt, Homo sapiens
  misc_RNA (1)...(19): siRNA sense strand
cacggaugguggcaaagaa

SEQ ID NO: 1756199 - RNA, 19 nt, Homo sapiens
  misc_RNA (1)...(19): siRNA sense strand
gcaacccacagcaggaaga

SEQ ID NO: 1756200 - RNA, 19 nt, Homo sapiens
  misc_RNA (1)...(19): siRNA sense strand
ugauauccaggaaauagaa

SEQ ID NO: 1756201 - RNA, 19 nt, Homo sapiens
  misc_RNA (1)...(19): siRNA sense strand
gagcagcaaggaauuucug

SEQ ID NO: 1756202 - RNA, 19 nt, Homo sapiens
  misc_RNA (1)...(19): siRNA sense strand
uaaugcaacuggaaaagga

SEQ ID NO: 1756203 - RNA, 19 nt, Homo sapiens
  misc_RNA (1)...(19): siRNA sense strand
gggacuggccgguaucaca

SEQ ID NO: 1756204 - RNA, 19 nt, Homo sapiens
  misc_RNA (1)...(19): siRNA sense strand
aggcacggaugguggcaaa

SEQ ID NO: 1756205 - RNA, 19 nt, Homo sapiens
  misc_RNA (1)...(19): siRNA sense strand
gcuggaaauguuaaagaug

SEQ ID NO: 1756206 - RNA, 19 nt, Homo sapiens
  misc_RNA (1)...(19): siRNA sense strand
ucagagcagugagaacuac

SEQ ID NO: 1756207 - RNA, 19 nt, Homo sapiens
  misc_RNA (1)...(19): siRNA sense strand
acagaugggagaugauuca

SEQ ID NO: 1756208 - RNA, 19 nt, Homo sapiens
  misc_RNA (1)...(19): siRNA sense strand
gcccagcuucgacgaggua

SEQ ID NO: 1756209 - RNA, 19 nt, Homo sapiens
  misc_RNA (1)...(19): siRNA sense strand
ugcauguuauugagaagaa

SEQ ID NO: 1756210 - RNA, 19 nt, Homo sapiens
  misc_RNA (1)...(19): siRNA sense strand
uuacaggagauuucaaaca

SEQ ID NO: 1756211 - RNA, 19 nt, Homo sapiens
  misc_RNA (1)...(19): siRNA sense strand
aaccucaaguggacauguu

SEQ ID NO: 1756212 - RNA, 19 nt, Homo sapiens
  misc_RNA (1)...(19): siRNA sense strand
ucaggugccuucgacagau

SEQ ID NO: 1756213 - RNA, 19 nt, Homo sapiens
  misc_RNA (1)...(19): siRNA sense strand
ggacuuccaccaguugagu

SEQ ID NO: 1756214 - RNA, 19 nt, Homo sapiens
  misc_RNA (1)...(19): siRNA sense strand
gcauuaguggucucuguca

SEQ ID NO: 1756215 - RNA, 19 nt, Homo sapiens
  misc_RNA (1)...(19): siRNA sense strand
ccaggaaauagaacugaga

SEQ ID NO: 1756216 - RNA, 19 nt, Homo sapiens
  misc_RNA (1)...(19): siRNA sense strand
ggaaggugacaggaauguu

SEQ ID NO: 1756217 - RNA, 19 nt, Homo sapiens
  misc_RNA (1)...(19): siRNA sense strand
ggaaaaggagcugguagaa

SEQ ID NO: 1756218 - RNA, 19 nt, Homo sapiens
  misc_RNA (1)...(19): siRNA sense strand
ugaagcagagcuggaaaug

SEQ ID NO: 1756219 - RNA, 19 nt, Homo sapiens
  misc_RNA (1)...(19): siRNA sense strand
augcugagguacaccaaug

SEQ ID NO: 1756220 - RNA, 19 nt, Homo sapiens
  misc_RNA (1)...(19): siRNA sense strand
caggugccuucgacagaug

SEQ ID NO: 1756221 - RNA, 19 nt, Homo sapiens
  misc_RNA (1)...(19): siRNA sense strand
cauuaguggucucugucaa

SEQ ID NO: 1756222 - RNA, 19 nt, Homo sapiens
  misc_RNA (1)...(19): siRNA sense strand
ugacacuuacaaggcauua

SEQ ID NO: 1756223 - RNA, 19 nt, Homo sapiens
  misc_RNA (1)...(19): siRNA sense strand
aaaaucugcugcugugguu

SEQ ID NO: 1756224 - RNA, 19 nt, Homo sapiens
  misc_RNA (1)...(19): siRNA sense strand
gucccgagcaucacuacaa

SEQ ID NO: 1756225 - RNA, 19 nt, Homo sapiens
  misc_RNA (1)...(19): siRNA sense strand
acauggagaagacuguauu

SEQ ID NO: 1756226 - RNA, 19 nt, Homo sapiens
  misc_RNA (1)...(19): siRNA sense strand
uuauaaaccacccuaugga

SEQ ID NO: 1756227 - RNA, 19 nt, Homo sapiens
  misc_RNA (1)...(19): siRNA sense strand
cauuaagggacauggagaa

SEQ ID NO: 1756228 - RNA, 19 nt, Homo sapiens
  misc_RNA (1)...(19): siRNA sense strand
guagaacgucaaccucaag

SEQ ID NO: 1756229 - RNA, 19 nt, Homo sapiens
  misc_RNA (1)...(19): siRNA sense strand
gagugucggagggaacuaa

SEQ ID NO: 1756230 - RNA, 19 nt, Homo sapiens
  misc_RNA (1)...(19): siRNA sense strand
gcucaugucaccgauccaa

SEQ ID NO: 1756231 - RNA, 19 nt, Homo sapiens
  misc_RNA (1)...(19): siRNA sense strand
cacaggagcuucacaauaa

SEQ ID NO: 1756232 - RNA, 19 nt, Homo sapiens
  misc_RNA (1)...(19): siRNA sense strand
gcaagugucccaagauuua

SEQ ID NO: 1756233 - RNA, 19 nt, Homo sapiens
  misc_RNA (1)...(19): siRNA sense strand
ccacagagcuccaaaguag

SEQ ID NO: 1756234 - RNA, 19 nt, Homo sapiens
  misc_RNA (1)...(19): siRNA sense strand
ucaaacagccuucucauua

SEQ ID NO: 1756235 - RNA, 19 nt, Homo sapiens
  misc_RNA (1)...(19): siRNA sense strand
caaacagccuucucauuaa

SEQ ID NO: 1756236 - RNA, 19 nt, Homo sapiens
  misc_RNA (1)...(19): siRNA sense strand
gcacaggagcuucacaaua

SEQ ID NO: 1756237 - RNA, 19 nt, Homo sapiens
  misc_RNA (1)...(19): siRNA sense strand
ggagaagacuguauugaag

SEQ ID NO: 1756238 - RNA, 19 nt, Homo sapiens
  misc_RNA (1)...(19): siRNA sense strand
gagcaagugucccaagauu

SEQ ID NO: 1756239 - RNA, 19 nt, Homo sapiens
  misc_RNA (1)...(19): siRNA sense strand
gaaauagaacugagaguga

SEQ ID NO: 1756240 - RNA, 19 nt, Homo sapiens
  misc_RNA (1)...(19): siRNA sense strand
aagcagagcuggaaauguu

SEQ ID NO: 1756241 - RNA, 19 nt, Homo sapiens
  misc_RNA (1)...(19): siRNA sense strand
gaacuaaugcaacuggaaa

SEQ ID NO: 1756242 - RNA, 19 nt, Homo sapiens
  misc_RNA (1)...(19): siRNA sense strand
gcaaagccucccucugaua

SEQ ID NO: 1756243 - RNA, 19 nt, Homo sapiens
  misc_RNA (1)...(19): siRNA sense strand
gaagaaaaggugcauguua

SEQ ID NO: 1756244 - RNA, 19 nt, Homo sapiens
  misc_RNA (1)...(19): siRNA sense strand
cagcugaacucugauauca

SEQ ID NO: 1756245 - RNA, 19 nt, Homo sapiens
  misc_RNA (1)...(19): siRNA sense strand
gauaucagcgccaucacua

SEQ ID NO: 1756246 - RNA, 19 nt, Homo sapiens
  misc_RNA (1)...(19): siRNA sense strand
gcaaggaauuucugcaaac

SEQ ID NO: 1756247 - RNA, 19 nt, Homo sapiens
  misc_RNA (1)...(19): siRNA sense strand
ugcaacagcugaacucuga

SEQ ID NO: 1756248 - RNA, 19 nt, Homo sapiens
  misc_RNA (1)...(19): siRNA sense strand
gcacucaggccaacaacuu

SEQ ID NO: 1756249 - RNA, 19 nt, Homo sapiens
  misc_RNA (1)...(19): siRNA sense strand
gaagagacugcaggagaua

SEQ ID NO: 1756250 - RNA, 19 nt, Homo sapiens
  misc_RNA (1)...(19): siRNA sense strand
gagaagaaacucaaacagu

SEQ ID NO: 1756251 - RNA, 19 nt, Homo sapiens
  misc_RNA (1)...(19): siRNA sense strand
ggagggaacuaaugcaacu

SEQ ID NO: 1756252 - RNA, 19 nt, Homo sapiens
  misc_RNA (1)...(19): siRNA sense strand
ggaccagccuccugcaaca

SEQ ID NO: 1756253 - RNA, 19 nt, Homo sapiens
  misc_RNA (1)...(19): siRNA sense strand
gaaggugacaggaauguuc

SEQ ID NO: 1756254 - RNA, 19 nt, Homo sapiens
  misc_RNA (1)...(19): siRNA sense strand
caacagcugaacucugaua

SEQ ID NO: 1756255 - RNA, 19 nt, Homo sapiens
  misc_RNA (1)...(19): siRNA sense strand
uggcaaagccucccucuga

SEQ ID NO: 1756256 - RNA, 19 nt, Homo sapiens
  misc_RNA (1)...(19): siRNA sense strand
aaauagaacugagagugaa

SEQ ID NO: 1756257 - RNA, 19 nt, Homo sapiens
  misc_RNA (1)...(19): siRNA sense strand
ugaagagacugcaggagau

SEQ ID NO: 1756258 - RNA, 19 nt, Homo sapiens
  misc_RNA (1)...(19): siRNA sense strand
gguagaacgucaaccucaa

SEQ ID NO: 1756259 - RNA, 19 nt, Homo sapiens
  misc_RNA (1)...(19): siRNA sense strand
cuauggaaagcuacuauua

SEQ ID NO: 1756260 - RNA, 19 nt, Homo sapiens
  misc_RNA (1)...(19): siRNA sense strand
caaagccucccucugauau

SEQ ID NO: 1756261 - RNA, 19 nt, Homo sapiens
  misc_RNA (1)...(19): siRNA sense strand
ccucugauauccaggaaau

SEQ ID NO: 1756262 - RNA, 19 nt, Homo sapiens
  misc_RNA (1)...(19): siRNA sense strand
gagcuggaaauguuaaaga

SEQ ID NO: 1756263 - RNA, 19 nt, Homo sapiens
  misc_RNA (1)...(19): siRNA sense strand
aaacagccuucucauuaag

SEQ ID NO: 1756264 - RNA, 19 nt, Homo sapiens
  misc_RNA (1)...(19): siRNA sense strand
gcagagcuggaaauguuaa

SEQ ID NO: 1756265 - RNA, 19 nt, Homo sapiens
  misc_RNA (1)...(19): siRNA sense strand
gcagugagaacuacagaag

SEQ ID NO: 1756266 - RNA, 19 nt, Homo sapiens
  misc_RNA (1)...(19): siRNA sense strand
caacuuugcccgguccuuu

SEQ ID NO: 1756267 - RNA, 19 nt, Homo sapiens
  misc_RNA (1)...(19): siRNA sense strand
uaagggacauggagaagac

SEQ ID NO: 1756268 - RNA, 19 nt, Homo sapiens
  misc_RNA (1)...(19): siRNA sense strand
gcacggaugguggcaaaga

SEQ ID NO: 1756269 - RNA, 19 nt, Homo sapiens
  misc_RNA (1)...(19): siRNA sense strand
ggacauggagaagacugua

SEQ ID NO: 1756270 - RNA, 19 nt, Homo sapiens
  misc_RNA (1)...(19): siRNA sense strand
cgacagaugggagaugauu

SEQ ID NO: 1756271 - RNA, 19 nt, Homo sapiens
  misc_RNA (1)...(19): siRNA sense strand
ggaacuaaugcaacuggaa

SEQ ID NO: 1756272 - RNA, 19 nt, Homo sapiens
  misc_RNA (1)...(19): siRNA sense strand
ggcaaagccucccucugau

SEQ ID NO: 1756273 - RNA, 19 nt, Homo sapiens
  misc_RNA (1)...(19): siRNA sense strand
caucacuacuuggcugaaa

SEQ ID NO: 1756274 - RNA, 19 nt, Homo sapiens
  misc_RNA (1)...(19): siRNA sense strand
ggacauguuacaggagauu

SEQ ID NO: 1756275 - RNA, 19 nt, Homo sapiens
  misc_RNA (1)...(19): siRNA sense strand
uggagaagacuguauugaa

SEQ ID NO: 1756276 - RNA, 19 nt, Homo sapiens
  misc_RNA (1)...(19): siRNA sense strand
uacaggagauuucaaacag

SEQ ID NO: 1756277 - RNA, 19 nt, Homo sapiens
  misc_RNA (1)...(19): siRNA sense strand
ucagcgccaucacuacuug

SEQ ID NO: 1756278 - RNA, 19 nt, Homo sapiens
  misc_RNA (1)...(19): siRNA sense strand
aagaaaaggugcauguuau

SEQ ID NO: 1756279 - RNA, 19 nt, Homo sapiens
  misc_RNA (1)...(19): siRNA sense strand
ggaggcagaaggcucaugu

SEQ ID NO: 1756280 - RNA, 19 nt, Homo sapiens
  misc_RNA (1)...(19): siRNA sense strand
uauaaaccacccuauggaa

SEQ ID NO: 1756281 - RNA, 19 nt, Homo sapiens
  misc_RNA (1)...(19): siRNA sense strand
gcauguuauugagaagaaa

SEQ ID NO: 1756282 - RNA, 19 nt, Homo sapiens
  misc_RNA (1)...(19): siRNA sense strand
caacgugagcagcaaggaa

SEQ ID NO: 1756283 - RNA, 19 nt, Homo sapiens
  misc_RNA (1)...(19): siRNA sense strand
gaaaaggugcauguuauug

SEQ ID NO: 1756284 - RNA, 19 nt, Homo sapiens
  misc_RNA (1)...(19): siRNA sense strand
cagcaaggaauuucugcaa

SEQ ID NO: 1756285 - RNA, 19 nt, Homo sapiens
  misc_RNA (1)...(19): siRNA sense strand
uaaaccacccuauggaaag

SEQ ID NO: 1756286 - RNA, 19 nt, Homo sapiens
  misc_RNA (1)...(19): siRNA sense strand
aaaggugcauguuauugag

SEQ ID NO: 1756287 - RNA, 19 nt, Homo sapiens
  misc_RNA (1)...(19): siRNA sense strand
gaagcagagcuggaaaugu

SEQ ID NO: 1756288 - RNA, 19 nt, Homo sapiens
  misc_RNA (1)...(19): siRNA sense strand
caagugucccaagauuuaa

SEQ ID NO: 1756289 - RNA, 19 nt, Homo sapiens
  misc_RNA (1)...(19): siRNA sense strand
ccaagaaccggaggcagaa

SEQ ID NO: 1756290 - RNA, 19 nt, Homo sapiens
  misc_RNA (1)...(19): siRNA sense strand
agcaaggaauuucugcaaa

SEQ ID NO: 1756291 - RNA, 19 nt, Homo sapiens
  misc_RNA (1)...(19): siRNA sense strand
gagcagugagaacuacaga

SEQ ID NO: 1756292 - RNA, 19 nt, Homo sapiens
  misc_RNA (1)...(19): siRNA sense strand
auaaaccacccuauggaaa

SEQ ID NO: 1756293 - RNA, 19 nt, Homo sapiens
  misc_RNA (1)...(19): siRNA sense strand
gcaacccacagcaggaaga

SEQ ID NO: 1756294 - RNA, 19 nt, Homo sapiens
  misc_RNA (1)...(19): siRNA sense strand
ggagcaagugucccaagau

SEQ ID NO: 1756295 - RNA, 19 nt, Homo sapiens
  misc_RNA (1)...(19): siRNA sense strand
cacggaugguggcaaagaa

SEQ ID NO: 1756296 - RNA, 19 nt, Homo sapiens
  misc_RNA (1)...(19): siRNA sense strand
gguuagcgagugccaagaa

SEQ ID NO: 1756297 - RNA, 19 nt, Homo sapiens
  misc_RNA (1)...(19): siRNA sense strand
ugauauccaggaaauagaa

SEQ ID NO: 1756298 - RNA, 19 nt, Homo sapiens
  misc_RNA (1)...(19): siRNA sense strand
gagcagcaaggaauuucug

SEQ ID NO: 1756299 - RNA, 19 nt, Homo sapiens
  misc_RNA (1)...(19): siRNA sense strand
aggcacggaugguggcaaa

SEQ ID NO: 1756300 - RNA, 19 nt, Homo sapiens
  misc_RNA (1)...(19): siRNA sense strand
gggacuggccgguaucaca

SEQ ID NO: 1756301 - RNA, 19 nt, Homo sapiens
  misc_RNA (1)...(19): siRNA sense strand
uaaugcaacuggaaaagga

SEQ ID NO: 1756302 - RNA, 19 nt, Homo sapiens
  misc_RNA (1)...(19): siRNA sense strand
gcuggaaauguuaaagaug

SEQ ID NO: 1756303 - RNA, 19 nt, Homo sapiens
  misc_RNA (1)...(19): siRNA sense strand
ucagagcagugagaacuac

SEQ ID NO: 1756304 - RNA, 19 nt, Homo sapiens
  misc_RNA (1)...(19): siRNA sense strand
gcccagcuucgacgaggua

SEQ ID NO: 1756305 - RNA, 19 nt, Homo sapiens
  misc_RNA (1)...(19): siRNA sense strand
acagaugggagaugauuca

SEQ ID NO: 1756306 - RNA, 19 nt, Homo sapiens
  misc_RNA (1)...(19): siRNA sense strand
ugcauguuauugagaagaa

SEQ ID NO: 1756307 - RNA, 19 nt, Homo sapiens
  misc_RNA (1)...(19): siRNA sense strand
uuacaggagauuucaaaca

SEQ ID NO: 1756308 - RNA, 19 nt, Homo sapiens
  misc_RNA (1)...(19): siRNA sense strand
aaccucaaguggacauguu

SEQ ID NO: 1756309 - RNA, 19 nt, Homo sapiens
  misc_RNA (1)...(19): siRNA sense strand
ggacuuccaccaguugagu

SEQ ID NO: 1756310 - RNA, 19 nt, Homo sapiens
  misc_RNA (1)...(19): siRNA sense strand
ucaggugccuucgacagau

SEQ ID NO: 1756311 - RNA, 19 nt, Homo sapiens
  misc_RNA (1)...(19): siRNA sense strand
gcauuaguggucucuguca

SEQ ID NO: 1756312 - RNA, 19 nt, Homo sapiens
  misc_RNA (1)...(19): siRNA sense strand
ccaggaaauagaacugaga

SEQ ID NO: 1756313 - RNA, 19 nt, Homo sapiens
  misc_RNA (1)...(19): siRNA sense strand
ggaaaaggagcugguagaa

SEQ ID NO: 1756314 - RNA, 19 nt, Homo sapiens
  misc_RNA (1)...(19): siRNA sense strand
ggaaggugacaggaauguu

SEQ ID NO: 1756315 - RNA, 19 nt, Homo sapiens
  misc_RNA (1)...(19): siRNA sense strand
ugaagcagagcuggaaaug

SEQ ID NO: 1756316 - RNA, 19 nt, Homo sapiens
  misc_RNA (1)...(19): siRNA sense strand
augcugagguacaccaaug

SEQ ID NO: 1756317 - RNA, 19 nt, Homo sapiens
  misc_RNA (1)...(19): siRNA sense strand
caggugccuucgacagaug

SEQ ID NO: 1756318 - RNA, 19 nt, Homo sapiens
  misc_RNA (1)...(19): siRNA sense strand
cauuaguggucucugucaa

SEQ ID NO: 1756319 - RNA, 19 nt, Homo sapiens
  misc_RNA (1)...(19): siRNA sense strand
ugacacuuacaaggcauua

SEQ ID NO: 1756320 - RNA, 19 nt, Homo sapiens
  misc_RNA (1)...(19): siRNA sense strand
aaaaucugcugcugugguu

SEQ ID NO: 1756321 - RNA, 19 nt, Homo sapiens
  misc_RNA (1)...(19): siRNA sense strand
gcucaugucaccgauccaa

SEQ ID NO: 1756322 - RNA, 19 nt, Homo sapiens
  misc_RNA (1)...(19): siRNA sense strand
acauggagaagacuguauu

SEQ ID NO: 1756323 - RNA, 19 nt, Homo sapiens
  misc_RNA (1)...(19): siRNA sense strand
cauuaagggacauggagaa

SEQ ID NO: 1756324 - RNA, 19 nt, Homo sapiens
  misc_RNA (1)...(19): siRNA sense strand
guagaacgucaaccucaag

SEQ ID NO: 1756325 - RNA, 19 nt, Homo sapiens
  misc_RNA (1)...(19): siRNA sense strand
uuauaaaccacccuaugga

SEQ ID NO: 1756326 - RNA, 19 nt, Homo sapiens
  misc_RNA (1)...(19): siRNA sense strand
gagugucggagggaacuaa

SEQ ID NO: 1756327 - RNA, 19 nt, Homo sapiens
  misc_RNA (1)...(19): siRNA sense strand
uauggaaagcuacuauuac

SEQ ID NO: 1756328 - RNA, 19 nt, Homo sapiens
  misc_RNA (1)...(19): siRNA sense strand
caaggaauuucugcaaacc

SEQ ID NO: 1756329 - RNA, 19 nt, Homo sapiens
  misc_RNA (1)...(19): siRNA sense strand
acacuuacaaggcauuagu

SEQ ID NO: 1756330 - RNA, 19 nt, Homo sapiens
  misc_RNA (1)...(19): siRNA sense strand
cacaggagcuucacaauaa

SEQ ID NO: 1756331 - RNA, 19 nt, Homo sapiens
  misc_RNA (1)...(19): siRNA sense strand
gcaagugucccaagauuua

SEQ ID NO: 1756332 - RNA, 19 nt, Homo sapiens
  misc_RNA (1)...(19): siRNA sense strand
ccacagagcuccaaaguag

SEQ ID NO: 1756333 - RNA, 19 nt, Homo sapiens
  misc_RNA (1)...(19): siRNA sense strand
ucaaacagccuucucauua

SEQ ID NO: 1756334 - RNA, 19 nt, Homo sapiens
  misc_RNA (1)...(19): siRNA sense strand
caaacagccuucucauuaa

SEQ ID NO: 1756335 - RNA, 19 nt, Homo sapiens
  misc_RNA (1)...(19): siRNA sense strand
gcacaggagcuucacaaua

SEQ ID NO: 1756336 - RNA, 19 nt, Homo sapiens
  misc_RNA (1)...(19): siRNA sense strand
ggagaagacuguauugaag

SEQ ID NO: 1756337 - RNA, 19 nt, Homo sapiens
  misc_RNA (1)...(19): siRNA sense strand
gagcaagugucccaagauu

SEQ ID NO: 1756338 - RNA, 19 nt, Homo sapiens
  misc_RNA (1)...(19): siRNA sense strand
gagcaucacuacaagcaaa

SEQ ID NO: 1756339 - RNA, 19 nt, Homo sapiens
  misc_RNA (1)...(19): siRNA sense strand
gaaauagaacugagaguga

SEQ ID NO: 1756340 - RNA, 19 nt, Homo sapiens
  misc_RNA (1)...(19): siRNA sense strand
aagcagagcuggaaauguu

SEQ ID NO: 1756341 - RNA, 19 nt, Homo sapiens
  misc_RNA (1)...(19): siRNA sense strand
gaacuaaugcaacuggaaa

SEQ ID NO: 1756342 - RNA, 19 nt, Homo sapiens
  misc_RNA (1)...(19): siRNA sense strand
gcaaagccucccucugaua

SEQ ID NO: 1756343 - RNA, 19 nt, Homo sapiens
  misc_RNA (1)...(19): siRNA sense strand
gaagaaaaggugcauguua

SEQ ID NO: 1756344 - RNA, 19 nt, Homo sapiens
  misc_RNA (1)...(19): siRNA sense strand
cagcugaacucugauauca

SEQ ID NO: 1756345 - RNA, 19 nt, Homo sapiens
  misc_RNA (1)...(19): siRNA sense strand
gauaucagcgccaucacua

SEQ ID NO: 1756346 - RNA, 19 nt, Homo sapiens
  misc_RNA (1)...(19): siRNA sense strand
gcaaggaauuucugcaaac

SEQ ID NO: 1756347 - RNA, 19 nt, Homo sapiens
  misc_RNA (1)...(19): siRNA sense strand
ugcaacagcugaacucuga

SEQ ID NO: 1756348 - RNA, 19 nt, Homo sapiens
  misc_RNA (1)...(19): siRNA sense strand
gcacucaggccaacaacuu

SEQ ID NO: 1756349 - RNA, 19 nt, Homo sapiens
  misc_RNA (1)...(19): siRNA sense strand
gaagagacugcaggagaua

SEQ ID NO: 1756350 - RNA, 19 nt, Homo sapiens
  misc_RNA (1)...(19): siRNA sense strand
gagaagaaacucaaacagu

SEQ ID NO: 1756351 - RNA, 19 nt, Homo sapiens
  misc_RNA (1)...(19): siRNA sense strand
ggagggaacuaaugcaacu

SEQ ID NO: 1756352 - RNA, 19 nt, Homo sapiens
  misc_RNA (1)...(19): siRNA sense strand
ggaccagccuccugcaaca

SEQ ID NO: 1756353 - RNA, 19 nt, Homo sapiens
  misc_RNA (1)...(19): siRNA sense strand
gaaggugacaggaauguuc

SEQ ID NO: 1756354 - RNA, 19 nt, Homo sapiens
  misc_RNA (1)...(19): siRNA sense strand
caacagcugaacucugaua

SEQ ID NO: 1756355 - RNA, 19 nt, Homo sapiens
  misc_RNA (1)...(19): siRNA sense strand
uggcaaagccucccucuga

SEQ ID NO: 1756356 - RNA, 19 nt, Homo sapiens
  misc_RNA (1)...(19): siRNA sense strand
aaauagaacugagagugaa

SEQ ID NO: 1756357 - RNA, 19 nt, Homo sapiens
  misc_RNA (1)...(19): siRNA sense strand
ugaagagacugcaggagau

SEQ ID NO: 1756358 - RNA, 19 nt, Homo sapiens
  misc_RNA (1)...(19): siRNA sense strand
gguagaacgucaaccucaa

SEQ ID NO: 1756359 - RNA, 19 nt, Homo sapiens
  misc_RNA (1)...(19): siRNA sense strand
cuauggaaagcuacuauua

SEQ ID NO: 1756360 - RNA, 19 nt, Homo sapiens
  misc_RNA (1)...(19): siRNA sense strand
caaagccucccucugauau

SEQ ID NO: 1756361 - RNA, 19 nt, Homo sapiens
  misc_RNA (1)...(19): siRNA sense strand
ccucugauauccaggaaau

SEQ ID NO: 1756362 - RNA, 19 nt, Homo sapiens
  misc_RNA (1)...(19): siRNA sense strand
gagcuggaaauguuaaaga

SEQ ID NO: 1756363 - RNA, 19 nt, Homo sapiens
  misc_RNA (1)...(19): siRNA sense strand
aaacagccuucucauuaag

SEQ ID NO: 1756364 - RNA, 19 nt, Homo sapiens
  misc_RNA (1)...(19): siRNA sense strand
gcagagcuggaaauguuaa

SEQ ID NO: 1756365 - RNA, 19 nt, Homo sapiens
  misc_RNA (1)...(19): siRNA sense strand
gcagugagaacuacagaag

SEQ ID NO: 1756366 - RNA, 19 nt, Homo sapiens
  misc_RNA (1)...(19): siRNA sense strand
caacuuugcccgguccuuu

SEQ ID NO: 1756367 - RNA, 19 nt, Homo sapiens
  misc_RNA (1)...(19): siRNA sense strand
uaagggacauggagaagac

SEQ ID NO: 1756368 - RNA, 19 nt, Homo sapiens
  misc_RNA (1)...(19): siRNA sense strand
gcacggaugguggcaaaga

SEQ ID NO: 1756369 - RNA, 19 nt, Homo sapiens
  misc_RNA (1)...(19): siRNA sense strand
ggacauggagaagacugua

SEQ ID NO: 1756370 - RNA, 19 nt, Homo sapiens
  misc_RNA (1)...(19): siRNA sense strand
cgacagaugggagaugauu

SEQ ID NO: 1756371 - RNA, 19 nt, Homo sapiens
  misc_RNA (1)...(19): siRNA sense strand
ggaacuaaugcaacuggaa

SEQ ID NO: 1756372 - RNA, 19 nt, Homo sapiens
  misc_RNA (1)...(19): siRNA sense strand
ggcaaagccucccucugau

SEQ ID NO: 1756373 - RNA, 19 nt, Homo sapiens
  misc_RNA (1)...(19): siRNA sense strand
caucacuacuuggcugaaa

SEQ ID NO: 1756374 - RNA, 19 nt, Homo sapiens
  misc_RNA (1)...(19): siRNA sense strand
ggacauguuacaggagauu

SEQ ID NO: 1756375 - RNA, 19 nt, Homo sapiens
  misc_RNA (1)...(19): siRNA sense strand
aauggaaggugacaggaau

SEQ ID NO: 1756376 - RNA, 19 nt, Homo sapiens
  misc_RNA (1)...(19): siRNA sense strand
uggagaagacuguauugaa

SEQ ID NO: 1756377 - RNA, 19 nt, Homo sapiens
  misc_RNA (1)...(19): siRNA sense strand
uacaggagauuucaaacag

SEQ ID NO: 1756378 - RNA, 19 nt, Homo sapiens
  misc_RNA (1)...(19): siRNA sense strand
ucagcgccaucacuacuug

SEQ ID NO: 1756379 - RNA, 19 nt, Homo sapiens
  misc_RNA (1)...(19): siRNA sense strand
aagaaaaggugcauguuau

SEQ ID NO: 1756380 - RNA, 19 nt, Homo sapiens
  misc_RNA (1)...(19): siRNA sense strand
uauaaaccacccuauggaa

SEQ ID NO: 1756381 - RNA, 19 nt, Homo sapiens
  misc_RNA (1)...(19): siRNA sense strand
ggaggcagaaggcucaugu

SEQ ID NO: 1756382 - RNA, 19 nt, Homo sapiens
  misc_RNA (1)...(19): siRNA sense strand
gcauguuauugagaagaaa

SEQ ID NO: 1756383 - RNA, 19 nt, Homo sapiens
  misc_RNA (1)...(19): siRNA sense strand
caacgugagcagcaaggaa

SEQ ID NO: 1756384 - RNA, 19 nt, Homo sapiens
  misc_RNA (1)...(19): siRNA sense strand
gaaaaggugcauguuauug

SEQ ID NO: 1756385 - RNA, 19 nt, Homo sapiens
  misc_RNA (1)...(19): siRNA sense strand
cagcaaggaauuucugcaa

SEQ ID NO: 1756386 - RNA, 19 nt, Homo sapiens
  misc_RNA (1)...(19): siRNA sense strand
aaaggugcauguuauugag

SEQ ID NO: 1756387 - RNA, 19 nt, Homo sapiens
  misc_RNA (1)...(19): siRNA sense strand
uaaaccacccuauggaaag

SEQ ID NO: 1756388 - RNA, 19 nt, Homo sapiens
  misc_RNA (1)...(19): siRNA sense strand
gaagcagagcuggaaaugu

SEQ ID NO: 1756389 - RNA, 19 nt, Homo sapiens
  misc_RNA (1)...(19): siRNA sense strand
caagugucccaagauuuaa

SEQ ID NO: 1756390 - RNA, 19 nt, Homo sapiens
  misc_RNA (1)...(19): siRNA sense strand
ccaagaaccggaggcagaa

SEQ ID NO: 1756391 - RNA, 19 nt, Homo sapiens
  misc_RNA (1)...(19): siRNA sense strand
agcaaggaauuucugcaaa

SEQ ID NO: 1756392 - RNA, 19 nt, Homo sapiens
  misc_RNA (1)...(19): siRNA sense strand
gagcagugagaacuacaga

SEQ ID NO: 1756393 - RNA, 19 nt, Homo sapiens
  misc_RNA (1)...(19): siRNA sense strand
gguuagcgagugccaagaa

SEQ ID NO: 1756394 - RNA, 19 nt, Homo sapiens
  misc_RNA (1)...(19): siRNA sense strand
ucacuacaagcaaauggaa

SEQ ID NO: 1756395 - RNA, 19 nt, Homo sapiens
  misc_RNA (1)...(19): siRNA sense strand
ggagcaagugucccaagau

SEQ ID NO: 1756396 - RNA, 19 nt, Homo sapiens
  misc_RNA (1)...(19): siRNA sense strand
auaaaccacccuauggaaa

SEQ ID NO: 1756397 - RNA, 19 nt, Homo sapiens
  misc_RNA (1)...(19): siRNA sense strand
cacggaugguggcaaagaa

SEQ ID NO: 1756398 - RNA, 19 nt, Homo sapiens
  misc_RNA (1)...(19): siRNA sense strand
gcaacccacagcaggaaga

SEQ ID NO: 1756399 - RNA, 19 nt, Homo sapiens
  misc_RNA (1)...(19): siRNA sense strand
ugauauccaggaaauagaa

SEQ ID NO: 1756400 - RNA, 19 nt, Homo sapiens
  misc_RNA (1)...(19): siRNA sense strand
gagcagcaaggaauuucug

SEQ ID NO: 1756401 - RNA, 19 nt, Homo sapiens
  misc_RNA (1)...(19): siRNA sense strand
uaaugcaacuggaaaagga

SEQ ID NO: 1756402 - RNA, 19 nt, Homo sapiens
  misc_RNA (1)...(19): siRNA sense strand
gggacuggccgguaucaca

SEQ ID NO: 1756403 - RNA, 19 nt, Homo sapiens
  misc_RNA (1)...(19): siRNA sense strand
aggcacggaugguggcaaa

SEQ ID NO: 1756404 - RNA, 19 nt, Homo sapiens
  misc_RNA (1)...(19): siRNA sense strand
gcuggaaauguuaaagaug

SEQ ID NO: 1756405 - RNA, 19 nt, Homo sapiens
  misc_RNA (1)...(19): siRNA sense strand
ucagagcagugagaacuac

SEQ ID NO: 1756406 - RNA, 19 nt, Homo sapiens
  misc_RNA (1)...(19): siRNA sense strand
acagaugggagaugauuca

SEQ ID NO: 1756407 - RNA, 19 nt, Homo sapiens
  misc_RNA (1)...(19): siRNA sense strand
gcccagcuucgacgaggua

SEQ ID NO: 1756408 - RNA, 19 nt, Homo sapiens
  misc_RNA (1)...(19): siRNA sense strand
ugcauguuauugagaagaa

SEQ ID NO: 1756409 - RNA, 19 nt, Homo sapiens
  misc_RNA (1)...(19): siRNA sense strand
uuacaggagauuucaaaca

SEQ ID NO: 1756410 - RNA, 19 nt, Homo sapiens
  misc_RNA (1)...(19): siRNA sense strand
aaccucaaguggacauguu

SEQ ID NO: 1756411 - RNA, 19 nt, Homo sapiens
  misc_RNA (1)...(19): siRNA sense strand
ucaggugccuucgacagau

SEQ ID NO: 1756412 - RNA, 19 nt, Homo sapiens
  misc_RNA (1)...(19): siRNA sense strand
ggacuuccaccaguugagu

SEQ ID NO: 1756413 - RNA, 19 nt, Homo sapiens
  misc_RNA (1)...(19): siRNA sense strand
gcauuaguggucucuguca

SEQ ID NO: 1756414 - RNA, 19 nt, Homo sapiens
  misc_RNA (1)...(19): siRNA sense strand
ccaggaaauagaacugaga

SEQ ID NO: 1756415 - RNA, 19 nt, Homo sapiens
  misc_RNA (1)...(19): siRNA sense strand
ggaaggugacaggaauguu

SEQ ID NO: 1756416 - RNA, 19 nt, Homo sapiens
  misc_RNA (1)...(19): siRNA sense strand
ggaaaaggagcugguagaa

SEQ ID NO: 1756417 - RNA, 19 nt, Homo sapiens
  misc_RNA (1)...(19): siRNA sense strand
ugaagcagagcuggaaaug

SEQ ID NO: 1756418 - RNA, 19 nt, Homo sapiens
  misc_RNA (1)...(19): siRNA sense strand
augcugagguacaccaaug

SEQ ID NO: 1756419 - RNA, 19 nt, Homo sapiens
  misc_RNA (1)...(19): siRNA sense strand
caggugccuucgacagaug

SEQ ID NO: 1756420 - RNA, 19 nt, Homo sapiens
  misc_RNA (1)...(19): siRNA sense strand
cauuaguggucucugucaa

SEQ ID NO: 1756421 - RNA, 19 nt, Homo sapiens
  misc_RNA (1)...(19): siRNA sense strand
ugacacuuacaaggcauua

SEQ ID NO: 1756422 - RNA, 19 nt, Homo sapiens
  misc_RNA (1)...(19): siRNA sense strand
aaaaucugcugcugugguu

SEQ ID NO: 1756423 - RNA, 19 nt, Homo sapiens
  misc_RNA (1)...(19): siRNA sense strand
gucccgagcaucacuacaa

SEQ ID NO: 1756424 - RNA, 19 nt, Homo sapiens
  misc_RNA (1)...(19): siRNA sense strand
acauggagaagacuguauu

SEQ ID NO: 1756425 - RNA, 19 nt, Homo sapiens
  misc_RNA (1)...(19): siRNA sense strand
uuauaaaccacccuaugga

SEQ ID NO: 1756426 - RNA, 19 nt, Homo sapiens
  misc_RNA (1)...(19): siRNA sense strand
cauuaagggacauggagaa

SEQ ID NO: 1756427 - RNA, 19 nt, Homo sapiens
  misc_RNA (1)...(19): siRNA sense strand
guagaacgucaaccucaag

SEQ ID NO: 1756428 - RNA, 19 nt, Homo sapiens
  misc_RNA (1)...(19): siRNA sense strand
gagugucggagggaacuaa

SEQ ID NO: 1756429 - RNA, 19 nt, Homo sapiens
  misc_RNA (1)...(19): siRNA sense strand
gcucaugucaccgauccaa

SEQ ID NO: 1756430 - RNA, 19 nt, Homo sapiens
  misc_RNA (1)...(19): siRNA sense strand
cacaggagcuucacaauaa

SEQ ID NO: 1756431 - RNA, 19 nt, Homo sapiens
  misc_RNA (1)...(19): siRNA sense strand
gcaagugucccaagauuua

SEQ ID NO: 1756432 - RNA, 19 nt, Homo sapiens
  misc_RNA (1)...(19): siRNA sense strand
ccacagagcuccaaaguag

SEQ ID NO: 1756433 - RNA, 19 nt, Homo sapiens
  misc_RNA (1)...(19): siRNA sense strand
ucaaacagccuucucauua

SEQ ID NO: 1756434 - RNA, 19 nt, Homo sapiens
  misc_RNA (1)...(19): siRNA sense strand
caaacagccuucucauuaa

SEQ ID NO: 1756435 - RNA, 19 nt, Homo sapiens
  misc_RNA (1)...(19): siRNA sense strand
gcacaggagcuucacaaua

SEQ ID NO: 1756436 - RNA, 19 nt, Homo sapiens
  misc_RNA (1)...(19): siRNA sense strand
ggagaagacuguauugaag

SEQ ID NO: 1756437 - RNA, 19 nt, Homo sapiens
  misc_RNA (1)...(19): siRNA sense strand
gagcaagugucccaagauu

SEQ ID NO: 1756438 - RNA, 19 nt, Homo sapiens
  misc_RNA (1)...(19): siRNA sense strand
gagcaucacuacaagcaaa

SEQ ID NO: 1756439 - RNA, 19 nt, Homo sapiens
  misc_RNA (1)...(19): siRNA sense strand
gaaauagaacugagaguga

SEQ ID NO: 1756440 - RNA, 19 nt, Homo sapiens
  misc_RNA (1)...(19): siRNA sense strand
aagcagagcuggaaauguu

SEQ ID NO: 1756441 - RNA, 19 nt, Homo sapiens
  misc_RNA (1)...(19): siRNA sense strand
gaacuaaugcaacuggaaa

SEQ ID NO: 1756442 - RNA, 19 nt, Homo sapiens
  misc_RNA (1)...(19): siRNA sense strand
gcaaagccucccucugaua

SEQ ID NO: 1756443 - RNA, 19 nt, Homo sapiens
  misc_RNA (1)...(19): siRNA sense strand
gaagaaaaggugcauguua

SEQ ID NO: 1756444 - RNA, 19 nt, Homo sapiens
  misc_RNA (1)...(19): siRNA sense strand
cagcugaacucugauauca

SEQ ID NO: 1756445 - RNA, 19 nt, Homo sapiens
  misc_RNA (1)...(19): siRNA sense strand
gauaucagcgccaucacua

SEQ ID NO: 1756446 - RNA, 19 nt, Homo sapiens
  misc_RNA (1)...(19): siRNA sense strand
gcaaggaauuucugcaaac

SEQ ID NO: 1756447 - RNA, 19 nt, Homo sapiens
  misc_RNA (1)...(19): siRNA sense strand
ugcaacagcugaacucuga

SEQ ID NO: 1756448 - RNA, 19 nt, Homo sapiens
  misc_RNA (1)...(19): siRNA sense strand
gcacucaggccaacaacuu

SEQ ID NO: 1756449 - RNA, 19 nt, Homo sapiens
  misc_RNA (1)...(19): siRNA sense strand
gaagagacugcaggagaua

SEQ ID NO: 1756450 - RNA, 19 nt, Homo sapiens
  misc_RNA (1)...(19): siRNA sense strand
gagaagaaacucaaacagu

SEQ ID NO: 1756451 - RNA, 19 nt, Homo sapiens
  misc_RNA (1)...(19): siRNA sense strand
ggagggaacuaaugcaacu

SEQ ID NO: 1756452 - RNA, 19 nt, Homo sapiens
  misc_RNA (1)...(19): siRNA sense strand
ggaccagccuccugcaaca

SEQ ID NO: 1756453 - RNA, 19 nt, Homo sapiens
  misc_RNA (1)...(19): siRNA sense strand
gaaggugacaggaauguuc

SEQ ID NO: 1756454 - RNA, 19 nt, Homo sapiens
  misc_RNA (1)...(19): siRNA sense strand
caacagcugaacucugaua

SEQ ID NO: 1756455 - RNA, 19 nt, Homo sapiens
  misc_RNA (1)...(19): siRNA sense strand
uggcaaagccucccucuga

SEQ ID NO: 1756456 - RNA, 19 nt, Homo sapiens
  misc_RNA (1)...(19): siRNA sense strand
aaauagaacugagagugaa

SEQ ID NO: 1756457 - RNA, 19 nt, Homo sapiens
  misc_RNA (1)...(19): siRNA sense strand
ugaagagacugcaggagau

SEQ ID NO: 1756458 - RNA, 19 nt, Homo sapiens
  misc_RNA (1)...(19): siRNA sense strand
gguagaacgucaaccucaa

SEQ ID NO: 1756459 - RNA, 19 nt, Homo sapiens
  misc_RNA (1)...(19): siRNA sense strand
cuauggaaagcuacuauua

SEQ ID NO: 1756460 - RNA, 19 nt, Homo sapiens
  misc_RNA (1)...(19): siRNA sense strand
caaagccucccucugauau

SEQ ID NO: 1756461 - RNA, 19 nt, Homo sapiens
  misc_RNA (1)...(19): siRNA sense strand
ccucugauauccaggaaau

SEQ ID NO: 1756462 - RNA, 19 nt, Homo sapiens
  misc_RNA (1)...(19): siRNA sense strand
gagcuggaaauguuaaaga

SEQ ID NO: 1756463 - RNA, 19 nt, Homo sapiens
  misc_RNA (1)...(19): siRNA sense strand
aaacagccuucucauuaag

SEQ ID NO: 1756464 - RNA, 19 nt, Homo sapiens
  misc_RNA (1)...(19): siRNA sense strand
gcagagcuggaaauguuaa

SEQ ID NO: 1756465 - RNA, 19 nt, Homo sapiens
  misc_RNA (1)...(19): siRNA sense strand
gcagugagaacuacagaag

SEQ ID NO: 1756466 - RNA, 19 nt, Homo sapiens
  misc_RNA (1)...(19): siRNA sense strand
caacuuugcccgguccuuu

SEQ ID NO: 1756467 - RNA, 19 nt, Homo sapiens
  misc_RNA (1)...(19): siRNA sense strand
uaagggacauggagaagac

SEQ ID NO: 1756468 - RNA, 19 nt, Homo sapiens
  misc_RNA (1)...(19): siRNA sense strand
gcacggaugguggcaaaga

SEQ ID NO: 1756469 - RNA, 19 nt, Homo sapiens
  misc_RNA (1)...(19): siRNA sense strand
ggacauggagaagacugua

SEQ ID NO: 1756470 - RNA, 19 nt, Homo sapiens
  misc_RNA (1)...(19): siRNA sense strand
cgacagaugggagaugauu

SEQ ID NO: 1756471 - RNA, 19 nt, Homo sapiens
  misc_RNA (1)...(19): siRNA sense strand
ggaacuaaugcaacuggaa

SEQ ID NO: 1756472 - RNA, 19 nt, Homo sapiens
  misc_RNA (1)...(19): siRNA sense strand
ggcaaagccucccucugau

SEQ ID NO: 1756473 - RNA, 19 nt, Homo sapiens
  misc_RNA (1)...(19): siRNA sense strand
caucacuacuuggcugaaa

SEQ ID NO: 1756474 - RNA, 19 nt, Homo sapiens
  misc_RNA (1)...(19): siRNA sense strand
ggacauguuacaggagauu

SEQ ID NO: 1756475 - RNA, 19 nt, Homo sapiens
  misc_RNA (1)...(19): siRNA sense strand
aauggaaggugacaggaau

SEQ ID NO: 1756476 - RNA, 19 nt, Homo sapiens
  misc_RNA (1)...(19): siRNA sense strand
uggagaagacuguauugaa

SEQ ID NO: 1756477 - RNA, 19 nt, Homo sapiens
  misc_RNA (1)...(19): siRNA sense strand
uacaggagauuucaaacag

SEQ ID NO: 1756478 - RNA, 19 nt, Homo sapiens
  misc_RNA (1)...(19): siRNA sense strand
ucagcgccaucacuacuug

SEQ ID NO: 1756479 - RNA, 19 nt, Homo sapiens
  misc_RNA (1)...(19): siRNA sense strand
aagaaaaggugcauguuau

SEQ ID NO: 1756480 - RNA, 19 nt, Homo sapiens
  misc_RNA (1)...(19): siRNA sense strand
uauaaaccacccuauggaa

SEQ ID NO: 1756481 - RNA, 19 nt, Homo sapiens
  misc_RNA (1)...(19): siRNA sense strand
ggaggcagaaggcucaugu

SEQ ID NO: 1756482 - RNA, 19 nt, Homo sapiens
  misc_RNA (1)...(19): siRNA sense strand
gcauguuauugagaagaaa

SEQ ID NO: 1756483 - RNA, 19 nt, Homo sapiens
  misc_RNA (1)...(19): siRNA sense strand
caacgugagcagcaaggaa

SEQ ID NO: 1756484 - RNA, 19 nt, Homo sapiens
  misc_RNA (1)...(19): siRNA sense strand
gaaaaggugcauguuauug

SEQ ID NO: 1756485 - RNA, 19 nt, Homo sapiens
  misc_RNA (1)...(19): siRNA sense strand
cagcaaggaauuucugcaa

SEQ ID NO: 1756486 - RNA, 19 nt, Homo sapiens
  misc_RNA (1)...(19): siRNA sense strand
aaaggugcauguuauugag

SEQ ID NO: 1756487 - RNA, 19 nt, Homo sapiens
  misc_RNA (1)...(19): siRNA sense strand
uaaaccacccuauggaaag

SEQ ID NO: 1756488 - RNA, 19 nt, Homo sapiens
  misc_RNA (1)...(19): siRNA sense strand
gaagcagagcuggaaaugu

SEQ ID NO: 1756489 - RNA, 19 nt, Homo sapiens
  misc_RNA (1)...(19): siRNA sense strand
caagugucccaagauuuaa

SEQ ID NO: 1756490 - RNA, 19 nt, Homo sapiens
  misc_RNA (1)...(19): siRNA sense strand
ccaagaaccggaggcagaa

SEQ ID NO: 1756491 - RNA, 19 nt, Homo sapiens
  misc_RNA (1)...(19): siRNA sense strand
agcaaggaauuucugcaaa

SEQ ID NO: 1756492 - RNA, 19 nt, Homo sapiens
  misc_RNA (1)...(19): siRNA sense strand
gagcagugagaacuacaga

SEQ ID NO: 1756493 - RNA, 19 nt, Homo sapiens
  misc_RNA (1)...(19): siRNA sense strand
gguuagcgagugccaagaa

SEQ ID NO: 1756494 - RNA, 19 nt, Homo sapiens
  misc_RNA (1)...(19): siRNA sense strand
ucacuacaagcaaauggaa

SEQ ID NO: 1756495 - RNA, 19 nt, Homo sapiens
  misc_RNA (1)...(19): siRNA sense strand
ggagcaagugucccaagau

SEQ ID NO: 1756496 - RNA, 19 nt, Homo sapiens
  misc_RNA (1)...(19): siRNA sense strand
auaaaccacccuauggaaa

SEQ ID NO: 1756497 - RNA, 19 nt, Homo sapiens
  misc_RNA (1)...(19): siRNA sense strand
cacggaugguggcaaagaa

SEQ ID NO: 1756498 - RNA, 19 nt, Homo sapiens
  misc_RNA (1)...(19): siRNA sense strand
gcaacccacagcaggaaga

SEQ ID NO: 1756499 - RNA, 19 nt, Homo sapiens
  misc_RNA (1)...(19): siRNA sense strand
ugauauccaggaaauagaa

SEQ ID NO: 1756500 - RNA, 19 nt, Homo sapiens
  misc_RNA (1)...(19): siRNA sense strand
gagcagcaaggaauuucug

SEQ ID NO: 1756501 - RNA, 19 nt, Homo sapiens
  misc_RNA (1)...(19): siRNA sense strand
uaaugcaacuggaaaagga

SEQ ID NO: 1756502 - RNA, 19 nt, Homo sapiens
  misc_RNA (1)...(19): siRNA sense strand
gggacuggccgguaucaca

SEQ ID NO: 1756503 - RNA, 19 nt, Homo sapiens
  misc_RNA (1)...(19): siRNA sense strand
aggcacggaugguggcaaa

SEQ ID NO: 1756504 - RNA, 19 nt, Homo sapiens
  misc_RNA (1)...(19): siRNA sense strand
gcuggaaauguuaaagaug

SEQ ID NO: 1756505 - RNA, 19 nt, Homo sapiens
  misc_RNA (1)...(19): siRNA sense strand
ucagagcagugagaacuac

SEQ ID NO: 1756506 - RNA, 19 nt, Homo sapiens
  misc_RNA (1)...(19): siRNA sense strand
acagaugggagaugauuca

SEQ ID NO: 1756507 - RNA, 19 nt, Homo sapiens
  misc_RNA (1)...(19): siRNA sense strand
gcccagcuucgacgaggua

SEQ ID NO: 1756508 - RNA, 19 nt, Homo sapiens
  misc_RNA (1)...(19): siRNA sense strand
ugcauguuauugagaagaa

SEQ ID NO: 1756509 - RNA, 19 nt, Homo sapiens
  misc_RNA (1)...(19): siRNA sense strand
uuacaggagauuucaaaca

SEQ ID NO: 1756510 - RNA, 19 nt, Homo sapiens
  misc_RNA (1)...(19): siRNA sense strand
aaccucaaguggacauguu

SEQ ID NO: 1756511 - RNA, 19 nt, Homo sapiens
  misc_RNA (1)...(19): siRNA sense strand
ucaggugccuucgacagau

SEQ ID NO: 1756512 - RNA, 19 nt, Homo sapiens
  misc_RNA (1)...(19): siRNA sense strand
ggacuuccaccaguugagu

SEQ ID NO: 1756513 - RNA, 19 nt, Homo sapiens
  misc_RNA (1)...(19): siRNA sense strand
gcauuaguggucucuguca

SEQ ID NO: 1756514 - RNA, 19 nt, Homo sapiens
  misc_RNA (1)...(19): siRNA sense strand
ccaggaaauagaacugaga

SEQ ID NO: 1756515 - RNA, 19 nt, Homo sapiens
  misc_RNA (1)...(19): siRNA sense strand
ggaaggugacaggaauguu

SEQ ID NO: 1756516 - RNA, 19 nt, Homo sapiens
  misc_RNA (1)...(19): siRNA sense strand
ggaaaaggagcugguagaa

SEQ ID NO: 1756517 - RNA, 19 nt, Homo sapiens
  misc_RNA (1)...(19): siRNA sense strand
ugaagcagagcuggaaaug

SEQ ID NO: 1756518 - RNA, 19 nt, Homo sapiens
  misc_RNA (1)...(19): siRNA sense strand
augcugagguacaccaaug

SEQ ID NO: 1756519 - RNA, 19 nt, Homo sapiens
  misc_RNA (1)...(19): siRNA sense strand
caggugccuucgacagaug

SEQ ID NO: 1756520 - RNA, 19 nt, Homo sapiens
  misc_RNA (1)...(19): siRNA sense strand
cauuaguggucucugucaa

SEQ ID NO: 1756521 - RNA, 19 nt, Homo sapiens
  misc_RNA (1)...(19): siRNA sense strand
ugacacuuacaaggcauua

SEQ ID NO: 1756522 - RNA, 19 nt, Homo sapiens
  misc_RNA (1)...(19): siRNA sense strand
aaaaucugcugcugugguu

SEQ ID NO: 1756523 - RNA, 19 nt, Homo sapiens
  misc_RNA (1)...(19): siRNA sense strand
gucccgagcaucacuacaa

SEQ ID NO: 1756524 - RNA, 19 nt, Homo sapiens
  misc_RNA (1)...(19): siRNA sense strand
acauggagaagacuguauu

SEQ ID NO: 1756525 - RNA, 19 nt, Homo sapiens
  misc_RNA (1)...(19): siRNA sense strand
uuauaaaccacccuaugga

SEQ ID NO: 1756526 - RNA, 19 nt, Homo sapiens
  misc_RNA (1)...(19): siRNA sense strand
cauuaagggacauggagaa

SEQ ID NO: 1756527 - RNA, 19 nt, Homo sapiens
  misc_RNA (1)...(19): siRNA sense strand
guagaacgucaaccucaag

SEQ ID NO: 1756528 - RNA, 19 nt, Homo sapiens
  misc_RNA (1)...(19): siRNA sense strand
gagugucggagggaacuaa

SEQ ID NO: 1756529 - RNA, 19 nt, Homo sapiens
  misc_RNA (1)...(19): siRNA sense strand
gcucaugucaccgauccaa

SEQ ID NO: 1756530 - RNA, 19 nt, Homo sapiens
  misc_RNA (1)...(19): siRNA sense strand
cacaggagcuucacaauaa

SEQ ID NO: 1756531 - RNA, 19 nt, Homo sapiens
  misc_RNA (1)...(19): siRNA sense strand
gcaagugucccaagauuua

SEQ ID NO: 1756532 - RNA, 19 nt, Homo sapiens
  misc_RNA (1)...(19): siRNA sense strand
ccacagagcuccaaaguag

SEQ ID NO: 1756533 - RNA, 19 nt, Homo sapiens
  misc_RNA (1)...(19): siRNA sense strand
ucaaacagccuucucauua

SEQ ID NO: 1756534 - RNA, 19 nt, Homo sapiens
  misc_RNA (1)...(19): siRNA sense strand
caaacagccuucucauuaa

SEQ ID NO: 1756535 - RNA, 19 nt, Homo sapiens
  misc_RNA (1)...(19): siRNA sense strand
gcacaggagcuucacaaua

SEQ ID NO: 1756536 - RNA, 19 nt, Homo sapiens
  misc_RNA (1)...(19): siRNA sense strand
ggagaagacuguauugaag

SEQ ID NO: 1756537 - RNA, 19 nt, Homo sapiens
  misc_RNA (1)...(19): siRNA sense strand
gagcaagugucccaagauu

SEQ ID NO: 1756538 - RNA, 19 nt, Homo sapiens
  misc_RNA (1)...(19): siRNA sense strand
gagcaucacuacaagcaaa

SEQ ID NO: 1756539 - RNA, 19 nt, Homo sapiens
  misc_RNA (1)...(19): siRNA sense strand
gaaauagaacugagaguga

SEQ ID NO: 1756540 - RNA, 19 nt, Homo sapiens
  misc_RNA (1)...(19): siRNA sense strand
aagcagagcuggaaauguu

SEQ ID NO: 1756541 - RNA, 19 nt, Homo sapiens
  misc_RNA (1)...(19): siRNA sense strand
gaacuaaugcaacuggaaa

SEQ ID NO: 1756542 - RNA, 19 nt, Homo sapiens
  misc_RNA (1)...(19): siRNA sense strand
gcaaagccucccucugaua

SEQ ID NO: 1756543 - RNA, 19 nt, Homo sapiens
  misc_RNA (1)...(19): siRNA sense strand
gaagaaaaggugcauguua

SEQ ID NO: 1756544 - RNA, 19 nt, Homo sapiens
  misc_RNA (1)...(19): siRNA sense strand
cagcugaacucugauauca

SEQ ID NO: 1756545 - RNA, 19 nt, Homo sapiens
  misc_RNA (1)...(19): siRNA sense strand
gauaucagcgccaucacua

SEQ ID NO: 1756546 - RNA, 19 nt, Homo sapiens
  misc_RNA (1)...(19): siRNA sense strand
gcaaggaauuucugcaaac

SEQ ID NO: 1756547 - RNA, 19 nt, Homo sapiens
  misc_RNA (1)...(19): siRNA sense strand
ugcaacagcugaacucuga

SEQ ID NO: 1756548 - RNA, 19 nt, Homo sapiens
  misc_RNA (1)...(19): siRNA sense strand
gcacucaggccaacaacuu

SEQ ID NO: 1756549 - RNA, 19 nt, Homo sapiens
  misc_RNA (1)...(19): siRNA sense strand
gaagagacugcaggagaua

SEQ ID NO: 1756550 - RNA, 19 nt, Homo sapiens
  misc_RNA (1)...(19): siRNA sense strand
gagaagaaacucaaacagu

SEQ ID NO: 1756551 - RNA, 19 nt, Homo sapiens
  misc_RNA (1)...(19): siRNA sense strand
ggagggaacuaaugcaacu

SEQ ID NO: 1756552 - RNA, 19 nt, Homo sapiens
  misc_RNA (1)...(19): siRNA sense strand
ggaccagccuccugcaaca

SEQ ID NO: 1756553 - RNA, 19 nt, Homo sapiens
  misc_RNA (1)...(19): siRNA sense strand
gaaggugacaggaauguuc

SEQ ID NO: 1756554 - RNA, 19 nt, Homo sapiens
  misc_RNA (1)...(19): siRNA sense strand
caacagcugaacucugaua

SEQ ID NO: 1756555 - RNA, 19 nt, Homo sapiens
  misc_RNA (1)...(19): siRNA sense strand
uggcaaagccucccucuga

SEQ ID NO: 1756556 - RNA, 19 nt, Homo sapiens
  misc_RNA (1)...(19): siRNA sense strand
aaauagaacugagagugaa

SEQ ID NO: 1756557 - RNA, 19 nt, Homo sapiens
  misc_RNA (1)...(19): siRNA sense strand
ugaagagacugcaggagau

SEQ ID NO: 1756558 - RNA, 19 nt, Homo sapiens
  misc_RNA (1)...(19): siRNA sense strand
gguagaacgucaaccucaa

SEQ ID NO: 1756559 - RNA, 19 nt, Homo sapiens
  misc_RNA (1)...(19): siRNA sense strand
cuauggaaagcuacuauua

SEQ ID NO: 1756560 - RNA, 19 nt, Homo sapiens
  misc_RNA (1)...(19): siRNA sense strand
caaagccucccucugauau

SEQ ID NO: 1756561 - RNA, 19 nt, Homo sapiens
  misc_RNA (1)...(19): siRNA sense strand
ccucugauauccaggaaau

SEQ ID NO: 1756562 - RNA, 19 nt, Homo sapiens
  misc_RNA (1)...(19): siRNA sense strand
gagcuggaaauguuaaaga

SEQ ID NO: 1756563 - RNA, 19 nt, Homo sapiens
  misc_RNA (1)...(19): siRNA sense strand
aaacagccuucucauuaag

SEQ ID NO: 1756564 - RNA, 19 nt, Homo sapiens
  misc_RNA (1)...(19): siRNA sense strand
gcagagcuggaaauguuaa

SEQ ID NO: 1756565 - RNA, 19 nt, Homo sapiens
  misc_RNA (1)...(19): siRNA sense strand
gcagugagaacuacagaag

SEQ ID NO: 1756566 - RNA, 19 nt, Homo sapiens
  misc_RNA (1)...(19): siRNA sense strand
caacuuugcccgguccuuu

SEQ ID NO: 1756567 - RNA, 19 nt, Homo sapiens
  misc_RNA (1)...(19): siRNA sense strand
uaagggacauggagaagac

SEQ ID NO: 1756568 - RNA, 19 nt, Homo sapiens
  misc_RNA (1)...(19): siRNA sense strand
gcacggaugguggcaaaga

SEQ ID NO: 1756569 - RNA, 19 nt, Homo sapiens
  misc_RNA (1)...(19): siRNA sense strand
ggacauggagaagacugua

SEQ ID NO: 1756570 - RNA, 19 nt, Homo sapiens
  misc_RNA (1)...(19): siRNA sense strand
cgacagaugggagaugauu

SEQ ID NO: 1756571 - RNA, 19 nt, Homo sapiens
  misc_RNA (1)...(19): siRNA sense strand
ggaacuaaugcaacuggaa

SEQ ID NO: 1756572 - RNA, 19 nt, Homo sapiens
  misc_RNA (1)...(19): siRNA sense strand
ggcaaagccucccucugau

SEQ ID NO: 1756573 - RNA, 19 nt, Homo sapiens
  misc_RNA (1)...(19): siRNA sense strand
caucacuacuuggcugaaa

SEQ ID NO: 1756574 - RNA, 19 nt, Homo sapiens
  misc_RNA (1)...(19): siRNA sense strand
ggacauguuacaggagauu

SEQ ID NO: 1756575 - RNA, 19 nt, Homo sapiens
  misc_RNA (1)...(19): siRNA sense strand
aauggaaggugacaggaau

SEQ ID NO: 1756576 - RNA, 19 nt, Homo sapiens
  misc_RNA (1)...(19): siRNA sense strand
uggagaagacuguauugaa

SEQ ID NO: 1756577 - RNA, 19 nt, Homo sapiens
  misc_RNA (1)...(19): siRNA sense strand
uacaggagauuucaaacag

SEQ ID NO: 1756578 - RNA, 19 nt, Homo sapiens
  misc_RNA (1)...(19): siRNA sense strand
ucagcgccaucacuacuug

SEQ ID NO: 1756579 - RNA, 19 nt, Homo sapiens
  misc_RNA (1)...(19): siRNA sense strand
aagaaaaggugcauguuau

SEQ ID NO: 1756580 - RNA, 19 nt, Homo sapiens
  misc_RNA (1)...(19): siRNA sense strand
uauaaaccacccuauggaa

SEQ ID NO: 1756581 - RNA, 19 nt, Homo sapiens
  misc_RNA (1)...(19): siRNA sense strand
ggaggcagaaggcucaugu

SEQ ID NO: 1756582 - RNA, 19 nt, Homo sapiens
  misc_RNA (1)...(19): siRNA sense strand
gcauguuauugagaagaaa

SEQ ID NO: 1756583 - RNA, 19 nt, Homo sapiens
  misc_RNA (1)...(19): siRNA sense strand
caacgugagcagcaaggaa

SEQ ID NO: 1756584 - RNA, 19 nt, Homo sapiens
  misc_RNA (1)...(19): siRNA sense strand
gaaaaggugcauguuauug

SEQ ID NO: 1756585 - RNA, 19 nt, Homo sapiens
  misc_RNA (1)...(19): siRNA sense strand
cagcaaggaauuucugcaa

SEQ ID NO: 1756586 - RNA, 19 nt, Homo sapiens
  misc_RNA (1)...(19): siRNA sense strand
aaaggugcauguuauugag

SEQ ID NO: 1756587 - RNA, 19 nt, Homo sapiens
  misc_RNA (1)...(19): siRNA sense strand
uaaaccacccuauggaaag

SEQ ID NO: 1756588 - RNA, 19 nt, Homo sapiens
  misc_RNA (1)...(19): siRNA sense strand
gaagcagagcuggaaaugu

SEQ ID NO: 1756589 - RNA, 19 nt, Homo sapiens
  misc_RNA (1)...(19): siRNA sense strand
caagugucccaagauuuaa

SEQ ID NO: 1756590 - RNA, 19 nt, Homo sapiens
  misc_RNA (1)...(19): siRNA sense strand
ccaagaaccggaggcagaa

SEQ ID NO: 1756591 - RNA, 19 nt, Homo sapiens
  misc_RNA (1)...(19): siRNA sense strand
agcaaggaauuucugcaaa

SEQ ID NO: 1756592 - RNA, 19 nt, Homo sapiens
  misc_RNA (1)...(19): siRNA sense strand
gagcagugagaacuacaga

SEQ ID NO: 1756593 - RNA, 19 nt, Homo sapiens
  misc_RNA (1)...(19): siRNA sense strand
gguuagcgagugccaagaa

SEQ ID NO: 1756594 - RNA, 19 nt, Homo sapiens
  misc_RNA (1)...(19): siRNA sense strand
ucacuacaagcaaauggaa

SEQ ID NO: 1756595 - RNA, 19 nt, Homo sapiens
  misc_RNA (1)...(19): siRNA sense strand
ggagcaagugucccaagau

SEQ ID NO: 1756596 - RNA, 19 nt, Homo sapiens
  misc_RNA (1)...(19): siRNA sense strand
auaaaccacccuauggaaa

SEQ ID NO: 1756597 - RNA, 19 nt, Homo sapiens
  misc_RNA (1)...(19): siRNA sense strand
cacggaugguggcaaagaa

SEQ ID NO: 1756598 - RNA, 19 nt, Homo sapiens
  misc_RNA (1)...(19): siRNA sense strand
gcaacccacagcaggaaga

SEQ ID NO: 1756599 - RNA, 19 nt, Homo sapiens
  misc_RNA (1)...(19): siRNA sense strand
ugauauccaggaaauagaa

SEQ ID NO: 1756600 - RNA, 19 nt, Homo sapiens
  misc_RNA (1)...(19): siRNA sense strand
gagcagcaaggaauuucug

SEQ ID NO: 1756601 - RNA, 19 nt, Homo sapiens
  misc_RNA (1)...(19): siRNA sense strand
uaaugcaacuggaaaagga

SEQ ID NO: 1756602 - RNA, 19 nt, Homo sapiens
  misc_RNA (1)...(19): siRNA sense strand
gggacuggccgguaucaca

SEQ ID NO: 1756603 - RNA, 19 nt, Homo sapiens
  misc_RNA (1)...(19): siRNA sense strand
aggcacggaugguggcaaa

SEQ ID NO: 1756604 - RNA, 19 nt, Homo sapiens
  misc_RNA (1)...(19): siRNA sense strand
gcuggaaauguuaaagaug

SEQ ID NO: 1756605 - RNA, 19 nt, Homo sapiens
  misc_RNA (1)...(19): siRNA sense strand
ucagagcagugagaacuac

SEQ ID NO: 1756606 - RNA, 19 nt, Homo sapiens
  misc_RNA (1)...(19): siRNA sense strand
acagaugggagaugauuca

SEQ ID NO: 1756607 - RNA, 19 nt, Homo sapiens
  misc_RNA (1)...(19): siRNA sense strand
gcccagcuucgacgaggua

SEQ ID NO: 1756608 - RNA, 19 nt, Homo sapiens
  misc_RNA (1)...(19): siRNA sense strand
ugcauguuauugagaagaa

SEQ ID NO: 1756609 - RNA, 19 nt, Homo sapiens
  misc_RNA (1)...(19): siRNA sense strand
uuacaggagauuucaaaca

SEQ ID NO: 1756610 - RNA, 19 nt, Homo sapiens
  misc_RNA (1)...(19): siRNA sense strand
aaccucaaguggacauguu

SEQ ID NO: 1756611 - RNA, 19 nt, Homo sapiens
  misc_RNA (1)...(19): siRNA sense strand
ucaggugccuucgacagau

SEQ ID NO: 1756612 - RNA, 19 nt, Homo sapiens
  misc_RNA (1)...(19): siRNA sense strand
ggacuuccaccaguugagu

SEQ ID NO: 1756613 - RNA, 19 nt, Homo sapiens
  misc_RNA (1)...(19): siRNA sense strand
gcauuaguggucucuguca

SEQ ID NO: 1756614 - RNA, 19 nt, Homo sapiens
  misc_RNA (1)...(19): siRNA sense strand
ccaggaaauagaacugaga

SEQ ID NO: 1756615 - RNA, 19 nt, Homo sapiens
  misc_RNA (1)...(19): siRNA sense strand
ggaaggugacaggaauguu

SEQ ID NO: 1756616 - RNA, 19 nt, Homo sapiens
  misc_RNA (1)...(19): siRNA sense strand
ggaaaaggagcugguagaa

SEQ ID NO: 1756617 - RNA, 19 nt, Homo sapiens
  misc_RNA (1)...(19): siRNA sense strand
ugaagcagagcuggaaaug

SEQ ID NO: 1756618 - RNA, 19 nt, Homo sapiens
  misc_RNA (1)...(19): siRNA sense strand
augcugagguacaccaaug

SEQ ID NO: 1756619 - RNA, 19 nt, Homo sapiens
  misc_RNA (1)...(19): siRNA sense strand
caggugccuucgacagaug

SEQ ID NO: 1756620 - RNA, 19 nt, Homo sapiens
  misc_RNA (1)...(19): siRNA sense strand
cauuaguggucucugucaa

SEQ ID NO: 1756621 - RNA, 19 nt, Homo sapiens
  misc_RNA (1)...(19): siRNA sense strand
ugacacuuacaaggcauua

SEQ ID NO: 1756622 - RNA, 19 nt, Homo sapiens
  misc_RNA (1)...(19): siRNA sense strand
aaaaucugcugcugugguu

SEQ ID NO: 1756623 - RNA, 19 nt, Homo sapiens
  misc_RNA (1)...(19): siRNA sense strand
gucccgagcaucacuacaa

SEQ ID NO: 1756624 - RNA, 19 nt, Homo sapiens
  misc_RNA (1)...(19): siRNA sense strand
acauggagaagacuguauu

SEQ ID NO: 1756625 - RNA, 19 nt, Homo sapiens
  misc_RNA (1)...(19): siRNA sense strand
uuauaaaccacccuaugga

SEQ ID NO: 1756626 - RNA, 19 nt, Homo sapiens
  misc_RNA (1)...(19): siRNA sense strand
cauuaagggacauggagaa

SEQ ID NO: 1756627 - RNA, 19 nt, Homo sapiens
  misc_RNA (1)...(19): siRNA sense strand
guagaacgucaaccucaag

SEQ ID NO: 1756628 - RNA, 19 nt, Homo sapiens
  misc_RNA (1)...(19): siRNA sense strand
gagugucggagggaacuaa

SEQ ID NO: 1756629 - RNA, 19 nt, Homo sapiens
  misc_RNA (1)...(19): siRNA sense strand
gcucaugucaccgauccaa

SEQ ID NO: 1756630 - RNA, 19 nt, Homo sapiens
  misc_RNA (1)...(19): siRNA sense strand
gaacuuaccugccucuuca

SEQ ID NO: 1756631 - RNA, 19 nt, Homo sapiens
  misc_RNA (1)...(19): siRNA sense strand
ccacagggcucuucauggu

SEQ ID NO: 1756632 - RNA, 19 nt, Homo sapiens
  misc_RNA (1)...(19): siRNA sense strand
gugcagguugcuaucaaua

SEQ ID NO: 1756633 - RNA, 19 nt, Homo sapiens
  misc_RNA (1)...(19): siRNA sense strand
ggaaacugggccuggauuc

SEQ ID NO: 1756634 - RNA, 19 nt, Homo sapiens
  misc_RNA (1)...(19): siRNA sense strand
ccucugcgccucuguacaa

SEQ ID NO: 1756635 - RNA, 19 nt, Homo sapiens
  misc_RNA (1)...(19): siRNA sense strand
ccaaaggggccaaaacuga

SEQ ID NO: 1756636 - RNA, 19 nt, Homo sapiens
  misc_RNA (1)...(19): siRNA sense strand
gcagguugcuaucaauacc

SEQ ID NO: 1756637 - RNA, 19 nt, Homo sapiens
  misc_RNA (1)...(19): siRNA sense strand
ggucuccgcguacgggauu

SEQ ID NO: 1756638 - RNA, 19 nt, Homo sapiens
  misc_RNA (1)...(19): siRNA sense strand
ggucauguucuccaucauc

SEQ ID NO: 1756639 - RNA, 19 nt, Homo sapiens
  misc_RNA (1)...(19): siRNA sense strand
uuaccugccucuucaugca

SEQ ID NO: 1756640 - RNA, 19 nt, Homo sapiens
  misc_RNA (1)...(19): siRNA sense strand
gucauguucuccaucaucu

SEQ ID NO: 1756641 - RNA, 19 nt, Homo sapiens
  misc_RNA (1)...(19): siRNA sense strand
caucaucuccauggacuuc

SEQ ID NO: 1756642 - RNA, 19 nt, Homo sapiens
  misc_RNA (1)...(19): siRNA sense strand
gccuucggcuaccugcaaa

SEQ ID NO: 1756643 - RNA, 19 nt, Homo sapiens
  misc_RNA (1)...(19): siRNA sense strand
cuggcuaccucauguccuu

SEQ ID NO: 1756644 - RNA, 19 nt, Homo sapiens
  misc_RNA (1)...(19): siRNA sense strand
uggugaagguggccuccaa

SEQ ID NO: 1756645 - RNA, 19 nt, Homo sapiens
  misc_RNA (1)...(19): siRNA sense strand
ugccagacgucccgaggau

SEQ ID NO: 1756646 - RNA, 19 nt, Homo sapiens
  misc_RNA (1)...(19): siRNA sense strand
gguccucggucaucuugcu

SEQ ID NO: 1756647 - RNA, 19 nt, Homo sapiens
  misc_RNA (1)...(19): siRNA sense strand
gaacuuaccugccucuuca

SEQ ID NO: 1756648 - RNA, 19 nt, Homo sapiens
  misc_RNA (1)...(19): siRNA sense strand
ccacagggcucuucauggu

SEQ ID NO: 1756649 - RNA, 19 nt, Homo sapiens
  misc_RNA (1)...(19): siRNA sense strand
gugcagguugcuaucaaua

SEQ ID NO: 1756650 - RNA, 19 nt, Homo sapiens
  misc_RNA (1)...(19): siRNA sense strand
ggaaacugggccuggauuc

SEQ ID NO: 1756651 - RNA, 19 nt, Homo sapiens
  misc_RNA (1)...(19): siRNA sense strand
ccucugcgccucuguacaa

SEQ ID NO: 1756652 - RNA, 19 nt, Homo sapiens
  misc_RNA (1)...(19): siRNA sense strand
ccaaaggggccaaaacuga

SEQ ID NO: 1756653 - RNA, 19 nt, Homo sapiens
  misc_RNA (1)...(19): siRNA sense strand
gcagguugcuaucaauacc

SEQ ID NO: 1756654 - RNA, 19 nt, Homo sapiens
  misc_RNA (1)...(19): siRNA sense strand
ggucuccgcguacgggauu

SEQ ID NO: 1756655 - RNA, 19 nt, Homo sapiens
  misc_RNA (1)...(19): siRNA sense strand
ggucauguucuccaucauc

SEQ ID NO: 1756656 - RNA, 19 nt, Homo sapiens
  misc_RNA (1)...(19): siRNA sense strand
uuaccugccucuucaugca

SEQ ID NO: 1756657 - RNA, 19 nt, Homo sapiens
  misc_RNA (1)...(19): siRNA sense strand
gucauguucuccaucaucu

SEQ ID NO: 1756658 - RNA, 19 nt, Homo sapiens
  misc_RNA (1)...(19): siRNA sense strand
caucaucuccauggacuuc

SEQ ID NO: 1756659 - RNA, 19 nt, Homo sapiens
  misc_RNA (1)...(19): siRNA sense strand
gccuucggcuaccugcaaa

SEQ ID NO: 1756660 - RNA, 19 nt, Homo sapiens
  misc_RNA (1)...(19): siRNA sense strand
cuggcuaccucauguccuu

SEQ ID NO: 1756661 - RNA, 19 nt, Homo sapiens
  misc_RNA (1)...(19): siRNA sense strand
uggugaagguggccuccaa

SEQ ID NO: 1756662 - RNA, 19 nt, Homo sapiens
  misc_RNA (1)...(19): siRNA sense strand
ugccagacgucccgaggau

SEQ ID NO: 1756663 - RNA, 19 nt, Homo sapiens
  misc_RNA (1)...(19): siRNA sense strand
gguccucggucaucuugcu

SEQ ID NO: 1756664 - RNA, 19 nt, Homo sapiens
  misc_RNA (1)...(19): siRNA sense strand
guaaaugucccaucuguua

SEQ ID NO: 1756665 - RNA, 19 nt, Homo sapiens
  misc_RNA (1)...(19): siRNA sense strand
gagaagacguggaguaaau

SEQ ID NO: 1756666 - RNA, 19 nt, Homo sapiens
  misc_RNA (1)...(19): siRNA sense strand
ggaagggugugcuggagua

SEQ ID NO: 1756667 - RNA, 19 nt, Homo sapiens
  misc_RNA (1)...(19): siRNA sense strand
ccaaauggaugaauguaga

SEQ ID NO: 1756668 - RNA, 19 nt, Homo sapiens
  misc_RNA (1)...(19): siRNA sense strand
ggauugagauagaggagaa

SEQ ID NO: 1756669 - RNA, 19 nt, Homo sapiens
  misc_RNA (1)...(19): siRNA sense strand
gaagauggacagcauaugu

SEQ ID NO: 1756670 - RNA, 19 nt, Homo sapiens
  misc_RNA (1)...(19): siRNA sense strand
cuaagaagaucaaccugaa

SEQ ID NO: 1756671 - RNA, 19 nt, Homo sapiens
  misc_RNA (1)...(19): siRNA sense strand
ggaguuagcagaugacaau

SEQ ID NO: 1756672 - RNA, 19 nt, Homo sapiens
  misc_RNA (1)...(19): siRNA sense strand
agaaggaucucaagagugu

SEQ ID NO: 1756673 - RNA, 19 nt, Homo sapiens
  misc_RNA (1)...(19): siRNA sense strand
acagauaucucucucacuu

SEQ ID NO: 1756674 - RNA, 19 nt, Homo sapiens
  misc_RNA (1)...(19): siRNA sense strand
gaaagaugagaacagcuua

SEQ ID NO: 1756675 - RNA, 19 nt, Homo sapiens
  misc_RNA (1)...(19): siRNA sense strand
caagaugccuccucaaagg

SEQ ID NO: 1756676 - RNA, 19 nt, Homo sapiens
  misc_RNA (1)...(19): siRNA sense strand
uaagaaggaucucaagagu

SEQ ID NO: 1756677 - RNA, 19 nt, Homo sapiens
  misc_RNA (1)...(19): siRNA sense strand
gaguaaaugucccaucugu

SEQ ID NO: 1756678 - RNA, 19 nt, Homo sapiens
  misc_RNA (1)...(19): siRNA sense strand
ggaggucacugguguugug

SEQ ID NO: 1756679 - RNA, 19 nt, Homo sapiens
  misc_RNA (1)...(19): siRNA sense strand
ugaaccacuuguugaauuu

SEQ ID NO: 1756680 - RNA, 19 nt, Homo sapiens
  misc_RNA (1)...(19): siRNA sense strand
gccaugaagugccaucuug

SEQ ID NO: 1756681 - RNA, 19 nt, Homo sapiens
  misc_RNA (1)...(19): siRNA sense strand
caagagcgauggaaagaac

SEQ ID NO: 1756682 - RNA, 19 nt, Homo sapiens
  misc_RNA (1)...(19): siRNA sense strand
ccacagagucacaucagua

SEQ ID NO: 1756683 - RNA, 19 nt, Homo sapiens
  misc_RNA (1)...(19): siRNA sense strand
aaagaaggcucgggaggaa

SEQ ID NO: 1756684 - RNA, 19 nt, Homo sapiens
  misc_RNA (1)...(19): siRNA sense strand
uaaggaaacccuagagaug

SEQ ID NO: 1756685 - RNA, 19 nt, Homo sapiens
  misc_RNA (1)...(19): siRNA sense strand
caaaacugcuccaaagaaa

SEQ ID NO: 1756686 - RNA, 19 nt, Homo sapiens
  misc_RNA (1)...(19): siRNA sense strand
ccagacgggucacuuugaa

SEQ ID NO: 1756687 - RNA, 19 nt, Homo sapiens
  misc_RNA (1)...(19): siRNA sense strand
gaaggcaguggacauggua

SEQ ID NO: 1756688 - RNA, 19 nt, Homo sapiens
  misc_RNA (1)...(19): siRNA sense strand
uaacugggacuuuguggaa

SEQ ID NO: 1756689 - RNA, 19 nt, Homo sapiens
  misc_RNA (1)...(19): siRNA sense strand
ggacacaccagcuacuuca

SEQ ID NO: 1756690 - RNA, 19 nt, Homo sapiens
  misc_RNA (1)...(19): siRNA sense strand
cagaugacauugagaagag

SEQ ID NO: 1756691 - RNA, 19 nt, Homo sapiens
  misc_RNA (1)...(19): siRNA sense strand
gaacuuuccuaccccaaaa

SEQ ID NO: 1756692 - RNA, 19 nt, Homo sapiens
  misc_RNA (1)...(19): siRNA sense strand
cagccaagcuauugaagca

SEQ ID NO: 1756693 - RNA, 19 nt, Homo sapiens
  misc_RNA (1)...(19): siRNA sense strand
cugaaccacuuguugaauu

SEQ ID NO: 1756694 - RNA, 19 nt, Homo sapiens
  misc_RNA (1)...(19): siRNA sense strand
gccaauuuguggugucuga

SEQ ID NO: 1756695 - RNA, 19 nt, Homo sapiens
  misc_RNA (1)...(19): siRNA sense strand
gauccugauacauuaguua

SEQ ID NO: 1756696 - RNA, 19 nt, Homo sapiens
  misc_RNA (1)...(19): siRNA sense strand
gauagaggagaacaagaaa

SEQ ID NO: 1756697 - RNA, 19 nt, Homo sapiens
  misc_RNA (1)...(19): siRNA sense strand
aaacugcuccaaagaaaga

SEQ ID NO: 1756698 - RNA, 19 nt, Homo sapiens
  misc_RNA (1)...(19): siRNA sense strand
cgaugcagcugaugaagag

SEQ ID NO: 1756699 - RNA, 19 nt, Homo sapiens
  misc_RNA (1)...(19): siRNA sense strand
gcagauguguggcccaaaa

SEQ ID NO: 1756700 - RNA, 19 nt, Homo sapiens
  misc_RNA (1)...(19): siRNA sense strand
ucgagaaucuacagcaguu

SEQ ID NO: 1756701 - RNA, 19 nt, Homo sapiens
  misc_RNA (1)...(19): siRNA sense strand
gauccaagcguuauaaucg

SEQ ID NO: 1756702 - RNA, 19 nt, Homo sapiens
  misc_RNA (1)...(19): siRNA sense strand
cagcagcucuccuuguuac

SEQ ID NO: 1756703 - RNA, 19 nt, Homo sapiens
  misc_RNA (1)...(19): siRNA sense strand
ggacauaagccuuuuaaca

SEQ ID NO: 1756704 - RNA, 19 nt, Homo sapiens
  misc_RNA (1)...(19): siRNA sense strand
gcucaacgggcagaguuua

SEQ ID NO: 1756705 - RNA, 19 nt, Homo sapiens
  misc_RNA (1)...(19): siRNA sense strand
cgagagcgcaggauugaga

SEQ ID NO: 1756706 - RNA, 19 nt, Homo sapiens
  misc_RNA (1)...(19): siRNA sense strand
ggagaaaguagcacuagag

SEQ ID NO: 1756707 - RNA, 19 nt, Homo sapiens
  misc_RNA (1)...(19): siRNA sense strand
gcacuaucuuucacugagu

SEQ ID NO: 1756708 - RNA, 19 nt, Homo sapiens
  misc_RNA (1)...(19): siRNA sense strand
uuaguuaacugggacuuug

SEQ ID NO: 1756709 - RNA, 19 nt, Homo sapiens
  misc_RNA (1)...(19): siRNA sense strand
ggcagcagcaaacucuuua

SEQ ID NO: 1756710 - RNA, 19 nt, Homo sapiens
  misc_RNA (1)...(19): siRNA sense strand
acaagaaacagggcaagua

SEQ ID NO: 1756711 - RNA, 19 nt, Homo sapiens
  misc_RNA (1)...(19): siRNA sense strand
ccuguggucucuaaggaaa

SEQ ID NO: 1756712 - RNA, 19 nt, Homo sapiens
  misc_RNA (1)...(19): siRNA sense strand
ggaggaagcagugucugaa

SEQ ID NO: 1756713 - RNA, 19 nt, Homo sapiens
  misc_RNA (1)...(19): siRNA sense strand
gcucaagacucgggaagag

SEQ ID NO: 1756714 - RNA, 19 nt, Homo sapiens
  misc_RNA (1)...(19): siRNA sense strand
ccuccgacauggacaagaa

SEQ ID NO: 1756715 - RNA, 19 nt, Homo sapiens
  misc_RNA (1)...(19): siRNA sense strand
gugagaagacguggaguaa

SEQ ID NO: 1756716 - RNA, 19 nt, Homo sapiens
  misc_RNA (1)...(19): siRNA sense strand
caggccaacugccaauuug

SEQ ID NO: 1756717 - RNA, 19 nt, Homo sapiens
  misc_RNA (1)...(19): siRNA sense strand
gacauaagccuuuuaacaa

SEQ ID NO: 1756718 - RNA, 19 nt, Homo sapiens
  misc_RNA (1)...(19): siRNA sense strand
caacugugguggagauugc

SEQ ID NO: 1756719 - RNA, 19 nt, Homo sapiens
  misc_RNA (1)...(19): siRNA sense strand
cagcaacugugguggagau

SEQ ID NO: 1756720 - RNA, 19 nt, Homo sapiens
  misc_RNA (1)...(19): siRNA sense strand
gcagcucuccuuguuacua

SEQ ID NO: 1756721 - RNA, 19 nt, Homo sapiens
  misc_RNA (1)...(19): siRNA sense strand
gaacagcacagccaguacu

SEQ ID NO: 1756722 - RNA, 19 nt, Homo sapiens
  misc_RNA (1)...(19): siRNA sense strand
ccacggaaguuuguucucu

SEQ ID NO: 1756723 - RNA, 19 nt, Homo sapiens
  misc_RNA (1)...(19): siRNA sense strand
gcgcauuuguagccaugaa

SEQ ID NO: 1756724 - RNA, 19 nt, Homo sapiens
  misc_RNA (1)...(19): siRNA sense strand
ggaggagaaaguagcacua

SEQ ID NO: 1756725 - RNA, 19 nt, Homo sapiens
  misc_RNA (1)...(19): siRNA sense strand
gaccaucccauucaucuag

SEQ ID NO: 1756726 - RNA, 19 nt, Homo sapiens
  misc_RNA (1)...(19): siRNA sense strand
gaagacguggaguaaaugu

SEQ ID NO: 1756727 - RNA, 19 nt, Homo sapiens
  misc_RNA (1)...(19): siRNA sense strand
gcaaacgugaacuuuccua

SEQ ID NO: 1756728 - RNA, 19 nt, Homo sapiens
  misc_RNA (1)...(19): siRNA sense strand
gcaaacucuuuagcucuuc

SEQ ID NO: 1756729 - RNA, 19 nt, Homo sapiens
  misc_RNA (1)...(19): siRNA sense strand
guacccagaaguccacauu

SEQ ID NO: 1756730 - RNA, 19 nt, Homo sapiens
  misc_RNA (1)...(19): siRNA sense strand
caagaaacagggcaaguac

SEQ ID NO: 1756731 - RNA, 19 nt, Homo sapiens
  misc_RNA (1)...(19): siRNA sense strand
agauagaggagaacaagaa

SEQ ID NO: 1756732 - RNA, 19 nt, Homo sapiens
  misc_RNA (1)...(19): siRNA sense strand
cccgaguccugcuuuauug

SEQ ID NO: 1756733 - RNA, 19 nt, Homo sapiens
  misc_RNA (1)...(19): siRNA sense strand
guuuagcccugcccaguuc

SEQ ID NO: 1756734 - RNA, 19 nt, Homo sapiens
  misc_RNA (1)...(19): siRNA sense strand
gcaagacuuuuaacaagau

SEQ ID NO: 1756735 - RNA, 19 nt, Homo sapiens
  misc_RNA (1)...(19): siRNA sense strand
ugaagaaaccacggaaguu

SEQ ID NO: 1756736 - RNA, 19 nt, Homo sapiens
  misc_RNA (1)...(19): siRNA sense strand
uauaccugcuccucugauu

SEQ ID NO: 1756737 - RNA, 19 nt, Homo sapiens
  misc_RNA (1)...(19): siRNA sense strand
gagaaucuacagcaguuuc

SEQ ID NO: 1756738 - RNA, 19 nt, Homo sapiens
  misc_RNA (1)...(19): siRNA sense strand
aggaaacccuagagauguu

SEQ ID NO: 1756739 - RNA, 19 nt, Homo sapiens
  misc_RNA (1)...(19): siRNA sense strand
agugccaucuugcccaaua

SEQ ID NO: 1756740 - RNA, 19 nt, Homo sapiens
  misc_RNA (1)...(19): siRNA sense strand
caaagaaagaugagaacag

SEQ ID NO: 1756741 - RNA, 19 nt, Homo sapiens
  misc_RNA (1)...(19): siRNA sense strand
ccaguggauccaagcguua

SEQ ID NO: 1756742 - RNA, 19 nt, Homo sapiens
  misc_RNA (1)...(19): siRNA sense strand
uugcugauccugauacauu

SEQ ID NO: 1756743 - RNA, 19 nt, Homo sapiens
  misc_RNA (1)...(19): siRNA sense strand
uagaggagaacaagaaaca

SEQ ID NO: 1756744 - RNA, 19 nt, Homo sapiens
  misc_RNA (1)...(19): siRNA sense strand
cauaagaaggaucucaaga

SEQ ID NO: 1756745 - RNA, 19 nt, Homo sapiens
  misc_RNA (1)...(19): siRNA sense strand
uggaacaacuggugcugau

SEQ ID NO: 1756746 - RNA, 19 nt, Homo sapiens
  misc_RNA (1)...(19): siRNA sense strand
cucagcagcucuccuuguu

SEQ ID NO: 1756747 - RNA, 19 nt, Homo sapiens
  misc_RNA (1)...(19): siRNA sense strand
guaucugucugccuucgau

SEQ ID NO: 1756748 - RNA, 19 nt, Homo sapiens
  misc_RNA (1)...(19): siRNA sense strand
uggaagacgagaugaggua

SEQ ID NO: 1756749 - RNA, 19 nt, Homo sapiens
  misc_RNA (1)...(19): siRNA sense strand
agaaagaugagaacagcuu

SEQ ID NO: 1756750 - RNA, 19 nt, Homo sapiens
  misc_RNA (1)...(19): siRNA sense strand
aacaagaugccuccucaaa

SEQ ID NO: 1756751 - RNA, 19 nt, Homo sapiens
  misc_RNA (1)...(19): siRNA sense strand
ggauuggccggaagcagaa

SEQ ID NO: 1756752 - RNA, 19 nt, Homo sapiens
  misc_RNA (1)...(19): siRNA sense strand
uggaguaaaugucccaucu

SEQ ID NO: 1756753 - RNA, 19 nt, Homo sapiens
  misc_RNA (1)...(19): siRNA sense strand
ugcugauccugauacauua

SEQ ID NO: 1756754 - RNA, 19 nt, Homo sapiens
  misc_RNA (1)...(19): siRNA sense strand
agaucaaccugaaccacuu

SEQ ID NO: 1756755 - RNA, 19 nt, Homo sapiens
  misc_RNA (1)...(19): siRNA sense strand
uggaacaagugcgcauuug

SEQ ID NO: 1756756 - RNA, 19 nt, Homo sapiens
  misc_RNA (1)...(19): siRNA sense strand
uuccugccuucaauucuua

SEQ ID NO: 1756757 - RNA, 19 nt, Homo sapiens
  misc_RNA (1)...(19): siRNA sense strand
caagcguuauaaucgcaaa

SEQ ID NO: 1756758 - RNA, 19 nt, Homo sapiens
  misc_RNA (1)...(19): siRNA sense strand
uguuguggcugcucuggaa

SEQ ID NO: 1756759 - RNA, 19 nt, Homo sapiens
  misc_RNA (1)...(19): siRNA sense strand
cucuuuagcucuucuuuua

SEQ ID NO: 1756760 - RNA, 19 nt, Homo sapiens
  misc_RNA (1)...(19): siRNA sense strand
ccugauacauuaguuaacu

SEQ ID NO: 1756761 - RNA, 19 nt, Homo sapiens
  misc_RNA (1)...(19): siRNA sense strand
gccgagagcgcaggauuga

SEQ ID NO: 1756762 - RNA, 19 nt, Homo sapiens
  misc_RNA (1)...(19): siRNA sense strand
ccauuacgaugcagcugau

SEQ ID NO: 1756763 - RNA, 19 nt, Homo sapiens
  misc_RNA (1)...(19): siRNA sense strand
gugauaccauuacgaugca

SEQ ID NO: 1756764 - RNA, 19 nt, Homo sapiens
  misc_RNA (1)...(19): siRNA sense strand
gcaaauaccugaugaagag

SEQ ID NO: 1756765 - RNA, 19 nt, Homo sapiens
  misc_RNA (1)...(19): siRNA sense strand
gaaagaagauccacaguac

SEQ ID NO: 1756766 - RNA, 19 nt, Homo sapiens
  misc_RNA (1)...(19): siRNA sense strand
ucacggagauccuuucuaa

SEQ ID NO: 1756767 - RNA, 19 nt, Homo sapiens
  misc_RNA (1)...(19): siRNA sense strand
gcacagcuauugacucuau

SEQ ID NO: 1756768 - RNA, 19 nt, Homo sapiens
  misc_RNA (1)...(19): siRNA sense strand
gaaagaagcaaauugauca

SEQ ID NO: 1756769 - RNA, 19 nt, Homo sapiens
  misc_RNA (1)...(19): siRNA sense strand
gaccuuaccuccacuaaau

SEQ ID NO: 1756770 - RNA, 19 nt, Homo sapiens
  misc_RNA (1)...(19): siRNA sense strand
aauaggaaauggagucuua

SEQ ID NO: 1756771 - RNA, 19 nt, Homo sapiens
  misc_RNA (1)...(19): siRNA sense strand
gaagagggcauuguuauug

SEQ ID NO: 1756772 - RNA, 19 nt, Homo sapiens
  misc_RNA (1)...(19): siRNA sense strand
ccacaggaaacaacaauua

SEQ ID NO: 1756773 - RNA, 19 nt, Homo sapiens
  misc_RNA (1)...(19): siRNA sense strand
aaacacagcuacacaagau

SEQ ID NO: 1756774 - RNA, 19 nt, Homo sapiens
  misc_RNA (1)...(19): siRNA sense strand
gaagcaaauugaucagaga

SEQ ID NO: 1756775 - RNA, 19 nt, Homo sapiens
  misc_RNA (1)...(19): siRNA sense strand
gcccgaagauccaguagaa

SEQ ID NO: 1756776 - RNA, 19 nt, Homo sapiens
  misc_RNA (1)...(19): siRNA sense strand
gaucagagacauuauggaa

SEQ ID NO: 1756777 - RNA, 19 nt, Homo sapiens
  misc_RNA (1)...(19): siRNA sense strand
gaugaccaguuaaauguau

SEQ ID NO: 1756778 - RNA, 19 nt, Homo sapiens
  misc_RNA (1)...(19): siRNA sense strand
gacaacaaguuauuuccaa

SEQ ID NO: 1756779 - RNA, 19 nt, Homo sapiens
  misc_RNA (1)...(19): siRNA sense strand
ucagggugaugaccaguua

SEQ ID NO: 1756780 - RNA, 19 nt, Homo sapiens
  misc_RNA (1)...(19): siRNA sense strand
gaaacaacaauuacagaga

SEQ ID NO: 1756781 - RNA, 19 nt, Homo sapiens
  misc_RNA (1)...(19): siRNA sense strand
gugaggaacuggcaucaga

SEQ ID NO: 1756782 - RNA, 19 nt, Homo sapiens
  misc_RNA (1)...(19): siRNA sense strand
aggaugagguguucuauga

SEQ ID NO: 1756783 - RNA, 19 nt, Homo sapiens
  misc_RNA (1)...(19): siRNA sense strand
gaugaagagggcauuguua

SEQ ID NO: 1756784 - RNA, 19 nt, Homo sapiens
  misc_RNA (1)...(19): siRNA sense strand
gagguuucauggaagauuu

SEQ ID NO: 1756785 - RNA, 19 nt, Homo sapiens
  misc_RNA (1)...(19): siRNA sense strand
gugaaaagcugguggaaaa

SEQ ID NO: 1756786 - RNA, 19 nt, Homo sapiens
  misc_RNA (1)...(19): siRNA sense strand
uacaggaucugauuaugaa

SEQ ID NO: 1756787 - RNA, 19 nt, Homo sapiens
  misc_RNA (1)...(19): siRNA sense strand
ccgaagauccaguagaaua

SEQ ID NO: 1756788 - RNA, 19 nt, Homo sapiens
  misc_RNA (1)...(19): siRNA sense strand
cagaguugauugaggagua

SEQ ID NO: 1756789 - RNA, 19 nt, Homo sapiens
  misc_RNA (1)...(19): siRNA sense strand
aaucagagacucaaagaaa

SEQ ID NO: 1756790 - RNA, 19 nt, Homo sapiens
  misc_RNA (1)...(19): siRNA sense strand
gagacucaaagaaagauua

SEQ ID NO: 1756791 - RNA, 19 nt, Homo sapiens
  misc_RNA (1)...(19): siRNA sense strand
gaugagguguucuaugaca

SEQ ID NO: 1756792 - RNA, 19 nt, Homo sapiens
  misc_RNA (1)...(19): siRNA sense strand
uaugggagguuucauggaa

SEQ ID NO: 1756793 - RNA, 19 nt, Homo sapiens
  misc_RNA (1)...(19): siRNA sense strand
gaaauguaaugccugaaaa

SEQ ID NO: 1756794 - RNA, 19 nt, Homo sapiens
  misc_RNA (1)...(19): siRNA sense strand
aaaggagacuaaugaacuu

SEQ ID NO: 1756795 - RNA, 19 nt, Homo sapiens
  misc_RNA (1)...(19): siRNA sense strand
gaagauuugagaaagugua

SEQ ID NO: 1756796 - RNA, 19 nt, Homo sapiens
  misc_RNA (1)...(19): siRNA sense strand
caaaggagacuaaugaacu

SEQ ID NO: 1756797 - RNA, 19 nt, Homo sapiens
  misc_RNA (1)...(19): siRNA sense strand
gcaaauugaucagagacau

SEQ ID NO: 1756798 - RNA, 19 nt, Homo sapiens
  misc_RNA (1)...(19): siRNA sense strand
gauacaggaucugauuaug

SEQ ID NO: 1756799 - RNA, 19 nt, Homo sapiens
  misc_RNA (1)...(19): siRNA sense strand
gugggagaauuauuaagaa

SEQ ID NO: 1756800 - RNA, 19 nt, Homo sapiens
  misc_RNA (1)...(19): siRNA sense strand
cuucaacucugcacagcua

SEQ ID NO: 1756801 - RNA, 19 nt, Homo sapiens
  misc_RNA (1)...(19): siRNA sense strand
gcauuguuauugauggauu

SEQ ID NO: 1756802 - RNA, 19 nt, Homo sapiens
  misc_RNA (1)...(19): siRNA sense strand
agaaagaagauccacagua

SEQ ID NO: 1756803 - RNA, 19 nt, Homo sapiens
  misc_RNA (1)...(19): siRNA sense strand
gaaaauugcagaacgauau

SEQ ID NO: 1756804 - RNA, 19 nt, Homo sapiens
  misc_RNA (1)...(19): siRNA sense strand
ggaggacagucacggagau

SEQ ID NO: 1756805 - RNA, 19 nt, Homo sapiens
  misc_RNA (1)...(19): siRNA sense strand
gauuggagacccacaguug

SEQ ID NO: 1756806 - RNA, 19 nt, Homo sapiens
  misc_RNA (1)...(19): siRNA sense strand
ggaacuggcaucagaaucu

SEQ ID NO: 1756807 - RNA, 19 nt, Homo sapiens
  misc_RNA (1)...(19): siRNA sense strand
ggaaauggagucuuauugc

SEQ ID NO: 1756808 - RNA, 19 nt, Homo sapiens
  misc_RNA (1)...(19): siRNA sense strand
cacaguaccagcagcaaua

SEQ ID NO: 1756809 - RNA, 19 nt, Homo sapiens
  misc_RNA (1)...(19): siRNA sense strand
aagagggcauuguuauuga

SEQ ID NO: 1756810 - RNA, 19 nt, Homo sapiens
  misc_RNA (1)...(19): siRNA sense strand
caaagaaagauuacugaag

SEQ ID NO: 1756811 - RNA, 19 nt, Homo sapiens
  misc_RNA (1)...(19): siRNA sense strand
gaccagacgacaauguaaa

SEQ ID NO: 1756812 - RNA, 19 nt, Homo sapiens
  misc_RNA (1)...(19): siRNA sense strand
gugaugaccaguuaaaugu

SEQ ID NO: 1756813 - RNA, 19 nt, Homo sapiens
  misc_RNA (1)...(19): siRNA sense strand
ggugaugaccaguuaaaug

SEQ ID NO: 1756814 - RNA, 19 nt, Homo sapiens
  misc_RNA (1)...(19): siRNA sense strand
acacagcuacacaagauaa

SEQ ID NO: 1756815 - RNA, 19 nt, Homo sapiens
  misc_RNA (1)...(19): siRNA sense strand
caaauugaucagagacauu

SEQ ID NO: 1756816 - RNA, 19 nt, Homo sapiens
  misc_RNA (1)...(19): siRNA sense strand
gauaauuacaacuggagaa

SEQ ID NO: 1756817 - RNA, 19 nt, Homo sapiens
  misc_RNA (1)...(19): siRNA sense strand
ugaaagaagcaaauugauc

SEQ ID NO: 1756818 - RNA, 19 nt, Homo sapiens
  misc_RNA (1)...(19): siRNA sense strand
ugaagagggcauuguuauu

SEQ ID NO: 1756819 - RNA, 19 nt, Homo sapiens
  misc_RNA (1)...(19): siRNA sense strand
agaaauguaaugccugaaa

SEQ ID NO: 1756820 - RNA, 19 nt, Homo sapiens
  misc_RNA (1)...(19): siRNA sense strand
cauggaagauuugagaaag

SEQ ID NO: 1756821 - RNA, 19 nt, Homo sapiens
  misc_RNA (1)...(19): siRNA sense strand
ucugaaagaagcaaauuga

SEQ ID NO: 1756822 - RNA, 19 nt, Homo sapiens
  misc_RNA (1)...(19): siRNA sense strand
gaacuggguggcugugaca

SEQ ID NO: 1756823 - RNA, 19 nt, Homo sapiens
  misc_RNA (1)...(19): siRNA sense strand
cugcuccauugguuaaaua

SEQ ID NO: 1756824 - RNA, 19 nt, Homo sapiens
  misc_RNA (1)...(19): siRNA sense strand
acggagauccuuucuaaga

SEQ ID NO: 1756825 - RNA, 19 nt, Homo sapiens
  misc_RNA (1)...(19): siRNA sense strand
gaaagugacacggaucucu

SEQ ID NO: 1756826 - RNA, 19 nt, Homo sapiens
  misc_RNA (1)...(19): siRNA sense strand
gggcauuguuauugaugga

SEQ ID NO: 1756827 - RNA, 19 nt, Homo sapiens
  misc_RNA (1)...(19): siRNA sense strand
gaagaccuuaccuccacua

SEQ ID NO: 1756828 - RNA, 19 nt, Homo sapiens
  misc_RNA (1)...(19): siRNA sense strand
uaccagaccucgaccaaaa

SEQ ID NO: 1756829 - RNA, 19 nt, Homo sapiens
  misc_RNA (1)...(19): siRNA sense strand
gacaaggugaaaugggaua

SEQ ID NO: 1756830 - RNA, 19 nt, Homo sapiens
  misc_RNA (1)...(19): siRNA sense strand
auacaggaucugauuauga

SEQ ID NO: 1756831 - RNA, 19 nt, Homo sapiens
  misc_RNA (1)...(19): siRNA sense strand
ugaugcaaauaccugauga

SEQ ID NO: 1756832 - RNA, 19 nt, Homo sapiens
  misc_RNA (1)...(19): siRNA sense strand
ucagagacucaaagaaaga

SEQ ID NO: 1756833 - RNA, 19 nt, Homo sapiens
  misc_RNA (1)...(19): siRNA sense strand
gcgaugaggaugagguguu

SEQ ID NO: 1756834 - RNA, 19 nt, Homo sapiens
  misc_RNA (1)...(19): siRNA sense strand
cgaccagacgacaauguaa

SEQ ID NO: 1756835 - RNA, 19 nt, Homo sapiens
  misc_RNA (1)...(19): siRNA sense strand
gcugugacaaggugaaaug

SEQ ID NO: 1756836 - RNA, 19 nt, Homo sapiens
  misc_RNA (1)...(19): siRNA sense strand
cugcacagcuauugacucu

SEQ ID NO: 1756837 - RNA, 19 nt, Homo sapiens
  misc_RNA (1)...(19): siRNA sense strand
caacucugcacagcuauug

SEQ ID NO: 1756838 - RNA, 19 nt, Homo sapiens
  misc_RNA (1)...(19): siRNA sense strand
gacaucagcauggcaguug

SEQ ID NO: 1756839 - RNA, 19 nt, Homo sapiens
  misc_RNA (1)...(19): siRNA sense strand
gccaagauaauuacaacug

SEQ ID NO: 1756840 - RNA, 19 nt, Homo sapiens
  misc_RNA (1)...(19): siRNA sense strand
uggaagauuugagaaagug

SEQ ID NO: 1756841 - RNA, 19 nt, Homo sapiens
  misc_RNA (1)...(19): siRNA sense strand
acccaaaggagacuaauga

SEQ ID NO: 1756842 - RNA, 19 nt, Homo sapiens
  misc_RNA (1)...(19): siRNA sense strand
cagcuacacaagauaaaug

SEQ ID NO: 1756843 - RNA, 19 nt, Homo sapiens
  misc_RNA (1)...(19): siRNA sense strand
ccaaccgccuucuccaaag

SEQ ID NO: 1756844 - RNA, 19 nt, Homo sapiens
  misc_RNA (1)...(19): siRNA sense strand
ugauacaggaucugauuau

SEQ ID NO: 1756845 - RNA, 19 nt, Homo sapiens
  misc_RNA (1)...(19): siRNA sense strand
gaccuugauccuucgauga

SEQ ID NO: 1756846 - RNA, 19 nt, Homo sapiens
  misc_RNA (1)...(19): siRNA sense strand
gcagaacgauauggauucc

SEQ ID NO: 1756847 - RNA, 19 nt, Homo sapiens
  misc_RNA (1)...(19): siRNA sense strand
gcuauugacucuauuuucu

SEQ ID NO: 1756848 - RNA, 19 nt, Homo sapiens
  misc_RNA (1)...(19): siRNA sense strand
gauaaaugcagagggaaca

SEQ ID NO: 1756849 - RNA, 19 nt, Homo sapiens
  misc_RNA (1)...(19): siRNA sense strand
gaggaacuggcaucagaau

SEQ ID NO: 1756850 - RNA, 19 nt, Homo sapiens
  misc_RNA (1)...(19): siRNA sense strand
gguccuggcucuggcaaag

SEQ ID NO: 1756851 - RNA, 19 nt, Homo sapiens
  misc_RNA (1)...(19): siRNA sense strand
ggacacuggagagaucauu

SEQ ID NO: 1756852 - RNA, 19 nt, Homo sapiens
  misc_RNA (1)...(19): siRNA sense strand
gagguguucuaugacauca

SEQ ID NO: 1756853 - RNA, 19 nt, Homo sapiens
  misc_RNA (1)...(19): siRNA sense strand
cgaugaggaugagguguuc

SEQ ID NO: 1756854 - RNA, 19 nt, Homo sapiens
  misc_RNA (1)...(19): siRNA sense strand
cuccauugguuaaauacuu

SEQ ID NO: 1756855 - RNA, 19 nt, Homo sapiens
  misc_RNA (1)...(19): siRNA sense strand
cuaaucagagacucaaaga

SEQ ID NO: 1756856 - RNA, 19 nt, Homo sapiens
  misc_RNA (1)...(19): siRNA sense strand
ugugggagaauuauuaaga

SEQ ID NO: 1756857 - RNA, 19 nt, Homo sapiens
  misc_RNA (1)...(19): siRNA sense strand
ggagguuucauggaagauu

SEQ ID NO: 1756858 - RNA, 19 nt, Homo sapiens
  misc_RNA (1)...(19): siRNA sense strand
ucauggaagauuugagaaa

SEQ ID NO: 1756859 - RNA, 19 nt, Homo sapiens
  misc_RNA (1)...(19): siRNA sense strand
gaaguggaaaggguacuca

SEQ ID NO: 1756860 - RNA, 19 nt, Homo sapiens
  misc_RNA (1)...(19): siRNA sense strand
gaccaaccgccuucuccaa

SEQ ID NO: 1756861 - RNA, 19 nt, Homo sapiens
  misc_RNA (1)...(19): siRNA sense strand
gaaucugaaagaagcaaau

SEQ ID NO: 1756862 - RNA, 19 nt, Homo sapiens
  misc_RNA (1)...(19): siRNA sense strand
ggaaaaggggcucaucaug

SEQ ID NO: 1756863 - RNA, 19 nt, Homo sapiens
  misc_RNA (1)...(19): siRNA sense strand
acucaaacuuuccauaucg

SEQ ID NO: 1756864 - RNA, 19 nt, Homo sapiens
  misc_RNA (1)...(19): siRNA sense strand
gcaaauaccugaugaagag

SEQ ID NO: 1756865 - RNA, 19 nt, Homo sapiens
  misc_RNA (1)...(19): siRNA sense strand
gaaagaagauccacaguac

SEQ ID NO: 1756866 - RNA, 19 nt, Homo sapiens
  misc_RNA (1)...(19): siRNA sense strand
ucacggagauccuuucuaa

SEQ ID NO: 1756867 - RNA, 19 nt, Homo sapiens
  misc_RNA (1)...(19): siRNA sense strand
gcacagcuauugacucuau

SEQ ID NO: 1756868 - RNA, 19 nt, Homo sapiens
  misc_RNA (1)...(19): siRNA sense strand
gaaagaagcaaauugauca

SEQ ID NO: 1756869 - RNA, 19 nt, Homo sapiens
  misc_RNA (1)...(19): siRNA sense strand
gaccuuaccuccacuaaau

SEQ ID NO: 1756870 - RNA, 19 nt, Homo sapiens
  misc_RNA (1)...(19): siRNA sense strand
aauaggaaauggagucuua

SEQ ID NO: 1756871 - RNA, 19 nt, Homo sapiens
  misc_RNA (1)...(19): siRNA sense strand
gaagagggcauuguuauug

SEQ ID NO: 1756872 - RNA, 19 nt, Homo sapiens
  misc_RNA (1)...(19): siRNA sense strand
ccacaggaaacaacaauua

SEQ ID NO: 1756873 - RNA, 19 nt, Homo sapiens
  misc_RNA (1)...(19): siRNA sense strand
aaacacagcuacacaagau

SEQ ID NO: 1756874 - RNA, 19 nt, Homo sapiens
  misc_RNA (1)...(19): siRNA sense strand
gaagcaaauugaucagaga

SEQ ID NO: 1756875 - RNA, 19 nt, Homo sapiens
  misc_RNA (1)...(19): siRNA sense strand
gcccgaagauccaguagaa

SEQ ID NO: 1756876 - RNA, 19 nt, Homo sapiens
  misc_RNA (1)...(19): siRNA sense strand
gaucagagacauuauggaa

SEQ ID NO: 1756877 - RNA, 19 nt, Homo sapiens
  misc_RNA (1)...(19): siRNA sense strand
ggacugauguguucuaagc

SEQ ID NO: 1756878 - RNA, 19 nt, Homo sapiens
  misc_RNA (1)...(19): siRNA sense strand
ugaauggacugauguguuc

SEQ ID NO: 1756879 - RNA, 19 nt, Homo sapiens
  misc_RNA (1)...(19): siRNA sense strand
gaugaccaguuaaauguau

SEQ ID NO: 1756880 - RNA, 19 nt, Homo sapiens
  misc_RNA (1)...(19): siRNA sense strand
gacaacaaguuauuuccaa

SEQ ID NO: 1756881 - RNA, 19 nt, Homo sapiens
  misc_RNA (1)...(19): siRNA sense strand
ucagggugaugaccaguua

SEQ ID NO: 1756882 - RNA, 19 nt, Homo sapiens
  misc_RNA (1)...(19): siRNA sense strand
gaaacaacaauuacagaga

SEQ ID NO: 1756883 - RNA, 19 nt, Homo sapiens
  misc_RNA (1)...(19): siRNA sense strand
gugaggaacuggcaucaga

SEQ ID NO: 1756884 - RNA, 19 nt, Homo sapiens
  misc_RNA (1)...(19): siRNA sense strand
aggaugagguguucuauga

SEQ ID NO: 1756885 - RNA, 19 nt, Homo sapiens
  misc_RNA (1)...(19): siRNA sense strand
gaugaagagggcauuguua

SEQ ID NO: 1756886 - RNA, 19 nt, Homo sapiens
  misc_RNA (1)...(19): siRNA sense strand
gagguuucauggaagauuu

SEQ ID NO: 1756887 - RNA, 19 nt, Homo sapiens
  misc_RNA (1)...(19): siRNA sense strand
gugaaaagcugguggaaaa

SEQ ID NO: 1756888 - RNA, 19 nt, Homo sapiens
  misc_RNA (1)...(19): siRNA sense strand
uacaggaucugauuaugaa

SEQ ID NO: 1756889 - RNA, 19 nt, Homo sapiens
  misc_RNA (1)...(19): siRNA sense strand
ccgaagauccaguagaaua

SEQ ID NO: 1756890 - RNA, 19 nt, Homo sapiens
  misc_RNA (1)...(19): siRNA sense strand
cagaguugauugaggagua

SEQ ID NO: 1756891 - RNA, 19 nt, Homo sapiens
  misc_RNA (1)...(19): siRNA sense strand
aaucagagacucaaagaaa

SEQ ID NO: 1756892 - RNA, 19 nt, Homo sapiens
  misc_RNA (1)...(19): siRNA sense strand
gagacucaaagaaagauua

SEQ ID NO: 1756893 - RNA, 19 nt, Homo sapiens
  misc_RNA (1)...(19): siRNA sense strand
gaugagguguucuaugaca

SEQ ID NO: 1756894 - RNA, 19 nt, Homo sapiens
  misc_RNA (1)...(19): siRNA sense strand
uaugggagguuucauggaa

SEQ ID NO: 1756895 - RNA, 19 nt, Homo sapiens
  misc_RNA (1)...(19): siRNA sense strand
gaaauguaaugccugaaaa

SEQ ID NO: 1756896 - RNA, 19 nt, Homo sapiens
  misc_RNA (1)...(19): siRNA sense strand
aaaggagacuaaugaacuu

SEQ ID NO: 1756897 - RNA, 19 nt, Homo sapiens
  misc_RNA (1)...(19): siRNA sense strand
gaagauuugagaaagugua

SEQ ID NO: 1756898 - RNA, 19 nt, Homo sapiens
  misc_RNA (1)...(19): siRNA sense strand
caaaggagacuaaugaacu

SEQ ID NO: 1756899 - RNA, 19 nt, Homo sapiens
  misc_RNA (1)...(19): siRNA sense strand
gcaaauugaucagagacau

SEQ ID NO: 1756900 - RNA, 19 nt, Homo sapiens
  misc_RNA (1)...(19): siRNA sense strand
gauacaggaucugauuaug

SEQ ID NO: 1756901 - RNA, 19 nt, Homo sapiens
  misc_RNA (1)...(19): siRNA sense strand
gugggagaauuauuaagaa

SEQ ID NO: 1756902 - RNA, 19 nt, Homo sapiens
  misc_RNA (1)...(19): siRNA sense strand
cuucaacucugcacagcua

SEQ ID NO: 1756903 - RNA, 19 nt, Homo sapiens
  misc_RNA (1)...(19): siRNA sense strand
gcauuguuauugauggauu

SEQ ID NO: 1756904 - RNA, 19 nt, Homo sapiens
  misc_RNA (1)...(19): siRNA sense strand
agaaagaagauccacagua

SEQ ID NO: 1756905 - RNA, 19 nt, Homo sapiens
  misc_RNA (1)...(19): siRNA sense strand
gaaaauugcagaacgauau

SEQ ID NO: 1756906 - RNA, 19 nt, Homo sapiens
  misc_RNA (1)...(19): siRNA sense strand
ggaggacagucacggagau

SEQ ID NO: 1756907 - RNA, 19 nt, Homo sapiens
  misc_RNA (1)...(19): siRNA sense strand
gauuggagacccacaguug

SEQ ID NO: 1756908 - RNA, 19 nt, Homo sapiens
  misc_RNA (1)...(19): siRNA sense strand
ggaacuggcaucagaaucu

SEQ ID NO: 1756909 - RNA, 19 nt, Homo sapiens
  misc_RNA (1)...(19): siRNA sense strand
ggaaauggagucuuauugc

SEQ ID NO: 1756910 - RNA, 19 nt, Homo sapiens
  misc_RNA (1)...(19): siRNA sense strand
cacaguaccagcagcaaua

SEQ ID NO: 1756911 - RNA, 19 nt, Homo sapiens
  misc_RNA (1)...(19): siRNA sense strand
aagagggcauuguuauuga

SEQ ID NO: 1756912 - RNA, 19 nt, Homo sapiens
  misc_RNA (1)...(19): siRNA sense strand
caaagaaagauuacugaag

SEQ ID NO: 1756913 - RNA, 19 nt, Homo sapiens
  misc_RNA (1)...(19): siRNA sense strand
gaccagacgacaauguaaa

SEQ ID NO: 1756914 - RNA, 19 nt, Homo sapiens
  misc_RNA (1)...(19): siRNA sense strand
gugaugaccaguuaaaugu

SEQ ID NO: 1756915 - RNA, 19 nt, Homo sapiens
  misc_RNA (1)...(19): siRNA sense strand
ggugaugaccaguuaaaug

SEQ ID NO: 1756916 - RNA, 19 nt, Homo sapiens
  misc_RNA (1)...(19): siRNA sense strand
acacagcuacacaagauaa

SEQ ID NO: 1756917 - RNA, 19 nt, Homo sapiens
  misc_RNA (1)...(19): siRNA sense strand
caaauugaucagagacauu

SEQ ID NO: 1756918 - RNA, 19 nt, Homo sapiens
  misc_RNA (1)...(19): siRNA sense strand
gauaauuacaacuggagaa

SEQ ID NO: 1756919 - RNA, 19 nt, Homo sapiens
  misc_RNA (1)...(19): siRNA sense strand
ugaaagaagcaaauugauc

SEQ ID NO: 1756920 - RNA, 19 nt, Homo sapiens
  misc_RNA (1)...(19): siRNA sense strand
ugaagagggcauuguuauu

SEQ ID NO: 1756921 - RNA, 19 nt, Homo sapiens
  misc_RNA (1)...(19): siRNA sense strand
agaaauguaaugccugaaa

SEQ ID NO: 1756922 - RNA, 19 nt, Homo sapiens
  misc_RNA (1)...(19): siRNA sense strand
cauggaagauuugagaaag

SEQ ID NO: 1756923 - RNA, 19 nt, Homo sapiens
  misc_RNA (1)...(19): siRNA sense strand
gaacuggguggcugugaca

SEQ ID NO: 1756924 - RNA, 19 nt, Homo sapiens
  misc_RNA (1)...(19): siRNA sense strand
ucugaaagaagcaaauuga

SEQ ID NO: 1756925 - RNA, 19 nt, Homo sapiens
  misc_RNA (1)...(19): siRNA sense strand
acggagauccuuucuaaga

SEQ ID NO: 1756926 - RNA, 19 nt, Homo sapiens
  misc_RNA (1)...(19): siRNA sense strand
cugcuccauugguuaaaua

SEQ ID NO: 1756927 - RNA, 19 nt, Homo sapiens
  misc_RNA (1)...(19): siRNA sense strand
gaaagugacacggaucucu

SEQ ID NO: 1756928 - RNA, 19 nt, Homo sapiens
  misc_RNA (1)...(19): siRNA sense strand
gaagaccuuaccuccacua

SEQ ID NO: 1756929 - RNA, 19 nt, Homo sapiens
  misc_RNA (1)...(19): siRNA sense strand
gggcauuguuauugaugga

SEQ ID NO: 1756930 - RNA, 19 nt, Homo sapiens
  misc_RNA (1)...(19): siRNA sense strand
uaccagaccucgaccaaaa

SEQ ID NO: 1756931 - RNA, 19 nt, Homo sapiens
  misc_RNA (1)...(19): siRNA sense strand
gacaaggugaaaugggaua

SEQ ID NO: 1756932 - RNA, 19 nt, Homo sapiens
  misc_RNA (1)...(19): siRNA sense strand
auacaggaucugauuauga

SEQ ID NO: 1756933 - RNA, 19 nt, Homo sapiens
  misc_RNA (1)...(19): siRNA sense strand
ugaugcaaauaccugauga

SEQ ID NO: 1756934 - RNA, 19 nt, Homo sapiens
  misc_RNA (1)...(19): siRNA sense strand
ucagagacucaaagaaaga

SEQ ID NO: 1756935 - RNA, 19 nt, Homo sapiens
  misc_RNA (1)...(19): siRNA sense strand
gcgaugaggaugagguguu

SEQ ID NO: 1756936 - RNA, 19 nt, Homo sapiens
  misc_RNA (1)...(19): siRNA sense strand
cgaccagacgacaauguaa

SEQ ID NO: 1756937 - RNA, 19 nt, Homo sapiens
  misc_RNA (1)...(19): siRNA sense strand
gacaucagcauggcaguug

SEQ ID NO: 1756938 - RNA, 19 nt, Homo sapiens
  misc_RNA (1)...(19): siRNA sense strand
cugcacagcuauugacucu

SEQ ID NO: 1756939 - RNA, 19 nt, Homo sapiens
  misc_RNA (1)...(19): siRNA sense strand
caacucugcacagcuauug

SEQ ID NO: 1756940 - RNA, 19 nt, Homo sapiens
  misc_RNA (1)...(19): siRNA sense strand
gcugugacaaggugaaaug

SEQ ID NO: 1756941 - RNA, 19 nt, Homo sapiens
  misc_RNA (1)...(19): siRNA sense strand
gccaagauaauuacaacug

SEQ ID NO: 1756942 - RNA, 19 nt, Homo sapiens
  misc_RNA (1)...(19): siRNA sense strand
uggaagauuugagaaagug

SEQ ID NO: 1756943 - RNA, 19 nt, Homo sapiens
  misc_RNA (1)...(19): siRNA sense strand
acccaaaggagacuaauga

SEQ ID NO: 1756944 - RNA, 19 nt, Homo sapiens
  misc_RNA (1)...(19): siRNA sense strand
cagcuacacaagauaaaug

SEQ ID NO: 1756945 - RNA, 19 nt, Homo sapiens
  misc_RNA (1)...(19): siRNA sense strand
ccaaccgccuucuccaaag

SEQ ID NO: 1756946 - RNA, 19 nt, Homo sapiens
  misc_RNA (1)...(19): siRNA sense strand
ugauacaggaucugauuau

SEQ ID NO: 1756947 - RNA, 19 nt, Homo sapiens
  misc_RNA (1)...(19): siRNA sense strand
gaccuugauccuucgauga

SEQ ID NO: 1756948 - RNA, 19 nt, Homo sapiens
  misc_RNA (1)...(19): siRNA sense strand
gcagaacgauauggauucc

SEQ ID NO: 1756949 - RNA, 19 nt, Homo sapiens
  misc_RNA (1)...(19): siRNA sense strand
gcuauugacucuauuuucu

SEQ ID NO: 1756950 - RNA, 19 nt, Homo sapiens
  misc_RNA (1)...(19): siRNA sense strand
gauaaaugcagagggaaca

SEQ ID NO: 1756951 - RNA, 19 nt, Homo sapiens
  misc_RNA (1)...(19): siRNA sense strand
gaggaacuggcaucagaau

SEQ ID NO: 1756952 - RNA, 19 nt, Homo sapiens
  misc_RNA (1)...(19): siRNA sense strand
gguccuggcucuggcaaag

SEQ ID NO: 1756953 - RNA, 19 nt, Homo sapiens
  misc_RNA (1)...(19): siRNA sense strand
ggacacuggagagaucauu

SEQ ID NO: 1756954 - RNA, 19 nt, Homo sapiens
  misc_RNA (1)...(19): siRNA sense strand
gagguguucuaugacauca

SEQ ID NO: 1756955 - RNA, 19 nt, Homo sapiens
  misc_RNA (1)...(19): siRNA sense strand
cgaugaggaugagguguuc

SEQ ID NO: 1756956 - RNA, 19 nt, Homo sapiens
  misc_RNA (1)...(19): siRNA sense strand
cuccauugguuaaauacuu

SEQ ID NO: 1756957 - RNA, 19 nt, Homo sapiens
  misc_RNA (1)...(19): siRNA sense strand
cuaaucagagacucaaaga

SEQ ID NO: 1756958 - RNA, 19 nt, Homo sapiens
  misc_RNA (1)...(19): siRNA sense strand
ugugggagaauuauuaaga

SEQ ID NO: 1756959 - RNA, 19 nt, Homo sapiens
  misc_RNA (1)...(19): siRNA sense strand
ggagguuucauggaagauu

SEQ ID NO: 1756960 - RNA, 19 nt, Homo sapiens
  misc_RNA (1)...(19): siRNA sense strand
ucauggaagauuugagaaa

SEQ ID NO: 1756961 - RNA, 19 nt, Homo sapiens
  misc_RNA (1)...(19): siRNA sense strand
gaaucugaaagaagcaaau

SEQ ID NO: 1756962 - RNA, 19 nt, Homo sapiens
  misc_RNA (1)...(19): siRNA sense strand
acucaaacuuuccauaucg

SEQ ID NO: 1756963 - RNA, 19 nt, Homo sapiens
  misc_RNA (1)...(19): siRNA sense strand
gaccaaccgccuucuccaa

SEQ ID NO: 1756964 - RNA, 19 nt, Homo sapiens
  misc_RNA (1)...(19): siRNA sense strand
gcaagaguaucgccaauaa

SEQ ID NO: 1756965 - RNA, 19 nt, Homo sapiens
  misc_RNA (1)...(19): siRNA sense strand
gcacaaaucucgaaacaac

SEQ ID NO: 1756966 - RNA, 19 nt, Homo sapiens
  misc_RNA (1)...(19): siRNA sense strand
ggacauagacauccucauu

SEQ ID NO: 1756967 - RNA, 19 nt, Homo sapiens
  misc_RNA (1)...(19): siRNA sense strand
gcacaaggccaacaucaug

SEQ ID NO: 1756968 - RNA, 19 nt, Homo sapiens
  misc_RNA (1)...(19): siRNA sense strand
gaacaucuuuucagaacaa

SEQ ID NO: 1756969 - RNA, 19 nt, Homo sapiens
  misc_RNA (1)...(19): siRNA sense strand
gaacacagagggcgaguac

SEQ ID NO: 1756970 - RNA, 19 nt, Homo sapiens
  misc_RNA (1)...(19): siRNA sense strand
uggcauccauggacaauga

SEQ ID NO: 1756971 - RNA, 19 nt, Homo sapiens
  misc_RNA (1)...(19): siRNA sense strand
agaacaugauuguggauaa

SEQ ID NO: 1756972 - RNA, 19 nt, Homo sapiens
  misc_RNA (1)...(19): siRNA sense strand
gcacaaggacauagacauc

SEQ ID NO: 1756973 - RNA, 19 nt, Homo sapiens
  misc_RNA (1)...(19): siRNA sense strand
gaacaugauuguggauaac

SEQ ID NO: 1756974 - RNA, 19 nt, Homo sapiens
  misc_RNA (1)...(19): siRNA sense strand
guggagagccugaagauca

SEQ ID NO: 1756975 - RNA, 19 nt, Homo sapiens
  misc_RNA (1)...(19): siRNA sense strand
ccaacgucauccacuguaa

SEQ ID NO: 1756976 - RNA, 19 nt, Homo sapiens
  misc_RNA (1)...(19): siRNA sense strand
acauagacauccucauugu

SEQ ID NO: 1756977 - RNA, 19 nt, Homo sapiens
  misc_RNA (1)...(19): siRNA sense strand
gacauagacauccucauug

SEQ ID NO: 1756978 - RNA, 19 nt, Homo sapiens
  misc_RNA (1)...(19): siRNA sense strand
gagaacaugauuguggaua

SEQ ID NO: 1756979 - RNA, 19 nt, Homo sapiens
  misc_RNA (1)...(19): siRNA sense strand
gcacgugaguuccaaugcu

SEQ ID NO: 1756980 - RNA, 19 nt, Homo sapiens
  misc_RNA (1)...(19): siRNA sense strand
ucgcacaaaucucgaaaca

SEQ ID NO: 1756981 - RNA, 19 nt, Homo sapiens
  misc_RNA (1)...(19): siRNA sense strand
aagaguaucgccaauaaga

SEQ ID NO: 1756982 - RNA, 19 nt, Homo sapiens
  misc_RNA (1)...(19): siRNA sense strand
acagcagccuggagcauga

SEQ ID NO: 1756983 - RNA, 19 nt, Homo sapiens
  misc_RNA (1)...(19): siRNA sense strand
ggugaugcccaaucucuau

SEQ ID NO: 1756984 - RNA, 19 nt, Homo sapiens
  misc_RNA (1)...(19): siRNA sense strand
gccugaagaucaucaccaa

SEQ ID NO: 1756985 - RNA, 19 nt, Homo sapiens
  misc_RNA (1)...(19): siRNA sense strand
gaggaacaccggcaagagu

SEQ ID NO: 1756986 - RNA, 19 nt, Homo sapiens
  misc_RNA (1)...(19): siRNA sense strand
gaguuccaaugcugaugaa

SEQ ID NO: 1756987 - RNA, 19 nt, Homo sapiens
  misc_RNA (1)...(19): siRNA sense strand
ggcaagaguaucgccaaua

SEQ ID NO: 1756988 - RNA, 19 nt, Homo sapiens
  misc_RNA (1)...(19): siRNA sense strand
cagaucaccuucgagaaca

SEQ ID NO: 1756989 - RNA, 19 nt, Homo sapiens
  misc_RNA (1)...(19): siRNA sense strand
ggcaacaucgucaacaaug

SEQ ID NO: 1756990 - RNA, 19 nt, Homo sapiens
  misc_RNA (1)...(19): siRNA sense strand
ggaacaccggcaagaguau

SEQ ID NO: 1756991 - RNA, 19 nt, Homo sapiens
  misc_RNA (1)...(19): siRNA sense strand
gaagaggugcacgugaguu

SEQ ID NO: 1756992 - RNA, 19 nt, Homo sapiens
  misc_RNA (1)...(19): siRNA sense strand
ccaacuauggccaugugua

SEQ ID NO: 1756993 - RNA, 19 nt, Homo sapiens
  misc_RNA (1)...(19): siRNA sense strand
caauuccuccguccgcuaa

SEQ ID NO: 1756994 - RNA, 19 nt, Homo sapiens
  misc_RNA (1)...(19): siRNA sense strand
cgaggaacaucuuuucaga

SEQ ID NO: 1756995 - RNA, 19 nt, Homo sapiens
  misc_RNA (1)...(19): siRNA sense strand
caacuauggccauguguac

SEQ ID NO: 1756996 - RNA, 19 nt, Homo sapiens
  misc_RNA (1)...(19): siRNA sense strand
caaucucuauggcaacauc

SEQ ID NO: 1756997 - RNA, 19 nt, Homo sapiens
  misc_RNA (1)...(19): siRNA sense strand
guguaccaguggacuuuga

SEQ ID NO: 1756998 - RNA, 19 nt, Homo sapiens
  misc_RNA (1)...(19): siRNA sense strand
ccagcaguuugaugucaug

SEQ ID NO: 1756999 - RNA, 19 nt, Homo sapiens
  misc_RNA (1)...(19): siRNA sense strand
gccaagucccugcgcauug

SEQ ID NO: 1757000 - RNA, 19 nt, Homo sapiens
  misc_RNA (1)...(19): siRNA sense strand
caacaucgaaaccaaccau

SEQ ID NO: 1757001 - RNA, 19 nt, Homo sapiens
  misc_RNA (1)...(19): siRNA sense strand
gaguaucgccaauaagaac

SEQ ID NO: 1757002 - RNA, 19 nt, Homo sapiens
  misc_RNA (1)...(19): siRNA sense strand
guuccaaugcugaugaaga

SEQ ID NO: 1757003 - RNA, 19 nt, Homo sapiens
  misc_RNA (1)...(19): siRNA sense strand
ggacgucauccgccacauc

SEQ ID NO: 1757004 - RNA, 19 nt, Homo sapiens
  misc_RNA (1)...(19): siRNA sense strand
caaggccaacaucaugaaa

SEQ ID NO: 1757005 - RNA, 19 nt, Homo sapiens
  misc_RNA (1)...(19): siRNA sense strand
ccaagucccugcgcauugc

SEQ ID NO: 1757006 - RNA, 19 nt, Homo sapiens
  misc_RNA (1)...(19): siRNA sense strand
acaucgaaaccaaccauaa

SEQ ID NO: 1757007 - RNA, 19 nt, Homo sapiens
  misc_RNA (1)...(19): siRNA sense strand
gaacaccggcaagaguauc

SEQ ID NO: 1757008 - RNA, 19 nt, Homo sapiens
  misc_RNA (1)...(19): siRNA sense strand
gccaacgucauccacugua

SEQ ID NO: 1757009 - RNA, 19 nt, Homo sapiens
  misc_RNA (1)...(19): siRNA sense strand
ggcacacggugaccaugau

SEQ ID NO: 1757010 - RNA, 19 nt, Homo sapiens
  misc_RNA (1)...(19): siRNA sense strand
aggaacaccggcaagagua

SEQ ID NO: 1757011 - RNA, 19 nt, Homo sapiens
  misc_RNA (1)...(19): siRNA sense strand
cacaaggccaacaucauga

SEQ ID NO: 1757012 - RNA, 19 nt, Homo sapiens
  misc_RNA (1)...(19): siRNA sense strand
ugaguuccaaugcugauga

SEQ ID NO: 1757013 - RNA, 19 nt, Homo sapiens
  misc_RNA (1)...(19): siRNA sense strand
gaaacagcuacgaggaaca

SEQ ID NO: 1757014 - RNA, 19 nt, Homo sapiens
  misc_RNA (1)...(19): siRNA sense strand
ucagaucaccuucgagaac

SEQ ID NO: 1757015 - RNA, 19 nt, Homo sapiens
  misc_RNA (1)...(19): siRNA sense strand
aaacugggcgaugggcuuu

SEQ ID NO: 1757016 - RNA, 19 nt, Homo sapiens
  misc_RNA (1)...(19): siRNA sense strand
uggagagccugaagaucau

SEQ ID NO: 1757017 - RNA, 19 nt, Homo sapiens
  misc_RNA (1)...(19): siRNA sense strand
caucgaaaccaaccauaac

SEQ ID NO: 1757018 - RNA, 19 nt, Homo sapiens
  misc_RNA (1)...(19): siRNA sense strand
cggcaagaguaucgccaau

SEQ ID NO: 1757019 - RNA, 19 nt, Homo sapiens
  misc_RNA (1)...(19): siRNA sense strand
gcaugucaaguccgucuuc

SEQ ID NO: 1757020 - RNA, 19 nt, Homo sapiens
  misc_RNA (1)...(19): siRNA sense strand
acaaaucucgaaacaacau

SEQ ID NO: 1757021 - RNA, 19 nt, Homo sapiens
  misc_RNA (1)...(19): siRNA sense strand
ugaagaggacauucgcaau

SEQ ID NO: 1757022 - RNA, 19 nt, Homo sapiens
  misc_RNA (1)...(19): siRNA sense strand
ccacauccgcgucaucaac

SEQ ID NO: 1757023 - RNA, 19 nt, Homo sapiens
  misc_RNA (1)...(19): siRNA sense strand
ucauggugaugcccaaucu

SEQ ID NO: 1757024 - RNA, 19 nt, Homo sapiens
  misc_RNA (1)...(19): siRNA sense strand
acacagagggcgaguacag

SEQ ID NO: 1757025 - RNA, 19 nt, Homo sapiens
  misc_RNA (1)...(19): siRNA sense strand
ggccagggcacaacaucug

SEQ ID NO: 1757026 - RNA, 19 nt, Homo sapiens
  misc_RNA (1)...(19): siRNA sense strand
ggccaagucccugcgcauu

SEQ ID NO: 1757027 - RNA, 19 nt, Homo sapiens
  misc_RNA (1)...(19): siRNA sense strand
gcaagaguaucgccaauaa

SEQ ID NO: 1757028 - RNA, 19 nt, Homo sapiens
  misc_RNA (1)...(19): siRNA sense strand
gcacaaaucucgaaacaac

SEQ ID NO: 1757029 - RNA, 19 nt, Homo sapiens
  misc_RNA (1)...(19): siRNA sense strand
ggacauagacauccucauu

SEQ ID NO: 1757030 - RNA, 19 nt, Homo sapiens
  misc_RNA (1)...(19): siRNA sense strand
gcacaaggccaacaucaug

SEQ ID NO: 1757031 - RNA, 19 nt, Homo sapiens
  misc_RNA (1)...(19): siRNA sense strand
gaacaucuuuucagaacaa

SEQ ID NO: 1757032 - RNA, 19 nt, Homo sapiens
  misc_RNA (1)...(19): siRNA sense strand
gaacacagagggcgaguac

SEQ ID NO: 1757033 - RNA, 19 nt, Homo sapiens
  misc_RNA (1)...(19): siRNA sense strand
uggcauccauggacaauga

SEQ ID NO: 1757034 - RNA, 19 nt, Homo sapiens
  misc_RNA (1)...(19): siRNA sense strand
agaacaugauuguggauaa

SEQ ID NO: 1757035 - RNA, 19 nt, Homo sapiens
  misc_RNA (1)...(19): siRNA sense strand
gcacaaggacauagacauc

SEQ ID NO: 1757036 - RNA, 19 nt, Homo sapiens
  misc_RNA (1)...(19): siRNA sense strand
gaacaugauuguggauaac

SEQ ID NO: 1757037 - RNA, 19 nt, Homo sapiens
  misc_RNA (1)...(19): siRNA sense strand
guggagagccugaagauca

SEQ ID NO: 1757038 - RNA, 19 nt, Homo sapiens
  misc_RNA (1)...(19): siRNA sense strand
ccaacgucauccacuguaa

SEQ ID NO: 1757039 - RNA, 19 nt, Homo sapiens
  misc_RNA (1)...(19): siRNA sense strand
acauagacauccucauugu

SEQ ID NO: 1757040 - RNA, 19 nt, Homo sapiens
  misc_RNA (1)...(19): siRNA sense strand
gacauagacauccucauug

SEQ ID NO: 1757041 - RNA, 19 nt, Homo sapiens
  misc_RNA (1)...(19): siRNA sense strand
gagaacaugauuguggaua

SEQ ID NO: 1757042 - RNA, 19 nt, Homo sapiens
  misc_RNA (1)...(19): siRNA sense strand
gcacgugaguuccaaugcu

SEQ ID NO: 1757043 - RNA, 19 nt, Homo sapiens
  misc_RNA (1)...(19): siRNA sense strand
ucgcacaaaucucgaaaca

SEQ ID NO: 1757044 - RNA, 19 nt, Homo sapiens
  misc_RNA (1)...(19): siRNA sense strand
aagaguaucgccaauaaga

SEQ ID NO: 1757045 - RNA, 19 nt, Homo sapiens
  misc_RNA (1)...(19): siRNA sense strand
acagcagccuggagcauga

SEQ ID NO: 1757046 - RNA, 19 nt, Homo sapiens
  misc_RNA (1)...(19): siRNA sense strand
ggugaugcccaaucucuau

SEQ ID NO: 1757047 - RNA, 19 nt, Homo sapiens
  misc_RNA (1)...(19): siRNA sense strand
gccugaagaucaucaccaa

SEQ ID NO: 1757048 - RNA, 19 nt, Homo sapiens
  misc_RNA (1)...(19): siRNA sense strand
gaggaacaccggcaagagu

SEQ ID NO: 1757049 - RNA, 19 nt, Homo sapiens
  misc_RNA (1)...(19): siRNA sense strand
gaguuccaaugcugaugaa

SEQ ID NO: 1757050 - RNA, 19 nt, Homo sapiens
  misc_RNA (1)...(19): siRNA sense strand
ggcaagaguaucgccaaua

SEQ ID NO: 1757051 - RNA, 19 nt, Homo sapiens
  misc_RNA (1)...(19): siRNA sense strand
cagaucaccuucgagaaca

SEQ ID NO: 1757052 - RNA, 19 nt, Homo sapiens
  misc_RNA (1)...(19): siRNA sense strand
ggcaacaucgucaacaaug

SEQ ID NO: 1757053 - RNA, 19 nt, Homo sapiens
  misc_RNA (1)...(19): siRNA sense strand
ggaacaccggcaagaguau

SEQ ID NO: 1757054 - RNA, 19 nt, Homo sapiens
  misc_RNA (1)...(19): siRNA sense strand
gaagaggugcacgugaguu

SEQ ID NO: 1757055 - RNA, 19 nt, Homo sapiens
  misc_RNA (1)...(19): siRNA sense strand
ccaacuauggccaugugua

SEQ ID NO: 1757056 - RNA, 19 nt, Homo sapiens
  misc_RNA (1)...(19): siRNA sense strand
caauuccuccguccgcuaa

SEQ ID NO: 1757057 - RNA, 19 nt, Homo sapiens
  misc_RNA (1)...(19): siRNA sense strand
cgaggaacaucuuuucaga

SEQ ID NO: 1757058 - RNA, 19 nt, Homo sapiens
  misc_RNA (1)...(19): siRNA sense strand
caacuauggccauguguac

SEQ ID NO: 1757059 - RNA, 19 nt, Homo sapiens
  misc_RNA (1)...(19): siRNA sense strand
caaucucuauggcaacauc

SEQ ID NO: 1757060 - RNA, 19 nt, Homo sapiens
  misc_RNA (1)...(19): siRNA sense strand
guguaccaguggacuuuga

SEQ ID NO: 1757061 - RNA, 19 nt, Homo sapiens
  misc_RNA (1)...(19): siRNA sense strand
ccagcaguuugaugucaug

SEQ ID NO: 1757062 - RNA, 19 nt, Homo sapiens
  misc_RNA (1)...(19): siRNA sense strand
gccaagucccugcgcauug

SEQ ID NO: 1757063 - RNA, 19 nt, Homo sapiens
  misc_RNA (1)...(19): siRNA sense strand
caacaucgaaaccaaccau

SEQ ID NO: 1757064 - RNA, 19 nt, Homo sapiens
  misc_RNA (1)...(19): siRNA sense strand
gaguaucgccaauaagaac

SEQ ID NO: 1757065 - RNA, 19 nt, Homo sapiens
  misc_RNA (1)...(19): siRNA sense strand
guuccaaugcugaugaaga

SEQ ID NO: 1757066 - RNA, 19 nt, Homo sapiens
  misc_RNA (1)...(19): siRNA sense strand
caaggccaacaucaugaaa

SEQ ID NO: 1757067 - RNA, 19 nt, Homo sapiens
  misc_RNA (1)...(19): siRNA sense strand
ccaagucccugcgcauugc

SEQ ID NO: 1757068 - RNA, 19 nt, Homo sapiens
  misc_RNA (1)...(19): siRNA sense strand
acaucgaaaccaaccauaa

SEQ ID NO: 1757069 - RNA, 19 nt, Homo sapiens
  misc_RNA (1)...(19): siRNA sense strand
gaacaccggcaagaguauc

SEQ ID NO: 1757070 - RNA, 19 nt, Homo sapiens
  misc_RNA (1)...(19): siRNA sense strand
gccaacgucauccacugua

SEQ ID NO: 1757071 - RNA, 19 nt, Homo sapiens
  misc_RNA (1)...(19): siRNA sense strand
ggcacacggugaccaugau

SEQ ID NO: 1757072 - RNA, 19 nt, Homo sapiens
  misc_RNA (1)...(19): siRNA sense strand
aggaacaccggcaagagua

SEQ ID NO: 1757073 - RNA, 19 nt, Homo sapiens
  misc_RNA (1)...(19): siRNA sense strand
cacaaggccaacaucauga

SEQ ID NO: 1757074 - RNA, 19 nt, Homo sapiens
  misc_RNA (1)...(19): siRNA sense strand
ugaguuccaaugcugauga

SEQ ID NO: 1757075 - RNA, 19 nt, Homo sapiens
  misc_RNA (1)...(19): siRNA sense strand
gaaacagcuacgaggaaca

SEQ ID NO: 1757076 - RNA, 19 nt, Homo sapiens
  misc_RNA (1)...(19): siRNA sense strand
ucagaucaccuucgagaac

SEQ ID NO: 1757077 - RNA, 19 nt, Homo sapiens
  misc_RNA (1)...(19): siRNA sense strand
aaacugggcgaugggcuuu

SEQ ID NO: 1757078 - RNA, 19 nt, Homo sapiens
  misc_RNA (1)...(19): siRNA sense strand
uggagagccugaagaucau

SEQ ID NO: 1757079 - RNA, 19 nt, Homo sapiens
  misc_RNA (1)...(19): siRNA sense strand
caucgaaaccaaccauaac

SEQ ID NO: 1757080 - RNA, 19 nt, Homo sapiens
  misc_RNA (1)...(19): siRNA sense strand
cggcaagaguaucgccaau

SEQ ID NO: 1757081 - RNA, 19 nt, Homo sapiens
  misc_RNA (1)...(19): siRNA sense strand
gcaugucaaguccgucuuc

SEQ ID NO: 1757082 - RNA, 19 nt, Homo sapiens
  misc_RNA (1)...(19): siRNA sense strand
acaaaucucgaaacaacau

SEQ ID NO: 1757083 - RNA, 19 nt, Homo sapiens
  misc_RNA (1)...(19): siRNA sense strand
ugaagaggacauucgcaau

SEQ ID NO: 1757084 - RNA, 19 nt, Homo sapiens
  misc_RNA (1)...(19): siRNA sense strand
ucauggugaugcccaaucu

SEQ ID NO: 1757085 - RNA, 19 nt, Homo sapiens
  misc_RNA (1)...(19): siRNA sense strand
acacagagggcgaguacag

SEQ ID NO: 1757086 - RNA, 19 nt, Homo sapiens
  misc_RNA (1)...(19): siRNA sense strand
ggccaagucccugcgcauu

SEQ ID NO: 1757087 - RNA, 19 nt, Homo sapiens
  misc_RNA (1)...(19): siRNA sense strand
agaagaaacuggccugaaa

SEQ ID NO: 1757088 - RNA, 19 nt, Homo sapiens
  misc_RNA (1)...(19): siRNA sense strand
ggaccucgaugacuuuaga

SEQ ID NO: 1757089 - RNA, 19 nt, Homo sapiens
  misc_RNA (1)...(19): siRNA sense strand
gaagaaaucgagaaguuug

SEQ ID NO: 1757090 - RNA, 19 nt, Homo sapiens
  misc_RNA (1)...(19): siRNA sense strand
caaagaaugucccaaagag

SEQ ID NO: 1757091 - RNA, 19 nt, Homo sapiens
  misc_RNA (1)...(19): siRNA sense strand
gaaacuggccugaaagugu

SEQ ID NO: 1757092 - RNA, 19 nt, Homo sapiens
  misc_RNA (1)...(19): siRNA sense strand
gagaacggccuuucaaaug

SEQ ID NO: 1757093 - RNA, 19 nt, Homo sapiens
  misc_RNA (1)...(19): siRNA sense strand
cacagugccuucuccuuua

SEQ ID NO: 1757094 - RNA, 19 nt, Homo sapiens
  misc_RNA (1)...(19): siRNA sense strand
ggccagcucuccaaucuga

SEQ ID NO: 1757095 - RNA, 19 nt, Homo sapiens
  misc_RNA (1)...(19): siRNA sense strand
caacaacuuuggccucuuc

SEQ ID NO: 1757096 - RNA, 19 nt, Homo sapiens
  misc_RNA (1)...(19): siRNA sense strand
gaucugacccgaaucaaug

SEQ ID NO: 1757097 - RNA, 19 nt, Homo sapiens
  misc_RNA (1)...(19): siRNA sense strand
gaacucugcccaaagaaug

SEQ ID NO: 1757098 - RNA, 19 nt, Homo sapiens
  misc_RNA (1)...(19): siRNA sense strand
ccacagugccuucuccuuu

SEQ ID NO: 1757099 - RNA, 19 nt, Homo sapiens
  misc_RNA (1)...(19): siRNA sense strand
agaaacaguugaaccaaug

SEQ ID NO: 1757100 - RNA, 19 nt, Homo sapiens
  misc_RNA (1)...(19): siRNA sense strand
guaaaggucaaacaagaaa

SEQ ID NO: 1757101 - RNA, 19 nt, Homo sapiens
  misc_RNA (1)...(19): siRNA sense strand
ggagaacggccuuucaaau

SEQ ID NO: 1757102 - RNA, 19 nt, Homo sapiens
  misc_RNA (1)...(19): siRNA sense strand
gcaacuggaugcgcuaugu

SEQ ID NO: 1757103 - RNA, 19 nt, Homo sapiens
  misc_RNA (1)...(19): siRNA sense strand
gaagaucugacccgaauca

SEQ ID NO: 1757104 - RNA, 19 nt, Homo sapiens
  misc_RNA (1)...(19): siRNA sense strand
gagagaaaccauaccaaug

SEQ ID NO: 1757105 - RNA, 19 nt, Homo sapiens
  misc_RNA (1)...(19): siRNA sense strand
gaacggccuuucaaauguc

SEQ ID NO: 1757106 - RNA, 19 nt, Homo sapiens
  misc_RNA (1)...(19): siRNA sense strand
ggagagaaaccauaccaau

SEQ ID NO: 1757107 - RNA, 19 nt, Homo sapiens
  misc_RNA (1)...(19): siRNA sense strand
ccggagagcugacaaugau

SEQ ID NO: 1757108 - RNA, 19 nt, Homo sapiens
  misc_RNA (1)...(19): siRNA sense strand
ccacuucauugacggcuuu

SEQ ID NO: 1757109 - RNA, 19 nt, Homo sapiens
  misc_RNA (1)...(19): siRNA sense strand
ugaauggcaucaacaacuu

SEQ ID NO: 1757110 - RNA, 19 nt, Homo sapiens
  misc_RNA (1)...(19): siRNA sense strand
gaguacagcgugaaagaaa

SEQ ID NO: 1757111 - RNA, 19 nt, Homo sapiens
  misc_RNA (1)...(19): siRNA sense strand
aaugaacucugcccaaaga

SEQ ID NO: 1757112 - RNA, 19 nt, Homo sapiens
  misc_RNA (1)...(19): siRNA sense strand
gcaacaagggcuuuacuca

SEQ ID NO: 1757113 - RNA, 19 nt, Homo sapiens
  misc_RNA (1)...(19): siRNA sense strand
ggagagcugacaaugauga

SEQ ID NO: 1757114 - RNA, 19 nt, Homo sapiens
  misc_RNA (1)...(19): siRNA sense strand
ccgaaucaaugaagaaauc

SEQ ID NO: 1757115 - RNA, 19 nt, Homo sapiens
  misc_RNA (1)...(19): siRNA sense strand
gaacuacauccaucucugu

SEQ ID NO: 1757116 - RNA, 19 nt, Homo sapiens
  misc_RNA (1)...(19): siRNA sense strand
gagaguacagcgugaaaga

SEQ ID NO: 1757117 - RNA, 19 nt, Homo sapiens
  misc_RNA (1)...(19): siRNA sense strand
agaacggccuuucaaaugu

SEQ ID NO: 1757118 - RNA, 19 nt, Homo sapiens
  misc_RNA (1)...(19): siRNA sense strand
gagcuucaccacuucauug

SEQ ID NO: 1757119 - RNA, 19 nt, Homo sapiens
  misc_RNA (1)...(19): siRNA sense strand
uggaagaucugacccgaau

SEQ ID NO: 1757120 - RNA, 19 nt, Homo sapiens
  misc_RNA (1)...(19): siRNA sense strand
ggucaaacaagaaacaguu

SEQ ID NO: 1757121 - RNA, 19 nt, Homo sapiens
  misc_RNA (1)...(19): siRNA sense strand
gaacuucuugugugguauu

SEQ ID NO: 1757122 - RNA, 19 nt, Homo sapiens
  misc_RNA (1)...(19): siRNA sense strand
ccaaagaaugucccaaaga

SEQ ID NO: 1757123 - RNA, 19 nt, Homo sapiens
  misc_RNA (1)...(19): siRNA sense strand
ccucuaccguucuaacauu

SEQ ID NO: 1757124 - RNA, 19 nt, Homo sapiens
  misc_RNA (1)...(19): siRNA sense strand
augaagaaaucgagaaguu

SEQ ID NO: 1757125 - RNA, 19 nt, Homo sapiens
  misc_RNA (1)...(19): siRNA sense strand
ggugugcccugccaaguuc

SEQ ID NO: 1757126 - RNA, 19 nt, Homo sapiens
  misc_RNA (1)...(19): siRNA sense strand
gagaaaccauaccaaugca

SEQ ID NO: 1757127 - RNA, 19 nt, Homo sapiens
  misc_RNA (1)...(19): siRNA sense strand
ggacuccuacgcuuacuug

SEQ ID NO: 1757128 - RNA, 19 nt, Homo sapiens
  misc_RNA (1)...(19): siRNA sense strand
ccuacggcaugaauuguaa

SEQ ID NO: 1757129 - RNA, 19 nt, Homo sapiens
  misc_RNA (1)...(19): siRNA sense strand
caaacaagaaacaguugaa

SEQ ID NO: 1757130 - RNA, 19 nt, Homo sapiens
  misc_RNA (1)...(19): siRNA sense strand
caaacacagagcagucuaa

SEQ ID NO: 1757131 - RNA, 19 nt, Homo sapiens
  misc_RNA (1)...(19): siRNA sense strand
cuguaaaggucaaacaaga

SEQ ID NO: 1757132 - RNA, 19 nt, Homo sapiens
  misc_RNA (1)...(19): siRNA sense strand
gaagaaacuggccugaaag

SEQ ID NO: 1757133 - RNA, 19 nt, Homo sapiens
  misc_RNA (1)...(19): siRNA sense strand
ucgaggacguggaggauga

SEQ ID NO: 1757134 - RNA, 19 nt, Homo sapiens
  misc_RNA (1)...(19): siRNA sense strand
gagaaaagccacaugaaug

SEQ ID NO: 1757135 - RNA, 19 nt, Homo sapiens
  misc_RNA (1)...(19): siRNA sense strand
gcccaaagaaugucccaaa

SEQ ID NO: 1757136 - RNA, 19 nt, Homo sapiens
  misc_RNA (1)...(19): siRNA sense strand
uaaagcaaccgagcacuga

SEQ ID NO: 1757137 - RNA, 19 nt, Homo sapiens
  misc_RNA (1)...(19): siRNA sense strand
gaauggcaucaacaacuuu

SEQ ID NO: 1757138 - RNA, 19 nt, Homo sapiens
  misc_RNA (1)...(19): siRNA sense strand
uugaaccaauggauccuua

SEQ ID NO: 1757139 - RNA, 19 nt, Homo sapiens
  misc_RNA (1)...(19): siRNA sense strand
ugaugaaucucacacaaac

SEQ ID NO: 1757140 - RNA, 19 nt, Homo sapiens
  misc_RNA (1)...(19): siRNA sense strand
aaacaugaccggcuacaag

SEQ ID NO: 1757141 - RNA, 19 nt, Homo sapiens
  misc_RNA (1)...(19): siRNA sense strand
acagagcagucuaaagcaa

SEQ ID NO: 1757142 - RNA, 19 nt, Homo sapiens
  misc_RNA (1)...(19): siRNA sense strand
aagaaacaguugaaccaau

SEQ ID NO: 1757143 - RNA, 19 nt, Homo sapiens
  misc_RNA (1)...(19): siRNA sense strand
gugcagccuuuaugaguca

SEQ ID NO: 1757144 - RNA, 19 nt, Homo sapiens
  misc_RNA (1)...(19): siRNA sense strand
gaggggagcuucaccacuu

SEQ ID NO: 1757145 - RNA, 19 nt, Homo sapiens
  misc_RNA (1)...(19): siRNA sense strand
cgagaaguuugacaucagu

SEQ ID NO: 1757146 - RNA, 19 nt, Homo sapiens
  misc_RNA (1)...(19): siRNA sense strand
ucaaaugucagacuugcaa

SEQ ID NO: 1757147 - RNA, 19 nt, Homo sapiens
  misc_RNA (1)...(19): siRNA sense strand
caaguacgaaugcaacguu

SEQ ID NO: 1757148 - RNA, 19 nt, Homo sapiens
  misc_RNA (1)...(19): siRNA sense strand
gagagacccacguacauca

SEQ ID NO: 1757149 - RNA, 19 nt, Homo sapiens
  misc_RNA (1)...(19): siRNA sense strand
gagcugacaaugaugaauc

SEQ ID NO: 1757150 - RNA, 19 nt, Homo sapiens
  misc_RNA (1)...(19): siRNA sense strand
cggcuuuaaugaagagaaa

SEQ ID NO: 1757151 - RNA, 19 nt, Homo sapiens
  misc_RNA (1)...(19): siRNA sense strand
ugaagaaaucgagaaguuu

SEQ ID NO: 1757152 - RNA, 19 nt, Homo sapiens
  misc_RNA (1)...(19): siRNA sense strand
gcaugaauggcaucaacaa

SEQ ID NO: 1757153 - RNA, 19 nt, Homo sapiens
  misc_RNA (1)...(19): siRNA sense strand
gagagaguacagcgugaaa

SEQ ID NO: 1757154 - RNA, 19 nt, Homo sapiens
  misc_RNA (1)...(19): siRNA sense strand
aaaaggaccucgaugacuu

SEQ ID NO: 1757155 - RNA, 19 nt, Homo sapiens
  misc_RNA (1)...(19): siRNA sense strand
caaaggaaaggaccucuac

SEQ ID NO: 1757156 - RNA, 19 nt, Homo sapiens
  misc_RNA (1)...(19): siRNA sense strand
cagcaugaauggcaucaac

SEQ ID NO: 1757157 - RNA, 19 nt, Homo sapiens
  misc_RNA (1)...(19): siRNA sense strand
aaugaugaaucucacacaa

SEQ ID NO: 1757158 - RNA, 19 nt, Homo sapiens
  misc_RNA (1)...(19): siRNA sense strand
aggaacuucuuguguggua

SEQ ID NO: 1757159 - RNA, 19 nt, Homo sapiens
  misc_RNA (1)...(19): siRNA sense strand
acacagagcagucuaaagc

SEQ ID NO: 1757160 - RNA, 19 nt, Homo sapiens
  misc_RNA (1)...(19): siRNA sense strand
aaaaugaacucugcccaaa

SEQ ID NO: 1757161 - RNA, 19 nt, Homo sapiens
  misc_RNA (1)...(19): siRNA sense strand
ugccaggucugccacaaga

SEQ ID NO: 1757162 - RNA, 19 nt, Homo sapiens
  misc_RNA (1)...(19): siRNA sense strand
ugucgggacuuugcagaaa

SEQ ID NO: 1757163 - RNA, 19 nt, Homo sapiens
  misc_RNA (1)...(19): siRNA sense strand
cacagcagcccugggaaua

SEQ ID NO: 1757164 - RNA, 19 nt, Homo sapiens
  misc_RNA (1)...(19): siRNA sense strand
ugacaucagugacaaugcu

SEQ ID NO: 1757165 - RNA, 19 nt, Homo sapiens
  misc_RNA (1)...(19): siRNA sense strand
gcaagaucaaguacgaaug

SEQ ID NO: 1757166 - RNA, 19 nt, Homo sapiens
  misc_RNA (1)...(19): siRNA sense strand
aagcagaacggcaagauca

SEQ ID NO: 1757167 - RNA, 19 nt, Homo sapiens
  misc_RNA (1)...(19): siRNA sense strand
aaacacagagcagucuaaa

SEQ ID NO: 1757168 - RNA, 19 nt, Homo sapiens
  misc_RNA (1)...(19): siRNA sense strand
caagaaacaguugaaccaa

SEQ ID NO: 1757169 - RNA, 19 nt, Homo sapiens
  misc_RNA (1)...(19): siRNA sense strand
ugacccgaaucaaugaaga

SEQ ID NO: 1757170 - RNA, 19 nt, Homo sapiens
  misc_RNA (1)...(19): siRNA sense strand
gaaacaugaccggcuacaa

SEQ ID NO: 1757171 - RNA, 19 nt, Homo sapiens
  misc_RNA (1)...(19): siRNA sense strand
gacgaagccaugaaucuca

SEQ ID NO: 1757172 - RNA, 19 nt, Homo sapiens
  misc_RNA (1)...(19): siRNA sense strand
ccaaaggaaaggaccucua

SEQ ID NO: 1757173 - RNA, 19 nt, Homo sapiens
  misc_RNA (1)...(19): siRNA sense strand
guacagcgugaaagaaauc

SEQ ID NO: 1757174 - RNA, 19 nt, Homo sapiens
  misc_RNA (1)...(19): siRNA sense strand
gaagcagaacggcaagauc

SEQ ID NO: 1757175 - RNA, 19 nt, Homo sapiens
  misc_RNA (1)...(19): siRNA sense strand
gaacggcaagaucaaguac

SEQ ID NO: 1757176 - RNA, 19 nt, Homo sapiens
  misc_RNA (1)...(19): siRNA sense strand
ggagaaaagccacaugaau

SEQ ID NO: 1757177 - RNA, 19 nt, Homo sapiens
  misc_RNA (1)...(19): siRNA sense strand
ucaaugaagaaaucgagaa

SEQ ID NO: 1757178 - RNA, 19 nt, Homo sapiens
  misc_RNA (1)...(19): siRNA sense strand
ccacaagaacuacauccau

SEQ ID NO: 1757179 - RNA, 19 nt, Homo sapiens
  misc_RNA (1)...(19): siRNA sense strand
ggaucgagagacccacgua

SEQ ID NO: 1757180 - RNA, 19 nt, Homo sapiens
  misc_RNA (1)...(19): siRNA sense strand
gaaaagagaaagaagaaac

SEQ ID NO: 1757181 - RNA, 19 nt, Homo sapiens
  misc_RNA (1)...(19): siRNA sense strand
gagagugcacaguggagaa

SEQ ID NO: 1757182 - RNA, 19 nt, Homo sapiens
  misc_RNA (1)...(19): siRNA sense strand
caagaucaaguacgaaugc

SEQ ID NO: 1757183 - RNA, 19 nt, Homo sapiens
  misc_RNA (1)...(19): siRNA sense strand
agagaaaccauaccaaugc

SEQ ID NO: 1757184 - RNA, 19 nt, Homo sapiens
  misc_RNA (1)...(19): siRNA sense strand
gaaaucgagaaguuugaca

SEQ ID NO: 1757185 - RNA, 19 nt, Homo sapiens
  misc_RNA (1)...(19): siRNA sense strand
ggagcuucaccacuucauu

SEQ ID NO: 1757186 - RNA, 19 nt, Homo sapiens
  misc_RNA (1)...(19): siRNA sense strand
caaccaggaacuucuugug

SEQ ID NO: 1757187 - RNA, 19 nt, Homo sapiens
  misc_RNA (1)...(19): siRNA sense strand
agaagaaacuggccugaaa

SEQ ID NO: 1757188 - RNA, 19 nt, Homo sapiens
  misc_RNA (1)...(19): siRNA sense strand
ggaccucgaugacuuuaga

SEQ ID NO: 1757189 - RNA, 19 nt, Homo sapiens
  misc_RNA (1)...(19): siRNA sense strand
gaagaaaucgagaaguuug

SEQ ID NO: 1757190 - RNA, 19 nt, Homo sapiens
  misc_RNA (1)...(19): siRNA sense strand
caaagaaugucccaaagag

SEQ ID NO: 1757191 - RNA, 19 nt, Homo sapiens
  misc_RNA (1)...(19): siRNA sense strand
gaaacuggccugaaagugu

SEQ ID NO: 1757192 - RNA, 19 nt, Homo sapiens
  misc_RNA (1)...(19): siRNA sense strand
gagaacggccuuucaaaug

SEQ ID NO: 1757193 - RNA, 19 nt, Homo sapiens
  misc_RNA (1)...(19): siRNA sense strand
cacagugccuucuccuuua

SEQ ID NO: 1757194 - RNA, 19 nt, Homo sapiens
  misc_RNA (1)...(19): siRNA sense strand
ggccagcucuccaaucuga

SEQ ID NO: 1757195 - RNA, 19 nt, Homo sapiens
  misc_RNA (1)...(19): siRNA sense strand
caacaacuuuggccucuuc

SEQ ID NO: 1757196 - RNA, 19 nt, Homo sapiens
  misc_RNA (1)...(19): siRNA sense strand
gaucugacccgaaucaaug

SEQ ID NO: 1757197 - RNA, 19 nt, Homo sapiens
  misc_RNA (1)...(19): siRNA sense strand
gaacucugcccaaagaaug

SEQ ID NO: 1757198 - RNA, 19 nt, Homo sapiens
  misc_RNA (1)...(19): siRNA sense strand
ccacagugccuucuccuuu

SEQ ID NO: 1757199 - RNA, 19 nt, Homo sapiens
  misc_RNA (1)...(19): siRNA sense strand
agaaacaguugaaccaaug

SEQ ID NO: 1757200 - RNA, 19 nt, Homo sapiens
  misc_RNA (1)...(19): siRNA sense strand
guaaaggucaaacaagaaa

SEQ ID NO: 1757201 - RNA, 19 nt, Homo sapiens
  misc_RNA (1)...(19): siRNA sense strand
ggagaacggccuuucaaau

SEQ ID NO: 1757202 - RNA, 19 nt, Homo sapiens
  misc_RNA (1)...(19): siRNA sense strand
gcaacuggaugcgcuaugu

SEQ ID NO: 1757203 - RNA, 19 nt, Homo sapiens
  misc_RNA (1)...(19): siRNA sense strand
gaagaucugacccgaauca

SEQ ID NO: 1757204 - RNA, 19 nt, Homo sapiens
  misc_RNA (1)...(19): siRNA sense strand
gagagaaaccauaccaaug

SEQ ID NO: 1757205 - RNA, 19 nt, Homo sapiens
  misc_RNA (1)...(19): siRNA sense strand
gaacggccuuucaaauguc

SEQ ID NO: 1757206 - RNA, 19 nt, Homo sapiens
  misc_RNA (1)...(19): siRNA sense strand
ggagagaaaccauaccaau

SEQ ID NO: 1757207 - RNA, 19 nt, Homo sapiens
  misc_RNA (1)...(19): siRNA sense strand
ccggagagcugacaaugau

SEQ ID NO: 1757208 - RNA, 19 nt, Homo sapiens
  misc_RNA (1)...(19): siRNA sense strand
ccacuucauugacggcuuu

SEQ ID NO: 1757209 - RNA, 19 nt, Homo sapiens
  misc_RNA (1)...(19): siRNA sense strand
ugaauggcaucaacaacuu

SEQ ID NO: 1757210 - RNA, 19 nt, Homo sapiens
  misc_RNA (1)...(19): siRNA sense strand
gaguacagcgugaaagaaa

SEQ ID NO: 1757211 - RNA, 19 nt, Homo sapiens
  misc_RNA (1)...(19): siRNA sense strand
aaugaacucugcccaaaga

SEQ ID NO: 1757212 - RNA, 19 nt, Homo sapiens
  misc_RNA (1)...(19): siRNA sense strand
gcaacaagggcuuuacuca

SEQ ID NO: 1757213 - RNA, 19 nt, Homo sapiens
  misc_RNA (1)...(19): siRNA sense strand
ggagagcugacaaugauga

SEQ ID NO: 1757214 - RNA, 19 nt, Homo sapiens
  misc_RNA (1)...(19): siRNA sense strand
ccgaaucaaugaagaaauc

SEQ ID NO: 1757215 - RNA, 19 nt, Homo sapiens
  misc_RNA (1)...(19): siRNA sense strand
gaacuacauccaucucugu

SEQ ID NO: 1757216 - RNA, 19 nt, Homo sapiens
  misc_RNA (1)...(19): siRNA sense strand
gagaguacagcgugaaaga

SEQ ID NO: 1757217 - RNA, 19 nt, Homo sapiens
  misc_RNA (1)...(19): siRNA sense strand
agaacggccuuucaaaugu

SEQ ID NO: 1757218 - RNA, 19 nt, Homo sapiens
  misc_RNA (1)...(19): siRNA sense strand
gagcuucaccacuucauug

SEQ ID NO: 1757219 - RNA, 19 nt, Homo sapiens
  misc_RNA (1)...(19): siRNA sense strand
uggaagaucugacccgaau

SEQ ID NO: 1757220 - RNA, 19 nt, Homo sapiens
  misc_RNA (1)...(19): siRNA sense strand
ggucaaacaagaaacaguu

SEQ ID NO: 1757221 - RNA, 19 nt, Homo sapiens
  misc_RNA (1)...(19): siRNA sense strand
gaacuucuugugugguauu

SEQ ID NO: 1757222 - RNA, 19 nt, Homo sapiens
  misc_RNA (1)...(19): siRNA sense strand
ccaaagaaugucccaaaga

SEQ ID NO: 1757223 - RNA, 19 nt, Homo sapiens
  misc_RNA (1)...(19): siRNA sense strand
ccucuaccguucuaacauu

SEQ ID NO: 1757224 - RNA, 19 nt, Homo sapiens
  misc_RNA (1)...(19): siRNA sense strand
augaagaaaucgagaaguu

SEQ ID NO: 1757225 - RNA, 19 nt, Homo sapiens
  misc_RNA (1)...(19): siRNA sense strand
ggugugcccugccaaguuc

SEQ ID NO: 1757226 - RNA, 19 nt, Homo sapiens
  misc_RNA (1)...(19): siRNA sense strand
gagaaaccauaccaaugca

SEQ ID NO: 1757227 - RNA, 19 nt, Homo sapiens
  misc_RNA (1)...(19): siRNA sense strand
ggacuccuacgcuuacuug

SEQ ID NO: 1757228 - RNA, 19 nt, Homo sapiens
  misc_RNA (1)...(19): siRNA sense strand
ccuacggcaugaauuguaa

SEQ ID NO: 1757229 - RNA, 19 nt, Homo sapiens
  misc_RNA (1)...(19): siRNA sense strand
caaacaagaaacaguugaa

SEQ ID NO: 1757230 - RNA, 19 nt, Homo sapiens
  misc_RNA (1)...(19): siRNA sense strand
caaacacagagcagucuaa

SEQ ID NO: 1757231 - RNA, 19 nt, Homo sapiens
  misc_RNA (1)...(19): siRNA sense strand
cuguaaaggucaaacaaga

SEQ ID NO: 1757232 - RNA, 19 nt, Homo sapiens
  misc_RNA (1)...(19): siRNA sense strand
gaagaaacuggccugaaag

SEQ ID NO: 1757233 - RNA, 19 nt, Homo sapiens
  misc_RNA (1)...(19): siRNA sense strand
ucgaggacguggaggauga

SEQ ID NO: 1757234 - RNA, 19 nt, Homo sapiens
  misc_RNA (1)...(19): siRNA sense strand
gagaaaagccacaugaaug

SEQ ID NO: 1757235 - RNA, 19 nt, Homo sapiens
  misc_RNA (1)...(19): siRNA sense strand
gcccaaagaaugucccaaa

SEQ ID NO: 1757236 - RNA, 19 nt, Homo sapiens
  misc_RNA (1)...(19): siRNA sense strand
uaaagcaaccgagcacuga

SEQ ID NO: 1757237 - RNA, 19 nt, Homo sapiens
  misc_RNA (1)...(19): siRNA sense strand
gaauggcaucaacaacuuu

SEQ ID NO: 1757238 - RNA, 19 nt, Homo sapiens
  misc_RNA (1)...(19): siRNA sense strand
uugaaccaauggauccuua

SEQ ID NO: 1757239 - RNA, 19 nt, Homo sapiens
  misc_RNA (1)...(19): siRNA sense strand
ugaugaaucucacacaaac

SEQ ID NO: 1757240 - RNA, 19 nt, Homo sapiens
  misc_RNA (1)...(19): siRNA sense strand
aaacaugaccggcuacaag

SEQ ID NO: 1757241 - RNA, 19 nt, Homo sapiens
  misc_RNA (1)...(19): siRNA sense strand
acagagcagucuaaagcaa

SEQ ID NO: 1757242 - RNA, 19 nt, Homo sapiens
  misc_RNA (1)...(19): siRNA sense strand
aagaaacaguugaaccaau

SEQ ID NO: 1757243 - RNA, 19 nt, Homo sapiens
  misc_RNA (1)...(19): siRNA sense strand
gugcagccuuuaugaguca

SEQ ID NO: 1757244 - RNA, 19 nt, Homo sapiens
  misc_RNA (1)...(19): siRNA sense strand
gaggggagcuucaccacuu

SEQ ID NO: 1757245 - RNA, 19 nt, Homo sapiens
  misc_RNA (1)...(19): siRNA sense strand
cgagaaguuugacaucagu

SEQ ID NO: 1757246 - RNA, 19 nt, Homo sapiens
  misc_RNA (1)...(19): siRNA sense strand
ucaaaugucagacuugcaa

SEQ ID NO: 1757247 - RNA, 19 nt, Homo sapiens
  misc_RNA (1)...(19): siRNA sense strand
caaguacgaaugcaacguu

SEQ ID NO: 1757248 - RNA, 19 nt, Homo sapiens
  misc_RNA (1)...(19): siRNA sense strand
gagagacccacguacauca

SEQ ID NO: 1757249 - RNA, 19 nt, Homo sapiens
  misc_RNA (1)...(19): siRNA sense strand
gagcugacaaugaugaauc

SEQ ID NO: 1757250 - RNA, 19 nt, Homo sapiens
  misc_RNA (1)...(19): siRNA sense strand
cggcuuuaaugaagagaaa

SEQ ID NO: 1757251 - RNA, 19 nt, Homo sapiens
  misc_RNA (1)...(19): siRNA sense strand
ugaagaaaucgagaaguuu

SEQ ID NO: 1757252 - RNA, 19 nt, Homo sapiens
  misc_RNA (1)...(19): siRNA sense strand
gcaugaauggcaucaacaa

SEQ ID NO: 1757253 - RNA, 19 nt, Homo sapiens
  misc_RNA (1)...(19): siRNA sense strand
gagagaguacagcgugaaa

SEQ ID NO: 1757254 - RNA, 19 nt, Homo sapiens
  misc_RNA (1)...(19): siRNA sense strand
aaaaggaccucgaugacuu

SEQ ID NO: 1757255 - RNA, 19 nt, Homo sapiens
  misc_RNA (1)...(19): siRNA sense strand
caaaggaaaggaccucuac

SEQ ID NO: 1757256 - RNA, 19 nt, Homo sapiens
  misc_RNA (1)...(19): siRNA sense strand
cagcaugaauggcaucaac

SEQ ID NO: 1757257 - RNA, 19 nt, Homo sapiens
  misc_RNA (1)...(19): siRNA sense strand
aaugaugaaucucacacaa

SEQ ID NO: 1757258 - RNA, 19 nt, Homo sapiens
  misc_RNA (1)...(19): siRNA sense strand
aggaacuucuuguguggua

SEQ ID NO: 1757259 - RNA, 19 nt, Homo sapiens
  misc_RNA (1)...(19): siRNA sense strand
acacagagcagucuaaagc

SEQ ID NO: 1757260 - RNA, 19 nt, Homo sapiens
  misc_RNA (1)...(19): siRNA sense strand
aaaaugaacucugcccaaa

SEQ ID NO: 1757261 - RNA, 19 nt, Homo sapiens
  misc_RNA (1)...(19): siRNA sense strand
ugccaggucugccacaaga

SEQ ID NO: 1757262 - RNA, 19 nt, Homo sapiens
  misc_RNA (1)...(19): siRNA sense strand
ugucgggacuuugcagaaa

SEQ ID NO: 1757263 - RNA, 19 nt, Homo sapiens
  misc_RNA (1)...(19): siRNA sense strand
cacagcagcccugggaaua

SEQ ID NO: 1757264 - RNA, 19 nt, Homo sapiens
  misc_RNA (1)...(19): siRNA sense strand
ugacaucagugacaaugcu

SEQ ID NO: 1757265 - RNA, 19 nt, Homo sapiens
  misc_RNA (1)...(19): siRNA sense strand
gcaagaucaaguacgaaug

SEQ ID NO: 1757266 - RNA, 19 nt, Homo sapiens
  misc_RNA (1)...(19): siRNA sense strand
aagcagaacggcaagauca

SEQ ID NO: 1757267 - RNA, 19 nt, Homo sapiens
  misc_RNA (1)...(19): siRNA sense strand
aaacacagagcagucuaaa

SEQ ID NO: 1757268 - RNA, 19 nt, Homo sapiens
  misc_RNA (1)...(19): siRNA sense strand
caagaaacaguugaaccaa

SEQ ID NO: 1757269 - RNA, 19 nt, Homo sapiens
  misc_RNA (1)...(19): siRNA sense strand
ugacccgaaucaaugaaga

SEQ ID NO: 1757270 - RNA, 19 nt, Homo sapiens
  misc_RNA (1)...(19): siRNA sense strand
gaaacaugaccggcuacaa

SEQ ID NO: 1757271 - RNA, 19 nt, Homo sapiens
  misc_RNA (1)...(19): siRNA sense strand
gacgaagccaugaaucuca

SEQ ID NO: 1757272 - RNA, 19 nt, Homo sapiens
  misc_RNA (1)...(19): siRNA sense strand
ccaaaggaaaggaccucua

SEQ ID NO: 1757273 - RNA, 19 nt, Homo sapiens
  misc_RNA (1)...(19): siRNA sense strand
guacagcgugaaagaaauc

SEQ ID NO: 1757274 - RNA, 19 nt, Homo sapiens
  misc_RNA (1)...(19): siRNA sense strand
gaagcagaacggcaagauc

SEQ ID NO: 1757275 - RNA, 19 nt, Homo sapiens
  misc_RNA (1)...(19): siRNA sense strand
gaacggcaagaucaaguac

SEQ ID NO: 1757276 - RNA, 19 nt, Homo sapiens
  misc_RNA (1)...(19): siRNA sense strand
ggagaaaagccacaugaau

SEQ ID NO: 1757277 - RNA, 19 nt, Homo sapiens
  misc_RNA (1)...(19): siRNA sense strand
ucaaugaagaaaucgagaa

SEQ ID NO: 1757278 - RNA, 19 nt, Homo sapiens
  misc_RNA (1)...(19): siRNA sense strand
ccacaagaacuacauccau

SEQ ID NO: 1757279 - RNA, 19 nt, Homo sapiens
  misc_RNA (1)...(19): siRNA sense strand
ggaucgagagacccacgua

SEQ ID NO: 1757280 - RNA, 19 nt, Homo sapiens
  misc_RNA (1)...(19): siRNA sense strand
gaaaagagaaagaagaaac

SEQ ID NO: 1757281 - RNA, 19 nt, Homo sapiens
  misc_RNA (1)...(19): siRNA sense strand
gagagugcacaguggagaa

SEQ ID NO: 1757282 - RNA, 19 nt, Homo sapiens
  misc_RNA (1)...(19): siRNA sense strand
caagaucaaguacgaaugc

SEQ ID NO: 1757283 - RNA, 19 nt, Homo sapiens
  misc_RNA (1)...(19): siRNA sense strand
agagaaaccauaccaaugc

SEQ ID NO: 1757284 - RNA, 19 nt, Homo sapiens
  misc_RNA (1)...(19): siRNA sense strand
gaaaucgagaaguuugaca

SEQ ID NO: 1757285 - RNA, 19 nt, Homo sapiens
  misc_RNA (1)...(19): siRNA sense strand
ggagcuucaccacuucauu

SEQ ID NO: 1757286 - RNA, 19 nt, Homo sapiens
  misc_RNA (1)...(19): siRNA sense strand
caaccaggaacuucuugug

SEQ ID NO: 1757287 - RNA, 19 nt, Homo sapiens
  misc_RNA (1)...(19): siRNA sense strand
agaagaaacuggccugaaa

SEQ ID NO: 1757288 - RNA, 19 nt, Homo sapiens
  misc_RNA (1)...(19): siRNA sense strand
ggaccucgaugacuuuaga

SEQ ID NO: 1757289 - RNA, 19 nt, Homo sapiens
  misc_RNA (1)...(19): siRNA sense strand
gaagaaaucgagaaguuug

SEQ ID NO: 1757290 - RNA, 19 nt, Homo sapiens
  misc_RNA (1)...(19): siRNA sense strand
caaagaaugucccaaagag

SEQ ID NO: 1757291 - RNA, 19 nt, Homo sapiens
  misc_RNA (1)...(19): siRNA sense strand
gaaacuggccugaaagugu

SEQ ID NO: 1757292 - RNA, 19 nt, Homo sapiens
  misc_RNA (1)...(19): siRNA sense strand
gagaacggccuuucaaaug

SEQ ID NO: 1757293 - RNA, 19 nt, Homo sapiens
  misc_RNA (1)...(19): siRNA sense strand
cacagugccuucuccuuua

SEQ ID NO: 1757294 - RNA, 19 nt, Homo sapiens
  misc_RNA (1)...(19): siRNA sense strand
ggccagcucuccaaucuga

SEQ ID NO: 1757295 - RNA, 19 nt, Homo sapiens
  misc_RNA (1)...(19): siRNA sense strand
caacaacuuuggccucuuc

SEQ ID NO: 1757296 - RNA, 19 nt, Homo sapiens
  misc_RNA (1)...(19): siRNA sense strand
gaucugacccgaaucaaug

SEQ ID NO: 1757297 - RNA, 19 nt, Homo sapiens
  misc_RNA (1)...(19): siRNA sense strand
gaacucugcccaaagaaug

SEQ ID NO: 1757298 - RNA, 19 nt, Homo sapiens
  misc_RNA (1)...(19): siRNA sense strand
ccacagugccuucuccuuu

SEQ ID NO: 1757299 - RNA, 19 nt, Homo sapiens
  misc_RNA (1)...(19): siRNA sense strand
agaaacaguugaaccaaug

SEQ ID NO: 1757300 - RNA, 19 nt, Homo sapiens
  misc_RNA (1)...(19): siRNA sense strand
guaaaggucaaacaagaaa

SEQ ID NO: 1757301 - RNA, 19 nt, Homo sapiens
  misc_RNA (1)...(19): siRNA sense strand
ggagaacggccuuucaaau

SEQ ID NO: 1757302 - RNA, 19 nt, Homo sapiens
  misc_RNA (1)...(19): siRNA sense strand
gcaacuggaugcgcuaugu

SEQ ID NO: 1757303 - RNA, 19 nt, Homo sapiens
  misc_RNA (1)...(19): siRNA sense strand
gaagaucugacccgaauca

SEQ ID NO: 1757304 - RNA, 19 nt, Homo sapiens
  misc_RNA (1)...(19): siRNA sense strand
gagagaaaccauaccaaug

SEQ ID NO: 1757305 - RNA, 19 nt, Homo sapiens
  misc_RNA (1)...(19): siRNA sense strand
gaacggccuuucaaauguc

SEQ ID NO: 1757306 - RNA, 19 nt, Homo sapiens
  misc_RNA (1)...(19): siRNA sense strand
ggagagaaaccauaccaau

SEQ ID NO: 1757307 - RNA, 19 nt, Homo sapiens
  misc_RNA (1)...(19): siRNA sense strand
ccggagagcugacaaugau

SEQ ID NO: 1757308 - RNA, 19 nt, Homo sapiens
  misc_RNA (1)...(19): siRNA sense strand
ccacuucauugacggcuuu

SEQ ID NO: 1757309 - RNA, 19 nt, Homo sapiens
  misc_RNA (1)...(19): siRNA sense strand
ugaauggcaucaacaacuu

SEQ ID NO: 1757310 - RNA, 19 nt, Homo sapiens
  misc_RNA (1)...(19): siRNA sense strand
gaguacagcgugaaagaaa

SEQ ID NO: 1757311 - RNA, 19 nt, Homo sapiens
  misc_RNA (1)...(19): siRNA sense strand
aaugaacucugcccaaaga

SEQ ID NO: 1757312 - RNA, 19 nt, Homo sapiens
  misc_RNA (1)...(19): siRNA sense strand
gcaacaagggcuuuacuca

SEQ ID NO: 1757313 - RNA, 19 nt, Homo sapiens
  misc_RNA (1)...(19): siRNA sense strand
ggagagcugacaaugauga

SEQ ID NO: 1757314 - RNA, 19 nt, Homo sapiens
  misc_RNA (1)...(19): siRNA sense strand
ccgaaucaaugaagaaauc

SEQ ID NO: 1757315 - RNA, 19 nt, Homo sapiens
  misc_RNA (1)...(19): siRNA sense strand
gaacuacauccaucucugu

SEQ ID NO: 1757316 - RNA, 19 nt, Homo sapiens
  misc_RNA (1)...(19): siRNA sense strand
gagaguacagcgugaaaga

SEQ ID NO: 1757317 - RNA, 19 nt, Homo sapiens
  misc_RNA (1)...(19): siRNA sense strand
agaacggccuuucaaaugu

SEQ ID NO: 1757318 - RNA, 19 nt, Homo sapiens
  misc_RNA (1)...(19): siRNA sense strand
gagcuucaccacuucauug

SEQ ID NO: 1757319 - RNA, 19 nt, Homo sapiens
  misc_RNA (1)...(19): siRNA sense strand
uggaagaucugacccgaau

SEQ ID NO: 1757320 - RNA, 19 nt, Homo sapiens
  misc_RNA (1)...(19): siRNA sense strand
ggucaaacaagaaacaguu

SEQ ID NO: 1757321 - RNA, 19 nt, Homo sapiens
  misc_RNA (1)...(19): siRNA sense strand
gaacuucuugugugguauu

SEQ ID NO: 1757322 - RNA, 19 nt, Homo sapiens
  misc_RNA (1)...(19): siRNA sense strand
ccaaagaaugucccaaaga

SEQ ID NO: 1757323 - RNA, 19 nt, Homo sapiens
  misc_RNA (1)...(19): siRNA sense strand
ccucuaccguucuaacauu

SEQ ID NO: 1757324 - RNA, 19 nt, Homo sapiens
  misc_RNA (1)...(19): siRNA sense strand
augaagaaaucgagaaguu

SEQ ID NO: 1757325 - RNA, 19 nt, Homo sapiens
  misc_RNA (1)...(19): siRNA sense strand
ggugugcccugccaaguuc

SEQ ID NO: 1757326 - RNA, 19 nt, Homo sapiens
  misc_RNA (1)...(19): siRNA sense strand
gagaaaccauaccaaugca

SEQ ID NO: 1757327 - RNA, 19 nt, Homo sapiens
  misc_RNA (1)...(19): siRNA sense strand
ggacuccuacgcuuacuug

SEQ ID NO: 1757328 - RNA, 19 nt, Homo sapiens
  misc_RNA (1)...(19): siRNA sense strand
ccuacggcaugaauuguaa

SEQ ID NO: 1757329 - RNA, 19 nt, Homo sapiens
  misc_RNA (1)...(19): siRNA sense strand
caaacaagaaacaguugaa

SEQ ID NO: 1757330 - RNA, 19 nt, Homo sapiens
  misc_RNA (1)...(19): siRNA sense strand
caaacacagagcagucuaa

SEQ ID NO: 1757331 - RNA, 19 nt, Homo sapiens
  misc_RNA (1)...(19): siRNA sense strand
cuguaaaggucaaacaaga

SEQ ID NO: 1757332 - RNA, 19 nt, Homo sapiens
  misc_RNA (1)...(19): siRNA sense strand
gaagaaacuggccugaaag

SEQ ID NO: 1757333 - RNA, 19 nt, Homo sapiens
  misc_RNA (1)...(19): siRNA sense strand
ucgaggacguggaggauga

SEQ ID NO: 1757334 - RNA, 19 nt, Homo sapiens
  misc_RNA (1)...(19): siRNA sense strand
gagaaaagccacaugaaug

SEQ ID NO: 1757335 - RNA, 19 nt, Homo sapiens
  misc_RNA (1)...(19): siRNA sense strand
gcccaaagaaugucccaaa

SEQ ID NO: 1757336 - RNA, 19 nt, Homo sapiens
  misc_RNA (1)...(19): siRNA sense strand
uaaagcaaccgagcacuga

SEQ ID NO: 1757337 - RNA, 19 nt, Homo sapiens
  misc_RNA (1)...(19): siRNA sense strand
gaauggcaucaacaacuuu

SEQ ID NO: 1757338 - RNA, 19 nt, Homo sapiens
  misc_RNA (1)...(19): siRNA sense strand
uugaaccaauggauccuua

SEQ ID NO: 1757339 - RNA, 19 nt, Homo sapiens
  misc_RNA (1)...(19): siRNA sense strand
ugaugaaucucacacaaac

SEQ ID NO: 1757340 - RNA, 19 nt, Homo sapiens
  misc_RNA (1)...(19): siRNA sense strand
aaacaugaccggcuacaag

SEQ ID NO: 1757341 - RNA, 19 nt, Homo sapiens
  misc_RNA (1)...(19): siRNA sense strand
acagagcagucuaaagcaa

SEQ ID NO: 1757342 - RNA, 19 nt, Homo sapiens
  misc_RNA (1)...(19): siRNA sense strand
aagaaacaguugaaccaau

SEQ ID NO: 1757343 - RNA, 19 nt, Homo sapiens
  misc_RNA (1)...(19): siRNA sense strand
gugcagccuuuaugaguca

SEQ ID NO: 1757344 - RNA, 19 nt, Homo sapiens
  misc_RNA (1)...(19): siRNA sense strand
gaggggagcuucaccacuu

SEQ ID NO: 1757345 - RNA, 19 nt, Homo sapiens
  misc_RNA (1)...(19): siRNA sense strand
cgagaaguuugacaucagu

SEQ ID NO: 1757346 - RNA, 19 nt, Homo sapiens
  misc_RNA (1)...(19): siRNA sense strand
ucaaaugucagacuugcaa

SEQ ID NO: 1757347 - RNA, 19 nt, Homo sapiens
  misc_RNA (1)...(19): siRNA sense strand
caaguacgaaugcaacguu

SEQ ID NO: 1757348 - RNA, 19 nt, Homo sapiens
  misc_RNA (1)...(19): siRNA sense strand
gagagacccacguacauca

SEQ ID NO: 1757349 - RNA, 19 nt, Homo sapiens
  misc_RNA (1)...(19): siRNA sense strand
gagcugacaaugaugaauc

SEQ ID NO: 1757350 - RNA, 19 nt, Homo sapiens
  misc_RNA (1)...(19): siRNA sense strand
cggcuuuaaugaagagaaa

SEQ ID NO: 1757351 - RNA, 19 nt, Homo sapiens
  misc_RNA (1)...(19): siRNA sense strand
ugaagaaaucgagaaguuu

SEQ ID NO: 1757352 - RNA, 19 nt, Homo sapiens
  misc_RNA (1)...(19): siRNA sense strand
gcaugaauggcaucaacaa

SEQ ID NO: 1757353 - RNA, 19 nt, Homo sapiens
  misc_RNA (1)...(19): siRNA sense strand
gagagaguacagcgugaaa

SEQ ID NO: 1757354 - RNA, 19 nt, Homo sapiens
  misc_RNA (1)...(19): siRNA sense strand
aaaaggaccucgaugacuu

SEQ ID NO: 1757355 - RNA, 19 nt, Homo sapiens
  misc_RNA (1)...(19): siRNA sense strand
caaaggaaaggaccucuac

SEQ ID NO: 1757356 - RNA, 19 nt, Homo sapiens
  misc_RNA (1)...(19): siRNA sense strand
cagcaugaauggcaucaac

SEQ ID NO: 1757357 - RNA, 19 nt, Homo sapiens
  misc_RNA (1)...(19): siRNA sense strand
aaugaugaaucucacacaa

SEQ ID NO: 1757358 - RNA, 19 nt, Homo sapiens
  misc_RNA (1)...(19): siRNA sense strand
aggaacuucuuguguggua

SEQ ID NO: 1757359 - RNA, 19 nt, Homo sapiens
  misc_RNA (1)...(19): siRNA sense strand
acacagagcagucuaaagc

SEQ ID NO: 1757360 - RNA, 19 nt, Homo sapiens
  misc_RNA (1)...(19): siRNA sense strand
aaaaugaacucugcccaaa

SEQ ID NO: 1757361 - RNA, 19 nt, Homo sapiens
  misc_RNA (1)...(19): siRNA sense strand
ugccaggucugccacaaga

SEQ ID NO: 1757362 - RNA, 19 nt, Homo sapiens
  misc_RNA (1)...(19): siRNA sense strand
ugucgggacuuugcagaaa

SEQ ID NO: 1757363 - RNA, 19 nt, Homo sapiens
  misc_RNA (1)...(19): siRNA sense strand
cacagcagcccugggaaua

SEQ ID NO: 1757364 - RNA, 19 nt, Homo sapiens
  misc_RNA (1)...(19): siRNA sense strand
ugacaucagugacaaugcu

SEQ ID NO: 1757365 - RNA, 19 nt, Homo sapiens
  misc_RNA (1)...(19): siRNA sense strand
gcaagaucaaguacgaaug

SEQ ID NO: 1757366 - RNA, 19 nt, Homo sapiens
  misc_RNA (1)...(19): siRNA sense strand
aagcagaacggcaagauca

SEQ ID NO: 1757367 - RNA, 19 nt, Homo sapiens
  misc_RNA (1)...(19): siRNA sense strand
aaacacagagcagucuaaa

SEQ ID NO: 1757368 - RNA, 19 nt, Homo sapiens
  misc_RNA (1)...(19): siRNA sense strand
caagaaacaguugaaccaa

SEQ ID NO: 1757369 - RNA, 19 nt, Homo sapiens
  misc_RNA (1)...(19): siRNA sense strand
ugacccgaaucaaugaaga

SEQ ID NO: 1757370 - RNA, 19 nt, Homo sapiens
  misc_RNA (1)...(19): siRNA sense strand
gaaacaugaccggcuacaa

SEQ ID NO: 1757371 - RNA, 19 nt, Homo sapiens
  misc_RNA (1)...(19): siRNA sense strand
gacgaagccaugaaucuca

SEQ ID NO: 1757372 - RNA, 19 nt, Homo sapiens
  misc_RNA (1)...(19): siRNA sense strand
ccaaaggaaaggaccucua

SEQ ID NO: 1757373 - RNA, 19 nt, Homo sapiens
  misc_RNA (1)...(19): siRNA sense strand
guacagcgugaaagaaauc

SEQ ID NO: 1757374 - RNA, 19 nt, Homo sapiens
  misc_RNA (1)...(19): siRNA sense strand
gaagcagaacggcaagauc

SEQ ID NO: 1757375 - RNA, 19 nt, Homo sapiens
  misc_RNA (1)...(19): siRNA sense strand
gaacggcaagaucaaguac

SEQ ID NO: 1757376 - RNA, 19 nt, Homo sapiens
  misc_RNA (1)...(19): siRNA sense strand
ggagaaaagccacaugaau

SEQ ID NO: 1757377 - RNA, 19 nt, Homo sapiens
  misc_RNA (1)...(19): siRNA sense strand
ucaaugaagaaaucgagaa

SEQ ID NO: 1757378 - RNA, 19 nt, Homo sapiens
  misc_RNA (1)...(19): siRNA sense strand
ccacaagaacuacauccau

SEQ ID NO: 1757379 - RNA, 19 nt, Homo sapiens
  misc_RNA (1)...(19): siRNA sense strand
ggaucgagagacccacgua

SEQ ID NO: 1757380 - RNA, 19 nt, Homo sapiens
  misc_RNA (1)...(19): siRNA sense strand
gaaaagagaaagaagaaac

SEQ ID NO: 1757381 - RNA, 19 nt, Homo sapiens
  misc_RNA (1)...(19): siRNA sense strand
gagagugcacaguggagaa

SEQ ID NO: 1757382 - RNA, 19 nt, Homo sapiens
  misc_RNA (1)...(19): siRNA sense strand
caagaucaaguacgaaugc

SEQ ID NO: 1757383 - RNA, 19 nt, Homo sapiens
  misc_RNA (1)...(19): siRNA sense strand
agagaaaccauaccaaugc

SEQ ID NO: 1757384 - RNA, 19 nt, Homo sapiens
  misc_RNA (1)...(19): siRNA sense strand
gaaaucgagaaguuugaca

SEQ ID NO: 1757385 - RNA, 19 nt, Homo sapiens
  misc_RNA (1)...(19): siRNA sense strand
ggagcuucaccacuucauu

SEQ ID NO: 1757386 - RNA, 19 nt, Homo sapiens
  misc_RNA (1)...(19): siRNA sense strand
caaccaggaacuucuugug

SEQ ID NO: 1757387 - RNA, 19 nt, Homo sapiens
  misc_RNA (1)...(19): siRNA sense strand
agaagaaacuggccugaaa

SEQ ID NO: 1757388 - RNA, 19 nt, Homo sapiens
  misc_RNA (1)...(19): siRNA sense strand
ggaccucgaugacuuuaga

SEQ ID NO: 1757389 - RNA, 19 nt, Homo sapiens
  misc_RNA (1)...(19): siRNA sense strand
gaagaaaucgagaaguuug

SEQ ID NO: 1757390 - RNA, 19 nt, Homo sapiens
  misc_RNA (1)...(19): siRNA sense strand
caaagaaugucccaaagag

SEQ ID NO: 1757391 - RNA, 19 nt, Homo sapiens
  misc_RNA (1)...(19): siRNA sense strand
gaaacuggccugaaagugu

SEQ ID NO: 1757392 - RNA, 19 nt, Homo sapiens
  misc_RNA (1)...(19): siRNA sense strand
gagaacggccuuucaaaug

SEQ ID NO: 1757393 - RNA, 19 nt, Homo sapiens
  misc_RNA (1)...(19): siRNA sense strand
cacagugccuucuccuuua

SEQ ID NO: 1757394 - RNA, 19 nt, Homo sapiens
  misc_RNA (1)...(19): siRNA sense strand
ggccagcucuccaaucuga

SEQ ID NO: 1757395 - RNA, 19 nt, Homo sapiens
  misc_RNA (1)...(19): siRNA sense strand
caacaacuuuggccucuuc

SEQ ID NO: 1757396 - RNA, 19 nt, Homo sapiens
  misc_RNA (1)...(19): siRNA sense strand
gaucugacccgaaucaaug

SEQ ID NO: 1757397 - RNA, 19 nt, Homo sapiens
  misc_RNA (1)...(19): siRNA sense strand
gaacucugcccaaagaaug

SEQ ID NO: 1757398 - RNA, 19 nt, Homo sapiens
  misc_RNA (1)...(19): siRNA sense strand
ccacagugccuucuccuuu

SEQ ID NO: 1757399 - RNA, 19 nt, Homo sapiens
  misc_RNA (1)...(19): siRNA sense strand
agaaacaguugaaccaaug

SEQ ID NO: 1757400 - RNA, 19 nt, Homo sapiens
  misc_RNA (1)...(19): siRNA sense strand
guaaaggucaaacaagaaa

SEQ ID NO: 1757401 - RNA, 19 nt, Homo sapiens
  misc_RNA (1)...(19): siRNA sense strand
ggagaacggccuuucaaau

SEQ ID NO: 1757402 - RNA, 19 nt, Homo sapiens
  misc_RNA (1)...(19): siRNA sense strand
gcaacuggaugcgcuaugu

SEQ ID NO: 1757403 - RNA, 19 nt, Homo sapiens
  misc_RNA (1)...(19): siRNA sense strand
gaagaucugacccgaauca

SEQ ID NO: 1757404 - RNA, 19 nt, Homo sapiens
  misc_RNA (1)...(19): siRNA sense strand
gagagaaaccauaccaaug

SEQ ID NO: 1757405 - RNA, 19 nt, Homo sapiens
  misc_RNA (1)...(19): siRNA sense strand
gaacggccuuucaaauguc

SEQ ID NO: 1757406 - RNA, 19 nt, Homo sapiens
  misc_RNA (1)...(19): siRNA sense strand
ggagagaaaccauaccaau

SEQ ID NO: 1757407 - RNA, 19 nt, Homo sapiens
  misc_RNA (1)...(19): siRNA sense strand
ccggagagcugacaaugau

SEQ ID NO: 1757408 - RNA, 19 nt, Homo sapiens
  misc_RNA (1)...(19): siRNA sense strand
ccacuucauugacggcuuu

SEQ ID NO: 1757409 - RNA, 19 nt, Homo sapiens
  misc_RNA (1)...(19): siRNA sense strand
ugaauggcaucaacaacuu

SEQ ID NO: 1757410 - RNA, 19 nt, Homo sapiens
  misc_RNA (1)...(19): siRNA sense strand
gaguacagcgugaaagaaa

SEQ ID NO: 1757411 - RNA, 19 nt, Homo sapiens
  misc_RNA (1)...(19): siRNA sense strand
aaugaacucugcccaaaga

SEQ ID NO: 1757412 - RNA, 19 nt, Homo sapiens
  misc_RNA (1)...(19): siRNA sense strand
gcaacaagggcuuuacuca

SEQ ID NO: 1757413 - RNA, 19 nt, Homo sapiens
  misc_RNA (1)...(19): siRNA sense strand
ggagagcugacaaugauga

SEQ ID NO: 1757414 - RNA, 19 nt, Homo sapiens
  misc_RNA (1)...(19): siRNA sense strand
ccgaaucaaugaagaaauc

SEQ ID NO: 1757415 - RNA, 19 nt, Homo sapiens
  misc_RNA (1)...(19): siRNA sense strand
gaacuacauccaucucugu

SEQ ID NO: 1757416 - RNA, 19 nt, Homo sapiens
  misc_RNA (1)...(19): siRNA sense strand
gagaguacagcgugaaaga

SEQ ID NO: 1757417 - RNA, 19 nt, Homo sapiens
  misc_RNA (1)...(19): siRNA sense strand
agaacggccuuucaaaugu

SEQ ID NO: 1757418 - RNA, 19 nt, Homo sapiens
  misc_RNA (1)...(19): siRNA sense strand
gagcuucaccacuucauug

SEQ ID NO: 1757419 - RNA, 19 nt, Homo sapiens
  misc_RNA (1)...(19): siRNA sense strand
uggaagaucugacccgaau

SEQ ID NO: 1757420 - RNA, 19 nt, Homo sapiens
  misc_RNA (1)...(19): siRNA sense strand
ggucaaacaagaaacaguu

SEQ ID NO: 1757421 - RNA, 19 nt, Homo sapiens
  misc_RNA (1)...(19): siRNA sense strand
gaacuucuugugugguauu

SEQ ID NO: 1757422 - RNA, 19 nt, Homo sapiens
  misc_RNA (1)...(19): siRNA sense strand
ccaaagaaugucccaaaga

SEQ ID NO: 1757423 - RNA, 19 nt, Homo sapiens
  misc_RNA (1)...(19): siRNA sense strand
ccucuaccguucuaacauu

SEQ ID NO: 1757424 - RNA, 19 nt, Homo sapiens
  misc_RNA (1)...(19): siRNA sense strand
augaagaaaucgagaaguu

SEQ ID NO: 1757425 - RNA, 19 nt, Homo sapiens
  misc_RNA (1)...(19): siRNA sense strand
ggugugcccugccaaguuc

SEQ ID NO: 1757426 - RNA, 19 nt, Homo sapiens
  misc_RNA (1)...(19): siRNA sense strand
gagaaaccauaccaaugca

SEQ ID NO: 1757427 - RNA, 19 nt, Homo sapiens
  misc_RNA (1)...(19): siRNA sense strand
ggacuccuacgcuuacuug

SEQ ID NO: 1757428 - RNA, 19 nt, Homo sapiens
  misc_RNA (1)...(19): siRNA sense strand
ccuacggcaugaauuguaa

SEQ ID NO: 1757429 - RNA, 19 nt, Homo sapiens
  misc_RNA (1)...(19): siRNA sense strand
caaacaagaaacaguugaa

SEQ ID NO: 1757430 - RNA, 19 nt, Homo sapiens
  misc_RNA (1)...(19): siRNA sense strand
caaacacagagcagucuaa

SEQ ID NO: 1757431 - RNA, 19 nt, Homo sapiens
  misc_RNA (1)...(19): siRNA sense strand
cuguaaaggucaaacaaga

SEQ ID NO: 1757432 - RNA, 19 nt, Homo sapiens
  misc_RNA (1)...(19): siRNA sense strand
gaagaaacuggccugaaag

SEQ ID NO: 1757433 - RNA, 19 nt, Homo sapiens
  misc_RNA (1)...(19): siRNA sense strand
ucgaggacguggaggauga

SEQ ID NO: 1757434 - RNA, 19 nt, Homo sapiens
  misc_RNA (1)...(19): siRNA sense strand
gagaaaagccacaugaaug

SEQ ID NO: 1757435 - RNA, 19 nt, Homo sapiens
  misc_RNA (1)...(19): siRNA sense strand
gcccaaagaaugucccaaa

SEQ ID NO: 1757436 - RNA, 19 nt, Homo sapiens
  misc_RNA (1)...(19): siRNA sense strand
uaaagcaaccgagcacuga

SEQ ID NO: 1757437 - RNA, 19 nt, Homo sapiens
  misc_RNA (1)...(19): siRNA sense strand
gaauggcaucaacaacuuu

SEQ ID NO: 1757438 - RNA, 19 nt, Homo sapiens
  misc_RNA (1)...(19): siRNA sense strand
uugaaccaauggauccuua

SEQ ID NO: 1757439 - RNA, 19 nt, Homo sapiens
  misc_RNA (1)...(19): siRNA sense strand
ugaugaaucucacacaaac

SEQ ID NO: 1757440 - RNA, 19 nt, Homo sapiens
  misc_RNA (1)...(19): siRNA sense strand
aaacaugaccggcuacaag

SEQ ID NO: 1757441 - RNA, 19 nt, Homo sapiens
  misc_RNA (1)...(19): siRNA sense strand
acagagcagucuaaagcaa

SEQ ID NO: 1757442 - RNA, 19 nt, Homo sapiens
  misc_RNA (1)...(19): siRNA sense strand
aagaaacaguugaaccaau

SEQ ID NO: 1757443 - RNA, 19 nt, Homo sapiens
  misc_RNA (1)...(19): siRNA sense strand
gugcagccuuuaugaguca

SEQ ID NO: 1757444 - RNA, 19 nt, Homo sapiens
  misc_RNA (1)...(19): siRNA sense strand
gaggggagcuucaccacuu

SEQ ID NO: 1757445 - RNA, 19 nt, Homo sapiens
  misc_RNA (1)...(19): siRNA sense strand
cgagaaguuugacaucagu

SEQ ID NO: 1757446 - RNA, 19 nt, Homo sapiens
  misc_RNA (1)...(19): siRNA sense strand
ucaaaugucagacuugcaa

SEQ ID NO: 1757447 - RNA, 19 nt, Homo sapiens
  misc_RNA (1)...(19): siRNA sense strand
caaguacgaaugcaacguu

SEQ ID NO: 1757448 - RNA, 19 nt, Homo sapiens
  misc_RNA (1)...(19): siRNA sense strand
gagagacccacguacauca

SEQ ID NO: 1757449 - RNA, 19 nt, Homo sapiens
  misc_RNA (1)...(19): siRNA sense strand
gagcugacaaugaugaauc

SEQ ID NO: 1757450 - RNA, 19 nt, Homo sapiens
  misc_RNA (1)...(19): siRNA sense strand
cggcuuuaaugaagagaaa

SEQ ID NO: 1757451 - RNA, 19 nt, Homo sapiens
  misc_RNA (1)...(19): siRNA sense strand
ugaagaaaucgagaaguuu

SEQ ID NO: 1757452 - RNA, 19 nt, Homo sapiens
  misc_RNA (1)...(19): siRNA sense strand
gcaugaauggcaucaacaa

SEQ ID NO: 1757453 - RNA, 19 nt, Homo sapiens
  misc_RNA (1)...(19): siRNA sense strand
gagagaguacagcgugaaa

SEQ ID NO: 1757454 - RNA, 19 nt, Homo sapiens
  misc_RNA (1)...(19): siRNA sense strand
aaaaggaccucgaugacuu

SEQ ID NO: 1757455 - RNA, 19 nt, Homo sapiens
  misc_RNA (1)...(19): siRNA sense strand
caaaggaaaggaccucuac

SEQ ID NO: 1757456 - RNA, 19 nt, Homo sapiens
  misc_RNA (1)...(19): siRNA sense strand
cagcaugaauggcaucaac

SEQ ID NO: 1757457 - RNA, 19 nt, Homo sapiens
  misc_RNA (1)...(19): siRNA sense strand
aaugaugaaucucacacaa

SEQ ID NO: 1757458 - RNA, 19 nt, Homo sapiens
  misc_RNA (1)...(19): siRNA sense strand
aggaacuucuuguguggua

SEQ ID NO: 1757459 - RNA, 19 nt, Homo sapiens
  misc_RNA (1)...(19): siRNA sense strand
acacagagcagucuaaagc

SEQ ID NO: 1757460 - RNA, 19 nt, Homo sapiens
  misc_RNA (1)...(19): siRNA sense strand
aaaaugaacucugcccaaa

SEQ ID NO: 1757461 - RNA, 19 nt, Homo sapiens
  misc_RNA (1)...(19): siRNA sense strand
ugccaggucugccacaaga

SEQ ID NO: 1757462 - RNA, 19 nt, Homo sapiens
  misc_RNA (1)...(19): siRNA sense strand
ugucgggacuuugcagaaa

SEQ ID NO: 1757463 - RNA, 19 nt, Homo sapiens
  misc_RNA (1)...(19): siRNA sense strand
cacagcagcccugggaaua

SEQ ID NO: 1757464 - RNA, 19 nt, Homo sapiens
  misc_RNA (1)...(19): siRNA sense strand
ugacaucagugacaaugcu

SEQ ID NO: 1757465 - RNA, 19 nt, Homo sapiens
  misc_RNA (1)...(19): siRNA sense strand
gcaagaucaaguacgaaug

SEQ ID NO: 1757466 - RNA, 19 nt, Homo sapiens
  misc_RNA (1)...(19): siRNA sense strand
aagcagaacggcaagauca

SEQ ID NO: 1757467 - RNA, 19 nt, Homo sapiens
  misc_RNA (1)...(19): siRNA sense strand
aaacacagagcagucuaaa

SEQ ID NO: 1757468 - RNA, 19 nt, Homo sapiens
  misc_RNA (1)...(19): siRNA sense strand
caagaaacaguugaaccaa

SEQ ID NO: 1757469 - RNA, 19 nt, Homo sapiens
  misc_RNA (1)...(19): siRNA sense strand
ugacccgaaucaaugaaga

SEQ ID NO: 1757470 - RNA, 19 nt, Homo sapiens
  misc_RNA (1)...(19): siRNA sense strand
gaaacaugaccggcuacaa

SEQ ID NO: 1757471 - RNA, 19 nt, Homo sapiens
  misc_RNA (1)...(19): siRNA sense strand
gacgaagccaugaaucuca

SEQ ID NO: 1757472 - RNA, 19 nt, Homo sapiens
  misc_RNA (1)...(19): siRNA sense strand
ccaaaggaaaggaccucua

SEQ ID NO: 1757473 - RNA, 19 nt, Homo sapiens
  misc_RNA (1)...(19): siRNA sense strand
guacagcgugaaagaaauc

SEQ ID NO: 1757474 - RNA, 19 nt, Homo sapiens
  misc_RNA (1)...(19): siRNA sense strand
gaagcagaacggcaagauc

SEQ ID NO: 1757475 - RNA, 19 nt, Homo sapiens
  misc_RNA (1)...(19): siRNA sense strand
gaacggcaagaucaaguac

SEQ ID NO: 1757476 - RNA, 19 nt, Homo sapiens
  misc_RNA (1)...(19): siRNA sense strand
ggagaaaagccacaugaau

SEQ ID NO: 1757477 - RNA, 19 nt, Homo sapiens
  misc_RNA (1)...(19): siRNA sense strand
ucaaugaagaaaucgagaa

SEQ ID NO: 1757478 - RNA, 19 nt, Homo sapiens
  misc_RNA (1)...(19): siRNA sense strand
ccacaagaacuacauccau

SEQ ID NO: 1757479 - RNA, 19 nt, Homo sapiens
  misc_RNA (1)...(19): siRNA sense strand
ggaucgagagacccacgua

SEQ ID NO: 1757480 - RNA, 19 nt, Homo sapiens
  misc_RNA (1)...(19): siRNA sense strand
gaaaagagaaagaagaaac

SEQ ID NO: 1757481 - RNA, 19 nt, Homo sapiens
  misc_RNA (1)...(19): siRNA sense strand
gagagugcacaguggagaa

SEQ ID NO: 1757482 - RNA, 19 nt, Homo sapiens
  misc_RNA (1)...(19): siRNA sense strand
caagaucaaguacgaaugc

SEQ ID NO: 1757483 - RNA, 19 nt, Homo sapiens
  misc_RNA (1)...(19): siRNA sense strand
agagaaaccauaccaaugc

SEQ ID NO: 1757484 - RNA, 19 nt, Homo sapiens
  misc_RNA (1)...(19): siRNA sense strand
gaaaucgagaaguuugaca

SEQ ID NO: 1757485 - RNA, 19 nt, Homo sapiens
  misc_RNA (1)...(19): siRNA sense strand
ggagcuucaccacuucauu

SEQ ID NO: 1757486 - RNA, 19 nt, Homo sapiens
  misc_RNA (1)...(19): siRNA sense strand
caaccaggaacuucuugug

SEQ ID NO: 1757487 - RNA, 19 nt, Homo sapiens
  misc_RNA (1)...(19): siRNA sense strand
gaagguagcugcucugaua

SEQ ID NO: 1757488 - RNA, 19 nt, Homo sapiens
  misc_RNA (1)...(19): siRNA sense strand
ccagaaggaugaaugauau

SEQ ID NO: 1757489 - RNA, 19 nt, Homo sapiens
  misc_RNA (1)...(19): siRNA sense strand
gaugagagaauucuguaua

SEQ ID NO: 1757490 - RNA, 19 nt, Homo sapiens
  misc_RNA (1)...(19): siRNA sense strand
uagccaaucuuaccuguuu

SEQ ID NO: 1757491 - RNA, 19 nt, Homo sapiens
  misc_RNA (1)...(19): siRNA sense strand
ggaagcaugucccugaaga

SEQ ID NO: 1757492 - RNA, 19 nt, Homo sapiens
  misc_RNA (1)...(19): siRNA sense strand
guggaauacuuaagcaaua

SEQ ID NO: 1757493 - RNA, 19 nt, Homo sapiens
  misc_RNA (1)...(19): siRNA sense strand
ucaagccacucuucaauau

SEQ ID NO: 1757494 - RNA, 19 nt, Homo sapiens
  misc_RNA (1)...(19): siRNA sense strand
gaauuugaguuuagccaau

SEQ ID NO: 1757495 - RNA, 19 nt, Homo sapiens
  misc_RNA (1)...(19): siRNA sense strand
ggaaaacacuucaauagca

SEQ ID NO: 1757496 - RNA, 19 nt, Homo sapiens
  misc_RNA (1)...(19): siRNA sense strand
gaccuucacugcugucuca

SEQ ID NO: 1757497 - RNA, 19 nt, Homo sapiens
  misc_RNA (1)...(19): siRNA sense strand
ugaagaccauggccacaaa

SEQ ID NO: 1757498 - RNA, 19 nt, Homo sapiens
  misc_RNA (1)...(19): siRNA sense strand
guugaacgcuguuauuucu

SEQ ID NO: 1757499 - RNA, 19 nt, Homo sapiens
  misc_RNA (1)...(19): siRNA sense strand
gggaauaucgagacaaaga

SEQ ID NO: 1757500 - RNA, 19 nt, Homo sapiens
  misc_RNA (1)...(19): siRNA sense strand
ucagugacaugaaucucua

SEQ ID NO: 1757501 - RNA, 19 nt, Homo sapiens
  misc_RNA (1)...(19): siRNA sense strand
acaacaaacuuuacacagu

SEQ ID NO: 1757502 - RNA, 19 nt, Homo sapiens
  misc_RNA (1)...(19): siRNA sense strand
gaugguggccaaugggaua

SEQ ID NO: 1757503 - RNA, 19 nt, Homo sapiens
  misc_RNA (1)...(19): siRNA sense strand
uuacacaguggaauacuua

SEQ ID NO: 1757504 - RNA, 19 nt, Homo sapiens
  misc_RNA (1)...(19): siRNA sense strand
aaugggauaugcuuguuaa

SEQ ID NO: 1757505 - RNA, 19 nt, Homo sapiens
  misc_RNA (1)...(19): siRNA sense strand
ugaagaacaugaauaaagc

SEQ ID NO: 1757506 - RNA, 19 nt, Homo sapiens
  misc_RNA (1)...(19): siRNA sense strand
gaaaacacuucaauagcaa

SEQ ID NO: 1757507 - RNA, 19 nt, Homo sapiens
  misc_RNA (1)...(19): siRNA sense strand
aagaaaugcuucccugaau

SEQ ID NO: 1757508 - RNA, 19 nt, Homo sapiens
  misc_RNA (1)...(19): siRNA sense strand
ggacacagcccagagaaag

SEQ ID NO: 1757509 - RNA, 19 nt, Homo sapiens
  misc_RNA (1)...(19): siRNA sense strand
aauaugguguuaucccuaa

SEQ ID NO: 1757510 - RNA, 19 nt, Homo sapiens
  misc_RNA (1)...(19): siRNA sense strand
gguguuaucccuaagaaau

SEQ ID NO: 1757511 - RNA, 19 nt, Homo sapiens
  misc_RNA (1)...(19): siRNA sense strand
caacagaggcaaccagaag

SEQ ID NO: 1757512 - RNA, 19 nt, Homo sapiens
  misc_RNA (1)...(19): siRNA sense strand
uaagaaaugcuucccugaa

SEQ ID NO: 1757513 - RNA, 19 nt, Homo sapiens
  misc_RNA (1)...(19): siRNA sense strand
gaugagugguucucugagu

SEQ ID NO: 1757514 - RNA, 19 nt, Homo sapiens
  misc_RNA (1)...(19): siRNA sense strand
gaccaugaguuaguguuug

SEQ ID NO: 1757515 - RNA, 19 nt, Homo sapiens
  misc_RNA (1)...(19): siRNA sense strand
gaacaugucaagccacucu

SEQ ID NO: 1757516 - RNA, 19 nt, Homo sapiens
  misc_RNA (1)...(19): siRNA sense strand
cauaacacccuuggaguuu

SEQ ID NO: 1757517 - RNA, 19 nt, Homo sapiens
  misc_RNA (1)...(19): siRNA sense strand
gaaaugcuucccugaaucu

SEQ ID NO: 1757518 - RNA, 19 nt, Homo sapiens
  misc_RNA (1)...(19): siRNA sense strand
gaccauggccacaaagguu

SEQ ID NO: 1757519 - RNA, 19 nt, Homo sapiens
  misc_RNA (1)...(19): siRNA sense strand
ugaacgcuguuauuucuuc

SEQ ID NO: 1757520 - RNA, 19 nt, Homo sapiens
  misc_RNA (1)...(19): siRNA sense strand
agagaaggaugaucaggau

SEQ ID NO: 1757521 - RNA, 19 nt, Homo sapiens
  misc_RNA (1)...(19): siRNA sense strand
uaacacccuuggaguuuua

SEQ ID NO: 1757522 - RNA, 19 nt, Homo sapiens
  misc_RNA (1)...(19): siRNA sense strand
uaugaacccugcaaaugau

SEQ ID NO: 1757523 - RNA, 19 nt, Homo sapiens
  misc_RNA (1)...(19): siRNA sense strand
caaccagaaggaugaauga

SEQ ID NO: 1757524 - RNA, 19 nt, Homo sapiens
  misc_RNA (1)...(19): siRNA sense strand
guuaugaggcuuccauuca

SEQ ID NO: 1757525 - RNA, 19 nt, Homo sapiens
  misc_RNA (1)...(19): siRNA sense strand
gcaagccaaucaccaacca

SEQ ID NO: 1757526 - RNA, 19 nt, Homo sapiens
  misc_RNA (1)...(19): siRNA sense strand
gagagaauucuguauacga

SEQ ID NO: 1757527 - RNA, 19 nt, Homo sapiens
  misc_RNA (1)...(19): siRNA sense strand
ccaaugggauaugcuuguu

SEQ ID NO: 1757528 - RNA, 19 nt, Homo sapiens
  misc_RNA (1)...(19): siRNA sense strand
uuaugaacccugcaaauga

SEQ ID NO: 1757529 - RNA, 19 nt, Homo sapiens
  misc_RNA (1)...(19): siRNA sense strand
gcaaccagaaggaugaaug

SEQ ID NO: 1757530 - RNA, 19 nt, Homo sapiens
  misc_RNA (1)...(19): siRNA sense strand
gaggcaaccagaaggauga

SEQ ID NO: 1757531 - RNA, 19 nt, Homo sapiens
  misc_RNA (1)...(19): siRNA sense strand
ggauggugcuuucacaaaa

SEQ ID NO: 1757532 - RNA, 19 nt, Homo sapiens
  misc_RNA (1)...(19): siRNA sense strand
uggagaggcugugugguuu

SEQ ID NO: 1757533 - RNA, 19 nt, Homo sapiens
  misc_RNA (1)...(19): siRNA sense strand
guacaacaaacuuuacaca

SEQ ID NO: 1757534 - RNA, 19 nt, Homo sapiens
  misc_RNA (1)...(19): siRNA sense strand
gucaagccacucuucaaua

SEQ ID NO: 1757535 - RNA, 19 nt, Homo sapiens
  misc_RNA (1)...(19): siRNA sense strand
guaauccaccagagacauu

SEQ ID NO: 1757536 - RNA, 19 nt, Homo sapiens
  misc_RNA (1)...(19): siRNA sense strand
ugggauaugcuuguuaaua

SEQ ID NO: 1757537 - RNA, 19 nt, Homo sapiens
  misc_RNA (1)...(19): siRNA sense strand
gaagaggugcuagcugugu

SEQ ID NO: 1757538 - RNA, 19 nt, Homo sapiens
  misc_RNA (1)...(19): siRNA sense strand
ggagaguggagaauucaug

SEQ ID NO: 1757539 - RNA, 19 nt, Homo sapiens
  misc_RNA (1)...(19): siRNA sense strand
ccuugaagaacaugaauaa

SEQ ID NO: 1757540 - RNA, 19 nt, Homo sapiens
  misc_RNA (1)...(19): siRNA sense strand
caaugggauaugcuuguua

SEQ ID NO: 1757541 - RNA, 19 nt, Homo sapiens
  misc_RNA (1)...(19): siRNA sense strand
ucucuaugaccaugaguua

SEQ ID NO: 1757542 - RNA, 19 nt, Homo sapiens
  misc_RNA (1)...(19): siRNA sense strand
ugacaugaaucucuaugac

SEQ ID NO: 1757543 - RNA, 19 nt, Homo sapiens
  misc_RNA (1)...(19): siRNA sense strand
guucguacuugcccagaau

SEQ ID NO: 1757544 - RNA, 19 nt, Homo sapiens
  misc_RNA (1)...(19): siRNA sense strand
cugggaauaucgagacaaa

SEQ ID NO: 1757545 - RNA, 19 nt, Homo sapiens
  misc_RNA (1)...(19): siRNA sense strand
caagaugagagaauucugu

SEQ ID NO: 1757546 - RNA, 19 nt, Homo sapiens
  misc_RNA (1)...(19): siRNA sense strand
gagaaaggagccugaggau

SEQ ID NO: 1757547 - RNA, 19 nt, Homo sapiens
  misc_RNA (1)...(19): siRNA sense strand
ggugcuagcuguguuagag

SEQ ID NO: 1757548 - RNA, 19 nt, Homo sapiens
  misc_RNA (1)...(19): siRNA sense strand
ccauaacacccuuggaguu

SEQ ID NO: 1757549 - RNA, 19 nt, Homo sapiens
  misc_RNA (1)...(19): siRNA sense strand
cgaguggugugcaucuguu

SEQ ID NO: 1757550 - RNA, 19 nt, Homo sapiens
  misc_RNA (1)...(19): siRNA sense strand
agaaaugcuucccugaauc

SEQ ID NO: 1757551 - RNA, 19 nt, Homo sapiens
  misc_RNA (1)...(19): siRNA sense strand
cacaggacgucaugaugga

SEQ ID NO: 1757552 - RNA, 19 nt, Homo sapiens
  misc_RNA (1)...(19): siRNA sense strand
gaaggaugaucaggauggu

SEQ ID NO: 1757553 - RNA, 19 nt, Homo sapiens
  misc_RNA (1)...(19): siRNA sense strand
gaaucucuaugaccaugag

SEQ ID NO: 1757554 - RNA, 19 nt, Homo sapiens
  misc_RNA (1)...(19): siRNA sense strand
gaaaauuggccccauaaca

SEQ ID NO: 1757555 - RNA, 19 nt, Homo sapiens
  misc_RNA (1)...(19): siRNA sense strand
gggccucagugacaugaau

SEQ ID NO: 1757556 - RNA, 19 nt, Homo sapiens
  misc_RNA (1)...(19): siRNA sense strand
gcccauugacuuccugaaa

SEQ ID NO: 1757557 - RNA, 19 nt, Homo sapiens
  misc_RNA (1)...(19): siRNA sense strand
gcuguuauuucuucuugag

SEQ ID NO: 1757558 - RNA, 19 nt, Homo sapiens
  misc_RNA (1)...(19): siRNA sense strand
aagcggagaggcugacuuu

SEQ ID NO: 1757559 - RNA, 19 nt, Homo sapiens
  misc_RNA (1)...(19): siRNA sense strand
gaucuuuucuugucugaau

SEQ ID NO: 1757560 - RNA, 19 nt, Homo sapiens
  misc_RNA (1)...(19): siRNA sense strand
gaacgcuguuauuucuucu

SEQ ID NO: 1757561 - RNA, 19 nt, Homo sapiens
  misc_RNA (1)...(19): siRNA sense strand
aauggagaguggagaauuc

SEQ ID NO: 1757562 - RNA, 19 nt, Homo sapiens
  misc_RNA (1)...(19): siRNA sense strand
gggcgaugcuggaucuuuu

SEQ ID NO: 1757563 - RNA, 19 nt, Homo sapiens
  misc_RNA (1)...(19): siRNA sense strand
aagccacucuucaauaugg

SEQ ID NO: 1757564 - RNA, 19 nt, Homo sapiens
  misc_RNA (1)...(19): siRNA sense strand
ucagaaaauuggccccaua

SEQ ID NO: 1757565 - RNA, 19 nt, Homo sapiens
  misc_RNA (1)...(19): siRNA sense strand
caaaugaugguggccaaug

SEQ ID NO: 1757566 - RNA, 19 nt, Homo sapiens
  misc_RNA (1)...(19): siRNA sense strand
gagaagguagcugcucuga

SEQ ID NO: 1757567 - RNA, 19 nt, Homo sapiens
  misc_RNA (1)...(19): siRNA sense strand
caaccagcccauugacuuc

SEQ ID NO: 1757568 - RNA, 19 nt, Homo sapiens
  misc_RNA (1)...(19): siRNA sense strand
acaacaaccagcccauuga

SEQ ID NO: 1757569 - RNA, 19 nt, Homo sapiens
  misc_RNA (1)...(19): siRNA sense strand
ggaauaucgagacaaagau

SEQ ID NO: 1757570 - RNA, 19 nt, Homo sapiens
  misc_RNA (1)...(19): siRNA sense strand
gaugcuggaucuuuucuug

SEQ ID NO: 1757571 - RNA, 19 nt, Homo sapiens
  misc_RNA (1)...(19): siRNA sense strand
ucagggcgaugcuggaucu

SEQ ID NO: 1757572 - RNA, 19 nt, Homo sapiens
  misc_RNA (1)...(19): siRNA sense strand
ggaauacuuaagcaauaug

SEQ ID NO: 1757573 - RNA, 19 nt, Homo sapiens
  misc_RNA (1)...(19): siRNA sense strand
ccacacaggacgucaugau

SEQ ID NO: 1757574 - RNA, 19 nt, Homo sapiens
  misc_RNA (1)...(19): siRNA sense strand
gagaggcugugugguuugg

SEQ ID NO: 1757575 - RNA, 19 nt, Homo sapiens
  misc_RNA (1)...(19): siRNA sense strand
ccaaucaccaaccagaaga

SEQ ID NO: 1757576 - RNA, 19 nt, Homo sapiens
  misc_RNA (1)...(19): siRNA sense strand
cugaguaugucuacgaagu

SEQ ID NO: 1757577 - RNA, 19 nt, Homo sapiens
  misc_RNA (1)...(19): siRNA sense strand
ucaggauggugcuuucaca

SEQ ID NO: 1757578 - RNA, 19 nt, Homo sapiens
  misc_RNA (1)...(19): siRNA sense strand
gcaagcugggccucaguga

SEQ ID NO: 1757579 - RNA, 19 nt, Homo sapiens
  misc_RNA (1)...(19): siRNA sense strand
cagcacaaguacaacaaac

SEQ ID NO: 1757580 - RNA, 19 nt, Homo sapiens
  misc_RNA (1)...(19): siRNA sense strand
cccugaaucuuauacaaca

SEQ ID NO: 1757581 - RNA, 19 nt, Homo sapiens
  misc_RNA (1)...(19): siRNA sense strand
ggagaggcugugugguuug

SEQ ID NO: 1757582 - RNA, 19 nt, Homo sapiens
  misc_RNA (1)...(19): siRNA sense strand
ggagcaaccaaaggagaaa

SEQ ID NO: 1757583 - RNA, 19 nt, Homo sapiens
  misc_RNA (1)...(19): siRNA sense strand
accagaaggaugaaugaua

SEQ ID NO: 1757584 - RNA, 19 nt, Homo sapiens
  misc_RNA (1)...(19): siRNA sense strand
gguugaacgcuguuauuuc

SEQ ID NO: 1757585 - RNA, 19 nt, Homo sapiens
  misc_RNA (1)...(19): siRNA sense strand
augagugguucucugagua

SEQ ID NO: 1757586 - RNA, 19 nt, Homo sapiens
  misc_RNA (1)...(19): siRNA sense strand
ugaccaugaguuaguguuu

SEQ ID NO: 1757587 - RNA, 19 nt, Homo sapiens
  misc_RNA (1)...(19): siRNA sense strand
cacaggagcuucacaauaa

SEQ ID NO: 1757588 - RNA, 19 nt, Homo sapiens
  misc_RNA (1)...(19): siRNA sense strand
gcaagugucccaagauuua

SEQ ID NO: 1757589 - RNA, 19 nt, Homo sapiens
  misc_RNA (1)...(19): siRNA sense strand
ccacagagcuccaaaguag

SEQ ID NO: 1757590 - RNA, 19 nt, Homo sapiens
  misc_RNA (1)...(19): siRNA sense strand
ucaaacagccuucucauua

SEQ ID NO: 1757591 - RNA, 19 nt, Homo sapiens
  misc_RNA (1)...(19): siRNA sense strand
caaacagccuucucauuaa

SEQ ID NO: 1757592 - RNA, 19 nt, Homo sapiens
  misc_RNA (1)...(19): siRNA sense strand
gcacaggagcuucacaaua

SEQ ID NO: 1757593 - RNA, 19 nt, Homo sapiens
  misc_RNA (1)...(19): siRNA sense strand
ggagaagacuguauugaag

SEQ ID NO: 1757594 - RNA, 19 nt, Homo sapiens
  misc_RNA (1)...(19): siRNA sense strand
gagcaagugucccaagauu

SEQ ID NO: 1757595 - RNA, 19 nt, Homo sapiens
  misc_RNA (1)...(19): siRNA sense strand
gagcaucacuacaagcaaa

SEQ ID NO: 1757596 - RNA, 19 nt, Homo sapiens
  misc_RNA (1)...(19): siRNA sense strand
gaaauagaacugagaguga

SEQ ID NO: 1757597 - RNA, 19 nt, Homo sapiens
  misc_RNA (1)...(19): siRNA sense strand
aagcagagcuggaaauguu

SEQ ID NO: 1757598 - RNA, 19 nt, Homo sapiens
  misc_RNA (1)...(19): siRNA sense strand
gaacuaaugcaacuggaaa

SEQ ID NO: 1757599 - RNA, 19 nt, Homo sapiens
  misc_RNA (1)...(19): siRNA sense strand
gcaaagccucccucugaua

SEQ ID NO: 1757600 - RNA, 19 nt, Homo sapiens
  misc_RNA (1)...(19): siRNA sense strand
gaagaaaaggugcauguua

SEQ ID NO: 1757601 - RNA, 19 nt, Homo sapiens
  misc_RNA (1)...(19): siRNA sense strand
cagcugaacucugauauca

SEQ ID NO: 1757602 - RNA, 19 nt, Homo sapiens
  misc_RNA (1)...(19): siRNA sense strand
gauaucagcgccaucacua

SEQ ID NO: 1757603 - RNA, 19 nt, Homo sapiens
  misc_RNA (1)...(19): siRNA sense strand
gcaaggaauuucugcaaac

SEQ ID NO: 1757604 - RNA, 19 nt, Homo sapiens
  misc_RNA (1)...(19): siRNA sense strand
ugcaacagcugaacucuga

SEQ ID NO: 1757605 - RNA, 19 nt, Homo sapiens
  misc_RNA (1)...(19): siRNA sense strand
gcacucaggccaacaacuu

SEQ ID NO: 1757606 - RNA, 19 nt, Homo sapiens
  misc_RNA (1)...(19): siRNA sense strand
gaagagacugcaggagaua

SEQ ID NO: 1757607 - RNA, 19 nt, Homo sapiens
  misc_RNA (1)...(19): siRNA sense strand
gagaagaaacucaaacagu

SEQ ID NO: 1757608 - RNA, 19 nt, Homo sapiens
  misc_RNA (1)...(19): siRNA sense strand
ggagggaacuaaugcaacu

SEQ ID NO: 1757609 - RNA, 19 nt, Homo sapiens
  misc_RNA (1)...(19): siRNA sense strand
ggaccagccuccugcaaca

SEQ ID NO: 1757610 - RNA, 19 nt, Homo sapiens
  misc_RNA (1)...(19): siRNA sense strand
gaaggugacaggaauguuc

SEQ ID NO: 1757611 - RNA, 19 nt, Homo sapiens
  misc_RNA (1)...(19): siRNA sense strand
caacagcugaacucugaua

SEQ ID NO: 1757612 - RNA, 19 nt, Homo sapiens
  misc_RNA (1)...(19): siRNA sense strand
uggcaaagccucccucuga

SEQ ID NO: 1757613 - RNA, 19 nt, Homo sapiens
  misc_RNA (1)...(19): siRNA sense strand
aaauagaacugagagugaa

SEQ ID NO: 1757614 - RNA, 19 nt, Homo sapiens
  misc_RNA (1)...(19): siRNA sense strand
ugaagagacugcaggagau

SEQ ID NO: 1757615 - RNA, 19 nt, Homo sapiens
  misc_RNA (1)...(19): siRNA sense strand
gguagaacgucaaccucaa

SEQ ID NO: 1757616 - RNA, 19 nt, Homo sapiens
  misc_RNA (1)...(19): siRNA sense strand
cuauggaaagcuacuauua

SEQ ID NO: 1757617 - RNA, 19 nt, Homo sapiens
  misc_RNA (1)...(19): siRNA sense strand
caaagccucccucugauau

SEQ ID NO: 1757618 - RNA, 19 nt, Homo sapiens
  misc_RNA (1)...(19): siRNA sense strand
ccucugauauccaggaaau

SEQ ID NO: 1757619 - RNA, 19 nt, Homo sapiens
  misc_RNA (1)...(19): siRNA sense strand
gagcuggaaauguuaaaga

SEQ ID NO: 1757620 - RNA, 19 nt, Homo sapiens
  misc_RNA (1)...(19): siRNA sense strand
aaacagccuucucauuaag

SEQ ID NO: 1757621 - RNA, 19 nt, Homo sapiens
  misc_RNA (1)...(19): siRNA sense strand
gcagagcuggaaauguuaa

SEQ ID NO: 1757622 - RNA, 19 nt, Homo sapiens
  misc_RNA (1)...(19): siRNA sense strand
gcagugagaacuacagaag

SEQ ID NO: 1757623 - RNA, 19 nt, Homo sapiens
  misc_RNA (1)...(19): siRNA sense strand
caacuuugcccgguccuuu

SEQ ID NO: 1757624 - RNA, 19 nt, Homo sapiens
  misc_RNA (1)...(19): siRNA sense strand
uaagggacauggagaagac

SEQ ID NO: 1757625 - RNA, 19 nt, Homo sapiens
  misc_RNA (1)...(19): siRNA sense strand
gcacggaugguggcaaaga

SEQ ID NO: 1757626 - RNA, 19 nt, Homo sapiens
  misc_RNA (1)...(19): siRNA sense strand
ggacauggagaagacugua

SEQ ID NO: 1757627 - RNA, 19 nt, Homo sapiens
  misc_RNA (1)...(19): siRNA sense strand
cgacagaugggagaugauu

SEQ ID NO: 1757628 - RNA, 19 nt, Homo sapiens
  misc_RNA (1)...(19): siRNA sense strand
ggaacuaaugcaacuggaa

SEQ ID NO: 1757629 - RNA, 19 nt, Homo sapiens
  misc_RNA (1)...(19): siRNA sense strand
ggcaaagccucccucugau

SEQ ID NO: 1757630 - RNA, 19 nt, Homo sapiens
  misc_RNA (1)...(19): siRNA sense strand
caucacuacuuggcugaaa

SEQ ID NO: 1757631 - RNA, 19 nt, Homo sapiens
  misc_RNA (1)...(19): siRNA sense strand
ggacauguuacaggagauu

SEQ ID NO: 1757632 - RNA, 19 nt, Homo sapiens
  misc_RNA (1)...(19): siRNA sense strand
aauggaaggugacaggaau

SEQ ID NO: 1757633 - RNA, 19 nt, Homo sapiens
  misc_RNA (1)...(19): siRNA sense strand
uggagaagacuguauugaa

SEQ ID NO: 1757634 - RNA, 19 nt, Homo sapiens
  misc_RNA (1)...(19): siRNA sense strand
uacaggagauuucaaacag

SEQ ID NO: 1757635 - RNA, 19 nt, Homo sapiens
  misc_RNA (1)...(19): siRNA sense strand
ucagcgccaucacuacuug

SEQ ID NO: 1757636 - RNA, 19 nt, Homo sapiens
  misc_RNA (1)...(19): siRNA sense strand
aagaaaaggugcauguuau

SEQ ID NO: 1757637 - RNA, 19 nt, Homo sapiens
  misc_RNA (1)...(19): siRNA sense strand
uauaaaccacccuauggaa

SEQ ID NO: 1757638 - RNA, 19 nt, Homo sapiens
  misc_RNA (1)...(19): siRNA sense strand
ggaggcagaaggcucaugu

SEQ ID NO: 1757639 - RNA, 19 nt, Homo sapiens
  misc_RNA (1)...(19): siRNA sense strand
gcauguuauugagaagaaa

SEQ ID NO: 1757640 - RNA, 19 nt, Homo sapiens
  misc_RNA (1)...(19): siRNA sense strand
caacgugagcagcaaggaa

SEQ ID NO: 1757641 - RNA, 19 nt, Homo sapiens
  misc_RNA (1)...(19): siRNA sense strand
gaaaaggugcauguuauug

SEQ ID NO: 1757642 - RNA, 19 nt, Homo sapiens
  misc_RNA (1)...(19): siRNA sense strand
cagcaaggaauuucugcaa

SEQ ID NO: 1757643 - RNA, 19 nt, Homo sapiens
  misc_RNA (1)...(19): siRNA sense strand
aaaggugcauguuauugag

SEQ ID NO: 1757644 - RNA, 19 nt, Homo sapiens
  misc_RNA (1)...(19): siRNA sense strand
uaaaccacccuauggaaag

SEQ ID NO: 1757645 - RNA, 19 nt, Homo sapiens
  misc_RNA (1)...(19): siRNA sense strand
gaagcagagcuggaaaugu

SEQ ID NO: 1757646 - RNA, 19 nt, Homo sapiens
  misc_RNA (1)...(19): siRNA sense strand
caagugucccaagauuuaa

SEQ ID NO: 1757647 - RNA, 19 nt, Homo sapiens
  misc_RNA (1)...(19): siRNA sense strand
ccaagaaccggaggcagaa

SEQ ID NO: 1757648 - RNA, 19 nt, Homo sapiens
  misc_RNA (1)...(19): siRNA sense strand
agcaaggaauuucugcaaa

SEQ ID NO: 1757649 - RNA, 19 nt, Homo sapiens
  misc_RNA (1)...(19): siRNA sense strand
gagcagugagaacuacaga

SEQ ID NO: 1757650 - RNA, 19 nt, Homo sapiens
  misc_RNA (1)...(19): siRNA sense strand
gguuagcgagugccaagaa

SEQ ID NO: 1757651 - RNA, 19 nt, Homo sapiens
  misc_RNA (1)...(19): siRNA sense strand
ucacuacaagcaaauggaa

SEQ ID NO: 1757652 - RNA, 19 nt, Homo sapiens
  misc_RNA (1)...(19): siRNA sense strand
ggagcaagugucccaagau

SEQ ID NO: 1757653 - RNA, 19 nt, Homo sapiens
  misc_RNA (1)...(19): siRNA sense strand
auaaaccacccuauggaaa

SEQ ID NO: 1757654 - RNA, 19 nt, Homo sapiens
  misc_RNA (1)...(19): siRNA sense strand
cacggaugguggcaaagaa

SEQ ID NO: 1757655 - RNA, 19 nt, Homo sapiens
  misc_RNA (1)...(19): siRNA sense strand
gcaacccacagcaggaaga

SEQ ID NO: 1757656 - RNA, 19 nt, Homo sapiens
  misc_RNA (1)...(19): siRNA sense strand
ugauauccaggaaauagaa

SEQ ID NO: 1757657 - RNA, 19 nt, Homo sapiens
  misc_RNA (1)...(19): siRNA sense strand
gagcagcaaggaauuucug

SEQ ID NO: 1757658 - RNA, 19 nt, Homo sapiens
  misc_RNA (1)...(19): siRNA sense strand
uaaugcaacuggaaaagga

SEQ ID NO: 1757659 - RNA, 19 nt, Homo sapiens
  misc_RNA (1)...(19): siRNA sense strand
gggacuggccgguaucaca

SEQ ID NO: 1757660 - RNA, 19 nt, Homo sapiens
  misc_RNA (1)...(19): siRNA sense strand
aggcacggaugguggcaaa

SEQ ID NO: 1757661 - RNA, 19 nt, Homo sapiens
  misc_RNA (1)...(19): siRNA sense strand
gcuggaaauguuaaagaug

SEQ ID NO: 1757662 - RNA, 19 nt, Homo sapiens
  misc_RNA (1)...(19): siRNA sense strand
ucagagcagugagaacuac

SEQ ID NO: 1757663 - RNA, 19 nt, Homo sapiens
  misc_RNA (1)...(19): siRNA sense strand
acagaugggagaugauuca

SEQ ID NO: 1757664 - RNA, 19 nt, Homo sapiens
  misc_RNA (1)...(19): siRNA sense strand
gcccagcuucgacgaggua

SEQ ID NO: 1757665 - RNA, 19 nt, Homo sapiens
  misc_RNA (1)...(19): siRNA sense strand
ugcauguuauugagaagaa

SEQ ID NO: 1757666 - RNA, 19 nt, Homo sapiens
  misc_RNA (1)...(19): siRNA sense strand
uuacaggagauuucaaaca

SEQ ID NO: 1757667 - RNA, 19 nt, Homo sapiens
  misc_RNA (1)...(19): siRNA sense strand
aaccucaaguggacauguu

SEQ ID NO: 1757668 - RNA, 19 nt, Homo sapiens
  misc_RNA (1)...(19): siRNA sense strand
ucaggugccuucgacagau

SEQ ID NO: 1757669 - RNA, 19 nt, Homo sapiens
  misc_RNA (1)...(19): siRNA sense strand
ggacuuccaccaguugagu

SEQ ID NO: 1757670 - RNA, 19 nt, Homo sapiens
  misc_RNA (1)...(19): siRNA sense strand
gcauuaguggucucuguca

SEQ ID NO: 1757671 - RNA, 19 nt, Homo sapiens
  misc_RNA (1)...(19): siRNA sense strand
ccaggaaauagaacugaga

SEQ ID NO: 1757672 - RNA, 19 nt, Homo sapiens
  misc_RNA (1)...(19): siRNA sense strand
ggaaggugacaggaauguu

SEQ ID NO: 1757673 - RNA, 19 nt, Homo sapiens
  misc_RNA (1)...(19): siRNA sense strand
ggaaaaggagcugguagaa

SEQ ID NO: 1757674 - RNA, 19 nt, Homo sapiens
  misc_RNA (1)...(19): siRNA sense strand
ugaagcagagcuggaaaug

SEQ ID NO: 1757675 - RNA, 19 nt, Homo sapiens
  misc_RNA (1)...(19): siRNA sense strand
augcugagguacaccaaug

SEQ ID NO: 1757676 - RNA, 19 nt, Homo sapiens
  misc_RNA (1)...(19): siRNA sense strand
caggugccuucgacagaug

SEQ ID NO: 1757677 - RNA, 19 nt, Homo sapiens
  misc_RNA (1)...(19): siRNA sense strand
cauuaguggucucugucaa

SEQ ID NO: 1757678 - RNA, 19 nt, Homo sapiens
  misc_RNA (1)...(19): siRNA sense strand
ugacacuuacaaggcauua

SEQ ID NO: 1757679 - RNA, 19 nt, Homo sapiens
  misc_RNA (1)...(19): siRNA sense strand
aaaaucugcugcugugguu

SEQ ID NO: 1757680 - RNA, 19 nt, Homo sapiens
  misc_RNA (1)...(19): siRNA sense strand
gucccgagcaucacuacaa

SEQ ID NO: 1757681 - RNA, 19 nt, Homo sapiens
  misc_RNA (1)...(19): siRNA sense strand
acauggagaagacuguauu

SEQ ID NO: 1757682 - RNA, 19 nt, Homo sapiens
  misc_RNA (1)...(19): siRNA sense strand
uuauaaaccacccuaugga

SEQ ID NO: 1757683 - RNA, 19 nt, Homo sapiens
  misc_RNA (1)...(19): siRNA sense strand
cauuaagggacauggagaa

SEQ ID NO: 1757684 - RNA, 19 nt, Homo sapiens
  misc_RNA (1)...(19): siRNA sense strand
guagaacgucaaccucaag

SEQ ID NO: 1757685 - RNA, 19 nt, Homo sapiens
  misc_RNA (1)...(19): siRNA sense strand
gagugucggagggaacuaa

SEQ ID NO: 1757686 - RNA, 19 nt, Homo sapiens
  misc_RNA (1)...(19): siRNA sense strand
gcucaugucaccgauccaa

SEQ ID NO: 1757687 - RNA, 19 nt, Homo sapiens
  misc_RNA (1)...(19): siRNA sense strand
cacaggagcuucacaauaa

SEQ ID NO: 1757688 - RNA, 19 nt, Homo sapiens
  misc_RNA (1)...(19): siRNA sense strand
gcaagugucccaagauuua

SEQ ID NO: 1757689 - RNA, 19 nt, Homo sapiens
  misc_RNA (1)...(19): siRNA sense strand
ccacagagcuccaaaguag

SEQ ID NO: 1757690 - RNA, 19 nt, Homo sapiens
  misc_RNA (1)...(19): siRNA sense strand
ucaaacagccuucucauua

SEQ ID NO: 1757691 - RNA, 19 nt, Homo sapiens
  misc_RNA (1)...(19): siRNA sense strand
caaacagccuucucauuaa

SEQ ID NO: 1757692 - RNA, 19 nt, Homo sapiens
  misc_RNA (1)...(19): siRNA sense strand
gcacaggagcuucacaaua

SEQ ID NO: 1757693 - RNA, 19 nt, Homo sapiens
  misc_RNA (1)...(19): siRNA sense strand
ggagaagacuguauugaag

SEQ ID NO: 1757694 - RNA, 19 nt, Homo sapiens
  misc_RNA (1)...(19): siRNA sense strand
gagcaagugucccaagauu

SEQ ID NO: 1757695 - RNA, 19 nt, Homo sapiens
  misc_RNA (1)...(19): siRNA sense strand
gaaauagaacugagaguga

SEQ ID NO: 1757696 - RNA, 19 nt, Homo sapiens
  misc_RNA (1)...(19): siRNA sense strand
aagcagagcuggaaauguu

SEQ ID NO: 1757697 - RNA, 19 nt, Homo sapiens
  misc_RNA (1)...(19): siRNA sense strand
gaacuaaugcaacuggaaa

SEQ ID NO: 1757698 - RNA, 19 nt, Homo sapiens
  misc_RNA (1)...(19): siRNA sense strand
gcaaagccucccucugaua

SEQ ID NO: 1757699 - RNA, 19 nt, Homo sapiens
  misc_RNA (1)...(19): siRNA sense strand
gaagaaaaggugcauguua

SEQ ID NO: 1757700 - RNA, 19 nt, Homo sapiens
  misc_RNA (1)...(19): siRNA sense strand
cagcugaacucugauauca

SEQ ID NO: 1757701 - RNA, 19 nt, Homo sapiens
  misc_RNA (1)...(19): siRNA sense strand
gauaucagcgccaucacua

SEQ ID NO: 1757702 - RNA, 19 nt, Homo sapiens
  misc_RNA (1)...(19): siRNA sense strand
gcaaggaauuucugcaaac

SEQ ID NO: 1757703 - RNA, 19 nt, Homo sapiens
  misc_RNA (1)...(19): siRNA sense strand
ugcaacagcugaacucuga

SEQ ID NO: 1757704 - RNA, 19 nt, Homo sapiens
  misc_RNA (1)...(19): siRNA sense strand
gcacucaggccaacaacuu

SEQ ID NO: 1757705 - RNA, 19 nt, Homo sapiens
  misc_RNA (1)...(19): siRNA sense strand
gaagagacugcaggagaua

SEQ ID NO: 1757706 - RNA, 19 nt, Homo sapiens
  misc_RNA (1)...(19): siRNA sense strand
gagaagaaacucaaacagu

SEQ ID NO: 1757707 - RNA, 19 nt, Homo sapiens
  misc_RNA (1)...(19): siRNA sense strand
ggagggaacuaaugcaacu

SEQ ID NO: 1757708 - RNA, 19 nt, Homo sapiens
  misc_RNA (1)...(19): siRNA sense strand
ggaccagccuccugcaaca

SEQ ID NO: 1757709 - RNA, 19 nt, Homo sapiens
  misc_RNA (1)...(19): siRNA sense strand
gaaggugacaggaauguuc

SEQ ID NO: 1757710 - RNA, 19 nt, Homo sapiens
  misc_RNA (1)...(19): siRNA sense strand
caacagcugaacucugaua

SEQ ID NO: 1757711 - RNA, 19 nt, Homo sapiens
  misc_RNA (1)...(19): siRNA sense strand
uggcaaagccucccucuga

SEQ ID NO: 1757712 - RNA, 19 nt, Homo sapiens
  misc_RNA (1)...(19): siRNA sense strand
aaauagaacugagagugaa

SEQ ID NO: 1757713 - RNA, 19 nt, Homo sapiens
  misc_RNA (1)...(19): siRNA sense strand
ugaagagacugcaggagau

SEQ ID NO: 1757714 - RNA, 19 nt, Homo sapiens
  misc_RNA (1)...(19): siRNA sense strand
gguagaacgucaaccucaa

SEQ ID NO: 1757715 - RNA, 19 nt, Homo sapiens
  misc_RNA (1)...(19): siRNA sense strand
cuauggaaagcuacuauua

SEQ ID NO: 1757716 - RNA, 19 nt, Homo sapiens
  misc_RNA (1)...(19): siRNA sense strand
caaagccucccucugauau

SEQ ID NO: 1757717 - RNA, 19 nt, Homo sapiens
  misc_RNA (1)...(19): siRNA sense strand
ccucugauauccaggaaau

SEQ ID NO: 1757718 - RNA, 19 nt, Homo sapiens
  misc_RNA (1)...(19): siRNA sense strand
gagcuggaaauguuaaaga

SEQ ID NO: 1757719 - RNA, 19 nt, Homo sapiens
  misc_RNA (1)...(19): siRNA sense strand
aaacagccuucucauuaag

SEQ ID NO: 1757720 - RNA, 19 nt, Homo sapiens
  misc_RNA (1)...(19): siRNA sense strand
gcagagcuggaaauguuaa

SEQ ID NO: 1757721 - RNA, 19 nt, Homo sapiens
  misc_RNA (1)...(19): siRNA sense strand
gcagugagaacuacagaag

SEQ ID NO: 1757722 - RNA, 19 nt, Homo sapiens
  misc_RNA (1)...(19): siRNA sense strand
caacuuugcccgguccuuu

SEQ ID NO: 1757723 - RNA, 19 nt, Homo sapiens
  misc_RNA (1)...(19): siRNA sense strand
uaagggacauggagaagac

SEQ ID NO: 1757724 - RNA, 19 nt, Homo sapiens
  misc_RNA (1)...(19): siRNA sense strand
gcacggaugguggcaaaga

SEQ ID NO: 1757725 - RNA, 19 nt, Homo sapiens
  misc_RNA (1)...(19): siRNA sense strand
ggacauggagaagacugua

SEQ ID NO: 1757726 - RNA, 19 nt, Homo sapiens
  misc_RNA (1)...(19): siRNA sense strand
cgacagaugggagaugauu

SEQ ID NO: 1757727 - RNA, 19 nt, Homo sapiens
  misc_RNA (1)...(19): siRNA sense strand
ggaacuaaugcaacuggaa

SEQ ID NO: 1757728 - RNA, 19 nt, Homo sapiens
  misc_RNA (1)...(19): siRNA sense strand
ggcaaagccucccucugau

SEQ ID NO: 1757729 - RNA, 19 nt, Homo sapiens
  misc_RNA (1)...(19): siRNA sense strand
caucacuacuuggcugaaa

SEQ ID NO: 1757730 - RNA, 19 nt, Homo sapiens
  misc_RNA (1)...(19): siRNA sense strand
ggacauguuacaggagauu

SEQ ID NO: 1757731 - RNA, 19 nt, Homo sapiens
  misc_RNA (1)...(19): siRNA sense strand
uggagaagacuguauugaa

SEQ ID NO: 1757732 - RNA, 19 nt, Homo sapiens
  misc_RNA (1)...(19): siRNA sense strand
uacaggagauuucaaacag

SEQ ID NO: 1757733 - RNA, 19 nt, Homo sapiens
  misc_RNA (1)...(19): siRNA sense strand
ucagcgccaucacuacuug

SEQ ID NO: 1757734 - RNA, 19 nt, Homo sapiens
  misc_RNA (1)...(19): siRNA sense strand
aagaaaaggugcauguuau

SEQ ID NO: 1757735 - RNA, 19 nt, Homo sapiens
  misc_RNA (1)...(19): siRNA sense strand
ggaggcagaaggcucaugu

SEQ ID NO: 1757736 - RNA, 19 nt, Homo sapiens
  misc_RNA (1)...(19): siRNA sense strand
uauaaaccacccuauggaa

SEQ ID NO: 1757737 - RNA, 19 nt, Homo sapiens
  misc_RNA (1)...(19): siRNA sense strand
gcauguuauugagaagaaa

SEQ ID NO: 1757738 - RNA, 19 nt, Homo sapiens
  misc_RNA (1)...(19): siRNA sense strand
caacgugagcagcaaggaa

SEQ ID NO: 1757739 - RNA, 19 nt, Homo sapiens
  misc_RNA (1)...(19): siRNA sense strand
gaaaaggugcauguuauug

SEQ ID NO: 1757740 - RNA, 19 nt, Homo sapiens
  misc_RNA (1)...(19): siRNA sense strand
cagcaaggaauuucugcaa

SEQ ID NO: 1757741 - RNA, 19 nt, Homo sapiens
  misc_RNA (1)...(19): siRNA sense strand
uaaaccacccuauggaaag

SEQ ID NO: 1757742 - RNA, 19 nt, Homo sapiens
  misc_RNA (1)...(19): siRNA sense strand
aaaggugcauguuauugag

SEQ ID NO: 1757743 - RNA, 19 nt, Homo sapiens
  misc_RNA (1)...(19): siRNA sense strand
gaagcagagcuggaaaugu

SEQ ID NO: 1757744 - RNA, 19 nt, Homo sapiens
  misc_RNA (1)...(19): siRNA sense strand
caagugucccaagauuuaa

SEQ ID NO: 1757745 - RNA, 19 nt, Homo sapiens
  misc_RNA (1)...(19): siRNA sense strand
ccaagaaccggaggcagaa

SEQ ID NO: 1757746 - RNA, 19 nt, Homo sapiens
  misc_RNA (1)...(19): siRNA sense strand
agcaaggaauuucugcaaa

SEQ ID NO: 1757747 - RNA, 19 nt, Homo sapiens
  misc_RNA (1)...(19): siRNA sense strand
gagcagugagaacuacaga

SEQ ID NO: 1757748 - RNA, 19 nt, Homo sapiens
  misc_RNA (1)...(19): siRNA sense strand
auaaaccacccuauggaaa

SEQ ID NO: 1757749 - RNA, 19 nt, Homo sapiens
  misc_RNA (1)...(19): siRNA sense strand
gcaacccacagcaggaaga

SEQ ID NO: 1757750 - RNA, 19 nt, Homo sapiens
  misc_RNA (1)...(19): siRNA sense strand
ggagcaagugucccaagau

SEQ ID NO: 1757751 - RNA, 19 nt, Homo sapiens
  misc_RNA (1)...(19): siRNA sense strand
cacggaugguggcaaagaa

SEQ ID NO: 1757752 - RNA, 19 nt, Homo sapiens
  misc_RNA (1)...(19): siRNA sense strand
gguuagcgagugccaagaa

SEQ ID NO: 1757753 - RNA, 19 nt, Homo sapiens
  misc_RNA (1)...(19): siRNA sense strand
ugauauccaggaaauagaa

SEQ ID NO: 1757754 - RNA, 19 nt, Homo sapiens
  misc_RNA (1)...(19): siRNA sense strand
gagcagcaaggaauuucug

SEQ ID NO: 1757755 - RNA, 19 nt, Homo sapiens
  misc_RNA (1)...(19): siRNA sense strand
aggcacggaugguggcaaa

SEQ ID NO: 1757756 - RNA, 19 nt, Homo sapiens
  misc_RNA (1)...(19): siRNA sense strand
gggacuggccgguaucaca

SEQ ID NO: 1757757 - RNA, 19 nt, Homo sapiens
  misc_RNA (1)...(19): siRNA sense strand
uaaugcaacuggaaaagga

SEQ ID NO: 1757758 - RNA, 19 nt, Homo sapiens
  misc_RNA (1)...(19): siRNA sense strand
gcuggaaauguuaaagaug

SEQ ID NO: 1757759 - RNA, 19 nt, Homo sapiens
  misc_RNA (1)...(19): siRNA sense strand
ucagagcagugagaacuac

SEQ ID NO: 1757760 - RNA, 19 nt, Homo sapiens
  misc_RNA (1)...(19): siRNA sense strand
gcccagcuucgacgaggua

SEQ ID NO: 1757761 - RNA, 19 nt, Homo sapiens
  misc_RNA (1)...(19): siRNA sense strand
acagaugggagaugauuca

SEQ ID NO: 1757762 - RNA, 19 nt, Homo sapiens
  misc_RNA (1)...(19): siRNA sense strand
ugcauguuauugagaagaa

SEQ ID NO: 1757763 - RNA, 19 nt, Homo sapiens
  misc_RNA (1)...(19): siRNA sense strand
uuacaggagauuucaaaca

SEQ ID NO: 1757764 - RNA, 19 nt, Homo sapiens
  misc_RNA (1)...(19): siRNA sense strand
aaccucaaguggacauguu

SEQ ID NO: 1757765 - RNA, 19 nt, Homo sapiens
  misc_RNA (1)...(19): siRNA sense strand
ggacuuccaccaguugagu

SEQ ID NO: 1757766 - RNA, 19 nt, Homo sapiens
  misc_RNA (1)...(19): siRNA sense strand
ucaggugccuucgacagau

SEQ ID NO: 1757767 - RNA, 19 nt, Homo sapiens
  misc_RNA (1)...(19): siRNA sense strand
gcauuaguggucucuguca

SEQ ID NO: 1757768 - RNA, 19 nt, Homo sapiens
  misc_RNA (1)...(19): siRNA sense strand
ccaggaaauagaacugaga

SEQ ID NO: 1757769 - RNA, 19 nt, Homo sapiens
  misc_RNA (1)...(19): siRNA sense strand
ggaaaaggagcugguagaa

SEQ ID NO: 1757770 - RNA, 19 nt, Homo sapiens
  misc_RNA (1)...(19): siRNA sense strand
ggaaggugacaggaauguu

SEQ ID NO: 1757771 - RNA, 19 nt, Homo sapiens
  misc_RNA (1)...(19): siRNA sense strand
ugaagcagagcuggaaaug

SEQ ID NO: 1757772 - RNA, 19 nt, Homo sapiens
  misc_RNA (1)...(19): siRNA sense strand
augcugagguacaccaaug

SEQ ID NO: 1757773 - RNA, 19 nt, Homo sapiens
  misc_RNA (1)...(19): siRNA sense strand
caggugccuucgacagaug

SEQ ID NO: 1757774 - RNA, 19 nt, Homo sapiens
  misc_RNA (1)...(19): siRNA sense strand
cauuaguggucucugucaa

SEQ ID NO: 1757775 - RNA, 19 nt, Homo sapiens
  misc_RNA (1)...(19): siRNA sense strand
ugacacuuacaaggcauua

SEQ ID NO: 1757776 - RNA, 19 nt, Homo sapiens
  misc_RNA (1)...(19): siRNA sense strand
aaaaucugcugcugugguu

SEQ ID NO: 1757777 - RNA, 19 nt, Homo sapiens
  misc_RNA (1)...(19): siRNA sense strand
gcucaugucaccgauccaa

SEQ ID NO: 1757778 - RNA, 19 nt, Homo sapiens
  misc_RNA (1)...(19): siRNA sense strand
acauggagaagacuguauu

SEQ ID NO: 1757779 - RNA, 19 nt, Homo sapiens
  misc_RNA (1)...(19): siRNA sense strand
cauuaagggacauggagaa

SEQ ID NO: 1757780 - RNA, 19 nt, Homo sapiens
  misc_RNA (1)...(19): siRNA sense strand
guagaacgucaaccucaag

SEQ ID NO: 1757781 - RNA, 19 nt, Homo sapiens
  misc_RNA (1)...(19): siRNA sense strand
uuauaaaccacccuaugga

SEQ ID NO: 1757782 - RNA, 19 nt, Homo sapiens
  misc_RNA (1)...(19): siRNA sense strand
gagugucggagggaacuaa

SEQ ID NO: 1757783 - RNA, 19 nt, Homo sapiens
  misc_RNA (1)...(19): siRNA sense strand
uauggaaagcuacuauuac

SEQ ID NO: 1757784 - RNA, 19 nt, Homo sapiens
  misc_RNA (1)...(19): siRNA sense strand
caaggaauuucugcaaacc

SEQ ID NO: 1757785 - RNA, 19 nt, Homo sapiens
  misc_RNA (1)...(19): siRNA sense strand
acacuuacaaggcauuagu

SEQ ID NO: 1757786 - RNA, 19 nt, Homo sapiens
  misc_RNA (1)...(19): siRNA sense strand
cacaggagcuucacaauaa

SEQ ID NO: 1757787 - RNA, 19 nt, Homo sapiens
  misc_RNA (1)...(19): siRNA sense strand
gcaagugucccaagauuua

SEQ ID NO: 1757788 - RNA, 19 nt, Homo sapiens
  misc_RNA (1)...(19): siRNA sense strand
ccacagagcuccaaaguag

SEQ ID NO: 1757789 - RNA, 19 nt, Homo sapiens
  misc_RNA (1)...(19): siRNA sense strand
ucaaacagccuucucauua

SEQ ID NO: 1757790 - RNA, 19 nt, Homo sapiens
  misc_RNA (1)...(19): siRNA sense strand
caaacagccuucucauuaa

SEQ ID NO: 1757791 - RNA, 19 nt, Homo sapiens
  misc_RNA (1)...(19): siRNA sense strand
gcacaggagcuucacaaua

SEQ ID NO: 1757792 - RNA, 19 nt, Homo sapiens
  misc_RNA (1)...(19): siRNA sense strand
ggagaagacuguauugaag

SEQ ID NO: 1757793 - RNA, 19 nt, Homo sapiens
  misc_RNA (1)...(19): siRNA sense strand
gagcaagugucccaagauu

SEQ ID NO: 1757794 - RNA, 19 nt, Homo sapiens
  misc_RNA (1)...(19): siRNA sense strand
gagcaucacuacaagcaaa

SEQ ID NO: 1757795 - RNA, 19 nt, Homo sapiens
  misc_RNA (1)...(19): siRNA sense strand
gaaauagaacugagaguga

SEQ ID NO: 1757796 - RNA, 19 nt, Homo sapiens
  misc_RNA (1)...(19): siRNA sense strand
aagcagagcuggaaauguu

SEQ ID NO: 1757797 - RNA, 19 nt, Homo sapiens
  misc_RNA (1)...(19): siRNA sense strand
gaacuaaugcaacuggaaa

SEQ ID NO: 1757798 - RNA, 19 nt, Homo sapiens
  misc_RNA (1)...(19): siRNA sense strand
gcaaagccucccucugaua

SEQ ID NO: 1757799 - RNA, 19 nt, Homo sapiens
  misc_RNA (1)...(19): siRNA sense strand
gaagaaaaggugcauguua

SEQ ID NO: 1757800 - RNA, 19 nt, Homo sapiens
  misc_RNA (1)...(19): siRNA sense strand
cagcugaacucugauauca

SEQ ID NO: 1757801 - RNA, 19 nt, Homo sapiens
  misc_RNA (1)...(19): siRNA sense strand
gauaucagcgccaucacua

SEQ ID NO: 1757802 - RNA, 19 nt, Homo sapiens
  misc_RNA (1)...(19): siRNA sense strand
gcaaggaauuucugcaaac

SEQ ID NO: 1757803 - RNA, 19 nt, Homo sapiens
  misc_RNA (1)...(19): siRNA sense strand
ugcaacagcugaacucuga

SEQ ID NO: 1757804 - RNA, 19 nt, Homo sapiens
  misc_RNA (1)...(19): siRNA sense strand
gcacucaggccaacaacuu

SEQ ID NO: 1757805 - RNA, 19 nt, Homo sapiens
  misc_RNA (1)...(19): siRNA sense strand
gaagagacugcaggagaua

SEQ ID NO: 1757806 - RNA, 19 nt, Homo sapiens
  misc_RNA (1)...(19): siRNA sense strand
gagaagaaacucaaacagu

SEQ ID NO: 1757807 - RNA, 19 nt, Homo sapiens
  misc_RNA (1)...(19): siRNA sense strand
ggagggaacuaaugcaacu

SEQ ID NO: 1757808 - RNA, 19 nt, Homo sapiens
  misc_RNA (1)...(19): siRNA sense strand
ggaccagccuccugcaaca

SEQ ID NO: 1757809 - RNA, 19 nt, Homo sapiens
  misc_RNA (1)...(19): siRNA sense strand
gaaggugacaggaauguuc

SEQ ID NO: 1757810 - RNA, 19 nt, Homo sapiens
  misc_RNA (1)...(19): siRNA sense strand
caacagcugaacucugaua

SEQ ID NO: 1757811 - RNA, 19 nt, Homo sapiens
  misc_RNA (1)...(19): siRNA sense strand
uggcaaagccucccucuga

SEQ ID NO: 1757812 - RNA, 19 nt, Homo sapiens
  misc_RNA (1)...(19): siRNA sense strand
aaauagaacugagagugaa

SEQ ID NO: 1757813 - RNA, 19 nt, Homo sapiens
  misc_RNA (1)...(19): siRNA sense strand
ugaagagacugcaggagau

SEQ ID NO: 1757814 - RNA, 19 nt, Homo sapiens
  misc_RNA (1)...(19): siRNA sense strand
gguagaacgucaaccucaa

SEQ ID NO: 1757815 - RNA, 19 nt, Homo sapiens
  misc_RNA (1)...(19): siRNA sense strand
cuauggaaagcuacuauua

SEQ ID NO: 1757816 - RNA, 19 nt, Homo sapiens
  misc_RNA (1)...(19): siRNA sense strand
caaagccucccucugauau

SEQ ID NO: 1757817 - RNA, 19 nt, Homo sapiens
  misc_RNA (1)...(19): siRNA sense strand
ccucugauauccaggaaau

SEQ ID NO: 1757818 - RNA, 19 nt, Homo sapiens
  misc_RNA (1)...(19): siRNA sense strand
gagcuggaaauguuaaaga

SEQ ID NO: 1757819 - RNA, 19 nt, Homo sapiens
  misc_RNA (1)...(19): siRNA sense strand
aaacagccuucucauuaag

SEQ ID NO: 1757820 - RNA, 19 nt, Homo sapiens
  misc_RNA (1)...(19): siRNA sense strand
gcagagcuggaaauguuaa

SEQ ID NO: 1757821 - RNA, 19 nt, Homo sapiens
  misc_RNA (1)...(19): siRNA sense strand
gcagugagaacuacagaag

SEQ ID NO: 1757822 - RNA, 19 nt, Homo sapiens
  misc_RNA (1)...(19): siRNA sense strand
caacuuugcccgguccuuu

SEQ ID NO: 1757823 - RNA, 19 nt, Homo sapiens
  misc_RNA (1)...(19): siRNA sense strand
uaagggacauggagaagac

SEQ ID NO: 1757824 - RNA, 19 nt, Homo sapiens
  misc_RNA (1)...(19): siRNA sense strand
gcacggaugguggcaaaga

SEQ ID NO: 1757825 - RNA, 19 nt, Homo sapiens
  misc_RNA (1)...(19): siRNA sense strand
ggacauggagaagacugua

SEQ ID NO: 1757826 - RNA, 19 nt, Homo sapiens
  misc_RNA (1)...(19): siRNA sense strand
cgacagaugggagaugauu

SEQ ID NO: 1757827 - RNA, 19 nt, Homo sapiens
  misc_RNA (1)...(19): siRNA sense strand
ggaacuaaugcaacuggaa

SEQ ID NO: 1757828 - RNA, 19 nt, Homo sapiens
  misc_RNA (1)...(19): siRNA sense strand
ggcaaagccucccucugau

SEQ ID NO: 1757829 - RNA, 19 nt, Homo sapiens
  misc_RNA (1)...(19): siRNA sense strand
caucacuacuuggcugaaa

SEQ ID NO: 1757830 - RNA, 19 nt, Homo sapiens
  misc_RNA (1)...(19): siRNA sense strand
ggacauguuacaggagauu

SEQ ID NO: 1757831 - RNA, 19 nt, Homo sapiens
  misc_RNA (1)...(19): siRNA sense strand
aauggaaggugacaggaau

SEQ ID NO: 1757832 - RNA, 19 nt, Homo sapiens
  misc_RNA (1)...(19): siRNA sense strand
uggagaagacuguauugaa

SEQ ID NO: 1757833 - RNA, 19 nt, Homo sapiens
  misc_RNA (1)...(19): siRNA sense strand
uacaggagauuucaaacag

SEQ ID NO: 1757834 - RNA, 19 nt, Homo sapiens
  misc_RNA (1)...(19): siRNA sense strand
ucagcgccaucacuacuug

SEQ ID NO: 1757835 - RNA, 19 nt, Homo sapiens
  misc_RNA (1)...(19): siRNA sense strand
aagaaaaggugcauguuau

SEQ ID NO: 1757836 - RNA, 19 nt, Homo sapiens
  misc_RNA (1)...(19): siRNA sense strand
uauaaaccacccuauggaa

SEQ ID NO: 1757837 - RNA, 19 nt, Homo sapiens
  misc_RNA (1)...(19): siRNA sense strand
ggaggcagaaggcucaugu

SEQ ID NO: 1757838 - RNA, 19 nt, Homo sapiens
  misc_RNA (1)...(19): siRNA sense strand
gcauguuauugagaagaaa

SEQ ID NO: 1757839 - RNA, 19 nt, Homo sapiens
  misc_RNA (1)...(19): siRNA sense strand
caacgugagcagcaaggaa

SEQ ID NO: 1757840 - RNA, 19 nt, Homo sapiens
  misc_RNA (1)...(19): siRNA sense strand
gaaaaggugcauguuauug

SEQ ID NO: 1757841 - RNA, 19 nt, Homo sapiens
  misc_RNA (1)...(19): siRNA sense strand
cagcaaggaauuucugcaa

SEQ ID NO: 1757842 - RNA, 19 nt, Homo sapiens
  misc_RNA (1)...(19): siRNA sense strand
aaaggugcauguuauugag

SEQ ID NO: 1757843 - RNA, 19 nt, Homo sapiens
  misc_RNA (1)...(19): siRNA sense strand
uaaaccacccuauggaaag

SEQ ID NO: 1757844 - RNA, 19 nt, Homo sapiens
  misc_RNA (1)...(19): siRNA sense strand
gaagcagagcuggaaaugu

SEQ ID NO: 1757845 - RNA, 19 nt, Homo sapiens
  misc_RNA (1)...(19): siRNA sense strand
caagugucccaagauuuaa

SEQ ID NO: 1757846 - RNA, 19 nt, Homo sapiens
  misc_RNA (1)...(19): siRNA sense strand
ccaagaaccggaggcagaa

SEQ ID NO: 1757847 - RNA, 19 nt, Homo sapiens
  misc_RNA (1)...(19): siRNA sense strand
agcaaggaauuucugcaaa

SEQ ID NO: 1757848 - RNA, 19 nt, Homo sapiens
  misc_RNA (1)...(19): siRNA sense strand
gagcagugagaacuacaga

SEQ ID NO: 1757849 - RNA, 19 nt, Homo sapiens
  misc_RNA (1)...(19): siRNA sense strand
gguuagcgagugccaagaa

SEQ ID NO: 1757850 - RNA, 19 nt, Homo sapiens
  misc_RNA (1)...(19): siRNA sense strand
ucacuacaagcaaauggaa

SEQ ID NO: 1757851 - RNA, 19 nt, Homo sapiens
  misc_RNA (1)...(19): siRNA sense strand
ggagcaagugucccaagau

SEQ ID NO: 1757852 - RNA, 19 nt, Homo sapiens
  misc_RNA (1)...(19): siRNA sense strand
auaaaccacccuauggaaa

SEQ ID NO: 1757853 - RNA, 19 nt, Homo sapiens
  misc_RNA (1)...(19): siRNA sense strand
cacggaugguggcaaagaa

SEQ ID NO: 1757854 - RNA, 19 nt, Homo sapiens
  misc_RNA (1)...(19): siRNA sense strand
gcaacccacagcaggaaga

SEQ ID NO: 1757855 - RNA, 19 nt, Homo sapiens
  misc_RNA (1)...(19): siRNA sense strand
ugauauccaggaaauagaa

SEQ ID NO: 1757856 - RNA, 19 nt, Homo sapiens
  misc_RNA (1)...(19): siRNA sense strand
gagcagcaaggaauuucug

SEQ ID NO: 1757857 - RNA, 19 nt, Homo sapiens
  misc_RNA (1)...(19): siRNA sense strand
uaaugcaacuggaaaagga

SEQ ID NO: 1757858 - RNA, 19 nt, Homo sapiens
  misc_RNA (1)...(19): siRNA sense strand
gggacuggccgguaucaca

SEQ ID NO: 1757859 - RNA, 19 nt, Homo sapiens
  misc_RNA (1)...(19): siRNA sense strand
aggcacggaugguggcaaa

SEQ ID NO: 1757860 - RNA, 19 nt, Homo sapiens
  misc_RNA (1)...(19): siRNA sense strand
gcuggaaauguuaaagaug

SEQ ID NO: 1757861 - RNA, 19 nt, Homo sapiens
  misc_RNA (1)...(19): siRNA sense strand
ucagagcagugagaacuac

SEQ ID NO: 1757862 - RNA, 19 nt, Homo sapiens
  misc_RNA (1)...(19): siRNA sense strand
acagaugggagaugauuca

SEQ ID NO: 1757863 - RNA, 19 nt, Homo sapiens
  misc_RNA (1)...(19): siRNA sense strand
gcccagcuucgacgaggua

SEQ ID NO: 1757864 - RNA, 19 nt, Homo sapiens
  misc_RNA (1)...(19): siRNA sense strand
ugcauguuauugagaagaa

SEQ ID NO: 1757865 - RNA, 19 nt, Homo sapiens
  misc_RNA (1)...(19): siRNA sense strand
uuacaggagauuucaaaca

SEQ ID NO: 1757866 - RNA, 19 nt, Homo sapiens
  misc_RNA (1)...(19): siRNA sense strand
aaccucaaguggacauguu

SEQ ID NO: 1757867 - RNA, 19 nt, Homo sapiens
  misc_RNA (1)...(19): siRNA sense strand
ucaggugccuucgacagau

SEQ ID NO: 1757868 - RNA, 19 nt, Homo sapiens
  misc_RNA (1)...(19): siRNA sense strand
ggacuuccaccaguugagu

SEQ ID NO: 1757869 - RNA, 19 nt, Homo sapiens
  misc_RNA (1)...(19): siRNA sense strand
gcauuaguggucucuguca

SEQ ID NO: 1757870 - RNA, 19 nt, Homo sapiens
  misc_RNA (1)...(19): siRNA sense strand
ccaggaaauagaacugaga

SEQ ID NO: 1757871 - RNA, 19 nt, Homo sapiens
  misc_RNA (1)...(19): siRNA sense strand
ggaaggugacaggaauguu

SEQ ID NO: 1757872 - RNA, 19 nt, Homo sapiens
  misc_RNA (1)...(19): siRNA sense strand
ggaaaaggagcugguagaa

SEQ ID NO: 1757873 - RNA, 19 nt, Homo sapiens
  misc_RNA (1)...(19): siRNA sense strand
ugaagcagagcuggaaaug

SEQ ID NO: 1757874 - RNA, 19 nt, Homo sapiens
  misc_RNA (1)...(19): siRNA sense strand
augcugagguacaccaaug

SEQ ID NO: 1757875 - RNA, 19 nt, Homo sapiens
  misc_RNA (1)...(19): siRNA sense strand
caggugccuucgacagaug

SEQ ID NO: 1757876 - RNA, 19 nt, Homo sapiens
  misc_RNA (1)...(19): siRNA sense strand
cauuaguggucucugucaa

SEQ ID NO: 1757877 - RNA, 19 nt, Homo sapiens
  misc_RNA (1)...(19): siRNA sense strand
ugacacuuacaaggcauua

SEQ ID NO: 1757878 - RNA, 19 nt, Homo sapiens
  misc_RNA (1)...(19): siRNA sense strand
aaaaucugcugcugugguu

SEQ ID NO: 1757879 - RNA, 19 nt, Homo sapiens
  misc_RNA (1)...(19): siRNA sense strand
gucccgagcaucacuacaa

SEQ ID NO: 1757880 - RNA, 19 nt, Homo sapiens
  misc_RNA (1)...(19): siRNA sense strand
acauggagaagacuguauu

SEQ ID NO: 1757881 - RNA, 19 nt, Homo sapiens
  misc_RNA (1)...(19): siRNA sense strand
uuauaaaccacccuaugga

SEQ ID NO: 1757882 - RNA, 19 nt, Homo sapiens
  misc_RNA (1)...(19): siRNA sense strand
cauuaagggacauggagaa

SEQ ID NO: 1757883 - RNA, 19 nt, Homo sapiens
  misc_RNA (1)...(19): siRNA sense strand
guagaacgucaaccucaag

SEQ ID NO: 1757884 - RNA, 19 nt, Homo sapiens
  misc_RNA (1)...(19): siRNA sense strand
gagugucggagggaacuaa

SEQ ID NO: 1757885 - RNA, 19 nt, Homo sapiens
  misc_RNA (1)...(19): siRNA sense strand
gcucaugucaccgauccaa

SEQ ID NO: 1757886 - RNA, 19 nt, Homo sapiens
  misc_RNA (1)...(19): siRNA sense strand
cacaggagcuucacaauaa

SEQ ID NO: 1757887 - RNA, 19 nt, Homo sapiens
  misc_RNA (1)...(19): siRNA sense strand
gcaagugucccaagauuua

SEQ ID NO: 1757888 - RNA, 19 nt, Homo sapiens
  misc_RNA (1)...(19): siRNA sense strand
ccacagagcuccaaaguag

SEQ ID NO: 1757889 - RNA, 19 nt, Homo sapiens
  misc_RNA (1)...(19): siRNA sense strand
ucaaacagccuucucauua

SEQ ID NO: 1757890 - RNA, 19 nt, Homo sapiens
  misc_RNA (1)...(19): siRNA sense strand
caaacagccuucucauuaa

SEQ ID NO: 1757891 - RNA, 19 nt, Homo sapiens
  misc_RNA (1)...(19): siRNA sense strand
gcacaggagcuucacaaua

SEQ ID NO: 1757892 - RNA, 19 nt, Homo sapiens
  misc_RNA (1)...(19): siRNA sense strand
ggagaagacuguauugaag

SEQ ID NO: 1757893 - RNA, 19 nt, Homo sapiens
  misc_RNA (1)...(19): siRNA sense strand
gagcaagugucccaagauu

SEQ ID NO: 1757894 - RNA, 19 nt, Homo sapiens
  misc_RNA (1)...(19): siRNA sense strand
gagcaucacuacaagcaaa

SEQ ID NO: 1757895 - RNA, 19 nt, Homo sapiens
  misc_RNA (1)...(19): siRNA sense strand
gaaauagaacugagaguga

SEQ ID NO: 1757896 - RNA, 19 nt, Homo sapiens
  misc_RNA (1)...(19): siRNA sense strand
aagcagagcuggaaauguu

SEQ ID NO: 1757897 - RNA, 19 nt, Homo sapiens
  misc_RNA (1)...(19): siRNA sense strand
gaacuaaugcaacuggaaa

SEQ ID NO: 1757898 - RNA, 19 nt, Homo sapiens
  misc_RNA (1)...(19): siRNA sense strand
gcaaagccucccucugaua

SEQ ID NO: 1757899 - RNA, 19 nt, Homo sapiens
  misc_RNA (1)...(19): siRNA sense strand
gaagaaaaggugcauguua

SEQ ID NO: 1757900 - RNA, 19 nt, Homo sapiens
  misc_RNA (1)...(19): siRNA sense strand
cagcugaacucugauauca

SEQ ID NO: 1757901 - RNA, 19 nt, Homo sapiens
  misc_RNA (1)...(19): siRNA sense strand
gauaucagcgccaucacua

SEQ ID NO: 1757902 - RNA, 19 nt, Homo sapiens
  misc_RNA (1)...(19): siRNA sense strand
gcaaggaauuucugcaaac

SEQ ID NO: 1757903 - RNA, 19 nt, Homo sapiens
  misc_RNA (1)...(19): siRNA sense strand
ugcaacagcugaacucuga

SEQ ID NO: 1757904 - RNA, 19 nt, Homo sapiens
  misc_RNA (1)...(19): siRNA sense strand
gcacucaggccaacaacuu

SEQ ID NO: 1757905 - RNA, 19 nt, Homo sapiens
  misc_RNA (1)...(19): siRNA sense strand
gaagagacugcaggagaua

SEQ ID NO: 1757906 - RNA, 19 nt, Homo sapiens
  misc_RNA (1)...(19): siRNA sense strand
gagaagaaacucaaacagu

SEQ ID NO: 1757907 - RNA, 19 nt, Homo sapiens
  misc_RNA (1)...(19): siRNA sense strand
ggagggaacuaaugcaacu

SEQ ID NO: 1757908 - RNA, 19 nt, Homo sapiens
  misc_RNA (1)...(19): siRNA sense strand
ggaccagccuccugcaaca

SEQ ID NO: 1757909 - RNA, 19 nt, Homo sapiens
  misc_RNA (1)...(19): siRNA sense strand
gaaggugacaggaauguuc

SEQ ID NO: 1757910 - RNA, 19 nt, Homo sapiens
  misc_RNA (1)...(19): siRNA sense strand
caacagcugaacucugaua

SEQ ID NO: 1757911 - RNA, 19 nt, Homo sapiens
  misc_RNA (1)...(19): siRNA sense strand
uggcaaagccucccucuga

SEQ ID NO: 1757912 - RNA, 19 nt, Homo sapiens
  misc_RNA (1)...(19): siRNA sense strand
aaauagaacugagagugaa

SEQ ID NO: 1757913 - RNA, 19 nt, Homo sapiens
  misc_RNA (1)...(19): siRNA sense strand
ugaagagacugcaggagau

SEQ ID NO: 1757914 - RNA, 19 nt, Homo sapiens
  misc_RNA (1)...(19): siRNA sense strand
gguagaacgucaaccucaa

SEQ ID NO: 1757915 - RNA, 19 nt, Homo sapiens
  misc_RNA (1)...(19): siRNA sense strand
cuauggaaagcuacuauua

SEQ ID NO: 1757916 - RNA, 19 nt, Homo sapiens
  misc_RNA (1)...(19): siRNA sense strand
caaagccucccucugauau

SEQ ID NO: 1757917 - RNA, 19 nt, Homo sapiens
  misc_RNA (1)...(19): siRNA sense strand
ccucugauauccaggaaau

SEQ ID NO: 1757918 - RNA, 19 nt, Homo sapiens
  misc_RNA (1)...(19): siRNA sense strand
gagcuggaaauguuaaaga

SEQ ID NO: 1757919 - RNA, 19 nt, Homo sapiens
  misc_RNA (1)...(19): siRNA sense strand
aaacagccuucucauuaag

SEQ ID NO: 1757920 - RNA, 19 nt, Homo sapiens
  misc_RNA (1)...(19): siRNA sense strand
gcagagcuggaaauguuaa

SEQ ID NO: 1757921 - RNA, 19 nt, Homo sapiens
  misc_RNA (1)...(19): siRNA sense strand
gcagugagaacuacagaag

SEQ ID NO: 1757922 - RNA, 19 nt, Homo sapiens
  misc_RNA (1)...(19): siRNA sense strand
caacuuugcccgguccuuu

SEQ ID NO: 1757923 - RNA, 19 nt, Homo sapiens
  misc_RNA (1)...(19): siRNA sense strand
uaagggacauggagaagac

SEQ ID NO: 1757924 - RNA, 19 nt, Homo sapiens
  misc_RNA (1)...(19): siRNA sense strand
gcacggaugguggcaaaga

SEQ ID NO: 1757925 - RNA, 19 nt, Homo sapiens
  misc_RNA (1)...(19): siRNA sense strand
ggacauggagaagacugua

SEQ ID NO: 1757926 - RNA, 19 nt, Homo sapiens
  misc_RNA (1)...(19): siRNA sense strand
cgacagaugggagaugauu

SEQ ID NO: 1757927 - RNA, 19 nt, Homo sapiens
  misc_RNA (1)...(19): siRNA sense strand
ggaacuaaugcaacuggaa

SEQ ID NO: 1757928 - RNA, 19 nt, Homo sapiens
  misc_RNA (1)...(19): siRNA sense strand
ggcaaagccucccucugau

SEQ ID NO: 1757929 - RNA, 19 nt, Homo sapiens
  misc_RNA (1)...(19): siRNA sense strand
caucacuacuuggcugaaa

SEQ ID NO: 1757930 - RNA, 19 nt, Homo sapiens
  misc_RNA (1)...(19): siRNA sense strand
ggacauguuacaggagauu

SEQ ID NO: 1757931 - RNA, 19 nt, Homo sapiens
  misc_RNA (1)...(19): siRNA sense strand
aauggaaggugacaggaau

SEQ ID NO: 1757932 - RNA, 19 nt, Homo sapiens
  misc_RNA (1)...(19): siRNA sense strand
uggagaagacuguauugaa

SEQ ID NO: 1757933 - RNA, 19 nt, Homo sapiens
  misc_RNA (1)...(19): siRNA sense strand
uacaggagauuucaaacag

SEQ ID NO: 1757934 - RNA, 19 nt, Homo sapiens
  misc_RNA (1)...(19): siRNA sense strand
ucagcgccaucacuacuug

SEQ ID NO: 1757935 - RNA, 19 nt, Homo sapiens
  misc_RNA (1)...(19): siRNA sense strand
aagaaaaggugcauguuau

SEQ ID NO: 1757936 - RNA, 19 nt, Homo sapiens
  misc_RNA (1)...(19): siRNA sense strand
uauaaaccacccuauggaa

SEQ ID NO: 1757937 - RNA, 19 nt, Homo sapiens
  misc_RNA (1)...(19): siRNA sense strand
ggaggcagaaggcucaugu

SEQ ID NO: 1757938 - RNA, 19 nt, Homo sapiens
  misc_RNA (1)...(19): siRNA sense strand
gcauguuauugagaagaaa

SEQ ID NO: 1757939 - RNA, 19 nt, Homo sapiens
  misc_RNA (1)...(19): siRNA sense strand
caacgugagcagcaaggaa

SEQ ID NO: 1757940 - RNA, 19 nt, Homo sapiens
  misc_RNA (1)...(19): siRNA sense strand
gaaaaggugcauguuauug

SEQ ID NO: 1757941 - RNA, 19 nt, Homo sapiens
  misc_RNA (1)...(19): siRNA sense strand
cagcaaggaauuucugcaa

SEQ ID NO: 1757942 - RNA, 19 nt, Homo sapiens
  misc_RNA (1)...(19): siRNA sense strand
aaaggugcauguuauugag

SEQ ID NO: 1757943 - RNA, 19 nt, Homo sapiens
  misc_RNA (1)...(19): siRNA sense strand
uaaaccacccuauggaaag

SEQ ID NO: 1757944 - RNA, 19 nt, Homo sapiens
  misc_RNA (1)...(19): siRNA sense strand
gaagcagagcuggaaaugu

SEQ ID NO: 1757945 - RNA, 19 nt, Homo sapiens
  misc_RNA (1)...(19): siRNA sense strand
caagugucccaagauuuaa

SEQ ID NO: 1757946 - RNA, 19 nt, Homo sapiens
  misc_RNA (1)...(19): siRNA sense strand
ccaagaaccggaggcagaa

SEQ ID NO: 1757947 - RNA, 19 nt, Homo sapiens
  misc_RNA (1)...(19): siRNA sense strand
agcaaggaauuucugcaaa

SEQ ID NO: 1757948 - RNA, 19 nt, Homo sapiens
  misc_RNA (1)...(19): siRNA sense strand
gagcagugagaacuacaga

SEQ ID NO: 1757949 - RNA, 19 nt, Homo sapiens
  misc_RNA (1)...(19): siRNA sense strand
gguuagcgagugccaagaa

SEQ ID NO: 1757950 - RNA, 19 nt, Homo sapiens
  misc_RNA (1)...(19): siRNA sense strand
ucacuacaagcaaauggaa

SEQ ID NO: 1757951 - RNA, 19 nt, Homo sapiens
  misc_RNA (1)...(19): siRNA sense strand
ggagcaagugucccaagau

SEQ ID NO: 1757952 - RNA, 19 nt, Homo sapiens
  misc_RNA (1)...(19): siRNA sense strand
auaaaccacccuauggaaa

SEQ ID NO: 1757953 - RNA, 19 nt, Homo sapiens
  misc_RNA (1)...(19): siRNA sense strand
cacggaugguggcaaagaa

SEQ ID NO: 1757954 - RNA, 19 nt, Homo sapiens
  misc_RNA (1)...(19): siRNA sense strand
gcaacccacagcaggaaga

SEQ ID NO: 1757955 - RNA, 19 nt, Homo sapiens
  misc_RNA (1)...(19): siRNA sense strand
ugauauccaggaaauagaa

SEQ ID NO: 1757956 - RNA, 19 nt, Homo sapiens
  misc_RNA (1)...(19): siRNA sense strand
gagcagcaaggaauuucug

SEQ ID NO: 1757957 - RNA, 19 nt, Homo sapiens
  misc_RNA (1)...(19): siRNA sense strand
uaaugcaacuggaaaagga

SEQ ID NO: 1757958 - RNA, 19 nt, Homo sapiens
  misc_RNA (1)...(19): siRNA sense strand
gggacuggccgguaucaca

SEQ ID NO: 1757959 - RNA, 19 nt, Homo sapiens
  misc_RNA (1)...(19): siRNA sense strand
aggcacggaugguggcaaa

SEQ ID NO: 1757960 - RNA, 19 nt, Homo sapiens
  misc_RNA (1)...(19): siRNA sense strand
gcuggaaauguuaaagaug

SEQ ID NO: 1757961 - RNA, 19 nt, Homo sapiens
  misc_RNA (1)...(19): siRNA sense strand
ucagagcagugagaacuac

SEQ ID NO: 1757962 - RNA, 19 nt, Homo sapiens
  misc_RNA (1)...(19): siRNA sense strand
acagaugggagaugauuca

SEQ ID NO: 1757963 - RNA, 19 nt, Homo sapiens
  misc_RNA (1)...(19): siRNA sense strand
gcccagcuucgacgaggua

SEQ ID NO: 1757964 - RNA, 19 nt, Homo sapiens
  misc_RNA (1)...(19): siRNA sense strand
ugcauguuauugagaagaa

SEQ ID NO: 1757965 - RNA, 19 nt, Homo sapiens
  misc_RNA (1)...(19): siRNA sense strand
uuacaggagauuucaaaca

SEQ ID NO: 1757966 - RNA, 19 nt, Homo sapiens
  misc_RNA (1)...(19): siRNA sense strand
aaccucaaguggacauguu

SEQ ID NO: 1757967 - RNA, 19 nt, Homo sapiens
  misc_RNA (1)...(19): siRNA sense strand
ucaggugccuucgacagau

SEQ ID NO: 1757968 - RNA, 19 nt, Homo sapiens
  misc_RNA (1)...(19): siRNA sense strand
ggacuuccaccaguugagu

SEQ ID NO: 1757969 - RNA, 19 nt, Homo sapiens
  misc_RNA (1)...(19): siRNA sense strand
gcauuaguggucucuguca

SEQ ID NO: 1757970 - RNA, 19 nt, Homo sapiens
  misc_RNA (1)...(19): siRNA sense strand
ccaggaaauagaacugaga

SEQ ID NO: 1757971 - RNA, 19 nt, Homo sapiens
  misc_RNA (1)...(19): siRNA sense strand
ggaaggugacaggaauguu

SEQ ID NO: 1757972 - RNA, 19 nt, Homo sapiens
  misc_RNA (1)...(19): siRNA sense strand
ggaaaaggagcugguagaa

SEQ ID NO: 1757973 - RNA, 19 nt, Homo sapiens
  misc_RNA (1)...(19): siRNA sense strand
ugaagcagagcuggaaaug

SEQ ID NO: 1757974 - RNA, 19 nt, Homo sapiens
  misc_RNA (1)...(19): siRNA sense strand
augcugagguacaccaaug

SEQ ID NO: 1757975 - RNA, 19 nt, Homo sapiens
  misc_RNA (1)...(19): siRNA sense strand
caggugccuucgacagaug

SEQ ID NO: 1757976 - RNA, 19 nt, Homo sapiens
  misc_RNA (1)...(19): siRNA sense strand
cauuaguggucucugucaa

SEQ ID NO: 1757977 - RNA, 19 nt, Homo sapiens
  misc_RNA (1)...(19): siRNA sense strand
ugacacuuacaaggcauua

SEQ ID NO: 1757978 - RNA, 19 nt, Homo sapiens
  misc_RNA (1)...(19): siRNA sense strand
aaaaucugcugcugugguu

SEQ ID NO: 1757979 - RNA, 19 nt, Homo sapiens
  misc_RNA (1)...(19): siRNA sense strand
gucccgagcaucacuacaa

SEQ ID NO: 1757980 - RNA, 19 nt, Homo sapiens
  misc_RNA (1)...(19): siRNA sense strand
acauggagaagacuguauu

SEQ ID NO: 1757981 - RNA, 19 nt, Homo sapiens
  misc_RNA (1)...(19): siRNA sense strand
uuauaaaccacccuaugga

SEQ ID NO: 1757982 - RNA, 19 nt, Homo sapiens
  misc_RNA (1)...(19): siRNA sense strand
cauuaagggacauggagaa

SEQ ID NO: 1757983 - RNA, 19 nt, Homo sapiens
  misc_RNA (1)...(19): siRNA sense strand
guagaacgucaaccucaag

SEQ ID NO: 1757984 - RNA, 19 nt, Homo sapiens
  misc_RNA (1)...(19): siRNA sense strand
gagugucggagggaacuaa

SEQ ID NO: 1757985 - RNA, 19 nt, Homo sapiens
  misc_RNA (1)...(19): siRNA sense strand
gcucaugucaccgauccaa

SEQ ID NO: 1757986 - RNA, 19 nt, Homo sapiens
  misc_RNA (1)...(19): siRNA sense strand
cacaggagcuucacaauaa

SEQ ID NO: 1757987 - RNA, 19 nt, Homo sapiens
  misc_RNA (1)...(19): siRNA sense strand
gcaagugucccaagauuua

SEQ ID NO: 1757988 - RNA, 19 nt, Homo sapiens
  misc_RNA (1)...(19): siRNA sense strand
ccacagagcuccaaaguag

SEQ ID NO: 1757989 - RNA, 19 nt, Homo sapiens
  misc_RNA (1)...(19): siRNA sense strand
ucaaacagccuucucauua

SEQ ID NO: 1757990 - RNA, 19 nt, Homo sapiens
  misc_RNA (1)...(19): siRNA sense strand
caaacagccuucucauuaa

SEQ ID NO: 1757991 - RNA, 19 nt, Homo sapiens
  misc_RNA (1)...(19): siRNA sense strand
gcacaggagcuucacaaua

SEQ ID NO: 1757992 - RNA, 19 nt, Homo sapiens
  misc_RNA (1)...(19): siRNA sense strand
ggagaagacuguauugaag

SEQ ID NO: 1757993 - RNA, 19 nt, Homo sapiens
  misc_RNA (1)...(19): siRNA sense strand
gagcaagugucccaagauu

SEQ ID NO: 1757994 - RNA, 19 nt, Homo sapiens
  misc_RNA (1)...(19): siRNA sense strand
gagcaucacuacaagcaaa

SEQ ID NO: 1757995 - RNA, 19 nt, Homo sapiens
  misc_RNA (1)...(19): siRNA sense strand
gaaauagaacugagaguga

SEQ ID NO: 1757996 - RNA, 19 nt, Homo sapiens
  misc_RNA (1)...(19): siRNA sense strand
aagcagagcuggaaauguu

SEQ ID NO: 1757997 - RNA, 19 nt, Homo sapiens
  misc_RNA (1)...(19): siRNA sense strand
gaacuaaugcaacuggaaa

SEQ ID NO: 1757998 - RNA, 19 nt, Homo sapiens
  misc_RNA (1)...(19): siRNA sense strand
gcaaagccucccucugaua

SEQ ID NO: 1757999 - RNA, 19 nt, Homo sapiens
  misc_RNA (1)...(19): siRNA sense strand
gaagaaaaggugcauguua

SEQ ID NO: 1758000 - RNA, 19 nt, Homo sapiens
  misc_RNA (1)...(19): siRNA sense strand
cagcugaacucugauauca

SEQ ID NO: 1758001 - RNA, 19 nt, Homo sapiens
  misc_RNA (1)...(19): siRNA sense strand
gauaucagcgccaucacua

SEQ ID NO: 1758002 - RNA, 19 nt, Homo sapiens
  misc_RNA (1)...(19): siRNA sense strand
gcaaggaauuucugcaaac

SEQ ID NO: 1758003 - RNA, 19 nt, Homo sapiens
  misc_RNA (1)...(19): siRNA sense strand
ugcaacagcugaacucuga

SEQ ID NO: 1758004 - RNA, 19 nt, Homo sapiens
  misc_RNA (1)...(19): siRNA sense strand
gcacucaggccaacaacuu

SEQ ID NO: 1758005 - RNA, 19 nt, Homo sapiens
  misc_RNA (1)...(19): siRNA sense strand
gaagagacugcaggagaua

SEQ ID NO: 1758006 - RNA, 19 nt, Homo sapiens
  misc_RNA (1)...(19): siRNA sense strand
gagaagaaacucaaacagu

SEQ ID NO: 1758007 - RNA, 19 nt, Homo sapiens
  misc_RNA (1)...(19): siRNA sense strand
ggagggaacuaaugcaacu

SEQ ID NO: 1758008 - RNA, 19 nt, Homo sapiens
  misc_RNA (1)...(19): siRNA sense strand
ggaccagccuccugcaaca

SEQ ID NO: 1758009 - RNA, 19 nt, Homo sapiens
  misc_RNA (1)...(19): siRNA sense strand
gaaggugacaggaauguuc

SEQ ID NO: 1758010 - RNA, 19 nt, Homo sapiens
  misc_RNA (1)...(19): siRNA sense strand
caacagcugaacucugaua

SEQ ID NO: 1758011 - RNA, 19 nt, Homo sapiens
  misc_RNA (1)...(19): siRNA sense strand
uggcaaagccucccucuga

SEQ ID NO: 1758012 - RNA, 19 nt, Homo sapiens
  misc_RNA (1)...(19): siRNA sense strand
aaauagaacugagagugaa

SEQ ID NO: 1758013 - RNA, 19 nt, Homo sapiens
  misc_RNA (1)...(19): siRNA sense strand
ugaagagacugcaggagau

SEQ ID NO: 1758014 - RNA, 19 nt, Homo sapiens
  misc_RNA (1)...(19): siRNA sense strand
gguagaacgucaaccucaa

SEQ ID NO: 1758015 - RNA, 19 nt, Homo sapiens
  misc_RNA (1)...(19): siRNA sense strand
cuauggaaagcuacuauua

SEQ ID NO: 1758016 - RNA, 19 nt, Homo sapiens
  misc_RNA (1)...(19): siRNA sense strand
caaagccucccucugauau

SEQ ID NO: 1758017 - RNA, 19 nt, Homo sapiens
  misc_RNA (1)...(19): siRNA sense strand
ccucugauauccaggaaau

SEQ ID NO: 1758018 - RNA, 19 nt, Homo sapiens
  misc_RNA (1)...(19): siRNA sense strand
gagcuggaaauguuaaaga

SEQ ID NO: 1758019 - RNA, 19 nt, Homo sapiens
  misc_RNA (1)...(19): siRNA sense strand
aaacagccuucucauuaag

SEQ ID NO: 1758020 - RNA, 19 nt, Homo sapiens
  misc_RNA (1)...(19): siRNA sense strand
gcagagcuggaaauguuaa

SEQ ID NO: 1758021 - RNA, 19 nt, Homo sapiens
  misc_RNA (1)...(19): siRNA sense strand
gcagugagaacuacagaag

SEQ ID NO: 1758022 - RNA, 19 nt, Homo sapiens
  misc_RNA (1)...(19): siRNA sense strand
caacuuugcccgguccuuu

SEQ ID NO: 1758023 - RNA, 19 nt, Homo sapiens
  misc_RNA (1)...(19): siRNA sense strand
uaagggacauggagaagac

SEQ ID NO: 1758024 - RNA, 19 nt, Homo sapiens
  misc_RNA (1)...(19): siRNA sense strand
gcacggaugguggcaaaga

SEQ ID NO: 1758025 - RNA, 19 nt, Homo sapiens
  misc_RNA (1)...(19): siRNA sense strand
ggacauggagaagacugua

SEQ ID NO: 1758026 - RNA, 19 nt, Homo sapiens
  misc_RNA (1)...(19): siRNA sense strand
cgacagaugggagaugauu

SEQ ID NO: 1758027 - RNA, 19 nt, Homo sapiens
  misc_RNA (1)...(19): siRNA sense strand
ggaacuaaugcaacuggaa

SEQ ID NO: 1758028 - RNA, 19 nt, Homo sapiens
  misc_RNA (1)...(19): siRNA sense strand
ggcaaagccucccucugau

SEQ ID NO: 1758029 - RNA, 19 nt, Homo sapiens
  misc_RNA (1)...(19): siRNA sense strand
caucacuacuuggcugaaa

SEQ ID NO: 1758030 - RNA, 19 nt, Homo sapiens
  misc_RNA (1)...(19): siRNA sense strand
ggacauguuacaggagauu

SEQ ID NO: 1758031 - RNA, 19 nt, Homo sapiens
  misc_RNA (1)...(19): siRNA sense strand
aauggaaggugacaggaau

SEQ ID NO: 1758032 - RNA, 19 nt, Homo sapiens
  misc_RNA (1)...(19): siRNA sense strand
uggagaagacuguauugaa

SEQ ID NO: 1758033 - RNA, 19 nt, Homo sapiens
  misc_RNA (1)...(19): siRNA sense strand
uacaggagauuucaaacag

SEQ ID NO: 1758034 - RNA, 19 nt, Homo sapiens
  misc_RNA (1)...(19): siRNA sense strand
ucagcgccaucacuacuug

SEQ ID NO: 1758035 - RNA, 19 nt, Homo sapiens
  misc_RNA (1)...(19): siRNA sense strand
aagaaaaggugcauguuau

SEQ ID NO: 1758036 - RNA, 19 nt, Homo sapiens
  misc_RNA (1)...(19): siRNA sense strand
uauaaaccacccuauggaa

SEQ ID NO: 1758037 - RNA, 19 nt, Homo sapiens
  misc_RNA (1)...(19): siRNA sense strand
ggaggcagaaggcucaugu

SEQ ID NO: 1758038 - RNA, 19 nt, Homo sapiens
  misc_RNA (1)...(19): siRNA sense strand
gcauguuauugagaagaaa

SEQ ID NO: 1758039 - RNA, 19 nt, Homo sapiens
  misc_RNA (1)...(19): siRNA sense strand
caacgugagcagcaaggaa

SEQ ID NO: 1758040 - RNA, 19 nt, Homo sapiens
  misc_RNA (1)...(19): siRNA sense strand
gaaaaggugcauguuauug

SEQ ID NO: 1758041 - RNA, 19 nt, Homo sapiens
  misc_RNA (1)...(19): siRNA sense strand
cagcaaggaauuucugcaa

SEQ ID NO: 1758042 - RNA, 19 nt, Homo sapiens
  misc_RNA (1)...(19): siRNA sense strand
aaaggugcauguuauugag

SEQ ID NO: 1758043 - RNA, 19 nt, Homo sapiens
  misc_RNA (1)...(19): siRNA sense strand
uaaaccacccuauggaaag

SEQ ID NO: 1758044 - RNA, 19 nt, Homo sapiens
  misc_RNA (1)...(19): siRNA sense strand
gaagcagagcuggaaaugu

SEQ ID NO: 1758045 - RNA, 19 nt, Homo sapiens
  misc_RNA (1)...(19): siRNA sense strand
caagugucccaagauuuaa

SEQ ID NO: 1758046 - RNA, 19 nt, Homo sapiens
  misc_RNA (1)...(19): siRNA sense strand
ccaagaaccggaggcagaa

SEQ ID NO: 1758047 - RNA, 19 nt, Homo sapiens
  misc_RNA (1)...(19): siRNA sense strand
agcaaggaauuucugcaaa

SEQ ID NO: 1758048 - RNA, 19 nt, Homo sapiens
  misc_RNA (1)...(19): siRNA sense strand
gagcagugagaacuacaga

SEQ ID NO: 1758049 - RNA, 19 nt, Homo sapiens
  misc_RNA (1)...(19): siRNA sense strand
gguuagcgagugccaagaa

SEQ ID NO: 1758050 - RNA, 19 nt, Homo sapiens
  misc_RNA (1)...(19): siRNA sense strand
ucacuacaagcaaauggaa

SEQ ID NO: 1758051 - RNA, 19 nt, Homo sapiens
  misc_RNA (1)...(19): siRNA sense strand
ggagcaagugucccaagau

SEQ ID NO: 1758052 - RNA, 19 nt, Homo sapiens
  misc_RNA (1)...(19): siRNA sense strand
auaaaccacccuauggaaa

SEQ ID NO: 1758053 - RNA, 19 nt, Homo sapiens
  misc_RNA (1)...(19): siRNA sense strand
cacggaugguggcaaagaa

SEQ ID NO: 1758054 - RNA, 19 nt, Homo sapiens
  misc_RNA (1)...(19): siRNA sense strand
gcaacccacagcaggaaga

SEQ ID NO: 1758055 - RNA, 19 nt, Homo sapiens
  misc_RNA (1)...(19): siRNA sense strand
ugauauccaggaaauagaa

SEQ ID NO: 1758056 - RNA, 19 nt, Homo sapiens
  misc_RNA (1)...(19): siRNA sense strand
gagcagcaaggaauuucug

SEQ ID NO: 1758057 - RNA, 19 nt, Homo sapiens
  misc_RNA (1)...(19): siRNA sense strand
uaaugcaacuggaaaagga

SEQ ID NO: 1758058 - RNA, 19 nt, Homo sapiens
  misc_RNA (1)...(19): siRNA sense strand
gggacuggccgguaucaca

SEQ ID NO: 1758059 - RNA, 19 nt, Homo sapiens
  misc_RNA (1)...(19): siRNA sense strand
aggcacggaugguggcaaa

SEQ ID NO: 1758060 - RNA, 19 nt, Homo sapiens
  misc_RNA (1)...(19): siRNA sense strand
gcuggaaauguuaaagaug

SEQ ID NO: 1758061 - RNA, 19 nt, Homo sapiens
  misc_RNA (1)...(19): siRNA sense strand
ucagagcagugagaacuac

SEQ ID NO: 1758062 - RNA, 19 nt, Homo sapiens
  misc_RNA (1)...(19): siRNA sense strand
acagaugggagaugauuca

SEQ ID NO: 1758063 - RNA, 19 nt, Homo sapiens
  misc_RNA (1)...(19): siRNA sense strand
gcccagcuucgacgaggua

SEQ ID NO: 1758064 - RNA, 19 nt, Homo sapiens
  misc_RNA (1)...(19): siRNA sense strand
ugcauguuauugagaagaa

SEQ ID NO: 1758065 - RNA, 19 nt, Homo sapiens
  misc_RNA (1)...(19): siRNA sense strand
uuacaggagauuucaaaca

SEQ ID NO: 1758066 - RNA, 19 nt, Homo sapiens
  misc_RNA (1)...(19): siRNA sense strand
aaccucaaguggacauguu

SEQ ID NO: 1758067 - RNA, 19 nt, Homo sapiens
  misc_RNA (1)...(19): siRNA sense strand
ucaggugccuucgacagau

SEQ ID NO: 1758068 - RNA, 19 nt, Homo sapiens
  misc_RNA (1)...(19): siRNA sense strand
ggacuuccaccaguugagu

SEQ ID NO: 1758069 - RNA, 19 nt, Homo sapiens
  misc_RNA (1)...(19): siRNA sense strand
gcauuaguggucucuguca

SEQ ID NO: 1758070 - RNA, 19 nt, Homo sapiens
  misc_RNA (1)...(19): siRNA sense strand
ccaggaaauagaacugaga

SEQ ID NO: 1758071 - RNA, 19 nt, Homo sapiens
  misc_RNA (1)...(19): siRNA sense strand
ggaaggugacaggaauguu

SEQ ID NO: 1758072 - RNA, 19 nt, Homo sapiens
  misc_RNA (1)...(19): siRNA sense strand
ggaaaaggagcugguagaa

SEQ ID NO: 1758073 - RNA, 19 nt, Homo sapiens
  misc_RNA (1)...(19): siRNA sense strand
ugaagcagagcuggaaaug

SEQ ID NO: 1758074 - RNA, 19 nt, Homo sapiens
  misc_RNA (1)...(19): siRNA sense strand
augcugagguacaccaaug

SEQ ID NO: 1758075 - RNA, 19 nt, Homo sapiens
  misc_RNA (1)...(19): siRNA sense strand
caggugccuucgacagaug

SEQ ID NO: 1758076 - RNA, 19 nt, Homo sapiens
  misc_RNA (1)...(19): siRNA sense strand
cauuaguggucucugucaa

SEQ ID NO: 1758077 - RNA, 19 nt, Homo sapiens
  misc_RNA (1)...(19): siRNA sense strand
ugacacuuacaaggcauua

SEQ ID NO: 1758078 - RNA, 19 nt, Homo sapiens
  misc_RNA (1)...(19): siRNA sense strand
aaaaucugcugcugugguu

SEQ ID NO: 1758079 - RNA, 19 nt, Homo sapiens
  misc_RNA (1)...(19): siRNA sense strand
gucccgagcaucacuacaa

SEQ ID NO: 1758080 - RNA, 19 nt, Homo sapiens
  misc_RNA (1)...(19): siRNA sense strand
acauggagaagacuguauu

SEQ ID NO: 1758081 - RNA, 19 nt, Homo sapiens
  misc_RNA (1)...(19): siRNA sense strand
uuauaaaccacccuaugga

SEQ ID NO: 1758082 - RNA, 19 nt, Homo sapiens
  misc_RNA (1)...(19): siRNA sense strand
cauuaagggacauggagaa

SEQ ID NO: 1758083 - RNA, 19 nt, Homo sapiens
  misc_RNA (1)...(19): siRNA sense strand
guagaacgucaaccucaag

SEQ ID NO: 1758084 - RNA, 19 nt, Homo sapiens
  misc_RNA (1)...(19): siRNA sense strand
gagugucggagggaacuaa

SEQ ID NO: 1758085 - RNA, 19 nt, Homo sapiens
  misc_RNA (1)...(19): siRNA sense strand
gcucaugucaccgauccaa

SEQ ID NO: 1758086 - RNA, 19 nt, Homo sapiens
  misc_RNA (1)...(19): siRNA sense strand
cacaggagcuucacaauaa

SEQ ID NO: 1758087 - RNA, 19 nt, Homo sapiens
  misc_RNA (1)...(19): siRNA sense strand
gcaagugucccaagauuua

SEQ ID NO: 1758088 - RNA, 19 nt, Homo sapiens
  misc_RNA (1)...(19): siRNA sense strand
ccacagagcuccaaaguag

SEQ ID NO: 1758089 - RNA, 19 nt, Homo sapiens
  misc_RNA (1)...(19): siRNA sense strand
ucaaacagccuucucauua

SEQ ID NO: 1758090 - RNA, 19 nt, Homo sapiens
  misc_RNA (1)...(19): siRNA sense strand
caaacagccuucucauuaa

SEQ ID NO: 1758091 - RNA, 19 nt, Homo sapiens
  misc_RNA (1)...(19): siRNA sense strand
gcacaggagcuucacaaua

SEQ ID NO: 1758092 - RNA, 19 nt, Homo sapiens
  misc_RNA (1)...(19): siRNA sense strand
ggagaagacuguauugaag

SEQ ID NO: 1758093 - RNA, 19 nt, Homo sapiens
  misc_RNA (1)...(19): siRNA sense strand
gagcaagugucccaagauu

SEQ ID NO: 1758094 - RNA, 19 nt, Homo sapiens
  misc_RNA (1)...(19): siRNA sense strand
gagcaucacuacaagcaaa

SEQ ID NO: 1758095 - RNA, 19 nt, Homo sapiens
  misc_RNA (1)...(19): siRNA sense strand
gaaauagaacugagaguga

SEQ ID NO: 1758096 - RNA, 19 nt, Homo sapiens
  misc_RNA (1)...(19): siRNA sense strand
aagcagagcuggaaauguu

SEQ ID NO: 1758097 - RNA, 19 nt, Homo sapiens
  misc_RNA (1)...(19): siRNA sense strand
gaacuaaugcaacuggaaa

SEQ ID NO: 1758098 - RNA, 19 nt, Homo sapiens
  misc_RNA (1)...(19): siRNA sense strand
gcaaagccucccucugaua

SEQ ID NO: 1758099 - RNA, 19 nt, Homo sapiens
  misc_RNA (1)...(19): siRNA sense strand
gaagaaaaggugcauguua

SEQ ID NO: 1758100 - RNA, 19 nt, Homo sapiens
  misc_RNA (1)...(19): siRNA sense strand
cagcugaacucugauauca

SEQ ID NO: 1758101 - RNA, 19 nt, Homo sapiens
  misc_RNA (1)...(19): siRNA sense strand
gauaucagcgccaucacua

SEQ ID NO: 1758102 - RNA, 19 nt, Homo sapiens
  misc_RNA (1)...(19): siRNA sense strand
gcaaggaauuucugcaaac

SEQ ID NO: 1758103 - RNA, 19 nt, Homo sapiens
  misc_RNA (1)...(19): siRNA sense strand
ugcaacagcugaacucuga

SEQ ID NO: 1758104 - RNA, 19 nt, Homo sapiens
  misc_RNA (1)...(19): siRNA sense strand
gcacucaggccaacaacuu

SEQ ID NO: 1758105 - RNA, 19 nt, Homo sapiens
  misc_RNA (1)...(19): siRNA sense strand
gaagagacugcaggagaua

SEQ ID NO: 1758106 - RNA, 19 nt, Homo sapiens
  misc_RNA (1)...(19): siRNA sense strand
gagaagaaacucaaacagu

SEQ ID NO: 1758107 - RNA, 19 nt, Homo sapiens
  misc_RNA (1)...(19): siRNA sense strand
ggagggaacuaaugcaacu

SEQ ID NO: 1758108 - RNA, 19 nt, Homo sapiens
  misc_RNA (1)...(19): siRNA sense strand
ggaccagccuccugcaaca

SEQ ID NO: 1758109 - RNA, 19 nt, Homo sapiens
  misc_RNA (1)...(19): siRNA sense strand
gaaggugacaggaauguuc

SEQ ID NO: 1758110 - RNA, 19 nt, Homo sapiens
  misc_RNA (1)...(19): siRNA sense strand
caacagcugaacucugaua

SEQ ID NO: 1758111 - RNA, 19 nt, Homo sapiens
  misc_RNA (1)...(19): siRNA sense strand
uggcaaagccucccucuga

SEQ ID NO: 1758112 - RNA, 19 nt, Homo sapiens
  misc_RNA (1)...(19): siRNA sense strand
aaauagaacugagagugaa

SEQ ID NO: 1758113 - RNA, 19 nt, Homo sapiens
  misc_RNA (1)...(19): siRNA sense strand
ugaagagacugcaggagau

SEQ ID NO: 1758114 - RNA, 19 nt, Homo sapiens
  misc_RNA (1)...(19): siRNA sense strand
gguagaacgucaaccucaa

SEQ ID NO: 1758115 - RNA, 19 nt, Homo sapiens
  misc_RNA (1)...(19): siRNA sense strand
cuauggaaagcuacuauua

SEQ ID NO: 1758116 - RNA, 19 nt, Homo sapiens
  misc_RNA (1)...(19): siRNA sense strand
caaagccucccucugauau

SEQ ID NO: 1758117 - RNA, 19 nt, Homo sapiens
  misc_RNA (1)...(19): siRNA sense strand
ccucugauauccaggaaau

SEQ ID NO: 1758118 - RNA, 19 nt, Homo sapiens
  misc_RNA (1)...(19): siRNA sense strand
gagcuggaaauguuaaaga

SEQ ID NO: 1758119 - RNA, 19 nt, Homo sapiens
  misc_RNA (1)...(19): siRNA sense strand
aaacagccuucucauuaag

SEQ ID NO: 1758120 - RNA, 19 nt, Homo sapiens
  misc_RNA (1)...(19): siRNA sense strand
gcagagcuggaaauguuaa

SEQ ID NO: 1758121 - RNA, 19 nt, Homo sapiens
  misc_RNA (1)...(19): siRNA sense strand
gcagugagaacuacagaag

SEQ ID NO: 1758122 - RNA, 19 nt, Homo sapiens
  misc_RNA (1)...(19): siRNA sense strand
caacuuugcccgguccuuu

SEQ ID NO: 1758123 - RNA, 19 nt, Homo sapiens
  misc_RNA (1)...(19): siRNA sense strand
uaagggacauggagaagac

SEQ ID NO: 1758124 - RNA, 19 nt, Homo sapiens
  misc_RNA (1)...(19): siRNA sense strand
gcacggaugguggcaaaga

SEQ ID NO: 1758125 - RNA, 19 nt, Homo sapiens
  misc_RNA (1)...(19): siRNA sense strand
ggacauggagaagacugua

SEQ ID NO: 1758126 - RNA, 19 nt, Homo sapiens
  misc_RNA (1)...(19): siRNA sense strand
cgacagaugggagaugauu

SEQ ID NO: 1758127 - RNA, 19 nt, Homo sapiens
  misc_RNA (1)...(19): siRNA sense strand
ggaacuaaugcaacuggaa

SEQ ID NO: 1758128 - RNA, 19 nt, Homo sapiens
  misc_RNA (1)...(19): siRNA sense strand
ggcaaagccucccucugau

SEQ ID NO: 1758129 - RNA, 19 nt, Homo sapiens
  misc_RNA (1)...(19): siRNA sense strand
caucacuacuuggcugaaa

SEQ ID NO: 1758130 - RNA, 19 nt, Homo sapiens
  misc_RNA (1)...(19): siRNA sense strand
ggacauguuacaggagauu

SEQ ID NO: 1758131 - RNA, 19 nt, Homo sapiens
  misc_RNA (1)...(19): siRNA sense strand
aauggaaggugacaggaau

SEQ ID NO: 1758132 - RNA, 19 nt, Homo sapiens
  misc_RNA (1)...(19): siRNA sense strand
uggagaagacuguauugaa

SEQ ID NO: 1758133 - RNA, 19 nt, Homo sapiens
  misc_RNA (1)...(19): siRNA sense strand
uacaggagauuucaaacag

SEQ ID NO: 1758134 - RNA, 19 nt, Homo sapiens
  misc_RNA (1)...(19): siRNA sense strand
ucagcgccaucacuacuug

SEQ ID NO: 1758135 - RNA, 19 nt, Homo sapiens
  misc_RNA (1)...(19): siRNA sense strand
aagaaaaggugcauguuau

SEQ ID NO: 1758136 - RNA, 19 nt, Homo sapiens
  misc_RNA (1)...(19): siRNA sense strand
uauaaaccacccuauggaa

SEQ ID NO: 1758137 - RNA, 19 nt, Homo sapiens
  misc_RNA (1)...(19): siRNA sense strand
ggaggcagaaggcucaugu

SEQ ID NO: 1758138 - RNA, 19 nt, Homo sapiens
  misc_RNA (1)...(19): siRNA sense strand
gcauguuauugagaagaaa

SEQ ID NO: 1758139 - RNA, 19 nt, Homo sapiens
  misc_RNA (1)...(19): siRNA sense strand
caacgugagcagcaaggaa

SEQ ID NO: 1758140 - RNA, 19 nt, Homo sapiens
  misc_RNA (1)...(19): siRNA sense strand
gaaaaggugcauguuauug

SEQ ID NO: 1758141 - RNA, 19 nt, Homo sapiens
  misc_RNA (1)...(19): siRNA sense strand
cagcaaggaauuucugcaa

SEQ ID NO: 1758142 - RNA, 19 nt, Homo sapiens
  misc_RNA (1)...(19): siRNA sense strand
aaaggugcauguuauugag

SEQ ID NO: 1758143 - RNA, 19 nt, Homo sapiens
  misc_RNA (1)...(19): siRNA sense strand
uaaaccacccuauggaaag

SEQ ID NO: 1758144 - RNA, 19 nt, Homo sapiens
  misc_RNA (1)...(19): siRNA sense strand
gaagcagagcuggaaaugu

SEQ ID NO: 1758145 - RNA, 19 nt, Homo sapiens
  misc_RNA (1)...(19): siRNA sense strand
caagugucccaagauuuaa

SEQ ID NO: 1758146 - RNA, 19 nt, Homo sapiens
  misc_RNA (1)...(19): siRNA sense strand
ccaagaaccggaggcagaa

SEQ ID NO: 1758147 - RNA, 19 nt, Homo sapiens
  misc_RNA (1)...(19): siRNA sense strand
agcaaggaauuucugcaaa

SEQ ID NO: 1758148 - RNA, 19 nt, Homo sapiens
  misc_RNA (1)...(19): siRNA sense strand
gagcagugagaacuacaga

SEQ ID NO: 1758149 - RNA, 19 nt, Homo sapiens
  misc_RNA (1)...(19): siRNA sense strand
gguuagcgagugccaagaa

SEQ ID NO: 1758150 - RNA, 19 nt, Homo sapiens
  misc_RNA (1)...(19): siRNA sense strand
ucacuacaagcaaauggaa

SEQ ID NO: 1758151 - RNA, 19 nt, Homo sapiens
  misc_RNA (1)...(19): siRNA sense strand
ggagcaagugucccaagau

SEQ ID NO: 1758152 - RNA, 19 nt, Homo sapiens
  misc_RNA (1)...(19): siRNA sense strand
auaaaccacccuauggaaa

SEQ ID NO: 1758153 - RNA, 19 nt, Homo sapiens
  misc_RNA (1)...(19): siRNA sense strand
cacggaugguggcaaagaa

SEQ ID NO: 1758154 - RNA, 19 nt, Homo sapiens
  misc_RNA (1)...(19): siRNA sense strand
gcaacccacagcaggaaga

SEQ ID NO: 1758155 - RNA, 19 nt, Homo sapiens
  misc_RNA (1)...(19): siRNA sense strand
ugauauccaggaaauagaa

SEQ ID NO: 1758156 - RNA, 19 nt, Homo sapiens
  misc_RNA (1)...(19): siRNA sense strand
gagcagcaaggaauuucug

SEQ ID NO: 1758157 - RNA, 19 nt, Homo sapiens
  misc_RNA (1)...(19): siRNA sense strand
uaaugcaacuggaaaagga

SEQ ID NO: 1758158 - RNA, 19 nt, Homo sapiens
  misc_RNA (1)...(19): siRNA sense strand
gggacuggccgguaucaca

SEQ ID NO: 1758159 - RNA, 19 nt, Homo sapiens
  misc_RNA (1)...(19): siRNA sense strand
aggcacggaugguggcaaa

SEQ ID NO: 1758160 - RNA, 19 nt, Homo sapiens
  misc_RNA (1)...(19): siRNA sense strand
gcuggaaauguuaaagaug

SEQ ID NO: 1758161 - RNA, 19 nt, Homo sapiens
  misc_RNA (1)...(19): siRNA sense strand
ucagagcagugagaacuac

SEQ ID NO: 1758162 - RNA, 19 nt, Homo sapiens
  misc_RNA (1)...(19): siRNA sense strand
acagaugggagaugauuca

SEQ ID NO: 1758163 - RNA, 19 nt, Homo sapiens
  misc_RNA (1)...(19): siRNA sense strand
gcccagcuucgacgaggua

SEQ ID NO: 1758164 - RNA, 19 nt, Homo sapiens
  misc_RNA (1)...(19): siRNA sense strand
ugcauguuauugagaagaa

SEQ ID NO: 1758165 - RNA, 19 nt, Homo sapiens
  misc_RNA (1)...(19): siRNA sense strand
uuacaggagauuucaaaca

SEQ ID NO: 1758166 - RNA, 19 nt, Homo sapiens
  misc_RNA (1)...(19): siRNA sense strand
aaccucaaguggacauguu

SEQ ID NO: 1758167 - RNA, 19 nt, Homo sapiens
  misc_RNA (1)...(19): siRNA sense strand
ucaggugccuucgacagau

SEQ ID NO: 1758168 - RNA, 19 nt, Homo sapiens
  misc_RNA (1)...(19): siRNA sense strand
ggacuuccaccaguugagu

SEQ ID NO: 1758169 - RNA, 19 nt, Homo sapiens
  misc_RNA (1)...(19): siRNA sense strand
gcauuaguggucucuguca

SEQ ID NO: 1758170 - RNA, 19 nt, Homo sapiens
  misc_RNA (1)...(19): siRNA sense strand
ccaggaaauagaacugaga

SEQ ID NO: 1758171 - RNA, 19 nt, Homo sapiens
  misc_RNA (1)...(19): siRNA sense strand
ggaaggugacaggaauguu

SEQ ID NO: 1758172 - RNA, 19 nt, Homo sapiens
  misc_RNA (1)...(19): siRNA sense strand
ggaaaaggagcugguagaa

SEQ ID NO: 1758173 - RNA, 19 nt, Homo sapiens
  misc_RNA (1)...(19): siRNA sense strand
ugaagcagagcuggaaaug

SEQ ID NO: 1758174 - RNA, 19 nt, Homo sapiens
  misc_RNA (1)...(19): siRNA sense strand
augcugagguacaccaaug

SEQ ID NO: 1758175 - RNA, 19 nt, Homo sapiens
  misc_RNA (1)...(19): siRNA sense strand
caggugccuucgacagaug

SEQ ID NO: 1758176 - RNA, 19 nt, Homo sapiens
  misc_RNA (1)...(19): siRNA sense strand
cauuaguggucucugucaa

SEQ ID NO: 1758177 - RNA, 19 nt, Homo sapiens
  misc_RNA (1)...(19): siRNA sense strand
ugacacuuacaaggcauua

SEQ ID NO: 1758178 - RNA, 19 nt, Homo sapiens
  misc_RNA (1)...(19): siRNA sense strand
aaaaucugcugcugugguu

SEQ ID NO: 1758179 - RNA, 19 nt, Homo sapiens
  misc_RNA (1)...(19): siRNA sense strand
gucccgagcaucacuacaa

SEQ ID NO: 1758180 - RNA, 19 nt, Homo sapiens
  misc_RNA (1)...(19): siRNA sense strand
acauggagaagacuguauu

SEQ ID NO: 1758181 - RNA, 19 nt, Homo sapiens
  misc_RNA (1)...(19): siRNA sense strand
uuauaaaccacccuaugga

SEQ ID NO: 1758182 - RNA, 19 nt, Homo sapiens
  misc_RNA (1)...(19): siRNA sense strand
cauuaagggacauggagaa

SEQ ID NO: 1758183 - RNA, 19 nt, Homo sapiens
  misc_RNA (1)...(19): siRNA sense strand
guagaacgucaaccucaag

SEQ ID NO: 1758184 - RNA, 19 nt, Homo sapiens
  misc_RNA (1)...(19): siRNA sense strand
gagugucggagggaacuaa

SEQ ID NO: 1758185 - RNA, 19 nt, Homo sapiens
  misc_RNA (1)...(19): siRNA sense strand
gcucaugucaccgauccaa

SEQ ID NO: 1758186 - RNA, 19 nt, Homo sapiens
  misc_RNA (1)...(19): siRNA sense strand
cacaggagcuucacaauaa

SEQ ID NO: 1758187 - RNA, 19 nt, Homo sapiens
  misc_RNA (1)...(19): siRNA sense strand
gcaagugucccaagauuua

SEQ ID NO: 1758188 - RNA, 19 nt, Homo sapiens
  misc_RNA (1)...(19): siRNA sense strand
ccacagagcuccaaaguag

SEQ ID NO: 1758189 - RNA, 19 nt, Homo sapiens
  misc_RNA (1)...(19): siRNA sense strand
ucaaacagccuucucauua

SEQ ID NO: 1758190 - RNA, 19 nt, Homo sapiens
  misc_RNA (1)...(19): siRNA sense strand
caaacagccuucucauuaa

SEQ ID NO: 1758191 - RNA, 19 nt, Homo sapiens
  misc_RNA (1)...(19): siRNA sense strand
gcacaggagcuucacaaua

SEQ ID NO: 1758192 - RNA, 19 nt, Homo sapiens
  misc_RNA (1)...(19): siRNA sense strand
ggagaagacuguauugaag

SEQ ID NO: 1758193 - RNA, 19 nt, Homo sapiens
  misc_RNA (1)...(19): siRNA sense strand
gagcaagugucccaagauu

SEQ ID NO: 1758194 - RNA, 19 nt, Homo sapiens
  misc_RNA (1)...(19): siRNA sense strand
gaaauagaacugagaguga

SEQ ID NO: 1758195 - RNA, 19 nt, Homo sapiens
  misc_RNA (1)...(19): siRNA sense strand
aagcagagcuggaaauguu

SEQ ID NO: 1758196 - RNA, 19 nt, Homo sapiens
  misc_RNA (1)...(19): siRNA sense strand
gaacuaaugcaacuggaaa

SEQ ID NO: 1758197 - RNA, 19 nt, Homo sapiens
  misc_RNA (1)...(19): siRNA sense strand
gcaaagccucccucugaua

SEQ ID NO: 1758198 - RNA, 19 nt, Homo sapiens
  misc_RNA (1)...(19): siRNA sense strand
gaagaaaaggugcauguua

SEQ ID NO: 1758199 - RNA, 19 nt, Homo sapiens
  misc_RNA (1)...(19): siRNA sense strand
cagcugaacucugauauca

SEQ ID NO: 1758200 - RNA, 19 nt, Homo sapiens
  misc_RNA (1)...(19): siRNA sense strand
gauaucagcgccaucacua

SEQ ID NO: 1758201 - RNA, 19 nt, Homo sapiens
  misc_RNA (1)...(19): siRNA sense strand
gcaaggaauuucugcaaac

SEQ ID NO: 1758202 - RNA, 19 nt, Homo sapiens
  misc_RNA (1)...(19): siRNA sense strand
ugcaacagcugaacucuga

SEQ ID NO: 1758203 - RNA, 19 nt, Homo sapiens
  misc_RNA (1)...(19): siRNA sense strand
gcacucaggccaacaacuu

SEQ ID NO: 1758204 - RNA, 19 nt, Homo sapiens
  misc_RNA (1)...(19): siRNA sense strand
gaagagacugcaggagaua

SEQ ID NO: 1758205 - RNA, 19 nt, Homo sapiens
  misc_RNA (1)...(19): siRNA sense strand
gagaagaaacucaaacagu

SEQ ID NO: 1758206 - RNA, 19 nt, Homo sapiens
  misc_RNA (1)...(19): siRNA sense strand
ggagggaacuaaugcaacu

SEQ ID NO: 1758207 - RNA, 19 nt, Homo sapiens
  misc_RNA (1)...(19): siRNA sense strand
ggaccagccuccugcaaca

SEQ ID NO: 1758208 - RNA, 19 nt, Homo sapiens
  misc_RNA (1)...(19): siRNA sense strand
gaaggugacaggaauguuc

SEQ ID NO: 1758209 - RNA, 19 nt, Homo sapiens
  misc_RNA (1)...(19): siRNA sense strand
caacagcugaacucugaua

SEQ ID NO: 1758210 - RNA, 19 nt, Homo sapiens
  misc_RNA (1)...(19): siRNA sense strand
uggcaaagccucccucuga

SEQ ID NO: 1758211 - RNA, 19 nt, Homo sapiens
  misc_RNA (1)...(19): siRNA sense strand
aaauagaacugagagugaa

SEQ ID NO: 1758212 - RNA, 19 nt, Homo sapiens
  misc_RNA (1)...(19): siRNA sense strand
ugaagagacugcaggagau

SEQ ID NO: 1758213 - RNA, 19 nt, Homo sapiens
  misc_RNA (1)...(19): siRNA sense strand
gguagaacgucaaccucaa

SEQ ID NO: 1758214 - RNA, 19 nt, Homo sapiens
  misc_RNA (1)...(19): siRNA sense strand
cuauggaaagcuacuauua

SEQ ID NO: 1758215 - RNA, 19 nt, Homo sapiens
  misc_RNA (1)...(19): siRNA sense strand
caaagccucccucugauau

SEQ ID NO: 1758216 - RNA, 19 nt, Homo sapiens
  misc_RNA (1)...(19): siRNA sense strand
ccucugauauccaggaaau

SEQ ID NO: 1758217 - RNA, 19 nt, Homo sapiens
  misc_RNA (1)...(19): siRNA sense strand
gagcuggaaauguuaaaga

SEQ ID NO: 1758218 - RNA, 19 nt, Homo sapiens
  misc_RNA (1)...(19): siRNA sense strand
aaacagccuucucauuaag

SEQ ID NO: 1758219 - RNA, 19 nt, Homo sapiens
  misc_RNA (1)...(19): siRNA sense strand
gcagagcuggaaauguuaa

SEQ ID NO: 1758220 - RNA, 19 nt, Homo sapiens
  misc_RNA (1)...(19): siRNA sense strand
gcagugagaacuacagaag

SEQ ID NO: 1758221 - RNA, 19 nt, Homo sapiens
  misc_RNA (1)...(19): siRNA sense strand
caacuuugcccgguccuuu

SEQ ID NO: 1758222 - RNA, 19 nt, Homo sapiens
  misc_RNA (1)...(19): siRNA sense strand
uaagggacauggagaagac

SEQ ID NO: 1758223 - RNA, 19 nt, Homo sapiens
  misc_RNA (1)...(19): siRNA sense strand
gcacggaugguggcaaaga

SEQ ID NO: 1758224 - RNA, 19 nt, Homo sapiens
  misc_RNA (1)...(19): siRNA sense strand
ggacauggagaagacugua

SEQ ID NO: 1758225 - RNA, 19 nt, Homo sapiens
  misc_RNA (1)...(19): siRNA sense strand
cgacagaugggagaugauu

SEQ ID NO: 1758226 - RNA, 19 nt, Homo sapiens
  misc_RNA (1)...(19): siRNA sense strand
ggaacuaaugcaacuggaa

SEQ ID NO: 1758227 - RNA, 19 nt, Homo sapiens
  misc_RNA (1)...(19): siRNA sense strand
ggcaaagccucccucugau

SEQ ID NO: 1758228 - RNA, 19 nt, Homo sapiens
  misc_RNA (1)...(19): siRNA sense strand
caucacuacuuggcugaaa

SEQ ID NO: 1758229 - RNA, 19 nt, Homo sapiens
  misc_RNA (1)...(19): siRNA sense strand
ggacauguuacaggagauu

SEQ ID NO: 1758230 - RNA, 19 nt, Homo sapiens
  misc_RNA (1)...(19): siRNA sense strand
uggagaagacuguauugaa

SEQ ID NO: 1758231 - RNA, 19 nt, Homo sapiens
  misc_RNA (1)...(19): siRNA sense strand
uacaggagauuucaaacag

SEQ ID NO: 1758232 - RNA, 19 nt, Homo sapiens
  misc_RNA (1)...(19): siRNA sense strand
ucagcgccaucacuacuug

SEQ ID NO: 1758233 - RNA, 19 nt, Homo sapiens
  misc_RNA (1)...(19): siRNA sense strand
aagaaaaggugcauguuau

SEQ ID NO: 1758234 - RNA, 19 nt, Homo sapiens
  misc_RNA (1)...(19): siRNA sense strand
ggaggcagaaggcucaugu

SEQ ID NO: 1758235 - RNA, 19 nt, Homo sapiens
  misc_RNA (1)...(19): siRNA sense strand
uauaaaccacccuauggaa

SEQ ID NO: 1758236 - RNA, 19 nt, Homo sapiens
  misc_RNA (1)...(19): siRNA sense strand
gcauguuauugagaagaaa

SEQ ID NO: 1758237 - RNA, 19 nt, Homo sapiens
  misc_RNA (1)...(19): siRNA sense strand
caacgugagcagcaaggaa

SEQ ID NO: 1758238 - RNA, 19 nt, Homo sapiens
  misc_RNA (1)...(19): siRNA sense strand
gaaaaggugcauguuauug

SEQ ID NO: 1758239 - RNA, 19 nt, Homo sapiens
  misc_RNA (1)...(19): siRNA sense strand
cagcaaggaauuucugcaa

SEQ ID NO: 1758240 - RNA, 19 nt, Homo sapiens
  misc_RNA (1)...(19): siRNA sense strand
uaaaccacccuauggaaag

SEQ ID NO: 1758241 - RNA, 19 nt, Homo sapiens
  misc_RNA (1)...(19): siRNA sense strand
aaaggugcauguuauugag

SEQ ID NO: 1758242 - RNA, 19 nt, Homo sapiens
  misc_RNA (1)...(19): siRNA sense strand
gaagcagagcuggaaaugu

SEQ ID NO: 1758243 - RNA, 19 nt, Homo sapiens
  misc_RNA (1)...(19): siRNA sense strand
caagugucccaagauuuaa

SEQ ID NO: 1758244 - RNA, 19 nt, Homo sapiens
  misc_RNA (1)...(19): siRNA sense strand
ccaagaaccggaggcagaa

SEQ ID NO: 1758245 - RNA, 19 nt, Homo sapiens
  misc_RNA (1)...(19): siRNA sense strand
agcaaggaauuucugcaaa

SEQ ID NO: 1758246 - RNA, 19 nt, Homo sapiens
  misc_RNA (1)...(19): siRNA sense strand
gagcagugagaacuacaga

SEQ ID NO: 1758247 - RNA, 19 nt, Homo sapiens
  misc_RNA (1)...(19): siRNA sense strand
auaaaccacccuauggaaa

SEQ ID NO: 1758248 - RNA, 19 nt, Homo sapiens
  misc_RNA (1)...(19): siRNA sense strand
gcaacccacagcaggaaga

SEQ ID NO: 1758249 - RNA, 19 nt, Homo sapiens
  misc_RNA (1)...(19): siRNA sense strand
ggagcaagugucccaagau

SEQ ID NO: 1758250 - RNA, 19 nt, Homo sapiens
  misc_RNA (1)...(19): siRNA sense strand
cacggaugguggcaaagaa

SEQ ID NO: 1758251 - RNA, 19 nt, Homo sapiens
  misc_RNA (1)...(19): siRNA sense strand
gguuagcgagugccaagaa

SEQ ID NO: 1758252 - RNA, 19 nt, Homo sapiens
  misc_RNA (1)...(19): siRNA sense strand
ugauauccaggaaauagaa

SEQ ID NO: 1758253 - RNA, 19 nt, Homo sapiens
  misc_RNA (1)...(19): siRNA sense strand
gagcagcaaggaauuucug

SEQ ID NO: 1758254 - RNA, 19 nt, Homo sapiens
  misc_RNA (1)...(19): siRNA sense strand
aggcacggaugguggcaaa

SEQ ID NO: 1758255 - RNA, 19 nt, Homo sapiens
  misc_RNA (1)...(19): siRNA sense strand
gggacuggccgguaucaca

SEQ ID NO: 1758256 - RNA, 19 nt, Homo sapiens
  misc_RNA (1)...(19): siRNA sense strand
uaaugcaacuggaaaagga

SEQ ID NO: 1758257 - RNA, 19 nt, Homo sapiens
  misc_RNA (1)...(19): siRNA sense strand
gcuggaaauguuaaagaug

SEQ ID NO: 1758258 - RNA, 19 nt, Homo sapiens
  misc_RNA (1)...(19): siRNA sense strand
ucagagcagugagaacuac

SEQ ID NO: 1758259 - RNA, 19 nt, Homo sapiens
  misc_RNA (1)...(19): siRNA sense strand
gcccagcuucgacgaggua

SEQ ID NO: 1758260 - RNA, 19 nt, Homo sapiens
  misc_RNA (1)...(19): siRNA sense strand
acagaugggagaugauuca

SEQ ID NO: 1758261 - RNA, 19 nt, Homo sapiens
  misc_RNA (1)...(19): siRNA sense strand
ugcauguuauugagaagaa

SEQ ID NO: 1758262 - RNA, 19 nt, Homo sapiens
  misc_RNA (1)...(19): siRNA sense strand
uuacaggagauuucaaaca

SEQ ID NO: 1758263 - RNA, 19 nt, Homo sapiens
  misc_RNA (1)...(19): siRNA sense strand
aaccucaaguggacauguu

SEQ ID NO: 1758264 - RNA, 19 nt, Homo sapiens
  misc_RNA (1)...(19): siRNA sense strand
ggacuuccaccaguugagu

SEQ ID NO: 1758265 - RNA, 19 nt, Homo sapiens
  misc_RNA (1)...(19): siRNA sense strand
ucaggugccuucgacagau

SEQ ID NO: 1758266 - RNA, 19 nt, Homo sapiens
  misc_RNA (1)...(19): siRNA sense strand
gcauuaguggucucuguca

SEQ ID NO: 1758267 - RNA, 19 nt, Homo sapiens
  misc_RNA (1)...(19): siRNA sense strand
ccaggaaauagaacugaga

SEQ ID NO: 1758268 - RNA, 19 nt, Homo sapiens
  misc_RNA (1)...(19): siRNA sense strand
ggaaaaggagcugguagaa

SEQ ID NO: 1758269 - RNA, 19 nt, Homo sapiens
  misc_RNA (1)...(19): siRNA sense strand
ggaaggugacaggaauguu

SEQ ID NO: 1758270 - RNA, 19 nt, Homo sapiens
  misc_RNA (1)...(19): siRNA sense strand
ugaagcagagcuggaaaug

SEQ ID NO: 1758271 - RNA, 19 nt, Homo sapiens
  misc_RNA (1)...(19): siRNA sense strand
augcugagguacaccaaug

SEQ ID NO: 1758272 - RNA, 19 nt, Homo sapiens
  misc_RNA (1)...(19): siRNA sense strand
caggugccuucgacagaug

SEQ ID NO: 1758273 - RNA, 19 nt, Homo sapiens
  misc_RNA (1)...(19): siRNA sense strand
cauuaguggucucugucaa

SEQ ID NO: 1758274 - RNA, 19 nt, Homo sapiens
  misc_RNA (1)...(19): siRNA sense strand
ugacacuuacaaggcauua

SEQ ID NO: 1758275 - RNA, 19 nt, Homo sapiens
  misc_RNA (1)...(19): siRNA sense strand
aaaaucugcugcugugguu

SEQ ID NO: 1758276 - RNA, 19 nt, Homo sapiens
  misc_RNA (1)...(19): siRNA sense strand
gcucaugucaccgauccaa

SEQ ID NO: 1758277 - RNA, 19 nt, Homo sapiens
  misc_RNA (1)...(19): siRNA sense strand
acauggagaagacuguauu

SEQ ID NO: 1758278 - RNA, 19 nt, Homo sapiens
  misc_RNA (1)...(19): siRNA sense strand
cauuaagggacauggagaa

SEQ ID NO: 1758279 - RNA, 19 nt, Homo sapiens
  misc_RNA (1)...(19): siRNA sense strand
guagaacgucaaccucaag

SEQ ID NO: 1758280 - RNA, 19 nt, Homo sapiens
  misc_RNA (1)...(19): siRNA sense strand
uuauaaaccacccuaugga

SEQ ID NO: 1758281 - RNA, 19 nt, Homo sapiens
  misc_RNA (1)...(19): siRNA sense strand
gagugucggagggaacuaa

SEQ ID NO: 1758282 - RNA, 19 nt, Homo sapiens
  misc_RNA (1)...(19): siRNA sense strand
uauggaaagcuacuauuac

SEQ ID NO: 1758283 - RNA, 19 nt, Homo sapiens
  misc_RNA (1)...(19): siRNA sense strand
caaggaauuucugcaaacc

SEQ ID NO: 1758284 - RNA, 19 nt, Homo sapiens
  misc_RNA (1)...(19): siRNA sense strand
acacuuacaaggcauuagu

SEQ ID NO: 1758285 - RNA, 19 nt, Homo sapiens
  misc_RNA (1)...(19): siRNA sense strand
cacaggagcuucacaauaa

SEQ ID NO: 1758286 - RNA, 19 nt, Homo sapiens
  misc_RNA (1)...(19): siRNA sense strand
gcaagugucccaagauuua

SEQ ID NO: 1758287 - RNA, 19 nt, Homo sapiens
  misc_RNA (1)...(19): siRNA sense strand
ccacagagcuccaaaguag

SEQ ID NO: 1758288 - RNA, 19 nt, Homo sapiens
  misc_RNA (1)...(19): siRNA sense strand
ucaaacagccuucucauua

SEQ ID NO: 1758289 - RNA, 19 nt, Homo sapiens
  misc_RNA (1)...(19): siRNA sense strand
caaacagccuucucauuaa

SEQ ID NO: 1758290 - RNA, 19 nt, Homo sapiens
  misc_RNA (1)...(19): siRNA sense strand
gcacaggagcuucacaaua

SEQ ID NO: 1758291 - RNA, 19 nt, Homo sapiens
  misc_RNA (1)...(19): siRNA sense strand
ggagaagacuguauugaag

SEQ ID NO: 1758292 - RNA, 19 nt, Homo sapiens
  misc_RNA (1)...(19): siRNA sense strand
gagcaagugucccaagauu

SEQ ID NO: 1758293 - RNA, 19 nt, Homo sapiens
  misc_RNA (1)...(19): siRNA sense strand
gagcaucacuacaagcaaa

SEQ ID NO: 1758294 - RNA, 19 nt, Homo sapiens
  misc_RNA (1)...(19): siRNA sense strand
gaaauagaacugagaguga

SEQ ID NO: 1758295 - RNA, 19 nt, Homo sapiens
  misc_RNA (1)...(19): siRNA sense strand
aagcagagcuggaaauguu

SEQ ID NO: 1758296 - RNA, 19 nt, Homo sapiens
  misc_RNA (1)...(19): siRNA sense strand
gaacuaaugcaacuggaaa

SEQ ID NO: 1758297 - RNA, 19 nt, Homo sapiens
  misc_RNA (1)...(19): siRNA sense strand
gcaaagccucccucugaua

SEQ ID NO: 1758298 - RNA, 19 nt, Homo sapiens
  misc_RNA (1)...(19): siRNA sense strand
gaagaaaaggugcauguua

SEQ ID NO: 1758299 - RNA, 19 nt, Homo sapiens
  misc_RNA (1)...(19): siRNA sense strand
cagcugaacucugauauca

SEQ ID NO: 1758300 - RNA, 19 nt, Homo sapiens
  misc_RNA (1)...(19): siRNA sense strand
gauaucagcgccaucacua

SEQ ID NO: 1758301 - RNA, 19 nt, Homo sapiens
  misc_RNA (1)...(19): siRNA sense strand
gcaaggaauuucugcaaac

SEQ ID NO: 1758302 - RNA, 19 nt, Homo sapiens
  misc_RNA (1)...(19): siRNA sense strand
ugcaacagcugaacucuga

SEQ ID NO: 1758303 - RNA, 19 nt, Homo sapiens
  misc_RNA (1)...(19): siRNA sense strand
gcacucaggccaacaacuu

SEQ ID NO: 1758304 - RNA, 19 nt, Homo sapiens
  misc_RNA (1)...(19): siRNA sense strand
gaagagacugcaggagaua

SEQ ID NO: 1758305 - RNA, 19 nt, Homo sapiens
  misc_RNA (1)...(19): siRNA sense strand
gagaagaaacucaaacagu

SEQ ID NO: 1758306 - RNA, 19 nt, Homo sapiens
  misc_RNA (1)...(19): siRNA sense strand
ggagggaacuaaugcaacu

SEQ ID NO: 1758307 - RNA, 19 nt, Homo sapiens
  misc_RNA (1)...(19): siRNA sense strand
ggaccagccuccugcaaca

SEQ ID NO: 1758308 - RNA, 19 nt, Homo sapiens
  misc_RNA (1)...(19): siRNA sense strand
gaaggugacaggaauguuc

SEQ ID NO: 1758309 - RNA, 19 nt, Homo sapiens
  misc_RNA (1)...(19): siRNA sense strand
caacagcugaacucugaua

SEQ ID NO: 1758310 - RNA, 19 nt, Homo sapiens
  misc_RNA (1)...(19): siRNA sense strand
uggcaaagccucccucuga

SEQ ID NO: 1758311 - RNA, 19 nt, Homo sapiens
  misc_RNA (1)...(19): siRNA sense strand
aaauagaacugagagugaa

SEQ ID NO: 1758312 - RNA, 19 nt, Homo sapiens
  misc_RNA (1)...(19): siRNA sense strand
ugaagagacugcaggagau

SEQ ID NO: 1758313 - RNA, 19 nt, Homo sapiens
  misc_RNA (1)...(19): siRNA sense strand
gguagaacgucaaccucaa

SEQ ID NO: 1758314 - RNA, 19 nt, Homo sapiens
  misc_RNA (1)...(19): siRNA sense strand
cuauggaaagcuacuauua

SEQ ID NO: 1758315 - RNA, 19 nt, Homo sapiens
  misc_RNA (1)...(19): siRNA sense strand
caaagccucccucugauau

SEQ ID NO: 1758316 - RNA, 19 nt, Homo sapiens
  misc_RNA (1)...(19): siRNA sense strand
ccucugauauccaggaaau

SEQ ID NO: 1758317 - RNA, 19 nt, Homo sapiens
  misc_RNA (1)...(19): siRNA sense strand
gagcuggaaauguuaaaga

SEQ ID NO: 1758318 - RNA, 19 nt, Homo sapiens
  misc_RNA (1)...(19): siRNA sense strand
aaacagccuucucauuaag

SEQ ID NO: 1758319 - RNA, 19 nt, Homo sapiens
  misc_RNA (1)...(19): siRNA sense strand
gcagagcuggaaauguuaa

SEQ ID NO: 1758320 - RNA, 19 nt, Homo sapiens
  misc_RNA (1)...(19): siRNA sense strand
gcagugagaacuacagaag

SEQ ID NO: 1758321 - RNA, 19 nt, Homo sapiens
  misc_RNA (1)...(19): siRNA sense strand
caacuuugcccgguccuuu

SEQ ID NO: 1758322 - RNA, 19 nt, Homo sapiens
  misc_RNA (1)...(19): siRNA sense strand
uaagggacauggagaagac

SEQ ID NO: 1758323 - RNA, 19 nt, Homo sapiens
  misc_RNA (1)...(19): siRNA sense strand
gcacggaugguggcaaaga

SEQ ID NO: 1758324 - RNA, 19 nt, Homo sapiens
  misc_RNA (1)...(19): siRNA sense strand
ggacauggagaagacugua

SEQ ID NO: 1758325 - RNA, 19 nt, Homo sapiens
  misc_RNA (1)...(19): siRNA sense strand
cgacagaugggagaugauu

SEQ ID NO: 1758326 - RNA, 19 nt, Homo sapiens
  misc_RNA (1)...(19): siRNA sense strand
ggaacuaaugcaacuggaa

SEQ ID NO: 1758327 - RNA, 19 nt, Homo sapiens
  misc_RNA (1)...(19): siRNA sense strand
ggcaaagccucccucugau

SEQ ID NO: 1758328 - RNA, 19 nt, Homo sapiens
  misc_RNA (1)...(19): siRNA sense strand
caucacuacuuggcugaaa

SEQ ID NO: 1758329 - RNA, 19 nt, Homo sapiens
  misc_RNA (1)...(19): siRNA sense strand
ggacauguuacaggagauu

SEQ ID NO: 1758330 - RNA, 19 nt, Homo sapiens
  misc_RNA (1)...(19): siRNA sense strand
aauggaaggugacaggaau

SEQ ID NO: 1758331 - RNA, 19 nt, Homo sapiens
  misc_RNA (1)...(19): siRNA sense strand
uggagaagacuguauugaa

SEQ ID NO: 1758332 - RNA, 19 nt, Homo sapiens
  misc_RNA (1)...(19): siRNA sense strand
uacaggagauuucaaacag

SEQ ID NO: 1758333 - RNA, 19 nt, Homo sapiens
  misc_RNA (1)...(19): siRNA sense strand
ucagcgccaucacuacuug

SEQ ID NO: 1758334 - RNA, 19 nt, Homo sapiens
  misc_RNA (1)...(19): siRNA sense strand
aagaaaaggugcauguuau

SEQ ID NO: 1758335 - RNA, 19 nt, Homo sapiens
  misc_RNA (1)...(19): siRNA sense strand
uauaaaccacccuauggaa

SEQ ID NO: 1758336 - RNA, 19 nt, Homo sapiens
  misc_RNA (1)...(19): siRNA sense strand
ggaggcagaaggcucaugu

SEQ ID NO: 1758337 - RNA, 19 nt, Homo sapiens
  misc_RNA (1)...(19): siRNA sense strand
gcauguuauugagaagaaa

SEQ ID NO: 1758338 - RNA, 19 nt, Homo sapiens
  misc_RNA (1)...(19): siRNA sense strand
caacgugagcagcaaggaa

SEQ ID NO: 1758339 - RNA, 19 nt, Homo sapiens
  misc_RNA (1)...(19): siRNA sense strand
gaaaaggugcauguuauug

SEQ ID NO: 1758340 - RNA, 19 nt, Homo sapiens
  misc_RNA (1)...(19): siRNA sense strand
cagcaaggaauuucugcaa

SEQ ID NO: 1758341 - RNA, 19 nt, Homo sapiens
  misc_RNA (1)...(19): siRNA sense strand
aaaggugcauguuauugag

SEQ ID NO: 1758342 - RNA, 19 nt, Homo sapiens
  misc_RNA (1)...(19): siRNA sense strand
uaaaccacccuauggaaag

SEQ ID NO: 1758343 - RNA, 19 nt, Homo sapiens
  misc_RNA (1)...(19): siRNA sense strand
gaagcagagcuggaaaugu

SEQ ID NO: 1758344 - RNA, 19 nt, Homo sapiens
  misc_RNA (1)...(19): siRNA sense strand
caagugucccaagauuuaa

SEQ ID NO: 1758345 - RNA, 19 nt, Homo sapiens
  misc_RNA (1)...(19): siRNA sense strand
ccaagaaccggaggcagaa

SEQ ID NO: 1758346 - RNA, 19 nt, Homo sapiens
  misc_RNA (1)...(19): siRNA sense strand
agcaaggaauuucugcaaa

SEQ ID NO: 1758347 - RNA, 19 nt, Homo sapiens
  misc_RNA (1)...(19): siRNA sense strand
gagcagugagaacuacaga

SEQ ID NO: 1758348 - RNA, 19 nt, Homo sapiens
  misc_RNA (1)...(19): siRNA sense strand
gguuagcgagugccaagaa

SEQ ID NO: 1758349 - RNA, 19 nt, Homo sapiens
  misc_RNA (1)...(19): siRNA sense strand
ucacuacaagcaaauggaa

SEQ ID NO: 1758350 - RNA, 19 nt, Homo sapiens
  misc_RNA (1)...(19): siRNA sense strand
ggagcaagugucccaagau

SEQ ID NO: 1758351 - RNA, 19 nt, Homo sapiens
  misc_RNA (1)...(19): siRNA sense strand
auaaaccacccuauggaaa

SEQ ID NO: 1758352 - RNA, 19 nt, Homo sapiens
  misc_RNA (1)...(19): siRNA sense strand
cacggaugguggcaaagaa

SEQ ID NO: 1758353 - RNA, 19 nt, Homo sapiens
  misc_RNA (1)...(19): siRNA sense strand
gcaacccacagcaggaaga

SEQ ID NO: 1758354 - RNA, 19 nt, Homo sapiens
  misc_RNA (1)...(19): siRNA sense strand
ugauauccaggaaauagaa

SEQ ID NO: 1758355 - RNA, 19 nt, Homo sapiens
  misc_RNA (1)...(19): siRNA sense strand
gagcagcaaggaauuucug

SEQ ID NO: 1758356 - RNA, 19 nt, Homo sapiens
  misc_RNA (1)...(19): siRNA sense strand
uaaugcaacuggaaaagga

SEQ ID NO: 1758357 - RNA, 19 nt, Homo sapiens
  misc_RNA (1)...(19): siRNA sense strand
gggacuggccgguaucaca

SEQ ID NO: 1758358 - RNA, 19 nt, Homo sapiens
  misc_RNA (1)...(19): siRNA sense strand
aggcacggaugguggcaaa

SEQ ID NO: 1758359 - RNA, 19 nt, Homo sapiens
  misc_RNA (1)...(19): siRNA sense strand
gcuggaaauguuaaagaug

SEQ ID NO: 1758360 - RNA, 19 nt, Homo sapiens
  misc_RNA (1)...(19): siRNA sense strand
ucagagcagugagaacuac

SEQ ID NO: 1758361 - RNA, 19 nt, Homo sapiens
  misc_RNA (1)...(19): siRNA sense strand
acagaugggagaugauuca

SEQ ID NO: 1758362 - RNA, 19 nt, Homo sapiens
  misc_RNA (1)...(19): siRNA sense strand
gcccagcuucgacgaggua

SEQ ID NO: 1758363 - RNA, 19 nt, Homo sapiens
  misc_RNA (1)...(19): siRNA sense strand
ugcauguuauugagaagaa

SEQ ID NO: 1758364 - RNA, 19 nt, Homo sapiens
  misc_RNA (1)...(19): siRNA sense strand
uuacaggagauuucaaaca

SEQ ID NO: 1758365 - RNA, 19 nt, Homo sapiens
  misc_RNA (1)...(19): siRNA sense strand
aaccucaaguggacauguu

SEQ ID NO: 1758366 - RNA, 19 nt, Homo sapiens
  misc_RNA (1)...(19): siRNA sense strand
ucaggugccuucgacagau

SEQ ID NO: 1758367 - RNA, 19 nt, Homo sapiens
  misc_RNA (1)...(19): siRNA sense strand
ggacuuccaccaguugagu

SEQ ID NO: 1758368 - RNA, 19 nt, Homo sapiens
  misc_RNA (1)...(19): siRNA sense strand
gcauuaguggucucuguca

SEQ ID NO: 1758369 - RNA, 19 nt, Homo sapiens
  misc_RNA (1)...(19): siRNA sense strand
ccaggaaauagaacugaga

SEQ ID NO: 1758370 - RNA, 19 nt, Homo sapiens
  misc_RNA (1)...(19): siRNA sense strand
ggaaggugacaggaauguu

SEQ ID NO: 1758371 - RNA, 19 nt, Homo sapiens
  misc_RNA (1)...(19): siRNA sense strand
ggaaaaggagcugguagaa

SEQ ID NO: 1758372 - RNA, 19 nt, Homo sapiens
  misc_RNA (1)...(19): siRNA sense strand
ugaagcagagcuggaaaug

SEQ ID NO: 1758373 - RNA, 19 nt, Homo sapiens
  misc_RNA (1)...(19): siRNA sense strand
augcugagguacaccaaug

SEQ ID NO: 1758374 - RNA, 19 nt, Homo sapiens
  misc_RNA (1)...(19): siRNA sense strand
caggugccuucgacagaug

SEQ ID NO: 1758375 - RNA, 19 nt, Homo sapiens
  misc_RNA (1)...(19): siRNA sense strand
cauuaguggucucugucaa

SEQ ID NO: 1758376 - RNA, 19 nt, Homo sapiens
  misc_RNA (1)...(19): siRNA sense strand
ugacacuuacaaggcauua

SEQ ID NO: 1758377 - RNA, 19 nt, Homo sapiens
  misc_RNA (1)...(19): siRNA sense strand
aaaaucugcugcugugguu

SEQ ID NO: 1758378 - RNA, 19 nt, Homo sapiens
  misc_RNA (1)...(19): siRNA sense strand
gucccgagcaucacuacaa

SEQ ID NO: 1758379 - RNA, 19 nt, Homo sapiens
  misc_RNA (1)...(19): siRNA sense strand
acauggagaagacuguauu

SEQ ID NO: 1758380 - RNA, 19 nt, Homo sapiens
  misc_RNA (1)...(19): siRNA sense strand
uuauaaaccacccuaugga

SEQ ID NO: 1758381 - RNA, 19 nt, Homo sapiens
  misc_RNA (1)...(19): siRNA sense strand
cauuaagggacauggagaa

SEQ ID NO: 1758382 - RNA, 19 nt, Homo sapiens
  misc_RNA (1)...(19): siRNA sense strand
guagaacgucaaccucaag

SEQ ID NO: 1758383 - RNA, 19 nt, Homo sapiens
  misc_RNA (1)...(19): siRNA sense strand
gagugucggagggaacuaa

SEQ ID NO: 1758384 - RNA, 19 nt, Homo sapiens
  misc_RNA (1)...(19): siRNA sense strand
gcucaugucaccgauccaa

SEQ ID NO: 1758385 - RNA, 19 nt, Homo sapiens
  misc_RNA (1)...(19): siRNA sense strand
cacaggagcuucacaauaa

SEQ ID NO: 1758386 - RNA, 19 nt, Homo sapiens
  misc_RNA (1)...(19): siRNA sense strand
gcaagugucccaagauuua

SEQ ID NO: 1758387 - RNA, 19 nt, Homo sapiens
  misc_RNA (1)...(19): siRNA sense strand
ccacagagcuccaaaguag

SEQ ID NO: 1758388 - RNA, 19 nt, Homo sapiens
  misc_RNA (1)...(19): siRNA sense strand
ucaaacagccuucucauua

SEQ ID NO: 1758389 - RNA, 19 nt, Homo sapiens
  misc_RNA (1)...(19): siRNA sense strand
caaacagccuucucauuaa

SEQ ID NO: 1758390 - RNA, 19 nt, Homo sapiens
  misc_RNA (1)...(19): siRNA sense strand
gcacaggagcuucacaaua

SEQ ID NO: 1758391 - RNA, 19 nt, Homo sapiens
  misc_RNA (1)...(19): siRNA sense strand
ggagaagacuguauugaag

SEQ ID NO: 1758392 - RNA, 19 nt, Homo sapiens
  misc_RNA (1)...(19): siRNA sense strand
gagcaagugucccaagauu

SEQ ID NO: 1758393 - RNA, 19 nt, Homo sapiens
  misc_RNA (1)...(19): siRNA sense strand
gagcaucacuacaagcaaa

SEQ ID NO: 1758394 - RNA, 19 nt, Homo sapiens
  misc_RNA (1)...(19): siRNA sense strand
gaaauagaacugagaguga

SEQ ID NO: 1758395 - RNA, 19 nt, Homo sapiens
  misc_RNA (1)...(19): siRNA sense strand
aagcagagcuggaaauguu

SEQ ID NO: 1758396 - RNA, 19 nt, Homo sapiens
  misc_RNA (1)...(19): siRNA sense strand
gaacuaaugcaacuggaaa

SEQ ID NO: 1758397 - RNA, 19 nt, Homo sapiens
  misc_RNA (1)...(19): siRNA sense strand
gcaaagccucccucugaua

SEQ ID NO: 1758398 - RNA, 19 nt, Homo sapiens
  misc_RNA (1)...(19): siRNA sense strand
gaagaaaaggugcauguua

SEQ ID NO: 1758399 - RNA, 19 nt, Homo sapiens
  misc_RNA (1)...(19): siRNA sense strand
cagcugaacucugauauca

SEQ ID NO: 1758400 - RNA, 19 nt, Homo sapiens
  misc_RNA (1)...(19): siRNA sense strand
gauaucagcgccaucacua

SEQ ID NO: 1758401 - RNA, 19 nt, Homo sapiens
  misc_RNA (1)...(19): siRNA sense strand
gcaaggaauuucugcaaac

SEQ ID NO: 1758402 - RNA, 19 nt, Homo sapiens
  misc_RNA (1)...(19): siRNA sense strand
ugcaacagcugaacucuga

SEQ ID NO: 1758403 - RNA, 19 nt, Homo sapiens
  misc_RNA (1)...(19): siRNA sense strand
gcacucaggccaacaacuu

SEQ ID NO: 1758404 - RNA, 19 nt, Homo sapiens
  misc_RNA (1)...(19): siRNA sense strand
gaagagacugcaggagaua

SEQ ID NO: 1758405 - RNA, 19 nt, Homo sapiens
  misc_RNA (1)...(19): siRNA sense strand
gagaagaaacucaaacagu

SEQ ID NO: 1758406 - RNA, 19 nt, Homo sapiens
  misc_RNA (1)...(19): siRNA sense strand
ggagggaacuaaugcaacu

SEQ ID NO: 1758407 - RNA, 19 nt, Homo sapiens
  misc_RNA (1)...(19): siRNA sense strand
ggaccagccuccugcaaca

SEQ ID NO: 1758408 - RNA, 19 nt, Homo sapiens
  misc_RNA (1)...(19): siRNA sense strand
gaaggugacaggaauguuc

SEQ ID NO: 1758409 - RNA, 19 nt, Homo sapiens
  misc_RNA (1)...(19): siRNA sense strand
caacagcugaacucugaua

SEQ ID NO: 1758410 - RNA, 19 nt, Homo sapiens
  misc_RNA (1)...(19): siRNA sense strand
uggcaaagccucccucuga

SEQ ID NO: 1758411 - RNA, 19 nt, Homo sapiens
  misc_RNA (1)...(19): siRNA sense strand
aaauagaacugagagugaa

SEQ ID NO: 1758412 - RNA, 19 nt, Homo sapiens
  misc_RNA (1)...(19): siRNA sense strand
ugaagagacugcaggagau

SEQ ID NO: 1758413 - RNA, 19 nt, Homo sapiens
  misc_RNA (1)...(19): siRNA sense strand
gguagaacgucaaccucaa

SEQ ID NO: 1758414 - RNA, 19 nt, Homo sapiens
  misc_RNA (1)...(19): siRNA sense strand
cuauggaaagcuacuauua

SEQ ID NO: 1758415 - RNA, 19 nt, Homo sapiens
  misc_RNA (1)...(19): siRNA sense strand
caaagccucccucugauau

SEQ ID NO: 1758416 - RNA, 19 nt, Homo sapiens
  misc_RNA (1)...(19): siRNA sense strand
ccucugauauccaggaaau

SEQ ID NO: 1758417 - RNA, 19 nt, Homo sapiens
  misc_RNA (1)...(19): siRNA sense strand
gagcuggaaauguuaaaga

SEQ ID NO: 1758418 - RNA, 19 nt, Homo sapiens
  misc_RNA (1)...(19): siRNA sense strand
aaacagccuucucauuaag

SEQ ID NO: 1758419 - RNA, 19 nt, Homo sapiens
  misc_RNA (1)...(19): siRNA sense strand
gcagagcuggaaauguuaa

SEQ ID NO: 1758420 - RNA, 19 nt, Homo sapiens
  misc_RNA (1)...(19): siRNA sense strand
gcagugagaacuacagaag

SEQ ID NO: 1758421 - RNA, 19 nt, Homo sapiens
  misc_RNA (1)...(19): siRNA sense strand
caacuuugcccgguccuuu

SEQ ID NO: 1758422 - RNA, 19 nt, Homo sapiens
  misc_RNA (1)...(19): siRNA sense strand
uaagggacauggagaagac

SEQ ID NO: 1758423 - RNA, 19 nt, Homo sapiens
  misc_RNA (1)...(19): siRNA sense strand
gcacggaugguggcaaaga

SEQ ID NO: 1758424 - RNA, 19 nt, Homo sapiens
  misc_RNA (1)...(19): siRNA sense strand
ggacauggagaagacugua

SEQ ID NO: 1758425 - RNA, 19 nt, Homo sapiens
  misc_RNA (1)...(19): siRNA sense strand
cgacagaugggagaugauu

SEQ ID NO: 1758426 - RNA, 19 nt, Homo sapiens
  misc_RNA (1)...(19): siRNA sense strand
ggaacuaaugcaacuggaa

SEQ ID NO: 1758427 - RNA, 19 nt, Homo sapiens
  misc_RNA (1)...(19): siRNA sense strand
ggcaaagccucccucugau

SEQ ID NO: 1758428 - RNA, 19 nt, Homo sapiens
  misc_RNA (1)...(19): siRNA sense strand
caucacuacuuggcugaaa

SEQ ID NO: 1758429 - RNA, 19 nt, Homo sapiens
  misc_RNA (1)...(19): siRNA sense strand
ggacauguuacaggagauu

SEQ ID NO: 1758430 - RNA, 19 nt, Homo sapiens
  misc_RNA (1)...(19): siRNA sense strand
aauggaaggugacaggaau

SEQ ID NO: 1758431 - RNA, 19 nt, Homo sapiens
  misc_RNA (1)...(19): siRNA sense strand
uggagaagacuguauugaa

SEQ ID NO: 1758432 - RNA, 19 nt, Homo sapiens
  misc_RNA (1)...(19): siRNA sense strand
uacaggagauuucaaacag

SEQ ID NO: 1758433 - RNA, 19 nt, Homo sapiens
  misc_RNA (1)...(19): siRNA sense strand
ucagcgccaucacuacuug

SEQ ID NO: 1758434 - RNA, 19 nt, Homo sapiens
  misc_RNA (1)...(19): siRNA sense strand
aagaaaaggugcauguuau

SEQ ID NO: 1758435 - RNA, 19 nt, Homo sapiens
  misc_RNA (1)...(19): siRNA sense strand
uauaaaccacccuauggaa

SEQ ID NO: 1758436 - RNA, 19 nt, Homo sapiens
  misc_RNA (1)...(19): siRNA sense strand
ggaggcagaaggcucaugu

SEQ ID NO: 1758437 - RNA, 19 nt, Homo sapiens
  misc_RNA (1)...(19): siRNA sense strand
gcauguuauugagaagaaa

SEQ ID NO: 1758438 - RNA, 19 nt, Homo sapiens
  misc_RNA (1)...(19): siRNA sense strand
caacgugagcagcaaggaa

SEQ ID NO: 1758439 - RNA, 19 nt, Homo sapiens
  misc_RNA (1)...(19): siRNA sense strand
gaaaaggugcauguuauug

SEQ ID NO: 1758440 - RNA, 19 nt, Homo sapiens
  misc_RNA (1)...(19): siRNA sense strand
cagcaaggaauuucugcaa

SEQ ID NO: 1758441 - RNA, 19 nt, Homo sapiens
  misc_RNA (1)...(19): siRNA sense strand
aaaggugcauguuauugag

SEQ ID NO: 1758442 - RNA, 19 nt, Homo sapiens
  misc_RNA (1)...(19): siRNA sense strand
uaaaccacccuauggaaag

SEQ ID NO: 1758443 - RNA, 19 nt, Homo sapiens
  misc_RNA (1)...(19): siRNA sense strand
gaagcagagcuggaaaugu

SEQ ID NO: 1758444 - RNA, 19 nt, Homo sapiens
  misc_RNA (1)...(19): siRNA sense strand
caagugucccaagauuuaa

SEQ ID NO: 1758445 - RNA, 19 nt, Homo sapiens
  misc_RNA (1)...(19): siRNA sense strand
ccaagaaccggaggcagaa

SEQ ID NO: 1758446 - RNA, 19 nt, Homo sapiens
  misc_RNA (1)...(19): siRNA sense strand
agcaaggaauuucugcaaa

SEQ ID NO: 1758447 - RNA, 19 nt, Homo sapiens
  misc_RNA (1)...(19): siRNA sense strand
gagcagugagaacuacaga

SEQ ID NO: 1758448 - RNA, 19 nt, Homo sapiens
  misc_RNA (1)...(19): siRNA sense strand
gguuagcgagugccaagaa

SEQ ID NO: 1758449 - RNA, 19 nt, Homo sapiens
  misc_RNA (1)...(19): siRNA sense strand
ucacuacaagcaaauggaa

SEQ ID NO: 1758450 - RNA, 19 nt, Homo sapiens
  misc_RNA (1)...(19): siRNA sense strand
ggagcaagugucccaagau

SEQ ID NO: 1758451 - RNA, 19 nt, Homo sapiens
  misc_RNA (1)...(19): siRNA sense strand
auaaaccacccuauggaaa

SEQ ID NO: 1758452 - RNA, 19 nt, Homo sapiens
  misc_RNA (1)...(19): siRNA sense strand
cacggaugguggcaaagaa

SEQ ID NO: 1758453 - RNA, 19 nt, Homo sapiens
  misc_RNA (1)...(19): siRNA sense strand
gcaacccacagcaggaaga

SEQ ID NO: 1758454 - RNA, 19 nt, Homo sapiens
  misc_RNA (1)...(19): siRNA sense strand
ugauauccaggaaauagaa

SEQ ID NO: 1758455 - RNA, 19 nt, Homo sapiens
  misc_RNA (1)...(19): siRNA sense strand
gagcagcaaggaauuucug

SEQ ID NO: 1758456 - RNA, 19 nt, Homo sapiens
  misc_RNA (1)...(19): siRNA sense strand
uaaugcaacuggaaaagga

SEQ ID NO: 1758457 - RNA, 19 nt, Homo sapiens
  misc_RNA (1)...(19): siRNA sense strand
gggacuggccgguaucaca

SEQ ID NO: 1758458 - RNA, 19 nt, Homo sapiens
  misc_RNA (1)...(19): siRNA sense strand
aggcacggaugguggcaaa

SEQ ID NO: 1758459 - RNA, 19 nt, Homo sapiens
  misc_RNA (1)...(19): siRNA sense strand
gcuggaaauguuaaagaug

SEQ ID NO: 1758460 - RNA, 19 nt, Homo sapiens
  misc_RNA (1)...(19): siRNA sense strand
ucagagcagugagaacuac

SEQ ID NO: 1758461 - RNA, 19 nt, Homo sapiens
  misc_RNA (1)...(19): siRNA sense strand
acagaugggagaugauuca

SEQ ID NO: 1758462 - RNA, 19 nt, Homo sapiens
  misc_RNA (1)...(19): siRNA sense strand
gcccagcuucgacgaggua

SEQ ID NO: 1758463 - RNA, 19 nt, Homo sapiens
  misc_RNA (1)...(19): siRNA sense strand
ugcauguuauugagaagaa

SEQ ID NO: 1758464 - RNA, 19 nt, Homo sapiens
  misc_RNA (1)...(19): siRNA sense strand
uuacaggagauuucaaaca

SEQ ID NO: 1758465 - RNA, 19 nt, Homo sapiens
  misc_RNA (1)...(19): siRNA sense strand
aaccucaaguggacauguu

SEQ ID NO: 1758466 - RNA, 19 nt, Homo sapiens
  misc_RNA (1)...(19): siRNA sense strand
ucaggugccuucgacagau

SEQ ID NO: 1758467 - RNA, 19 nt, Homo sapiens
  misc_RNA (1)...(19): siRNA sense strand
ggacuuccaccaguugagu

SEQ ID NO: 1758468 - RNA, 19 nt, Homo sapiens
  misc_RNA (1)...(19): siRNA sense strand
gcauuaguggucucuguca

SEQ ID NO: 1758469 - RNA, 19 nt, Homo sapiens
  misc_RNA (1)...(19): siRNA sense strand
ccaggaaauagaacugaga

SEQ ID NO: 1758470 - RNA, 19 nt, Homo sapiens
  misc_RNA (1)...(19): siRNA sense strand
ggaaggugacaggaauguu

SEQ ID NO: 1758471 - RNA, 19 nt, Homo sapiens
  misc_RNA (1)...(19): siRNA sense strand
ggaaaaggagcugguagaa

SEQ ID NO: 1758472 - RNA, 19 nt, Homo sapiens
  misc_RNA (1)...(19): siRNA sense strand
ugaagcagagcuggaaaug

SEQ ID NO: 1758473 - RNA, 19 nt, Homo sapiens
  misc_RNA (1)...(19): siRNA sense strand
augcugagguacaccaaug

SEQ ID NO: 1758474 - RNA, 19 nt, Homo sapiens
  misc_RNA (1)...(19): siRNA sense strand
caggugccuucgacagaug

SEQ ID NO: 1758475 - RNA, 19 nt, Homo sapiens
  misc_RNA (1)...(19): siRNA sense strand
cauuaguggucucugucaa

SEQ ID NO: 1758476 - RNA, 19 nt, Homo sapiens
  misc_RNA (1)...(19): siRNA sense strand
ugacacuuacaaggcauua

SEQ ID NO: 1758477 - RNA, 19 nt, Homo sapiens
  misc_RNA (1)...(19): siRNA sense strand
aaaaucugcugcugugguu

SEQ ID NO: 1758478 - RNA, 19 nt, Homo sapiens
  misc_RNA (1)...(19): siRNA sense strand
gucccgagcaucacuacaa

SEQ ID NO: 1758479 - RNA, 19 nt, Homo sapiens
  misc_RNA (1)...(19): siRNA sense strand
acauggagaagacuguauu

SEQ ID NO: 1758480 - RNA, 19 nt, Homo sapiens
  misc_RNA (1)...(19): siRNA sense strand
uuauaaaccacccuaugga

SEQ ID NO: 1758481 - RNA, 19 nt, Homo sapiens
  misc_RNA (1)...(19): siRNA sense strand
cauuaagggacauggagaa

SEQ ID NO: 1758482 - RNA, 19 nt, Homo sapiens
  misc_RNA (1)...(19): siRNA sense strand
guagaacgucaaccucaag

SEQ ID NO: 1758483 - RNA, 19 nt, Homo sapiens
  misc_RNA (1)...(19): siRNA sense strand
gagugucggagggaacuaa

SEQ ID NO: 1758484 - RNA, 19 nt, Homo sapiens
  misc_RNA (1)...(19): siRNA sense strand
gcucaugucaccgauccaa

SEQ ID NO: 1758485 - RNA, 19 nt, Homo sapiens
  misc_RNA (1)...(19): siRNA sense strand
cacaggagcuucacaauaa

SEQ ID NO: 1758486 - RNA, 19 nt, Homo sapiens
  misc_RNA (1)...(19): siRNA sense strand
gcaagugucccaagauuua

SEQ ID NO: 1758487 - RNA, 19 nt, Homo sapiens
  misc_RNA (1)...(19): siRNA sense strand
ccacagagcuccaaaguag

SEQ ID NO: 1758488 - RNA, 19 nt, Homo sapiens
  misc_RNA (1)...(19): siRNA sense strand
ucaaacagccuucucauua

SEQ ID NO: 1758489 - RNA, 19 nt, Homo sapiens
  misc_RNA (1)...(19): siRNA sense strand
caaacagccuucucauuaa

SEQ ID NO: 1758490 - RNA, 19 nt, Homo sapiens
  misc_RNA (1)...(19): siRNA sense strand
gcacaggagcuucacaaua

SEQ ID NO: 1758491 - RNA, 19 nt, Homo sapiens
  misc_RNA (1)...(19): siRNA sense strand
ggagaagacuguauugaag

SEQ ID NO: 1758492 - RNA, 19 nt, Homo sapiens
  misc_RNA (1)...(19): siRNA sense strand
gagcaagugucccaagauu

SEQ ID NO: 1758493 - RNA, 19 nt, Homo sapiens
  misc_RNA (1)...(19): siRNA sense strand
gagcaucacuacaagcaaa

SEQ ID NO: 1758494 - RNA, 19 nt, Homo sapiens
  misc_RNA (1)...(19): siRNA sense strand
gaaauagaacugagaguga

SEQ ID NO: 1758495 - RNA, 19 nt, Homo sapiens
  misc_RNA (1)...(19): siRNA sense strand
aagcagagcuggaaauguu

SEQ ID NO: 1758496 - RNA, 19 nt, Homo sapiens
  misc_RNA (1)...(19): siRNA sense strand
gaacuaaugcaacuggaaa

SEQ ID NO: 1758497 - RNA, 19 nt, Homo sapiens
  misc_RNA (1)...(19): siRNA sense strand
gcaaagccucccucugaua

SEQ ID NO: 1758498 - RNA, 19 nt, Homo sapiens
  misc_RNA (1)...(19): siRNA sense strand
gaagaaaaggugcauguua

SEQ ID NO: 1758499 - RNA, 19 nt, Homo sapiens
  misc_RNA (1)...(19): siRNA sense strand
cagcugaacucugauauca

SEQ ID NO: 1758500 - RNA, 19 nt, Homo sapiens
  misc_RNA (1)...(19): siRNA sense strand
gauaucagcgccaucacua

SEQ ID NO: 1758501 - RNA, 19 nt, Homo sapiens
  misc_RNA (1)...(19): siRNA sense strand
gcaaggaauuucugcaaac

SEQ ID NO: 1758502 - RNA, 19 nt, Homo sapiens
  misc_RNA (1)...(19): siRNA sense strand
ugcaacagcugaacucuga

SEQ ID NO: 1758503 - RNA, 19 nt, Homo sapiens
  misc_RNA (1)...(19): siRNA sense strand
gcacucaggccaacaacuu

SEQ ID NO: 1758504 - RNA, 19 nt, Homo sapiens
  misc_RNA (1)...(19): siRNA sense strand
gaagagacugcaggagaua

SEQ ID NO: 1758505 - RNA, 19 nt, Homo sapiens
  misc_RNA (1)...(19): siRNA sense strand
gagaagaaacucaaacagu

SEQ ID NO: 1758506 - RNA, 19 nt, Homo sapiens
  misc_RNA (1)...(19): siRNA sense strand
ggagggaacuaaugcaacu

SEQ ID NO: 1758507 - RNA, 19 nt, Homo sapiens
  misc_RNA (1)...(19): siRNA sense strand
ggaccagccuccugcaaca

SEQ ID NO: 1758508 - RNA, 19 nt, Homo sapiens
  misc_RNA (1)...(19): siRNA sense strand
gaaggugacaggaauguuc

SEQ ID NO: 1758509 - RNA, 19 nt, Homo sapiens
  misc_RNA (1)...(19): siRNA sense strand
caacagcugaacucugaua

SEQ ID NO: 1758510 - RNA, 19 nt, Homo sapiens
  misc_RNA (1)...(19): siRNA sense strand
uggcaaagccucccucuga

SEQ ID NO: 1758511 - RNA, 19 nt, Homo sapiens
  misc_RNA (1)...(19): siRNA sense strand
aaauagaacugagagugaa

SEQ ID NO: 1758512 - RNA, 19 nt, Homo sapiens
  misc_RNA (1)...(19): siRNA sense strand
ugaagagacugcaggagau

SEQ ID NO: 1758513 - RNA, 19 nt, Homo sapiens
  misc_RNA (1)...(19): siRNA sense strand
gguagaacgucaaccucaa

SEQ ID NO: 1758514 - RNA, 19 nt, Homo sapiens
  misc_RNA (1)...(19): siRNA sense strand
cuauggaaagcuacuauua

SEQ ID NO: 1758515 - RNA, 19 nt, Homo sapiens
  misc_RNA (1)...(19): siRNA sense strand
caaagccucccucugauau

SEQ ID NO: 1758516 - RNA, 19 nt, Homo sapiens
  misc_RNA (1)...(19): siRNA sense strand
ccucugauauccaggaaau

SEQ ID NO: 1758517 - RNA, 19 nt, Homo sapiens
  misc_RNA (1)...(19): siRNA sense strand
gagcuggaaauguuaaaga

SEQ ID NO: 1758518 - RNA, 19 nt, Homo sapiens
  misc_RNA (1)...(19): siRNA sense strand
aaacagccuucucauuaag

SEQ ID NO: 1758519 - RNA, 19 nt, Homo sapiens
  misc_RNA (1)...(19): siRNA sense strand
gcagagcuggaaauguuaa

SEQ ID NO: 1758520 - RNA, 19 nt, Homo sapiens
  misc_RNA (1)...(19): siRNA sense strand
gcagugagaacuacagaag

SEQ ID NO: 1758521 - RNA, 19 nt, Homo sapiens
  misc_RNA (1)...(19): siRNA sense strand
caacuuugcccgguccuuu

SEQ ID NO: 1758522 - RNA, 19 nt, Homo sapiens
  misc_RNA (1)...(19): siRNA sense strand
uaagggacauggagaagac

SEQ ID NO: 1758523 - RNA, 19 nt, Homo sapiens
  misc_RNA (1)...(19): siRNA sense strand
gcacggaugguggcaaaga

SEQ ID NO: 1758524 - RNA, 19 nt, Homo sapiens
  misc_RNA (1)...(19): siRNA sense strand
ggacauggagaagacugua

SEQ ID NO: 1758525 - RNA, 19 nt, Homo sapiens
  misc_RNA (1)...(19): siRNA sense strand
cgacagaugggagaugauu

SEQ ID NO: 1758526 - RNA, 19 nt, Homo sapiens
  misc_RNA (1)...(19): siRNA sense strand
ggaacuaaugcaacuggaa

SEQ ID NO: 1758527 - RNA, 19 nt, Homo sapiens
  misc_RNA (1)...(19): siRNA sense strand
ggcaaagccucccucugau

SEQ ID NO: 1758528 - RNA, 19 nt, Homo sapiens
  misc_RNA (1)...(19): siRNA sense strand
caucacuacuuggcugaaa

SEQ ID NO: 1758529 - RNA, 19 nt, Homo sapiens
  misc_RNA (1)...(19): siRNA sense strand
ggacauguuacaggagauu

SEQ ID NO: 1758530 - RNA, 19 nt, Homo sapiens
  misc_RNA (1)...(19): siRNA sense strand
aauggaaggugacaggaau

SEQ ID NO: 1758531 - RNA, 19 nt, Homo sapiens
  misc_RNA (1)...(19): siRNA sense strand
uggagaagacuguauugaa

SEQ ID NO: 1758532 - RNA, 19 nt, Homo sapiens
  misc_RNA (1)...(19): siRNA sense strand
uacaggagauuucaaacag

SEQ ID NO: 1758533 - RNA, 19 nt, Homo sapiens
  misc_RNA (1)...(19): siRNA sense strand
ucagcgccaucacuacuug

SEQ ID NO: 1758534 - RNA, 19 nt, Homo sapiens
  misc_RNA (1)...(19): siRNA sense strand
aagaaaaggugcauguuau

SEQ ID NO: 1758535 - RNA, 19 nt, Homo sapiens
  misc_RNA (1)...(19): siRNA sense strand
uauaaaccacccuauggaa

SEQ ID NO: 1758536 - RNA, 19 nt, Homo sapiens
  misc_RNA (1)...(19): siRNA sense strand
ggaggcagaaggcucaugu

SEQ ID NO: 1758537 - RNA, 19 nt, Homo sapiens
  misc_RNA (1)...(19): siRNA sense strand
gcauguuauugagaagaaa

SEQ ID NO: 1758538 - RNA, 19 nt, Homo sapiens
  misc_RNA (1)...(19): siRNA sense strand
caacgugagcagcaaggaa

SEQ ID NO: 1758539 - RNA, 19 nt, Homo sapiens
  misc_RNA (1)...(19): siRNA sense strand
gaaaaggugcauguuauug

SEQ ID NO: 1758540 - RNA, 19 nt, Homo sapiens
  misc_RNA (1)...(19): siRNA sense strand
cagcaaggaauuucugcaa

SEQ ID NO: 1758541 - RNA, 19 nt, Homo sapiens
  misc_RNA (1)...(19): siRNA sense strand
aaaggugcauguuauugag

SEQ ID NO: 1758542 - RNA, 19 nt, Homo sapiens
  misc_RNA (1)...(19): siRNA sense strand
uaaaccacccuauggaaag

SEQ ID NO: 1758543 - RNA, 19 nt, Homo sapiens
  misc_RNA (1)...(19): siRNA sense strand
gaagcagagcuggaaaugu

SEQ ID NO: 1758544 - RNA, 19 nt, Homo sapiens
  misc_RNA (1)...(19): siRNA sense strand
caagugucccaagauuuaa

SEQ ID NO: 1758545 - RNA, 19 nt, Homo sapiens
  misc_RNA (1)...(19): siRNA sense strand
ccaagaaccggaggcagaa

SEQ ID NO: 1758546 - RNA, 19 nt, Homo sapiens
  misc_RNA (1)...(19): siRNA sense strand
agcaaggaauuucugcaaa

SEQ ID NO: 1758547 - RNA, 19 nt, Homo sapiens
  misc_RNA (1)...(19): siRNA sense strand
gagcagugagaacuacaga

SEQ ID NO: 1758548 - RNA, 19 nt, Homo sapiens
  misc_RNA (1)...(19): siRNA sense strand
gguuagcgagugccaagaa

SEQ ID NO: 1758549 - RNA, 19 nt, Homo sapiens
  misc_RNA (1)...(19): siRNA sense strand
ucacuacaagcaaauggaa

SEQ ID NO: 1758550 - RNA, 19 nt, Homo sapiens
  misc_RNA (1)...(19): siRNA sense strand
ggagcaagugucccaagau

SEQ ID NO: 1758551 - RNA, 19 nt, Homo sapiens
  misc_RNA (1)...(19): siRNA sense strand
auaaaccacccuauggaaa

SEQ ID NO: 1758552 - RNA, 19 nt, Homo sapiens
  misc_RNA (1)...(19): siRNA sense strand
cacggaugguggcaaagaa

SEQ ID NO: 1758553 - RNA, 19 nt, Homo sapiens
  misc_RNA (1)...(19): siRNA sense strand
gcaacccacagcaggaaga

SEQ ID NO: 1758554 - RNA, 19 nt, Homo sapiens
  misc_RNA (1)...(19): siRNA sense strand
ugauauccaggaaauagaa

SEQ ID NO: 1758555 - RNA, 19 nt, Homo sapiens
  misc_RNA (1)...(19): siRNA sense strand
gagcagcaaggaauuucug

SEQ ID NO: 1758556 - RNA, 19 nt, Homo sapiens
  misc_RNA (1)...(19): siRNA sense strand
uaaugcaacuggaaaagga

SEQ ID NO: 1758557 - RNA, 19 nt, Homo sapiens
  misc_RNA (1)...(19): siRNA sense strand
gggacuggccgguaucaca

SEQ ID NO: 1758558 - RNA, 19 nt, Homo sapiens
  misc_RNA (1)...(19): siRNA sense strand
aggcacggaugguggcaaa

SEQ ID NO: 1758559 - RNA, 19 nt, Homo sapiens
  misc_RNA (1)...(19): siRNA sense strand
gcuggaaauguuaaagaug

SEQ ID NO: 1758560 - RNA, 19 nt, Homo sapiens
  misc_RNA (1)...(19): siRNA sense strand
ucagagcagugagaacuac

SEQ ID NO: 1758561 - RNA, 19 nt, Homo sapiens
  misc_RNA (1)...(19): siRNA sense strand
acagaugggagaugauuca

SEQ ID NO: 1758562 - RNA, 19 nt, Homo sapiens
  misc_RNA (1)...(19): siRNA sense strand
gcccagcuucgacgaggua

SEQ ID NO: 1758563 - RNA, 19 nt, Homo sapiens
  misc_RNA (1)...(19): siRNA sense strand
ugcauguuauugagaagaa

SEQ ID NO: 1758564 - RNA, 19 nt, Homo sapiens
  misc_RNA (1)...(19): siRNA sense strand
uuacaggagauuucaaaca

SEQ ID NO: 1758565 - RNA, 19 nt, Homo sapiens
  misc_RNA (1)...(19): siRNA sense strand
aaccucaaguggacauguu

SEQ ID NO: 1758566 - RNA, 19 nt, Homo sapiens
  misc_RNA (1)...(19): siRNA sense strand
ucaggugccuucgacagau

SEQ ID NO: 1758567 - RNA, 19 nt, Homo sapiens
  misc_RNA (1)...(19): siRNA sense strand
ggacuuccaccaguugagu

SEQ ID NO: 1758568 - RNA, 19 nt, Homo sapiens
  misc_RNA (1)...(19): siRNA sense strand
gcauuaguggucucuguca

SEQ ID NO: 1758569 - RNA, 19 nt, Homo sapiens
  misc_RNA (1)...(19): siRNA sense strand
ccaggaaauagaacugaga

SEQ ID NO: 1758570 - RNA, 19 nt, Homo sapiens
  misc_RNA (1)...(19): siRNA sense strand
ggaaggugacaggaauguu

SEQ ID NO: 1758571 - RNA, 19 nt, Homo sapiens
  misc_RNA (1)...(19): siRNA sense strand
ggaaaaggagcugguagaa

SEQ ID NO: 1758572 - RNA, 19 nt, Homo sapiens
  misc_RNA (1)...(19): siRNA sense strand
ugaagcagagcuggaaaug

SEQ ID NO: 1758573 - RNA, 19 nt, Homo sapiens
  misc_RNA (1)...(19): siRNA sense strand
augcugagguacaccaaug

SEQ ID NO: 1758574 - RNA, 19 nt, Homo sapiens
  misc_RNA (1)...(19): siRNA sense strand
caggugccuucgacagaug

SEQ ID NO: 1758575 - RNA, 19 nt, Homo sapiens
  misc_RNA (1)...(19): siRNA sense strand
cauuaguggucucugucaa

SEQ ID NO: 1758576 - RNA, 19 nt, Homo sapiens
  misc_RNA (1)...(19): siRNA sense strand
ugacacuuacaaggcauua

SEQ ID NO: 1758577 - RNA, 19 nt, Homo sapiens
  misc_RNA (1)...(19): siRNA sense strand
aaaaucugcugcugugguu

SEQ ID NO: 1758578 - RNA, 19 nt, Homo sapiens
  misc_RNA (1)...(19): siRNA sense strand
gucccgagcaucacuacaa

SEQ ID NO: 1758579 - RNA, 19 nt, Homo sapiens
  misc_RNA (1)...(19): siRNA sense strand
acauggagaagacuguauu

SEQ ID NO: 1758580 - RNA, 19 nt, Homo sapiens
  misc_RNA (1)...(19): siRNA sense strand
uuauaaaccacccuaugga

SEQ ID NO: 1758581 - RNA, 19 nt, Homo sapiens
  misc_RNA (1)...(19): siRNA sense strand
cauuaagggacauggagaa

SEQ ID NO: 1758582 - RNA, 19 nt, Homo sapiens
  misc_RNA (1)...(19): siRNA sense strand
guagaacgucaaccucaag

SEQ ID NO: 1758583 - RNA, 19 nt, Homo sapiens
  misc_RNA (1)...(19): siRNA sense strand
gagugucggagggaacuaa

SEQ ID NO: 1758584 - RNA, 19 nt, Homo sapiens
  misc_RNA (1)...(19): siRNA sense strand
gcucaugucaccgauccaa

SEQ ID NO: 1758585 - RNA, 19 nt, Homo sapiens
  misc_RNA (1)...(19): siRNA sense strand
cacaggagcuucacaauaa

SEQ ID NO: 1758586 - RNA, 19 nt, Homo sapiens
  misc_RNA (1)...(19): siRNA sense strand
gcaagugucccaagauuua

SEQ ID NO: 1758587 - RNA, 19 nt, Homo sapiens
  misc_RNA (1)...(19): siRNA sense strand
ccacagagcuccaaaguag

SEQ ID NO: 1758588 - RNA, 19 nt, Homo sapiens
  misc_RNA (1)...(19): siRNA sense strand
ucaaacagccuucucauua

SEQ ID NO: 1758589 - RNA, 19 nt, Homo sapiens
  misc_RNA (1)...(19): siRNA sense strand
caaacagccuucucauuaa

SEQ ID NO: 1758590 - RNA, 19 nt, Homo sapiens
  misc_RNA (1)...(19): siRNA sense strand
gcacaggagcuucacaaua

SEQ ID NO: 1758591 - RNA, 19 nt, Homo sapiens
  misc_RNA (1)...(19): siRNA sense strand
ggagaagacuguauugaag

SEQ ID NO: 1758592 - RNA, 19 nt, Homo sapiens
  misc_RNA (1)...(19): siRNA sense strand
gagcaagugucccaagauu

SEQ ID NO: 1758593 - RNA, 19 nt, Homo sapiens
  misc_RNA (1)...(19): siRNA sense strand
gagcaucacuacaagcaaa

SEQ ID NO: 1758594 - RNA, 19 nt, Homo sapiens
  misc_RNA (1)...(19): siRNA sense strand
gaaauagaacugagaguga

SEQ ID NO: 1758595 - RNA, 19 nt, Homo sapiens
  misc_RNA (1)...(19): siRNA sense strand
aagcagagcuggaaauguu

SEQ ID NO: 1758596 - RNA, 19 nt, Homo sapiens
  misc_RNA (1)...(19): siRNA sense strand
gaacuaaugcaacuggaaa

SEQ ID NO: 1758597 - RNA, 19 nt, Homo sapiens
  misc_RNA (1)...(19): siRNA sense strand
gcaaagccucccucugaua

SEQ ID NO: 1758598 - RNA, 19 nt, Homo sapiens
  misc_RNA (1)...(19): siRNA sense strand
gaagaaaaggugcauguua

SEQ ID NO: 1758599 - RNA, 19 nt, Homo sapiens
  misc_RNA (1)...(19): siRNA sense strand
cagcugaacucugauauca

SEQ ID NO: 1758600 - RNA, 19 nt, Homo sapiens
  misc_RNA (1)...(19): siRNA sense strand
gauaucagcgccaucacua

SEQ ID NO: 1758601 - RNA, 19 nt, Homo sapiens
  misc_RNA (1)...(19): siRNA sense strand
gcaaggaauuucugcaaac

SEQ ID NO: 1758602 - RNA, 19 nt, Homo sapiens
  misc_RNA (1)...(19): siRNA sense strand
ugcaacagcugaacucuga

SEQ ID NO: 1758603 - RNA, 19 nt, Homo sapiens
  misc_RNA (1)...(19): siRNA sense strand
gcacucaggccaacaacuu

SEQ ID NO: 1758604 - RNA, 19 nt, Homo sapiens
  misc_RNA (1)...(19): siRNA sense strand
gaagagacugcaggagaua

SEQ ID NO: 1758605 - RNA, 19 nt, Homo sapiens
  misc_RNA (1)...(19): siRNA sense strand
gagaagaaacucaaacagu

SEQ ID NO: 1758606 - RNA, 19 nt, Homo sapiens
  misc_RNA (1)...(19): siRNA sense strand
ggagggaacuaaugcaacu

SEQ ID NO: 1758607 - RNA, 19 nt, Homo sapiens
  misc_RNA (1)...(19): siRNA sense strand
ggaccagccuccugcaaca

SEQ ID NO: 1758608 - RNA, 19 nt, Homo sapiens
  misc_RNA (1)...(19): siRNA sense strand
gaaggugacaggaauguuc

SEQ ID NO: 1758609 - RNA, 19 nt, Homo sapiens
  misc_RNA (1)...(19): siRNA sense strand
caacagcugaacucugaua

SEQ ID NO: 1758610 - RNA, 19 nt, Homo sapiens
  misc_RNA (1)...(19): siRNA sense strand
uggcaaagccucccucuga

SEQ ID NO: 1758611 - RNA, 19 nt, Homo sapiens
  misc_RNA (1)...(19): siRNA sense strand
aaauagaacugagagugaa

SEQ ID NO: 1758612 - RNA, 19 nt, Homo sapiens
  misc_RNA (1)...(19): siRNA sense strand
ugaagagacugcaggagau

SEQ ID NO: 1758613 - RNA, 19 nt, Homo sapiens
  misc_RNA (1)...(19): siRNA sense strand
gguagaacgucaaccucaa

SEQ ID NO: 1758614 - RNA, 19 nt, Homo sapiens
  misc_RNA (1)...(19): siRNA sense strand
cuauggaaagcuacuauua

SEQ ID NO: 1758615 - RNA, 19 nt, Homo sapiens
  misc_RNA (1)...(19): siRNA sense strand
caaagccucccucugauau

SEQ ID NO: 1758616 - RNA, 19 nt, Homo sapiens
  misc_RNA (1)...(19): siRNA sense strand
ccucugauauccaggaaau

SEQ ID NO: 1758617 - RNA, 19 nt, Homo sapiens
  misc_RNA (1)...(19): siRNA sense strand
gagcuggaaauguuaaaga

SEQ ID NO: 1758618 - RNA, 19 nt, Homo sapiens
  misc_RNA (1)...(19): siRNA sense strand
aaacagccuucucauuaag

SEQ ID NO: 1758619 - RNA, 19 nt, Homo sapiens
  misc_RNA (1)...(19): siRNA sense strand
gcagagcuggaaauguuaa

SEQ ID NO: 1758620 - RNA, 19 nt, Homo sapiens
  misc_RNA (1)...(19): siRNA sense strand
gcagugagaacuacagaag

SEQ ID NO: 1758621 - RNA, 19 nt, Homo sapiens
  misc_RNA (1)...(19): siRNA sense strand
caacuuugcccgguccuuu

SEQ ID NO: 1758622 - RNA, 19 nt, Homo sapiens
  misc_RNA (1)...(19): siRNA sense strand
uaagggacauggagaagac

SEQ ID NO: 1758623 - RNA, 19 nt, Homo sapiens
  misc_RNA (1)...(19): siRNA sense strand
gcacggaugguggcaaaga

SEQ ID NO: 1758624 - RNA, 19 nt, Homo sapiens
  misc_RNA (1)...(19): siRNA sense strand
ggacauggagaagacugua

SEQ ID NO: 1758625 - RNA, 19 nt, Homo sapiens
  misc_RNA (1)...(19): siRNA sense strand
cgacagaugggagaugauu

SEQ ID NO: 1758626 - RNA, 19 nt, Homo sapiens
  misc_RNA (1)...(19): siRNA sense strand
ggaacuaaugcaacuggaa

SEQ ID NO: 1758627 - RNA, 19 nt, Homo sapiens
  misc_RNA (1)...(19): siRNA sense strand
ggcaaagccucccucugau

SEQ ID NO: 1758628 - RNA, 19 nt, Homo sapiens
  misc_RNA (1)...(19): siRNA sense strand
caucacuacuuggcugaaa

SEQ ID NO: 1758629 - RNA, 19 nt, Homo sapiens
  misc_RNA (1)...(19): siRNA sense strand
ggacauguuacaggagauu

SEQ ID NO: 1758630 - RNA, 19 nt, Homo sapiens
  misc_RNA (1)...(19): siRNA sense strand
aauggaaggugacaggaau

SEQ ID NO: 1758631 - RNA, 19 nt, Homo sapiens
  misc_RNA (1)...(19): siRNA sense strand
uggagaagacuguauugaa

SEQ ID NO: 1758632 - RNA, 19 nt, Homo sapiens
  misc_RNA (1)...(19): siRNA sense strand
uacaggagauuucaaacag

SEQ ID NO: 1758633 - RNA, 19 nt, Homo sapiens
  misc_RNA (1)...(19): siRNA sense strand
ucagcgccaucacuacuug

SEQ ID NO: 1758634 - RNA, 19 nt, Homo sapiens
  misc_RNA (1)...(19): siRNA sense strand
aagaaaaggugcauguuau

SEQ ID NO: 1758635 - RNA, 19 nt, Homo sapiens
  misc_RNA (1)...(19): siRNA sense strand
uauaaaccacccuauggaa

SEQ ID NO: 1758636 - RNA, 19 nt, Homo sapiens
  misc_RNA (1)...(19): siRNA sense strand
ggaggcagaaggcucaugu

SEQ ID NO: 1758637 - RNA, 19 nt, Homo sapiens
  misc_RNA (1)...(19): siRNA sense strand
gcauguuauugagaagaaa

SEQ ID NO: 1758638 - RNA, 19 nt, Homo sapiens
  misc_RNA (1)...(19): siRNA sense strand
caacgugagcagcaaggaa

SEQ ID NO: 1758639 - RNA, 19 nt, Homo sapiens
  misc_RNA (1)...(19): siRNA sense strand
gaaaaggugcauguuauug

SEQ ID NO: 1758640 - RNA, 19 nt, Homo sapiens
  misc_RNA (1)...(19): siRNA sense strand
cagcaaggaauuucugcaa

SEQ ID NO: 1758641 - RNA, 19 nt, Homo sapiens
  misc_RNA (1)...(19): siRNA sense strand
aaaggugcauguuauugag

SEQ ID NO: 1758642 - RNA, 19 nt, Homo sapiens
  misc_RNA (1)...(19): siRNA sense strand
uaaaccacccuauggaaag

SEQ ID NO: 1758643 - RNA, 19 nt, Homo sapiens
  misc_RNA (1)...(19): siRNA sense strand
gaagcagagcuggaaaugu

SEQ ID NO: 1758644 - RNA, 19 nt, Homo sapiens
  misc_RNA (1)...(19): siRNA sense strand
caagugucccaagauuuaa

SEQ ID NO: 1758645 - RNA, 19 nt, Homo sapiens
  misc_RNA (1)...(19): siRNA sense strand
ccaagaaccggaggcagaa

SEQ ID NO: 1758646 - RNA, 19 nt, Homo sapiens
  misc_RNA (1)...(19): siRNA sense strand
agcaaggaauuucugcaaa

SEQ ID NO: 1758647 - RNA, 19 nt, Homo sapiens
  misc_RNA (1)...(19): siRNA sense strand
gagcagugagaacuacaga

SEQ ID NO: 1758648 - RNA, 19 nt, Homo sapiens
  misc_RNA (1)...(19): siRNA sense strand
gguuagcgagugccaagaa

SEQ ID NO: 1758649 - RNA, 19 nt, Homo sapiens
  misc_RNA (1)...(19): siRNA sense strand
ucacuacaagcaaauggaa

SEQ ID NO: 1758650 - RNA, 19 nt, Homo sapiens
  misc_RNA (1)...(19): siRNA sense strand
ggagcaagugucccaagau

SEQ ID NO: 1758651 - RNA, 19 nt, Homo sapiens
  misc_RNA (1)...(19): siRNA sense strand
auaaaccacccuauggaaa

SEQ ID NO: 1758652 - RNA, 19 nt, Homo sapiens
  misc_RNA (1)...(19): siRNA sense strand
cacggaugguggcaaagaa

SEQ ID NO: 1758653 - RNA, 19 nt, Homo sapiens
  misc_RNA (1)...(19): siRNA sense strand
gcaacccacagcaggaaga

SEQ ID NO: 1758654 - RNA, 19 nt, Homo sapiens
  misc_RNA (1)...(19): siRNA sense strand
ugauauccaggaaauagaa

SEQ ID NO: 1758655 - RNA, 19 nt, Homo sapiens
  misc_RNA (1)...(19): siRNA sense strand
gagcagcaaggaauuucug

SEQ ID NO: 1758656 - RNA, 19 nt, Homo sapiens
  misc_RNA (1)...(19): siRNA sense strand
uaaugcaacuggaaaagga

SEQ ID NO: 1758657 - RNA, 19 nt, Homo sapiens
  misc_RNA (1)...(19): siRNA sense strand
gggacuggccgguaucaca

SEQ ID NO: 1758658 - RNA, 19 nt, Homo sapiens
  misc_RNA (1)...(19): siRNA sense strand
aggcacggaugguggcaaa

SEQ ID NO: 1758659 - RNA, 19 nt, Homo sapiens
  misc_RNA (1)...(19): siRNA sense strand
gcuggaaauguuaaagaug

SEQ ID NO: 1758660 - RNA, 19 nt, Homo sapiens
  misc_RNA (1)...(19): siRNA sense strand
ucagagcagugagaacuac

SEQ ID NO: 1758661 - RNA, 19 nt, Homo sapiens
  misc_RNA (1)...(19): siRNA sense strand
acagaugggagaugauuca

SEQ ID NO: 1758662 - RNA, 19 nt, Homo sapiens
  misc_RNA (1)...(19): siRNA sense strand
gcccagcuucgacgaggua

SEQ ID NO: 1758663 - RNA, 19 nt, Homo sapiens
  misc_RNA (1)...(19): siRNA sense strand
ugcauguuauugagaagaa

SEQ ID NO: 1758664 - RNA, 19 nt, Homo sapiens
  misc_RNA (1)...(19): siRNA sense strand
uuacaggagauuucaaaca

SEQ ID NO: 1758665 - RNA, 19 nt, Homo sapiens
  misc_RNA (1)...(19): siRNA sense strand
aaccucaaguggacauguu

SEQ ID NO: 1758666 - RNA, 19 nt, Homo sapiens
  misc_RNA (1)...(19): siRNA sense strand
ucaggugccuucgacagau

SEQ ID NO: 1758667 - RNA, 19 nt, Homo sapiens
  misc_RNA (1)...(19): siRNA sense strand
ggacuuccaccaguugagu

SEQ ID NO: 1758668 - RNA, 19 nt, Homo sapiens
  misc_RNA (1)...(19): siRNA sense strand
gcauuaguggucucuguca

SEQ ID NO: 1758669 - RNA, 19 nt, Homo sapiens
  misc_RNA (1)...(19): siRNA sense strand
ccaggaaauagaacugaga

SEQ ID NO: 1758670 - RNA, 19 nt, Homo sapiens
  misc_RNA (1)...(19): siRNA sense strand
ggaaggugacaggaauguu

SEQ ID NO: 1758671 - RNA, 19 nt, Homo sapiens
  misc_RNA (1)...(19): siRNA sense strand
ggaaaaggagcugguagaa

SEQ ID NO: 1758672 - RNA, 19 nt, Homo sapiens
  misc_RNA (1)...(19): siRNA sense strand
ugaagcagagcuggaaaug

SEQ ID NO: 1758673 - RNA, 19 nt, Homo sapiens
  misc_RNA (1)...(19): siRNA sense strand
augcugagguacaccaaug

SEQ ID NO: 1758674 - RNA, 19 nt, Homo sapiens
  misc_RNA (1)...(19): siRNA sense strand
caggugccuucgacagaug

SEQ ID NO: 1758675 - RNA, 19 nt, Homo sapiens
  misc_RNA (1)...(19): siRNA sense strand
cauuaguggucucugucaa

SEQ ID NO: 1758676 - RNA, 19 nt, Homo sapiens
  misc_RNA (1)...(19): siRNA sense strand
ugacacuuacaaggcauua

SEQ ID NO: 1758677 - RNA, 19 nt, Homo sapiens
  misc_RNA (1)...(19): siRNA sense strand
aaaaucugcugcugugguu

SEQ ID NO: 1758678 - RNA, 19 nt, Homo sapiens
  misc_RNA (1)...(19): siRNA sense strand
gucccgagcaucacuacaa

SEQ ID NO: 1758679 - RNA, 19 nt, Homo sapiens
  misc_RNA (1)...(19): siRNA sense strand
acauggagaagacuguauu

SEQ ID NO: 1758680 - RNA, 19 nt, Homo sapiens
  misc_RNA (1)...(19): siRNA sense strand
uuauaaaccacccuaugga

SEQ ID NO: 1758681 - RNA, 19 nt, Homo sapiens
  misc_RNA (1)...(19): siRNA sense strand
cauuaagggacauggagaa

SEQ ID NO: 1758682 - RNA, 19 nt, Homo sapiens
  misc_RNA (1)...(19): siRNA sense strand
guagaacgucaaccucaag

SEQ ID NO: 1758683 - RNA, 19 nt, Homo sapiens
  misc_RNA (1)...(19): siRNA sense strand
gagugucggagggaacuaa

SEQ ID NO: 1758684 - RNA, 19 nt, Homo sapiens
  misc_RNA (1)...(19): siRNA sense strand
gcucaugucaccgauccaa

SEQ ID NO: 1758685 - RNA, 19 nt, Homo sapiens
  misc_RNA (1)...(19): siRNA sense strand
cacaggagcuucacaauaa

SEQ ID NO: 1758686 - RNA, 19 nt, Homo sapiens
  misc_RNA (1)...(19): siRNA sense strand
gcaagugucccaagauuua

SEQ ID NO: 1758687 - RNA, 19 nt, Homo sapiens
  misc_RNA (1)...(19): siRNA sense strand
ccacagagcuccaaaguag

SEQ ID NO: 1758688 - RNA, 19 nt, Homo sapiens
  misc_RNA (1)...(19): siRNA sense strand
ucaaacagccuucucauua

SEQ ID NO: 1758689 - RNA, 19 nt, Homo sapiens
  misc_RNA (1)...(19): siRNA sense strand
caaacagccuucucauuaa

SEQ ID NO: 1758690 - RNA, 19 nt, Homo sapiens
  misc_RNA (1)...(19): siRNA sense strand
gcacaggagcuucacaaua

SEQ ID NO: 1758691 - RNA, 19 nt, Homo sapiens
  misc_RNA (1)...(19): siRNA sense strand
ggagaagacuguauugaag

SEQ ID NO: 1758692 - RNA, 19 nt, Homo sapiens
  misc_RNA (1)...(19): siRNA sense strand
gagcaagugucccaagauu

SEQ ID NO: 1758693 - RNA, 19 nt, Homo sapiens
  misc_RNA (1)...(19): siRNA sense strand
gaaauagaacugagaguga

SEQ ID NO: 1758694 - RNA, 19 nt, Homo sapiens
  misc_RNA (1)...(19): siRNA sense strand
aagcagagcuggaaauguu

SEQ ID NO: 1758695 - RNA, 19 nt, Homo sapiens
  misc_RNA (1)...(19): siRNA sense strand
gaacuaaugcaacuggaaa

SEQ ID NO: 1758696 - RNA, 19 nt, Homo sapiens
  misc_RNA (1)...(19): siRNA sense strand
gcaaagccucccucugaua

SEQ ID NO: 1758697 - RNA, 19 nt, Homo sapiens
  misc_RNA (1)...(19): siRNA sense strand
gaagaaaaggugcauguua

SEQ ID NO: 1758698 - RNA, 19 nt, Homo sapiens
  misc_RNA (1)...(19): siRNA sense strand
cagcugaacucugauauca

SEQ ID NO: 1758699 - RNA, 19 nt, Homo sapiens
  misc_RNA (1)...(19): siRNA sense strand
gauaucagcgccaucacua

SEQ ID NO: 1758700 - RNA, 19 nt, Homo sapiens
  misc_RNA (1)...(19): siRNA sense strand
gcaaggaauuucugcaaac

SEQ ID NO: 1758701 - RNA, 19 nt, Homo sapiens
  misc_RNA (1)...(19): siRNA sense strand
ugcaacagcugaacucuga

SEQ ID NO: 1758702 - RNA, 19 nt, Homo sapiens
  misc_RNA (1)...(19): siRNA sense strand
gcacucaggccaacaacuu

SEQ ID NO: 1758703 - RNA, 19 nt, Homo sapiens
  misc_RNA (1)...(19): siRNA sense strand
gaagagacugcaggagaua

SEQ ID NO: 1758704 - RNA, 19 nt, Homo sapiens
  misc_RNA (1)...(19): siRNA sense strand
gagaagaaacucaaacagu

SEQ ID NO: 1758705 - RNA, 19 nt, Homo sapiens
  misc_RNA (1)...(19): siRNA sense strand
ggagggaacuaaugcaacu

SEQ ID NO: 1758706 - RNA, 19 nt, Homo sapiens
  misc_RNA (1)...(19): siRNA sense strand
ggaccagccuccugcaaca

SEQ ID NO: 1758707 - RNA, 19 nt, Homo sapiens
  misc_RNA (1)...(19): siRNA sense strand
gaaggugacaggaauguuc

SEQ ID NO: 1758708 - RNA, 19 nt, Homo sapiens
  misc_RNA (1)...(19): siRNA sense strand
caacagcugaacucugaua

SEQ ID NO: 1758709 - RNA, 19 nt, Homo sapiens
  misc_RNA (1)...(19): siRNA sense strand
uggcaaagccucccucuga

SEQ ID NO: 1758710 - RNA, 19 nt, Homo sapiens
  misc_RNA (1)...(19): siRNA sense strand
aaauagaacugagagugaa

SEQ ID NO: 1758711 - RNA, 19 nt, Homo sapiens
  misc_RNA (1)...(19): siRNA sense strand
ugaagagacugcaggagau

SEQ ID NO: 1758712 - RNA, 19 nt, Homo sapiens
  misc_RNA (1)...(19): siRNA sense strand
gguagaacgucaaccucaa

SEQ ID NO: 1758713 - RNA, 19 nt, Homo sapiens
  misc_RNA (1)...(19): siRNA sense strand
cuauggaaagcuacuauua

SEQ ID NO: 1758714 - RNA, 19 nt, Homo sapiens
  misc_RNA (1)...(19): siRNA sense strand
caaagccucccucugauau

SEQ ID NO: 1758715 - RNA, 19 nt, Homo sapiens
  misc_RNA (1)...(19): siRNA sense strand
ccucugauauccaggaaau

SEQ ID NO: 1758716 - RNA, 19 nt, Homo sapiens
  misc_RNA (1)...(19): siRNA sense strand
gagcuggaaauguuaaaga

SEQ ID NO: 1758717 - RNA, 19 nt, Homo sapiens
  misc_RNA (1)...(19): siRNA sense strand
aaacagccuucucauuaag

SEQ ID NO: 1758718 - RNA, 19 nt, Homo sapiens
  misc_RNA (1)...(19): siRNA sense strand
gcagagcuggaaauguuaa

SEQ ID NO: 1758719 - RNA, 19 nt, Homo sapiens
  misc_RNA (1)...(19): siRNA sense strand
gcagugagaacuacagaag

SEQ ID NO: 1758720 - RNA, 19 nt, Homo sapiens
  misc_RNA (1)...(19): siRNA sense strand
caacuuugcccgguccuuu

SEQ ID NO: 1758721 - RNA, 19 nt, Homo sapiens
  misc_RNA (1)...(19): siRNA sense strand
uaagggacauggagaagac

SEQ ID NO: 1758722 - RNA, 19 nt, Homo sapiens
  misc_RNA (1)...(19): siRNA sense strand
gcacggaugguggcaaaga

SEQ ID NO: 1758723 - RNA, 19 nt, Homo sapiens
  misc_RNA (1)...(19): siRNA sense strand
ggacauggagaagacugua

SEQ ID NO: 1758724 - RNA, 19 nt, Homo sapiens
  misc_RNA (1)...(19): siRNA sense strand
cgacagaugggagaugauu

SEQ ID NO: 1758725 - RNA, 19 nt, Homo sapiens
  misc_RNA (1)...(19): siRNA sense strand
ggaacuaaugcaacuggaa

SEQ ID NO: 1758726 - RNA, 19 nt, Homo sapiens
  misc_RNA (1)...(19): siRNA sense strand
ggcaaagccucccucugau

SEQ ID NO: 1758727 - RNA, 19 nt, Homo sapiens
  misc_RNA (1)...(19): siRNA sense strand
caucacuacuuggcugaaa

SEQ ID NO: 1758728 - RNA, 19 nt, Homo sapiens
  misc_RNA (1)...(19): siRNA sense strand
ggacauguuacaggagauu

SEQ ID NO: 1758729 - RNA, 19 nt, Homo sapiens
  misc_RNA (1)...(19): siRNA sense strand
uggagaagacuguauugaa

SEQ ID NO: 1758730 - RNA, 19 nt, Homo sapiens
  misc_RNA (1)...(19): siRNA sense strand
uacaggagauuucaaacag

SEQ ID NO: 1758731 - RNA, 19 nt, Homo sapiens
  misc_RNA (1)...(19): siRNA sense strand
ucagcgccaucacuacuug

SEQ ID NO: 1758732 - RNA, 19 nt, Homo sapiens
  misc_RNA (1)...(19): siRNA sense strand
aagaaaaggugcauguuau

SEQ ID NO: 1758733 - RNA, 19 nt, Homo sapiens
  misc_RNA (1)...(19): siRNA sense strand
ggaggcagaaggcucaugu

SEQ ID NO: 1758734 - RNA, 19 nt, Homo sapiens
  misc_RNA (1)...(19): siRNA sense strand
uauaaaccacccuauggaa

SEQ ID NO: 1758735 - RNA, 19 nt, Homo sapiens
  misc_RNA (1)...(19): siRNA sense strand
gcauguuauugagaagaaa

SEQ ID NO: 1758736 - RNA, 19 nt, Homo sapiens
  misc_RNA (1)...(19): siRNA sense strand
caacgugagcagcaaggaa

SEQ ID NO: 1758737 - RNA, 19 nt, Homo sapiens
  misc_RNA (1)...(19): siRNA sense strand
gaaaaggugcauguuauug

SEQ ID NO: 1758738 - RNA, 19 nt, Homo sapiens
  misc_RNA (1)...(19): siRNA sense strand
cagcaaggaauuucugcaa

SEQ ID NO: 1758739 - RNA, 19 nt, Homo sapiens
  misc_RNA (1)...(19): siRNA sense strand
uaaaccacccuauggaaag

SEQ ID NO: 1758740 - RNA, 19 nt, Homo sapiens
  misc_RNA (1)...(19): siRNA sense strand
aaaggugcauguuauugag

SEQ ID NO: 1758741 - RNA, 19 nt, Homo sapiens
  misc_RNA (1)...(19): siRNA sense strand
gaagcagagcuggaaaugu

SEQ ID NO: 1758742 - RNA, 19 nt, Homo sapiens
  misc_RNA (1)...(19): siRNA sense strand
caagugucccaagauuuaa

SEQ ID NO: 1758743 - RNA, 19 nt, Homo sapiens
  misc_RNA (1)...(19): siRNA sense strand
ccaagaaccggaggcagaa

SEQ ID NO: 1758744 - RNA, 19 nt, Homo sapiens
  misc_RNA (1)...(19): siRNA sense strand
agcaaggaauuucugcaaa

SEQ ID NO: 1758745 - RNA, 19 nt, Homo sapiens
  misc_RNA (1)...(19): siRNA sense strand
gagcagugagaacuacaga

SEQ ID NO: 1758746 - RNA, 19 nt, Homo sapiens
  misc_RNA (1)...(19): siRNA sense strand
auaaaccacccuauggaaa

SEQ ID NO: 1758747 - RNA, 19 nt, Homo sapiens
  misc_RNA (1)...(19): siRNA sense strand
gcaacccacagcaggaaga

SEQ ID NO: 1758748 - RNA, 19 nt, Homo sapiens
  misc_RNA (1)...(19): siRNA sense strand
ggagcaagugucccaagau

SEQ ID NO: 1758749 - RNA, 19 nt, Homo sapiens
  misc_RNA (1)...(19): siRNA sense strand
cacggaugguggcaaagaa

SEQ ID NO: 1758750 - RNA, 19 nt, Homo sapiens
  misc_RNA (1)...(19): siRNA sense strand
gguuagcgagugccaagaa

SEQ ID NO: 1758751 - RNA, 19 nt, Homo sapiens
  misc_RNA (1)...(19): siRNA sense strand
ugauauccaggaaauagaa

SEQ ID NO: 1758752 - RNA, 19 nt, Homo sapiens
  misc_RNA (1)...(19): siRNA sense strand
gagcagcaaggaauuucug

SEQ ID NO: 1758753 - RNA, 19 nt, Homo sapiens
  misc_RNA (1)...(19): siRNA sense strand
aggcacggaugguggcaaa

SEQ ID NO: 1758754 - RNA, 19 nt, Homo sapiens
  misc_RNA (1)...(19): siRNA sense strand
gggacuggccgguaucaca

SEQ ID NO: 1758755 - RNA, 19 nt, Homo sapiens
  misc_RNA (1)...(19): siRNA sense strand
uaaugcaacuggaaaagga

SEQ ID NO: 1758756 - RNA, 19 nt, Homo sapiens
  misc_RNA (1)...(19): siRNA sense strand
gcuggaaauguuaaagaug

SEQ ID NO: 1758757 - RNA, 19 nt, Homo sapiens
  misc_RNA (1)...(19): siRNA sense strand
ucagagcagugagaacuac

SEQ ID NO: 1758758 - RNA, 19 nt, Homo sapiens
  misc_RNA (1)...(19): siRNA sense strand
gcccagcuucgacgaggua

SEQ ID NO: 1758759 - RNA, 19 nt, Homo sapiens
  misc_RNA (1)...(19): siRNA sense strand
acagaugggagaugauuca

SEQ ID NO: 1758760 - RNA, 19 nt, Homo sapiens
  misc_RNA (1)...(19): siRNA sense strand
ugcauguuauugagaagaa

SEQ ID NO: 1758761 - RNA, 19 nt, Homo sapiens
  misc_RNA (1)...(19): siRNA sense strand
uuacaggagauuucaaaca

SEQ ID NO: 1758762 - RNA, 19 nt, Homo sapiens
  misc_RNA (1)...(19): siRNA sense strand
aaccucaaguggacauguu

SEQ ID NO: 1758763 - RNA, 19 nt, Homo sapiens
  misc_RNA (1)...(19): siRNA sense strand
ggacuuccaccaguugagu

SEQ ID NO: 1758764 - RNA, 19 nt, Homo sapiens
  misc_RNA (1)...(19): siRNA sense strand
ucaggugccuucgacagau

SEQ ID NO: 1758765 - RNA, 19 nt, Homo sapiens
  misc_RNA (1)...(19): siRNA sense strand
gcauuaguggucucuguca

SEQ ID NO: 1758766 - RNA, 19 nt, Homo sapiens
  misc_RNA (1)...(19): siRNA sense strand
ccaggaaauagaacugaga

SEQ ID NO: 1758767 - RNA, 19 nt, Homo sapiens
  misc_RNA (1)...(19): siRNA sense strand
ggaaaaggagcugguagaa

SEQ ID NO: 1758768 - RNA, 19 nt, Homo sapiens
  misc_RNA (1)...(19): siRNA sense strand
ggaaggugacaggaauguu

SEQ ID NO: 1758769 - RNA, 19 nt, Homo sapiens
  misc_RNA (1)...(19): siRNA sense strand
ugaagcagagcuggaaaug

SEQ ID NO: 1758770 - RNA, 19 nt, Homo sapiens
  misc_RNA (1)...(19): siRNA sense strand
augcugagguacaccaaug

SEQ ID NO: 1758771 - RNA, 19 nt, Homo sapiens
  misc_RNA (1)...(19): siRNA sense strand
caggugccuucgacagaug

SEQ ID NO: 1758772 - RNA, 19 nt, Homo sapiens
  misc_RNA (1)...(19): siRNA sense strand
cauuaguggucucugucaa

SEQ ID NO: 1758773 - RNA, 19 nt, Homo sapiens
  misc_RNA (1)...(19): siRNA sense strand
ugacacuuacaaggcauua

SEQ ID NO: 1758774 - RNA, 19 nt, Homo sapiens
  misc_RNA (1)...(19): siRNA sense strand
aaaaucugcugcugugguu

SEQ ID NO: 1758775 - RNA, 19 nt, Homo sapiens
  misc_RNA (1)...(19): siRNA sense strand
gcucaugucaccgauccaa

SEQ ID NO: 1758776 - RNA, 19 nt, Homo sapiens
  misc_RNA (1)...(19): siRNA sense strand
acauggagaagacuguauu

SEQ ID NO: 1758777 - RNA, 19 nt, Homo sapiens
  misc_RNA (1)...(19): siRNA sense strand
cauuaagggacauggagaa

SEQ ID NO: 1758778 - RNA, 19 nt, Homo sapiens
  misc_RNA (1)...(19): siRNA sense strand
guagaacgucaaccucaag

SEQ ID NO: 1758779 - RNA, 19 nt, Homo sapiens
  misc_RNA (1)...(19): siRNA sense strand
uuauaaaccacccuaugga

SEQ ID NO: 1758780 - RNA, 19 nt, Homo sapiens
  misc_RNA (1)...(19): siRNA sense strand
gagugucggagggaacuaa

SEQ ID NO: 1758781 - RNA, 19 nt, Homo sapiens
  misc_RNA (1)...(19): siRNA sense strand
uauggaaagcuacuauuac

SEQ ID NO: 1758782 - RNA, 19 nt, Homo sapiens
  misc_RNA (1)...(19): siRNA sense strand
caaggaauuucugcaaacc

SEQ ID NO: 1758783 - RNA, 19 nt, Homo sapiens
  misc_RNA (1)...(19): siRNA sense strand
acacuuacaaggcauuagu

SEQ ID NO: 1758784 - RNA, 19 nt, Homo sapiens
  misc_RNA (1)...(19): siRNA sense strand
cacaggagcuucacaauaa

SEQ ID NO: 1758785 - RNA, 19 nt, Homo sapiens
  misc_RNA (1)...(19): siRNA sense strand
gcaagugucccaagauuua

SEQ ID NO: 1758786 - RNA, 19 nt, Homo sapiens
  misc_RNA (1)...(19): siRNA sense strand
ccacagagcuccaaaguag

SEQ ID NO: 1758787 - RNA, 19 nt, Homo sapiens
  misc_RNA (1)...(19): siRNA sense strand
ucaaacagccuucucauua

SEQ ID NO: 1758788 - RNA, 19 nt, Homo sapiens
  misc_RNA (1)...(19): siRNA sense strand
caaacagccuucucauuaa

SEQ ID NO: 1758789 - RNA, 19 nt, Homo sapiens
  misc_RNA (1)...(19): siRNA sense strand
gcacaggagcuucacaaua

SEQ ID NO: 1758790 - RNA, 19 nt, Homo sapiens
  misc_RNA (1)...(19): siRNA sense strand
ggagaagacuguauugaag

SEQ ID NO: 1758791 - RNA, 19 nt, Homo sapiens
  misc_RNA (1)...(19): siRNA sense strand
gagcaagugucccaagauu

SEQ ID NO: 1758792 - RNA, 19 nt, Homo sapiens
  misc_RNA (1)...(19): siRNA sense strand
gagcaucacuacaagcaaa

SEQ ID NO: 1758793 - RNA, 19 nt, Homo sapiens
  misc_RNA (1)...(19): siRNA sense strand
gaaauagaacugagaguga

SEQ ID NO: 1758794 - RNA, 19 nt, Homo sapiens
  misc_RNA (1)...(19): siRNA sense strand
aagcagagcuggaaauguu

SEQ ID NO: 1758795 - RNA, 19 nt, Homo sapiens
  misc_RNA (1)...(19): siRNA sense strand
gaacuaaugcaacuggaaa

SEQ ID NO: 1758796 - RNA, 19 nt, Homo sapiens
  misc_RNA (1)...(19): siRNA sense strand
gcaaagccucccucugaua

SEQ ID NO: 1758797 - RNA, 19 nt, Homo sapiens
  misc_RNA (1)...(19): siRNA sense strand
gaagaaaaggugcauguua

SEQ ID NO: 1758798 - RNA, 19 nt, Homo sapiens
  misc_RNA (1)...(19): siRNA sense strand
cagcugaacucugauauca

SEQ ID NO: 1758799 - RNA, 19 nt, Homo sapiens
  misc_RNA (1)...(19): siRNA sense strand
gauaucagcgccaucacua

SEQ ID NO: 1758800 - RNA, 19 nt, Homo sapiens
  misc_RNA (1)...(19): siRNA sense strand
gcaaggaauuucugcaaac

SEQ ID NO: 1758801 - RNA, 19 nt, Homo sapiens
  misc_RNA (1)...(19): siRNA sense strand
ugcaacagcugaacucuga

SEQ ID NO: 1758802 - RNA, 19 nt, Homo sapiens
  misc_RNA (1)...(19): siRNA sense strand
gcacucaggccaacaacuu

SEQ ID NO: 1758803 - RNA, 19 nt, Homo sapiens
  misc_RNA (1)...(19): siRNA sense strand
gaagagacugcaggagaua

SEQ ID NO: 1758804 - RNA, 19 nt, Homo sapiens
  misc_RNA (1)...(19): siRNA sense strand
gagaagaaacucaaacagu

SEQ ID NO: 1758805 - RNA, 19 nt, Homo sapiens
  misc_RNA (1)...(19): siRNA sense strand
ggagggaacuaaugcaacu

SEQ ID NO: 1758806 - RNA, 19 nt, Homo sapiens
  misc_RNA (1)...(19): siRNA sense strand
ggaccagccuccugcaaca

SEQ ID NO: 1758807 - RNA, 19 nt, Homo sapiens
  misc_RNA (1)...(19): siRNA sense strand
gaaggugacaggaauguuc

SEQ ID NO: 1758808 - RNA, 19 nt, Homo sapiens
  misc_RNA (1)...(19): siRNA sense strand
caacagcugaacucugaua

SEQ ID NO: 1758809 - RNA, 19 nt, Homo sapiens
  misc_RNA (1)...(19): siRNA sense strand
uggcaaagccucccucuga

SEQ ID NO: 1758810 - RNA, 19 nt, Homo sapiens
  misc_RNA (1)...(19): siRNA sense strand
aaauagaacugagagugaa

SEQ ID NO: 1758811 - RNA, 19 nt, Homo sapiens
  misc_RNA (1)...(19): siRNA sense strand
ugaagagacugcaggagau

SEQ ID NO: 1758812 - RNA, 19 nt, Homo sapiens
  misc_RNA (1)...(19): siRNA sense strand
gguagaacgucaaccucaa

SEQ ID NO: 1758813 - RNA, 19 nt, Homo sapiens
  misc_RNA (1)...(19): siRNA sense strand
cuauggaaagcuacuauua

SEQ ID NO: 1758814 - RNA, 19 nt, Homo sapiens
  misc_RNA (1)...(19): siRNA sense strand
caaagccucccucugauau

SEQ ID NO: 1758815 - RNA, 19 nt, Homo sapiens
  misc_RNA (1)...(19): siRNA sense strand
ccucugauauccaggaaau

SEQ ID NO: 1758816 - RNA, 19 nt, Homo sapiens
  misc_RNA (1)...(19): siRNA sense strand
gagcuggaaauguuaaaga

SEQ ID NO: 1758817 - RNA, 19 nt, Homo sapiens
  misc_RNA (1)...(19): siRNA sense strand
aaacagccuucucauuaag

SEQ ID NO: 1758818 - RNA, 19 nt, Homo sapiens
  misc_RNA (1)...(19): siRNA sense strand
gcagagcuggaaauguuaa

SEQ ID NO: 1758819 - RNA, 19 nt, Homo sapiens
  misc_RNA (1)...(19): siRNA sense strand
gcagugagaacuacagaag

SEQ ID NO: 1758820 - RNA, 19 nt, Homo sapiens
  misc_RNA (1)...(19): siRNA sense strand
caacuuugcccgguccuuu

SEQ ID NO: 1758821 - RNA, 19 nt, Homo sapiens
  misc_RNA (1)...(19): siRNA sense strand
uaagggacauggagaagac

SEQ ID NO: 1758822 - RNA, 19 nt, Homo sapiens
  misc_RNA (1)...(19): siRNA sense strand
gcacggaugguggcaaaga

SEQ ID NO: 1758823 - RNA, 19 nt, Homo sapiens
  misc_RNA (1)...(19): siRNA sense strand
ggacauggagaagacugua

SEQ ID NO: 1758824 - RNA, 19 nt, Homo sapiens
  misc_RNA (1)...(19): siRNA sense strand
cgacagaugggagaugauu

SEQ ID NO: 1758825 - RNA, 19 nt, Homo sapiens
  misc_RNA (1)...(19): siRNA sense strand
ggaacuaaugcaacuggaa

SEQ ID NO: 1758826 - RNA, 19 nt, Homo sapiens
  misc_RNA (1)...(19): siRNA sense strand
ggcaaagccucccucugau

SEQ ID NO: 1758827 - RNA, 19 nt, Homo sapiens
  misc_RNA (1)...(19): siRNA sense strand
caucacuacuuggcugaaa

SEQ ID NO: 1758828 - RNA, 19 nt, Homo sapiens
  misc_RNA (1)...(19): siRNA sense strand
ggacauguuacaggagauu

SEQ ID NO: 1758829 - RNA, 19 nt, Homo sapiens
  misc_RNA (1)...(19): siRNA sense strand
aauggaaggugacaggaau

SEQ ID NO: 1758830 - RNA, 19 nt, Homo sapiens
  misc_RNA (1)...(19): siRNA sense strand
uggagaagacuguauugaa

SEQ ID NO: 1758831 - RNA, 19 nt, Homo sapiens
  misc_RNA (1)...(19): siRNA sense strand
uacaggagauuucaaacag

SEQ ID NO: 1758832 - RNA, 19 nt, Homo sapiens
  misc_RNA (1)...(19): siRNA sense strand
ucagcgccaucacuacuug

SEQ ID NO: 1758833 - RNA, 19 nt, Homo sapiens
  misc_RNA (1)...(19): siRNA sense strand
aagaaaaggugcauguuau

SEQ ID NO: 1758834 - RNA, 19 nt, Homo sapiens
  misc_RNA (1)...(19): siRNA sense strand
uauaaaccacccuauggaa

SEQ ID NO: 1758835 - RNA, 19 nt, Homo sapiens
  misc_RNA (1)...(19): siRNA sense strand
ggaggcagaaggcucaugu

SEQ ID NO: 1758836 - RNA, 19 nt, Homo sapiens
  misc_RNA (1)...(19): siRNA sense strand
gcauguuauugagaagaaa

SEQ ID NO: 1758837 - RNA, 19 nt, Homo sapiens
  misc_RNA (1)...(19): siRNA sense strand
caacgugagcagcaaggaa

SEQ ID NO: 1758838 - RNA, 19 nt, Homo sapiens
  misc_RNA (1)...(19): siRNA sense strand
gaaaaggugcauguuauug

SEQ ID NO: 1758839 - RNA, 19 nt, Homo sapiens
  misc_RNA (1)...(19): siRNA sense strand
cagcaaggaauuucugcaa

SEQ ID NO: 1758840 - RNA, 19 nt, Homo sapiens
  misc_RNA (1)...(19): siRNA sense strand
aaaggugcauguuauugag

SEQ ID NO: 1758841 - RNA, 19 nt, Homo sapiens
  misc_RNA (1)...(19): siRNA sense strand
uaaaccacccuauggaaag

SEQ ID NO: 1758842 - RNA, 19 nt, Homo sapiens
  misc_RNA (1)...(19): siRNA sense strand
gaagcagagcuggaaaugu

SEQ ID NO: 1758843 - RNA, 19 nt, Homo sapiens
  misc_RNA (1)...(19): siRNA sense strand
caagugucccaagauuuaa

SEQ ID NO: 1758844 - RNA, 19 nt, Homo sapiens
  misc_RNA (1)...(19): siRNA sense strand
ccaagaaccggaggcagaa

SEQ ID NO: 1758845 - RNA, 19 nt, Homo sapiens
  misc_RNA (1)...(19): siRNA sense strand
agcaaggaauuucugcaaa

SEQ ID NO: 1758846 - RNA, 19 nt, Homo sapiens
  misc_RNA (1)...(19): siRNA sense strand
gagcagugagaacuacaga

SEQ ID NO: 1758847 - RNA, 19 nt, Homo sapiens
  misc_RNA (1)...(19): siRNA sense strand
gguuagcgagugccaagaa

SEQ ID NO: 1758848 - RNA, 19 nt, Homo sapiens
  misc_RNA (1)...(19): siRNA sense strand
ucacuacaagcaaauggaa

SEQ ID NO: 1758849 - RNA, 19 nt, Homo sapiens
  misc_RNA (1)...(19): siRNA sense strand
ggagcaagugucccaagau

SEQ ID NO: 1758850 - RNA, 19 nt, Homo sapiens
  misc_RNA (1)...(19): siRNA sense strand
auaaaccacccuauggaaa

SEQ ID NO: 1758851 - RNA, 19 nt, Homo sapiens
  misc_RNA (1)...(19): siRNA sense strand
cacggaugguggcaaagaa

SEQ ID NO: 1758852 - RNA, 19 nt, Homo sapiens
  misc_RNA (1)...(19): siRNA sense strand
gcaacccacagcaggaaga

SEQ ID NO: 1758853 - RNA, 19 nt, Homo sapiens
  misc_RNA (1)...(19): siRNA sense strand
ugauauccaggaaauagaa

SEQ ID NO: 1758854 - RNA, 19 nt, Homo sapiens
  misc_RNA (1)...(19): siRNA sense strand
gagcagcaaggaauuucug

SEQ ID NO: 1758855 - RNA, 19 nt, Homo sapiens
  misc_RNA (1)...(19): siRNA sense strand
uaaugcaacuggaaaagga

SEQ ID NO: 1758856 - RNA, 19 nt, Homo sapiens
  misc_RNA (1)...(19): siRNA sense strand
gggacuggccgguaucaca

SEQ ID NO: 1758857 - RNA, 19 nt, Homo sapiens
  misc_RNA (1)...(19): siRNA sense strand
aggcacggaugguggcaaa

SEQ ID NO: 1758858 - RNA, 19 nt, Homo sapiens
  misc_RNA (1)...(19): siRNA sense strand
gcuggaaauguuaaagaug

SEQ ID NO: 1758859 - RNA, 19 nt, Homo sapiens
  misc_RNA (1)...(19): siRNA sense strand
ucagagcagugagaacuac

SEQ ID NO: 1758860 - RNA, 19 nt, Homo sapiens
  misc_RNA (1)...(19): siRNA sense strand
acagaugggagaugauuca

SEQ ID NO: 1758861 - RNA, 19 nt, Homo sapiens
  misc_RNA (1)...(19): siRNA sense strand
gcccagcuucgacgaggua

SEQ ID NO: 1758862 - RNA, 19 nt, Homo sapiens
  misc_RNA (1)...(19): siRNA sense strand
ugcauguuauugagaagaa

SEQ ID NO: 1758863 - RNA, 19 nt, Homo sapiens
  misc_RNA (1)...(19): siRNA sense strand
uuacaggagauuucaaaca

SEQ ID NO: 1758864 - RNA, 19 nt, Homo sapiens
  misc_RNA (1)...(19): siRNA sense strand
aaccucaaguggacauguu

SEQ ID NO: 1758865 - RNA, 19 nt, Homo sapiens
  misc_RNA (1)...(19): siRNA sense strand
ucaggugccuucgacagau

SEQ ID NO: 1758866 - RNA, 19 nt, Homo sapiens
  misc_RNA (1)...(19): siRNA sense strand
ggacuuccaccaguugagu

SEQ ID NO: 1758867 - RNA, 19 nt, Homo sapiens
  misc_RNA (1)...(19): siRNA sense strand
gcauuaguggucucuguca

SEQ ID NO: 1758868 - RNA, 19 nt, Homo sapiens
  misc_RNA (1)...(19): siRNA sense strand
ccaggaaauagaacugaga

SEQ ID NO: 1758869 - RNA, 19 nt, Homo sapiens
  misc_RNA (1)...(19): siRNA sense strand
ggaaggugacaggaauguu

SEQ ID NO: 1758870 - RNA, 19 nt, Homo sapiens
  misc_RNA (1)...(19): siRNA sense strand
ggaaaaggagcugguagaa

SEQ ID NO: 1758871 - RNA, 19 nt, Homo sapiens
  misc_RNA (1)...(19): siRNA sense strand
ugaagcagagcuggaaaug

SEQ ID NO: 1758872 - RNA, 19 nt, Homo sapiens
  misc_RNA (1)...(19): siRNA sense strand
augcugagguacaccaaug

SEQ ID NO: 1758873 - RNA, 19 nt, Homo sapiens
  misc_RNA (1)...(19): siRNA sense strand
caggugccuucgacagaug

SEQ ID NO: 1758874 - RNA, 19 nt, Homo sapiens
  misc_RNA (1)...(19): siRNA sense strand
cauuaguggucucugucaa

SEQ ID NO: 1758875 - RNA, 19 nt, Homo sapiens
  misc_RNA (1)...(19): siRNA sense strand
ugacacuuacaaggcauua

SEQ ID NO: 1758876 - RNA, 19 nt, Homo sapiens
  misc_RNA (1)...(19): siRNA sense strand
aaaaucugcugcugugguu

SEQ ID NO: 1758877 - RNA, 19 nt, Homo sapiens
  misc_RNA (1)...(19): siRNA sense strand
gucccgagcaucacuacaa

SEQ ID NO: 1758878 - RNA, 19 nt, Homo sapiens
  misc_RNA (1)...(19): siRNA sense strand
acauggagaagacuguauu

SEQ ID NO: 1758879 - RNA, 19 nt, Homo sapiens
  misc_RNA (1)...(19): siRNA sense strand
uuauaaaccacccuaugga

SEQ ID NO: 1758880 - RNA, 19 nt, Homo sapiens
  misc_RNA (1)...(19): siRNA sense strand
cauuaagggacauggagaa

SEQ ID NO: 1758881 - RNA, 19 nt, Homo sapiens
  misc_RNA (1)...(19): siRNA sense strand
guagaacgucaaccucaag

SEQ ID NO: 1758882 - RNA, 19 nt, Homo sapiens
  misc_RNA (1)...(19): siRNA sense strand
gagugucggagggaacuaa

SEQ ID NO: 1758883 - RNA, 19 nt, Homo sapiens
  misc_RNA (1)...(19): siRNA sense strand
gcucaugucaccgauccaa

SEQ ID NO: 1758884 - RNA, 19 nt, Homo sapiens
  misc_RNA (1)...(19): siRNA sense strand
cacaggagcuucacaauaa

SEQ ID NO: 1758885 - RNA, 19 nt, Homo sapiens
  misc_RNA (1)...(19): siRNA sense strand
gcaagugucccaagauuua

SEQ ID NO: 1758886 - RNA, 19 nt, Homo sapiens
  misc_RNA (1)...(19): siRNA sense strand
ccacagagcuccaaaguag

SEQ ID NO: 1758887 - RNA, 19 nt, Homo sapiens
  misc_RNA (1)...(19): siRNA sense strand
ucaaacagccuucucauua

SEQ ID NO: 1758888 - RNA, 19 nt, Homo sapiens
  misc_RNA (1)...(19): siRNA sense strand
caaacagccuucucauuaa

SEQ ID NO: 1758889 - RNA, 19 nt, Homo sapiens
  misc_RNA (1)...(19): siRNA sense strand
gcacaggagcuucacaaua

SEQ ID NO: 1758890 - RNA, 19 nt, Homo sapiens
  misc_RNA (1)...(19): siRNA sense strand
ggagaagacuguauugaag

SEQ ID NO: 1758891 - RNA, 19 nt, Homo sapiens
  misc_RNA (1)...(19): siRNA sense strand
gagcaagugucccaagauu

SEQ ID NO: 1758892 - RNA, 19 nt, Homo sapiens
  misc_RNA (1)...(19): siRNA sense strand
gagcaucacuacaagcaaa

SEQ ID NO: 1758893 - RNA, 19 nt, Homo sapiens
  misc_RNA (1)...(19): siRNA sense strand
gaaauagaacugagaguga

SEQ ID NO: 1758894 - RNA, 19 nt, Homo sapiens
  misc_RNA (1)...(19): siRNA sense strand
aagcagagcuggaaauguu

SEQ ID NO: 1758895 - RNA, 19 nt, Homo sapiens
  misc_RNA (1)...(19): siRNA sense strand
gaacuaaugcaacuggaaa

SEQ ID NO: 1758896 - RNA, 19 nt, Homo sapiens
  misc_RNA (1)...(19): siRNA sense strand
gcaaagccucccucugaua

SEQ ID NO: 1758897 - RNA, 19 nt, Homo sapiens
  misc_RNA (1)...(19): siRNA sense strand
gaagaaaaggugcauguua

SEQ ID NO: 1758898 - RNA, 19 nt, Homo sapiens
  misc_RNA (1)...(19): siRNA sense strand
cagcugaacucugauauca

SEQ ID NO: 1758899 - RNA, 19 nt, Homo sapiens
  misc_RNA (1)...(19): siRNA sense strand
gauaucagcgccaucacua

SEQ ID NO: 1758900 - RNA, 19 nt, Homo sapiens
  misc_RNA (1)...(19): siRNA sense strand
gcaaggaauuucugcaaac

SEQ ID NO: 1758901 - RNA, 19 nt, Homo sapiens
  misc_RNA (1)...(19): siRNA sense strand
ugcaacagcugaacucuga

SEQ ID NO: 1758902 - RNA, 19 nt, Homo sapiens
  misc_RNA (1)...(19): siRNA sense strand
gcacucaggccaacaacuu

SEQ ID NO: 1758903 - RNA, 19 nt, Homo sapiens
  misc_RNA (1)...(19): siRNA sense strand
gaagagacugcaggagaua

SEQ ID NO: 1758904 - RNA, 19 nt, Homo sapiens
  misc_RNA (1)...(19): siRNA sense strand
gagaagaaacucaaacagu

SEQ ID NO: 1758905 - RNA, 19 nt, Homo sapiens
  misc_RNA (1)...(19): siRNA sense strand
ggagggaacuaaugcaacu

SEQ ID NO: 1758906 - RNA, 19 nt, Homo sapiens
  misc_RNA (1)...(19): siRNA sense strand
ggaccagccuccugcaaca

SEQ ID NO: 1758907 - RNA, 19 nt, Homo sapiens
  misc_RNA (1)...(19): siRNA sense strand
gaaggugacaggaauguuc

SEQ ID NO: 1758908 - RNA, 19 nt, Homo sapiens
  misc_RNA (1)...(19): siRNA sense strand
caacagcugaacucugaua

SEQ ID NO: 1758909 - RNA, 19 nt, Homo sapiens
  misc_RNA (1)...(19): siRNA sense strand
uggcaaagccucccucuga

SEQ ID NO: 1758910 - RNA, 19 nt, Homo sapiens
  misc_RNA (1)...(19): siRNA sense strand
aaauagaacugagagugaa

SEQ ID NO: 1758911 - RNA, 19 nt, Homo sapiens
  misc_RNA (1)...(19): siRNA sense strand
ugaagagacugcaggagau

SEQ ID NO: 1758912 - RNA, 19 nt, Homo sapiens
  misc_RNA (1)...(19): siRNA sense strand
gguagaacgucaaccucaa

SEQ ID NO: 1758913 - RNA, 19 nt, Homo sapiens
  misc_RNA (1)...(19): siRNA sense strand
cuauggaaagcuacuauua

SEQ ID NO: 1758914 - RNA, 19 nt, Homo sapiens
  misc_RNA (1)...(19): siRNA sense strand
caaagccucccucugauau

SEQ ID NO: 1758915 - RNA, 19 nt, Homo sapiens
  misc_RNA (1)...(19): siRNA sense strand
ccucugauauccaggaaau

SEQ ID NO: 1758916 - RNA, 19 nt, Homo sapiens
  misc_RNA (1)...(19): siRNA sense strand
gagcuggaaauguuaaaga

SEQ ID NO: 1758917 - RNA, 19 nt, Homo sapiens
  misc_RNA (1)...(19): siRNA sense strand
aaacagccuucucauuaag

SEQ ID NO: 1758918 - RNA, 19 nt, Homo sapiens
  misc_RNA (1)...(19): siRNA sense strand
gcagagcuggaaauguuaa

SEQ ID NO: 1758919 - RNA, 19 nt, Homo sapiens
  misc_RNA (1)...(19): siRNA sense strand
gcagugagaacuacagaag

SEQ ID NO: 1758920 - RNA, 19 nt, Homo sapiens
  misc_RNA (1)...(19): siRNA sense strand
caacuuugcccgguccuuu

SEQ ID NO: 1758921 - RNA, 19 nt, Homo sapiens
  misc_RNA (1)...(19): siRNA sense strand
uaagggacauggagaagac

SEQ ID NO: 1758922 - RNA, 19 nt, Homo sapiens
  misc_RNA (1)...(19): siRNA sense strand
gcacggaugguggcaaaga

SEQ ID NO: 1758923 - RNA, 19 nt, Homo sapiens
  misc_RNA (1)...(19): siRNA sense strand
ggacauggagaagacugua

SEQ ID NO: 1758924 - RNA, 19 nt, Homo sapiens
  misc_RNA (1)...(19): siRNA sense strand
cgacagaugggagaugauu

SEQ ID NO: 1758925 - RNA, 19 nt, Homo sapiens
  misc_RNA (1)...(19): siRNA sense strand
ggaacuaaugcaacuggaa

SEQ ID NO: 1758926 - RNA, 19 nt, Homo sapiens
  misc_RNA (1)...(19): siRNA sense strand
ggcaaagccucccucugau

SEQ ID NO: 1758927 - RNA, 19 nt, Homo sapiens
  misc_RNA (1)...(19): siRNA sense strand
caucacuacuuggcugaaa

SEQ ID NO: 1758928 - RNA, 19 nt, Homo sapiens
  misc_RNA (1)...(19): siRNA sense strand
ggacauguuacaggagauu

SEQ ID NO: 1758929 - RNA, 19 nt, Homo sapiens
  misc_RNA (1)...(19): siRNA sense strand
aauggaaggugacaggaau

SEQ ID NO: 1758930 - RNA, 19 nt, Homo sapiens
  misc_RNA (1)...(19): siRNA sense strand
uggagaagacuguauugaa

SEQ ID NO: 1758931 - RNA, 19 nt, Homo sapiens
  misc_RNA (1)...(19): siRNA sense strand
uacaggagauuucaaacag

SEQ ID NO: 1758932 - RNA, 19 nt, Homo sapiens
  misc_RNA (1)...(19): siRNA sense strand
ucagcgccaucacuacuug

SEQ ID NO: 1758933 - RNA, 19 nt, Homo sapiens
  misc_RNA (1)...(19): siRNA sense strand
aagaaaaggugcauguuau

SEQ ID NO: 1758934 - RNA, 19 nt, Homo sapiens
  misc_RNA (1)...(19): siRNA sense strand
uauaaaccacccuauggaa

SEQ ID NO: 1758935 - RNA, 19 nt, Homo sapiens
  misc_RNA (1)...(19): siRNA sense strand
ggaggcagaaggcucaugu

SEQ ID NO: 1758936 - RNA, 19 nt, Homo sapiens
  misc_RNA (1)...(19): siRNA sense strand
gcauguuauugagaagaaa

SEQ ID NO: 1758937 - RNA, 19 nt, Homo sapiens
  misc_RNA (1)...(19): siRNA sense strand
caacgugagcagcaaggaa

SEQ ID NO: 1758938 - RNA, 19 nt, Homo sapiens
  misc_RNA (1)...(19): siRNA sense strand
gaaaaggugcauguuauug

SEQ ID NO: 1758939 - RNA, 19 nt, Homo sapiens
  misc_RNA (1)...(19): siRNA sense strand
cagcaaggaauuucugcaa

SEQ ID NO: 1758940 - RNA, 19 nt, Homo sapiens
  misc_RNA (1)...(19): siRNA sense strand
aaaggugcauguuauugag

SEQ ID NO: 1758941 - RNA, 19 nt, Homo sapiens
  misc_RNA (1)...(19): siRNA sense strand
uaaaccacccuauggaaag

SEQ ID NO: 1758942 - RNA, 19 nt, Homo sapiens
  misc_RNA (1)...(19): siRNA sense strand
gaagcagagcuggaaaugu

SEQ ID NO: 1758943 - RNA, 19 nt, Homo sapiens
  misc_RNA (1)...(19): siRNA sense strand
caagugucccaagauuuaa

SEQ ID NO: 1758944 - RNA, 19 nt, Homo sapiens
  misc_RNA (1)...(19): siRNA sense strand
ccaagaaccggaggcagaa

SEQ ID NO: 1758945 - RNA, 19 nt, Homo sapiens
  misc_RNA (1)...(19): siRNA sense strand
agcaaggaauuucugcaaa

SEQ ID NO: 1758946 - RNA, 19 nt, Homo sapiens
  misc_RNA (1)...(19): siRNA sense strand
gagcagugagaacuacaga

SEQ ID NO: 1758947 - RNA, 19 nt, Homo sapiens
  misc_RNA (1)...(19): siRNA sense strand
gguuagcgagugccaagaa

SEQ ID NO: 1758948 - RNA, 19 nt, Homo sapiens
  misc_RNA (1)...(19): siRNA sense strand
ucacuacaagcaaauggaa

SEQ ID NO: 1758949 - RNA, 19 nt, Homo sapiens
  misc_RNA (1)...(19): siRNA sense strand
ggagcaagugucccaagau

SEQ ID NO: 1758950 - RNA, 19 nt, Homo sapiens
  misc_RNA (1)...(19): siRNA sense strand
auaaaccacccuauggaaa

SEQ ID NO: 1758951 - RNA, 19 nt, Homo sapiens
  misc_RNA (1)...(19): siRNA sense strand
cacggaugguggcaaagaa

SEQ ID NO: 1758952 - RNA, 19 nt, Homo sapiens
  misc_RNA (1)...(19): siRNA sense strand
gcaacccacagcaggaaga

SEQ ID NO: 1758953 - RNA, 19 nt, Homo sapiens
  misc_RNA (1)...(19): siRNA sense strand
ugauauccaggaaauagaa

SEQ ID NO: 1758954 - RNA, 19 nt, Homo sapiens
  misc_RNA (1)...(19): siRNA sense strand
gagcagcaaggaauuucug

SEQ ID NO: 1758955 - RNA, 19 nt, Homo sapiens
  misc_RNA (1)...(19): siRNA sense strand
uaaugcaacuggaaaagga

SEQ ID NO: 1758956 - RNA, 19 nt, Homo sapiens
  misc_RNA (1)...(19): siRNA sense strand
gggacuggccgguaucaca

SEQ ID NO: 1758957 - RNA, 19 nt, Homo sapiens
  misc_RNA (1)...(19): siRNA sense strand
aggcacggaugguggcaaa

SEQ ID NO: 1758958 - RNA, 19 nt, Homo sapiens
  misc_RNA (1)...(19): siRNA sense strand
gcuggaaauguuaaagaug

SEQ ID NO: 1758959 - RNA, 19 nt, Homo sapiens
  misc_RNA (1)...(19): siRNA sense strand
ucagagcagugagaacuac

SEQ ID NO: 1758960 - RNA, 19 nt, Homo sapiens
  misc_RNA (1)...(19): siRNA sense strand
acagaugggagaugauuca

SEQ ID NO: 1758961 - RNA, 19 nt, Homo sapiens
  misc_RNA (1)...(19): siRNA sense strand
gcccagcuucgacgaggua

SEQ ID NO: 1758962 - RNA, 19 nt, Homo sapiens
  misc_RNA (1)...(19): siRNA sense strand
ugcauguuauugagaagaa

SEQ ID NO: 1758963 - RNA, 19 nt, Homo sapiens
  misc_RNA (1)...(19): siRNA sense strand
uuacaggagauuucaaaca

SEQ ID NO: 1758964 - RNA, 19 nt, Homo sapiens
  misc_RNA (1)...(19): siRNA sense strand
aaccucaaguggacauguu

SEQ ID NO: 1758965 - RNA, 19 nt, Homo sapiens
  misc_RNA (1)...(19): siRNA sense strand
ucaggugccuucgacagau

SEQ ID NO: 1758966 - RNA, 19 nt, Homo sapiens
  misc_RNA (1)...(19): siRNA sense strand
ggacuuccaccaguugagu

SEQ ID NO: 1758967 - RNA, 19 nt, Homo sapiens
  misc_RNA (1)...(19): siRNA sense strand
gcauuaguggucucuguca

SEQ ID NO: 1758968 - RNA, 19 nt, Homo sapiens
  misc_RNA (1)...(19): siRNA sense strand
ccaggaaauagaacugaga

SEQ ID NO: 1758969 - RNA, 19 nt, Homo sapiens
  misc_RNA (1)...(19): siRNA sense strand
ggaaggugacaggaauguu

SEQ ID NO: 1758970 - RNA, 19 nt, Homo sapiens
  misc_RNA (1)...(19): siRNA sense strand
ggaaaaggagcugguagaa

SEQ ID NO: 1758971 - RNA, 19 nt, Homo sapiens
  misc_RNA (1)...(19): siRNA sense strand
ugaagcagagcuggaaaug

SEQ ID NO: 1758972 - RNA, 19 nt, Homo sapiens
  misc_RNA (1)...(19): siRNA sense strand
augcugagguacaccaaug

SEQ ID NO: 1758973 - RNA, 19 nt, Homo sapiens
  misc_RNA (1)...(19): siRNA sense strand
caggugccuucgacagaug

SEQ ID NO: 1758974 - RNA, 19 nt, Homo sapiens
  misc_RNA (1)...(19): siRNA sense strand
cauuaguggucucugucaa

SEQ ID NO: 1758975 - RNA, 19 nt, Homo sapiens
  misc_RNA (1)...(19): siRNA sense strand
ugacacuuacaaggcauua

SEQ ID NO: 1758976 - RNA, 19 nt, Homo sapiens
  misc_RNA (1)...(19): siRNA sense strand
aaaaucugcugcugugguu

SEQ ID NO: 1758977 - RNA, 19 nt, Homo sapiens
  misc_RNA (1)...(19): siRNA sense strand
gucccgagcaucacuacaa

SEQ ID NO: 1758978 - RNA, 19 nt, Homo sapiens
  misc_RNA (1)...(19): siRNA sense strand
acauggagaagacuguauu

SEQ ID NO: 1758979 - RNA, 19 nt, Homo sapiens
  misc_RNA (1)...(19): siRNA sense strand
uuauaaaccacccuaugga

SEQ ID NO: 1758980 - RNA, 19 nt, Homo sapiens
  misc_RNA (1)...(19): siRNA sense strand
cauuaagggacauggagaa

SEQ ID NO: 1758981 - RNA, 19 nt, Homo sapiens
  misc_RNA (1)...(19): siRNA sense strand
guagaacgucaaccucaag

SEQ ID NO: 1758982 - RNA, 19 nt, Homo sapiens
  misc_RNA (1)...(19): siRNA sense strand
gagugucggagggaacuaa

SEQ ID NO: 1758983 - RNA, 19 nt, Homo sapiens
  misc_RNA (1)...(19): siRNA sense strand
gcucaugucaccgauccaa

SEQ ID NO: 1758984 - RNA, 19 nt, Homo sapiens
  misc_RNA (1)...(19): siRNA sense strand
cacaggagcuucacaauaa

SEQ ID NO: 1758985 - RNA, 19 nt, Homo sapiens
  misc_RNA (1)...(19): siRNA sense strand
gcaagugucccaagauuua

SEQ ID NO: 1758986 - RNA, 19 nt, Homo sapiens
  misc_RNA (1)...(19): siRNA sense strand
ccacagagcuccaaaguag

SEQ ID NO: 1758987 - RNA, 19 nt, Homo sapiens
  misc_RNA (1)...(19): siRNA sense strand
ucaaacagccuucucauua

SEQ ID NO: 1758988 - RNA, 19 nt, Homo sapiens
  misc_RNA (1)...(19): siRNA sense strand
caaacagccuucucauuaa

SEQ ID NO: 1758989 - RNA, 19 nt, Homo sapiens
  misc_RNA (1)...(19): siRNA sense strand
gcacaggagcuucacaaua

SEQ ID NO: 1758990 - RNA, 19 nt, Homo sapiens
  misc_RNA (1)...(19): siRNA sense strand
ggagaagacuguauugaag

SEQ ID NO: 1758991 - RNA, 19 nt, Homo sapiens
  misc_RNA (1)...(19): siRNA sense strand
gagcaagugucccaagauu

SEQ ID NO: 1758992 - RNA, 19 nt, Homo sapiens
  misc_RNA (1)...(19): siRNA sense strand
gagcaucacuacaagcaaa

SEQ ID NO: 1758993 - RNA, 19 nt, Homo sapiens
  misc_RNA (1)...(19): siRNA sense strand
gaaauagaacugagaguga

SEQ ID NO: 1758994 - RNA, 19 nt, Homo sapiens
  misc_RNA (1)...(19): siRNA sense strand
aagcagagcuggaaauguu

SEQ ID NO: 1758995 - RNA, 19 nt, Homo sapiens
  misc_RNA (1)...(19): siRNA sense strand
gaacuaaugcaacuggaaa

SEQ ID NO: 1758996 - RNA, 19 nt, Homo sapiens
  misc_RNA (1)...(19): siRNA sense strand
gcaaagccucccucugaua

SEQ ID NO: 1758997 - RNA, 19 nt, Homo sapiens
  misc_RNA (1)...(19): siRNA sense strand
gaagaaaaggugcauguua

SEQ ID NO: 1758998 - RNA, 19 nt, Homo sapiens
  misc_RNA (1)...(19): siRNA sense strand
cagcugaacucugauauca

SEQ ID NO: 1758999 - RNA, 19 nt, Homo sapiens
  misc_RNA (1)...(19): siRNA sense strand
gauaucagcgccaucacua

SEQ ID NO: 1759000 - RNA, 19 nt, Homo sapiens
  misc_RNA (1)...(19): siRNA sense strand
gcaaggaauuucugcaaac

SEQ ID NO: 1759001 - RNA, 19 nt, Homo sapiens
  misc_RNA (1)...(19): siRNA sense strand
ugcaacagcugaacucuga

SEQ ID NO: 1759002 - RNA, 19 nt, Homo sapiens
  misc_RNA (1)...(19): siRNA sense strand
gcacucaggccaacaacuu

SEQ ID NO: 1759003 - RNA, 19 nt, Homo sapiens
  misc_RNA (1)...(19): siRNA sense strand
gaagagacugcaggagaua

SEQ ID NO: 1759004 - RNA, 19 nt, Homo sapiens
  misc_RNA (1)...(19): siRNA sense strand
gagaagaaacucaaacagu

SEQ ID NO: 1759005 - RNA, 19 nt, Homo sapiens
  misc_RNA (1)...(19): siRNA sense strand
ggagggaacuaaugcaacu

SEQ ID NO: 1759006 - RNA, 19 nt, Homo sapiens
  misc_RNA (1)...(19): siRNA sense strand
ggaccagccuccugcaaca

SEQ ID NO: 1759007 - RNA, 19 nt, Homo sapiens
  misc_RNA (1)...(19): siRNA sense strand
gaaggugacaggaauguuc

SEQ ID NO: 1759008 - RNA, 19 nt, Homo sapiens
  misc_RNA (1)...(19): siRNA sense strand
caacagcugaacucugaua

SEQ ID NO: 1759009 - RNA, 19 nt, Homo sapiens
  misc_RNA (1)...(19): siRNA sense strand
uggcaaagccucccucuga

SEQ ID NO: 1759010 - RNA, 19 nt, Homo sapiens
  misc_RNA (1)...(19): siRNA sense strand
aaauagaacugagagugaa

SEQ ID NO: 1759011 - RNA, 19 nt, Homo sapiens
  misc_RNA (1)...(19): siRNA sense strand
ugaagagacugcaggagau

SEQ ID NO: 1759012 - RNA, 19 nt, Homo sapiens
  misc_RNA (1)...(19): siRNA sense strand
gguagaacgucaaccucaa

SEQ ID NO: 1759013 - RNA, 19 nt, Homo sapiens
  misc_RNA (1)...(19): siRNA sense strand
cuauggaaagcuacuauua

SEQ ID NO: 1759014 - RNA, 19 nt, Homo sapiens
  misc_RNA (1)...(19): siRNA sense strand
caaagccucccucugauau

SEQ ID NO: 1759015 - RNA, 19 nt, Homo sapiens
  misc_RNA (1)...(19): siRNA sense strand
ccucugauauccaggaaau

SEQ ID NO: 1759016 - RNA, 19 nt, Homo sapiens
  misc_RNA (1)...(19): siRNA sense strand
gagcuggaaauguuaaaga

SEQ ID NO: 1759017 - RNA, 19 nt, Homo sapiens
  misc_RNA (1)...(19): siRNA sense strand
aaacagccuucucauuaag

SEQ ID NO: 1759018 - RNA, 19 nt, Homo sapiens
  misc_RNA (1)...(19): siRNA sense strand
gcagagcuggaaauguuaa

SEQ ID NO: 1759019 - RNA, 19 nt, Homo sapiens
  misc_RNA (1)...(19): siRNA sense strand
gcagugagaacuacagaag

SEQ ID NO: 1759020 - RNA, 19 nt, Homo sapiens
  misc_RNA (1)...(19): siRNA sense strand
caacuuugcccgguccuuu

SEQ ID NO: 1759021 - RNA, 19 nt, Homo sapiens
  misc_RNA (1)...(19): siRNA sense strand
uaagggacauggagaagac

SEQ ID NO: 1759022 - RNA, 19 nt, Homo sapiens
  misc_RNA (1)...(19): siRNA sense strand
gcacggaugguggcaaaga

SEQ ID NO: 1759023 - RNA, 19 nt, Homo sapiens
  misc_RNA (1)...(19): siRNA sense strand
ggacauggagaagacugua

SEQ ID NO: 1759024 - RNA, 19 nt, Homo sapiens
  misc_RNA (1)...(19): siRNA sense strand
cgacagaugggagaugauu

SEQ ID NO: 1759025 - RNA, 19 nt, Homo sapiens
  misc_RNA (1)...(19): siRNA sense strand
ggaacuaaugcaacuggaa

SEQ ID NO: 1759026 - RNA, 19 nt, Homo sapiens
  misc_RNA (1)...(19): siRNA sense strand
ggcaaagccucccucugau

SEQ ID NO: 1759027 - RNA, 19 nt, Homo sapiens
  misc_RNA (1)...(19): siRNA sense strand
caucacuacuuggcugaaa

SEQ ID NO: 1759028 - RNA, 19 nt, Homo sapiens
  misc_RNA (1)...(19): siRNA sense strand
ggacauguuacaggagauu

SEQ ID NO: 1759029 - RNA, 19 nt, Homo sapiens
  misc_RNA (1)...(19): siRNA sense strand
aauggaaggugacaggaau

SEQ ID NO: 1759030 - RNA, 19 nt, Homo sapiens
  misc_RNA (1)...(19): siRNA sense strand
uggagaagacuguauugaa

SEQ ID NO: 1759031 - RNA, 19 nt, Homo sapiens
  misc_RNA (1)...(19): siRNA sense strand
uacaggagauuucaaacag

SEQ ID NO: 1759032 - RNA, 19 nt, Homo sapiens
  misc_RNA (1)...(19): siRNA sense strand
ucagcgccaucacuacuug

SEQ ID NO: 1759033 - RNA, 19 nt, Homo sapiens
  misc_RNA (1)...(19): siRNA sense strand
aagaaaaggugcauguuau

SEQ ID NO: 1759034 - RNA, 19 nt, Homo sapiens
  misc_RNA (1)...(19): siRNA sense strand
uauaaaccacccuauggaa

SEQ ID NO: 1759035 - RNA, 19 nt, Homo sapiens
  misc_RNA (1)...(19): siRNA sense strand
ggaggcagaaggcucaugu

SEQ ID NO: 1759036 - RNA, 19 nt, Homo sapiens
  misc_RNA (1)...(19): siRNA sense strand
gcauguuauugagaagaaa

SEQ ID NO: 1759037 - RNA, 19 nt, Homo sapiens
  misc_RNA (1)...(19): siRNA sense strand
caacgugagcagcaaggaa

SEQ ID NO: 1759038 - RNA, 19 nt, Homo sapiens
  misc_RNA (1)...(19): siRNA sense strand
gaaaaggugcauguuauug

SEQ ID NO: 1759039 - RNA, 19 nt, Homo sapiens
  misc_RNA (1)...(19): siRNA sense strand
cagcaaggaauuucugcaa

SEQ ID NO: 1759040 - RNA, 19 nt, Homo sapiens
  misc_RNA (1)...(19): siRNA sense strand
aaaggugcauguuauugag

SEQ ID NO: 1759041 - RNA, 19 nt, Homo sapiens
  misc_RNA (1)...(19): siRNA sense strand
uaaaccacccuauggaaag

SEQ ID NO: 1759042 - RNA, 19 nt, Homo sapiens
  misc_RNA (1)...(19): siRNA sense strand
gaagcagagcuggaaaugu

SEQ ID NO: 1759043 - RNA, 19 nt, Homo sapiens
  misc_RNA (1)...(19): siRNA sense strand
caagugucccaagauuuaa

SEQ ID NO: 1759044 - RNA, 19 nt, Homo sapiens
  misc_RNA (1)...(19): siRNA sense strand
ccaagaaccggaggcagaa

SEQ ID NO: 1759045 - RNA, 19 nt, Homo sapiens
  misc_RNA (1)...(19): siRNA sense strand
agcaaggaauuucugcaaa

SEQ ID NO: 1759046 - RNA, 19 nt, Homo sapiens
  misc_RNA (1)...(19): siRNA sense strand
gagcagugagaacuacaga

SEQ ID NO: 1759047 - RNA, 19 nt, Homo sapiens
  misc_RNA (1)...(19): siRNA sense strand
gguuagcgagugccaagaa

SEQ ID NO: 1759048 - RNA, 19 nt, Homo sapiens
  misc_RNA (1)...(19): siRNA sense strand
ucacuacaagcaaauggaa

SEQ ID NO: 1759049 - RNA, 19 nt, Homo sapiens
  misc_RNA (1)...(19): siRNA sense strand
ggagcaagugucccaagau

SEQ ID NO: 1759050 - RNA, 19 nt, Homo sapiens
  misc_RNA (1)...(19): siRNA sense strand
auaaaccacccuauggaaa

SEQ ID NO: 1759051 - RNA, 19 nt, Homo sapiens
  misc_RNA (1)...(19): siRNA sense strand
cacggaugguggcaaagaa

SEQ ID NO: 1759052 - RNA, 19 nt, Homo sapiens
  misc_RNA (1)...(19): siRNA sense strand
gcaacccacagcaggaaga

SEQ ID NO: 1759053 - RNA, 19 nt, Homo sapiens
  misc_RNA (1)...(19): siRNA sense strand
ugauauccaggaaauagaa

SEQ ID NO: 1759054 - RNA, 19 nt, Homo sapiens
  misc_RNA (1)...(19): siRNA sense strand
gagcagcaaggaauuucug

SEQ ID NO: 1759055 - RNA, 19 nt, Homo sapiens
  misc_RNA (1)...(19): siRNA sense strand
uaaugcaacuggaaaagga

SEQ ID NO: 1759056 - RNA, 19 nt, Homo sapiens
  misc_RNA (1)...(19): siRNA sense strand
gggacuggccgguaucaca

SEQ ID NO: 1759057 - RNA, 19 nt, Homo sapiens
  misc_RNA (1)...(19): siRNA sense strand
aggcacggaugguggcaaa

SEQ ID NO: 1759058 - RNA, 19 nt, Homo sapiens
  misc_RNA (1)...(19): siRNA sense strand
gcuggaaauguuaaagaug

SEQ ID NO: 1759059 - RNA, 19 nt, Homo sapiens
  misc_RNA (1)...(19): siRNA sense strand
ucagagcagugagaacuac

SEQ ID NO: 1759060 - RNA, 19 nt, Homo sapiens
  misc_RNA (1)...(19): siRNA sense strand
acagaugggagaugauuca

SEQ ID NO: 1759061 - RNA, 19 nt, Homo sapiens
  misc_RNA (1)...(19): siRNA sense strand
gcccagcuucgacgaggua

SEQ ID NO: 1759062 - RNA, 19 nt, Homo sapiens
  misc_RNA (1)...(19): siRNA sense strand
ugcauguuauugagaagaa

SEQ ID NO: 1759063 - RNA, 19 nt, Homo sapiens
  misc_RNA (1)...(19): siRNA sense strand
uuacaggagauuucaaaca

SEQ ID NO: 1759064 - RNA, 19 nt, Homo sapiens
  misc_RNA (1)...(19): siRNA sense strand
aaccucaaguggacauguu

SEQ ID NO: 1759065 - RNA, 19 nt, Homo sapiens
  misc_RNA (1)...(19): siRNA sense strand
ucaggugccuucgacagau

SEQ ID NO: 1759066 - RNA, 19 nt, Homo sapiens
  misc_RNA (1)...(19): siRNA sense strand
ggacuuccaccaguugagu

SEQ ID NO: 1759067 - RNA, 19 nt, Homo sapiens
  misc_RNA (1)...(19): siRNA sense strand
gcauuaguggucucuguca

SEQ ID NO: 1759068 - RNA, 19 nt, Homo sapiens
  misc_RNA (1)...(19): siRNA sense strand
ccaggaaauagaacugaga

SEQ ID NO: 1759069 - RNA, 19 nt, Homo sapiens
  misc_RNA (1)...(19): siRNA sense strand
ggaaggugacaggaauguu

SEQ ID NO: 1759070 - RNA, 19 nt, Homo sapiens
  misc_RNA (1)...(19): siRNA sense strand
ggaaaaggagcugguagaa

SEQ ID NO: 1759071 - RNA, 19 nt, Homo sapiens
  misc_RNA (1)...(19): siRNA sense strand
ugaagcagagcuggaaaug

SEQ ID NO: 1759072 - RNA, 19 nt, Homo sapiens
  misc_RNA (1)...(19): siRNA sense strand
augcugagguacaccaaug

SEQ ID NO: 1759073 - RNA, 19 nt, Homo sapiens
  misc_RNA (1)...(19): siRNA sense strand
caggugccuucgacagaug

SEQ ID NO: 1759074 - RNA, 19 nt, Homo sapiens
  misc_RNA (1)...(19): siRNA sense strand
cauuaguggucucugucaa

SEQ ID NO: 1759075 - RNA, 19 nt, Homo sapiens
  misc_RNA (1)...(19): siRNA sense strand
ugacacuuacaaggcauua

SEQ ID NO: 1759076 - RNA, 19 nt, Homo sapiens
  misc_RNA (1)...(19): siRNA sense strand
aaaaucugcugcugugguu

SEQ ID NO: 1759077 - RNA, 19 nt, Homo sapiens
  misc_RNA (1)...(19): siRNA sense strand
gucccgagcaucacuacaa

SEQ ID NO: 1759078 - RNA, 19 nt, Homo sapiens
  misc_RNA (1)...(19): siRNA sense strand
acauggagaagacuguauu

SEQ ID NO: 1759079 - RNA, 19 nt, Homo sapiens
  misc_RNA (1)...(19): siRNA sense strand
uuauaaaccacccuaugga

SEQ ID NO: 1759080 - RNA, 19 nt, Homo sapiens
  misc_RNA (1)...(19): siRNA sense strand
cauuaagggacauggagaa

SEQ ID NO: 1759081 - RNA, 19 nt, Homo sapiens
  misc_RNA (1)...(19): siRNA sense strand
guagaacgucaaccucaag

SEQ ID NO: 1759082 - RNA, 19 nt, Homo sapiens
  misc_RNA (1)...(19): siRNA sense strand
gagugucggagggaacuaa

SEQ ID NO: 1759083 - RNA, 19 nt, Homo sapiens
  misc_RNA (1)...(19): siRNA sense strand
gcucaugucaccgauccaa

SEQ ID NO: 1759084 - RNA, 19 nt, Homo sapiens
  misc_RNA (1)...(19): siRNA sense strand
cacaggagcuucacaauaa

SEQ ID NO: 1759085 - RNA, 19 nt, Homo sapiens
  misc_RNA (1)...(19): siRNA sense strand
gcaagugucccaagauuua

SEQ ID NO: 1759086 - RNA, 19 nt, Homo sapiens
  misc_RNA (1)...(19): siRNA sense strand
ccacagagcuccaaaguag

SEQ ID NO: 1759087 - RNA, 19 nt, Homo sapiens
  misc_RNA (1)...(19): siRNA sense strand
ucaaacagccuucucauua

SEQ ID NO: 1759088 - RNA, 19 nt, Homo sapiens
  misc_RNA (1)...(19): siRNA sense strand
caaacagccuucucauuaa

SEQ ID NO: 1759089 - RNA, 19 nt, Homo sapiens
  misc_RNA (1)...(19): siRNA sense strand
gcacaggagcuucacaaua

SEQ ID NO: 1759090 - RNA, 19 nt, Homo sapiens
  misc_RNA (1)...(19): siRNA sense strand
ggagaagacuguauugaag

SEQ ID NO: 1759091 - RNA, 19 nt, Homo sapiens
  misc_RNA (1)...(19): siRNA sense strand
gagcaagugucccaagauu

SEQ ID NO: 1759092 - RNA, 19 nt, Homo sapiens
  misc_RNA (1)...(19): siRNA sense strand
gagcaucacuacaagcaaa

SEQ ID NO: 1759093 - RNA, 19 nt, Homo sapiens
  misc_RNA (1)...(19): siRNA sense strand
gaaauagaacugagaguga

SEQ ID NO: 1759094 - RNA, 19 nt, Homo sapiens
  misc_RNA (1)...(19): siRNA sense strand
aagcagagcuggaaauguu

SEQ ID NO: 1759095 - RNA, 19 nt, Homo sapiens
  misc_RNA (1)...(19): siRNA sense strand
gaacuaaugcaacuggaaa

SEQ ID NO: 1759096 - RNA, 19 nt, Homo sapiens
  misc_RNA (1)...(19): siRNA sense strand
gcaaagccucccucugaua

SEQ ID NO: 1759097 - RNA, 19 nt, Homo sapiens
  misc_RNA (1)...(19): siRNA sense strand
gaagaaaaggugcauguua

SEQ ID NO: 1759098 - RNA, 19 nt, Homo sapiens
  misc_RNA (1)...(19): siRNA sense strand
cagcugaacucugauauca

SEQ ID NO: 1759099 - RNA, 19 nt, Homo sapiens
  misc_RNA (1)...(19): siRNA sense strand
gauaucagcgccaucacua

SEQ ID NO: 1759100 - RNA, 19 nt, Homo sapiens
  misc_RNA (1)...(19): siRNA sense strand
gcaaggaauuucugcaaac

SEQ ID NO: 1759101 - RNA, 19 nt, Homo sapiens
  misc_RNA (1)...(19): siRNA sense strand
ugcaacagcugaacucuga

SEQ ID NO: 1759102 - RNA, 19 nt, Homo sapiens
  misc_RNA (1)...(19): siRNA sense strand
gcacucaggccaacaacuu

SEQ ID NO: 1759103 - RNA, 19 nt, Homo sapiens
  misc_RNA (1)...(19): siRNA sense strand
gaagagacugcaggagaua

SEQ ID NO: 1759104 - RNA, 19 nt, Homo sapiens
  misc_RNA (1)...(19): siRNA sense strand
gagaagaaacucaaacagu

SEQ ID NO: 1759105 - RNA, 19 nt, Homo sapiens
  misc_RNA (1)...(19): siRNA sense strand
ggagggaacuaaugcaacu

SEQ ID NO: 1759106 - RNA, 19 nt, Homo sapiens
  misc_RNA (1)...(19): siRNA sense strand
ggaccagccuccugcaaca

SEQ ID NO: 1759107 - RNA, 19 nt, Homo sapiens
  misc_RNA (1)...(19): siRNA sense strand
gaaggugacaggaauguuc

SEQ ID NO: 1759108 - RNA, 19 nt, Homo sapiens
  misc_RNA (1)...(19): siRNA sense strand
caacagcugaacucugaua

SEQ ID NO: 1759109 - RNA, 19 nt, Homo sapiens
  misc_RNA (1)...(19): siRNA sense strand
uggcaaagccucccucuga

SEQ ID NO: 1759110 - RNA, 19 nt, Homo sapiens
  misc_RNA (1)...(19): siRNA sense strand
aaauagaacugagagugaa

SEQ ID NO: 1759111 - RNA, 19 nt, Homo sapiens
  misc_RNA (1)...(19): siRNA sense strand
ugaagagacugcaggagau

SEQ ID NO: 1759112 - RNA, 19 nt, Homo sapiens
  misc_RNA (1)...(19): siRNA sense strand
gguagaacgucaaccucaa

SEQ ID NO: 1759113 - RNA, 19 nt, Homo sapiens
  misc_RNA (1)...(19): siRNA sense strand
cuauggaaagcuacuauua

SEQ ID NO: 1759114 - RNA, 19 nt, Homo sapiens
  misc_RNA (1)...(19): siRNA sense strand
caaagccucccucugauau

SEQ ID NO: 1759115 - RNA, 19 nt, Homo sapiens
  misc_RNA (1)...(19): siRNA sense strand
ccucugauauccaggaaau

SEQ ID NO: 1759116 - RNA, 19 nt, Homo sapiens
  misc_RNA (1)...(19): siRNA sense strand
gagcuggaaauguuaaaga

SEQ ID NO: 1759117 - RNA, 19 nt, Homo sapiens
  misc_RNA (1)...(19): siRNA sense strand
aaacagccuucucauuaag

SEQ ID NO: 1759118 - RNA, 19 nt, Homo sapiens
  misc_RNA (1)...(19): siRNA sense strand
gcagagcuggaaauguuaa

SEQ ID NO: 1759119 - RNA, 19 nt, Homo sapiens
  misc_RNA (1)...(19): siRNA sense strand
gcagugagaacuacagaag

SEQ ID NO: 1759120 - RNA, 19 nt, Homo sapiens
  misc_RNA (1)...(19): siRNA sense strand
caacuuugcccgguccuuu

SEQ ID NO: 1759121 - RNA, 19 nt, Homo sapiens
  misc_RNA (1)...(19): siRNA sense strand
uaagggacauggagaagac

SEQ ID NO: 1759122 - RNA, 19 nt, Homo sapiens
  misc_RNA (1)...(19): siRNA sense strand
gcacggaugguggcaaaga

SEQ ID NO: 1759123 - RNA, 19 nt, Homo sapiens
  misc_RNA (1)...(19): siRNA sense strand
ggacauggagaagacugua

SEQ ID NO: 1759124 - RNA, 19 nt, Homo sapiens
  misc_RNA (1)...(19): siRNA sense strand
cgacagaugggagaugauu

SEQ ID NO: 1759125 - RNA, 19 nt, Homo sapiens
  misc_RNA (1)...(19): siRNA sense strand
ggaacuaaugcaacuggaa

SEQ ID NO: 1759126 - RNA, 19 nt, Homo sapiens
  misc_RNA (1)...(19): siRNA sense strand
ggcaaagccucccucugau

SEQ ID NO: 1759127 - RNA, 19 nt, Homo sapiens
  misc_RNA (1)...(19): siRNA sense strand
caucacuacuuggcugaaa

SEQ ID NO: 1759128 - RNA, 19 nt, Homo sapiens
  misc_RNA (1)...(19): siRNA sense strand
ggacauguuacaggagauu

SEQ ID NO: 1759129 - RNA, 19 nt, Homo sapiens
  misc_RNA (1)...(19): siRNA sense strand
aauggaaggugacaggaau

SEQ ID NO: 1759130 - RNA, 19 nt, Homo sapiens
  misc_RNA (1)...(19): siRNA sense strand
uggagaagacuguauugaa

SEQ ID NO: 1759131 - RNA, 19 nt, Homo sapiens
  misc_RNA (1)...(19): siRNA sense strand
uacaggagauuucaaacag

SEQ ID NO: 1759132 - RNA, 19 nt, Homo sapiens
  misc_RNA (1)...(19): siRNA sense strand
ucagcgccaucacuacuug

SEQ ID NO: 1759133 - RNA, 19 nt, Homo sapiens
  misc_RNA (1)...(19): siRNA sense strand
aagaaaaggugcauguuau

SEQ ID NO: 1759134 - RNA, 19 nt, Homo sapiens
  misc_RNA (1)...(19): siRNA sense strand
uauaaaccacccuauggaa

SEQ ID NO: 1759135 - RNA, 19 nt, Homo sapiens
  misc_RNA (1)...(19): siRNA sense strand
ggaggcagaaggcucaugu

SEQ ID NO: 1759136 - RNA, 19 nt, Homo sapiens
  misc_RNA (1)...(19): siRNA sense strand
gcauguuauugagaagaaa

SEQ ID NO: 1759137 - RNA, 19 nt, Homo sapiens
  misc_RNA (1)...(19): siRNA sense strand
caacgugagcagcaaggaa

SEQ ID NO: 1759138 - RNA, 19 nt, Homo sapiens
  misc_RNA (1)...(19): siRNA sense strand
gaaaaggugcauguuauug

SEQ ID NO: 1759139 - RNA, 19 nt, Homo sapiens
  misc_RNA (1)...(19): siRNA sense strand
cagcaaggaauuucugcaa

SEQ ID NO: 1759140 - RNA, 19 nt, Homo sapiens
  misc_RNA (1)...(19): siRNA sense strand
aaaggugcauguuauugag

SEQ ID NO: 1759141 - RNA, 19 nt, Homo sapiens
  misc_RNA (1)...(19): siRNA sense strand
uaaaccacccuauggaaag

SEQ ID NO: 1759142 - RNA, 19 nt, Homo sapiens
  misc_RNA (1)...(19): siRNA sense strand
gaagcagagcuggaaaugu

SEQ ID NO: 1759143 - RNA, 19 nt, Homo sapiens
  misc_RNA (1)...(19): siRNA sense strand
caagugucccaagauuuaa

SEQ ID NO: 1759144 - RNA, 19 nt, Homo sapiens
  misc_RNA (1)...(19): siRNA sense strand
ccaagaaccggaggcagaa

SEQ ID NO: 1759145 - RNA, 19 nt, Homo sapiens
  misc_RNA (1)...(19): siRNA sense strand
agcaaggaauuucugcaaa

SEQ ID NO: 1759146 - RNA, 19 nt, Homo sapiens
  misc_RNA (1)...(19): siRNA sense strand
gagcagugagaacuacaga

SEQ ID NO: 1759147 - RNA, 19 nt, Homo sapiens
  misc_RNA (1)...(19): siRNA sense strand
gguuagcgagugccaagaa

SEQ ID NO: 1759148 - RNA, 19 nt, Homo sapiens
  misc_RNA (1)...(19): siRNA sense strand
ucacuacaagcaaauggaa

SEQ ID NO: 1759149 - RNA, 19 nt, Homo sapiens
  misc_RNA (1)...(19): siRNA sense strand
ggagcaagugucccaagau

SEQ ID NO: 1759150 - RNA, 19 nt, Homo sapiens
  misc_RNA (1)...(19): siRNA sense strand
auaaaccacccuauggaaa

SEQ ID NO: 1759151 - RNA, 19 nt, Homo sapiens
  misc_RNA (1)...(19): siRNA sense strand
cacggaugguggcaaagaa

SEQ ID NO: 1759152 - RNA, 19 nt, Homo sapiens
  misc_RNA (1)...(19): siRNA sense strand
gcaacccacagcaggaaga

SEQ ID NO: 1759153 - RNA, 19 nt, Homo sapiens
  misc_RNA (1)...(19): siRNA sense strand
ugauauccaggaaauagaa

SEQ ID NO: 1759154 - RNA, 19 nt, Homo sapiens
  misc_RNA (1)...(19): siRNA sense strand
gagcagcaaggaauuucug

SEQ ID NO: 1759155 - RNA, 19 nt, Homo sapiens
  misc_RNA (1)...(19): siRNA sense strand
uaaugcaacuggaaaagga

SEQ ID NO: 1759156 - RNA, 19 nt, Homo sapiens
  misc_RNA (1)...(19): siRNA sense strand
gggacuggccgguaucaca

SEQ ID NO: 1759157 - RNA, 19 nt, Homo sapiens
  misc_RNA (1)...(19): siRNA sense strand
aggcacggaugguggcaaa

SEQ ID NO: 1759158 - RNA, 19 nt, Homo sapiens
  misc_RNA (1)...(19): siRNA sense strand
gcuggaaauguuaaagaug

SEQ ID NO: 1759159 - RNA, 19 nt, Homo sapiens
  misc_RNA (1)...(19): siRNA sense strand
ucagagcagugagaacuac

SEQ ID NO: 1759160 - RNA, 19 nt, Homo sapiens
  misc_RNA (1)...(19): siRNA sense strand
acagaugggagaugauuca

SEQ ID NO: 1759161 - RNA, 19 nt, Homo sapiens
  misc_RNA (1)...(19): siRNA sense strand
gcccagcuucgacgaggua

SEQ ID NO: 1759162 - RNA, 19 nt, Homo sapiens
  misc_RNA (1)...(19): siRNA sense strand
ugcauguuauugagaagaa

SEQ ID NO: 1759163 - RNA, 19 nt, Homo sapiens
  misc_RNA (1)...(19): siRNA sense strand
uuacaggagauuucaaaca

SEQ ID NO: 1759164 - RNA, 19 nt, Homo sapiens
  misc_RNA (1)...(19): siRNA sense strand
aaccucaaguggacauguu

SEQ ID NO: 1759165 - RNA, 19 nt, Homo sapiens
  misc_RNA (1)...(19): siRNA sense strand
ucaggugccuucgacagau

SEQ ID NO: 1759166 - RNA, 19 nt, Homo sapiens
  misc_RNA (1)...(19): siRNA sense strand
ggacuuccaccaguugagu

SEQ ID NO: 1759167 - RNA, 19 nt, Homo sapiens
  misc_RNA (1)...(19): siRNA sense strand
gcauuaguggucucuguca

SEQ ID NO: 1759168 - RNA, 19 nt, Homo sapiens
  misc_RNA (1)...(19): siRNA sense strand
ccaggaaauagaacugaga

SEQ ID NO: 1759169 - RNA, 19 nt, Homo sapiens
  misc_RNA (1)...(19): siRNA sense strand
ggaaggugacaggaauguu

SEQ ID NO: 1759170 - RNA, 19 nt, Homo sapiens
  misc_RNA (1)...(19): siRNA sense strand
ggaaaaggagcugguagaa

SEQ ID NO: 1759171 - RNA, 19 nt, Homo sapiens
  misc_RNA (1)...(19): siRNA sense strand
ugaagcagagcuggaaaug

SEQ ID NO: 1759172 - RNA, 19 nt, Homo sapiens
  misc_RNA (1)...(19): siRNA sense strand
augcugagguacaccaaug

SEQ ID NO: 1759173 - RNA, 19 nt, Homo sapiens
  misc_RNA (1)...(19): siRNA sense strand
caggugccuucgacagaug

SEQ ID NO: 1759174 - RNA, 19 nt, Homo sapiens
  misc_RNA (1)...(19): siRNA sense strand
cauuaguggucucugucaa

SEQ ID NO: 1759175 - RNA, 19 nt, Homo sapiens
  misc_RNA (1)...(19): siRNA sense strand
ugacacuuacaaggcauua

SEQ ID NO: 1759176 - RNA, 19 nt, Homo sapiens
  misc_RNA (1)...(19): siRNA sense strand
aaaaucugcugcugugguu

SEQ ID NO: 1759177 - RNA, 19 nt, Homo sapiens
  misc_RNA (1)...(19): siRNA sense strand
gucccgagcaucacuacaa

SEQ ID NO: 1759178 - RNA, 19 nt, Homo sapiens
  misc_RNA (1)...(19): siRNA sense strand
acauggagaagacuguauu

SEQ ID NO: 1759179 - RNA, 19 nt, Homo sapiens
  misc_RNA (1)...(19): siRNA sense strand
uuauaaaccacccuaugga

SEQ ID NO: 1759180 - RNA, 19 nt, Homo sapiens
  misc_RNA (1)...(19): siRNA sense strand
cauuaagggacauggagaa

SEQ ID NO: 1759181 - RNA, 19 nt, Homo sapiens
  misc_RNA (1)...(19): siRNA sense strand
guagaacgucaaccucaag

SEQ ID NO: 1759182 - RNA, 19 nt, Homo sapiens
  misc_RNA (1)...(19): siRNA sense strand
gagugucggagggaacuaa

SEQ ID NO: 1759183 - RNA, 19 nt, Homo sapiens
  misc_RNA (1)...(19): siRNA sense strand
gcucaugucaccgauccaa

SEQ ID NO: 1759184 - RNA, 19 nt, Homo sapiens
  misc_RNA (1)...(19): siRNA sense strand
cacaggagcuucacaauaa

SEQ ID NO: 1759185 - RNA, 19 nt, Homo sapiens
  misc_RNA (1)...(19): siRNA sense strand
gcaagugucccaagauuua

SEQ ID NO: 1759186 - RNA, 19 nt, Homo sapiens
  misc_RNA (1)...(19): siRNA sense strand
ccacagagcuccaaaguag

SEQ ID NO: 1759187 - RNA, 19 nt, Homo sapiens
  misc_RNA (1)...(19): siRNA sense strand
ucaaacagccuucucauua

SEQ ID NO: 1759188 - RNA, 19 nt, Homo sapiens
  misc_RNA (1)...(19): siRNA sense strand
caaacagccuucucauuaa

SEQ ID NO: 1759189 - RNA, 19 nt, Homo sapiens
  misc_RNA (1)...(19): siRNA sense strand
gcacaggagcuucacaaua

SEQ ID NO: 1759190 - RNA, 19 nt, Homo sapiens
  misc_RNA (1)...(19): siRNA sense strand
ggagaagacuguauugaag

SEQ ID NO: 1759191 - RNA, 19 nt, Homo sapiens
  misc_RNA (1)...(19): siRNA sense strand
gagcaagugucccaagauu

SEQ ID NO: 1759192 - RNA, 19 nt, Homo sapiens
  misc_RNA (1)...(19): siRNA sense strand
gaaauagaacugagaguga

SEQ ID NO: 1759193 - RNA, 19 nt, Homo sapiens
  misc_RNA (1)...(19): siRNA sense strand
aagcagagcuggaaauguu

SEQ ID NO: 1759194 - RNA, 19 nt, Homo sapiens
  misc_RNA (1)...(19): siRNA sense strand
gaacuaaugcaacuggaaa

SEQ ID NO: 1759195 - RNA, 19 nt, Homo sapiens
  misc_RNA (1)...(19): siRNA sense strand
gcaaagccucccucugaua

SEQ ID NO: 1759196 - RNA, 19 nt, Homo sapiens
  misc_RNA (1)...(19): siRNA sense strand
gaagaaaaggugcauguua

SEQ ID NO: 1759197 - RNA, 19 nt, Homo sapiens
  misc_RNA (1)...(19): siRNA sense strand
cagcugaacucugauauca

SEQ ID NO: 1759198 - RNA, 19 nt, Homo sapiens
  misc_RNA (1)...(19): siRNA sense strand
gauaucagcgccaucacua

SEQ ID NO: 1759199 - RNA, 19 nt, Homo sapiens
  misc_RNA (1)...(19): siRNA sense strand
gcaaggaauuucugcaaac

SEQ ID NO: 1759200 - RNA, 19 nt, Homo sapiens
  misc_RNA (1)...(19): siRNA sense strand
ugcaacagcugaacucuga

SEQ ID NO: 1759201 - RNA, 19 nt, Homo sapiens
  misc_RNA (1)...(19): siRNA sense strand
gcacucaggccaacaacuu

SEQ ID NO: 1759202 - RNA, 19 nt, Homo sapiens
  misc_RNA (1)...(19): siRNA sense strand
gaagagacugcaggagaua

SEQ ID NO: 1759203 - RNA, 19 nt, Homo sapiens
  misc_RNA (1)...(19): siRNA sense strand
gagaagaaacucaaacagu

SEQ ID NO: 1759204 - RNA, 19 nt, Homo sapiens
  misc_RNA (1)...(19): siRNA sense strand
ggagggaacuaaugcaacu

SEQ ID NO: 1759205 - RNA, 19 nt, Homo sapiens
  misc_RNA (1)...(19): siRNA sense strand
ggaccagccuccugcaaca

SEQ ID NO: 1759206 - RNA, 19 nt, Homo sapiens
  misc_RNA (1)...(19): siRNA sense strand
gaaggugacaggaauguuc

SEQ ID NO: 1759207 - RNA, 19 nt, Homo sapiens
  misc_RNA (1)...(19): siRNA sense strand
caacagcugaacucugaua

SEQ ID NO: 1759208 - RNA, 19 nt, Homo sapiens
  misc_RNA (1)...(19): siRNA sense strand
uggcaaagccucccucuga

SEQ ID NO: 1759209 - RNA, 19 nt, Homo sapiens
  misc_RNA (1)...(19): siRNA sense strand
aaauagaacugagagugaa

SEQ ID NO: 1759210 - RNA, 19 nt, Homo sapiens
  misc_RNA (1)...(19): siRNA sense strand
ugaagagacugcaggagau

SEQ ID NO: 1759211 - RNA, 19 nt, Homo sapiens
  misc_RNA (1)...(19): siRNA sense strand
gguagaacgucaaccucaa

SEQ ID NO: 1759212 - RNA, 19 nt, Homo sapiens
  misc_RNA (1)...(19): siRNA sense strand
cuauggaaagcuacuauua

SEQ ID NO: 1759213 - RNA, 19 nt, Homo sapiens
  misc_RNA (1)...(19): siRNA sense strand
caaagccucccucugauau

SEQ ID NO: 1759214 - RNA, 19 nt, Homo sapiens
  misc_RNA (1)...(19): siRNA sense strand
ccucugauauccaggaaau

SEQ ID NO: 1759215 - RNA, 19 nt, Homo sapiens
  misc_RNA (1)...(19): siRNA sense strand
gagcuggaaauguuaaaga

SEQ ID NO: 1759216 - RNA, 19 nt, Homo sapiens
  misc_RNA (1)...(19): siRNA sense strand
aaacagccuucucauuaag

SEQ ID NO: 1759217 - RNA, 19 nt, Homo sapiens
  misc_RNA (1)...(19): siRNA sense strand
gcagagcuggaaauguuaa

SEQ ID NO: 1759218 - RNA, 19 nt, Homo sapiens
  misc_RNA (1)...(19): siRNA sense strand
gcagugagaacuacagaag

SEQ ID NO: 1759219 - RNA, 19 nt, Homo sapiens
  misc_RNA (1)...(19): siRNA sense strand
caacuuugcccgguccuuu

SEQ ID NO: 1759220 - RNA, 19 nt, Homo sapiens
  misc_RNA (1)...(19): siRNA sense strand
uaagggacauggagaagac

SEQ ID NO: 1759221 - RNA, 19 nt, Homo sapiens
  misc_RNA (1)...(19): siRNA sense strand
gcacggaugguggcaaaga

SEQ ID NO: 1759222 - RNA, 19 nt, Homo sapiens
  misc_RNA (1)...(19): siRNA sense strand
ggacauggagaagacugua

SEQ ID NO: 1759223 - RNA, 19 nt, Homo sapiens
  misc_RNA (1)...(19): siRNA sense strand
cgacagaugggagaugauu

SEQ ID NO: 1759224 - RNA, 19 nt, Homo sapiens
  misc_RNA (1)...(19): siRNA sense strand
ggaacuaaugcaacuggaa

SEQ ID NO: 1759225 - RNA, 19 nt, Homo sapiens
  misc_RNA (1)...(19): siRNA sense strand
ggcaaagccucccucugau

SEQ ID NO: 1759226 - RNA, 19 nt, Homo sapiens
  misc_RNA (1)...(19): siRNA sense strand
caucacuacuuggcugaaa

SEQ ID NO: 1759227 - RNA, 19 nt, Homo sapiens
  misc_RNA (1)...(19): siRNA sense strand
ggacauguuacaggagauu

SEQ ID NO: 1759228 - RNA, 19 nt, Homo sapiens
  misc_RNA (1)...(19): siRNA sense strand
uggagaagacuguauugaa

SEQ ID NO: 1759229 - RNA, 19 nt, Homo sapiens
  misc_RNA (1)...(19): siRNA sense strand
uacaggagauuucaaacag

SEQ ID NO: 1759230 - RNA, 19 nt, Homo sapiens
  misc_RNA (1)...(19): siRNA sense strand
ucagcgccaucacuacuug

SEQ ID NO: 1759231 - RNA, 19 nt, Homo sapiens
  misc_RNA (1)...(19): siRNA sense strand
aagaaaaggugcauguuau

SEQ ID NO: 1759232 - RNA, 19 nt, Homo sapiens
  misc_RNA (1)...(19): siRNA sense strand
ggaggcagaaggcucaugu

SEQ ID NO: 1759233 - RNA, 19 nt, Homo sapiens
  misc_RNA (1)...(19): siRNA sense strand
uauaaaccacccuauggaa

SEQ ID NO: 1759234 - RNA, 19 nt, Homo sapiens
  misc_RNA (1)...(19): siRNA sense strand
gcauguuauugagaagaaa

SEQ ID NO: 1759235 - RNA, 19 nt, Homo sapiens
  misc_RNA (1)...(19): siRNA sense strand
caacgugagcagcaaggaa

SEQ ID NO: 1759236 - RNA, 19 nt, Homo sapiens
  misc_RNA (1)...(19): siRNA sense strand
gaaaaggugcauguuauug

SEQ ID NO: 1759237 - RNA, 19 nt, Homo sapiens
  misc_RNA (1)...(19): siRNA sense strand
cagcaaggaauuucugcaa

SEQ ID NO: 1759238 - RNA, 19 nt, Homo sapiens
  misc_RNA (1)...(19): siRNA sense strand
uaaaccacccuauggaaag

SEQ ID NO: 1759239 - RNA, 19 nt, Homo sapiens
  misc_RNA (1)...(19): siRNA sense strand
aaaggugcauguuauugag

SEQ ID NO: 1759240 - RNA, 19 nt, Homo sapiens
  misc_RNA (1)...(19): siRNA sense strand
gaagcagagcuggaaaugu

SEQ ID NO: 1759241 - RNA, 19 nt, Homo sapiens
  misc_RNA (1)...(19): siRNA sense strand
caagugucccaagauuuaa

SEQ ID NO: 1759242 - RNA, 19 nt, Homo sapiens
  misc_RNA (1)...(19): siRNA sense strand
ccaagaaccggaggcagaa

SEQ ID NO: 1759243 - RNA, 19 nt, Homo sapiens
  misc_RNA (1)...(19): siRNA sense strand
agcaaggaauuucugcaaa

SEQ ID NO: 1759244 - RNA, 19 nt, Homo sapiens
  misc_RNA (1)...(19): siRNA sense strand
gagcagugagaacuacaga

SEQ ID NO: 1759245 - RNA, 19 nt, Homo sapiens
  misc_RNA (1)...(19): siRNA sense strand
auaaaccacccuauggaaa

SEQ ID NO: 1759246 - RNA, 19 nt, Homo sapiens
  misc_RNA (1)...(19): siRNA sense strand
gcaacccacagcaggaaga

SEQ ID NO: 1759247 - RNA, 19 nt, Homo sapiens
  misc_RNA (1)...(19): siRNA sense strand
ggagcaagugucccaagau

SEQ ID NO: 1759248 - RNA, 19 nt, Homo sapiens
  misc_RNA (1)...(19): siRNA sense strand
cacggaugguggcaaagaa

SEQ ID NO: 1759249 - RNA, 19 nt, Homo sapiens
  misc_RNA (1)...(19): siRNA sense strand
gguuagcgagugccaagaa

SEQ ID NO: 1759250 - RNA, 19 nt, Homo sapiens
  misc_RNA (1)...(19): siRNA sense strand
ugauauccaggaaauagaa

SEQ ID NO: 1759251 - RNA, 19 nt, Homo sapiens
  misc_RNA (1)...(19): siRNA sense strand
gagcagcaaggaauuucug

SEQ ID NO: 1759252 - RNA, 19 nt, Homo sapiens
  misc_RNA (1)...(19): siRNA sense strand
aggcacggaugguggcaaa

SEQ ID NO: 1759253 - RNA, 19 nt, Homo sapiens
  misc_RNA (1)...(19): siRNA sense strand
gggacuggccgguaucaca

SEQ ID NO: 1759254 - RNA, 19 nt, Homo sapiens
  misc_RNA (1)...(19): siRNA sense strand
uaaugcaacuggaaaagga

SEQ ID NO: 1759255 - RNA, 19 nt, Homo sapiens
  misc_RNA (1)...(19): siRNA sense strand
gcuggaaauguuaaagaug

SEQ ID NO: 1759256 - RNA, 19 nt, Homo sapiens
  misc_RNA (1)...(19): siRNA sense strand
ucagagcagugagaacuac

SEQ ID NO: 1759257 - RNA, 19 nt, Homo sapiens
  misc_RNA (1)...(19): siRNA sense strand
gcccagcuucgacgaggua

SEQ ID NO: 1759258 - RNA, 19 nt, Homo sapiens
  misc_RNA (1)...(19): siRNA sense strand
acagaugggagaugauuca

SEQ ID NO: 1759259 - RNA, 19 nt, Homo sapiens
  misc_RNA (1)...(19): siRNA sense strand
ugcauguuauugagaagaa

SEQ ID NO: 1759260 - RNA, 19 nt, Homo sapiens
  misc_RNA (1)...(19): siRNA sense strand
uuacaggagauuucaaaca

SEQ ID NO: 1759261 - RNA, 19 nt, Homo sapiens
  misc_RNA (1)...(19): siRNA sense strand
aaccucaaguggacauguu

SEQ ID NO: 1759262 - RNA, 19 nt, Homo sapiens
  misc_RNA (1)...(19): siRNA sense strand
ggacuuccaccaguugagu

SEQ ID NO: 1759263 - RNA, 19 nt, Homo sapiens
  misc_RNA (1)...(19): siRNA sense strand
ucaggugccuucgacagau

SEQ ID NO: 1759264 - RNA, 19 nt, Homo sapiens
  misc_RNA (1)...(19): siRNA sense strand
gcauuaguggucucuguca

SEQ ID NO: 1759265 - RNA, 19 nt, Homo sapiens
  misc_RNA (1)...(19): siRNA sense strand
ccaggaaauagaacugaga

SEQ ID NO: 1759266 - RNA, 19 nt, Homo sapiens
  misc_RNA (1)...(19): siRNA sense strand
ggaaaaggagcugguagaa

SEQ ID NO: 1759267 - RNA, 19 nt, Homo sapiens
  misc_RNA (1)...(19): siRNA sense strand
ggaaggugacaggaauguu

SEQ ID NO: 1759268 - RNA, 19 nt, Homo sapiens
  misc_RNA (1)...(19): siRNA sense strand
ugaagcagagcuggaaaug

SEQ ID NO: 1759269 - RNA, 19 nt, Homo sapiens
  misc_RNA (1)...(19): siRNA sense strand
augcugagguacaccaaug

SEQ ID NO: 1759270 - RNA, 19 nt, Homo sapiens
  misc_RNA (1)...(19): siRNA sense strand
caggugccuucgacagaug

SEQ ID NO: 1759271 - RNA, 19 nt, Homo sapiens
  misc_RNA (1)...(19): siRNA sense strand
cauuaguggucucugucaa

SEQ ID NO: 1759272 - RNA, 19 nt, Homo sapiens
  misc_RNA (1)...(19): siRNA sense strand
ugacacuuacaaggcauua

SEQ ID NO: 1759273 - RNA, 19 nt, Homo sapiens
  misc_RNA (1)...(19): siRNA sense strand
aaaaucugcugcugugguu

SEQ ID NO: 1759274 - RNA, 19 nt, Homo sapiens
  misc_RNA (1)...(19): siRNA sense strand
gcucaugucaccgauccaa

SEQ ID NO: 1759275 - RNA, 19 nt, Homo sapiens
  misc_RNA (1)...(19): siRNA sense strand
acauggagaagacuguauu

SEQ ID NO: 1759276 - RNA, 19 nt, Homo sapiens
  misc_RNA (1)...(19): siRNA sense strand
cauuaagggacauggagaa

SEQ ID NO: 1759277 - RNA, 19 nt, Homo sapiens
  misc_RNA (1)...(19): siRNA sense strand
guagaacgucaaccucaag

SEQ ID NO: 1759278 - RNA, 19 nt, Homo sapiens
  misc_RNA (1)...(19): siRNA sense strand
uuauaaaccacccuaugga

SEQ ID NO: 1759279 - RNA, 19 nt, Homo sapiens
  misc_RNA (1)...(19): siRNA sense strand
gagugucggagggaacuaa

SEQ ID NO: 1759280 - RNA, 19 nt, Homo sapiens
  misc_RNA (1)...(19): siRNA sense strand
uauggaaagcuacuauuac

SEQ ID NO: 1759281 - RNA, 19 nt, Homo sapiens
  misc_RNA (1)...(19): siRNA sense strand
caaggaauuucugcaaacc

SEQ ID NO: 1759282 - RNA, 19 nt, Homo sapiens
  misc_RNA (1)...(19): siRNA sense strand
acacuuacaaggcauuagu

SEQ ID NO: 1759283 - RNA, 19 nt, Homo sapiens
  misc_RNA (1)...(19): siRNA sense strand
cacaggagcuucacaauaa

SEQ ID NO: 1759284 - RNA, 19 nt, Homo sapiens
  misc_RNA (1)...(19): siRNA sense strand
gcaagugucccaagauuua

SEQ ID NO: 1759285 - RNA, 19 nt, Homo sapiens
  misc_RNA (1)...(19): siRNA sense strand
ccacagagcuccaaaguag

SEQ ID NO: 1759286 - RNA, 19 nt, Homo sapiens
  misc_RNA (1)...(19): siRNA sense strand
ucaaacagccuucucauua

SEQ ID NO: 1759287 - RNA, 19 nt, Homo sapiens
  misc_RNA (1)...(19): siRNA sense strand
caaacagccuucucauuaa

SEQ ID NO: 1759288 - RNA, 19 nt, Homo sapiens
  misc_RNA (1)...(19): siRNA sense strand
gcacaggagcuucacaaua

SEQ ID NO: 1759289 - RNA, 19 nt, Homo sapiens
  misc_RNA (1)...(19): siRNA sense strand
ggagaagacuguauugaag

SEQ ID NO: 1759290 - RNA, 19 nt, Homo sapiens
  misc_RNA (1)...(19): siRNA sense strand
gagcaagugucccaagauu

SEQ ID NO: 1759291 - RNA, 19 nt, Homo sapiens
  misc_RNA (1)...(19): siRNA sense strand
gagcaucacuacaagcaaa

SEQ ID NO: 1759292 - RNA, 19 nt, Homo sapiens
  misc_RNA (1)...(19): siRNA sense strand
gaaauagaacugagaguga

SEQ ID NO: 1759293 - RNA, 19 nt, Homo sapiens
  misc_RNA (1)...(19): siRNA sense strand
aagcagagcuggaaauguu

SEQ ID NO: 1759294 - RNA, 19 nt, Homo sapiens
  misc_RNA (1)...(19): siRNA sense strand
gaacuaaugcaacuggaaa

SEQ ID NO: 1759295 - RNA, 19 nt, Homo sapiens
  misc_RNA (1)...(19): siRNA sense strand
gcaaagccucccucugaua

SEQ ID NO: 1759296 - RNA, 19 nt, Homo sapiens
  misc_RNA (1)...(19): siRNA sense strand
gaagaaaaggugcauguua

SEQ ID NO: 1759297 - RNA, 19 nt, Homo sapiens
  misc_RNA (1)...(19): siRNA sense strand
cagcugaacucugauauca

SEQ ID NO: 1759298 - RNA, 19 nt, Homo sapiens
  misc_RNA (1)...(19): siRNA sense strand
gauaucagcgccaucacua

SEQ ID NO: 1759299 - RNA, 19 nt, Homo sapiens
  misc_RNA (1)...(19): siRNA sense strand
gcaaggaauuucugcaaac

SEQ ID NO: 1759300 - RNA, 19 nt, Homo sapiens
  misc_RNA (1)...(19): siRNA sense strand
ugcaacagcugaacucuga

SEQ ID NO: 1759301 - RNA, 19 nt, Homo sapiens
  misc_RNA (1)...(19): siRNA sense strand
gcacucaggccaacaacuu

SEQ ID NO: 1759302 - RNA, 19 nt, Homo sapiens
  misc_RNA (1)...(19): siRNA sense strand
gaagagacugcaggagaua

SEQ ID NO: 1759303 - RNA, 19 nt, Homo sapiens
  misc_RNA (1)...(19): siRNA sense strand
gagaagaaacucaaacagu

SEQ ID NO: 1759304 - RNA, 19 nt, Homo sapiens
  misc_RNA (1)...(19): siRNA sense strand
ggagggaacuaaugcaacu

SEQ ID NO: 1759305 - RNA, 19 nt, Homo sapiens
  misc_RNA (1)...(19): siRNA sense strand
ggaccagccuccugcaaca

SEQ ID NO: 1759306 - RNA, 19 nt, Homo sapiens
  misc_RNA (1)...(19): siRNA sense strand
gaaggugacaggaauguuc

SEQ ID NO: 1759307 - RNA, 19 nt, Homo sapiens
  misc_RNA (1)...(19): siRNA sense strand
caacagcugaacucugaua

SEQ ID NO: 1759308 - RNA, 19 nt, Homo sapiens
  misc_RNA (1)...(19): siRNA sense strand
uggcaaagccucccucuga

SEQ ID NO: 1759309 - RNA, 19 nt, Homo sapiens
  misc_RNA (1)...(19): siRNA sense strand
aaauagaacugagagugaa

SEQ ID NO: 1759310 - RNA, 19 nt, Homo sapiens
  misc_RNA (1)...(19): siRNA sense strand
ugaagagacugcaggagau

SEQ ID NO: 1759311 - RNA, 19 nt, Homo sapiens
  misc_RNA (1)...(19): siRNA sense strand
gguagaacgucaaccucaa

SEQ ID NO: 1759312 - RNA, 19 nt, Homo sapiens
  misc_RNA (1)...(19): siRNA sense strand
cuauggaaagcuacuauua

SEQ ID NO: 1759313 - RNA, 19 nt, Homo sapiens
  misc_RNA (1)...(19): siRNA sense strand
caaagccucccucugauau

SEQ ID NO: 1759314 - RNA, 19 nt, Homo sapiens
  misc_RNA (1)...(19): siRNA sense strand
ccucugauauccaggaaau

SEQ ID NO: 1759315 - RNA, 19 nt, Homo sapiens
  misc_RNA (1)...(19): siRNA sense strand
gagcuggaaauguuaaaga

SEQ ID NO: 1759316 - RNA, 19 nt, Homo sapiens
  misc_RNA (1)...(19): siRNA sense strand
aaacagccuucucauuaag

SEQ ID NO: 1759317 - RNA, 19 nt, Homo sapiens
  misc_RNA (1)...(19): siRNA sense strand
gcagagcuggaaauguuaa

SEQ ID NO: 1759318 - RNA, 19 nt, Homo sapiens
  misc_RNA (1)...(19): siRNA sense strand
gcagugagaacuacagaag

SEQ ID NO: 1759319 - RNA, 19 nt, Homo sapiens
  misc_RNA (1)...(19): siRNA sense strand
caacuuugcccgguccuuu

SEQ ID NO: 1759320 - RNA, 19 nt, Homo sapiens
  misc_RNA (1)...(19): siRNA sense strand
uaagggacauggagaagac

SEQ ID NO: 1759321 - RNA, 19 nt, Homo sapiens
  misc_RNA (1)...(19): siRNA sense strand
gcacggaugguggcaaaga

SEQ ID NO: 1759322 - RNA, 19 nt, Homo sapiens
  misc_RNA (1)...(19): siRNA sense strand
ggacauggagaagacugua

SEQ ID NO: 1759323 - RNA, 19 nt, Homo sapiens
  misc_RNA (1)...(19): siRNA sense strand
cgacagaugggagaugauu

SEQ ID NO: 1759324 - RNA, 19 nt, Homo sapiens
  misc_RNA (1)...(19): siRNA sense strand
ggaacuaaugcaacuggaa

SEQ ID NO: 1759325 - RNA, 19 nt, Homo sapiens
  misc_RNA (1)...(19): siRNA sense strand
ggcaaagccucccucugau

SEQ ID NO: 1759326 - RNA, 19 nt, Homo sapiens
  misc_RNA (1)...(19): siRNA sense strand
caucacuacuuggcugaaa

SEQ ID NO: 1759327 - RNA, 19 nt, Homo sapiens
  misc_RNA (1)...(19): siRNA sense strand
ggacauguuacaggagauu

SEQ ID NO: 1759328 - RNA, 19 nt, Homo sapiens
  misc_RNA (1)...(19): siRNA sense strand
aauggaaggugacaggaau

SEQ ID NO: 1759329 - RNA, 19 nt, Homo sapiens
  misc_RNA (1)...(19): siRNA sense strand
uggagaagacuguauugaa

SEQ ID NO: 1759330 - RNA, 19 nt, Homo sapiens
  misc_RNA (1)...(19): siRNA sense strand
uacaggagauuucaaacag

SEQ ID NO: 1759331 - RNA, 19 nt, Homo sapiens
  misc_RNA (1)...(19): siRNA sense strand
ucagcgccaucacuacuug

SEQ ID NO: 1759332 - RNA, 19 nt, Homo sapiens
  misc_RNA (1)...(19): siRNA sense strand
aagaaaaggugcauguuau

SEQ ID NO: 1759333 - RNA, 19 nt, Homo sapiens
  misc_RNA (1)...(19): siRNA sense strand
uauaaaccacccuauggaa

SEQ ID NO: 1759334 - RNA, 19 nt, Homo sapiens
  misc_RNA (1)...(19): siRNA sense strand
ggaggcagaaggcucaugu

SEQ ID NO: 1759335 - RNA, 19 nt, Homo sapiens
  misc_RNA (1)...(19): siRNA sense strand
gcauguuauugagaagaaa

SEQ ID NO: 1759336 - RNA, 19 nt, Homo sapiens
  misc_RNA (1)...(19): siRNA sense strand
caacgugagcagcaaggaa

SEQ ID NO: 1759337 - RNA, 19 nt, Homo sapiens
  misc_RNA (1)...(19): siRNA sense strand
gaaaaggugcauguuauug

SEQ ID NO: 1759338 - RNA, 19 nt, Homo sapiens
  misc_RNA (1)...(19): siRNA sense strand
cagcaaggaauuucugcaa

SEQ ID NO: 1759339 - RNA, 19 nt, Homo sapiens
  misc_RNA (1)...(19): siRNA sense strand
aaaggugcauguuauugag

SEQ ID NO: 1759340 - RNA, 19 nt, Homo sapiens
  misc_RNA (1)...(19): siRNA sense strand
uaaaccacccuauggaaag

SEQ ID NO: 1759341 - RNA, 19 nt, Homo sapiens
  misc_RNA (1)...(19): siRNA sense strand
gaagcagagcuggaaaugu

SEQ ID NO: 1759342 - RNA, 19 nt, Homo sapiens
  misc_RNA (1)...(19): siRNA sense strand
caagugucccaagauuuaa

SEQ ID NO: 1759343 - RNA, 19 nt, Homo sapiens
  misc_RNA (1)...(19): siRNA sense strand
ccaagaaccggaggcagaa

SEQ ID NO: 1759344 - RNA, 19 nt, Homo sapiens
  misc_RNA (1)...(19): siRNA sense strand
agcaaggaauuucugcaaa

SEQ ID NO: 1759345 - RNA, 19 nt, Homo sapiens
  misc_RNA (1)...(19): siRNA sense strand
gagcagugagaacuacaga

SEQ ID NO: 1759346 - RNA, 19 nt, Homo sapiens
  misc_RNA (1)...(19): siRNA sense strand
gguuagcgagugccaagaa

SEQ ID NO: 1759347 - RNA, 19 nt, Homo sapiens
  misc_RNA (1)...(19): siRNA sense strand
ucacuacaagcaaauggaa

SEQ ID NO: 1759348 - RNA, 19 nt, Homo sapiens
  misc_RNA (1)...(19): siRNA sense strand
ggagcaagugucccaagau

SEQ ID NO: 1759349 - RNA, 19 nt, Homo sapiens
  misc_RNA (1)...(19): siRNA sense strand
auaaaccacccuauggaaa

SEQ ID NO: 1759350 - RNA, 19 nt, Homo sapiens
  misc_RNA (1)...(19): siRNA sense strand
cacggaugguggcaaagaa

SEQ ID NO: 1759351 - RNA, 19 nt, Homo sapiens
  misc_RNA (1)...(19): siRNA sense strand
gcaacccacagcaggaaga

SEQ ID NO: 1759352 - RNA, 19 nt, Homo sapiens
  misc_RNA (1)...(19): siRNA sense strand
ugauauccaggaaauagaa

SEQ ID NO: 1759353 - RNA, 19 nt, Homo sapiens
  misc_RNA (1)...(19): siRNA sense strand
gagcagcaaggaauuucug

SEQ ID NO: 1759354 - RNA, 19 nt, Homo sapiens
  misc_RNA (1)...(19): siRNA sense strand
uaaugcaacuggaaaagga

SEQ ID NO: 1759355 - RNA, 19 nt, Homo sapiens
  misc_RNA (1)...(19): siRNA sense strand
gggacuggccgguaucaca

SEQ ID NO: 1759356 - RNA, 19 nt, Homo sapiens
  misc_RNA (1)...(19): siRNA sense strand
aggcacggaugguggcaaa

SEQ ID NO: 1759357 - RNA, 19 nt, Homo sapiens
  misc_RNA (1)...(19): siRNA sense strand
gcuggaaauguuaaagaug

SEQ ID NO: 1759358 - RNA, 19 nt, Homo sapiens
  misc_RNA (1)...(19): siRNA sense strand
ucagagcagugagaacuac

SEQ ID NO: 1759359 - RNA, 19 nt, Homo sapiens
  misc_RNA (1)...(19): siRNA sense strand
acagaugggagaugauuca

SEQ ID NO: 1759360 - RNA, 19 nt, Homo sapiens
  misc_RNA (1)...(19): siRNA sense strand
gcccagcuucgacgaggua

SEQ ID NO: 1759361 - RNA, 19 nt, Homo sapiens
  misc_RNA (1)...(19): siRNA sense strand
ugcauguuauugagaagaa

SEQ ID NO: 1759362 - RNA, 19 nt, Homo sapiens
  misc_RNA (1)...(19): siRNA sense strand
uuacaggagauuucaaaca

SEQ ID NO: 1759363 - RNA, 19 nt, Homo sapiens
  misc_RNA (1)...(19): siRNA sense strand
aaccucaaguggacauguu

SEQ ID NO: 1759364 - RNA, 19 nt, Homo sapiens
  misc_RNA (1)...(19): siRNA sense strand
ucaggugccuucgacagau

SEQ ID NO: 1759365 - RNA, 19 nt, Homo sapiens
  misc_RNA (1)...(19): siRNA sense strand
ggacuuccaccaguugagu

SEQ ID NO: 1759366 - RNA, 19 nt, Homo sapiens
  misc_RNA (1)...(19): siRNA sense strand
gcauuaguggucucuguca

SEQ ID NO: 1759367 - RNA, 19 nt, Homo sapiens
  misc_RNA (1)...(19): siRNA sense strand
ccaggaaauagaacugaga

SEQ ID NO: 1759368 - RNA, 19 nt, Homo sapiens
  misc_RNA (1)...(19): siRNA sense strand
ggaaggugacaggaauguu

SEQ ID NO: 1759369 - RNA, 19 nt, Homo sapiens
  misc_RNA (1)...(19): siRNA sense strand
ggaaaaggagcugguagaa

SEQ ID NO: 1759370 - RNA, 19 nt, Homo sapiens
  misc_RNA (1)...(19): siRNA sense strand
ugaagcagagcuggaaaug

SEQ ID NO: 1759371 - RNA, 19 nt, Homo sapiens
  misc_RNA (1)...(19): siRNA sense strand
augcugagguacaccaaug

SEQ ID NO: 1759372 - RNA, 19 nt, Homo sapiens
  misc_RNA (1)...(19): siRNA sense strand
caggugccuucgacagaug

SEQ ID NO: 1759373 - RNA, 19 nt, Homo sapiens
  misc_RNA (1)...(19): siRNA sense strand
cauuaguggucucugucaa

SEQ ID NO: 1759374 - RNA, 19 nt, Homo sapiens
  misc_RNA (1)...(19): siRNA sense strand
ugacacuuacaaggcauua

SEQ ID NO: 1759375 - RNA, 19 nt, Homo sapiens
  misc_RNA (1)...(19): siRNA sense strand
aaaaucugcugcugugguu

SEQ ID NO: 1759376 - RNA, 19 nt, Homo sapiens
  misc_RNA (1)...(19): siRNA sense strand
gucccgagcaucacuacaa

SEQ ID NO: 1759377 - RNA, 19 nt, Homo sapiens
  misc_RNA (1)...(19): siRNA sense strand
acauggagaagacuguauu

SEQ ID NO: 1759378 - RNA, 19 nt, Homo sapiens
  misc_RNA (1)...(19): siRNA sense strand
uuauaaaccacccuaugga

SEQ ID NO: 1759379 - RNA, 19 nt, Homo sapiens
  misc_RNA (1)...(19): siRNA sense strand
cauuaagggacauggagaa

SEQ ID NO: 1759380 - RNA, 19 nt, Homo sapiens
  misc_RNA (1)...(19): siRNA sense strand
guagaacgucaaccucaag

SEQ ID NO: 1759381 - RNA, 19 nt, Homo sapiens
  misc_RNA (1)...(19): siRNA sense strand
gagugucggagggaacuaa

SEQ ID NO: 1759382 - RNA, 19 nt, Homo sapiens
  misc_RNA (1)...(19): siRNA sense strand
gcucaugucaccgauccaa

SEQ ID NO: 1759383 - RNA, 19 nt, Homo sapiens
  misc_RNA (1)...(19): siRNA sense strand
cacaggagcuucacaauaa

SEQ ID NO: 1759384 - RNA, 19 nt, Homo sapiens
  misc_RNA (1)...(19): siRNA sense strand
gcaagugucccaagauuua

SEQ ID NO: 1759385 - RNA, 19 nt, Homo sapiens
  misc_RNA (1)...(19): siRNA sense strand
ccacagagcuccaaaguag

SEQ ID NO: 1759386 - RNA, 19 nt, Homo sapiens
  misc_RNA (1)...(19): siRNA sense strand
ucaaacagccuucucauua

SEQ ID NO: 1759387 - RNA, 19 nt, Homo sapiens
  misc_RNA (1)...(19): siRNA sense strand
caaacagccuucucauuaa

SEQ ID NO: 1759388 - RNA, 19 nt, Homo sapiens
  misc_RNA (1)...(19): siRNA sense strand
gcacaggagcuucacaaua

SEQ ID NO: 1759389 - RNA, 19 nt, Homo sapiens
  misc_RNA (1)...(19): siRNA sense strand
ggagaagacuguauugaag

SEQ ID NO: 1759390 - RNA, 19 nt, Homo sapiens
  misc_RNA (1)...(19): siRNA sense strand
gagcaagugucccaagauu

SEQ ID NO: 1759391 - RNA, 19 nt, Homo sapiens
  misc_RNA (1)...(19): siRNA sense strand
gagcaucacuacaagcaaa

SEQ ID NO: 1759392 - RNA, 19 nt, Homo sapiens
  misc_RNA (1)...(19): siRNA sense strand
gaaauagaacugagaguga

SEQ ID NO: 1759393 - RNA, 19 nt, Homo sapiens
  misc_RNA (1)...(19): siRNA sense strand
aagcagagcuggaaauguu

SEQ ID NO: 1759394 - RNA, 19 nt, Homo sapiens
  misc_RNA (1)...(19): siRNA sense strand
gaacuaaugcaacuggaaa

SEQ ID NO: 1759395 - RNA, 19 nt, Homo sapiens
  misc_RNA (1)...(19): siRNA sense strand
gcaaagccucccucugaua

SEQ ID NO: 1759396 - RNA, 19 nt, Homo sapiens
  misc_RNA (1)...(19): siRNA sense strand
gaagaaaaggugcauguua

SEQ ID NO: 1759397 - RNA, 19 nt, Homo sapiens
  misc_RNA (1)...(19): siRNA sense strand
cagcugaacucugauauca

SEQ ID NO: 1759398 - RNA, 19 nt, Homo sapiens
  misc_RNA (1)...(19): siRNA sense strand
gauaucagcgccaucacua

SEQ ID NO: 1759399 - RNA, 19 nt, Homo sapiens
  misc_RNA (1)...(19): siRNA sense strand
gcaaggaauuucugcaaac

SEQ ID NO: 1759400 - RNA, 19 nt, Homo sapiens
  misc_RNA (1)...(19): siRNA sense strand
ugcaacagcugaacucuga

SEQ ID NO: 1759401 - RNA, 19 nt, Homo sapiens
  misc_RNA (1)...(19): siRNA sense strand
gcacucaggccaacaacuu

SEQ ID NO: 1759402 - RNA, 19 nt, Homo sapiens
  misc_RNA (1)...(19): siRNA sense strand
gaagagacugcaggagaua

SEQ ID NO: 1759403 - RNA, 19 nt, Homo sapiens
  misc_RNA (1)...(19): siRNA sense strand
gagaagaaacucaaacagu

SEQ ID NO: 1759404 - RNA, 19 nt, Homo sapiens
  misc_RNA (1)...(19): siRNA sense strand
ggagggaacuaaugcaacu

SEQ ID NO: 1759405 - RNA, 19 nt, Homo sapiens
  misc_RNA (1)...(19): siRNA sense strand
ggaccagccuccugcaaca

SEQ ID NO: 1759406 - RNA, 19 nt, Homo sapiens
  misc_RNA (1)...(19): siRNA sense strand
gaaggugacaggaauguuc

SEQ ID NO: 1759407 - RNA, 19 nt, Homo sapiens
  misc_RNA (1)...(19): siRNA sense strand
caacagcugaacucugaua

SEQ ID NO: 1759408 - RNA, 19 nt, Homo sapiens
  misc_RNA (1)...(19): siRNA sense strand
uggcaaagccucccucuga

SEQ ID NO: 1759409 - RNA, 19 nt, Homo sapiens
  misc_RNA (1)...(19): siRNA sense strand
aaauagaacugagagugaa

SEQ ID NO: 1759410 - RNA, 19 nt, Homo sapiens
  misc_RNA (1)...(19): siRNA sense strand
ugaagagacugcaggagau

SEQ ID NO: 1759411 - RNA, 19 nt, Homo sapiens
  misc_RNA (1)...(19): siRNA sense strand
gguagaacgucaaccucaa

SEQ ID NO: 1759412 - RNA, 19 nt, Homo sapiens
  misc_RNA (1)...(19): siRNA sense strand
cuauggaaagcuacuauua

SEQ ID NO: 1759413 - RNA, 19 nt, Homo sapiens
  misc_RNA (1)...(19): siRNA sense strand
caaagccucccucugauau

SEQ ID NO: 1759414 - RNA, 19 nt, Homo sapiens
  misc_RNA (1)...(19): siRNA sense strand
ccucugauauccaggaaau

SEQ ID NO: 1759415 - RNA, 19 nt, Homo sapiens
  misc_RNA (1)...(19): siRNA sense strand
gagcuggaaauguuaaaga

SEQ ID NO: 1759416 - RNA, 19 nt, Homo sapiens
  misc_RNA (1)...(19): siRNA sense strand
aaacagccuucucauuaag

SEQ ID NO: 1759417 - RNA, 19 nt, Homo sapiens
  misc_RNA (1)...(19): siRNA sense strand
gcagagcuggaaauguuaa

SEQ ID NO: 1759418 - RNA, 19 nt, Homo sapiens
  misc_RNA (1)...(19): siRNA sense strand
gcagugagaacuacagaag

SEQ ID NO: 1759419 - RNA, 19 nt, Homo sapiens
  misc_RNA (1)...(19): siRNA sense strand
caacuuugcccgguccuuu

SEQ ID NO: 1759420 - RNA, 19 nt, Homo sapiens
  misc_RNA (1)...(19): siRNA sense strand
uaagggacauggagaagac

SEQ ID NO: 1759421 - RNA, 19 nt, Homo sapiens
  misc_RNA (1)...(19): siRNA sense strand
gcacggaugguggcaaaga

SEQ ID NO: 1759422 - RNA, 19 nt, Homo sapiens
  misc_RNA (1)...(19): siRNA sense strand
ggacauggagaagacugua

SEQ ID NO: 1759423 - RNA, 19 nt, Homo sapiens
  misc_RNA (1)...(19): siRNA sense strand
cgacagaugggagaugauu

SEQ ID NO: 1759424 - RNA, 19 nt, Homo sapiens
  misc_RNA (1)...(19): siRNA sense strand
ggaacuaaugcaacuggaa

SEQ ID NO: 1759425 - RNA, 19 nt, Homo sapiens
  misc_RNA (1)...(19): siRNA sense strand
ggcaaagccucccucugau

SEQ ID NO: 1759426 - RNA, 19 nt, Homo sapiens
  misc_RNA (1)...(19): siRNA sense strand
caucacuacuuggcugaaa

SEQ ID NO: 1759427 - RNA, 19 nt, Homo sapiens
  misc_RNA (1)...(19): siRNA sense strand
ggacauguuacaggagauu

SEQ ID NO: 1759428 - RNA, 19 nt, Homo sapiens
  misc_RNA (1)...(19): siRNA sense strand
aauggaaggugacaggaau

SEQ ID NO: 1759429 - RNA, 19 nt, Homo sapiens
  misc_RNA (1)...(19): siRNA sense strand
uggagaagacuguauugaa

SEQ ID NO: 1759430 - RNA, 19 nt, Homo sapiens
  misc_RNA (1)...(19): siRNA sense strand
uacaggagauuucaaacag

SEQ ID NO: 1759431 - RNA, 19 nt, Homo sapiens
  misc_RNA (1)...(19): siRNA sense strand
ucagcgccaucacuacuug

SEQ ID NO: 1759432 - RNA, 19 nt, Homo sapiens
  misc_RNA (1)...(19): siRNA sense strand
aagaaaaggugcauguuau

SEQ ID NO: 1759433 - RNA, 19 nt, Homo sapiens
  misc_RNA (1)...(19): siRNA sense strand
uauaaaccacccuauggaa

SEQ ID NO: 1759434 - RNA, 19 nt, Homo sapiens
  misc_RNA (1)...(19): siRNA sense strand
ggaggcagaaggcucaugu

SEQ ID NO: 1759435 - RNA, 19 nt, Homo sapiens
  misc_RNA (1)...(19): siRNA sense strand
gcauguuauugagaagaaa

SEQ ID NO: 1759436 - RNA, 19 nt, Homo sapiens
  misc_RNA (1)...(19): siRNA sense strand
caacgugagcagcaaggaa

SEQ ID NO: 1759437 - RNA, 19 nt, Homo sapiens
  misc_RNA (1)...(19): siRNA sense strand
gaaaaggugcauguuauug

SEQ ID NO: 1759438 - RNA, 19 nt, Homo sapiens
  misc_RNA (1)...(19): siRNA sense strand
cagcaaggaauuucugcaa

SEQ ID NO: 1759439 - RNA, 19 nt, Homo sapiens
  misc_RNA (1)...(19): siRNA sense strand
aaaggugcauguuauugag

SEQ ID NO: 1759440 - RNA, 19 nt, Homo sapiens
  misc_RNA (1)...(19): siRNA sense strand
uaaaccacccuauggaaag

SEQ ID NO: 1759441 - RNA, 19 nt, Homo sapiens
  misc_RNA (1)...(19): siRNA sense strand
gaagcagagcuggaaaugu

SEQ ID NO: 1759442 - RNA, 19 nt, Homo sapiens
  misc_RNA (1)...(19): siRNA sense strand
caagugucccaagauuuaa

SEQ ID NO: 1759443 - RNA, 19 nt, Homo sapiens
  misc_RNA (1)...(19): siRNA sense strand
ccaagaaccggaggcagaa

SEQ ID NO: 1759444 - RNA, 19 nt, Homo sapiens
  misc_RNA (1)...(19): siRNA sense strand
agcaaggaauuucugcaaa

SEQ ID NO: 1759445 - RNA, 19 nt, Homo sapiens
  misc_RNA (1)...(19): siRNA sense strand
gagcagugagaacuacaga

SEQ ID NO: 1759446 - RNA, 19 nt, Homo sapiens
  misc_RNA (1)...(19): siRNA sense strand
gguuagcgagugccaagaa

SEQ ID NO: 1759447 - RNA, 19 nt, Homo sapiens
  misc_RNA (1)...(19): siRNA sense strand
ucacuacaagcaaauggaa

SEQ ID NO: 1759448 - RNA, 19 nt, Homo sapiens
  misc_RNA (1)...(19): siRNA sense strand
ggagcaagugucccaagau

SEQ ID NO: 1759449 - RNA, 19 nt, Homo sapiens
  misc_RNA (1)...(19): siRNA sense strand
auaaaccacccuauggaaa

SEQ ID NO: 1759450 - RNA, 19 nt, Homo sapiens
  misc_RNA (1)...(19): siRNA sense strand
cacggaugguggcaaagaa

SEQ ID NO: 1759451 - RNA, 19 nt, Homo sapiens
  misc_RNA (1)...(19): siRNA sense strand
gcaacccacagcaggaaga

SEQ ID NO: 1759452 - RNA, 19 nt, Homo sapiens
  misc_RNA (1)...(19): siRNA sense strand
ugauauccaggaaauagaa

SEQ ID NO: 1759453 - RNA, 19 nt, Homo sapiens
  misc_RNA (1)...(19): siRNA sense strand
gagcagcaaggaauuucug

SEQ ID NO: 1759454 - RNA, 19 nt, Homo sapiens
  misc_RNA (1)...(19): siRNA sense strand
uaaugcaacuggaaaagga

SEQ ID NO: 1759455 - RNA, 19 nt, Homo sapiens
  misc_RNA (1)...(19): siRNA sense strand
gggacuggccgguaucaca

SEQ ID NO: 1759456 - RNA, 19 nt, Homo sapiens
  misc_RNA (1)...(19): siRNA sense strand
aggcacggaugguggcaaa

SEQ ID NO: 1759457 - RNA, 19 nt, Homo sapiens
  misc_RNA (1)...(19): siRNA sense strand
gcuggaaauguuaaagaug

SEQ ID NO: 1759458 - RNA, 19 nt, Homo sapiens
  misc_RNA (1)...(19): siRNA sense strand
ucagagcagugagaacuac

SEQ ID NO: 1759459 - RNA, 19 nt, Homo sapiens
  misc_RNA (1)...(19): siRNA sense strand
acagaugggagaugauuca

SEQ ID NO: 1759460 - RNA, 19 nt, Homo sapiens
  misc_RNA (1)...(19): siRNA sense strand
gcccagcuucgacgaggua

SEQ ID NO: 1759461 - RNA, 19 nt, Homo sapiens
  misc_RNA (1)...(19): siRNA sense strand
ugcauguuauugagaagaa

SEQ ID NO: 1759462 - RNA, 19 nt, Homo sapiens
  misc_RNA (1)...(19): siRNA sense strand
uuacaggagauuucaaaca

SEQ ID NO: 1759463 - RNA, 19 nt, Homo sapiens
  misc_RNA (1)...(19): siRNA sense strand
aaccucaaguggacauguu

SEQ ID NO: 1759464 - RNA, 19 nt, Homo sapiens
  misc_RNA (1)...(19): siRNA sense strand
ucaggugccuucgacagau

SEQ ID NO: 1759465 - RNA, 19 nt, Homo sapiens
  misc_RNA (1)...(19): siRNA sense strand
ggacuuccaccaguugagu

SEQ ID NO: 1759466 - RNA, 19 nt, Homo sapiens
  misc_RNA (1)...(19): siRNA sense strand
gcauuaguggucucuguca

SEQ ID NO: 1759467 - RNA, 19 nt, Homo sapiens
  misc_RNA (1)...(19): siRNA sense strand
ccaggaaauagaacugaga

SEQ ID NO: 1759468 - RNA, 19 nt, Homo sapiens
  misc_RNA (1)...(19): siRNA sense strand
ggaaggugacaggaauguu

SEQ ID NO: 1759469 - RNA, 19 nt, Homo sapiens
  misc_RNA (1)...(19): siRNA sense strand
ggaaaaggagcugguagaa

SEQ ID NO: 1759470 - RNA, 19 nt, Homo sapiens
  misc_RNA (1)...(19): siRNA sense strand
ugaagcagagcuggaaaug

SEQ ID NO: 1759471 - RNA, 19 nt, Homo sapiens
  misc_RNA (1)...(19): siRNA sense strand
augcugagguacaccaaug

SEQ ID NO: 1759472 - RNA, 19 nt, Homo sapiens
  misc_RNA (1)...(19): siRNA sense strand
caggugccuucgacagaug

SEQ ID NO: 1759473 - RNA, 19 nt, Homo sapiens
  misc_RNA (1)...(19): siRNA sense strand
cauuaguggucucugucaa

SEQ ID NO: 1759474 - RNA, 19 nt, Homo sapiens
  misc_RNA (1)...(19): siRNA sense strand
ugacacuuacaaggcauua

SEQ ID NO: 1759475 - RNA, 19 nt, Homo sapiens
  misc_RNA (1)...(19): siRNA sense strand
aaaaucugcugcugugguu

SEQ ID NO: 1759476 - RNA, 19 nt, Homo sapiens
  misc_RNA (1)...(19): siRNA sense strand
gucccgagcaucacuacaa

SEQ ID NO: 1759477 - RNA, 19 nt, Homo sapiens
  misc_RNA (1)...(19): siRNA sense strand
acauggagaagacuguauu

SEQ ID NO: 1759478 - RNA, 19 nt, Homo sapiens
  misc_RNA (1)...(19): siRNA sense strand
uuauaaaccacccuaugga

SEQ ID NO: 1759479 - RNA, 19 nt, Homo sapiens
  misc_RNA (1)...(19): siRNA sense strand
cauuaagggacauggagaa

SEQ ID NO: 1759480 - RNA, 19 nt, Homo sapiens
  misc_RNA (1)...(19): siRNA sense strand
guagaacgucaaccucaag

SEQ ID NO: 1759481 - RNA, 19 nt, Homo sapiens
  misc_RNA (1)...(19): siRNA sense strand
gagugucggagggaacuaa

SEQ ID NO: 1759482 - RNA, 19 nt, Homo sapiens
  misc_RNA (1)...(19): siRNA sense strand
gcucaugucaccgauccaa

SEQ ID NO: 1759483 - RNA, 19 nt, Homo sapiens
  misc_RNA (1)...(19): siRNA sense strand
cacaggagcuucacaauaa

SEQ ID NO: 1759484 - RNA, 19 nt, Homo sapiens
  misc_RNA (1)...(19): siRNA sense strand
gcaagugucccaagauuua

SEQ ID NO: 1759485 - RNA, 19 nt, Homo sapiens
  misc_RNA (1)...(19): siRNA sense strand
ccacagagcuccaaaguag

SEQ ID NO: 1759486 - RNA, 19 nt, Homo sapiens
  misc_RNA (1)...(19): siRNA sense strand
ucaaacagccuucucauua

SEQ ID NO: 1759487 - RNA, 19 nt, Homo sapiens
  misc_RNA (1)...(19): siRNA sense strand
caaacagccuucucauuaa

SEQ ID NO: 1759488 - RNA, 19 nt, Homo sapiens
  misc_RNA (1)...(19): siRNA sense strand
gcacaggagcuucacaaua

SEQ ID NO: 1759489 - RNA, 19 nt, Homo sapiens
  misc_RNA (1)...(19): siRNA sense strand
ggagaagacuguauugaag

SEQ ID NO: 1759490 - RNA, 19 nt, Homo sapiens
  misc_RNA (1)...(19): siRNA sense strand
gagcaagugucccaagauu

SEQ ID NO: 1759491 - RNA, 19 nt, Homo sapiens
  misc_RNA (1)...(19): siRNA sense strand
gagcaucacuacaagcaaa

SEQ ID NO: 1759492 - RNA, 19 nt, Homo sapiens
  misc_RNA (1)...(19): siRNA sense strand
gaaauagaacugagaguga

SEQ ID NO: 1759493 - RNA, 19 nt, Homo sapiens
  misc_RNA (1)...(19): siRNA sense strand
aagcagagcuggaaauguu

SEQ ID NO: 1759494 - RNA, 19 nt, Homo sapiens
  misc_RNA (1)...(19): siRNA sense strand
gaacuaaugcaacuggaaa

SEQ ID NO: 1759495 - RNA, 19 nt, Homo sapiens
  misc_RNA (1)...(19): siRNA sense strand
gcaaagccucccucugaua

SEQ ID NO: 1759496 - RNA, 19 nt, Homo sapiens
  misc_RNA (1)...(19): siRNA sense strand
gaagaaaaggugcauguua

SEQ ID NO: 1759497 - RNA, 19 nt, Homo sapiens
  misc_RNA (1)...(19): siRNA sense strand
cagcugaacucugauauca

SEQ ID NO: 1759498 - RNA, 19 nt, Homo sapiens
  misc_RNA (1)...(19): siRNA sense strand
gauaucagcgccaucacua

SEQ ID NO: 1759499 - RNA, 19 nt, Homo sapiens
  misc_RNA (1)...(19): siRNA sense strand
gcaaggaauuucugcaaac

SEQ ID NO: 1759500 - RNA, 19 nt, Homo sapiens
  misc_RNA (1)...(19): siRNA sense strand
ugcaacagcugaacucuga

SEQ ID NO: 1759501 - RNA, 19 nt, Homo sapiens
  misc_RNA (1)...(19): siRNA sense strand
gcacucaggccaacaacuu

SEQ ID NO: 1759502 - RNA, 19 nt, Homo sapiens
  misc_RNA (1)...(19): siRNA sense strand
gaagagacugcaggagaua

SEQ ID NO: 1759503 - RNA, 19 nt, Homo sapiens
  misc_RNA (1)...(19): siRNA sense strand
gagaagaaacucaaacagu

SEQ ID NO: 1759504 - RNA, 19 nt, Homo sapiens
  misc_RNA (1)...(19): siRNA sense strand
ggagggaacuaaugcaacu

SEQ ID NO: 1759505 - RNA, 19 nt, Homo sapiens
  misc_RNA (1)...(19): siRNA sense strand
ggaccagccuccugcaaca

SEQ ID NO: 1759506 - RNA, 19 nt, Homo sapiens
  misc_RNA (1)...(19): siRNA sense strand
gaaggugacaggaauguuc

SEQ ID NO: 1759507 - RNA, 19 nt, Homo sapiens
  misc_RNA (1)...(19): siRNA sense strand
caacagcugaacucugaua

SEQ ID NO: 1759508 - RNA, 19 nt, Homo sapiens
  misc_RNA (1)...(19): siRNA sense strand
uggcaaagccucccucuga

SEQ ID NO: 1759509 - RNA, 19 nt, Homo sapiens
  misc_RNA (1)...(19): siRNA sense strand
aaauagaacugagagugaa

SEQ ID NO: 1759510 - RNA, 19 nt, Homo sapiens
  misc_RNA (1)...(19): siRNA sense strand
ugaagagacugcaggagau

SEQ ID NO: 1759511 - RNA, 19 nt, Homo sapiens
  misc_RNA (1)...(19): siRNA sense strand
gguagaacgucaaccucaa

SEQ ID NO: 1759512 - RNA, 19 nt, Homo sapiens
  misc_RNA (1)...(19): siRNA sense strand
cuauggaaagcuacuauua

SEQ ID NO: 1759513 - RNA, 19 nt, Homo sapiens
  misc_RNA (1)...(19): siRNA sense strand
caaagccucccucugauau

SEQ ID NO: 1759514 - RNA, 19 nt, Homo sapiens
  misc_RNA (1)...(19): siRNA sense strand
ccucugauauccaggaaau

SEQ ID NO: 1759515 - RNA, 19 nt, Homo sapiens
  misc_RNA (1)...(19): siRNA sense strand
gagcuggaaauguuaaaga

SEQ ID NO: 1759516 - RNA, 19 nt, Homo sapiens
  misc_RNA (1)...(19): siRNA sense strand
aaacagccuucucauuaag

SEQ ID NO: 1759517 - RNA, 19 nt, Homo sapiens
  misc_RNA (1)...(19): siRNA sense strand
gcagagcuggaaauguuaa

SEQ ID NO: 1759518 - RNA, 19 nt, Homo sapiens
  misc_RNA (1)...(19): siRNA sense strand
gcagugagaacuacagaag

SEQ ID NO: 1759519 - RNA, 19 nt, Homo sapiens
  misc_RNA (1)...(19): siRNA sense strand
caacuuugcccgguccuuu

SEQ ID NO: 1759520 - RNA, 19 nt, Homo sapiens
  misc_RNA (1)...(19): siRNA sense strand
uaagggacauggagaagac

SEQ ID NO: 1759521 - RNA, 19 nt, Homo sapiens
  misc_RNA (1)...(19): siRNA sense strand
gcacggaugguggcaaaga

SEQ ID NO: 1759522 - RNA, 19 nt, Homo sapiens
  misc_RNA (1)...(19): siRNA sense strand
ggacauggagaagacugua

SEQ ID NO: 1759523 - RNA, 19 nt, Homo sapiens
  misc_RNA (1)...(19): siRNA sense strand
cgacagaugggagaugauu

SEQ ID NO: 1759524 - RNA, 19 nt, Homo sapiens
  misc_RNA (1)...(19): siRNA sense strand
ggaacuaaugcaacuggaa

SEQ ID NO: 1759525 - RNA, 19 nt, Homo sapiens
  misc_RNA (1)...(19): siRNA sense strand
ggcaaagccucccucugau

SEQ ID NO: 1759526 - RNA, 19 nt, Homo sapiens
  misc_RNA (1)...(19): siRNA sense strand
caucacuacuuggcugaaa

SEQ ID NO: 1759527 - RNA, 19 nt, Homo sapiens
  misc_RNA (1)...(19): siRNA sense strand
ggacauguuacaggagauu

SEQ ID NO: 1759528 - RNA, 19 nt, Homo sapiens
  misc_RNA (1)...(19): siRNA sense strand
aauggaaggugacaggaau

SEQ ID NO: 1759529 - RNA, 19 nt, Homo sapiens
  misc_RNA (1)...(19): siRNA sense strand
uggagaagacuguauugaa

SEQ ID NO: 1759530 - RNA, 19 nt, Homo sapiens
  misc_RNA (1)...(19): siRNA sense strand
uacaggagauuucaaacag

SEQ ID NO: 1759531 - RNA, 19 nt, Homo sapiens
  misc_RNA (1)...(19): siRNA sense strand
ucagcgccaucacuacuug

SEQ ID NO: 1759532 - RNA, 19 nt, Homo sapiens
  misc_RNA (1)...(19): siRNA sense strand
aagaaaaggugcauguuau

SEQ ID NO: 1759533 - RNA, 19 nt, Homo sapiens
  misc_RNA (1)...(19): siRNA sense strand
uauaaaccacccuauggaa

SEQ ID NO: 1759534 - RNA, 19 nt, Homo sapiens
  misc_RNA (1)...(19): siRNA sense strand
ggaggcagaaggcucaugu

SEQ ID NO: 1759535 - RNA, 19 nt, Homo sapiens
  misc_RNA (1)...(19): siRNA sense strand
gcauguuauugagaagaaa

SEQ ID NO: 1759536 - RNA, 19 nt, Homo sapiens
  misc_RNA (1)...(19): siRNA sense strand
caacgugagcagcaaggaa

SEQ ID NO: 1759537 - RNA, 19 nt, Homo sapiens
  misc_RNA (1)...(19): siRNA sense strand
gaaaaggugcauguuauug

SEQ ID NO: 1759538 - RNA, 19 nt, Homo sapiens
  misc_RNA (1)...(19): siRNA sense strand
cagcaaggaauuucugcaa

SEQ ID NO: 1759539 - RNA, 19 nt, Homo sapiens
  misc_RNA (1)...(19): siRNA sense strand
aaaggugcauguuauugag

SEQ ID NO: 1759540 - RNA, 19 nt, Homo sapiens
  misc_RNA (1)...(19): siRNA sense strand
uaaaccacccuauggaaag

SEQ ID NO: 1759541 - RNA, 19 nt, Homo sapiens
  misc_RNA (1)...(19): siRNA sense strand
gaagcagagcuggaaaugu

SEQ ID NO: 1759542 - RNA, 19 nt, Homo sapiens
  misc_RNA (1)...(19): siRNA sense strand
caagugucccaagauuuaa

SEQ ID NO: 1759543 - RNA, 19 nt, Homo sapiens
  misc_RNA (1)...(19): siRNA sense strand
ccaagaaccggaggcagaa

SEQ ID NO: 1759544 - RNA, 19 nt, Homo sapiens
  misc_RNA (1)...(19): siRNA sense strand
agcaaggaauuucugcaaa

SEQ ID NO: 1759545 - RNA, 19 nt, Homo sapiens
  misc_RNA (1)...(19): siRNA sense strand
gagcagugagaacuacaga

SEQ ID NO: 1759546 - RNA, 19 nt, Homo sapiens
  misc_RNA (1)...(19): siRNA sense strand
gguuagcgagugccaagaa

SEQ ID NO: 1759547 - RNA, 19 nt, Homo sapiens
  misc_RNA (1)...(19): siRNA sense strand
ucacuacaagcaaauggaa

SEQ ID NO: 1759548 - RNA, 19 nt, Homo sapiens
  misc_RNA (1)...(19): siRNA sense strand
ggagcaagugucccaagau

SEQ ID NO: 1759549 - RNA, 19 nt, Homo sapiens
  misc_RNA (1)...(19): siRNA sense strand
auaaaccacccuauggaaa

SEQ ID NO: 1759550 - RNA, 19 nt, Homo sapiens
  misc_RNA (1)...(19): siRNA sense strand
cacggaugguggcaaagaa

SEQ ID NO: 1759551 - RNA, 19 nt, Homo sapiens
  misc_RNA (1)...(19): siRNA sense strand
gcaacccacagcaggaaga

SEQ ID NO: 1759552 - RNA, 19 nt, Homo sapiens
  misc_RNA (1)...(19): siRNA sense strand
ugauauccaggaaauagaa

SEQ ID NO: 1759553 - RNA, 19 nt, Homo sapiens
  misc_RNA (1)...(19): siRNA sense strand
gagcagcaaggaauuucug

SEQ ID NO: 1759554 - RNA, 19 nt, Homo sapiens
  misc_RNA (1)...(19): siRNA sense strand
uaaugcaacuggaaaagga

SEQ ID NO: 1759555 - RNA, 19 nt, Homo sapiens
  misc_RNA (1)...(19): siRNA sense strand
gggacuggccgguaucaca

SEQ ID NO: 1759556 - RNA, 19 nt, Homo sapiens
  misc_RNA (1)...(19): siRNA sense strand
aggcacggaugguggcaaa

SEQ ID NO: 1759557 - RNA, 19 nt, Homo sapiens
  misc_RNA (1)...(19): siRNA sense strand
gcuggaaauguuaaagaug

SEQ ID NO: 1759558 - RNA, 19 nt, Homo sapiens
  misc_RNA (1)...(19): siRNA sense strand
ucagagcagugagaacuac

SEQ ID NO: 1759559 - RNA, 19 nt, Homo sapiens
  misc_RNA (1)...(19): siRNA sense strand
acagaugggagaugauuca

SEQ ID NO: 1759560 - RNA, 19 nt, Homo sapiens
  misc_RNA (1)...(19): siRNA sense strand
gcccagcuucgacgaggua

SEQ ID NO: 1759561 - RNA, 19 nt, Homo sapiens
  misc_RNA (1)...(19): siRNA sense strand
ugcauguuauugagaagaa

SEQ ID NO: 1759562 - RNA, 19 nt, Homo sapiens
  misc_RNA (1)...(19): siRNA sense strand
uuacaggagauuucaaaca

SEQ ID NO: 1759563 - RNA, 19 nt, Homo sapiens
  misc_RNA (1)...(19): siRNA sense strand
aaccucaaguggacauguu

SEQ ID NO: 1759564 - RNA, 19 nt, Homo sapiens
  misc_RNA (1)...(19): siRNA sense strand
ucaggugccuucgacagau

SEQ ID NO: 1759565 - RNA, 19 nt, Homo sapiens
  misc_RNA (1)...(19): siRNA sense strand
ggacuuccaccaguugagu

SEQ ID NO: 1759566 - RNA, 19 nt, Homo sapiens
  misc_RNA (1)...(19): siRNA sense strand
gcauuaguggucucuguca

SEQ ID NO: 1759567 - RNA, 19 nt, Homo sapiens
  misc_RNA (1)...(19): siRNA sense strand
ccaggaaauagaacugaga

SEQ ID NO: 1759568 - RNA, 19 nt, Homo sapiens
  misc_RNA (1)...(19): siRNA sense strand
ggaaggugacaggaauguu

SEQ ID NO: 1759569 - RNA, 19 nt, Homo sapiens
  misc_RNA (1)...(19): siRNA sense strand
ggaaaaggagcugguagaa

SEQ ID NO: 1759570 - RNA, 19 nt, Homo sapiens
  misc_RNA (1)...(19): siRNA sense strand
ugaagcagagcuggaaaug

SEQ ID NO: 1759571 - RNA, 19 nt, Homo sapiens
  misc_RNA (1)...(19): siRNA sense strand
augcugagguacaccaaug

SEQ ID NO: 1759572 - RNA, 19 nt, Homo sapiens
  misc_RNA (1)...(19): siRNA sense strand
caggugccuucgacagaug

SEQ ID NO: 1759573 - RNA, 19 nt, Homo sapiens
  misc_RNA (1)...(19): siRNA sense strand
cauuaguggucucugucaa

SEQ ID NO: 1759574 - RNA, 19 nt, Homo sapiens
  misc_RNA (1)...(19): siRNA sense strand
ugacacuuacaaggcauua

SEQ ID NO: 1759575 - RNA, 19 nt, Homo sapiens
  misc_RNA (1)...(19): siRNA sense strand
aaaaucugcugcugugguu

SEQ ID NO: 1759576 - RNA, 19 nt, Homo sapiens
  misc_RNA (1)...(19): siRNA sense strand
gucccgagcaucacuacaa

SEQ ID NO: 1759577 - RNA, 19 nt, Homo sapiens
  misc_RNA (1)...(19): siRNA sense strand
acauggagaagacuguauu

SEQ ID NO: 1759578 - RNA, 19 nt, Homo sapiens
  misc_RNA (1)...(19): siRNA sense strand
uuauaaaccacccuaugga

SEQ ID NO: 1759579 - RNA, 19 nt, Homo sapiens
  misc_RNA (1)...(19): siRNA sense strand
cauuaagggacauggagaa

SEQ ID NO: 1759580 - RNA, 19 nt, Homo sapiens
  misc_RNA (1)...(19): siRNA sense strand
guagaacgucaaccucaag

SEQ ID NO: 1759581 - RNA, 19 nt, Homo sapiens
  misc_RNA (1)...(19): siRNA sense strand
gagugucggagggaacuaa

SEQ ID NO: 1759582 - RNA, 19 nt, Homo sapiens
  misc_RNA (1)...(19): siRNA sense strand
gcucaugucaccgauccaa

SEQ ID NO: 1759583 - RNA, 19 nt, Homo sapiens
  misc_RNA (1)...(19): siRNA sense strand
ugaagaagcuggacaguaa

SEQ ID NO: 1759584 - RNA, 19 nt, Homo sapiens
  misc_RNA (1)...(19): siRNA sense strand
agaagaaacuggaggauaa

SEQ ID NO: 1759585 - RNA, 19 nt, Homo sapiens
  misc_RNA (1)...(19): siRNA sense strand
agaaagagcugcacgagaa

SEQ ID NO: 1759586 - RNA, 19 nt, Homo sapiens
  misc_RNA (1)...(19): siRNA sense strand
gaagagugcuacacaccua

SEQ ID NO: 1759587 - RNA, 19 nt, Homo sapiens
  misc_RNA (1)...(19): siRNA sense strand
gaaagaagcggagcucaaa

SEQ ID NO: 1759588 - RNA, 19 nt, Homo sapiens
  misc_RNA (1)...(19): siRNA sense strand
gaagauaggcaacaagaug

SEQ ID NO: 1759589 - RNA, 19 nt, Homo sapiens
  misc_RNA (1)...(19): siRNA sense strand
agagugagcuaacaaaguu

SEQ ID NO: 1759590 - RNA, 19 nt, Homo sapiens
  misc_RNA (1)...(19): siRNA sense strand
gcuguaagcuggaggagau

SEQ ID NO: 1759591 - RNA, 19 nt, Homo sapiens
  misc_RNA (1)...(19): siRNA sense strand
gaagagagacaaagagaag

SEQ ID NO: 1759592 - RNA, 19 nt, Homo sapiens
  misc_RNA (1)...(19): siRNA sense strand
gcaacggaguccagaucua

SEQ ID NO: 1759593 - RNA, 19 nt, Homo sapiens
  misc_RNA (1)...(19): siRNA sense strand
cagaagaacugaagauagg

SEQ ID NO: 1759594 - RNA, 19 nt, Homo sapiens
  misc_RNA (1)...(19): siRNA sense strand
gcucaaagaggcagagaaa

SEQ ID NO: 1759595 - RNA, 19 nt, Homo sapiens
  misc_RNA (1)...(19): siRNA sense strand
gggaccagaucaacaaaga

SEQ ID NO: 1759596 - RNA, 19 nt, Homo sapiens
  misc_RNA (1)...(19): siRNA sense strand
ggagacauaugaggccaaa

SEQ ID NO: 1759597 - RNA, 19 nt, Homo sapiens
  misc_RNA (1)...(19): siRNA sense strand
cuaaagcucacgaucguua

SEQ ID NO: 1759598 - RNA, 19 nt, Homo sapiens
  misc_RNA (1)...(19): siRNA sense strand
ucaaagaggcagagaaaga

SEQ ID NO: 1759599 - RNA, 19 nt, Homo sapiens
  misc_RNA (1)...(19): siRNA sense strand
ccagcgagcuugucagcaa

SEQ ID NO: 1759600 - RNA, 19 nt, Homo sapiens
  misc_RNA (1)...(19): siRNA sense strand
cuacaagccuaucguggaa

SEQ ID NO: 1759601 - RNA, 19 nt, Homo sapiens
  misc_RNA (1)...(19): siRNA sense strand
gcagaugccauuucgaaga

SEQ ID NO: 1759602 - RNA, 19 nt, Homo sapiens
  misc_RNA (1)...(19): siRNA sense strand
caaagcagaugccauuucg

SEQ ID NO: 1759603 - RNA, 19 nt, Homo sapiens
  misc_RNA (1)...(19): siRNA sense strand
gaagaggagaugagacaga

SEQ ID NO: 1759604 - RNA, 19 nt, Homo sapiens
  misc_RNA (1)...(19): siRNA sense strand
gagagcaacgugaggcuaa

SEQ ID NO: 1759605 - RNA, 19 nt, Homo sapiens
  misc_RNA (1)...(19): siRNA sense strand
gcacagaagaacugaagau

SEQ ID NO: 1759606 - RNA, 19 nt, Homo sapiens
  misc_RNA (1)...(19): siRNA sense strand
gaauccaugucugcuugua

SEQ ID NO: 1759607 - RNA, 19 nt, Homo sapiens
  misc_RNA (1)...(19): siRNA sense strand
gcaggaagagcuaaagauc

SEQ ID NO: 1759608 - RNA, 19 nt, Homo sapiens
  misc_RNA (1)...(19): siRNA sense strand
guccagaucuaucaguuuc

SEQ ID NO: 1759609 - RNA, 19 nt, Homo sapiens
  misc_RNA (1)...(19): siRNA sense strand
guguccagcuccagucuaa

SEQ ID NO: 1759610 - RNA, 19 nt, Homo sapiens
  misc_RNA (1)...(19): siRNA sense strand
gaguccagaucuaucaguu

SEQ ID NO: 1759611 - RNA, 19 nt, Homo sapiens
  misc_RNA (1)...(19): siRNA sense strand
guccagcuccagucuaaua

SEQ ID NO: 1759612 - RNA, 19 nt, Homo sapiens
  misc_RNA (1)...(19): siRNA sense strand
gcuccagucuaauaccuau

SEQ ID NO: 1759613 - RNA, 19 nt, Homo sapiens
  misc_RNA (1)...(19): siRNA sense strand
gaaacuggaggauaagaag

SEQ ID NO: 1759614 - RNA, 19 nt, Homo sapiens
  misc_RNA (1)...(19): siRNA sense strand
caacggaguccagaucuau

SEQ ID NO: 1759615 - RNA, 19 nt, Homo sapiens
  misc_RNA (1)...(19): siRNA sense strand
auucaucgaugcacaauuc

SEQ ID NO: 1759616 - RNA, 19 nt, Homo sapiens
  misc_RNA (1)...(19): siRNA sense strand
ugaagucucuggaccuagu

SEQ ID NO: 1759617 - RNA, 19 nt, Homo sapiens
  misc_RNA (1)...(19): siRNA sense strand
acaagccuaucguggaauu

SEQ ID NO: 1759618 - RNA, 19 nt, Homo sapiens
  misc_RNA (1)...(19): siRNA sense strand
caccgacccugacagcaaa

SEQ ID NO: 1759619 - RNA, 19 nt, Homo sapiens
  misc_RNA (1)...(19): siRNA sense strand
gaacugaagauaggcaaca

SEQ ID NO: 1759620 - RNA, 19 nt, Homo sapiens
  misc_RNA (1)...(19): siRNA sense strand
gaagagugagcuaacaaag

SEQ ID NO: 1759621 - RNA, 19 nt, Homo sapiens
  misc_RNA (1)...(19): siRNA sense strand
acaguaaggugaacaucau

SEQ ID NO: 1759622 - RNA, 19 nt, Homo sapiens
  misc_RNA (1)...(19): siRNA sense strand
ggaauucaucgaugcacaa

SEQ ID NO: 1759623 - RNA, 19 nt, Homo sapiens
  misc_RNA (1)...(19): siRNA sense strand
augaugaagugaaugcuuu

SEQ ID NO: 1759624 - RNA, 19 nt, Homo sapiens
  misc_RNA (1)...(19): siRNA sense strand
gaggagaugagacagaugu

SEQ ID NO: 1759625 - RNA, 19 nt, Homo sapiens
  misc_RNA (1)...(19): siRNA sense strand
ggugaagguugccgaacug

SEQ ID NO: 1759626 - RNA, 19 nt, Homo sapiens
  misc_RNA (1)...(19): siRNA sense strand
caugucugcuuguauuuca

SEQ ID NO: 1759627 - RNA, 19 nt, Homo sapiens
  misc_RNA (1)...(19): siRNA sense strand
guucaacaccaaauucgaa

SEQ ID NO: 1759628 - RNA, 19 nt, Homo sapiens
  misc_RNA (1)...(19): siRNA sense strand
gaaguuugaccgucugaag

SEQ ID NO: 1759629 - RNA, 19 nt, Homo sapiens
  misc_RNA (1)...(19): siRNA sense strand
gaacaucauccccaucauu

SEQ ID NO: 1759630 - RNA, 19 nt, Homo sapiens
  misc_RNA (1)...(19): siRNA sense strand
ucuaucaguuuccuacaga

SEQ ID NO: 1759631 - RNA, 19 nt, Homo sapiens
  misc_RNA (1)...(19): siRNA sense strand
cgaagagugagcuaacaaa

SEQ ID NO: 1759632 - RNA, 19 nt, Homo sapiens
  misc_RNA (1)...(19): siRNA sense strand
uaauaccuaugaccuccaa

SEQ ID NO: 1759633 - RNA, 19 nt, Homo sapiens
  misc_RNA (1)...(19): siRNA sense strand
ggcuaaagcucacgaucgu

SEQ ID NO: 1759634 - RNA, 19 nt, Homo sapiens
  misc_RNA (1)...(19): siRNA sense strand
cacagaagaacugaagaua

SEQ ID NO: 1759635 - RNA, 19 nt, Homo sapiens
  misc_RNA (1)...(19): siRNA sense strand
cagaugccauuucgaagag

SEQ ID NO: 1759636 - RNA, 19 nt, Homo sapiens
  misc_RNA (1)...(19): siRNA sense strand
aagcagaugccauuucgaa

SEQ ID NO: 1759637 - RNA, 19 nt, Homo sapiens
  misc_RNA (1)...(19): siRNA sense strand
gacaguaaggugaacauca

SEQ ID NO: 1759638 - RNA, 19 nt, Homo sapiens
  misc_RNA (1)...(19): siRNA sense strand
ccugaagucucuggaccua

SEQ ID NO: 1759639 - RNA, 19 nt, Homo sapiens
  misc_RNA (1)...(19): siRNA sense strand
cuacacaccuaccaugacu

SEQ ID NO: 1759640 - RNA, 19 nt, Homo sapiens
  misc_RNA (1)...(19): siRNA sense strand
aagaagaaacuggaggaua

SEQ ID NO: 1759641 - RNA, 19 nt, Homo sapiens
  misc_RNA (1)...(19): siRNA sense strand
ucaguuuacaggagacaua

SEQ ID NO: 1759642 - RNA, 19 nt, Homo sapiens
  misc_RNA (1)...(19): siRNA sense strand
ccaaagcagaugccauuuc

SEQ ID NO: 1759643 - RNA, 19 nt, Homo sapiens
  misc_RNA (1)...(19): siRNA sense strand
caaagaggacagcuacaag

SEQ ID NO: 1759644 - RNA, 19 nt, Homo sapiens
  misc_RNA (1)...(19): siRNA sense strand
gggcaaguccacccucaug

SEQ ID NO: 1759645 - RNA, 19 nt, Homo sapiens
  misc_RNA (1)...(19): siRNA sense strand
gagcuaaagauccgaagag

SEQ ID NO: 1759646 - RNA, 19 nt, Homo sapiens
  misc_RNA (1)...(19): siRNA sense strand
gaugaugaagugaaugcuu

SEQ ID NO: 1759647 - RNA, 19 nt, Homo sapiens
  misc_RNA (1)...(19): siRNA sense strand
guuuacaggagacauauga

SEQ ID NO: 1759648 - RNA, 19 nt, Homo sapiens
  misc_RNA (1)...(19): siRNA sense strand
ccacugcgacuuugugaag

SEQ ID NO: 1759649 - RNA, 19 nt, Homo sapiens
  misc_RNA (1)...(19): siRNA sense strand
gacagcaaacccuucaguu

SEQ ID NO: 1759650 - RNA, 19 nt, Homo sapiens
  misc_RNA (1)...(19): siRNA sense strand
gagagacaaagagaagaaa

SEQ ID NO: 1759651 - RNA, 19 nt, Homo sapiens
  misc_RNA (1)...(19): siRNA sense strand
gagcugcacgagaaguuug

SEQ ID NO: 1759652 - RNA, 19 nt, Homo sapiens
  misc_RNA (1)...(19): siRNA sense strand
caaagaggcagagaaagag

SEQ ID NO: 1759653 - RNA, 19 nt, Homo sapiens
  misc_RNA (1)...(19): siRNA sense strand
acaaagaggacagcuacaa

SEQ ID NO: 1759654 - RNA, 19 nt, Homo sapiens
  misc_RNA (1)...(19): siRNA sense strand
gaagaaacuggaggauaag

SEQ ID NO: 1759655 - RNA, 19 nt, Homo sapiens
  misc_RNA (1)...(19): siRNA sense strand
aagaggagaugagacagau

SEQ ID NO: 1759656 - RNA, 19 nt, Homo sapiens
  misc_RNA (1)...(19): siRNA sense strand
ugccaaagcagaugccauu

SEQ ID NO: 1759657 - RNA, 19 nt, Homo sapiens
  misc_RNA (1)...(19): siRNA sense strand
gucauucccugaagucucu

SEQ ID NO: 1759658 - RNA, 19 nt, Homo sapiens
  misc_RNA (1)...(19): siRNA sense strand
aggccuaccugcaggaaga

SEQ ID NO: 1759659 - RNA, 19 nt, Homo sapiens
  misc_RNA (1)...(19): siRNA sense strand
gaaagagcugcacgagaag

SEQ ID NO: 1759660 - RNA, 19 nt, Homo sapiens
  misc_RNA (1)...(19): siRNA sense strand
gaagaagaaacuggaggau

SEQ ID NO: 1759661 - RNA, 19 nt, Homo sapiens
  misc_RNA (1)...(19): siRNA sense strand
aagauaggcaacaagauga

SEQ ID NO: 1759662 - RNA, 19 nt, Homo sapiens
  misc_RNA (1)...(19): siRNA sense strand
aagaagcggagcucaaaga

SEQ ID NO: 1759663 - RNA, 19 nt, Homo sapiens
  misc_RNA (1)...(19): siRNA sense strand
gggugaagguugccgaacu

SEQ ID NO: 1759664 - RNA, 19 nt, Homo sapiens
  misc_RNA (1)...(19): siRNA sense strand
agaaagaagcggagcucaa

SEQ ID NO: 1759665 - RNA, 19 nt, Homo sapiens
  misc_RNA (1)...(19): siRNA sense strand
ggagaugagacagauguuc

SEQ ID NO: 1759666 - RNA, 19 nt, Homo sapiens
  misc_RNA (1)...(19): siRNA sense strand
auccaugucugcuuguauu

SEQ ID NO: 1759667 - RNA, 19 nt, Homo sapiens
  misc_RNA (1)...(19): siRNA sense strand
agagagacaaagagaagaa

SEQ ID NO: 1759668 - RNA, 19 nt, Homo sapiens
  misc_RNA (1)...(19): siRNA sense strand
ucaacaaagaggacagcua

SEQ ID NO: 1759669 - RNA, 19 nt, Homo sapiens
  misc_RNA (1)...(19): siRNA sense strand
ugaagagagacaaagagaa

SEQ ID NO: 1759670 - RNA, 19 nt, Homo sapiens
  misc_RNA (1)...(19): siRNA sense strand
ccacgggucauucccugaa

SEQ ID NO: 1759671 - RNA, 19 nt, Homo sapiens
  misc_RNA (1)...(19): siRNA sense strand
aagaagaggagaugagaca

SEQ ID NO: 1759672 - RNA, 19 nt, Homo sapiens
  misc_RNA (1)...(19): siRNA sense strand
acagaagaacugaagauag

SEQ ID NO: 1759673 - RNA, 19 nt, Homo sapiens
  misc_RNA (1)...(19): siRNA sense strand
uaccaugacucccgaaucc

SEQ ID NO: 1759674 - RNA, 19 nt, Homo sapiens
  misc_RNA (1)...(19): siRNA sense strand
ccuggaugaugaagugaau

SEQ ID NO: 1759675 - RNA, 19 nt, Homo sapiens
  misc_RNA (1)...(19): siRNA sense strand
cacgaucguuagcacaguu

SEQ ID NO: 1759676 - RNA, 19 nt, Homo sapiens
  misc_RNA (1)...(19): siRNA sense strand
ccagcgagucaaagagaaa

SEQ ID NO: 1759677 - RNA, 19 nt, Homo sapiens
  misc_RNA (1)...(19): siRNA sense strand
uggaggagaugggcuucaa

SEQ ID NO: 1759678 - RNA, 19 nt, Homo sapiens
  misc_RNA (1)...(19): siRNA sense strand
caucauugccaaagcagau

SEQ ID NO: 1759679 - RNA, 19 nt, Homo sapiens
  misc_RNA (1)...(19): siRNA sense strand
gaagaagcuggacaguaag

SEQ ID NO: 1759680 - RNA, 19 nt, Homo sapiens
  misc_RNA (1)...(19): siRNA sense strand
ucaguuuccuacagaugau

SEQ ID NO: 1759681 - RNA, 19 nt, Homo sapiens
  misc_RNA (1)...(19): siRNA sense strand
cagcacagaagaacugaag

SEQ ID NO: 1759682 - RNA, 19 nt, Homo sapiens
  misc_RNA (1)...(19): siRNA sense strand
gcagagaucaauggaacca

SEQ ID NO: 1759683 - RNA, 19 nt, Homo sapiens
  misc_RNA (1)...(19): siRNA sense strand
ugaagaagcuggacaguaa

SEQ ID NO: 1759684 - RNA, 19 nt, Homo sapiens
  misc_RNA (1)...(19): siRNA sense strand
agaagaaacuggaggauaa

SEQ ID NO: 1759685 - RNA, 19 nt, Homo sapiens
  misc_RNA (1)...(19): siRNA sense strand
agaaagagcugcacgagaa

SEQ ID NO: 1759686 - RNA, 19 nt, Homo sapiens
  misc_RNA (1)...(19): siRNA sense strand
gaagagugcuacacaccua

SEQ ID NO: 1759687 - RNA, 19 nt, Homo sapiens
  misc_RNA (1)...(19): siRNA sense strand
gaaagaagcggagcucaaa

SEQ ID NO: 1759688 - RNA, 19 nt, Homo sapiens
  misc_RNA (1)...(19): siRNA sense strand
gaagauaggcaacaagaug

SEQ ID NO: 1759689 - RNA, 19 nt, Homo sapiens
  misc_RNA (1)...(19): siRNA sense strand
agagugagcuaacaaaguu

SEQ ID NO: 1759690 - RNA, 19 nt, Homo sapiens
  misc_RNA (1)...(19): siRNA sense strand
gcuguaagcuggaggagau

SEQ ID NO: 1759691 - RNA, 19 nt, Homo sapiens
  misc_RNA (1)...(19): siRNA sense strand
gaagagagacaaagagaag

SEQ ID NO: 1759692 - RNA, 19 nt, Homo sapiens
  misc_RNA (1)...(19): siRNA sense strand
gcaacggaguccagaucua

SEQ ID NO: 1759693 - RNA, 19 nt, Homo sapiens
  misc_RNA (1)...(19): siRNA sense strand
cagaagaacugaagauagg

SEQ ID NO: 1759694 - RNA, 19 nt, Homo sapiens
  misc_RNA (1)...(19): siRNA sense strand
gcucaaagaggcagagaaa

SEQ ID NO: 1759695 - RNA, 19 nt, Homo sapiens
  misc_RNA (1)...(19): siRNA sense strand
gggaccagaucaacaaaga

SEQ ID NO: 1759696 - RNA, 19 nt, Homo sapiens
  misc_RNA (1)...(19): siRNA sense strand
ggagacauaugaggccaaa

SEQ ID NO: 1759697 - RNA, 19 nt, Homo sapiens
  misc_RNA (1)...(19): siRNA sense strand
cuaaagcucacgaucguua

SEQ ID NO: 1759698 - RNA, 19 nt, Homo sapiens
  misc_RNA (1)...(19): siRNA sense strand
ucaaagaggcagagaaaga

SEQ ID NO: 1759699 - RNA, 19 nt, Homo sapiens
  misc_RNA (1)...(19): siRNA sense strand
ccagcgagcuugucagcaa

SEQ ID NO: 1759700 - RNA, 19 nt, Homo sapiens
  misc_RNA (1)...(19): siRNA sense strand
cuacaagccuaucguggaa

SEQ ID NO: 1759701 - RNA, 19 nt, Homo sapiens
  misc_RNA (1)...(19): siRNA sense strand
gcagaugccauuucgaaga

SEQ ID NO: 1759702 - RNA, 19 nt, Homo sapiens
  misc_RNA (1)...(19): siRNA sense strand
caaagcagaugccauuucg

SEQ ID NO: 1759703 - RNA, 19 nt, Homo sapiens
  misc_RNA (1)...(19): siRNA sense strand
gaagaggagaugagacaga

SEQ ID NO: 1759704 - RNA, 19 nt, Homo sapiens
  misc_RNA (1)...(19): siRNA sense strand
gagagcaacgugaggcuaa

SEQ ID NO: 1759705 - RNA, 19 nt, Homo sapiens
  misc_RNA (1)...(19): siRNA sense strand
gcacagaagaacugaagau

SEQ ID NO: 1759706 - RNA, 19 nt, Homo sapiens
  misc_RNA (1)...(19): siRNA sense strand
gaauccaugucugcuugua

SEQ ID NO: 1759707 - RNA, 19 nt, Homo sapiens
  misc_RNA (1)...(19): siRNA sense strand
gcaggaagagcuaaagauc

SEQ ID NO: 1759708 - RNA, 19 nt, Homo sapiens
  misc_RNA (1)...(19): siRNA sense strand
guccagaucuaucaguuuc

SEQ ID NO: 1759709 - RNA, 19 nt, Homo sapiens
  misc_RNA (1)...(19): siRNA sense strand
guguccagcuccagucuaa

SEQ ID NO: 1759710 - RNA, 19 nt, Homo sapiens
  misc_RNA (1)...(19): siRNA sense strand
gaguccagaucuaucaguu

SEQ ID NO: 1759711 - RNA, 19 nt, Homo sapiens
  misc_RNA (1)...(19): siRNA sense strand
guccagcuccagucuaaua

SEQ ID NO: 1759712 - RNA, 19 nt, Homo sapiens
  misc_RNA (1)...(19): siRNA sense strand
gcuccagucuaauaccuau

SEQ ID NO: 1759713 - RNA, 19 nt, Homo sapiens
  misc_RNA (1)...(19): siRNA sense strand
gaaacuggaggauaagaag

SEQ ID NO: 1759714 - RNA, 19 nt, Homo sapiens
  misc_RNA (1)...(19): siRNA sense strand
caacggaguccagaucuau

SEQ ID NO: 1759715 - RNA, 19 nt, Homo sapiens
  misc_RNA (1)...(19): siRNA sense strand
auucaucgaugcacaauuc

SEQ ID NO: 1759716 - RNA, 19 nt, Homo sapiens
  misc_RNA (1)...(19): siRNA sense strand
ugaagucucuggaccuagu

SEQ ID NO: 1759717 - RNA, 19 nt, Homo sapiens
  misc_RNA (1)...(19): siRNA sense strand
acaagccuaucguggaauu

SEQ ID NO: 1759718 - RNA, 19 nt, Homo sapiens
  misc_RNA (1)...(19): siRNA sense strand
caccgacccugacagcaaa

SEQ ID NO: 1759719 - RNA, 19 nt, Homo sapiens
  misc_RNA (1)...(19): siRNA sense strand
gaacugaagauaggcaaca

SEQ ID NO: 1759720 - RNA, 19 nt, Homo sapiens
  misc_RNA (1)...(19): siRNA sense strand
gaagagugagcuaacaaag

SEQ ID NO: 1759721 - RNA, 19 nt, Homo sapiens
  misc_RNA (1)...(19): siRNA sense strand
acaguaaggugaacaucau

SEQ ID NO: 1759722 - RNA, 19 nt, Homo sapiens
  misc_RNA (1)...(19): siRNA sense strand
ggaauucaucgaugcacaa

SEQ ID NO: 1759723 - RNA, 19 nt, Homo sapiens
  misc_RNA (1)...(19): siRNA sense strand
augaugaagugaaugcuuu

SEQ ID NO: 1759724 - RNA, 19 nt, Homo sapiens
  misc_RNA (1)...(19): siRNA sense strand
gaggagaugagacagaugu

SEQ ID NO: 1759725 - RNA, 19 nt, Homo sapiens
  misc_RNA (1)...(19): siRNA sense strand
ggugaagguugccgaacug

SEQ ID NO: 1759726 - RNA, 19 nt, Homo sapiens
  misc_RNA (1)...(19): siRNA sense strand
caugucugcuuguauuuca

SEQ ID NO: 1759727 - RNA, 19 nt, Homo sapiens
  misc_RNA (1)...(19): siRNA sense strand
guucaacaccaaauucgaa

SEQ ID NO: 1759728 - RNA, 19 nt, Homo sapiens
  misc_RNA (1)...(19): siRNA sense strand
gaaguuugaccgucugaag

SEQ ID NO: 1759729 - RNA, 19 nt, Homo sapiens
  misc_RNA (1)...(19): siRNA sense strand
gaacaucauccccaucauu

SEQ ID NO: 1759730 - RNA, 19 nt, Homo sapiens
  misc_RNA (1)...(19): siRNA sense strand
ucuaucaguuuccuacaga

SEQ ID NO: 1759731 - RNA, 19 nt, Homo sapiens
  misc_RNA (1)...(19): siRNA sense strand
cgaagagugagcuaacaaa

SEQ ID NO: 1759732 - RNA, 19 nt, Homo sapiens
  misc_RNA (1)...(19): siRNA sense strand
uaauaccuaugaccuccaa

SEQ ID NO: 1759733 - RNA, 19 nt, Homo sapiens
  misc_RNA (1)...(19): siRNA sense strand
ggcuaaagcucacgaucgu

SEQ ID NO: 1759734 - RNA, 19 nt, Homo sapiens
  misc_RNA (1)...(19): siRNA sense strand
cacagaagaacugaagaua

SEQ ID NO: 1759735 - RNA, 19 nt, Homo sapiens
  misc_RNA (1)...(19): siRNA sense strand
cagaugccauuucgaagag

SEQ ID NO: 1759736 - RNA, 19 nt, Homo sapiens
  misc_RNA (1)...(19): siRNA sense strand
aagcagaugccauuucgaa

SEQ ID NO: 1759737 - RNA, 19 nt, Homo sapiens
  misc_RNA (1)...(19): siRNA sense strand
gacaguaaggugaacauca

SEQ ID NO: 1759738 - RNA, 19 nt, Homo sapiens
  misc_RNA (1)...(19): siRNA sense strand
ccugaagucucuggaccua

SEQ ID NO: 1759739 - RNA, 19 nt, Homo sapiens
  misc_RNA (1)...(19): siRNA sense strand
cuacacaccuaccaugacu

SEQ ID NO: 1759740 - RNA, 19 nt, Homo sapiens
  misc_RNA (1)...(19): siRNA sense strand
aagaagaaacuggaggaua

SEQ ID NO: 1759741 - RNA, 19 nt, Homo sapiens
  misc_RNA (1)...(19): siRNA sense strand
ucaguuuacaggagacaua

SEQ ID NO: 1759742 - RNA, 19 nt, Homo sapiens
  misc_RNA (1)...(19): siRNA sense strand
ccaaagcagaugccauuuc

SEQ ID NO: 1759743 - RNA, 19 nt, Homo sapiens
  misc_RNA (1)...(19): siRNA sense strand
caaagaggacagcuacaag

SEQ ID NO: 1759744 - RNA, 19 nt, Homo sapiens
  misc_RNA (1)...(19): siRNA sense strand
gggcaaguccacccucaug

SEQ ID NO: 1759745 - RNA, 19 nt, Homo sapiens
  misc_RNA (1)...(19): siRNA sense strand
gagcuaaagauccgaagag

SEQ ID NO: 1759746 - RNA, 19 nt, Homo sapiens
  misc_RNA (1)...(19): siRNA sense strand
gaugaugaagugaaugcuu

SEQ ID NO: 1759747 - RNA, 19 nt, Homo sapiens
  misc_RNA (1)...(19): siRNA sense strand
guuuacaggagacauauga

SEQ ID NO: 1759748 - RNA, 19 nt, Homo sapiens
  misc_RNA (1)...(19): siRNA sense strand
ccacugcgacuuugugaag

SEQ ID NO: 1759749 - RNA, 19 nt, Homo sapiens
  misc_RNA (1)...(19): siRNA sense strand
gacagcaaacccuucaguu

SEQ ID NO: 1759750 - RNA, 19 nt, Homo sapiens
  misc_RNA (1)...(19): siRNA sense strand
gagagacaaagagaagaaa

SEQ ID NO: 1759751 - RNA, 19 nt, Homo sapiens
  misc_RNA (1)...(19): siRNA sense strand
gagcugcacgagaaguuug

SEQ ID NO: 1759752 - RNA, 19 nt, Homo sapiens
  misc_RNA (1)...(19): siRNA sense strand
caaagaggcagagaaagag

SEQ ID NO: 1759753 - RNA, 19 nt, Homo sapiens
  misc_RNA (1)...(19): siRNA sense strand
acaaagaggacagcuacaa

SEQ ID NO: 1759754 - RNA, 19 nt, Homo sapiens
  misc_RNA (1)...(19): siRNA sense strand
gaagaaacuggaggauaag

SEQ ID NO: 1759755 - RNA, 19 nt, Homo sapiens
  misc_RNA (1)...(19): siRNA sense strand
aagaggagaugagacagau

SEQ ID NO: 1759756 - RNA, 19 nt, Homo sapiens
  misc_RNA (1)...(19): siRNA sense strand
ugccaaagcagaugccauu

SEQ ID NO: 1759757 - RNA, 19 nt, Homo sapiens
  misc_RNA (1)...(19): siRNA sense strand
gucauucccugaagucucu

SEQ ID NO: 1759758 - RNA, 19 nt, Homo sapiens
  misc_RNA (1)...(19): siRNA sense strand
aggccuaccugcaggaaga

SEQ ID NO: 1759759 - RNA, 19 nt, Homo sapiens
  misc_RNA (1)...(19): siRNA sense strand
gaaagagcugcacgagaag

SEQ ID NO: 1759760 - RNA, 19 nt, Homo sapiens
  misc_RNA (1)...(19): siRNA sense strand
gaagaagaaacuggaggau

SEQ ID NO: 1759761 - RNA, 19 nt, Homo sapiens
  misc_RNA (1)...(19): siRNA sense strand
aagauaggcaacaagauga

SEQ ID NO: 1759762 - RNA, 19 nt, Homo sapiens
  misc_RNA (1)...(19): siRNA sense strand
aagaagcggagcucaaaga

SEQ ID NO: 1759763 - RNA, 19 nt, Homo sapiens
  misc_RNA (1)...(19): siRNA sense strand
gggugaagguugccgaacu

SEQ ID NO: 1759764 - RNA, 19 nt, Homo sapiens
  misc_RNA (1)...(19): siRNA sense strand
agaaagaagcggagcucaa

SEQ ID NO: 1759765 - RNA, 19 nt, Homo sapiens
  misc_RNA (1)...(19): siRNA sense strand
ggagaugagacagauguuc

SEQ ID NO: 1759766 - RNA, 19 nt, Homo sapiens
  misc_RNA (1)...(19): siRNA sense strand
auccaugucugcuuguauu

SEQ ID NO: 1759767 - RNA, 19 nt, Homo sapiens
  misc_RNA (1)...(19): siRNA sense strand
agagagacaaagagaagaa

SEQ ID NO: 1759768 - RNA, 19 nt, Homo sapiens
  misc_RNA (1)...(19): siRNA sense strand
ucaacaaagaggacagcua

SEQ ID NO: 1759769 - RNA, 19 nt, Homo sapiens
  misc_RNA (1)...(19): siRNA sense strand
ugaagagagacaaagagaa

SEQ ID NO: 1759770 - RNA, 19 nt, Homo sapiens
  misc_RNA (1)...(19): siRNA sense strand
ccacgggucauucccugaa

SEQ ID NO: 1759771 - RNA, 19 nt, Homo sapiens
  misc_RNA (1)...(19): siRNA sense strand
aagaagaggagaugagaca

SEQ ID NO: 1759772 - RNA, 19 nt, Homo sapiens
  misc_RNA (1)...(19): siRNA sense strand
acagaagaacugaagauag

SEQ ID NO: 1759773 - RNA, 19 nt, Homo sapiens
  misc_RNA (1)...(19): siRNA sense strand
uaccaugacucccgaaucc

SEQ ID NO: 1759774 - RNA, 19 nt, Homo sapiens
  misc_RNA (1)...(19): siRNA sense strand
ccuggaugaugaagugaau

SEQ ID NO: 1759775 - RNA, 19 nt, Homo sapiens
  misc_RNA (1)...(19): siRNA sense strand
cacgaucguuagcacaguu

SEQ ID NO: 1759776 - RNA, 19 nt, Homo sapiens
  misc_RNA (1)...(19): siRNA sense strand
ccagcgagucaaagagaaa

SEQ ID NO: 1759777 - RNA, 19 nt, Homo sapiens
  misc_RNA (1)...(19): siRNA sense strand
uggaggagaugggcuucaa

SEQ ID NO: 1759778 - RNA, 19 nt, Homo sapiens
  misc_RNA (1)...(19): siRNA sense strand
caucauugccaaagcagau

SEQ ID NO: 1759779 - RNA, 19 nt, Homo sapiens
  misc_RNA (1)...(19): siRNA sense strand
gaagaagcuggacaguaag

SEQ ID NO: 1759780 - RNA, 19 nt, Homo sapiens
  misc_RNA (1)...(19): siRNA sense strand
ucaguuuccuacagaugau

SEQ ID NO: 1759781 - RNA, 19 nt, Homo sapiens
  misc_RNA (1)...(19): siRNA sense strand
cagcacagaagaacugaag

SEQ ID NO: 1759782 - RNA, 19 nt, Homo sapiens
  misc_RNA (1)...(19): siRNA sense strand
gcagagaucaauggaacca

SEQ ID NO: 1759783 - RNA, 19 nt, Homo sapiens
  misc_RNA (1)...(19): siRNA sense strand
ugaagaagcuggacaguaa

SEQ ID NO: 1759784 - RNA, 19 nt, Homo sapiens
  misc_RNA (1)...(19): siRNA sense strand
agaagaaacuggaggauaa

SEQ ID NO: 1759785 - RNA, 19 nt, Homo sapiens
  misc_RNA (1)...(19): siRNA sense strand
agaaagagcugcacgagaa

SEQ ID NO: 1759786 - RNA, 19 nt, Homo sapiens
  misc_RNA (1)...(19): siRNA sense strand
gaagagugcuacacaccua

SEQ ID NO: 1759787 - RNA, 19 nt, Homo sapiens
  misc_RNA (1)...(19): siRNA sense strand
gaaagaagcggagcucaaa

SEQ ID NO: 1759788 - RNA, 19 nt, Homo sapiens
  misc_RNA (1)...(19): siRNA sense strand
gaagauaggcaacaagaug

SEQ ID NO: 1759789 - RNA, 19 nt, Homo sapiens
  misc_RNA (1)...(19): siRNA sense strand
agagugagcuaacaaaguu

SEQ ID NO: 1759790 - RNA, 19 nt, Homo sapiens
  misc_RNA (1)...(19): siRNA sense strand
gcuguaagcuggaggagau

SEQ ID NO: 1759791 - RNA, 19 nt, Homo sapiens
  misc_RNA (1)...(19): siRNA sense strand
gaagagagacaaagagaag

SEQ ID NO: 1759792 - RNA, 19 nt, Homo sapiens
  misc_RNA (1)...(19): siRNA sense strand
gcaacggaguccagaucua

SEQ ID NO: 1759793 - RNA, 19 nt, Homo sapiens
  misc_RNA (1)...(19): siRNA sense strand
cagaagaacugaagauagg

SEQ ID NO: 1759794 - RNA, 19 nt, Homo sapiens
  misc_RNA (1)...(19): siRNA sense strand
gcucaaagaggcagagaaa

SEQ ID NO: 1759795 - RNA, 19 nt, Homo sapiens
  misc_RNA (1)...(19): siRNA sense strand
gggaccagaucaacaaaga

SEQ ID NO: 1759796 - RNA, 19 nt, Homo sapiens
  misc_RNA (1)...(19): siRNA sense strand
ggagacauaugaggccaaa

SEQ ID NO: 1759797 - RNA, 19 nt, Homo sapiens
  misc_RNA (1)...(19): siRNA sense strand
cuaaagcucacgaucguua

SEQ ID NO: 1759798 - RNA, 19 nt, Homo sapiens
  misc_RNA (1)...(19): siRNA sense strand
ucaaagaggcagagaaaga

SEQ ID NO: 1759799 - RNA, 19 nt, Homo sapiens
  misc_RNA (1)...(19): siRNA sense strand
ccagcgagcuugucagcaa

SEQ ID NO: 1759800 - RNA, 19 nt, Homo sapiens
  misc_RNA (1)...(19): siRNA sense strand
cuacaagccuaucguggaa

SEQ ID NO: 1759801 - RNA, 19 nt, Homo sapiens
  misc_RNA (1)...(19): siRNA sense strand
gcagaugccauuucgaaga

SEQ ID NO: 1759802 - RNA, 19 nt, Homo sapiens
  misc_RNA (1)...(19): siRNA sense strand
caaagcagaugccauuucg

SEQ ID NO: 1759803 - RNA, 19 nt, Homo sapiens
  misc_RNA (1)...(19): siRNA sense strand
gaagaggagaugagacaga

SEQ ID NO: 1759804 - RNA, 19 nt, Homo sapiens
  misc_RNA (1)...(19): siRNA sense strand
gagagcaacgugaggcuaa

SEQ ID NO: 1759805 - RNA, 19 nt, Homo sapiens
  misc_RNA (1)...(19): siRNA sense strand
gcacagaagaacugaagau

SEQ ID NO: 1759806 - RNA, 19 nt, Homo sapiens
  misc_RNA (1)...(19): siRNA sense strand
gaauccaugucugcuugua

SEQ ID NO: 1759807 - RNA, 19 nt, Homo sapiens
  misc_RNA (1)...(19): siRNA sense strand
gcaggaagagcuaaagauc

SEQ ID NO: 1759808 - RNA, 19 nt, Homo sapiens
  misc_RNA (1)...(19): siRNA sense strand
guccagaucuaucaguuuc

SEQ ID NO: 1759809 - RNA, 19 nt, Homo sapiens
  misc_RNA (1)...(19): siRNA sense strand
guguccagcuccagucuaa

SEQ ID NO: 1759810 - RNA, 19 nt, Homo sapiens
  misc_RNA (1)...(19): siRNA sense strand
gaguccagaucuaucaguu

SEQ ID NO: 1759811 - RNA, 19 nt, Homo sapiens
  misc_RNA (1)...(19): siRNA sense strand
guccagcuccagucuaaua

SEQ ID NO: 1759812 - RNA, 19 nt, Homo sapiens
  misc_RNA (1)...(19): siRNA sense strand
gcuccagucuaauaccuau

SEQ ID NO: 1759813 - RNA, 19 nt, Homo sapiens
  misc_RNA (1)...(19): siRNA sense strand
gaaacuggaggauaagaag

SEQ ID NO: 1759814 - RNA, 19 nt, Homo sapiens
  misc_RNA (1)...(19): siRNA sense strand
caacggaguccagaucuau

SEQ ID NO: 1759815 - RNA, 19 nt, Homo sapiens
  misc_RNA (1)...(19): siRNA sense strand
auucaucgaugcacaauuc

SEQ ID NO: 1759816 - RNA, 19 nt, Homo sapiens
  misc_RNA (1)...(19): siRNA sense strand
ugaagucucuggaccuagu

SEQ ID NO: 1759817 - RNA, 19 nt, Homo sapiens
  misc_RNA (1)...(19): siRNA sense strand
acaagccuaucguggaauu

SEQ ID NO: 1759818 - RNA, 19 nt, Homo sapiens
  misc_RNA (1)...(19): siRNA sense strand
caccgacccugacagcaaa

SEQ ID NO: 1759819 - RNA, 19 nt, Homo sapiens
  misc_RNA (1)...(19): siRNA sense strand
gaacugaagauaggcaaca

SEQ ID NO: 1759820 - RNA, 19 nt, Homo sapiens
  misc_RNA (1)...(19): siRNA sense strand
gaagagugagcuaacaaag

SEQ ID NO: 1759821 - RNA, 19 nt, Homo sapiens
  misc_RNA (1)...(19): siRNA sense strand
acaguaaggugaacaucau

SEQ ID NO: 1759822 - RNA, 19 nt, Homo sapiens
  misc_RNA (1)...(19): siRNA sense strand
ggaauucaucgaugcacaa

SEQ ID NO: 1759823 - RNA, 19 nt, Homo sapiens
  misc_RNA (1)...(19): siRNA sense strand
augaugaagugaaugcuuu

SEQ ID NO: 1759824 - RNA, 19 nt, Homo sapiens
  misc_RNA (1)...(19): siRNA sense strand
gaggagaugagacagaugu

SEQ ID NO: 1759825 - RNA, 19 nt, Homo sapiens
  misc_RNA (1)...(19): siRNA sense strand
ggugaagguugccgaacug

SEQ ID NO: 1759826 - RNA, 19 nt, Homo sapiens
  misc_RNA (1)...(19): siRNA sense strand
caugucugcuuguauuuca

SEQ ID NO: 1759827 - RNA, 19 nt, Homo sapiens
  misc_RNA (1)...(19): siRNA sense strand
guucaacaccaaauucgaa

SEQ ID NO: 1759828 - RNA, 19 nt, Homo sapiens
  misc_RNA (1)...(19): siRNA sense strand
gaaguuugaccgucugaag

SEQ ID NO: 1759829 - RNA, 19 nt, Homo sapiens
  misc_RNA (1)...(19): siRNA sense strand
gaacaucauccccaucauu

SEQ ID NO: 1759830 - RNA, 19 nt, Homo sapiens
  misc_RNA (1)...(19): siRNA sense strand
ucuaucaguuuccuacaga

SEQ ID NO: 1759831 - RNA, 19 nt, Homo sapiens
  misc_RNA (1)...(19): siRNA sense strand
cgaagagugagcuaacaaa

SEQ ID NO: 1759832 - RNA, 19 nt, Homo sapiens
  misc_RNA (1)...(19): siRNA sense strand
uaauaccuaugaccuccaa

SEQ ID NO: 1759833 - RNA, 19 nt, Homo sapiens
  misc_RNA (1)...(19): siRNA sense strand
ggcuaaagcucacgaucgu

SEQ ID NO: 1759834 - RNA, 19 nt, Homo sapiens
  misc_RNA (1)...(19): siRNA sense strand
cacagaagaacugaagaua

SEQ ID NO: 1759835 - RNA, 19 nt, Homo sapiens
  misc_RNA (1)...(19): siRNA sense strand
cagaugccauuucgaagag

SEQ ID NO: 1759836 - RNA, 19 nt, Homo sapiens
  misc_RNA (1)...(19): siRNA sense strand
aagcagaugccauuucgaa

SEQ ID NO: 1759837 - RNA, 19 nt, Homo sapiens
  misc_RNA (1)...(19): siRNA sense strand
gacaguaaggugaacauca

SEQ ID NO: 1759838 - RNA, 19 nt, Homo sapiens
  misc_RNA (1)...(19): siRNA sense strand
ccugaagucucuggaccua

SEQ ID NO: 1759839 - RNA, 19 nt, Homo sapiens
  misc_RNA (1)...(19): siRNA sense strand
cuacacaccuaccaugacu

SEQ ID NO: 1759840 - RNA, 19 nt, Homo sapiens
  misc_RNA (1)...(19): siRNA sense strand
aagaagaaacuggaggaua

SEQ ID NO: 1759841 - RNA, 19 nt, Homo sapiens
  misc_RNA (1)...(19): siRNA sense strand
ucaguuuacaggagacaua

SEQ ID NO: 1759842 - RNA, 19 nt, Homo sapiens
  misc_RNA (1)...(19): siRNA sense strand
ccaaagcagaugccauuuc

SEQ ID NO: 1759843 - RNA, 19 nt, Homo sapiens
  misc_RNA (1)...(19): siRNA sense strand
caaagaggacagcuacaag

SEQ ID NO: 1759844 - RNA, 19 nt, Homo sapiens
  misc_RNA (1)...(19): siRNA sense strand
gggcaaguccacccucaug

SEQ ID NO: 1759845 - RNA, 19 nt, Homo sapiens
  misc_RNA (1)...(19): siRNA sense strand
gagcuaaagauccgaagag

SEQ ID NO: 1759846 - RNA, 19 nt, Homo sapiens
  misc_RNA (1)...(19): siRNA sense strand
gaugaugaagugaaugcuu

SEQ ID NO: 1759847 - RNA, 19 nt, Homo sapiens
  misc_RNA (1)...(19): siRNA sense strand
guuuacaggagacauauga

SEQ ID NO: 1759848 - RNA, 19 nt, Homo sapiens
  misc_RNA (1)...(19): siRNA sense strand
ccacugcgacuuugugaag

SEQ ID NO: 1759849 - RNA, 19 nt, Homo sapiens
  misc_RNA (1)...(19): siRNA sense strand
gacagcaaacccuucaguu

SEQ ID NO: 1759850 - RNA, 19 nt, Homo sapiens
  misc_RNA (1)...(19): siRNA sense strand
gagagacaaagagaagaaa

SEQ ID NO: 1759851 - RNA, 19 nt, Homo sapiens
  misc_RNA (1)...(19): siRNA sense strand
gagcugcacgagaaguuug

SEQ ID NO: 1759852 - RNA, 19 nt, Homo sapiens
  misc_RNA (1)...(19): siRNA sense strand
caaagaggcagagaaagag

SEQ ID NO: 1759853 - RNA, 19 nt, Homo sapiens
  misc_RNA (1)...(19): siRNA sense strand
acaaagaggacagcuacaa

SEQ ID NO: 1759854 - RNA, 19 nt, Homo sapiens
  misc_RNA (1)...(19): siRNA sense strand
gaagaaacuggaggauaag

SEQ ID NO: 1759855 - RNA, 19 nt, Homo sapiens
  misc_RNA (1)...(19): siRNA sense strand
aagaggagaugagacagau

SEQ ID NO: 1759856 - RNA, 19 nt, Homo sapiens
  misc_RNA (1)...(19): siRNA sense strand
ugccaaagcagaugccauu

SEQ ID NO: 1759857 - RNA, 19 nt, Homo sapiens
  misc_RNA (1)...(19): siRNA sense strand
gucauucccugaagucucu

SEQ ID NO: 1759858 - RNA, 19 nt, Homo sapiens
  misc_RNA (1)...(19): siRNA sense strand
aggccuaccugcaggaaga

SEQ ID NO: 1759859 - RNA, 19 nt, Homo sapiens
  misc_RNA (1)...(19): siRNA sense strand
gaaagagcugcacgagaag

SEQ ID NO: 1759860 - RNA, 19 nt, Homo sapiens
  misc_RNA (1)...(19): siRNA sense strand
gaagaagaaacuggaggau

SEQ ID NO: 1759861 - RNA, 19 nt, Homo sapiens
  misc_RNA (1)...(19): siRNA sense strand
aagauaggcaacaagauga

SEQ ID NO: 1759862 - RNA, 19 nt, Homo sapiens
  misc_RNA (1)...(19): siRNA sense strand
aagaagcggagcucaaaga

SEQ ID NO: 1759863 - RNA, 19 nt, Homo sapiens
  misc_RNA (1)...(19): siRNA sense strand
gggugaagguugccgaacu

SEQ ID NO: 1759864 - RNA, 19 nt, Homo sapiens
  misc_RNA (1)...(19): siRNA sense strand
agaaagaagcggagcucaa

SEQ ID NO: 1759865 - RNA, 19 nt, Homo sapiens
  misc_RNA (1)...(19): siRNA sense strand
ggagaugagacagauguuc

SEQ ID NO: 1759866 - RNA, 19 nt, Homo sapiens
  misc_RNA (1)...(19): siRNA sense strand
auccaugucugcuuguauu

SEQ ID NO: 1759867 - RNA, 19 nt, Homo sapiens
  misc_RNA (1)...(19): siRNA sense strand
agagagacaaagagaagaa

SEQ ID NO: 1759868 - RNA, 19 nt, Homo sapiens
  misc_RNA (1)...(19): siRNA sense strand
ucaacaaagaggacagcua

SEQ ID NO: 1759869 - RNA, 19 nt, Homo sapiens
  misc_RNA (1)...(19): siRNA sense strand
ugaagagagacaaagagaa

SEQ ID NO: 1759870 - RNA, 19 nt, Homo sapiens
  misc_RNA (1)...(19): siRNA sense strand
ccacgggucauucccugaa

SEQ ID NO: 1759871 - RNA, 19 nt, Homo sapiens
  misc_RNA (1)...(19): siRNA sense strand
aagaagaggagaugagaca

SEQ ID NO: 1759872 - RNA, 19 nt, Homo sapiens
  misc_RNA (1)...(19): siRNA sense strand
acagaagaacugaagauag

SEQ ID NO: 1759873 - RNA, 19 nt, Homo sapiens
  misc_RNA (1)...(19): siRNA sense strand
uaccaugacucccgaaucc

SEQ ID NO: 1759874 - RNA, 19 nt, Homo sapiens
  misc_RNA (1)...(19): siRNA sense strand
ccuggaugaugaagugaau

SEQ ID NO: 1759875 - RNA, 19 nt, Homo sapiens
  misc_RNA (1)...(19): siRNA sense strand
cacgaucguuagcacaguu

SEQ ID NO: 1759876 - RNA, 19 nt, Homo sapiens
  misc_RNA (1)...(19): siRNA sense strand
ccagcgagucaaagagaaa

SEQ ID NO: 1759877 - RNA, 19 nt, Homo sapiens
  misc_RNA (1)...(19): siRNA sense strand
uggaggagaugggcuucaa

SEQ ID NO: 1759878 - RNA, 19 nt, Homo sapiens
  misc_RNA (1)...(19): siRNA sense strand
caucauugccaaagcagau

SEQ ID NO: 1759879 - RNA, 19 nt, Homo sapiens
  misc_RNA (1)...(19): siRNA sense strand
gaagaagcuggacaguaag

SEQ ID NO: 1759880 - RNA, 19 nt, Homo sapiens
  misc_RNA (1)...(19): siRNA sense strand
ucaguuuccuacagaugau

SEQ ID NO: 1759881 - RNA, 19 nt, Homo sapiens
  misc_RNA (1)...(19): siRNA sense strand
cagcacagaagaacugaag

SEQ ID NO: 1759882 - RNA, 19 nt, Homo sapiens
  misc_RNA (1)...(19): siRNA sense strand
gcagagaucaauggaacca

SEQ ID NO: 1759883 - RNA, 19 nt, Homo sapiens
  misc_RNA (1)...(19): siRNA sense strand
ugaagaagcuggacaguaa

SEQ ID NO: 1759884 - RNA, 19 nt, Homo sapiens
  misc_RNA (1)...(19): siRNA sense strand
agaagaaacuggaggauaa

SEQ ID NO: 1759885 - RNA, 19 nt, Homo sapiens
  misc_RNA (1)...(19): siRNA sense strand
agaaagagcugcacgagaa

SEQ ID NO: 1759886 - RNA, 19 nt, Homo sapiens
  misc_RNA (1)...(19): siRNA sense strand
gaagagugcuacacaccua

SEQ ID NO: 1759887 - RNA, 19 nt, Homo sapiens
  misc_RNA (1)...(19): siRNA sense strand
gaaagaagcggagcucaaa

SEQ ID NO: 1759888 - RNA, 19 nt, Homo sapiens
  misc_RNA (1)...(19): siRNA sense strand
gaagauaggcaacaagaug

SEQ ID NO: 1759889 - RNA, 19 nt, Homo sapiens
  misc_RNA (1)...(19): siRNA sense strand
agagugagcuaacaaaguu

SEQ ID NO: 1759890 - RNA, 19 nt, Homo sapiens
  misc_RNA (1)...(19): siRNA sense strand
gcuguaagcuggaggagau

SEQ ID NO: 1759891 - RNA, 19 nt, Homo sapiens
  misc_RNA (1)...(19): siRNA sense strand
gaagagagacaaagagaag

SEQ ID NO: 1759892 - RNA, 19 nt, Homo sapiens
  misc_RNA (1)...(19): siRNA sense strand
gcaacggaguccagaucua

SEQ ID NO: 1759893 - RNA, 19 nt, Homo sapiens
  misc_RNA (1)...(19): siRNA sense strand
cagaagaacugaagauagg

SEQ ID NO: 1759894 - RNA, 19 nt, Homo sapiens
  misc_RNA (1)...(19): siRNA sense strand
gcucaaagaggcagagaaa

SEQ ID NO: 1759895 - RNA, 19 nt, Homo sapiens
  misc_RNA (1)...(19): siRNA sense strand
gggaccagaucaacaaaga

SEQ ID NO: 1759896 - RNA, 19 nt, Homo sapiens
  misc_RNA (1)...(19): siRNA sense strand
ggagacauaugaggccaaa

SEQ ID NO: 1759897 - RNA, 19 nt, Homo sapiens
  misc_RNA (1)...(19): siRNA sense strand
cuaaagcucacgaucguua

SEQ ID NO: 1759898 - RNA, 19 nt, Homo sapiens
  misc_RNA (1)...(19): siRNA sense strand
ucaaagaggcagagaaaga

SEQ ID NO: 1759899 - RNA, 19 nt, Homo sapiens
  misc_RNA (1)...(19): siRNA sense strand
ccagcgagcuugucagcaa

SEQ ID NO: 1759900 - RNA, 19 nt, Homo sapiens
  misc_RNA (1)...(19): siRNA sense strand
cuacaagccuaucguggaa

SEQ ID NO: 1759901 - RNA, 19 nt, Homo sapiens
  misc_RNA (1)...(19): siRNA sense strand
gcagaugccauuucgaaga

SEQ ID NO: 1759902 - RNA, 19 nt, Homo sapiens
  misc_RNA (1)...(19): siRNA sense strand
caaagcagaugccauuucg

SEQ ID NO: 1759903 - RNA, 19 nt, Homo sapiens
  misc_RNA (1)...(19): siRNA sense strand
gaagaggagaugagacaga

SEQ ID NO: 1759904 - RNA, 19 nt, Homo sapiens
  misc_RNA (1)...(19): siRNA sense strand
gagagcaacgugaggcuaa

SEQ ID NO: 1759905 - RNA, 19 nt, Homo sapiens
  misc_RNA (1)...(19): siRNA sense strand
gcacagaagaacugaagau

SEQ ID NO: 1759906 - RNA, 19 nt, Homo sapiens
  misc_RNA (1)...(19): siRNA sense strand
gaauccaugucugcuugua

SEQ ID NO: 1759907 - RNA, 19 nt, Homo sapiens
  misc_RNA (1)...(19): siRNA sense strand
gcaggaagagcuaaagauc

SEQ ID NO: 1759908 - RNA, 19 nt, Homo sapiens
  misc_RNA (1)...(19): siRNA sense strand
guccagaucuaucaguuuc

SEQ ID NO: 1759909 - RNA, 19 nt, Homo sapiens
  misc_RNA (1)...(19): siRNA sense strand
guguccagcuccagucuaa

SEQ ID NO: 1759910 - RNA, 19 nt, Homo sapiens
  misc_RNA (1)...(19): siRNA sense strand
gaguccagaucuaucaguu

SEQ ID NO: 1759911 - RNA, 19 nt, Homo sapiens
  misc_RNA (1)...(19): siRNA sense strand
guccagcuccagucuaaua

SEQ ID NO: 1759912 - RNA, 19 nt, Homo sapiens
  misc_RNA (1)...(19): siRNA sense strand
gcuccagucuaauaccuau

SEQ ID NO: 1759913 - RNA, 19 nt, Homo sapiens
  misc_RNA (1)...(19): siRNA sense strand
gaaacuggaggauaagaag

SEQ ID NO: 1759914 - RNA, 19 nt, Homo sapiens
  misc_RNA (1)...(19): siRNA sense strand
caacggaguccagaucuau

SEQ ID NO: 1759915 - RNA, 19 nt, Homo sapiens
  misc_RNA (1)...(19): siRNA sense strand
auucaucgaugcacaauuc

SEQ ID NO: 1759916 - RNA, 19 nt, Homo sapiens
  misc_RNA (1)...(19): siRNA sense strand
ugaagucucuggaccuagu

SEQ ID NO: 1759917 - RNA, 19 nt, Homo sapiens
  misc_RNA (1)...(19): siRNA sense strand
acaagccuaucguggaauu

SEQ ID NO: 1759918 - RNA, 19 nt, Homo sapiens
  misc_RNA (1)...(19): siRNA sense strand
caccgacccugacagcaaa

SEQ ID NO: 1759919 - RNA, 19 nt, Homo sapiens
  misc_RNA (1)...(19): siRNA sense strand
gaacugaagauaggcaaca

SEQ ID NO: 1759920 - RNA, 19 nt, Homo sapiens
  misc_RNA (1)...(19): siRNA sense strand
gaagagugagcuaacaaag

SEQ ID NO: 1759921 - RNA, 19 nt, Homo sapiens
  misc_RNA (1)...(19): siRNA sense strand
acaguaaggugaacaucau

SEQ ID NO: 1759922 - RNA, 19 nt, Homo sapiens
  misc_RNA (1)...(19): siRNA sense strand
ggaauucaucgaugcacaa

SEQ ID NO: 1759923 - RNA, 19 nt, Homo sapiens
  misc_RNA (1)...(19): siRNA sense strand
augaugaagugaaugcuuu

SEQ ID NO: 1759924 - RNA, 19 nt, Homo sapiens
  misc_RNA (1)...(19): siRNA sense strand
gaggagaugagacagaugu

SEQ ID NO: 1759925 - RNA, 19 nt, Homo sapiens
  misc_RNA (1)...(19): siRNA sense strand
ggugaagguugccgaacug

SEQ ID NO: 1759926 - RNA, 19 nt, Homo sapiens
  misc_RNA (1)...(19): siRNA sense strand
caugucugcuuguauuuca

SEQ ID NO: 1759927 - RNA, 19 nt, Homo sapiens
  misc_RNA (1)...(19): siRNA sense strand
guucaacaccaaauucgaa

SEQ ID NO: 1759928 - RNA, 19 nt, Homo sapiens
  misc_RNA (1)...(19): siRNA sense strand
gaaguuugaccgucugaag

SEQ ID NO: 1759929 - RNA, 19 nt, Homo sapiens
  misc_RNA (1)...(19): siRNA sense strand
gaacaucauccccaucauu

SEQ ID NO: 1759930 - RNA, 19 nt, Homo sapiens
  misc_RNA (1)...(19): siRNA sense strand
ucuaucaguuuccuacaga

SEQ ID NO: 1759931 - RNA, 19 nt, Homo sapiens
  misc_RNA (1)...(19): siRNA sense strand
cgaagagugagcuaacaaa

SEQ ID NO: 1759932 - RNA, 19 nt, Homo sapiens
  misc_RNA (1)...(19): siRNA sense strand
uaauaccuaugaccuccaa

SEQ ID NO: 1759933 - RNA, 19 nt, Homo sapiens
  misc_RNA (1)...(19): siRNA sense strand
ggcuaaagcucacgaucgu

SEQ ID NO: 1759934 - RNA, 19 nt, Homo sapiens
  misc_RNA (1)...(19): siRNA sense strand
cacagaagaacugaagaua

SEQ ID NO: 1759935 - RNA, 19 nt, Homo sapiens
  misc_RNA (1)...(19): siRNA sense strand
cagaugccauuucgaagag

SEQ ID NO: 1759936 - RNA, 19 nt, Homo sapiens
  misc_RNA (1)...(19): siRNA sense strand
aagcagaugccauuucgaa

SEQ ID NO: 1759937 - RNA, 19 nt, Homo sapiens
  misc_RNA (1)...(19): siRNA sense strand
gacaguaaggugaacauca

SEQ ID NO: 1759938 - RNA, 19 nt, Homo sapiens
  misc_RNA (1)...(19): siRNA sense strand
ccugaagucucuggaccua

SEQ ID NO: 1759939 - RNA, 19 nt, Homo sapiens
  misc_RNA (1)...(19): siRNA sense strand
cuacacaccuaccaugacu

SEQ ID NO: 1759940 - RNA, 19 nt, Homo sapiens
  misc_RNA (1)...(19): siRNA sense strand
aagaagaaacuggaggaua

SEQ ID NO: 1759941 - RNA, 19 nt, Homo sapiens
  misc_RNA (1)...(19): siRNA sense strand
ucaguuuacaggagacaua

SEQ ID NO: 1759942 - RNA, 19 nt, Homo sapiens
  misc_RNA (1)...(19): siRNA sense strand
ccaaagcagaugccauuuc

SEQ ID NO: 1759943 - RNA, 19 nt, Homo sapiens
  misc_RNA (1)...(19): siRNA sense strand
caaagaggacagcuacaag

SEQ ID NO: 1759944 - RNA, 19 nt, Homo sapiens
  misc_RNA (1)...(19): siRNA sense strand
gggcaaguccacccucaug

SEQ ID NO: 1759945 - RNA, 19 nt, Homo sapiens
  misc_RNA (1)...(19): siRNA sense strand
gagcuaaagauccgaagag

SEQ ID NO: 1759946 - RNA, 19 nt, Homo sapiens
  misc_RNA (1)...(19): siRNA sense strand
gaugaugaagugaaugcuu

SEQ ID NO: 1759947 - RNA, 19 nt, Homo sapiens
  misc_RNA (1)...(19): siRNA sense strand
guuuacaggagacauauga

SEQ ID NO: 1759948 - RNA, 19 nt, Homo sapiens
  misc_RNA (1)...(19): siRNA sense strand
ccacugcgacuuugugaag

SEQ ID NO: 1759949 - RNA, 19 nt, Homo sapiens
  misc_RNA (1)...(19): siRNA sense strand
gacagcaaacccuucaguu

SEQ ID NO: 1759950 - RNA, 19 nt, Homo sapiens
  misc_RNA (1)...(19): siRNA sense strand
gagagacaaagagaagaaa

SEQ ID NO: 1759951 - RNA, 19 nt, Homo sapiens
  misc_RNA (1)...(19): siRNA sense strand
gagcugcacgagaaguuug

SEQ ID NO: 1759952 - RNA, 19 nt, Homo sapiens
  misc_RNA (1)...(19): siRNA sense strand
caaagaggcagagaaagag

SEQ ID NO: 1759953 - RNA, 19 nt, Homo sapiens
  misc_RNA (1)...(19): siRNA sense strand
acaaagaggacagcuacaa

SEQ ID NO: 1759954 - RNA, 19 nt, Homo sapiens
  misc_RNA (1)...(19): siRNA sense strand
gaagaaacuggaggauaag

SEQ ID NO: 1759955 - RNA, 19 nt, Homo sapiens
  misc_RNA (1)...(19): siRNA sense strand
aagaggagaugagacagau

SEQ ID NO: 1759956 - RNA, 19 nt, Homo sapiens
  misc_RNA (1)...(19): siRNA sense strand
ugccaaagcagaugccauu

SEQ ID NO: 1759957 - RNA, 19 nt, Homo sapiens
  misc_RNA (1)...(19): siRNA sense strand
gucauucccugaagucucu

SEQ ID NO: 1759958 - RNA, 19 nt, Homo sapiens
  misc_RNA (1)...(19): siRNA sense strand
aggccuaccugcaggaaga

SEQ ID NO: 1759959 - RNA, 19 nt, Homo sapiens
  misc_RNA (1)...(19): siRNA sense strand
gaaagagcugcacgagaag

SEQ ID NO: 1759960 - RNA, 19 nt, Homo sapiens
  misc_RNA (1)...(19): siRNA sense strand
gaagaagaaacuggaggau

SEQ ID NO: 1759961 - RNA, 19 nt, Homo sapiens
  misc_RNA (1)...(19): siRNA sense strand
aagauaggcaacaagauga

SEQ ID NO: 1759962 - RNA, 19 nt, Homo sapiens
  misc_RNA (1)...(19): siRNA sense strand
aagaagcggagcucaaaga

SEQ ID NO: 1759963 - RNA, 19 nt, Homo sapiens
  misc_RNA (1)...(19): siRNA sense strand
gggugaagguugccgaacu

SEQ ID NO: 1759964 - RNA, 19 nt, Homo sapiens
  misc_RNA (1)...(19): siRNA sense strand
agaaagaagcggagcucaa

SEQ ID NO: 1759965 - RNA, 19 nt, Homo sapiens
  misc_RNA (1)...(19): siRNA sense strand
ggagaugagacagauguuc

SEQ ID NO: 1759966 - RNA, 19 nt, Homo sapiens
  misc_RNA (1)...(19): siRNA sense strand
auccaugucugcuuguauu

SEQ ID NO: 1759967 - RNA, 19 nt, Homo sapiens
  misc_RNA (1)...(19): siRNA sense strand
agagagacaaagagaagaa

SEQ ID NO: 1759968 - RNA, 19 nt, Homo sapiens
  misc_RNA (1)...(19): siRNA sense strand
ucaacaaagaggacagcua

SEQ ID NO: 1759969 - RNA, 19 nt, Homo sapiens
  misc_RNA (1)...(19): siRNA sense strand
ugaagagagacaaagagaa

SEQ ID NO: 1759970 - RNA, 19 nt, Homo sapiens
  misc_RNA (1)...(19): siRNA sense strand
ccacgggucauucccugaa

SEQ ID NO: 1759971 - RNA, 19 nt, Homo sapiens
  misc_RNA (1)...(19): siRNA sense strand
aagaagaggagaugagaca

SEQ ID NO: 1759972 - RNA, 19 nt, Homo sapiens
  misc_RNA (1)...(19): siRNA sense strand
acagaagaacugaagauag

SEQ ID NO: 1759973 - RNA, 19 nt, Homo sapiens
  misc_RNA (1)...(19): siRNA sense strand
uaccaugacucccgaaucc

SEQ ID NO: 1759974 - RNA, 19 nt, Homo sapiens
  misc_RNA (1)...(19): siRNA sense strand
ccuggaugaugaagugaau

SEQ ID NO: 1759975 - RNA, 19 nt, Homo sapiens
  misc_RNA (1)...(19): siRNA sense strand
cacgaucguuagcacaguu

SEQ ID NO: 1759976 - RNA, 19 nt, Homo sapiens
  misc_RNA (1)...(19): siRNA sense strand
ccagcgagucaaagagaaa

SEQ ID NO: 1759977 - RNA, 19 nt, Homo sapiens
  misc_RNA (1)...(19): siRNA sense strand
uggaggagaugggcuucaa

SEQ ID NO: 1759978 - RNA, 19 nt, Homo sapiens
  misc_RNA (1)...(19): siRNA sense strand
caucauugccaaagcagau

SEQ ID NO: 1759979 - RNA, 19 nt, Homo sapiens
  misc_RNA (1)...(19): siRNA sense strand
gaagaagcuggacaguaag

SEQ ID NO: 1759980 - RNA, 19 nt, Homo sapiens
  misc_RNA (1)...(19): siRNA sense strand
ucaguuuccuacagaugau

SEQ ID NO: 1759981 - RNA, 19 nt, Homo sapiens
  misc_RNA (1)...(19): siRNA sense strand
cagcacagaagaacugaag

SEQ ID NO: 1759982 - RNA, 19 nt, Homo sapiens
  misc_RNA (1)...(19): siRNA sense strand
gcagagaucaauggaacca

SEQ ID NO: 1759983 - RNA, 19 nt, Homo sapiens
  misc_RNA (1)...(19): siRNA sense strand
ugaagaagcuggacaguaa

SEQ ID NO: 1759984 - RNA, 19 nt, Homo sapiens
  misc_RNA (1)...(19): siRNA sense strand
agaagaaacuggaggauaa

SEQ ID NO: 1759985 - RNA, 19 nt, Homo sapiens
  misc_RNA (1)...(19): siRNA sense strand
agaaagagcugcacgagaa

SEQ ID NO: 1759986 - RNA, 19 nt, Homo sapiens
  misc_RNA (1)...(19): siRNA sense strand
gaagagugcuacacaccua

SEQ ID NO: 1759987 - RNA, 19 nt, Homo sapiens
  misc_RNA (1)...(19): siRNA sense strand
gaaagaagcggagcucaaa

SEQ ID NO: 1759988 - RNA, 19 nt, Homo sapiens
  misc_RNA (1)...(19): siRNA sense strand
gaagauaggcaacaagaug

SEQ ID NO: 1759989 - RNA, 19 nt, Homo sapiens
  misc_RNA (1)...(19): siRNA sense strand
agagugagcuaacaaaguu

SEQ ID NO: 1759990 - RNA, 19 nt, Homo sapiens
  misc_RNA (1)...(19): siRNA sense strand
gcuguaagcuggaggagau

SEQ ID NO: 1759991 - RNA, 19 nt, Homo sapiens
  misc_RNA (1)...(19): siRNA sense strand
gaagagagacaaagagaag

SEQ ID NO: 1759992 - RNA, 19 nt, Homo sapiens
  misc_RNA (1)...(19): siRNA sense strand
gcaacggaguccagaucua

SEQ ID NO: 1759993 - RNA, 19 nt, Homo sapiens
  misc_RNA (1)...(19): siRNA sense strand
cagaagaacugaagauagg

SEQ ID NO: 1759994 - RNA, 19 nt, Homo sapiens
  misc_RNA (1)...(19): siRNA sense strand
gcucaaagaggcagagaaa

SEQ ID NO: 1759995 - RNA, 19 nt, Homo sapiens
  misc_RNA (1)...(19): siRNA sense strand
gggaccagaucaacaaaga

SEQ ID NO: 1759996 - RNA, 19 nt, Homo sapiens
  misc_RNA (1)...(19): siRNA sense strand
ggagacauaugaggccaaa

SEQ ID NO: 1759997 - RNA, 19 nt, Homo sapiens
  misc_RNA (1)...(19): siRNA sense strand
cuaaagcucacgaucguua

SEQ ID NO: 1759998 - RNA, 19 nt, Homo sapiens
  misc_RNA (1)...(19): siRNA sense strand
ucaaagaggcagagaaaga

SEQ ID NO: 1759999 - RNA, 19 nt, Homo sapiens
  misc_RNA (1)...(19): siRNA sense strand
ccagcgagcuugucagcaa

SEQ ID NO: 1760000 - RNA, 19 nt, Homo sapiens
  misc_RNA (1)...(19): siRNA sense strand
cuacaagccuaucguggaa

SEQ ID NO: 1760001 - RNA, 19 nt, Homo sapiens
  misc_RNA (1)...(19): siRNA sense strand
gcagaugccauuucgaaga

SEQ ID NO: 1760002 - RNA, 19 nt, Homo sapiens
  misc_RNA (1)...(19): siRNA sense strand
caaagcagaugccauuucg

SEQ ID NO: 1760003 - RNA, 19 nt, Homo sapiens
  misc_RNA (1)...(19): siRNA sense strand
gaagaggagaugagacaga

SEQ ID NO: 1760004 - RNA, 19 nt, Homo sapiens
  misc_RNA (1)...(19): siRNA sense strand
gagagcaacgugaggcuaa

SEQ ID NO: 1760005 - RNA, 19 nt, Homo sapiens
  misc_RNA (1)...(19): siRNA sense strand
gcacagaagaacugaagau

SEQ ID NO: 1760006 - RNA, 19 nt, Homo sapiens
  misc_RNA (1)...(19): siRNA sense strand
gaauccaugucugcuugua

SEQ ID NO: 1760007 - RNA, 19 nt, Homo sapiens
  misc_RNA (1)...(19): siRNA sense strand
gcaggaagagcuaaagauc

SEQ ID NO: 1760008 - RNA, 19 nt, Homo sapiens
  misc_RNA (1)...(19): siRNA sense strand
guccagaucuaucaguuuc

SEQ ID NO: 1760009 - RNA, 19 nt, Homo sapiens
  misc_RNA (1)...(19): siRNA sense strand
guguccagcuccagucuaa

SEQ ID NO: 1760010 - RNA, 19 nt, Homo sapiens
  misc_RNA (1)...(19): siRNA sense strand
gaguccagaucuaucaguu

SEQ ID NO: 1760011 - RNA, 19 nt, Homo sapiens
  misc_RNA (1)...(19): siRNA sense strand
guccagcuccagucuaaua

SEQ ID NO: 1760012 - RNA, 19 nt, Homo sapiens
  misc_RNA (1)...(19): siRNA sense strand
gcuccagucuaauaccuau

SEQ ID NO: 1760013 - RNA, 19 nt, Homo sapiens
  misc_RNA (1)...(19): siRNA sense strand
gaaacuggaggauaagaag

SEQ ID NO: 1760014 - RNA, 19 nt, Homo sapiens
  misc_RNA (1)...(19): siRNA sense strand
caacggaguccagaucuau

SEQ ID NO: 1760015 - RNA, 19 nt, Homo sapiens
  misc_RNA (1)...(19): siRNA sense strand
auucaucgaugcacaauuc

SEQ ID NO: 1760016 - RNA, 19 nt, Homo sapiens
  misc_RNA (1)...(19): siRNA sense strand
ugaagucucuggaccuagu

SEQ ID NO: 1760017 - RNA, 19 nt, Homo sapiens
  misc_RNA (1)...(19): siRNA sense strand
acaagccuaucguggaauu

SEQ ID NO: 1760018 - RNA, 19 nt, Homo sapiens
  misc_RNA (1)...(19): siRNA sense strand
caccgacccugacagcaaa

SEQ ID NO: 1760019 - RNA, 19 nt, Homo sapiens
  misc_RNA (1)...(19): siRNA sense strand
gaacugaagauaggcaaca

SEQ ID NO: 1760020 - RNA, 19 nt, Homo sapiens
  misc_RNA (1)...(19): siRNA sense strand
gaagagugagcuaacaaag

SEQ ID NO: 1760021 - RNA, 19 nt, Homo sapiens
  misc_RNA (1)...(19): siRNA sense strand
acaguaaggugaacaucau

SEQ ID NO: 1760022 - RNA, 19 nt, Homo sapiens
  misc_RNA (1)...(19): siRNA sense strand
ggaauucaucgaugcacaa

SEQ ID NO: 1760023 - RNA, 19 nt, Homo sapiens
  misc_RNA (1)...(19): siRNA sense strand
augaugaagugaaugcuuu

SEQ ID NO: 1760024 - RNA, 19 nt, Homo sapiens
  misc_RNA (1)...(19): siRNA sense strand
gaggagaugagacagaugu

SEQ ID NO: 1760025 - RNA, 19 nt, Homo sapiens
  misc_RNA (1)...(19): siRNA sense strand
ggugaagguugccgaacug

SEQ ID NO: 1760026 - RNA, 19 nt, Homo sapiens
  misc_RNA (1)...(19): siRNA sense strand
caugucugcuuguauuuca

SEQ ID NO: 1760027 - RNA, 19 nt, Homo sapiens
  misc_RNA (1)...(19): siRNA sense strand
guucaacaccaaauucgaa

SEQ ID NO: 1760028 - RNA, 19 nt, Homo sapiens
  misc_RNA (1)...(19): siRNA sense strand
gaaguuugaccgucugaag

SEQ ID NO: 1760029 - RNA, 19 nt, Homo sapiens
  misc_RNA (1)...(19): siRNA sense strand
gaacaucauccccaucauu

SEQ ID NO: 1760030 - RNA, 19 nt, Homo sapiens
  misc_RNA (1)...(19): siRNA sense strand
ucuaucaguuuccuacaga

SEQ ID NO: 1760031 - RNA, 19 nt, Homo sapiens
  misc_RNA (1)...(19): siRNA sense strand
cgaagagugagcuaacaaa

SEQ ID NO: 1760032 - RNA, 19 nt, Homo sapiens
  misc_RNA (1)...(19): siRNA sense strand
uaauaccuaugaccuccaa

SEQ ID NO: 1760033 - RNA, 19 nt, Homo sapiens
  misc_RNA (1)...(19): siRNA sense strand
ggcuaaagcucacgaucgu

SEQ ID NO: 1760034 - RNA, 19 nt, Homo sapiens
  misc_RNA (1)...(19): siRNA sense strand
cacagaagaacugaagaua

SEQ ID NO: 1760035 - RNA, 19 nt, Homo sapiens
  misc_RNA (1)...(19): siRNA sense strand
cagaugccauuucgaagag

SEQ ID NO: 1760036 - RNA, 19 nt, Homo sapiens
  misc_RNA (1)...(19): siRNA sense strand
aagcagaugccauuucgaa

SEQ ID NO: 1760037 - RNA, 19 nt, Homo sapiens
  misc_RNA (1)...(19): siRNA sense strand
gacaguaaggugaacauca

SEQ ID NO: 1760038 - RNA, 19 nt, Homo sapiens
  misc_RNA (1)...(19): siRNA sense strand
ccugaagucucuggaccua

SEQ ID NO: 1760039 - RNA, 19 nt, Homo sapiens
  misc_RNA (1)...(19): siRNA sense strand
cuacacaccuaccaugacu

SEQ ID NO: 1760040 - RNA, 19 nt, Homo sapiens
  misc_RNA (1)...(19): siRNA sense strand
aagaagaaacuggaggaua

SEQ ID NO: 1760041 - RNA, 19 nt, Homo sapiens
  misc_RNA (1)...(19): siRNA sense strand
ucaguuuacaggagacaua

SEQ ID NO: 1760042 - RNA, 19 nt, Homo sapiens
  misc_RNA (1)...(19): siRNA sense strand
ccaaagcagaugccauuuc

SEQ ID NO: 1760043 - RNA, 19 nt, Homo sapiens
  misc_RNA (1)...(19): siRNA sense strand
caaagaggacagcuacaag

SEQ ID NO: 1760044 - RNA, 19 nt, Homo sapiens
  misc_RNA (1)...(19): siRNA sense strand
gggcaaguccacccucaug

SEQ ID NO: 1760045 - RNA, 19 nt, Homo sapiens
  misc_RNA (1)...(19): siRNA sense strand
gagcuaaagauccgaagag

SEQ ID NO: 1760046 - RNA, 19 nt, Homo sapiens
  misc_RNA (1)...(19): siRNA sense strand
gaugaugaagugaaugcuu

SEQ ID NO: 1760047 - RNA, 19 nt, Homo sapiens
  misc_RNA (1)...(19): siRNA sense strand
guuuacaggagacauauga

SEQ ID NO: 1760048 - RNA, 19 nt, Homo sapiens
  misc_RNA (1)...(19): siRNA sense strand
ccacugcgacuuugugaag

SEQ ID NO: 1760049 - RNA, 19 nt, Homo sapiens
  misc_RNA (1)...(19): siRNA sense strand
gacagcaaacccuucaguu

SEQ ID NO: 1760050 - RNA, 19 nt, Homo sapiens
  misc_RNA (1)...(19): siRNA sense strand
gagagacaaagagaagaaa

SEQ ID NO: 1760051 - RNA, 19 nt, Homo sapiens
  misc_RNA (1)...(19): siRNA sense strand
gagcugcacgagaaguuug

SEQ ID NO: 1760052 - RNA, 19 nt, Homo sapiens
  misc_RNA (1)...(19): siRNA sense strand
caaagaggcagagaaagag

SEQ ID NO: 1760053 - RNA, 19 nt, Homo sapiens
  misc_RNA (1)...(19): siRNA sense strand
acaaagaggacagcuacaa

SEQ ID NO: 1760054 - RNA, 19 nt, Homo sapiens
  misc_RNA (1)...(19): siRNA sense strand
gaagaaacuggaggauaag

SEQ ID NO: 1760055 - RNA, 19 nt, Homo sapiens
  misc_RNA (1)...(19): siRNA sense strand
aagaggagaugagacagau

SEQ ID NO: 1760056 - RNA, 19 nt, Homo sapiens
  misc_RNA (1)...(19): siRNA sense strand
ugccaaagcagaugccauu

SEQ ID NO: 1760057 - RNA, 19 nt, Homo sapiens
  misc_RNA (1)...(19): siRNA sense strand
gucauucccugaagucucu

SEQ ID NO: 1760058 - RNA, 19 nt, Homo sapiens
  misc_RNA (1)...(19): siRNA sense strand
aggccuaccugcaggaaga

SEQ ID NO: 1760059 - RNA, 19 nt, Homo sapiens
  misc_RNA (1)...(19): siRNA sense strand
gaaagagcugcacgagaag

SEQ ID NO: 1760060 - RNA, 19 nt, Homo sapiens
  misc_RNA (1)...(19): siRNA sense strand
gaagaagaaacuggaggau

SEQ ID NO: 1760061 - RNA, 19 nt, Homo sapiens
  misc_RNA (1)...(19): siRNA sense strand
aagauaggcaacaagauga

SEQ ID NO: 1760062 - RNA, 19 nt, Homo sapiens
  misc_RNA (1)...(19): siRNA sense strand
aagaagcggagcucaaaga

SEQ ID NO: 1760063 - RNA, 19 nt, Homo sapiens
  misc_RNA (1)...(19): siRNA sense strand
gggugaagguugccgaacu

SEQ ID NO: 1760064 - RNA, 19 nt, Homo sapiens
  misc_RNA (1)...(19): siRNA sense strand
agaaagaagcggagcucaa

SEQ ID NO: 1760065 - RNA, 19 nt, Homo sapiens
  misc_RNA (1)...(19): siRNA sense strand
ggagaugagacagauguuc

SEQ ID NO: 1760066 - RNA, 19 nt, Homo sapiens
  misc_RNA (1)...(19): siRNA sense strand
auccaugucugcuuguauu

SEQ ID NO: 1760067 - RNA, 19 nt, Homo sapiens
  misc_RNA (1)...(19): siRNA sense strand
agagagacaaagagaagaa

SEQ ID NO: 1760068 - RNA, 19 nt, Homo sapiens
  misc_RNA (1)...(19): siRNA sense strand
ucaacaaagaggacagcua

SEQ ID NO: 1760069 - RNA, 19 nt, Homo sapiens
  misc_RNA (1)...(19): siRNA sense strand
ugaagagagacaaagagaa

SEQ ID NO: 1760070 - RNA, 19 nt, Homo sapiens
  misc_RNA (1)...(19): siRNA sense strand
ccacgggucauucccugaa

SEQ ID NO: 1760071 - RNA, 19 nt, Homo sapiens
  misc_RNA (1)...(19): siRNA sense strand
aagaagaggagaugagaca

SEQ ID NO: 1760072 - RNA, 19 nt, Homo sapiens
  misc_RNA (1)...(19): siRNA sense strand
acagaagaacugaagauag

SEQ ID NO: 1760073 - RNA, 19 nt, Homo sapiens
  misc_RNA (1)...(19): siRNA sense strand
uaccaugacucccgaaucc

SEQ ID NO: 1760074 - RNA, 19 nt, Homo sapiens
  misc_RNA (1)...(19): siRNA sense strand
ccuggaugaugaagugaau

SEQ ID NO: 1760075 - RNA, 19 nt, Homo sapiens
  misc_RNA (1)...(19): siRNA sense strand
cacgaucguuagcacaguu

SEQ ID NO: 1760076 - RNA, 19 nt, Homo sapiens
  misc_RNA (1)...(19): siRNA sense strand
ccagcgagucaaagagaaa

SEQ ID NO: 1760077 - RNA, 19 nt, Homo sapiens
  misc_RNA (1)...(19): siRNA sense strand
uggaggagaugggcuucaa

SEQ ID NO: 1760078 - RNA, 19 nt, Homo sapiens
  misc_RNA (1)...(19): siRNA sense strand
caucauugccaaagcagau

SEQ ID NO: 1760079 - RNA, 19 nt, Homo sapiens
  misc_RNA (1)...(19): siRNA sense strand
gaagaagcuggacaguaag

SEQ ID NO: 1760080 - RNA, 19 nt, Homo sapiens
  misc_RNA (1)...(19): siRNA sense strand
ucaguuuccuacagaugau

SEQ ID NO: 1760081 - RNA, 19 nt, Homo sapiens
  misc_RNA (1)...(19): siRNA sense strand
cagcacagaagaacugaag

SEQ ID NO: 1760082 - RNA, 19 nt, Homo sapiens
  misc_RNA (1)...(19): siRNA sense strand
gcagagaucaauggaacca

SEQ ID NO: 1760083 - RNA, 19 nt, Homo sapiens
  misc_RNA (1)...(19): siRNA sense strand
ugaagaagcuggacaguaa

SEQ ID NO: 1760084 - RNA, 19 nt, Homo sapiens
  misc_RNA (1)...(19): siRNA sense strand
agaagaaacuggaggauaa

SEQ ID NO: 1760085 - RNA, 19 nt, Homo sapiens
  misc_RNA (1)...(19): siRNA sense strand
agaaagagcugcacgagaa

SEQ ID NO: 1760086 - RNA, 19 nt, Homo sapiens
  misc_RNA (1)...(19): siRNA sense strand
gaagagugcuacacaccua

SEQ ID NO: 1760087 - RNA, 19 nt, Homo sapiens
  misc_RNA (1)...(19): siRNA sense strand
gaaagaagcggagcucaaa

SEQ ID NO: 1760088 - RNA, 19 nt, Homo sapiens
  misc_RNA (1)...(19): siRNA sense strand
gaagauaggcaacaagaug

SEQ ID NO: 1760089 - RNA, 19 nt, Homo sapiens
  misc_RNA (1)...(19): siRNA sense strand
agagugagcuaacaaaguu

SEQ ID NO: 1760090 - RNA, 19 nt, Homo sapiens
  misc_RNA (1)...(19): siRNA sense strand
gcuguaagcuggaggagau

SEQ ID NO: 1760091 - RNA, 19 nt, Homo sapiens
  misc_RNA (1)...(19): siRNA sense strand
gaagagagacaaagagaag

SEQ ID NO: 1760092 - RNA, 19 nt, Homo sapiens
  misc_RNA (1)...(19): siRNA sense strand
gcaacggaguccagaucua

SEQ ID NO: 1760093 - RNA, 19 nt, Homo sapiens
  misc_RNA (1)...(19): siRNA sense strand
cagaagaacugaagauagg

SEQ ID NO: 1760094 - RNA, 19 nt, Homo sapiens
  misc_RNA (1)...(19): siRNA sense strand
gcucaaagaggcagagaaa

SEQ ID NO: 1760095 - RNA, 19 nt, Homo sapiens
  misc_RNA (1)...(19): siRNA sense strand
gggaccagaucaacaaaga

SEQ ID NO: 1760096 - RNA, 19 nt, Homo sapiens
  misc_RNA (1)...(19): siRNA sense strand
ggagacauaugaggccaaa

SEQ ID NO: 1760097 - RNA, 19 nt, Homo sapiens
  misc_RNA (1)...(19): siRNA sense strand
cuaaagcucacgaucguua

SEQ ID NO: 1760098 - RNA, 19 nt, Homo sapiens
  misc_RNA (1)...(19): siRNA sense strand
ucaaagaggcagagaaaga

SEQ ID NO: 1760099 - RNA, 19 nt, Homo sapiens
  misc_RNA (1)...(19): siRNA sense strand
ccagcgagcuugucagcaa

SEQ ID NO: 1760100 - RNA, 19 nt, Homo sapiens
  misc_RNA (1)...(19): siRNA sense strand
cuacaagccuaucguggaa

SEQ ID NO: 1760101 - RNA, 19 nt, Homo sapiens
  misc_RNA (1)...(19): siRNA sense strand
gcagaugccauuucgaaga

SEQ ID NO: 1760102 - RNA, 19 nt, Homo sapiens
  misc_RNA (1)...(19): siRNA sense strand
caaagcagaugccauuucg

SEQ ID NO: 1760103 - RNA, 19 nt, Homo sapiens
  misc_RNA (1)...(19): siRNA sense strand
gaagaggagaugagacaga

SEQ ID NO: 1760104 - RNA, 19 nt, Homo sapiens
  misc_RNA (1)...(19): siRNA sense strand
gagagcaacgugaggcuaa

SEQ ID NO: 1760105 - RNA, 19 nt, Homo sapiens
  misc_RNA (1)...(19): siRNA sense strand
gcacagaagaacugaagau

SEQ ID NO: 1760106 - RNA, 19 nt, Homo sapiens
  misc_RNA (1)...(19): siRNA sense strand
gaauccaugucugcuugua

SEQ ID NO: 1760107 - RNA, 19 nt, Homo sapiens
  misc_RNA (1)...(19): siRNA sense strand
gcaggaagagcuaaagauc

SEQ ID NO: 1760108 - RNA, 19 nt, Homo sapiens
  misc_RNA (1)...(19): siRNA sense strand
guccagaucuaucaguuuc

SEQ ID NO: 1760109 - RNA, 19 nt, Homo sapiens
  misc_RNA (1)...(19): siRNA sense strand
guguccagcuccagucuaa

SEQ ID NO: 1760110 - RNA, 19 nt, Homo sapiens
  misc_RNA (1)...(19): siRNA sense strand
gaguccagaucuaucaguu

SEQ ID NO: 1760111 - RNA, 19 nt, Homo sapiens
  misc_RNA (1)...(19): siRNA sense strand
guccagcuccagucuaaua

SEQ ID NO: 1760112 - RNA, 19 nt, Homo sapiens
  misc_RNA (1)...(19): siRNA sense strand
gcuccagucuaauaccuau

SEQ ID NO: 1760113 - RNA, 19 nt, Homo sapiens
  misc_RNA (1)...(19): siRNA sense strand
gaaacuggaggauaagaag

SEQ ID NO: 1760114 - RNA, 19 nt, Homo sapiens
  misc_RNA (1)...(19): siRNA sense strand
caacggaguccagaucuau

SEQ ID NO: 1760115 - RNA, 19 nt, Homo sapiens
  misc_RNA (1)...(19): siRNA sense strand
auucaucgaugcacaauuc

SEQ ID NO: 1760116 - RNA, 19 nt, Homo sapiens
  misc_RNA (1)...(19): siRNA sense strand
ugaagucucuggaccuagu

SEQ ID NO: 1760117 - RNA, 19 nt, Homo sapiens
  misc_RNA (1)...(19): siRNA sense strand
acaagccuaucguggaauu

SEQ ID NO: 1760118 - RNA, 19 nt, Homo sapiens
  misc_RNA (1)...(19): siRNA sense strand
caccgacccugacagcaaa

SEQ ID NO: 1760119 - RNA, 19 nt, Homo sapiens
  misc_RNA (1)...(19): siRNA sense strand
gaacugaagauaggcaaca

SEQ ID NO: 1760120 - RNA, 19 nt, Homo sapiens
  misc_RNA (1)...(19): siRNA sense strand
gaagagugagcuaacaaag

SEQ ID NO: 1760121 - RNA, 19 nt, Homo sapiens
  misc_RNA (1)...(19): siRNA sense strand
acaguaaggugaacaucau

SEQ ID NO: 1760122 - RNA, 19 nt, Homo sapiens
  misc_RNA (1)...(19): siRNA sense strand
ggaauucaucgaugcacaa

SEQ ID NO: 1760123 - RNA, 19 nt, Homo sapiens
  misc_RNA (1)...(19): siRNA sense strand
augaugaagugaaugcuuu

SEQ ID NO: 1760124 - RNA, 19 nt, Homo sapiens
  misc_RNA (1)...(19): siRNA sense strand
gaggagaugagacagaugu

SEQ ID NO: 1760125 - RNA, 19 nt, Homo sapiens
  misc_RNA (1)...(19): siRNA sense strand
ggugaagguugccgaacug

SEQ ID NO: 1760126 - RNA, 19 nt, Homo sapiens
  misc_RNA (1)...(19): siRNA sense strand
caugucugcuuguauuuca

SEQ ID NO: 1760127 - RNA, 19 nt, Homo sapiens
  misc_RNA (1)...(19): siRNA sense strand
guucaacaccaaauucgaa

SEQ ID NO: 1760128 - RNA, 19 nt, Homo sapiens
  misc_RNA (1)...(19): siRNA sense strand
gaaguuugaccgucugaag

SEQ ID NO: 1760129 - RNA, 19 nt, Homo sapiens
  misc_RNA (1)...(19): siRNA sense strand
gaacaucauccccaucauu

SEQ ID NO: 1760130 - RNA, 19 nt, Homo sapiens
  misc_RNA (1)...(19): siRNA sense strand
ucuaucaguuuccuacaga

SEQ ID NO: 1760131 - RNA, 19 nt, Homo sapiens
  misc_RNA (1)...(19): siRNA sense strand
cgaagagugagcuaacaaa

SEQ ID NO: 1760132 - RNA, 19 nt, Homo sapiens
  misc_RNA (1)...(19): siRNA sense strand
uaauaccuaugaccuccaa

SEQ ID NO: 1760133 - RNA, 19 nt, Homo sapiens
  misc_RNA (1)...(19): siRNA sense strand
ggcuaaagcucacgaucgu

SEQ ID NO: 1760134 - RNA, 19 nt, Homo sapiens
  misc_RNA (1)...(19): siRNA sense strand
cacagaagaacugaagaua

SEQ ID NO: 1760135 - RNA, 19 nt, Homo sapiens
  misc_RNA (1)...(19): siRNA sense strand
cagaugccauuucgaagag

SEQ ID NO: 1760136 - RNA, 19 nt, Homo sapiens
  misc_RNA (1)...(19): siRNA sense strand
aagcagaugccauuucgaa

SEQ ID NO: 1760137 - RNA, 19 nt, Homo sapiens
  misc_RNA (1)...(19): siRNA sense strand
gacaguaaggugaacauca

SEQ ID NO: 1760138 - RNA, 19 nt, Homo sapiens
  misc_RNA (1)...(19): siRNA sense strand
ccugaagucucuggaccua

SEQ ID NO: 1760139 - RNA, 19 nt, Homo sapiens
  misc_RNA (1)...(19): siRNA sense strand
cuacacaccuaccaugacu

SEQ ID NO: 1760140 - RNA, 19 nt, Homo sapiens
  misc_RNA (1)...(19): siRNA sense strand
aagaagaaacuggaggaua

SEQ ID NO: 1760141 - RNA, 19 nt, Homo sapiens
  misc_RNA (1)...(19): siRNA sense strand
ucaguuuacaggagacaua

SEQ ID NO: 1760142 - RNA, 19 nt, Homo sapiens
  misc_RNA (1)...(19): siRNA sense strand
ccaaagcagaugccauuuc

SEQ ID NO: 1760143 - RNA, 19 nt, Homo sapiens
  misc_RNA (1)...(19): siRNA sense strand
caaagaggacagcuacaag

SEQ ID NO: 1760144 - RNA, 19 nt, Homo sapiens
  misc_RNA (1)...(19): siRNA sense strand
gggcaaguccacccucaug

SEQ ID NO: 1760145 - RNA, 19 nt, Homo sapiens
  misc_RNA (1)...(19): siRNA sense strand
gagcuaaagauccgaagag

SEQ ID NO: 1760146 - RNA, 19 nt, Homo sapiens
  misc_RNA (1)...(19): siRNA sense strand
gaugaugaagugaaugcuu

SEQ ID NO: 1760147 - RNA, 19 nt, Homo sapiens
  misc_RNA (1)...(19): siRNA sense strand
guuuacaggagacauauga

SEQ ID NO: 1760148 - RNA, 19 nt, Homo sapiens
  misc_RNA (1)...(19): siRNA sense strand
ccacugcgacuuugugaag

SEQ ID NO: 1760149 - RNA, 19 nt, Homo sapiens
  misc_RNA (1)...(19): siRNA sense strand
gacagcaaacccuucaguu

SEQ ID NO: 1760150 - RNA, 19 nt, Homo sapiens
  misc_RNA (1)...(19): siRNA sense strand
gagagacaaagagaagaaa

SEQ ID NO: 1760151 - RNA, 19 nt, Homo sapiens
  misc_RNA (1)...(19): siRNA sense strand
gagcugcacgagaaguuug

SEQ ID NO: 1760152 - RNA, 19 nt, Homo sapiens
  misc_RNA (1)...(19): siRNA sense strand
caaagaggcagagaaagag

SEQ ID NO: 1760153 - RNA, 19 nt, Homo sapiens
  misc_RNA (1)...(19): siRNA sense strand
acaaagaggacagcuacaa

SEQ ID NO: 1760154 - RNA, 19 nt, Homo sapiens
  misc_RNA (1)...(19): siRNA sense strand
gaagaaacuggaggauaag

SEQ ID NO: 1760155 - RNA, 19 nt, Homo sapiens
  misc_RNA (1)...(19): siRNA sense strand
aagaggagaugagacagau

SEQ ID NO: 1760156 - RNA, 19 nt, Homo sapiens
  misc_RNA (1)...(19): siRNA sense strand
ugccaaagcagaugccauu

SEQ ID NO: 1760157 - RNA, 19 nt, Homo sapiens
  misc_RNA (1)...(19): siRNA sense strand
gucauucccugaagucucu

SEQ ID NO: 1760158 - RNA, 19 nt, Homo sapiens
  misc_RNA (1)...(19): siRNA sense strand
aggccuaccugcaggaaga

SEQ ID NO: 1760159 - RNA, 19 nt, Homo sapiens
  misc_RNA (1)...(19): siRNA sense strand
gaaagagcugcacgagaag

SEQ ID NO: 1760160 - RNA, 19 nt, Homo sapiens
  misc_RNA (1)...(19): siRNA sense strand
gaagaagaaacuggaggau

SEQ ID NO: 1760161 - RNA, 19 nt, Homo sapiens
  misc_RNA (1)...(19): siRNA sense strand
aagauaggcaacaagauga

SEQ ID NO: 1760162 - RNA, 19 nt, Homo sapiens
  misc_RNA (1)...(19): siRNA sense strand
aagaagcggagcucaaaga

SEQ ID NO: 1760163 - RNA, 19 nt, Homo sapiens
  misc_RNA (1)...(19): siRNA sense strand
gggugaagguugccgaacu

SEQ ID NO: 1760164 - RNA, 19 nt, Homo sapiens
  misc_RNA (1)...(19): siRNA sense strand
agaaagaagcggagcucaa

SEQ ID NO: 1760165 - RNA, 19 nt, Homo sapiens
  misc_RNA (1)...(19): siRNA sense strand
ggagaugagacagauguuc

SEQ ID NO: 1760166 - RNA, 19 nt, Homo sapiens
  misc_RNA (1)...(19): siRNA sense strand
auccaugucugcuuguauu

SEQ ID NO: 1760167 - RNA, 19 nt, Homo sapiens
  misc_RNA (1)...(19): siRNA sense strand
agagagacaaagagaagaa

SEQ ID NO: 1760168 - RNA, 19 nt, Homo sapiens
  misc_RNA (1)...(19): siRNA sense strand
ucaacaaagaggacagcua

SEQ ID NO: 1760169 - RNA, 19 nt, Homo sapiens
  misc_RNA (1)...(19): siRNA sense strand
ugaagagagacaaagagaa

SEQ ID NO: 1760170 - RNA, 19 nt, Homo sapiens
  misc_RNA (1)...(19): siRNA sense strand
ccacgggucauucccugaa

SEQ ID NO: 1760171 - RNA, 19 nt, Homo sapiens
  misc_RNA (1)...(19): siRNA sense strand
aagaagaggagaugagaca

SEQ ID NO: 1760172 - RNA, 19 nt, Homo sapiens
  misc_RNA (1)...(19): siRNA sense strand
acagaagaacugaagauag

SEQ ID NO: 1760173 - RNA, 19 nt, Homo sapiens
  misc_RNA (1)...(19): siRNA sense strand
uaccaugacucccgaaucc

SEQ ID NO: 1760174 - RNA, 19 nt, Homo sapiens
  misc_RNA (1)...(19): siRNA sense strand
ccuggaugaugaagugaau

SEQ ID NO: 1760175 - RNA, 19 nt, Homo sapiens
  misc_RNA (1)...(19): siRNA sense strand
cacgaucguuagcacaguu

SEQ ID NO: 1760176 - RNA, 19 nt, Homo sapiens
  misc_RNA (1)...(19): siRNA sense strand
ccagcgagucaaagagaaa

SEQ ID NO: 1760177 - RNA, 19 nt, Homo sapiens
  misc_RNA (1)...(19): siRNA sense strand
uggaggagaugggcuucaa

SEQ ID NO: 1760178 - RNA, 19 nt, Homo sapiens
  misc_RNA (1)...(19): siRNA sense strand
caucauugccaaagcagau

SEQ ID NO: 1760179 - RNA, 19 nt, Homo sapiens
  misc_RNA (1)...(19): siRNA sense strand
gaagaagcuggacaguaag

SEQ ID NO: 1760180 - RNA, 19 nt, Homo sapiens
  misc_RNA (1)...(19): siRNA sense strand
ucaguuuccuacagaugau

SEQ ID NO: 1760181 - RNA, 19 nt, Homo sapiens
  misc_RNA (1)...(19): siRNA sense strand
cagcacagaagaacugaag

SEQ ID NO: 1760182 - RNA, 19 nt, Homo sapiens
  misc_RNA (1)...(19): siRNA sense strand
gcagagaucaauggaacca

SEQ ID NO: 1760183 - RNA, 19 nt, Homo sapiens
  misc_RNA (1)...(19): siRNA sense strand
ugaagaagcuggacaguaa

SEQ ID NO: 1760184 - RNA, 19 nt, Homo sapiens
  misc_RNA (1)...(19): siRNA sense strand
agaagaaacuggaggauaa

SEQ ID NO: 1760185 - RNA, 19 nt, Homo sapiens
  misc_RNA (1)...(19): siRNA sense strand
agaaagagcugcacgagaa

SEQ ID NO: 1760186 - RNA, 19 nt, Homo sapiens
  misc_RNA (1)...(19): siRNA sense strand
gaagagugcuacacaccua

SEQ ID NO: 1760187 - RNA, 19 nt, Homo sapiens
  misc_RNA (1)...(19): siRNA sense strand
gaaagaagcggagcucaaa

SEQ ID NO: 1760188 - RNA, 19 nt, Homo sapiens
  misc_RNA (1)...(19): siRNA sense strand
gaagauaggcaacaagaug

SEQ ID NO: 1760189 - RNA, 19 nt, Homo sapiens
  misc_RNA (1)...(19): siRNA sense strand
agagugagcuaacaaaguu

SEQ ID NO: 1760190 - RNA, 19 nt, Homo sapiens
  misc_RNA (1)...(19): siRNA sense strand
gcuguaagcuggaggagau

SEQ ID NO: 1760191 - RNA, 19 nt, Homo sapiens
  misc_RNA (1)...(19): siRNA sense strand
gaagagagacaaagagaag

SEQ ID NO: 1760192 - RNA, 19 nt, Homo sapiens
  misc_RNA (1)...(19): siRNA sense strand
gcaacggaguccagaucua

SEQ ID NO: 1760193 - RNA, 19 nt, Homo sapiens
  misc_RNA (1)...(19): siRNA sense strand
cagaagaacugaagauagg

SEQ ID NO: 1760194 - RNA, 19 nt, Homo sapiens
  misc_RNA (1)...(19): siRNA sense strand
gcucaaagaggcagagaaa

SEQ ID NO: 1760195 - RNA, 19 nt, Homo sapiens
  misc_RNA (1)...(19): siRNA sense strand
gggaccagaucaacaaaga

SEQ ID NO: 1760196 - RNA, 19 nt, Homo sapiens
  misc_RNA (1)...(19): siRNA sense strand
ggagacauaugaggccaaa

SEQ ID NO: 1760197 - RNA, 19 nt, Homo sapiens
  misc_RNA (1)...(19): siRNA sense strand
cuaaagcucacgaucguua

SEQ ID NO: 1760198 - RNA, 19 nt, Homo sapiens
  misc_RNA (1)...(19): siRNA sense strand
ucaaagaggcagagaaaga

SEQ ID NO: 1760199 - RNA, 19 nt, Homo sapiens
  misc_RNA (1)...(19): siRNA sense strand
ccagcgagcuugucagcaa

SEQ ID NO: 1760200 - RNA, 19 nt, Homo sapiens
  misc_RNA (1)...(19): siRNA sense strand
cuacaagccuaucguggaa

SEQ ID NO: 1760201 - RNA, 19 nt, Homo sapiens
  misc_RNA (1)...(19): siRNA sense strand
gcagaugccauuucgaaga

SEQ ID NO: 1760202 - RNA, 19 nt, Homo sapiens
  misc_RNA (1)...(19): siRNA sense strand
caaagcagaugccauuucg

SEQ ID NO: 1760203 - RNA, 19 nt, Homo sapiens
  misc_RNA (1)...(19): siRNA sense strand
gaagaggagaugagacaga

SEQ ID NO: 1760204 - RNA, 19 nt, Homo sapiens
  misc_RNA (1)...(19): siRNA sense strand
gagagcaacgugaggcuaa

SEQ ID NO: 1760205 - RNA, 19 nt, Homo sapiens
  misc_RNA (1)...(19): siRNA sense strand
gcacagaagaacugaagau

SEQ ID NO: 1760206 - RNA, 19 nt, Homo sapiens
  misc_RNA (1)...(19): siRNA sense strand
gaauccaugucugcuugua

SEQ ID NO: 1760207 - RNA, 19 nt, Homo sapiens
  misc_RNA (1)...(19): siRNA sense strand
gcaggaagagcuaaagauc

SEQ ID NO: 1760208 - RNA, 19 nt, Homo sapiens
  misc_RNA (1)...(19): siRNA sense strand
guccagaucuaucaguuuc

SEQ ID NO: 1760209 - RNA, 19 nt, Homo sapiens
  misc_RNA (1)...(19): siRNA sense strand
guguccagcuccagucuaa

SEQ ID NO: 1760210 - RNA, 19 nt, Homo sapiens
  misc_RNA (1)...(19): siRNA sense strand
gaguccagaucuaucaguu

SEQ ID NO: 1760211 - RNA, 19 nt, Homo sapiens
  misc_RNA (1)...(19): siRNA sense strand
guccagcuccagucuaaua

SEQ ID NO: 1760212 - RNA, 19 nt, Homo sapiens
  misc_RNA (1)...(19): siRNA sense strand
gcuccagucuaauaccuau

SEQ ID NO: 1760213 - RNA, 19 nt, Homo sapiens
  misc_RNA (1)...(19): siRNA sense strand
gaaacuggaggauaagaag

SEQ ID NO: 1760214 - RNA, 19 nt, Homo sapiens
  misc_RNA (1)...(19): siRNA sense strand
caacggaguccagaucuau

SEQ ID NO: 1760215 - RNA, 19 nt, Homo sapiens
  misc_RNA (1)...(19): siRNA sense strand
auucaucgaugcacaauuc

SEQ ID NO: 1760216 - RNA, 19 nt, Homo sapiens
  misc_RNA (1)...(19): siRNA sense strand
ugaagucucuggaccuagu

SEQ ID NO: 1760217 - RNA, 19 nt, Homo sapiens
  misc_RNA (1)...(19): siRNA sense strand
acaagccuaucguggaauu

SEQ ID NO: 1760218 - RNA, 19 nt, Homo sapiens
  misc_RNA (1)...(19): siRNA sense strand
caccgacccugacagcaaa

SEQ ID NO: 1760219 - RNA, 19 nt, Homo sapiens
  misc_RNA (1)...(19): siRNA sense strand
gaacugaagauaggcaaca

SEQ ID NO: 1760220 - RNA, 19 nt, Homo sapiens
  misc_RNA (1)...(19): siRNA sense strand
gaagagugagcuaacaaag

SEQ ID NO: 1760221 - RNA, 19 nt, Homo sapiens
  misc_RNA (1)...(19): siRNA sense strand
acaguaaggugaacaucau

SEQ ID NO: 1760222 - RNA, 19 nt, Homo sapiens
  misc_RNA (1)...(19): siRNA sense strand
ggaauucaucgaugcacaa

SEQ ID NO: 1760223 - RNA, 19 nt, Homo sapiens
  misc_RNA (1)...(19): siRNA sense strand
augaugaagugaaugcuuu

SEQ ID NO: 1760224 - RNA, 19 nt, Homo sapiens
  misc_RNA (1)...(19): siRNA sense strand
gaggagaugagacagaugu

SEQ ID NO: 1760225 - RNA, 19 nt, Homo sapiens
  misc_RNA (1)...(19): siRNA sense strand
ggugaagguugccgaacug

SEQ ID NO: 1760226 - RNA, 19 nt, Homo sapiens
  misc_RNA (1)...(19): siRNA sense strand
caugucugcuuguauuuca

SEQ ID NO: 1760227 - RNA, 19 nt, Homo sapiens
  misc_RNA (1)...(19): siRNA sense strand
guucaacaccaaauucgaa

SEQ ID NO: 1760228 - RNA, 19 nt, Homo sapiens
  misc_RNA (1)...(19): siRNA sense strand
gaaguuugaccgucugaag

SEQ ID NO: 1760229 - RNA, 19 nt, Homo sapiens
  misc_RNA (1)...(19): siRNA sense strand
gaacaucauccccaucauu

SEQ ID NO: 1760230 - RNA, 19 nt, Homo sapiens
  misc_RNA (1)...(19): siRNA sense strand
ucuaucaguuuccuacaga

SEQ ID NO: 1760231 - RNA, 19 nt, Homo sapiens
  misc_RNA (1)...(19): siRNA sense strand
cgaagagugagcuaacaaa

SEQ ID NO: 1760232 - RNA, 19 nt, Homo sapiens
  misc_RNA (1)...(19): siRNA sense strand
uaauaccuaugaccuccaa

SEQ ID NO: 1760233 - RNA, 19 nt, Homo sapiens
  misc_RNA (1)...(19): siRNA sense strand
ggcuaaagcucacgaucgu

SEQ ID NO: 1760234 - RNA, 19 nt, Homo sapiens
  misc_RNA (1)...(19): siRNA sense strand
cacagaagaacugaagaua

SEQ ID NO: 1760235 - RNA, 19 nt, Homo sapiens
  misc_RNA (1)...(19): siRNA sense strand
cagaugccauuucgaagag

SEQ ID NO: 1760236 - RNA, 19 nt, Homo sapiens
  misc_RNA (1)...(19): siRNA sense strand
aagcagaugccauuucgaa

SEQ ID NO: 1760237 - RNA, 19 nt, Homo sapiens
  misc_RNA (1)...(19): siRNA sense strand
gacaguaaggugaacauca

SEQ ID NO: 1760238 - RNA, 19 nt, Homo sapiens
  misc_RNA (1)...(19): siRNA sense strand
ccugaagucucuggaccua

SEQ ID NO: 1760239 - RNA, 19 nt, Homo sapiens
  misc_RNA (1)...(19): siRNA sense strand
cuacacaccuaccaugacu

SEQ ID NO: 1760240 - RNA, 19 nt, Homo sapiens
  misc_RNA (1)...(19): siRNA sense strand
aagaagaaacuggaggaua

SEQ ID NO: 1760241 - RNA, 19 nt, Homo sapiens
  misc_RNA (1)...(19): siRNA sense strand
ucaguuuacaggagacaua

SEQ ID NO: 1760242 - RNA, 19 nt, Homo sapiens
  misc_RNA (1)...(19): siRNA sense strand
ccaaagcagaugccauuuc

SEQ ID NO: 1760243 - RNA, 19 nt, Homo sapiens
  misc_RNA (1)...(19): siRNA sense strand
caaagaggacagcuacaag

SEQ ID NO: 1760244 - RNA, 19 nt, Homo sapiens
  misc_RNA (1)...(19): siRNA sense strand
gggcaaguccacccucaug

SEQ ID NO: 1760245 - RNA, 19 nt, Homo sapiens
  misc_RNA (1)...(19): siRNA sense strand
gagcuaaagauccgaagag

SEQ ID NO: 1760246 - RNA, 19 nt, Homo sapiens
  misc_RNA (1)...(19): siRNA sense strand
gaugaugaagugaaugcuu

SEQ ID NO: 1760247 - RNA, 19 nt, Homo sapiens
  misc_RNA (1)...(19): siRNA sense strand
guuuacaggagacauauga

SEQ ID NO: 1760248 - RNA, 19 nt, Homo sapiens
  misc_RNA (1)...(19): siRNA sense strand
ccacugcgacuuugugaag

SEQ ID NO: 1760249 - RNA, 19 nt, Homo sapiens
  misc_RNA (1)...(19): siRNA sense strand
gacagcaaacccuucaguu

SEQ ID NO: 1760250 - RNA, 19 nt, Homo sapiens
  misc_RNA (1)...(19): siRNA sense strand
gagagacaaagagaagaaa

SEQ ID NO: 1760251 - RNA, 19 nt, Homo sapiens
  misc_RNA (1)...(19): siRNA sense strand
gagcugcacgagaaguuug

SEQ ID NO: 1760252 - RNA, 19 nt, Homo sapiens
  misc_RNA (1)...(19): siRNA sense strand
caaagaggcagagaaagag

SEQ ID NO: 1760253 - RNA, 19 nt, Homo sapiens
  misc_RNA (1)...(19): siRNA sense strand
acaaagaggacagcuacaa

SEQ ID NO: 1760254 - RNA, 19 nt, Homo sapiens
  misc_RNA (1)...(19): siRNA sense strand
gaagaaacuggaggauaag

SEQ ID NO: 1760255 - RNA, 19 nt, Homo sapiens
  misc_RNA (1)...(19): siRNA sense strand
aagaggagaugagacagau

SEQ ID NO: 1760256 - RNA, 19 nt, Homo sapiens
  misc_RNA (1)...(19): siRNA sense strand
ugccaaagcagaugccauu

SEQ ID NO: 1760257 - RNA, 19 nt, Homo sapiens
  misc_RNA (1)...(19): siRNA sense strand
gucauucccugaagucucu

SEQ ID NO: 1760258 - RNA, 19 nt, Homo sapiens
  misc_RNA (1)...(19): siRNA sense strand
aggccuaccugcaggaaga

SEQ ID NO: 1760259 - RNA, 19 nt, Homo sapiens
  misc_RNA (1)...(19): siRNA sense strand
gaaagagcugcacgagaag

SEQ ID NO: 1760260 - RNA, 19 nt, Homo sapiens
  misc_RNA (1)...(19): siRNA sense strand
gaagaagaaacuggaggau

SEQ ID NO: 1760261 - RNA, 19 nt, Homo sapiens
  misc_RNA (1)...(19): siRNA sense strand
aagauaggcaacaagauga

SEQ ID NO: 1760262 - RNA, 19 nt, Homo sapiens
  misc_RNA (1)...(19): siRNA sense strand
aagaagcggagcucaaaga

SEQ ID NO: 1760263 - RNA, 19 nt, Homo sapiens
  misc_RNA (1)...(19): siRNA sense strand
gggugaagguugccgaacu

SEQ ID NO: 1760264 - RNA, 19 nt, Homo sapiens
  misc_RNA (1)...(19): siRNA sense strand
agaaagaagcggagcucaa

SEQ ID NO: 1760265 - RNA, 19 nt, Homo sapiens
  misc_RNA (1)...(19): siRNA sense strand
ggagaugagacagauguuc

SEQ ID NO: 1760266 - RNA, 19 nt, Homo sapiens
  misc_RNA (1)...(19): siRNA sense strand
auccaugucugcuuguauu

SEQ ID NO: 1760267 - RNA, 19 nt, Homo sapiens
  misc_RNA (1)...(19): siRNA sense strand
agagagacaaagagaagaa

SEQ ID NO: 1760268 - RNA, 19 nt, Homo sapiens
  misc_RNA (1)...(19): siRNA sense strand
ucaacaaagaggacagcua

SEQ ID NO: 1760269 - RNA, 19 nt, Homo sapiens
  misc_RNA (1)...(19): siRNA sense strand
ugaagagagacaaagagaa

SEQ ID NO: 1760270 - RNA, 19 nt, Homo sapiens
  misc_RNA (1)...(19): siRNA sense strand
ccacgggucauucccugaa

SEQ ID NO: 1760271 - RNA, 19 nt, Homo sapiens
  misc_RNA (1)...(19): siRNA sense strand
aagaagaggagaugagaca

SEQ ID NO: 1760272 - RNA, 19 nt, Homo sapiens
  misc_RNA (1)...(19): siRNA sense strand
acagaagaacugaagauag

SEQ ID NO: 1760273 - RNA, 19 nt, Homo sapiens
  misc_RNA (1)...(19): siRNA sense strand
uaccaugacucccgaaucc

SEQ ID NO: 1760274 - RNA, 19 nt, Homo sapiens
  misc_RNA (1)...(19): siRNA sense strand
ccuggaugaugaagugaau

SEQ ID NO: 1760275 - RNA, 19 nt, Homo sapiens
  misc_RNA (1)...(19): siRNA sense strand
cacgaucguuagcacaguu

SEQ ID NO: 1760276 - RNA, 19 nt, Homo sapiens
  misc_RNA (1)...(19): siRNA sense strand
ccagcgagucaaagagaaa

SEQ ID NO: 1760277 - RNA, 19 nt, Homo sapiens
  misc_RNA (1)...(19): siRNA sense strand
uggaggagaugggcuucaa

SEQ ID NO: 1760278 - RNA, 19 nt, Homo sapiens
  misc_RNA (1)...(19): siRNA sense strand
caucauugccaaagcagau

SEQ ID NO: 1760279 - RNA, 19 nt, Homo sapiens
  misc_RNA (1)...(19): siRNA sense strand
gaagaagcuggacaguaag

SEQ ID NO: 1760280 - RNA, 19 nt, Homo sapiens
  misc_RNA (1)...(19): siRNA sense strand
ucaguuuccuacagaugau

SEQ ID NO: 1760281 - RNA, 19 nt, Homo sapiens
  misc_RNA (1)...(19): siRNA sense strand
cagcacagaagaacugaag

SEQ ID NO: 1760282 - RNA, 19 nt, Homo sapiens
  misc_RNA (1)...(19): siRNA sense strand
gcagagaucaauggaacca

SEQ ID NO: 1760283 - RNA, 19 nt, Homo sapiens
  misc_RNA (1)...(19): siRNA sense strand
ugaagaagcuggacaguaa

SEQ ID NO: 1760284 - RNA, 19 nt, Homo sapiens
  misc_RNA (1)...(19): siRNA sense strand
agaagaaacuggaggauaa

SEQ ID NO: 1760285 - RNA, 19 nt, Homo sapiens
  misc_RNA (1)...(19): siRNA sense strand
agaaagagcugcacgagaa

SEQ ID NO: 1760286 - RNA, 19 nt, Homo sapiens
  misc_RNA (1)...(19): siRNA sense strand
gaagagugcuacacaccua

SEQ ID NO: 1760287 - RNA, 19 nt, Homo sapiens
  misc_RNA (1)...(19): siRNA sense strand
gaaagaagcggagcucaaa

SEQ ID NO: 1760288 - RNA, 19 nt, Homo sapiens
  misc_RNA (1)...(19): siRNA sense strand
gaagauaggcaacaagaug

SEQ ID NO: 1760289 - RNA, 19 nt, Homo sapiens
  misc_RNA (1)...(19): siRNA sense strand
agagugagcuaacaaaguu

SEQ ID NO: 1760290 - RNA, 19 nt, Homo sapiens
  misc_RNA (1)...(19): siRNA sense strand
gcuguaagcuggaggagau

SEQ ID NO: 1760291 - RNA, 19 nt, Homo sapiens
  misc_RNA (1)...(19): siRNA sense strand
gaagagagacaaagagaag

SEQ ID NO: 1760292 - RNA, 19 nt, Homo sapiens
  misc_RNA (1)...(19): siRNA sense strand
gcaacggaguccagaucua

SEQ ID NO: 1760293 - RNA, 19 nt, Homo sapiens
  misc_RNA (1)...(19): siRNA sense strand
cagaagaacugaagauagg

SEQ ID NO: 1760294 - RNA, 19 nt, Homo sapiens
  misc_RNA (1)...(19): siRNA sense strand
gcucaaagaggcagagaaa

SEQ ID NO: 1760295 - RNA, 19 nt, Homo sapiens
  misc_RNA (1)...(19): siRNA sense strand
gggaccagaucaacaaaga

SEQ ID NO: 1760296 - RNA, 19 nt, Homo sapiens
  misc_RNA (1)...(19): siRNA sense strand
ggagacauaugaggccaaa

SEQ ID NO: 1760297 - RNA, 19 nt, Homo sapiens
  misc_RNA (1)...(19): siRNA sense strand
cuaaagcucacgaucguua

SEQ ID NO: 1760298 - RNA, 19 nt, Homo sapiens
  misc_RNA (1)...(19): siRNA sense strand
ucaaagaggcagagaaaga

SEQ ID NO: 1760299 - RNA, 19 nt, Homo sapiens
  misc_RNA (1)...(19): siRNA sense strand
ccagcgagcuugucagcaa

SEQ ID NO: 1760300 - RNA, 19 nt, Homo sapiens
  misc_RNA (1)...(19): siRNA sense strand
cuacaagccuaucguggaa

SEQ ID NO: 1760301 - RNA, 19 nt, Homo sapiens
  misc_RNA (1)...(19): siRNA sense strand
gcagaugccauuucgaaga

SEQ ID NO: 1760302 - RNA, 19 nt, Homo sapiens
  misc_RNA (1)...(19): siRNA sense strand
caaagcagaugccauuucg

SEQ ID NO: 1760303 - RNA, 19 nt, Homo sapiens
  misc_RNA (1)...(19): siRNA sense strand
gaagaggagaugagacaga

SEQ ID NO: 1760304 - RNA, 19 nt, Homo sapiens
  misc_RNA (1)...(19): siRNA sense strand
gagagcaacgugaggcuaa

SEQ ID NO: 1760305 - RNA, 19 nt, Homo sapiens
  misc_RNA (1)...(19): siRNA sense strand
gcacagaagaacugaagau

SEQ ID NO: 1760306 - RNA, 19 nt, Homo sapiens
  misc_RNA (1)...(19): siRNA sense strand
gaauccaugucugcuugua

SEQ ID NO: 1760307 - RNA, 19 nt, Homo sapiens
  misc_RNA (1)...(19): siRNA sense strand
gcaggaagagcuaaagauc

SEQ ID NO: 1760308 - RNA, 19 nt, Homo sapiens
  misc_RNA (1)...(19): siRNA sense strand
guccagaucuaucaguuuc

SEQ ID NO: 1760309 - RNA, 19 nt, Homo sapiens
  misc_RNA (1)...(19): siRNA sense strand
guguccagcuccagucuaa

SEQ ID NO: 1760310 - RNA, 19 nt, Homo sapiens
  misc_RNA (1)...(19): siRNA sense strand
gaguccagaucuaucaguu

SEQ ID NO: 1760311 - RNA, 19 nt, Homo sapiens
  misc_RNA (1)...(19): siRNA sense strand
guccagcuccagucuaaua

SEQ ID NO: 1760312 - RNA, 19 nt, Homo sapiens
  misc_RNA (1)...(19): siRNA sense strand
gcuccagucuaauaccuau

SEQ ID NO: 1760313 - RNA, 19 nt, Homo sapiens
  misc_RNA (1)...(19): siRNA sense strand
gaaacuggaggauaagaag

SEQ ID NO: 1760314 - RNA, 19 nt, Homo sapiens
  misc_RNA (1)...(19): siRNA sense strand
caacggaguccagaucuau

SEQ ID NO: 1760315 - RNA, 19 nt, Homo sapiens
  misc_RNA (1)...(19): siRNA sense strand
auucaucgaugcacaauuc

SEQ ID NO: 1760316 - RNA, 19 nt, Homo sapiens
  misc_RNA (1)...(19): siRNA sense strand
ugaagucucuggaccuagu

SEQ ID NO: 1760317 - RNA, 19 nt, Homo sapiens
  misc_RNA (1)...(19): siRNA sense strand
acaagccuaucguggaauu

SEQ ID NO: 1760318 - RNA, 19 nt, Homo sapiens
  misc_RNA (1)...(19): siRNA sense strand
caccgacccugacagcaaa

SEQ ID NO: 1760319 - RNA, 19 nt, Homo sapiens
  misc_RNA (1)...(19): siRNA sense strand
gaacugaagauaggcaaca

SEQ ID NO: 1760320 - RNA, 19 nt, Homo sapiens
  misc_RNA (1)...(19): siRNA sense strand
gaagagugagcuaacaaag

SEQ ID NO: 1760321 - RNA, 19 nt, Homo sapiens
  misc_RNA (1)...(19): siRNA sense strand
acaguaaggugaacaucau

SEQ ID NO: 1760322 - RNA, 19 nt, Homo sapiens
  misc_RNA (1)...(19): siRNA sense strand
ggaauucaucgaugcacaa

SEQ ID NO: 1760323 - RNA, 19 nt, Homo sapiens
  misc_RNA (1)...(19): siRNA sense strand
augaugaagugaaugcuuu

SEQ ID NO: 1760324 - RNA, 19 nt, Homo sapiens
  misc_RNA (1)...(19): siRNA sense strand
gaggagaugagacagaugu

SEQ ID NO: 1760325 - RNA, 19 nt, Homo sapiens
  misc_RNA (1)...(19): siRNA sense strand
ggugaagguugccgaacug

SEQ ID NO: 1760326 - RNA, 19 nt, Homo sapiens
  misc_RNA (1)...(19): siRNA sense strand
caugucugcuuguauuuca

SEQ ID NO: 1760327 - RNA, 19 nt, Homo sapiens
  misc_RNA (1)...(19): siRNA sense strand
guucaacaccaaauucgaa

SEQ ID NO: 1760328 - RNA, 19 nt, Homo sapiens
  misc_RNA (1)...(19): siRNA sense strand
gaaguuugaccgucugaag

SEQ ID NO: 1760329 - RNA, 19 nt, Homo sapiens
  misc_RNA (1)...(19): siRNA sense strand
gaacaucauccccaucauu

SEQ ID NO: 1760330 - RNA, 19 nt, Homo sapiens
  misc_RNA (1)...(19): siRNA sense strand
ucuaucaguuuccuacaga

SEQ ID NO: 1760331 - RNA, 19 nt, Homo sapiens
  misc_RNA (1)...(19): siRNA sense strand
cgaagagugagcuaacaaa

SEQ ID NO: 1760332 - RNA, 19 nt, Homo sapiens
  misc_RNA (1)...(19): siRNA sense strand
uaauaccuaugaccuccaa

SEQ ID NO: 1760333 - RNA, 19 nt, Homo sapiens
  misc_RNA (1)...(19): siRNA sense strand
ggcuaaagcucacgaucgu

SEQ ID NO: 1760334 - RNA, 19 nt, Homo sapiens
  misc_RNA (1)...(19): siRNA sense strand
cacagaagaacugaagaua

SEQ ID NO: 1760335 - RNA, 19 nt, Homo sapiens
  misc_RNA (1)...(19): siRNA sense strand
cagaugccauuucgaagag

SEQ ID NO: 1760336 - RNA, 19 nt, Homo sapiens
  misc_RNA (1)...(19): siRNA sense strand
aagcagaugccauuucgaa

SEQ ID NO: 1760337 - RNA, 19 nt, Homo sapiens
  misc_RNA (1)...(19): siRNA sense strand
gacaguaaggugaacauca

SEQ ID NO: 1760338 - RNA, 19 nt, Homo sapiens
  misc_RNA (1)...(19): siRNA sense strand
ccugaagucucuggaccua

SEQ ID NO: 1760339 - RNA, 19 nt, Homo sapiens
  misc_RNA (1)...(19): siRNA sense strand
cuacacaccuaccaugacu

SEQ ID NO: 1760340 - RNA, 19 nt, Homo sapiens
  misc_RNA (1)...(19): siRNA sense strand
aagaagaaacuggaggaua

SEQ ID NO: 1760341 - RNA, 19 nt, Homo sapiens
  misc_RNA (1)...(19): siRNA sense strand
ucaguuuacaggagacaua

SEQ ID NO: 1760342 - RNA, 19 nt, Homo sapiens
  misc_RNA (1)...(19): siRNA sense strand
ccaaagcagaugccauuuc

SEQ ID NO: 1760343 - RNA, 19 nt, Homo sapiens
  misc_RNA (1)...(19): siRNA sense strand
caaagaggacagcuacaag

SEQ ID NO: 1760344 - RNA, 19 nt, Homo sapiens
  misc_RNA (1)...(19): siRNA sense strand
gggcaaguccacccucaug

SEQ ID NO: 1760345 - RNA, 19 nt, Homo sapiens
  misc_RNA (1)...(19): siRNA sense strand
gagcuaaagauccgaagag

SEQ ID NO: 1760346 - RNA, 19 nt, Homo sapiens
  misc_RNA (1)...(19): siRNA sense strand
gaugaugaagugaaugcuu

SEQ ID NO: 1760347 - RNA, 19 nt, Homo sapiens
  misc_RNA (1)...(19): siRNA sense strand
guuuacaggagacauauga

SEQ ID NO: 1760348 - RNA, 19 nt, Homo sapiens
  misc_RNA (1)...(19): siRNA sense strand
ccacugcgacuuugugaag

SEQ ID NO: 1760349 - RNA, 19 nt, Homo sapiens
  misc_RNA (1)...(19): siRNA sense strand
gacagcaaacccuucaguu

SEQ ID NO: 1760350 - RNA, 19 nt, Homo sapiens
  misc_RNA (1)...(19): siRNA sense strand
gagagacaaagagaagaaa

SEQ ID NO: 1760351 - RNA, 19 nt, Homo sapiens
  misc_RNA (1)...(19): siRNA sense strand
gagcugcacgagaaguuug

SEQ ID NO: 1760352 - RNA, 19 nt, Homo sapiens
  misc_RNA (1)...(19): siRNA sense strand
caaagaggcagagaaagag

SEQ ID NO: 1760353 - RNA, 19 nt, Homo sapiens
  misc_RNA (1)...(19): siRNA sense strand
acaaagaggacagcuacaa

SEQ ID NO: 1760354 - RNA, 19 nt, Homo sapiens
  misc_RNA (1)...(19): siRNA sense strand
gaagaaacuggaggauaag

SEQ ID NO: 1760355 - RNA, 19 nt, Homo sapiens
  misc_RNA (1)...(19): siRNA sense strand
aagaggagaugagacagau

SEQ ID NO: 1760356 - RNA, 19 nt, Homo sapiens
  misc_RNA (1)...(19): siRNA sense strand
ugccaaagcagaugccauu

SEQ ID NO: 1760357 - RNA, 19 nt, Homo sapiens
  misc_RNA (1)...(19): siRNA sense strand
gucauucccugaagucucu

SEQ ID NO: 1760358 - RNA, 19 nt, Homo sapiens
  misc_RNA (1)...(19): siRNA sense strand
aggccuaccugcaggaaga

SEQ ID NO: 1760359 - RNA, 19 nt, Homo sapiens
  misc_RNA (1)...(19): siRNA sense strand
gaaagagcugcacgagaag

SEQ ID NO: 1760360 - RNA, 19 nt, Homo sapiens
  misc_RNA (1)...(19): siRNA sense strand
gaagaagaaacuggaggau

SEQ ID NO: 1760361 - RNA, 19 nt, Homo sapiens
  misc_RNA (1)...(19): siRNA sense strand
aagauaggcaacaagauga

SEQ ID NO: 1760362 - RNA, 19 nt, Homo sapiens
  misc_RNA (1)...(19): siRNA sense strand
aagaagcggagcucaaaga

SEQ ID NO: 1760363 - RNA, 19 nt, Homo sapiens
  misc_RNA (1)...(19): siRNA sense strand
gggugaagguugccgaacu

SEQ ID NO: 1760364 - RNA, 19 nt, Homo sapiens
  misc_RNA (1)...(19): siRNA sense strand
agaaagaagcggagcucaa

SEQ ID NO: 1760365 - RNA, 19 nt, Homo sapiens
  misc_RNA (1)...(19): siRNA sense strand
ggagaugagacagauguuc

SEQ ID NO: 1760366 - RNA, 19 nt, Homo sapiens
  misc_RNA (1)...(19): siRNA sense strand
auccaugucugcuuguauu

SEQ ID NO: 1760367 - RNA, 19 nt, Homo sapiens
  misc_RNA (1)...(19): siRNA sense strand
agagagacaaagagaagaa

SEQ ID NO: 1760368 - RNA, 19 nt, Homo sapiens
  misc_RNA (1)...(19): siRNA sense strand
ucaacaaagaggacagcua

SEQ ID NO: 1760369 - RNA, 19 nt, Homo sapiens
  misc_RNA (1)...(19): siRNA sense strand
ugaagagagacaaagagaa

SEQ ID NO: 1760370 - RNA, 19 nt, Homo sapiens
  misc_RNA (1)...(19): siRNA sense strand
ccacgggucauucccugaa

SEQ ID NO: 1760371 - RNA, 19 nt, Homo sapiens
  misc_RNA (1)...(19): siRNA sense strand
aagaagaggagaugagaca

SEQ ID NO: 1760372 - RNA, 19 nt, Homo sapiens
  misc_RNA (1)...(19): siRNA sense strand
acagaagaacugaagauag

SEQ ID NO: 1760373 - RNA, 19 nt, Homo sapiens
  misc_RNA (1)...(19): siRNA sense strand
uaccaugacucccgaaucc

SEQ ID NO: 1760374 - RNA, 19 nt, Homo sapiens
  misc_RNA (1)...(19): siRNA sense strand
ccuggaugaugaagugaau

SEQ ID NO: 1760375 - RNA, 19 nt, Homo sapiens
  misc_RNA (1)...(19): siRNA sense strand
cacgaucguuagcacaguu

SEQ ID NO: 1760376 - RNA, 19 nt, Homo sapiens
  misc_RNA (1)...(19): siRNA sense strand
ccagcgagucaaagagaaa

SEQ ID NO: 1760377 - RNA, 19 nt, Homo sapiens
  misc_RNA (1)...(19): siRNA sense strand
uggaggagaugggcuucaa

SEQ ID NO: 1760378 - RNA, 19 nt, Homo sapiens
  misc_RNA (1)...(19): siRNA sense strand
caucauugccaaagcagau

SEQ ID NO: 1760379 - RNA, 19 nt, Homo sapiens
  misc_RNA (1)...(19): siRNA sense strand
gaagaagcuggacaguaag

SEQ ID NO: 1760380 - RNA, 19 nt, Homo sapiens
  misc_RNA (1)...(19): siRNA sense strand
ucaguuuccuacagaugau

SEQ ID NO: 1760381 - RNA, 19 nt, Homo sapiens
  misc_RNA (1)...(19): siRNA sense strand
cagcacagaagaacugaag

SEQ ID NO: 1760382 - RNA, 19 nt, Homo sapiens
  misc_RNA (1)...(19): siRNA sense strand
gcagagaucaauggaacca

SEQ ID NO: 1760383 - RNA, 19 nt, Homo sapiens
  misc_RNA (1)...(19): siRNA sense strand
ugaagaagcuggacaguaa

SEQ ID NO: 1760384 - RNA, 19 nt, Homo sapiens
  misc_RNA (1)...(19): siRNA sense strand
agaagaaacuggaggauaa

SEQ ID NO: 1760385 - RNA, 19 nt, Homo sapiens
  misc_RNA (1)...(19): siRNA sense strand
agaaagagcugcacgagaa

SEQ ID NO: 1760386 - RNA, 19 nt, Homo sapiens
  misc_RNA (1)...(19): siRNA sense strand
gaagagugcuacacaccua

SEQ ID NO: 1760387 - RNA, 19 nt, Homo sapiens
  misc_RNA (1)...(19): siRNA sense strand
gaaagaagcggagcucaaa

SEQ ID NO: 1760388 - RNA, 19 nt, Homo sapiens
  misc_RNA (1)...(19): siRNA sense strand
gaagauaggcaacaagaug

SEQ ID NO: 1760389 - RNA, 19 nt, Homo sapiens
  misc_RNA (1)...(19): siRNA sense strand
agagugagcuaacaaaguu

SEQ ID NO: 1760390 - RNA, 19 nt, Homo sapiens
  misc_RNA (1)...(19): siRNA sense strand
gcuguaagcuggaggagau

SEQ ID NO: 1760391 - RNA, 19 nt, Homo sapiens
  misc_RNA (1)...(19): siRNA sense strand
gaagagagacaaagagaag

SEQ ID NO: 1760392 - RNA, 19 nt, Homo sapiens
  misc_RNA (1)...(19): siRNA sense strand
gcaacggaguccagaucua

SEQ ID NO: 1760393 - RNA, 19 nt, Homo sapiens
  misc_RNA (1)...(19): siRNA sense strand
cagaagaacugaagauagg

SEQ ID NO: 1760394 - RNA, 19 nt, Homo sapiens
  misc_RNA (1)...(19): siRNA sense strand
gcucaaagaggcagagaaa

SEQ ID NO: 1760395 - RNA, 19 nt, Homo sapiens
  misc_RNA (1)...(19): siRNA sense strand
gggaccagaucaacaaaga

SEQ ID NO: 1760396 - RNA, 19 nt, Homo sapiens
  misc_RNA (1)...(19): siRNA sense strand
ggagacauaugaggccaaa

SEQ ID NO: 1760397 - RNA, 19 nt, Homo sapiens
  misc_RNA (1)...(19): siRNA sense strand
cuaaagcucacgaucguua

SEQ ID NO: 1760398 - RNA, 19 nt, Homo sapiens
  misc_RNA (1)...(19): siRNA sense strand
ucaaagaggcagagaaaga

SEQ ID NO: 1760399 - RNA, 19 nt, Homo sapiens
  misc_RNA (1)...(19): siRNA sense strand
ccagcgagcuugucagcaa

SEQ ID NO: 1760400 - RNA, 19 nt, Homo sapiens
  misc_RNA (1)...(19): siRNA sense strand
cuacaagccuaucguggaa

SEQ ID NO: 1760401 - RNA, 19 nt, Homo sapiens
  misc_RNA (1)...(19): siRNA sense strand
gcagaugccauuucgaaga

SEQ ID NO: 1760402 - RNA, 19 nt, Homo sapiens
  misc_RNA (1)...(19): siRNA sense strand
caaagcagaugccauuucg

SEQ ID NO: 1760403 - RNA, 19 nt, Homo sapiens
  misc_RNA (1)...(19): siRNA sense strand
gaagaggagaugagacaga

SEQ ID NO: 1760404 - RNA, 19 nt, Homo sapiens
  misc_RNA (1)...(19): siRNA sense strand
gagagcaacgugaggcuaa

SEQ ID NO: 1760405 - RNA, 19 nt, Homo sapiens
  misc_RNA (1)...(19): siRNA sense strand
gcacagaagaacugaagau

SEQ ID NO: 1760406 - RNA, 19 nt, Homo sapiens
  misc_RNA (1)...(19): siRNA sense strand
gaauccaugucugcuugua

SEQ ID NO: 1760407 - RNA, 19 nt, Homo sapiens
  misc_RNA (1)...(19): siRNA sense strand
gcaggaagagcuaaagauc

SEQ ID NO: 1760408 - RNA, 19 nt, Homo sapiens
  misc_RNA (1)...(19): siRNA sense strand
guccagaucuaucaguuuc

SEQ ID NO: 1760409 - RNA, 19 nt, Homo sapiens
  misc_RNA (1)...(19): siRNA sense strand
guguccagcuccagucuaa

SEQ ID NO: 1760410 - RNA, 19 nt, Homo sapiens
  misc_RNA (1)...(19): siRNA sense strand
gaguccagaucuaucaguu

SEQ ID NO: 1760411 - RNA, 19 nt, Homo sapiens
  misc_RNA (1)...(19): siRNA sense strand
guccagcuccagucuaaua

SEQ ID NO: 1760412 - RNA, 19 nt, Homo sapiens
  misc_RNA (1)...(19): siRNA sense strand
gcuccagucuaauaccuau

SEQ ID NO: 1760413 - RNA, 19 nt, Homo sapiens
  misc_RNA (1)...(19): siRNA sense strand
gaaacuggaggauaagaag

SEQ ID NO: 1760414 - RNA, 19 nt, Homo sapiens
  misc_RNA (1)...(19): siRNA sense strand
caacggaguccagaucuau

SEQ ID NO: 1760415 - RNA, 19 nt, Homo sapiens
  misc_RNA (1)...(19): siRNA sense strand
auucaucgaugcacaauuc

SEQ ID NO: 1760416 - RNA, 19 nt, Homo sapiens
  misc_RNA (1)...(19): siRNA sense strand
ugaagucucuggaccuagu

SEQ ID NO: 1760417 - RNA, 19 nt, Homo sapiens
  misc_RNA (1)...(19): siRNA sense strand
acaagccuaucguggaauu

SEQ ID NO: 1760418 - RNA, 19 nt, Homo sapiens
  misc_RNA (1)...(19): siRNA sense strand
caccgacccugacagcaaa

SEQ ID NO: 1760419 - RNA, 19 nt, Homo sapiens
  misc_RNA (1)...(19): siRNA sense strand
gaacugaagauaggcaaca

SEQ ID NO: 1760420 - RNA, 19 nt, Homo sapiens
  misc_RNA (1)...(19): siRNA sense strand
gaagagugagcuaacaaag

SEQ ID NO: 1760421 - RNA, 19 nt, Homo sapiens
  misc_RNA (1)...(19): siRNA sense strand
acaguaaggugaacaucau

SEQ ID NO: 1760422 - RNA, 19 nt, Homo sapiens
  misc_RNA (1)...(19): siRNA sense strand
ggaauucaucgaugcacaa

SEQ ID NO: 1760423 - RNA, 19 nt, Homo sapiens
  misc_RNA (1)...(19): siRNA sense strand
augaugaagugaaugcuuu

SEQ ID NO: 1760424 - RNA, 19 nt, Homo sapiens
  misc_RNA (1)...(19): siRNA sense strand
gaggagaugagacagaugu

SEQ ID NO: 1760425 - RNA, 19 nt, Homo sapiens
  misc_RNA (1)...(19): siRNA sense strand
ggugaagguugccgaacug

SEQ ID NO: 1760426 - RNA, 19 nt, Homo sapiens
  misc_RNA (1)...(19): siRNA sense strand
caugucugcuuguauuuca

SEQ ID NO: 1760427 - RNA, 19 nt, Homo sapiens
  misc_RNA (1)...(19): siRNA sense strand
guucaacaccaaauucgaa

SEQ ID NO: 1760428 - RNA, 19 nt, Homo sapiens
  misc_RNA (1)...(19): siRNA sense strand
gaaguuugaccgucugaag

SEQ ID NO: 1760429 - RNA, 19 nt, Homo sapiens
  misc_RNA (1)...(19): siRNA sense strand
gaacaucauccccaucauu

SEQ ID NO: 1760430 - RNA, 19 nt, Homo sapiens
  misc_RNA (1)...(19): siRNA sense strand
ucuaucaguuuccuacaga

SEQ ID NO: 1760431 - RNA, 19 nt, Homo sapiens
  misc_RNA (1)...(19): siRNA sense strand
cgaagagugagcuaacaaa

SEQ ID NO: 1760432 - RNA, 19 nt, Homo sapiens
  misc_RNA (1)...(19): siRNA sense strand
uaauaccuaugaccuccaa

SEQ ID NO: 1760433 - RNA, 19 nt, Homo sapiens
  misc_RNA (1)...(19): siRNA sense strand
ggcuaaagcucacgaucgu

SEQ ID NO: 1760434 - RNA, 19 nt, Homo sapiens
  misc_RNA (1)...(19): siRNA sense strand
cacagaagaacugaagaua

SEQ ID NO: 1760435 - RNA, 19 nt, Homo sapiens
  misc_RNA (1)...(19): siRNA sense strand
cagaugccauuucgaagag

SEQ ID NO: 1760436 - RNA, 19 nt, Homo sapiens
  misc_RNA (1)...(19): siRNA sense strand
aagcagaugccauuucgaa

SEQ ID NO: 1760437 - RNA, 19 nt, Homo sapiens
  misc_RNA (1)...(19): siRNA sense strand
gacaguaaggugaacauca

SEQ ID NO: 1760438 - RNA, 19 nt, Homo sapiens
  misc_RNA (1)...(19): siRNA sense strand
ccugaagucucuggaccua

SEQ ID NO: 1760439 - RNA, 19 nt, Homo sapiens
  misc_RNA (1)...(19): siRNA sense strand
cuacacaccuaccaugacu

SEQ ID NO: 1760440 - RNA, 19 nt, Homo sapiens
  misc_RNA (1)...(19): siRNA sense strand
aagaagaaacuggaggaua

SEQ ID NO: 1760441 - RNA, 19 nt, Homo sapiens
  misc_RNA (1)...(19): siRNA sense strand
ucaguuuacaggagacaua

SEQ ID NO: 1760442 - RNA, 19 nt, Homo sapiens
  misc_RNA (1)...(19): siRNA sense strand
ccaaagcagaugccauuuc

SEQ ID NO: 1760443 - RNA, 19 nt, Homo sapiens
  misc_RNA (1)...(19): siRNA sense strand
caaagaggacagcuacaag

SEQ ID NO: 1760444 - RNA, 19 nt, Homo sapiens
  misc_RNA (1)...(19): siRNA sense strand
gggcaaguccacccucaug

SEQ ID NO: 1760445 - RNA, 19 nt, Homo sapiens
  misc_RNA (1)...(19): siRNA sense strand
gagcuaaagauccgaagag

SEQ ID NO: 1760446 - RNA, 19 nt, Homo sapiens
  misc_RNA (1)...(19): siRNA sense strand
gaugaugaagugaaugcuu

SEQ ID NO: 1760447 - RNA, 19 nt, Homo sapiens
  misc_RNA (1)...(19): siRNA sense strand
guuuacaggagacauauga

SEQ ID NO: 1760448 - RNA, 19 nt, Homo sapiens
  misc_RNA (1)...(19): siRNA sense strand
ccacugcgacuuugugaag

SEQ ID NO: 1760449 - RNA, 19 nt, Homo sapiens
  misc_RNA (1)...(19): siRNA sense strand
gacagcaaacccuucaguu

SEQ ID NO: 1760450 - RNA, 19 nt, Homo sapiens
  misc_RNA (1)...(19): siRNA sense strand
gagagacaaagagaagaaa

SEQ ID NO: 1760451 - RNA, 19 nt, Homo sapiens
  misc_RNA (1)...(19): siRNA sense strand
gagcugcacgagaaguuug

SEQ ID NO: 1760452 - RNA, 19 nt, Homo sapiens
  misc_RNA (1)...(19): siRNA sense strand
caaagaggcagagaaagag

SEQ ID NO: 1760453 - RNA, 19 nt, Homo sapiens
  misc_RNA (1)...(19): siRNA sense strand
acaaagaggacagcuacaa

SEQ ID NO: 1760454 - RNA, 19 nt, Homo sapiens
  misc_RNA (1)...(19): siRNA sense strand
gaagaaacuggaggauaag

SEQ ID NO: 1760455 - RNA, 19 nt, Homo sapiens
  misc_RNA (1)...(19): siRNA sense strand
aagaggagaugagacagau

SEQ ID NO: 1760456 - RNA, 19 nt, Homo sapiens
  misc_RNA (1)...(19): siRNA sense strand
ugccaaagcagaugccauu

SEQ ID NO: 1760457 - RNA, 19 nt, Homo sapiens
  misc_RNA (1)...(19): siRNA sense strand
gucauucccugaagucucu

SEQ ID NO: 1760458 - RNA, 19 nt, Homo sapiens
  misc_RNA (1)...(19): siRNA sense strand
aggccuaccugcaggaaga

SEQ ID NO: 1760459 - RNA, 19 nt, Homo sapiens
  misc_RNA (1)...(19): siRNA sense strand
gaaagagcugcacgagaag

SEQ ID NO: 1760460 - RNA, 19 nt, Homo sapiens
  misc_RNA (1)...(19): siRNA sense strand
gaagaagaaacuggaggau

SEQ ID NO: 1760461 - RNA, 19 nt, Homo sapiens
  misc_RNA (1)...(19): siRNA sense strand
aagauaggcaacaagauga

SEQ ID NO: 1760462 - RNA, 19 nt, Homo sapiens
  misc_RNA (1)...(19): siRNA sense strand
aagaagcggagcucaaaga

SEQ ID NO: 1760463 - RNA, 19 nt, Homo sapiens
  misc_RNA (1)...(19): siRNA sense strand
gggugaagguugccgaacu

SEQ ID NO: 1760464 - RNA, 19 nt, Homo sapiens
  misc_RNA (1)...(19): siRNA sense strand
agaaagaagcggagcucaa

SEQ ID NO: 1760465 - RNA, 19 nt, Homo sapiens
  misc_RNA (1)...(19): siRNA sense strand
ggagaugagacagauguuc

SEQ ID NO: 1760466 - RNA, 19 nt, Homo sapiens
  misc_RNA (1)...(19): siRNA sense strand
auccaugucugcuuguauu

SEQ ID NO: 1760467 - RNA, 19 nt, Homo sapiens
  misc_RNA (1)...(19): siRNA sense strand
agagagacaaagagaagaa

SEQ ID NO: 1760468 - RNA, 19 nt, Homo sapiens
  misc_RNA (1)...(19): siRNA sense strand
ucaacaaagaggacagcua

SEQ ID NO: 1760469 - RNA, 19 nt, Homo sapiens
  misc_RNA (1)...(19): siRNA sense strand
ugaagagagacaaagagaa

SEQ ID NO: 1760470 - RNA, 19 nt, Homo sapiens
  misc_RNA (1)...(19): siRNA sense strand
ccacgggucauucccugaa

SEQ ID NO: 1760471 - RNA, 19 nt, Homo sapiens
  misc_RNA (1)...(19): siRNA sense strand
aagaagaggagaugagaca

SEQ ID NO: 1760472 - RNA, 19 nt, Homo sapiens
  misc_RNA (1)...(19): siRNA sense strand
acagaagaacugaagauag

SEQ ID NO: 1760473 - RNA, 19 nt, Homo sapiens
  misc_RNA (1)...(19): siRNA sense strand
uaccaugacucccgaaucc

SEQ ID NO: 1760474 - RNA, 19 nt, Homo sapiens
  misc_RNA (1)...(19): siRNA sense strand
ccuggaugaugaagugaau

SEQ ID NO: 1760475 - RNA, 19 nt, Homo sapiens
  misc_RNA (1)...(19): siRNA sense strand
cacgaucguuagcacaguu

SEQ ID NO: 1760476 - RNA, 19 nt, Homo sapiens
  misc_RNA (1)...(19): siRNA sense strand
ccagcgagucaaagagaaa

SEQ ID NO: 1760477 - RNA, 19 nt, Homo sapiens
  misc_RNA (1)...(19): siRNA sense strand
uggaggagaugggcuucaa

SEQ ID NO: 1760478 - RNA, 19 nt, Homo sapiens
  misc_RNA (1)...(19): siRNA sense strand
caucauugccaaagcagau

SEQ ID NO: 1760479 - RNA, 19 nt, Homo sapiens
  misc_RNA (1)...(19): siRNA sense strand
gaagaagcuggacaguaag

SEQ ID NO: 1760480 - RNA, 19 nt, Homo sapiens
  misc_RNA (1)...(19): siRNA sense strand
ucaguuuccuacagaugau

SEQ ID NO: 1760481 - RNA, 19 nt, Homo sapiens
  misc_RNA (1)...(19): siRNA sense strand
cagcacagaagaacugaag

SEQ ID NO: 1760482 - RNA, 19 nt, Homo sapiens
  misc_RNA (1)...(19): siRNA sense strand
gcagagaucaauggaacca

SEQ ID NO: 1760483 - RNA, 19 nt, Homo sapiens
  misc_RNA (1)...(19): siRNA sense strand
ugaagaagcuggacaguaa

SEQ ID NO: 1760484 - RNA, 19 nt, Homo sapiens
  misc_RNA (1)...(19): siRNA sense strand
agaagaaacuggaggauaa

SEQ ID NO: 1760485 - RNA, 19 nt, Homo sapiens
  misc_RNA (1)...(19): siRNA sense strand
agaaagagcugcacgagaa

SEQ ID NO: 1760486 - RNA, 19 nt, Homo sapiens
  misc_RNA (1)...(19): siRNA sense strand
gaagagugcuacacaccua

SEQ ID NO: 1760487 - RNA, 19 nt, Homo sapiens
  misc_RNA (1)...(19): siRNA sense strand
gaaagaagcggagcucaaa

SEQ ID NO: 1760488 - RNA, 19 nt, Homo sapiens
  misc_RNA (1)...(19): siRNA sense strand
gaagauaggcaacaagaug

SEQ ID NO: 1760489 - RNA, 19 nt, Homo sapiens
  misc_RNA (1)...(19): siRNA sense strand
agagugagcuaacaaaguu

SEQ ID NO: 1760490 - RNA, 19 nt, Homo sapiens
  misc_RNA (1)...(19): siRNA sense strand
gcuguaagcuggaggagau

SEQ ID NO: 1760491 - RNA, 19 nt, Homo sapiens
  misc_RNA (1)...(19): siRNA sense strand
gaagagagacaaagagaag

SEQ ID NO: 1760492 - RNA, 19 nt, Homo sapiens
  misc_RNA (1)...(19): siRNA sense strand
gcaacggaguccagaucua

SEQ ID NO: 1760493 - RNA, 19 nt, Homo sapiens
  misc_RNA (1)...(19): siRNA sense strand
cagaagaacugaagauagg

SEQ ID NO: 1760494 - RNA, 19 nt, Homo sapiens
  misc_RNA (1)...(19): siRNA sense strand
gcucaaagaggcagagaaa

SEQ ID NO: 1760495 - RNA, 19 nt, Homo sapiens
  misc_RNA (1)...(19): siRNA sense strand
gggaccagaucaacaaaga

SEQ ID NO: 1760496 - RNA, 19 nt, Homo sapiens
  misc_RNA (1)...(19): siRNA sense strand
ggagacauaugaggccaaa

SEQ ID NO: 1760497 - RNA, 19 nt, Homo sapiens
  misc_RNA (1)...(19): siRNA sense strand
cuaaagcucacgaucguua

SEQ ID NO: 1760498 - RNA, 19 nt, Homo sapiens
  misc_RNA (1)...(19): siRNA sense strand
ucaaagaggcagagaaaga

SEQ ID NO: 1760499 - RNA, 19 nt, Homo sapiens
  misc_RNA (1)...(19): siRNA sense strand
ccagcgagcuugucagcaa

SEQ ID NO: 1760500 - RNA, 19 nt, Homo sapiens
  misc_RNA (1)...(19): siRNA sense strand
cuacaagccuaucguggaa

SEQ ID NO: 1760501 - RNA, 19 nt, Homo sapiens
  misc_RNA (1)...(19): siRNA sense strand
gcagaugccauuucgaaga

SEQ ID NO: 1760502 - RNA, 19 nt, Homo sapiens
  misc_RNA (1)...(19): siRNA sense strand
caaagcagaugccauuucg

SEQ ID NO: 1760503 - RNA, 19 nt, Homo sapiens
  misc_RNA (1)...(19): siRNA sense strand
gaagaggagaugagacaga

SEQ ID NO: 1760504 - RNA, 19 nt, Homo sapiens
  misc_RNA (1)...(19): siRNA sense strand
gagagcaacgugaggcuaa

SEQ ID NO: 1760505 - RNA, 19 nt, Homo sapiens
  misc_RNA (1)...(19): siRNA sense strand
gcacagaagaacugaagau

SEQ ID NO: 1760506 - RNA, 19 nt, Homo sapiens
  misc_RNA (1)...(19): siRNA sense strand
gaauccaugucugcuugua

SEQ ID NO: 1760507 - RNA, 19 nt, Homo sapiens
  misc_RNA (1)...(19): siRNA sense strand
gcaggaagagcuaaagauc

SEQ ID NO: 1760508 - RNA, 19 nt, Homo sapiens
  misc_RNA (1)...(19): siRNA sense strand
guccagaucuaucaguuuc

SEQ ID NO: 1760509 - RNA, 19 nt, Homo sapiens
  misc_RNA (1)...(19): siRNA sense strand
guguccagcuccagucuaa

SEQ ID NO: 1760510 - RNA, 19 nt, Homo sapiens
  misc_RNA (1)...(19): siRNA sense strand
gaguccagaucuaucaguu

SEQ ID NO: 1760511 - RNA, 19 nt, Homo sapiens
  misc_RNA (1)...(19): siRNA sense strand
guccagcuccagucuaaua

SEQ ID NO: 1760512 - RNA, 19 nt, Homo sapiens
  misc_RNA (1)...(19): siRNA sense strand
gcuccagucuaauaccuau

SEQ ID NO: 1760513 - RNA, 19 nt, Homo sapiens
  misc_RNA (1)...(19): siRNA sense strand
gaaacuggaggauaagaag

SEQ ID NO: 1760514 - RNA, 19 nt, Homo sapiens
  misc_RNA (1)...(19): siRNA sense strand
caacggaguccagaucuau

SEQ ID NO: 1760515 - RNA, 19 nt, Homo sapiens
  misc_RNA (1)...(19): siRNA sense strand
auucaucgaugcacaauuc

SEQ ID NO: 1760516 - RNA, 19 nt, Homo sapiens
  misc_RNA (1)...(19): siRNA sense strand
ugaagucucuggaccuagu

SEQ ID NO: 1760517 - RNA, 19 nt, Homo sapiens
  misc_RNA (1)...(19): siRNA sense strand
acaagccuaucguggaauu

SEQ ID NO: 1760518 - RNA, 19 nt, Homo sapiens
  misc_RNA (1)...(19): siRNA sense strand
caccgacccugacagcaaa

SEQ ID NO: 1760519 - RNA, 19 nt, Homo sapiens
  misc_RNA (1)...(19): siRNA sense strand
gaacugaagauaggcaaca

SEQ ID NO: 1760520 - RNA, 19 nt, Homo sapiens
  misc_RNA (1)...(19): siRNA sense strand
gaagagugagcuaacaaag

SEQ ID NO: 1760521 - RNA, 19 nt, Homo sapiens
  misc_RNA (1)...(19): siRNA sense strand
acaguaaggugaacaucau

SEQ ID NO: 1760522 - RNA, 19 nt, Homo sapiens
  misc_RNA (1)...(19): siRNA sense strand
ggaauucaucgaugcacaa

SEQ ID NO: 1760523 - RNA, 19 nt, Homo sapiens
  misc_RNA (1)...(19): siRNA sense strand
augaugaagugaaugcuuu

SEQ ID NO: 1760524 - RNA, 19 nt, Homo sapiens
  misc_RNA (1)...(19): siRNA sense strand
gaggagaugagacagaugu

SEQ ID NO: 1760525 - RNA, 19 nt, Homo sapiens
  misc_RNA (1)...(19): siRNA sense strand
ggugaagguugccgaacug

SEQ ID NO: 1760526 - RNA, 19 nt, Homo sapiens
  misc_RNA (1)...(19): siRNA sense strand
caugucugcuuguauuuca

SEQ ID NO: 1760527 - RNA, 19 nt, Homo sapiens
  misc_RNA (1)...(19): siRNA sense strand
guucaacaccaaauucgaa

SEQ ID NO: 1760528 - RNA, 19 nt, Homo sapiens
  misc_RNA (1)...(19): siRNA sense strand
gaaguuugaccgucugaag

SEQ ID NO: 1760529 - RNA, 19 nt, Homo sapiens
  misc_RNA (1)...(19): siRNA sense strand
gaacaucauccccaucauu

SEQ ID NO: 1760530 - RNA, 19 nt, Homo sapiens
  misc_RNA (1)...(19): siRNA sense strand
ucuaucaguuuccuacaga

SEQ ID NO: 1760531 - RNA, 19 nt, Homo sapiens
  misc_RNA (1)...(19): siRNA sense strand
cgaagagugagcuaacaaa

SEQ ID NO: 1760532 - RNA, 19 nt, Homo sapiens
  misc_RNA (1)...(19): siRNA sense strand
uaauaccuaugaccuccaa

SEQ ID NO: 1760533 - RNA, 19 nt, Homo sapiens
  misc_RNA (1)...(19): siRNA sense strand
ggcuaaagcucacgaucgu

SEQ ID NO: 1760534 - RNA, 19 nt, Homo sapiens
  misc_RNA (1)...(19): siRNA sense strand
cacagaagaacugaagaua

SEQ ID NO: 1760535 - RNA, 19 nt, Homo sapiens
  misc_RNA (1)...(19): siRNA sense strand
cagaugccauuucgaagag

SEQ ID NO: 1760536 - RNA, 19 nt, Homo sapiens
  misc_RNA (1)...(19): siRNA sense strand
aagcagaugccauuucgaa

SEQ ID NO: 1760537 - RNA, 19 nt, Homo sapiens
  misc_RNA (1)...(19): siRNA sense strand
gacaguaaggugaacauca

SEQ ID NO: 1760538 - RNA, 19 nt, Homo sapiens
  misc_RNA (1)...(19): siRNA sense strand
ccugaagucucuggaccua

SEQ ID NO: 1760539 - RNA, 19 nt, Homo sapiens
  misc_RNA (1)...(19): siRNA sense strand
cuacacaccuaccaugacu

SEQ ID NO: 1760540 - RNA, 19 nt, Homo sapiens
  misc_RNA (1)...(19): siRNA sense strand
aagaagaaacuggaggaua

SEQ ID NO: 1760541 - RNA, 19 nt, Homo sapiens
  misc_RNA (1)...(19): siRNA sense strand
ucaguuuacaggagacaua

SEQ ID NO: 1760542 - RNA, 19 nt, Homo sapiens
  misc_RNA (1)...(19): siRNA sense strand
ccaaagcagaugccauuuc

SEQ ID NO: 1760543 - RNA, 19 nt, Homo sapiens
  misc_RNA (1)...(19): siRNA sense strand
caaagaggacagcuacaag

SEQ ID NO: 1760544 - RNA, 19 nt, Homo sapiens
  misc_RNA (1)...(19): siRNA sense strand
gggcaaguccacccucaug

SEQ ID NO: 1760545 - RNA, 19 nt, Homo sapiens
  misc_RNA (1)...(19): siRNA sense strand
gagcuaaagauccgaagag

SEQ ID NO: 1760546 - RNA, 19 nt, Homo sapiens
  misc_RNA (1)...(19): siRNA sense strand
gaugaugaagugaaugcuu

SEQ ID NO: 1760547 - RNA, 19 nt, Homo sapiens
  misc_RNA (1)...(19): siRNA sense strand
guuuacaggagacauauga

SEQ ID NO: 1760548 - RNA, 19 nt, Homo sapiens
  misc_RNA (1)...(19): siRNA sense strand
ccacugcgacuuugugaag

SEQ ID NO: 1760549 - RNA, 19 nt, Homo sapiens
  misc_RNA (1)...(19): siRNA sense strand
gacagcaaacccuucaguu

SEQ ID NO: 1760550 - RNA, 19 nt, Homo sapiens
  misc_RNA (1)...(19): siRNA sense strand
gagagacaaagagaagaaa

SEQ ID NO: 1760551 - RNA, 19 nt, Homo sapiens
  misc_RNA (1)...(19): siRNA sense strand
gagcugcacgagaaguuug

SEQ ID NO: 1760552 - RNA, 19 nt, Homo sapiens
  misc_RNA (1)...(19): siRNA sense strand
caaagaggcagagaaagag

SEQ ID NO: 1760553 - RNA, 19 nt, Homo sapiens
  misc_RNA (1)...(19): siRNA sense strand
acaaagaggacagcuacaa

SEQ ID NO: 1760554 - RNA, 19 nt, Homo sapiens
  misc_RNA (1)...(19): siRNA sense strand
gaagaaacuggaggauaag

SEQ ID NO: 1760555 - RNA, 19 nt, Homo sapiens
  misc_RNA (1)...(19): siRNA sense strand
aagaggagaugagacagau

SEQ ID NO: 1760556 - RNA, 19 nt, Homo sapiens
  misc_RNA (1)...(19): siRNA sense strand
ugccaaagcagaugccauu

SEQ ID NO: 1760557 - RNA, 19 nt, Homo sapiens
  misc_RNA (1)...(19): siRNA sense strand
gucauucccugaagucucu

SEQ ID NO: 1760558 - RNA, 19 nt, Homo sapiens
  misc_RNA (1)...(19): siRNA sense strand
aggccuaccugcaggaaga

SEQ ID NO: 1760559 - RNA, 19 nt, Homo sapiens
  misc_RNA (1)...(19): siRNA sense strand
gaaagagcugcacgagaag

SEQ ID NO: 1760560 - RNA, 19 nt, Homo sapiens
  misc_RNA (1)...(19): siRNA sense strand
gaagaagaaacuggaggau

SEQ ID NO: 1760561 - RNA, 19 nt, Homo sapiens
  misc_RNA (1)...(19): siRNA sense strand
aagauaggcaacaagauga

SEQ ID NO: 1760562 - RNA, 19 nt, Homo sapiens
  misc_RNA (1)...(19): siRNA sense strand
aagaagcggagcucaaaga

SEQ ID NO: 1760563 - RNA, 19 nt, Homo sapiens
  misc_RNA (1)...(19): siRNA sense strand
gggugaagguugccgaacu

SEQ ID NO: 1760564 - RNA, 19 nt, Homo sapiens
  misc_RNA (1)...(19): siRNA sense strand
agaaagaagcggagcucaa

SEQ ID NO: 1760565 - RNA, 19 nt, Homo sapiens
  misc_RNA (1)...(19): siRNA sense strand
ggagaugagacagauguuc

SEQ ID NO: 1760566 - RNA, 19 nt, Homo sapiens
  misc_RNA (1)...(19): siRNA sense strand
auccaugucugcuuguauu

SEQ ID NO: 1760567 - RNA, 19 nt, Homo sapiens
  misc_RNA (1)...(19): siRNA sense strand
agagagacaaagagaagaa

SEQ ID NO: 1760568 - RNA, 19 nt, Homo sapiens
  misc_RNA (1)...(19): siRNA sense strand
ucaacaaagaggacagcua

SEQ ID NO: 1760569 - RNA, 19 nt, Homo sapiens
  misc_RNA (1)...(19): siRNA sense strand
ugaagagagacaaagagaa

SEQ ID NO: 1760570 - RNA, 19 nt, Homo sapiens
  misc_RNA (1)...(19): siRNA sense strand
ccacgggucauucccugaa

SEQ ID NO: 1760571 - RNA, 19 nt, Homo sapiens
  misc_RNA (1)...(19): siRNA sense strand
aagaagaggagaugagaca

SEQ ID NO: 1760572 - RNA, 19 nt, Homo sapiens
  misc_RNA (1)...(19): siRNA sense strand
acagaagaacugaagauag

SEQ ID NO: 1760573 - RNA, 19 nt, Homo sapiens
  misc_RNA (1)...(19): siRNA sense strand
uaccaugacucccgaaucc

SEQ ID NO: 1760574 - RNA, 19 nt, Homo sapiens
  misc_RNA (1)...(19): siRNA sense strand
ccuggaugaugaagugaau

SEQ ID NO: 1760575 - RNA, 19 nt, Homo sapiens
  misc_RNA (1)...(19): siRNA sense strand
cacgaucguuagcacaguu

SEQ ID NO: 1760576 - RNA, 19 nt, Homo sapiens
  misc_RNA (1)...(19): siRNA sense strand
ccagcgagucaaagagaaa

SEQ ID NO: 1760577 - RNA, 19 nt, Homo sapiens
  misc_RNA (1)...(19): siRNA sense strand
uggaggagaugggcuucaa

SEQ ID NO: 1760578 - RNA, 19 nt, Homo sapiens
  misc_RNA (1)...(19): siRNA sense strand
caucauugccaaagcagau

SEQ ID NO: 1760579 - RNA, 19 nt, Homo sapiens
  misc_RNA (1)...(19): siRNA sense strand
gaagaagcuggacaguaag

SEQ ID NO: 1760580 - RNA, 19 nt, Homo sapiens
  misc_RNA (1)...(19): siRNA sense strand
ucaguuuccuacagaugau

SEQ ID NO: 1760581 - RNA, 19 nt, Homo sapiens
  misc_RNA (1)...(19): siRNA sense strand
cagcacagaagaacugaag

SEQ ID NO: 1760582 - RNA, 19 nt, Homo sapiens
  misc_RNA (1)...(19): siRNA sense strand
gcagagaucaauggaacca

SEQ ID NO: 1760583 - RNA, 19 nt, Homo sapiens
  misc_RNA (1)...(19): siRNA sense strand
ugaagaagcuggacaguaa

SEQ ID NO: 1760584 - RNA, 19 nt, Homo sapiens
  misc_RNA (1)...(19): siRNA sense strand
agaagaaacuggaggauaa

SEQ ID NO: 1760585 - RNA, 19 nt, Homo sapiens
  misc_RNA (1)...(19): siRNA sense strand
agaaagagcugcacgagaa

SEQ ID NO: 1760586 - RNA, 19 nt, Homo sapiens
  misc_RNA (1)...(19): siRNA sense strand
gaagagugcuacacaccua

SEQ ID NO: 1760587 - RNA, 19 nt, Homo sapiens
  misc_RNA (1)...(19): siRNA sense strand
gaaagaagcggagcucaaa

SEQ ID NO: 1760588 - RNA, 19 nt, Homo sapiens
  misc_RNA (1)...(19): siRNA sense strand
gaagauaggcaacaagaug

SEQ ID NO: 1760589 - RNA, 19 nt, Homo sapiens
  misc_RNA (1)...(19): siRNA sense strand
agagugagcuaacaaaguu

SEQ ID NO: 1760590 - RNA, 19 nt, Homo sapiens
  misc_RNA (1)...(19): siRNA sense strand
gcuguaagcuggaggagau

SEQ ID NO: 1760591 - RNA, 19 nt, Homo sapiens
  misc_RNA (1)...(19): siRNA sense strand
gaagagagacaaagagaag

SEQ ID NO: 1760592 - RNA, 19 nt, Homo sapiens
  misc_RNA (1)...(19): siRNA sense strand
gcaacggaguccagaucua

SEQ ID NO: 1760593 - RNA, 19 nt, Homo sapiens
  misc_RNA (1)...(19): siRNA sense strand
cagaagaacugaagauagg

SEQ ID NO: 1760594 - RNA, 19 nt, Homo sapiens
  misc_RNA (1)...(19): siRNA sense strand
gcucaaagaggcagagaaa

SEQ ID NO: 1760595 - RNA, 19 nt, Homo sapiens
  misc_RNA (1)...(19): siRNA sense strand
gggaccagaucaacaaaga

SEQ ID NO: 1760596 - RNA, 19 nt, Homo sapiens
  misc_RNA (1)...(19): siRNA sense strand
ggagacauaugaggccaaa

SEQ ID NO: 1760597 - RNA, 19 nt, Homo sapiens
  misc_RNA (1)...(19): siRNA sense strand
cuaaagcucacgaucguua

SEQ ID NO: 1760598 - RNA, 19 nt, Homo sapiens
  misc_RNA (1)...(19): siRNA sense strand
ucaaagaggcagagaaaga

SEQ ID NO: 1760599 - RNA, 19 nt, Homo sapiens
  misc_RNA (1)...(19): siRNA sense strand
ccagcgagcuugucagcaa

SEQ ID NO: 1760600 - RNA, 19 nt, Homo sapiens
  misc_RNA (1)...(19): siRNA sense strand
cuacaagccuaucguggaa

SEQ ID NO: 1760601 - RNA, 19 nt, Homo sapiens
  misc_RNA (1)...(19): siRNA sense strand
gcagaugccauuucgaaga

SEQ ID NO: 1760602 - RNA, 19 nt, Homo sapiens
  misc_RNA (1)...(19): siRNA sense strand
caaagcagaugccauuucg

SEQ ID NO: 1760603 - RNA, 19 nt, Homo sapiens
  misc_RNA (1)...(19): siRNA sense strand
gaagaggagaugagacaga

SEQ ID NO: 1760604 - RNA, 19 nt, Homo sapiens
  misc_RNA (1)...(19): siRNA sense strand
gagagcaacgugaggcuaa

SEQ ID NO: 1760605 - RNA, 19 nt, Homo sapiens
  misc_RNA (1)...(19): siRNA sense strand
gcacagaagaacugaagau

SEQ ID NO: 1760606 - RNA, 19 nt, Homo sapiens
  misc_RNA (1)...(19): siRNA sense strand
gaauccaugucugcuugua

SEQ ID NO: 1760607 - RNA, 19 nt, Homo sapiens
  misc_RNA (1)...(19): siRNA sense strand
gcaggaagagcuaaagauc

SEQ ID NO: 1760608 - RNA, 19 nt, Homo sapiens
  misc_RNA (1)...(19): siRNA sense strand
guccagaucuaucaguuuc

SEQ ID NO: 1760609 - RNA, 19 nt, Homo sapiens
  misc_RNA (1)...(19): siRNA sense strand
guguccagcuccagucuaa

SEQ ID NO: 1760610 - RNA, 19 nt, Homo sapiens
  misc_RNA (1)...(19): siRNA sense strand
gaguccagaucuaucaguu

SEQ ID NO: 1760611 - RNA, 19 nt, Homo sapiens
  misc_RNA (1)...(19): siRNA sense strand
guccagcuccagucuaaua

SEQ ID NO: 1760612 - RNA, 19 nt, Homo sapiens
  misc_RNA (1)...(19): siRNA sense strand
gcuccagucuaauaccuau

SEQ ID NO: 1760613 - RNA, 19 nt, Homo sapiens
  misc_RNA (1)...(19): siRNA sense strand
gaaacuggaggauaagaag

SEQ ID NO: 1760614 - RNA, 19 nt, Homo sapiens
  misc_RNA (1)...(19): siRNA sense strand
caacggaguccagaucuau

SEQ ID NO: 1760615 - RNA, 19 nt, Homo sapiens
  misc_RNA (1)...(19): siRNA sense strand
auucaucgaugcacaauuc

SEQ ID NO: 1760616 - RNA, 19 nt, Homo sapiens
  misc_RNA (1)...(19): siRNA sense strand
ugaagucucuggaccuagu

SEQ ID NO: 1760617 - RNA, 19 nt, Homo sapiens
  misc_RNA (1)...(19): siRNA sense strand
acaagccuaucguggaauu

SEQ ID NO: 1760618 - RNA, 19 nt, Homo sapiens
  misc_RNA (1)...(19): siRNA sense strand
caccgacccugacagcaaa

SEQ ID NO: 1760619 - RNA, 19 nt, Homo sapiens
  misc_RNA (1)...(19): siRNA sense strand
gaacugaagauaggcaaca

SEQ ID NO: 1760620 - RNA, 19 nt, Homo sapiens
  misc_RNA (1)...(19): siRNA sense strand
gaagagugagcuaacaaag

SEQ ID NO: 1760621 - RNA, 19 nt, Homo sapiens
  misc_RNA (1)...(19): siRNA sense strand
acaguaaggugaacaucau

SEQ ID NO: 1760622 - RNA, 19 nt, Homo sapiens
  misc_RNA (1)...(19): siRNA sense strand
ggaauucaucgaugcacaa

SEQ ID NO: 1760623 - RNA, 19 nt, Homo sapiens
  misc_RNA (1)...(19): siRNA sense strand
augaugaagugaaugcuuu

SEQ ID NO: 1760624 - RNA, 19 nt, Homo sapiens
  misc_RNA (1)...(19): siRNA sense strand
gaggagaugagacagaugu

SEQ ID NO: 1760625 - RNA, 19 nt, Homo sapiens
  misc_RNA (1)...(19): siRNA sense strand
ggugaagguugccgaacug

SEQ ID NO: 1760626 - RNA, 19 nt, Homo sapiens
  misc_RNA (1)...(19): siRNA sense strand
caugucugcuuguauuuca

SEQ ID NO: 1760627 - RNA, 19 nt, Homo sapiens
  misc_RNA (1)...(19): siRNA sense strand
guucaacaccaaauucgaa

SEQ ID NO: 1760628 - RNA, 19 nt, Homo sapiens
  misc_RNA (1)...(19): siRNA sense strand
gaaguuugaccgucugaag

SEQ ID NO: 1760629 - RNA, 19 nt, Homo sapiens
  misc_RNA (1)...(19): siRNA sense strand
gaacaucauccccaucauu

SEQ ID NO: 1760630 - RNA, 19 nt, Homo sapiens
  misc_RNA (1)...(19): siRNA sense strand
ucuaucaguuuccuacaga

SEQ ID NO: 1760631 - RNA, 19 nt, Homo sapiens
  misc_RNA (1)...(19): siRNA sense strand
cgaagagugagcuaacaaa

SEQ ID NO: 1760632 - RNA, 19 nt, Homo sapiens
  misc_RNA (1)...(19): siRNA sense strand
uaauaccuaugaccuccaa

SEQ ID NO: 1760633 - RNA, 19 nt, Homo sapiens
  misc_RNA (1)...(19): siRNA sense strand
ggcuaaagcucacgaucgu

SEQ ID NO: 1760634 - RNA, 19 nt, Homo sapiens
  misc_RNA (1)...(19): siRNA sense strand
cacagaagaacugaagaua

SEQ ID NO: 1760635 - RNA, 19 nt, Homo sapiens
  misc_RNA (1)...(19): siRNA sense strand
cagaugccauuucgaagag

SEQ ID NO: 1760636 - RNA, 19 nt, Homo sapiens
  misc_RNA (1)...(19): siRNA sense strand
aagcagaugccauuucgaa

SEQ ID NO: 1760637 - RNA, 19 nt, Homo sapiens
  misc_RNA (1)...(19): siRNA sense strand
gacaguaaggugaacauca

SEQ ID NO: 1760638 - RNA, 19 nt, Homo sapiens
  misc_RNA (1)...(19): siRNA sense strand
ccugaagucucuggaccua

SEQ ID NO: 1760639 - RNA, 19 nt, Homo sapiens
  misc_RNA (1)...(19): siRNA sense strand
cuacacaccuaccaugacu

SEQ ID NO: 1760640 - RNA, 19 nt, Homo sapiens
  misc_RNA (1)...(19): siRNA sense strand
aagaagaaacuggaggaua

SEQ ID NO: 1760641 - RNA, 19 nt, Homo sapiens
  misc_RNA (1)...(19): siRNA sense strand
ucaguuuacaggagacaua

SEQ ID NO: 1760642 - RNA, 19 nt, Homo sapiens
  misc_RNA (1)...(19): siRNA sense strand
ccaaagcagaugccauuuc

SEQ ID NO: 1760643 - RNA, 19 nt, Homo sapiens
  misc_RNA (1)...(19): siRNA sense strand
caaagaggacagcuacaag

SEQ ID NO: 1760644 - RNA, 19 nt, Homo sapiens
  misc_RNA (1)...(19): siRNA sense strand
gggcaaguccacccucaug

SEQ ID NO: 1760645 - RNA, 19 nt, Homo sapiens
  misc_RNA (1)...(19): siRNA sense strand
gagcuaaagauccgaagag

SEQ ID NO: 1760646 - RNA, 19 nt, Homo sapiens
  misc_RNA (1)...(19): siRNA sense strand
gaugaugaagugaaugcuu

SEQ ID NO: 1760647 - RNA, 19 nt, Homo sapiens
  misc_RNA (1)...(19): siRNA sense strand
guuuacaggagacauauga

SEQ ID NO: 1760648 - RNA, 19 nt, Homo sapiens
  misc_RNA (1)...(19): siRNA sense strand
ccacugcgacuuugugaag

SEQ ID NO: 1760649 - RNA, 19 nt, Homo sapiens
  misc_RNA (1)...(19): siRNA sense strand
gacagcaaacccuucaguu

SEQ ID NO: 1760650 - RNA, 19 nt, Homo sapiens
  misc_RNA (1)...(19): siRNA sense strand
gagagacaaagagaagaaa

SEQ ID NO: 1760651 - RNA, 19 nt, Homo sapiens
  misc_RNA (1)...(19): siRNA sense strand
gagcugcacgagaaguuug

SEQ ID NO: 1760652 - RNA, 19 nt, Homo sapiens
  misc_RNA (1)...(19): siRNA sense strand
caaagaggcagagaaagag

SEQ ID NO: 1760653 - RNA, 19 nt, Homo sapiens
  misc_RNA (1)...(19): siRNA sense strand
acaaagaggacagcuacaa

SEQ ID NO: 1760654 - RNA, 19 nt, Homo sapiens
  misc_RNA (1)...(19): siRNA sense strand
gaagaaacuggaggauaag

SEQ ID NO: 1760655 - RNA, 19 nt, Homo sapiens
  misc_RNA (1)...(19): siRNA sense strand
aagaggagaugagacagau

SEQ ID NO: 1760656 - RNA, 19 nt, Homo sapiens
  misc_RNA (1)...(19): siRNA sense strand
ugccaaagcagaugccauu

SEQ ID NO: 1760657 - RNA, 19 nt, Homo sapiens
  misc_RNA (1)...(19): siRNA sense strand
gucauucccugaagucucu

SEQ ID NO: 1760658 - RNA, 19 nt, Homo sapiens
  misc_RNA (1)...(19): siRNA sense strand
aggccuaccugcaggaaga

SEQ ID NO: 1760659 - RNA, 19 nt, Homo sapiens
  misc_RNA (1)...(19): siRNA sense strand
gaaagagcugcacgagaag

SEQ ID NO: 1760660 - RNA, 19 nt, Homo sapiens
  misc_RNA (1)...(19): siRNA sense strand
gaagaagaaacuggaggau

SEQ ID NO: 1760661 - RNA, 19 nt, Homo sapiens
  misc_RNA (1)...(19): siRNA sense strand
aagauaggcaacaagauga

SEQ ID NO: 1760662 - RNA, 19 nt, Homo sapiens
  misc_RNA (1)...(19): siRNA sense strand
aagaagcggagcucaaaga

SEQ ID NO: 1760663 - RNA, 19 nt, Homo sapiens
  misc_RNA (1)...(19): siRNA sense strand
gggugaagguugccgaacu

SEQ ID NO: 1760664 - RNA, 19 nt, Homo sapiens
  misc_RNA (1)...(19): siRNA sense strand
agaaagaagcggagcucaa

SEQ ID NO: 1760665 - RNA, 19 nt, Homo sapiens
  misc_RNA (1)...(19): siRNA sense strand
ggagaugagacagauguuc

SEQ ID NO: 1760666 - RNA, 19 nt, Homo sapiens
  misc_RNA (1)...(19): siRNA sense strand
auccaugucugcuuguauu

SEQ ID NO: 1760667 - RNA, 19 nt, Homo sapiens
  misc_RNA (1)...(19): siRNA sense strand
agagagacaaagagaagaa

SEQ ID NO: 1760668 - RNA, 19 nt, Homo sapiens
  misc_RNA (1)...(19): siRNA sense strand
ucaacaaagaggacagcua

SEQ ID NO: 1760669 - RNA, 19 nt, Homo sapiens
  misc_RNA (1)...(19): siRNA sense strand
ugaagagagacaaagagaa

SEQ ID NO: 1760670 - RNA, 19 nt, Homo sapiens
  misc_RNA (1)...(19): siRNA sense strand
ccacgggucauucccugaa

SEQ ID NO: 1760671 - RNA, 19 nt, Homo sapiens
  misc_RNA (1)...(19): siRNA sense strand
aagaagaggagaugagaca

SEQ ID NO: 1760672 - RNA, 19 nt, Homo sapiens
  misc_RNA (1)...(19): siRNA sense strand
acagaagaacugaagauag

SEQ ID NO: 1760673 - RNA, 19 nt, Homo sapiens
  misc_RNA (1)...(19): siRNA sense strand
uaccaugacucccgaaucc

SEQ ID NO: 1760674 - RNA, 19 nt, Homo sapiens
  misc_RNA (1)...(19): siRNA sense strand
ccuggaugaugaagugaau

SEQ ID NO: 1760675 - RNA, 19 nt, Homo sapiens
  misc_RNA (1)...(19): siRNA sense strand
cacgaucguuagcacaguu

SEQ ID NO: 1760676 - RNA, 19 nt, Homo sapiens
  misc_RNA (1)...(19): siRNA sense strand
ccagcgagucaaagagaaa

SEQ ID NO: 1760677 - RNA, 19 nt, Homo sapiens
  misc_RNA (1)...(19): siRNA sense strand
uggaggagaugggcuucaa

SEQ ID NO: 1760678 - RNA, 19 nt, Homo sapiens
  misc_RNA (1)...(19): siRNA sense strand
caucauugccaaagcagau

SEQ ID NO: 1760679 - RNA, 19 nt, Homo sapiens
  misc_RNA (1)...(19): siRNA sense strand
gaagaagcuggacaguaag

SEQ ID NO: 1760680 - RNA, 19 nt, Homo sapiens
  misc_RNA (1)...(19): siRNA sense strand
ucaguuuccuacagaugau

SEQ ID NO: 1760681 - RNA, 19 nt, Homo sapiens
  misc_RNA (1)...(19): siRNA sense strand
cagcacagaagaacugaag

SEQ ID NO: 1760682 - RNA, 19 nt, Homo sapiens
  misc_RNA (1)...(19): siRNA sense strand
gcagagaucaauggaacca

SEQ ID NO: 1760683 - RNA, 19 nt, Homo sapiens
  misc_RNA (1)...(19): siRNA sense strand
ugaagaagcuggacaguaa

SEQ ID NO: 1760684 - RNA, 19 nt, Homo sapiens
  misc_RNA (1)...(19): siRNA sense strand
agaagaaacuggaggauaa

SEQ ID NO: 1760685 - RNA, 19 nt, Homo sapiens
  misc_RNA (1)...(19): siRNA sense strand
agaaagagcugcacgagaa

SEQ ID NO: 1760686 - RNA, 19 nt, Homo sapiens
  misc_RNA (1)...(19): siRNA sense strand
gaagagugcuacacaccua

SEQ ID NO: 1760687 - RNA, 19 nt, Homo sapiens
  misc_RNA (1)...(19): siRNA sense strand
gaaagaagcggagcucaaa

SEQ ID NO: 1760688 - RNA, 19 nt, Homo sapiens
  misc_RNA (1)...(19): siRNA sense strand
gaagauaggcaacaagaug

SEQ ID NO: 1760689 - RNA, 19 nt, Homo sapiens
  misc_RNA (1)...(19): siRNA sense strand
agagugagcuaacaaaguu

SEQ ID NO: 1760690 - RNA, 19 nt, Homo sapiens
  misc_RNA (1)...(19): siRNA sense strand
gcuguaagcuggaggagau

SEQ ID NO: 1760691 - RNA, 19 nt, Homo sapiens
  misc_RNA (1)...(19): siRNA sense strand
gaagagagacaaagagaag

SEQ ID NO: 1760692 - RNA, 19 nt, Homo sapiens
  misc_RNA (1)...(19): siRNA sense strand
gcaacggaguccagaucua

SEQ ID NO: 1760693 - RNA, 19 nt, Homo sapiens
  misc_RNA (1)...(19): siRNA sense strand
cagaagaacugaagauagg

SEQ ID NO: 1760694 - RNA, 19 nt, Homo sapiens
  misc_RNA (1)...(19): siRNA sense strand
gcucaaagaggcagagaaa

SEQ ID NO: 1760695 - RNA, 19 nt, Homo sapiens
  misc_RNA (1)...(19): siRNA sense strand
gggaccagaucaacaaaga

SEQ ID NO: 1760696 - RNA, 19 nt, Homo sapiens
  misc_RNA (1)...(19): siRNA sense strand
ggagacauaugaggccaaa

SEQ ID NO: 1760697 - RNA, 19 nt, Homo sapiens
  misc_RNA (1)...(19): siRNA sense strand
cuaaagcucacgaucguua

SEQ ID NO: 1760698 - RNA, 19 nt, Homo sapiens
  misc_RNA (1)...(19): siRNA sense strand
ucaaagaggcagagaaaga

SEQ ID NO: 1760699 - RNA, 19 nt, Homo sapiens
  misc_RNA (1)...(19): siRNA sense strand
ccagcgagcuugucagcaa

SEQ ID NO: 1760700 - RNA, 19 nt, Homo sapiens
  misc_RNA (1)...(19): siRNA sense strand
cuacaagccuaucguggaa

SEQ ID NO: 1760701 - RNA, 19 nt, Homo sapiens
  misc_RNA (1)...(19): siRNA sense strand
gcagaugccauuucgaaga

SEQ ID NO: 1760702 - RNA, 19 nt, Homo sapiens
  misc_RNA (1)...(19): siRNA sense strand
caaagcagaugccauuucg

SEQ ID NO: 1760703 - RNA, 19 nt, Homo sapiens
  misc_RNA (1)...(19): siRNA sense strand
gaagaggagaugagacaga

SEQ ID NO: 1760704 - RNA, 19 nt, Homo sapiens
  misc_RNA (1)...(19): siRNA sense strand
gagagcaacgugaggcuaa

SEQ ID NO: 1760705 - RNA, 19 nt, Homo sapiens
  misc_RNA (1)...(19): siRNA sense strand
gcacagaagaacugaagau

SEQ ID NO: 1760706 - RNA, 19 nt, Homo sapiens
  misc_RNA (1)...(19): siRNA sense strand
gaauccaugucugcuugua

SEQ ID NO: 1760707 - RNA, 19 nt, Homo sapiens
  misc_RNA (1)...(19): siRNA sense strand
gcaggaagagcuaaagauc

SEQ ID NO: 1760708 - RNA, 19 nt, Homo sapiens
  misc_RNA (1)...(19): siRNA sense strand
guccagaucuaucaguuuc

SEQ ID NO: 1760709 - RNA, 19 nt, Homo sapiens
  misc_RNA (1)...(19): siRNA sense strand
guguccagcuccagucuaa

SEQ ID NO: 1760710 - RNA, 19 nt, Homo sapiens
  misc_RNA (1)...(19): siRNA sense strand
gaguccagaucuaucaguu

SEQ ID NO: 1760711 - RNA, 19 nt, Homo sapiens
  misc_RNA (1)...(19): siRNA sense strand
guccagcuccagucuaaua

SEQ ID NO: 1760712 - RNA, 19 nt, Homo sapiens
  misc_RNA (1)...(19): siRNA sense strand
gcuccagucuaauaccuau

SEQ ID NO: 1760713 - RNA, 19 nt, Homo sapiens
  misc_RNA (1)...(19): siRNA sense strand
gaaacuggaggauaagaag

SEQ ID NO: 1760714 - RNA, 19 nt, Homo sapiens
  misc_RNA (1)...(19): siRNA sense strand
caacggaguccagaucuau

SEQ ID NO: 1760715 - RNA, 19 nt, Homo sapiens
  misc_RNA (1)...(19): siRNA sense strand
auucaucgaugcacaauuc

SEQ ID NO: 1760716 - RNA, 19 nt, Homo sapiens
  misc_RNA (1)...(19): siRNA sense strand
ugaagucucuggaccuagu

SEQ ID NO: 1760717 - RNA, 19 nt, Homo sapiens
  misc_RNA (1)...(19): siRNA sense strand
acaagccuaucguggaauu

SEQ ID NO: 1760718 - RNA, 19 nt, Homo sapiens
  misc_RNA (1)...(19): siRNA sense strand
caccgacccugacagcaaa

SEQ ID NO: 1760719 - RNA, 19 nt, Homo sapiens
  misc_RNA (1)...(19): siRNA sense strand
gaacugaagauaggcaaca

SEQ ID NO: 1760720 - RNA, 19 nt, Homo sapiens
  misc_RNA (1)...(19): siRNA sense strand
gaagagugagcuaacaaag

SEQ ID NO: 1760721 - RNA, 19 nt, Homo sapiens
  misc_RNA (1)...(19): siRNA sense strand
acaguaaggugaacaucau

SEQ ID NO: 1760722 - RNA, 19 nt, Homo sapiens
  misc_RNA (1)...(19): siRNA sense strand
ggaauucaucgaugcacaa

SEQ ID NO: 1760723 - RNA, 19 nt, Homo sapiens
  misc_RNA (1)...(19): siRNA sense strand
augaugaagugaaugcuuu

SEQ ID NO: 1760724 - RNA, 19 nt, Homo sapiens
  misc_RNA (1)...(19): siRNA sense strand
gaggagaugagacagaugu

SEQ ID NO: 1760725 - RNA, 19 nt, Homo sapiens
  misc_RNA (1)...(19): siRNA sense strand
ggugaagguugccgaacug

SEQ ID NO: 1760726 - RNA, 19 nt, Homo sapiens
  misc_RNA (1)...(19): siRNA sense strand
caugucugcuuguauuuca

SEQ ID NO: 1760727 - RNA, 19 nt, Homo sapiens
  misc_RNA (1)...(19): siRNA sense strand
guucaacaccaaauucgaa

SEQ ID NO: 1760728 - RNA, 19 nt, Homo sapiens
  misc_RNA (1)...(19): siRNA sense strand
gaaguuugaccgucugaag

SEQ ID NO: 1760729 - RNA, 19 nt, Homo sapiens
  misc_RNA (1)...(19): siRNA sense strand
gaacaucauccccaucauu

SEQ ID NO: 1760730 - RNA, 19 nt, Homo sapiens
  misc_RNA (1)...(19): siRNA sense strand
ucuaucaguuuccuacaga

SEQ ID NO: 1760731 - RNA, 19 nt, Homo sapiens
  misc_RNA (1)...(19): siRNA sense strand
cgaagagugagcuaacaaa

SEQ ID NO: 1760732 - RNA, 19 nt, Homo sapiens
  misc_RNA (1)...(19): siRNA sense strand
uaauaccuaugaccuccaa

SEQ ID NO: 1760733 - RNA, 19 nt, Homo sapiens
  misc_RNA (1)...(19): siRNA sense strand
ggcuaaagcucacgaucgu

SEQ ID NO: 1760734 - RNA, 19 nt, Homo sapiens
  misc_RNA (1)...(19): siRNA sense strand
cacagaagaacugaagaua

SEQ ID NO: 1760735 - RNA, 19 nt, Homo sapiens
  misc_RNA (1)...(19): siRNA sense strand
cagaugccauuucgaagag

SEQ ID NO: 1760736 - RNA, 19 nt, Homo sapiens
  misc_RNA (1)...(19): siRNA sense strand
aagcagaugccauuucgaa

SEQ ID NO: 1760737 - RNA, 19 nt, Homo sapiens
  misc_RNA (1)...(19): siRNA sense strand
gacaguaaggugaacauca

SEQ ID NO: 1760738 - RNA, 19 nt, Homo sapiens
  misc_RNA (1)...(19): siRNA sense strand
ccugaagucucuggaccua

SEQ ID NO: 1760739 - RNA, 19 nt, Homo sapiens
  misc_RNA (1)...(19): siRNA sense strand
cuacacaccuaccaugacu

SEQ ID NO: 1760740 - RNA, 19 nt, Homo sapiens
  misc_RNA (1)...(19): siRNA sense strand
aagaagaaacuggaggaua

SEQ ID NO: 1760741 - RNA, 19 nt, Homo sapiens
  misc_RNA (1)...(19): siRNA sense strand
ucaguuuacaggagacaua

SEQ ID NO: 1760742 - RNA, 19 nt, Homo sapiens
  misc_RNA (1)...(19): siRNA sense strand
ccaaagcagaugccauuuc

SEQ ID NO: 1760743 - RNA, 19 nt, Homo sapiens
  misc_RNA (1)...(19): siRNA sense strand
caaagaggacagcuacaag

SEQ ID NO: 1760744 - RNA, 19 nt, Homo sapiens
  misc_RNA (1)...(19): siRNA sense strand
gggcaaguccacccucaug

SEQ ID NO: 1760745 - RNA, 19 nt, Homo sapiens
  misc_RNA (1)...(19): siRNA sense strand
gagcuaaagauccgaagag

SEQ ID NO: 1760746 - RNA, 19 nt, Homo sapiens
  misc_RNA (1)...(19): siRNA sense strand
gaugaugaagugaaugcuu

SEQ ID NO: 1760747 - RNA, 19 nt, Homo sapiens
  misc_RNA (1)...(19): siRNA sense strand
guuuacaggagacauauga

SEQ ID NO: 1760748 - RNA, 19 nt, Homo sapiens
  misc_RNA (1)...(19): siRNA sense strand
ccacugcgacuuugugaag

SEQ ID NO: 1760749 - RNA, 19 nt, Homo sapiens
  misc_RNA (1)...(19): siRNA sense strand
gacagcaaacccuucaguu

SEQ ID NO: 1760750 - RNA, 19 nt, Homo sapiens
  misc_RNA (1)...(19): siRNA sense strand
gagagacaaagagaagaaa

SEQ ID NO: 1760751 - RNA, 19 nt, Homo sapiens
  misc_RNA (1)...(19): siRNA sense strand
gagcugcacgagaaguuug

SEQ ID NO: 1760752 - RNA, 19 nt, Homo sapiens
  misc_RNA (1)...(19): siRNA sense strand
caaagaggcagagaaagag

SEQ ID NO: 1760753 - RNA, 19 nt, Homo sapiens
  misc_RNA (1)...(19): siRNA sense strand
acaaagaggacagcuacaa

SEQ ID NO: 1760754 - RNA, 19 nt, Homo sapiens
  misc_RNA (1)...(19): siRNA sense strand
gaagaaacuggaggauaag

SEQ ID NO: 1760755 - RNA, 19 nt, Homo sapiens
  misc_RNA (1)...(19): siRNA sense strand
aagaggagaugagacagau

SEQ ID NO: 1760756 - RNA, 19 nt, Homo sapiens
  misc_RNA (1)...(19): siRNA sense strand
ugccaaagcagaugccauu

SEQ ID NO: 1760757 - RNA, 19 nt, Homo sapiens
  misc_RNA (1)...(19): siRNA sense strand
gucauucccugaagucucu

SEQ ID NO: 1760758 - RNA, 19 nt, Homo sapiens
  misc_RNA (1)...(19): siRNA sense strand
aggccuaccugcaggaaga

SEQ ID NO: 1760759 - RNA, 19 nt, Homo sapiens
  misc_RNA (1)...(19): siRNA sense strand
gaaagagcugcacgagaag

SEQ ID NO: 1760760 - RNA, 19 nt, Homo sapiens
  misc_RNA (1)...(19): siRNA sense strand
gaagaagaaacuggaggau

SEQ ID NO: 1760761 - RNA, 19 nt, Homo sapiens
  misc_RNA (1)...(19): siRNA sense strand
aagauaggcaacaagauga

SEQ ID NO: 1760762 - RNA, 19 nt, Homo sapiens
  misc_RNA (1)...(19): siRNA sense strand
aagaagcggagcucaaaga

SEQ ID NO: 1760763 - RNA, 19 nt, Homo sapiens
  misc_RNA (1)...(19): siRNA sense strand
gggugaagguugccgaacu

SEQ ID NO: 1760764 - RNA, 19 nt, Homo sapiens
  misc_RNA (1)...(19): siRNA sense strand
agaaagaagcggagcucaa

SEQ ID NO: 1760765 - RNA, 19 nt, Homo sapiens
  misc_RNA (1)...(19): siRNA sense strand
ggagaugagacagauguuc

SEQ ID NO: 1760766 - RNA, 19 nt, Homo sapiens
  misc_RNA (1)...(19): siRNA sense strand
auccaugucugcuuguauu

SEQ ID NO: 1760767 - RNA, 19 nt, Homo sapiens
  misc_RNA (1)...(19): siRNA sense strand
agagagacaaagagaagaa

SEQ ID NO: 1760768 - RNA, 19 nt, Homo sapiens
  misc_RNA (1)...(19): siRNA sense strand
ucaacaaagaggacagcua

SEQ ID NO: 1760769 - RNA, 19 nt, Homo sapiens
  misc_RNA (1)...(19): siRNA sense strand
ugaagagagacaaagagaa

SEQ ID NO: 1760770 - RNA, 19 nt, Homo sapiens
  misc_RNA (1)...(19): siRNA sense strand
ccacgggucauucccugaa

SEQ ID NO: 1760771 - RNA, 19 nt, Homo sapiens
  misc_RNA (1)...(19): siRNA sense strand
aagaagaggagaugagaca

SEQ ID NO: 1760772 - RNA, 19 nt, Homo sapiens
  misc_RNA (1)...(19): siRNA sense strand
acagaagaacugaagauag

SEQ ID NO: 1760773 - RNA, 19 nt, Homo sapiens
  misc_RNA (1)...(19): siRNA sense strand
uaccaugacucccgaaucc

SEQ ID NO: 1760774 - RNA, 19 nt, Homo sapiens
  misc_RNA (1)...(19): siRNA sense strand
ccuggaugaugaagugaau

SEQ ID NO: 1760775 - RNA, 19 nt, Homo sapiens
  misc_RNA (1)...(19): siRNA sense strand
cacgaucguuagcacaguu

SEQ ID NO: 1760776 - RNA, 19 nt, Homo sapiens
  misc_RNA (1)...(19): siRNA sense strand
ccagcgagucaaagagaaa

SEQ ID NO: 1760777 - RNA, 19 nt, Homo sapiens
  misc_RNA (1)...(19): siRNA sense strand
uggaggagaugggcuucaa

SEQ ID NO: 1760778 - RNA, 19 nt, Homo sapiens
  misc_RNA (1)...(19): siRNA sense strand
caucauugccaaagcagau

SEQ ID NO: 1760779 - RNA, 19 nt, Homo sapiens
  misc_RNA (1)...(19): siRNA sense strand
gaagaagcuggacaguaag

SEQ ID NO: 1760780 - RNA, 19 nt, Homo sapiens
  misc_RNA (1)...(19): siRNA sense strand
ucaguuuccuacagaugau

SEQ ID NO: 1760781 - RNA, 19 nt, Homo sapiens
  misc_RNA (1)...(19): siRNA sense strand
cagcacagaagaacugaag

SEQ ID NO: 1760782 - RNA, 19 nt, Homo sapiens
  misc_RNA (1)...(19): siRNA sense strand
gcagagaucaauggaacca

SEQ ID NO: 1760783 - RNA, 19 nt, Homo sapiens
  misc_RNA (1)...(19): siRNA sense strand
ugaagaagcuggacaguaa

SEQ ID NO: 1760784 - RNA, 19 nt, Homo sapiens
  misc_RNA (1)...(19): siRNA sense strand
agaagaaacuggaggauaa

SEQ ID NO: 1760785 - RNA, 19 nt, Homo sapiens
  misc_RNA (1)...(19): siRNA sense strand
agaaagagcugcacgagaa

SEQ ID NO: 1760786 - RNA, 19 nt, Homo sapiens
  misc_RNA (1)...(19): siRNA sense strand
gaagagugcuacacaccua

SEQ ID NO: 1760787 - RNA, 19 nt, Homo sapiens
  misc_RNA (1)...(19): siRNA sense strand
gaaagaagcggagcucaaa

SEQ ID NO: 1760788 - RNA, 19 nt, Homo sapiens
  misc_RNA (1)...(19): siRNA sense strand
gaagauaggcaacaagaug

SEQ ID NO: 1760789 - RNA, 19 nt, Homo sapiens
  misc_RNA (1)...(19): siRNA sense strand
agagugagcuaacaaaguu

SEQ ID NO: 1760790 - RNA, 19 nt, Homo sapiens
  misc_RNA (1)...(19): siRNA sense strand
gcuguaagcuggaggagau

SEQ ID NO: 1760791 - RNA, 19 nt, Homo sapiens
  misc_RNA (1)...(19): siRNA sense strand
gaagagagacaaagagaag

SEQ ID NO: 1760792 - RNA, 19 nt, Homo sapiens
  misc_RNA (1)...(19): siRNA sense strand
gcaacggaguccagaucua

SEQ ID NO: 1760793 - RNA, 19 nt, Homo sapiens
  misc_RNA (1)...(19): siRNA sense strand
cagaagaacugaagauagg

SEQ ID NO: 1760794 - RNA, 19 nt, Homo sapiens
  misc_RNA (1)...(19): siRNA sense strand
gcucaaagaggcagagaaa

SEQ ID NO: 1760795 - RNA, 19 nt, Homo sapiens
  misc_RNA (1)...(19): siRNA sense strand
gggaccagaucaacaaaga

SEQ ID NO: 1760796 - RNA, 19 nt, Homo sapiens
  misc_RNA (1)...(19): siRNA sense strand
ggagacauaugaggccaaa

SEQ ID NO: 1760797 - RNA, 19 nt, Homo sapiens
  misc_RNA (1)...(19): siRNA sense strand
cuaaagcucacgaucguua

SEQ ID NO: 1760798 - RNA, 19 nt, Homo sapiens
  misc_RNA (1)...(19): siRNA sense strand
ucaaagaggcagagaaaga

SEQ ID NO: 1760799 - RNA, 19 nt, Homo sapiens
  misc_RNA (1)...(19): siRNA sense strand
ccagcgagcuugucagcaa

SEQ ID NO: 1760800 - RNA, 19 nt, Homo sapiens
  misc_RNA (1)...(19): siRNA sense strand
cuacaagccuaucguggaa

SEQ ID NO: 1760801 - RNA, 19 nt, Homo sapiens
  misc_RNA (1)...(19): siRNA sense strand
gcagaugccauuucgaaga

SEQ ID NO: 1760802 - RNA, 19 nt, Homo sapiens
  misc_RNA (1)...(19): siRNA sense strand
caaagcagaugccauuucg

SEQ ID NO: 1760803 - RNA, 19 nt, Homo sapiens
  misc_RNA (1)...(19): siRNA sense strand
gaagaggagaugagacaga

SEQ ID NO: 1760804 - RNA, 19 nt, Homo sapiens
  misc_RNA (1)...(19): siRNA sense strand
gagagcaacgugaggcuaa

SEQ ID NO: 1760805 - RNA, 19 nt, Homo sapiens
  misc_RNA (1)...(19): siRNA sense strand
gcacagaagaacugaagau

SEQ ID NO: 1760806 - RNA, 19 nt, Homo sapiens
  misc_RNA (1)...(19): siRNA sense strand
gaauccaugucugcuugua

SEQ ID NO: 1760807 - RNA, 19 nt, Homo sapiens
  misc_RNA (1)...(19): siRNA sense strand
gcaggaagagcuaaagauc

SEQ ID NO: 1760808 - RNA, 19 nt, Homo sapiens
  misc_RNA (1)...(19): siRNA sense strand
guccagaucuaucaguuuc

SEQ ID NO: 1760809 - RNA, 19 nt, Homo sapiens
  misc_RNA (1)...(19): siRNA sense strand
guguccagcuccagucuaa

SEQ ID NO: 1760810 - RNA, 19 nt, Homo sapiens
  misc_RNA (1)...(19): siRNA sense strand
gaguccagaucuaucaguu

SEQ ID NO: 1760811 - RNA, 19 nt, Homo sapiens
  misc_RNA (1)...(19): siRNA sense strand
guccagcuccagucuaaua

SEQ ID NO: 1760812 - RNA, 19 nt, Homo sapiens
  misc_RNA (1)...(19): siRNA sense strand
gcuccagucuaauaccuau

SEQ ID NO: 1760813 - RNA, 19 nt, Homo sapiens
  misc_RNA (1)...(19): siRNA sense strand
gaaacuggaggauaagaag

SEQ ID NO: 1760814 - RNA, 19 nt, Homo sapiens
  misc_RNA (1)...(19): siRNA sense strand
caacggaguccagaucuau

SEQ ID NO: 1760815 - RNA, 19 nt, Homo sapiens
  misc_RNA (1)...(19): siRNA sense strand
auucaucgaugcacaauuc

SEQ ID NO: 1760816 - RNA, 19 nt, Homo sapiens
  misc_RNA (1)...(19): siRNA sense strand
ugaagucucuggaccuagu

SEQ ID NO: 1760817 - RNA, 19 nt, Homo sapiens
  misc_RNA (1)...(19): siRNA sense strand
acaagccuaucguggaauu

SEQ ID NO: 1760818 - RNA, 19 nt, Homo sapiens
  misc_RNA (1)...(19): siRNA sense strand
caccgacccugacagcaaa

SEQ ID NO: 1760819 - RNA, 19 nt, Homo sapiens
  misc_RNA (1)...(19): siRNA sense strand
gaacugaagauaggcaaca

SEQ ID NO: 1760820 - RNA, 19 nt, Homo sapiens
  misc_RNA (1)...(19): siRNA sense strand
gaagagugagcuaacaaag

SEQ ID NO: 1760821 - RNA, 19 nt, Homo sapiens
  misc_RNA (1)...(19): siRNA sense strand
acaguaaggugaacaucau

SEQ ID NO: 1760822 - RNA, 19 nt, Homo sapiens
  misc_RNA (1)...(19): siRNA sense strand
ggaauucaucgaugcacaa

SEQ ID NO: 1760823 - RNA, 19 nt, Homo sapiens
  misc_RNA (1)...(19): siRNA sense strand
augaugaagugaaugcuuu

SEQ ID NO: 1760824 - RNA, 19 nt, Homo sapiens
  misc_RNA (1)...(19): siRNA sense strand
gaggagaugagacagaugu

SEQ ID NO: 1760825 - RNA, 19 nt, Homo sapiens
  misc_RNA (1)...(19): siRNA sense strand
ggugaagguugccgaacug

SEQ ID NO: 1760826 - RNA, 19 nt, Homo sapiens
  misc_RNA (1)...(19): siRNA sense strand
caugucugcuuguauuuca

SEQ ID NO: 1760827 - RNA, 19 nt, Homo sapiens
  misc_RNA (1)...(19): siRNA sense strand
guucaacaccaaauucgaa

SEQ ID NO: 1760828 - RNA, 19 nt, Homo sapiens
  misc_RNA (1)...(19): siRNA sense strand
gaaguuugaccgucugaag

SEQ ID NO: 1760829 - RNA, 19 nt, Homo sapiens
  misc_RNA (1)...(19): siRNA sense strand
gaacaucauccccaucauu

SEQ ID NO: 1760830 - RNA, 19 nt, Homo sapiens
  misc_RNA (1)...(19): siRNA sense strand
ucuaucaguuuccuacaga

SEQ ID NO: 1760831 - RNA, 19 nt, Homo sapiens
  misc_RNA (1)...(19): siRNA sense strand
cgaagagugagcuaacaaa

SEQ ID NO: 1760832 - RNA, 19 nt, Homo sapiens
  misc_RNA (1)...(19): siRNA sense strand
uaauaccuaugaccuccaa

SEQ ID NO: 1760833 - RNA, 19 nt, Homo sapiens
  misc_RNA (1)...(19): siRNA sense strand
ggcuaaagcucacgaucgu

SEQ ID NO: 1760834 - RNA, 19 nt, Homo sapiens
  misc_RNA (1)...(19): siRNA sense strand
cacagaagaacugaagaua

SEQ ID NO: 1760835 - RNA, 19 nt, Homo sapiens
  misc_RNA (1)...(19): siRNA sense strand
cagaugccauuucgaagag

SEQ ID NO: 1760836 - RNA, 19 nt, Homo sapiens
  misc_RNA (1)...(19): siRNA sense strand
aagcagaugccauuucgaa

SEQ ID NO: 1760837 - RNA, 19 nt, Homo sapiens
  misc_RNA (1)...(19): siRNA sense strand
gacaguaaggugaacauca

SEQ ID NO: 1760838 - RNA, 19 nt, Homo sapiens
  misc_RNA (1)...(19): siRNA sense strand
ccugaagucucuggaccua

SEQ ID NO: 1760839 - RNA, 19 nt, Homo sapiens
  misc_RNA (1)...(19): siRNA sense strand
cuacacaccuaccaugacu

SEQ ID NO: 1760840 - RNA, 19 nt, Homo sapiens
  misc_RNA (1)...(19): siRNA sense strand
aagaagaaacuggaggaua

SEQ ID NO: 1760841 - RNA, 19 nt, Homo sapiens
  misc_RNA (1)...(19): siRNA sense strand
ucaguuuacaggagacaua

SEQ ID NO: 1760842 - RNA, 19 nt, Homo sapiens
  misc_RNA (1)...(19): siRNA sense strand
ccaaagcagaugccauuuc

SEQ ID NO: 1760843 - RNA, 19 nt, Homo sapiens
  misc_RNA (1)...(19): siRNA sense strand
caaagaggacagcuacaag

SEQ ID NO: 1760844 - RNA, 19 nt, Homo sapiens
  misc_RNA (1)...(19): siRNA sense strand
gggcaaguccacccucaug

SEQ ID NO: 1760845 - RNA, 19 nt, Homo sapiens
  misc_RNA (1)...(19): siRNA sense strand
gagcuaaagauccgaagag

SEQ ID NO: 1760846 - RNA, 19 nt, Homo sapiens
  misc_RNA (1)...(19): siRNA sense strand
gaugaugaagugaaugcuu

SEQ ID NO: 1760847 - RNA, 19 nt, Homo sapiens
  misc_RNA (1)...(19): siRNA sense strand
guuuacaggagacauauga

SEQ ID NO: 1760848 - RNA, 19 nt, Homo sapiens
  misc_RNA (1)...(19): siRNA sense strand
ccacugcgacuuugugaag

SEQ ID NO: 1760849 - RNA, 19 nt, Homo sapiens
  misc_RNA (1)...(19): siRNA sense strand
gacagcaaacccuucaguu

SEQ ID NO: 1760850 - RNA, 19 nt, Homo sapiens
  misc_RNA (1)...(19): siRNA sense strand
gagagacaaagagaagaaa

SEQ ID NO: 1760851 - RNA, 19 nt, Homo sapiens
  misc_RNA (1)...(19): siRNA sense strand
gagcugcacgagaaguuug

SEQ ID NO: 1760852 - RNA, 19 nt, Homo sapiens
  misc_RNA (1)...(19): siRNA sense strand
caaagaggcagagaaagag

SEQ ID NO: 1760853 - RNA, 19 nt, Homo sapiens
  misc_RNA (1)...(19): siRNA sense strand
acaaagaggacagcuacaa

SEQ ID NO: 1760854 - RNA, 19 nt, Homo sapiens
  misc_RNA (1)...(19): siRNA sense strand
gaagaaacuggaggauaag

SEQ ID NO: 1760855 - RNA, 19 nt, Homo sapiens
  misc_RNA (1)...(19): siRNA sense strand
aagaggagaugagacagau

SEQ ID NO: 1760856 - RNA, 19 nt, Homo sapiens
  misc_RNA (1)...(19): siRNA sense strand
ugccaaagcagaugccauu

SEQ ID NO: 1760857 - RNA, 19 nt, Homo sapiens
  misc_RNA (1)...(19): siRNA sense strand
gucauucccugaagucucu

SEQ ID NO: 1760858 - RNA, 19 nt, Homo sapiens
  misc_RNA (1)...(19): siRNA sense strand
aggccuaccugcaggaaga

SEQ ID NO: 1760859 - RNA, 19 nt, Homo sapiens
  misc_RNA (1)...(19): siRNA sense strand
gaaagagcugcacgagaag

SEQ ID NO: 1760860 - RNA, 19 nt, Homo sapiens
  misc_RNA (1)...(19): siRNA sense strand
gaagaagaaacuggaggau

SEQ ID NO: 1760861 - RNA, 19 nt, Homo sapiens
  misc_RNA (1)...(19): siRNA sense strand
aagauaggcaacaagauga

SEQ ID NO: 1760862 - RNA, 19 nt, Homo sapiens
  misc_RNA (1)...(19): siRNA sense strand
aagaagcggagcucaaaga

SEQ ID NO: 1760863 - RNA, 19 nt, Homo sapiens
  misc_RNA (1)...(19): siRNA sense strand
gggugaagguugccgaacu

SEQ ID NO: 1760864 - RNA, 19 nt, Homo sapiens
  misc_RNA (1)...(19): siRNA sense strand
agaaagaagcggagcucaa

SEQ ID NO: 1760865 - RNA, 19 nt, Homo sapiens
  misc_RNA (1)...(19): siRNA sense strand
ggagaugagacagauguuc

SEQ ID NO: 1760866 - RNA, 19 nt, Homo sapiens
  misc_RNA (1)...(19): siRNA sense strand
auccaugucugcuuguauu

SEQ ID NO: 1760867 - RNA, 19 nt, Homo sapiens
  misc_RNA (1)...(19): siRNA sense strand
agagagacaaagagaagaa

SEQ ID NO: 1760868 - RNA, 19 nt, Homo sapiens
  misc_RNA (1)...(19): siRNA sense strand
ucaacaaagaggacagcua

SEQ ID NO: 1760869 - RNA, 19 nt, Homo sapiens
  misc_RNA (1)...(19): siRNA sense strand
ugaagagagacaaagagaa

SEQ ID NO: 1760870 - RNA, 19 nt, Homo sapiens
  misc_RNA (1)...(19): siRNA sense strand
ccacgggucauucccugaa

SEQ ID NO: 1760871 - RNA, 19 nt, Homo sapiens
  misc_RNA (1)...(19): siRNA sense strand
aagaagaggagaugagaca

SEQ ID NO: 1760872 - RNA, 19 nt, Homo sapiens
  misc_RNA (1)...(19): siRNA sense strand
acagaagaacugaagauag

SEQ ID NO: 1760873 - RNA, 19 nt, Homo sapiens
  misc_RNA (1)...(19): siRNA sense strand
uaccaugacucccgaaucc

SEQ ID NO: 1760874 - RNA, 19 nt, Homo sapiens
  misc_RNA (1)...(19): siRNA sense strand
ccuggaugaugaagugaau

SEQ ID NO: 1760875 - RNA, 19 nt, Homo sapiens
  misc_RNA (1)...(19): siRNA sense strand
cacgaucguuagcacaguu

SEQ ID NO: 1760876 - RNA, 19 nt, Homo sapiens
  misc_RNA (1)...(19): siRNA sense strand
ccagcgagucaaagagaaa

SEQ ID NO: 1760877 - RNA, 19 nt, Homo sapiens
  misc_RNA (1)...(19): siRNA sense strand
uggaggagaugggcuucaa

SEQ ID NO: 1760878 - RNA, 19 nt, Homo sapiens
  misc_RNA (1)...(19): siRNA sense strand
caucauugccaaagcagau

SEQ ID NO: 1760879 - RNA, 19 nt, Homo sapiens
  misc_RNA (1)...(19): siRNA sense strand
gaagaagcuggacaguaag

SEQ ID NO: 1760880 - RNA, 19 nt, Homo sapiens
  misc_RNA (1)...(19): siRNA sense strand
ucaguuuccuacagaugau

SEQ ID NO: 1760881 - RNA, 19 nt, Homo sapiens
  misc_RNA (1)...(19): siRNA sense strand
cagcacagaagaacugaag

SEQ ID NO: 1760882 - RNA, 19 nt, Homo sapiens
  misc_RNA (1)...(19): siRNA sense strand
gcagagaucaauggaacca

SEQ ID NO: 1760883 - RNA, 19 nt, Homo sapiens
  misc_RNA (1)...(19): siRNA sense strand
ugaagaagcuggacaguaa

SEQ ID NO: 1760884 - RNA, 19 nt, Homo sapiens
  misc_RNA (1)...(19): siRNA sense strand
agaagaaacuggaggauaa

SEQ ID NO: 1760885 - RNA, 19 nt, Homo sapiens
  misc_RNA (1)...(19): siRNA sense strand
agaaagagcugcacgagaa

SEQ ID NO: 1760886 - RNA, 19 nt, Homo sapiens
  misc_RNA (1)...(19): siRNA sense strand
gaagagugcuacacaccua

SEQ ID NO: 1760887 - RNA, 19 nt, Homo sapiens
  misc_RNA (1)...(19): siRNA sense strand
gaaagaagcggagcucaaa

SEQ ID NO: 1760888 - RNA, 19 nt, Homo sapiens
  misc_RNA (1)...(19): siRNA sense strand
gaagauaggcaacaagaug

SEQ ID NO: 1760889 - RNA, 19 nt, Homo sapiens
  misc_RNA (1)...(19): siRNA sense strand
agagugagcuaacaaaguu

SEQ ID NO: 1760890 - RNA, 19 nt, Homo sapiens
  misc_RNA (1)...(19): siRNA sense strand
gcuguaagcuggaggagau

SEQ ID NO: 1760891 - RNA, 19 nt, Homo sapiens
  misc_RNA (1)...(19): siRNA sense strand
gaagagagacaaagagaag

SEQ ID NO: 1760892 - RNA, 19 nt, Homo sapiens
  misc_RNA (1)...(19): siRNA sense strand
gcaacggaguccagaucua

SEQ ID NO: 1760893 - RNA, 19 nt, Homo sapiens
  misc_RNA (1)...(19): siRNA sense strand
cagaagaacugaagauagg

SEQ ID NO: 1760894 - RNA, 19 nt, Homo sapiens
  misc_RNA (1)...(19): siRNA sense strand
gcucaaagaggcagagaaa

SEQ ID NO: 1760895 - RNA, 19 nt, Homo sapiens
  misc_RNA (1)...(19): siRNA sense strand
gggaccagaucaacaaaga

SEQ ID NO: 1760896 - RNA, 19 nt, Homo sapiens
  misc_RNA (1)...(19): siRNA sense strand
ggagacauaugaggccaaa

SEQ ID NO: 1760897 - RNA, 19 nt, Homo sapiens
  misc_RNA (1)...(19): siRNA sense strand
cuaaagcucacgaucguua

SEQ ID NO: 1760898 - RNA, 19 nt, Homo sapiens
  misc_RNA (1)...(19): siRNA sense strand
ucaaagaggcagagaaaga

SEQ ID NO: 1760899 - RNA, 19 nt, Homo sapiens
  misc_RNA (1)...(19): siRNA sense strand
ccagcgagcuugucagcaa

SEQ ID NO: 1760900 - RNA, 19 nt, Homo sapiens
  misc_RNA (1)...(19): siRNA sense strand
cuacaagccuaucguggaa

SEQ ID NO: 1760901 - RNA, 19 nt, Homo sapiens
  misc_RNA (1)...(19): siRNA sense strand
gcagaugccauuucgaaga

SEQ ID NO: 1760902 - RNA, 19 nt, Homo sapiens
  misc_RNA (1)...(19): siRNA sense strand
caaagcagaugccauuucg

SEQ ID NO: 1760903 - RNA, 19 nt, Homo sapiens
  misc_RNA (1)...(19): siRNA sense strand
gaagaggagaugagacaga

SEQ ID NO: 1760904 - RNA, 19 nt, Homo sapiens
  misc_RNA (1)...(19): siRNA sense strand
gagagcaacgugaggcuaa

SEQ ID NO: 1760905 - RNA, 19 nt, Homo sapiens
  misc_RNA (1)...(19): siRNA sense strand
gcacagaagaacugaagau

SEQ ID NO: 1760906 - RNA, 19 nt, Homo sapiens
  misc_RNA (1)...(19): siRNA sense strand
gaauccaugucugcuugua

SEQ ID NO: 1760907 - RNA, 19 nt, Homo sapiens
  misc_RNA (1)...(19): siRNA sense strand
gcaggaagagcuaaagauc

SEQ ID NO: 1760908 - RNA, 19 nt, Homo sapiens
  misc_RNA (1)...(19): siRNA sense strand
guccagaucuaucaguuuc

SEQ ID NO: 1760909 - RNA, 19 nt, Homo sapiens
  misc_RNA (1)...(19): siRNA sense strand
guguccagcuccagucuaa

SEQ ID NO: 1760910 - RNA, 19 nt, Homo sapiens
  misc_RNA (1)...(19): siRNA sense strand
gaguccagaucuaucaguu

SEQ ID NO: 1760911 - RNA, 19 nt, Homo sapiens
  misc_RNA (1)...(19): siRNA sense strand
guccagcuccagucuaaua

SEQ ID NO: 1760912 - RNA, 19 nt, Homo sapiens
  misc_RNA (1)...(19): siRNA sense strand
gcuccagucuaauaccuau

SEQ ID NO: 1760913 - RNA, 19 nt, Homo sapiens
  misc_RNA (1)...(19): siRNA sense strand
gaaacuggaggauaagaag

SEQ ID NO: 1760914 - RNA, 19 nt, Homo sapiens
  misc_RNA (1)...(19): siRNA sense strand
caacggaguccagaucuau

SEQ ID NO: 1760915 - RNA, 19 nt, Homo sapiens
  misc_RNA (1)...(19): siRNA sense strand
auucaucgaugcacaauuc

SEQ ID NO: 1760916 - RNA, 19 nt, Homo sapiens
  misc_RNA (1)...(19): siRNA sense strand
ugaagucucuggaccuagu

SEQ ID NO: 1760917 - RNA, 19 nt, Homo sapiens
  misc_RNA (1)...(19): siRNA sense strand
acaagccuaucguggaauu

SEQ ID NO: 1760918 - RNA, 19 nt, Homo sapiens
  misc_RNA (1)...(19): siRNA sense strand
caccgacccugacagcaaa

SEQ ID NO: 1760919 - RNA, 19 nt, Homo sapiens
  misc_RNA (1)...(19): siRNA sense strand
gaacugaagauaggcaaca

SEQ ID NO: 1760920 - RNA, 19 nt, Homo sapiens
  misc_RNA (1)...(19): siRNA sense strand
gaagagugagcuaacaaag

SEQ ID NO: 1760921 - RNA, 19 nt, Homo sapiens
  misc_RNA (1)...(19): siRNA sense strand
acaguaaggugaacaucau

SEQ ID NO: 1760922 - RNA, 19 nt, Homo sapiens
  misc_RNA (1)...(19): siRNA sense strand
ggaauucaucgaugcacaa

SEQ ID NO: 1760923 - RNA, 19 nt, Homo sapiens
  misc_RNA (1)...(19): siRNA sense strand
augaugaagugaaugcuuu

SEQ ID NO: 1760924 - RNA, 19 nt, Homo sapiens
  misc_RNA (1)...(19): siRNA sense strand
gaggagaugagacagaugu

SEQ ID NO: 1760925 - RNA, 19 nt, Homo sapiens
  misc_RNA (1)...(19): siRNA sense strand
ggugaagguugccgaacug

SEQ ID NO: 1760926 - RNA, 19 nt, Homo sapiens
  misc_RNA (1)...(19): siRNA sense strand
caugucugcuuguauuuca

SEQ ID NO: 1760927 - RNA, 19 nt, Homo sapiens
  misc_RNA (1)...(19): siRNA sense strand
guucaacaccaaauucgaa

SEQ ID NO: 1760928 - RNA, 19 nt, Homo sapiens
  misc_RNA (1)...(19): siRNA sense strand
gaaguuugaccgucugaag

SEQ ID NO: 1760929 - RNA, 19 nt, Homo sapiens
  misc_RNA (1)...(19): siRNA sense strand
gaacaucauccccaucauu

SEQ ID NO: 1760930 - RNA, 19 nt, Homo sapiens
  misc_RNA (1)...(19): siRNA sense strand
ucuaucaguuuccuacaga

SEQ ID NO: 1760931 - RNA, 19 nt, Homo sapiens
  misc_RNA (1)...(19): siRNA sense strand
cgaagagugagcuaacaaa

SEQ ID NO: 1760932 - RNA, 19 nt, Homo sapiens
  misc_RNA (1)...(19): siRNA sense strand
uaauaccuaugaccuccaa

SEQ ID NO: 1760933 - RNA, 19 nt, Homo sapiens
  misc_RNA (1)...(19): siRNA sense strand
ggcuaaagcucacgaucgu

SEQ ID NO: 1760934 - RNA, 19 nt, Homo sapiens
  misc_RNA (1)...(19): siRNA sense strand
cacagaagaacugaagaua

SEQ ID NO: 1760935 - RNA, 19 nt, Homo sapiens
  misc_RNA (1)...(19): siRNA sense strand
cagaugccauuucgaagag

SEQ ID NO: 1760936 - RNA, 19 nt, Homo sapiens
  misc_RNA (1)...(19): siRNA sense strand
aagcagaugccauuucgaa

SEQ ID NO: 1760937 - RNA, 19 nt, Homo sapiens
  misc_RNA (1)...(19): siRNA sense strand
gacaguaaggugaacauca

SEQ ID NO: 1760938 - RNA, 19 nt, Homo sapiens
  misc_RNA (1)...(19): siRNA sense strand
ccugaagucucuggaccua

SEQ ID NO: 1760939 - RNA, 19 nt, Homo sapiens
  misc_RNA (1)...(19): siRNA sense strand
cuacacaccuaccaugacu

SEQ ID NO: 1760940 - RNA, 19 nt, Homo sapiens
  misc_RNA (1)...(19): siRNA sense strand
aagaagaaacuggaggaua

SEQ ID NO: 1760941 - RNA, 19 nt, Homo sapiens
  misc_RNA (1)...(19): siRNA sense strand
ucaguuuacaggagacaua

SEQ ID NO: 1760942 - RNA, 19 nt, Homo sapiens
  misc_RNA (1)...(19): siRNA sense strand
ccaaagcagaugccauuuc

SEQ ID NO: 1760943 - RNA, 19 nt, Homo sapiens
  misc_RNA (1)...(19): siRNA sense strand
caaagaggacagcuacaag

SEQ ID NO: 1760944 - RNA, 19 nt, Homo sapiens
  misc_RNA (1)...(19): siRNA sense strand
gggcaaguccacccucaug

SEQ ID NO: 1760945 - RNA, 19 nt, Homo sapiens
  misc_RNA (1)...(19): siRNA sense strand
gagcuaaagauccgaagag

SEQ ID NO: 1760946 - RNA, 19 nt, Homo sapiens
  misc_RNA (1)...(19): siRNA sense strand
gaugaugaagugaaugcuu

SEQ ID NO: 1760947 - RNA, 19 nt, Homo sapiens
  misc_RNA (1)...(19): siRNA sense strand
guuuacaggagacauauga

SEQ ID NO: 1760948 - RNA, 19 nt, Homo sapiens
  misc_RNA (1)...(19): siRNA sense strand
ccacugcgacuuugugaag

SEQ ID NO: 1760949 - RNA, 19 nt, Homo sapiens
  misc_RNA (1)...(19): siRNA sense strand
gacagcaaacccuucaguu

SEQ ID NO: 1760950 - RNA, 19 nt, Homo sapiens
  misc_RNA (1)...(19): siRNA sense strand
gagagacaaagagaagaaa

SEQ ID NO: 1760951 - RNA, 19 nt, Homo sapiens
  misc_RNA (1)...(19): siRNA sense strand
gagcugcacgagaaguuug

SEQ ID NO: 1760952 - RNA, 19 nt, Homo sapiens
  misc_RNA (1)...(19): siRNA sense strand
caaagaggcagagaaagag

SEQ ID NO: 1760953 - RNA, 19 nt, Homo sapiens
  misc_RNA (1)...(19): siRNA sense strand
acaaagaggacagcuacaa

SEQ ID NO: 1760954 - RNA, 19 nt, Homo sapiens
  misc_RNA (1)...(19): siRNA sense strand
gaagaaacuggaggauaag

SEQ ID NO: 1760955 - RNA, 19 nt, Homo sapiens
  misc_RNA (1)...(19): siRNA sense strand
aagaggagaugagacagau

SEQ ID NO: 1760956 - RNA, 19 nt, Homo sapiens
  misc_RNA (1)...(19): siRNA sense strand
ugccaaagcagaugccauu

SEQ ID NO: 1760957 - RNA, 19 nt, Homo sapiens
  misc_RNA (1)...(19): siRNA sense strand
gucauucccugaagucucu

SEQ ID NO: 1760958 - RNA, 19 nt, Homo sapiens
  misc_RNA (1)...(19): siRNA sense strand
aggccuaccugcaggaaga

SEQ ID NO: 1760959 - RNA, 19 nt, Homo sapiens
  misc_RNA (1)...(19): siRNA sense strand
gaaagagcugcacgagaag

SEQ ID NO: 1760960 - RNA, 19 nt, Homo sapiens
  misc_RNA (1)...(19): siRNA sense strand
gaagaagaaacuggaggau

SEQ ID NO: 1760961 - RNA, 19 nt, Homo sapiens
  misc_RNA (1)...(19): siRNA sense strand
aagauaggcaacaagauga

SEQ ID NO: 1760962 - RNA, 19 nt, Homo sapiens
  misc_RNA (1)...(19): siRNA sense strand
aagaagcggagcucaaaga

SEQ ID NO: 1760963 - RNA, 19 nt, Homo sapiens
  misc_RNA (1)...(19): siRNA sense strand
gggugaagguugccgaacu

SEQ ID NO: 1760964 - RNA, 19 nt, Homo sapiens
  misc_RNA (1)...(19): siRNA sense strand
agaaagaagcggagcucaa

SEQ ID NO: 1760965 - RNA, 19 nt, Homo sapiens
  misc_RNA (1)...(19): siRNA sense strand
ggagaugagacagauguuc

SEQ ID NO: 1760966 - RNA, 19 nt, Homo sapiens
  misc_RNA (1)...(19): siRNA sense strand
auccaugucugcuuguauu

SEQ ID NO: 1760967 - RNA, 19 nt, Homo sapiens
  misc_RNA (1)...(19): siRNA sense strand
agagagacaaagagaagaa

SEQ ID NO: 1760968 - RNA, 19 nt, Homo sapiens
  misc_RNA (1)...(19): siRNA sense strand
ucaacaaagaggacagcua

SEQ ID NO: 1760969 - RNA, 19 nt, Homo sapiens
  misc_RNA (1)...(19): siRNA sense strand
ugaagagagacaaagagaa

SEQ ID NO: 1760970 - RNA, 19 nt, Homo sapiens
  misc_RNA (1)...(19): siRNA sense strand
ccacgggucauucccugaa

SEQ ID NO: 1760971 - RNA, 19 nt, Homo sapiens
  misc_RNA (1)...(19): siRNA sense strand
aagaagaggagaugagaca

SEQ ID NO: 1760972 - RNA, 19 nt, Homo sapiens
  misc_RNA (1)...(19): siRNA sense strand
acagaagaacugaagauag

SEQ ID NO: 1760973 - RNA, 19 nt, Homo sapiens
  misc_RNA (1)...(19): siRNA sense strand
uaccaugacucccgaaucc

SEQ ID NO: 1760974 - RNA, 19 nt, Homo sapiens
  misc_RNA (1)...(19): siRNA sense strand
ccuggaugaugaagugaau

SEQ ID NO: 1760975 - RNA, 19 nt, Homo sapiens
  misc_RNA (1)...(19): siRNA sense strand
cacgaucguuagcacaguu

SEQ ID NO: 1760976 - RNA, 19 nt, Homo sapiens
  misc_RNA (1)...(19): siRNA sense strand
ccagcgagucaaagagaaa

SEQ ID NO: 1760977 - RNA, 19 nt, Homo sapiens
  misc_RNA (1)...(19): siRNA sense strand
uggaggagaugggcuucaa

SEQ ID NO: 1760978 - RNA, 19 nt, Homo sapiens
  misc_RNA (1)...(19): siRNA sense strand
caucauugccaaagcagau

SEQ ID NO: 1760979 - RNA, 19 nt, Homo sapiens
  misc_RNA (1)...(19): siRNA sense strand
gaagaagcuggacaguaag

SEQ ID NO: 1760980 - RNA, 19 nt, Homo sapiens
  misc_RNA (1)...(19): siRNA sense strand
ucaguuuccuacagaugau

SEQ ID NO: 1760981 - RNA, 19 nt, Homo sapiens
  misc_RNA (1)...(19): siRNA sense strand
cagcacagaagaacugaag

SEQ ID NO: 1760982 - RNA, 19 nt, Homo sapiens
  misc_RNA (1)...(19): siRNA sense strand
gcagagaucaauggaacca

SEQ ID NO: 1760983 - RNA, 19 nt, Homo sapiens
  misc_RNA (1)...(19): siRNA sense strand
ugaagaagcuggacaguaa

SEQ ID NO: 1760984 - RNA, 19 nt, Homo sapiens
  misc_RNA (1)...(19): siRNA sense strand
agaagaaacuggaggauaa

SEQ ID NO: 1760985 - RNA, 19 nt, Homo sapiens
  misc_RNA (1)...(19): siRNA sense strand
agaaagagcugcacgagaa

SEQ ID NO: 1760986 - RNA, 19 nt, Homo sapiens
  misc_RNA (1)...(19): siRNA sense strand
gaagagugcuacacaccua

SEQ ID NO: 1760987 - RNA, 19 nt, Homo sapiens
  misc_RNA (1)...(19): siRNA sense strand
gaaagaagcggagcucaaa

SEQ ID NO: 1760988 - RNA, 19 nt, Homo sapiens
  misc_RNA (1)...(19): siRNA sense strand
gaagauaggcaacaagaug

SEQ ID NO: 1760989 - RNA, 19 nt, Homo sapiens
  misc_RNA (1)...(19): siRNA sense strand
agagugagcuaacaaaguu

SEQ ID NO: 1760990 - RNA, 19 nt, Homo sapiens
  misc_RNA (1)...(19): siRNA sense strand
gcuguaagcuggaggagau

SEQ ID NO: 1760991 - RNA, 19 nt, Homo sapiens
  misc_RNA (1)...(19): siRNA sense strand
gaagagagacaaagagaag

SEQ ID NO: 1760992 - RNA, 19 nt, Homo sapiens
  misc_RNA (1)...(19): siRNA sense strand
gcaacggaguccagaucua

SEQ ID NO: 1760993 - RNA, 19 nt, Homo sapiens
  misc_RNA (1)...(19): siRNA sense strand
cagaagaacugaagauagg

SEQ ID NO: 1760994 - RNA, 19 nt, Homo sapiens
  misc_RNA (1)...(19): siRNA sense strand
gcucaaagaggcagagaaa

SEQ ID NO: 1760995 - RNA, 19 nt, Homo sapiens
  misc_RNA (1)...(19): siRNA sense strand
gggaccagaucaacaaaga

SEQ ID NO: 1760996 - RNA, 19 nt, Homo sapiens
  misc_RNA (1)...(19): siRNA sense strand
ggagacauaugaggccaaa

SEQ ID NO: 1760997 - RNA, 19 nt, Homo sapiens
  misc_RNA (1)...(19): siRNA sense strand
cuaaagcucacgaucguua

SEQ ID NO: 1760998 - RNA, 19 nt, Homo sapiens
  misc_RNA (1)...(19): siRNA sense strand
ucaaagaggcagagaaaga

SEQ ID NO: 1760999 - RNA, 19 nt, Homo sapiens
  misc_RNA (1)...(19): siRNA sense strand
ccagcgagcuugucagcaa

SEQ ID NO: 1761000 - RNA, 19 nt, Homo sapiens
  misc_RNA (1)...(19): siRNA sense strand
cuacaagccuaucguggaa

SEQ ID NO: 1761001 - RNA, 19 nt, Homo sapiens
  misc_RNA (1)...(19): siRNA sense strand
gcagaugccauuucgaaga

SEQ ID NO: 1761002 - RNA, 19 nt, Homo sapiens
  misc_RNA (1)...(19): siRNA sense strand
caaagcagaugccauuucg

SEQ ID NO: 1761003 - RNA, 19 nt, Homo sapiens
  misc_RNA (1)...(19): siRNA sense strand
gaagaggagaugagacaga

SEQ ID NO: 1761004 - RNA, 19 nt, Homo sapiens
  misc_RNA (1)...(19): siRNA sense strand
gagagcaacgugaggcuaa

SEQ ID NO: 1761005 - RNA, 19 nt, Homo sapiens
  misc_RNA (1)...(19): siRNA sense strand
gcacagaagaacugaagau

SEQ ID NO: 1761006 - RNA, 19 nt, Homo sapiens
  misc_RNA (1)...(19): siRNA sense strand
gaauccaugucugcuugua

SEQ ID NO: 1761007 - RNA, 19 nt, Homo sapiens
  misc_RNA (1)...(19): siRNA sense strand
gcaggaagagcuaaagauc

SEQ ID NO: 1761008 - RNA, 19 nt, Homo sapiens
  misc_RNA (1)...(19): siRNA sense strand
guccagaucuaucaguuuc

SEQ ID NO: 1761009 - RNA, 19 nt, Homo sapiens
  misc_RNA (1)...(19): siRNA sense strand
guguccagcuccagucuaa

SEQ ID NO: 1761010 - RNA, 19 nt, Homo sapiens
  misc_RNA (1)...(19): siRNA sense strand
gaguccagaucuaucaguu

SEQ ID NO: 1761011 - RNA, 19 nt, Homo sapiens
  misc_RNA (1)...(19): siRNA sense strand
guccagcuccagucuaaua

SEQ ID NO: 1761012 - RNA, 19 nt, Homo sapiens
  misc_RNA (1)...(19): siRNA sense strand
gcuccagucuaauaccuau

SEQ ID NO: 1761013 - RNA, 19 nt, Homo sapiens
  misc_RNA (1)...(19): siRNA sense strand
gaaacuggaggauaagaag

SEQ ID NO: 1761014 - RNA, 19 nt, Homo sapiens
  misc_RNA (1)...(19): siRNA sense strand
caacggaguccagaucuau

SEQ ID NO: 1761015 - RNA, 19 nt, Homo sapiens
  misc_RNA (1)...(19): siRNA sense strand
auucaucgaugcacaauuc

SEQ ID NO: 1761016 - RNA, 19 nt, Homo sapiens
  misc_RNA (1)...(19): siRNA sense strand
ugaagucucuggaccuagu

SEQ ID NO: 1761017 - RNA, 19 nt, Homo sapiens
  misc_RNA (1)...(19): siRNA sense strand
acaagccuaucguggaauu

SEQ ID NO: 1761018 - RNA, 19 nt, Homo sapiens
  misc_RNA (1)...(19): siRNA sense strand
caccgacccugacagcaaa

SEQ ID NO: 1761019 - RNA, 19 nt, Homo sapiens
  misc_RNA (1)...(19): siRNA sense strand
gaacugaagauaggcaaca

SEQ ID NO: 1761020 - RNA, 19 nt, Homo sapiens
  misc_RNA (1)...(19): siRNA sense strand
gaagagugagcuaacaaag

SEQ ID NO: 1761021 - RNA, 19 nt, Homo sapiens
  misc_RNA (1)...(19): siRNA sense strand
acaguaaggugaacaucau

SEQ ID NO: 1761022 - RNA, 19 nt, Homo sapiens
  misc_RNA (1)...(19): siRNA sense strand
ggaauucaucgaugcacaa

SEQ ID NO: 1761023 - RNA, 19 nt, Homo sapiens
  misc_RNA (1)...(19): siRNA sense strand
augaugaagugaaugcuuu

SEQ ID NO: 1761024 - RNA, 19 nt, Homo sapiens
  misc_RNA (1)...(19): siRNA sense strand
gaggagaugagacagaugu

SEQ ID NO: 1761025 - RNA, 19 nt, Homo sapiens
  misc_RNA (1)...(19): siRNA sense strand
ggugaagguugccgaacug

SEQ ID NO: 1761026 - RNA, 19 nt, Homo sapiens
  misc_RNA (1)...(19): siRNA sense strand
caugucugcuuguauuuca

SEQ ID NO: 1761027 - RNA, 19 nt, Homo sapiens
  misc_RNA (1)...(19): siRNA sense strand
guucaacaccaaauucgaa

SEQ ID NO: 1761028 - RNA, 19 nt, Homo sapiens
  misc_RNA (1)...(19): siRNA sense strand
gaaguuugaccgucugaag

SEQ ID NO: 1761029 - RNA, 19 nt, Homo sapiens
  misc_RNA (1)...(19): siRNA sense strand
gaacaucauccccaucauu

SEQ ID NO: 1761030 - RNA, 19 nt, Homo sapiens
  misc_RNA (1)...(19): siRNA sense strand
ucuaucaguuuccuacaga

SEQ ID NO: 1761031 - RNA, 19 nt, Homo sapiens
  misc_RNA (1)...(19): siRNA sense strand
cgaagagugagcuaacaaa

SEQ ID NO: 1761032 - RNA, 19 nt, Homo sapiens
  misc_RNA (1)...(19): siRNA sense strand
uaauaccuaugaccuccaa

SEQ ID NO: 1761033 - RNA, 19 nt, Homo sapiens
  misc_RNA (1)...(19): siRNA sense strand
ggcuaaagcucacgaucgu

SEQ ID NO: 1761034 - RNA, 19 nt, Homo sapiens
  misc_RNA (1)...(19): siRNA sense strand
cacagaagaacugaagaua

SEQ ID NO: 1761035 - RNA, 19 nt, Homo sapiens
  misc_RNA (1)...(19): siRNA sense strand
cagaugccauuucgaagag

SEQ ID NO: 1761036 - RNA, 19 nt, Homo sapiens
  misc_RNA (1)...(19): siRNA sense strand
aagcagaugccauuucgaa

SEQ ID NO: 1761037 - RNA, 19 nt, Homo sapiens
  misc_RNA (1)...(19): siRNA sense strand
gacaguaaggugaacauca

SEQ ID NO: 1761038 - RNA, 19 nt, Homo sapiens
  misc_RNA (1)...(19): siRNA sense strand
ccugaagucucuggaccua

SEQ ID NO: 1761039 - RNA, 19 nt, Homo sapiens
  misc_RNA (1)...(19): siRNA sense strand
cuacacaccuaccaugacu

SEQ ID NO: 1761040 - RNA, 19 nt, Homo sapiens
  misc_RNA (1)...(19): siRNA sense strand
aagaagaaacuggaggaua

SEQ ID NO: 1761041 - RNA, 19 nt, Homo sapiens
  misc_RNA (1)...(19): siRNA sense strand
ucaguuuacaggagacaua

SEQ ID NO: 1761042 - RNA, 19 nt, Homo sapiens
  misc_RNA (1)...(19): siRNA sense strand
ccaaagcagaugccauuuc

SEQ ID NO: 1761043 - RNA, 19 nt, Homo sapiens
  misc_RNA (1)...(19): siRNA sense strand
caaagaggacagcuacaag

SEQ ID NO: 1761044 - RNA, 19 nt, Homo sapiens
  misc_RNA (1)...(19): siRNA sense strand
gggcaaguccacccucaug

SEQ ID NO: 1761045 - RNA, 19 nt, Homo sapiens
  misc_RNA (1)...(19): siRNA sense strand
gagcuaaagauccgaagag

SEQ ID NO: 1761046 - RNA, 19 nt, Homo sapiens
  misc_RNA (1)...(19): siRNA sense strand
gaugaugaagugaaugcuu

SEQ ID NO: 1761047 - RNA, 19 nt, Homo sapiens
  misc_RNA (1)...(19): siRNA sense strand
guuuacaggagacauauga

SEQ ID NO: 1761048 - RNA, 19 nt, Homo sapiens
  misc_RNA (1)...(19): siRNA sense strand
ccacugcgacuuugugaag

SEQ ID NO: 1761049 - RNA, 19 nt, Homo sapiens
  misc_RNA (1)...(19): siRNA sense strand
gacagcaaacccuucaguu

SEQ ID NO: 1761050 - RNA, 19 nt, Homo sapiens
  misc_RNA (1)...(19): siRNA sense strand
gagagacaaagagaagaaa

SEQ ID NO: 1761051 - RNA, 19 nt, Homo sapiens
  misc_RNA (1)...(19): siRNA sense strand
gagcugcacgagaaguuug

SEQ ID NO: 1761052 - RNA, 19 nt, Homo sapiens
  misc_RNA (1)...(19): siRNA sense strand
caaagaggcagagaaagag

SEQ ID NO: 1761053 - RNA, 19 nt, Homo sapiens
  misc_RNA (1)...(19): siRNA sense strand
acaaagaggacagcuacaa

SEQ ID NO: 1761054 - RNA, 19 nt, Homo sapiens
  misc_RNA (1)...(19): siRNA sense strand
gaagaaacuggaggauaag

SEQ ID NO: 1761055 - RNA, 19 nt, Homo sapiens
  misc_RNA (1)...(19): siRNA sense strand
aagaggagaugagacagau

SEQ ID NO: 1761056 - RNA, 19 nt, Homo sapiens
  misc_RNA (1)...(19): siRNA sense strand
ugccaaagcagaugccauu

SEQ ID NO: 1761057 - RNA, 19 nt, Homo sapiens
  misc_RNA (1)...(19): siRNA sense strand
gucauucccugaagucucu

SEQ ID NO: 1761058 - RNA, 19 nt, Homo sapiens
  misc_RNA (1)...(19): siRNA sense strand
aggccuaccugcaggaaga

SEQ ID NO: 1761059 - RNA, 19 nt, Homo sapiens
  misc_RNA (1)...(19): siRNA sense strand
gaaagagcugcacgagaag

SEQ ID NO: 1761060 - RNA, 19 nt, Homo sapiens
  misc_RNA (1)...(19): siRNA sense strand
gaagaagaaacuggaggau

SEQ ID NO: 1761061 - RNA, 19 nt, Homo sapiens
  misc_RNA (1)...(19): siRNA sense strand
aagauaggcaacaagauga

SEQ ID NO: 1761062 - RNA, 19 nt, Homo sapiens
  misc_RNA (1)...(19): siRNA sense strand
aagaagcggagcucaaaga

SEQ ID NO: 1761063 - RNA, 19 nt, Homo sapiens
  misc_RNA (1)...(19): siRNA sense strand
gggugaagguugccgaacu

SEQ ID NO: 1761064 - RNA, 19 nt, Homo sapiens
  misc_RNA (1)...(19): siRNA sense strand
agaaagaagcggagcucaa

SEQ ID NO: 1761065 - RNA, 19 nt, Homo sapiens
  misc_RNA (1)...(19): siRNA sense strand
ggagaugagacagauguuc

SEQ ID NO: 1761066 - RNA, 19 nt, Homo sapiens
  misc_RNA (1)...(19): siRNA sense strand
auccaugucugcuuguauu

SEQ ID NO: 1761067 - RNA, 19 nt, Homo sapiens
  misc_RNA (1)...(19): siRNA sense strand
agagagacaaagagaagaa

SEQ ID NO: 1761068 - RNA, 19 nt, Homo sapiens
  misc_RNA (1)...(19): siRNA sense strand
ucaacaaagaggacagcua

SEQ ID NO: 1761069 - RNA, 19 nt, Homo sapiens
  misc_RNA (1)...(19): siRNA sense strand
ugaagagagacaaagagaa

SEQ ID NO: 1761070 - RNA, 19 nt, Homo sapiens
  misc_RNA (1)...(19): siRNA sense strand
ccacgggucauucccugaa

SEQ ID NO: 1761071 - RNA, 19 nt, Homo sapiens
  misc_RNA (1)...(19): siRNA sense strand
aagaagaggagaugagaca

SEQ ID NO: 1761072 - RNA, 19 nt, Homo sapiens
  misc_RNA (1)...(19): siRNA sense strand
acagaagaacugaagauag

SEQ ID NO: 1761073 - RNA, 19 nt, Homo sapiens
  misc_RNA (1)...(19): siRNA sense strand
uaccaugacucccgaaucc

SEQ ID NO: 1761074 - RNA, 19 nt, Homo sapiens
  misc_RNA (1)...(19): siRNA sense strand
ccuggaugaugaagugaau

SEQ ID NO: 1761075 - RNA, 19 nt, Homo sapiens
  misc_RNA (1)...(19): siRNA sense strand
cacgaucguuagcacaguu

SEQ ID NO: 1761076 - RNA, 19 nt, Homo sapiens
  misc_RNA (1)...(19): siRNA sense strand
ccagcgagucaaagagaaa

SEQ ID NO: 1761077 - RNA, 19 nt, Homo sapiens
  misc_RNA (1)...(19): siRNA sense strand
uggaggagaugggcuucaa

SEQ ID NO: 1761078 - RNA, 19 nt, Homo sapiens
  misc_RNA (1)...(19): siRNA sense strand
caucauugccaaagcagau

SEQ ID NO: 1761079 - RNA, 19 nt, Homo sapiens
  misc_RNA (1)...(19): siRNA sense strand
gaagaagcuggacaguaag

SEQ ID NO: 1761080 - RNA, 19 nt, Homo sapiens
  misc_RNA (1)...(19): siRNA sense strand
ucaguuuccuacagaugau

SEQ ID NO: 1761081 - RNA, 19 nt, Homo sapiens
  misc_RNA (1)...(19): siRNA sense strand
cagcacagaagaacugaag

SEQ ID NO: 1761082 - RNA, 19 nt, Homo sapiens
  misc_RNA (1)...(19): siRNA sense strand
gcagagaucaauggaacca

SEQ ID NO: 1761083 - RNA, 19 nt, Homo sapiens
  misc_RNA (1)...(19): siRNA sense strand
ugaagaagcuggacaguaa

SEQ ID NO: 1761084 - RNA, 19 nt, Homo sapiens
  misc_RNA (1)...(19): siRNA sense strand
agaagaaacuggaggauaa

SEQ ID NO: 1761085 - RNA, 19 nt, Homo sapiens
  misc_RNA (1)...(19): siRNA sense strand
agaaagagcugcacgagaa

SEQ ID NO: 1761086 - RNA, 19 nt, Homo sapiens
  misc_RNA (1)...(19): siRNA sense strand
gaagagugcuacacaccua

SEQ ID NO: 1761087 - RNA, 19 nt, Homo sapiens
  misc_RNA (1)...(19): siRNA sense strand
gaaagaagcggagcucaaa

SEQ ID NO: 1761088 - RNA, 19 nt, Homo sapiens
  misc_RNA (1)...(19): siRNA sense strand
gaagauaggcaacaagaug

SEQ ID NO: 1761089 - RNA, 19 nt, Homo sapiens
  misc_RNA (1)...(19): siRNA sense strand
agagugagcuaacaaaguu

SEQ ID NO: 1761090 - RNA, 19 nt, Homo sapiens
  misc_RNA (1)...(19): siRNA sense strand
gcuguaagcuggaggagau

SEQ ID NO: 1761091 - RNA, 19 nt, Homo sapiens
  misc_RNA (1)...(19): siRNA sense strand
gaagagagacaaagagaag

SEQ ID NO: 1761092 - RNA, 19 nt, Homo sapiens
  misc_RNA (1)...(19): siRNA sense strand
gcaacggaguccagaucua

SEQ ID NO: 1761093 - RNA, 19 nt, Homo sapiens
  misc_RNA (1)...(19): siRNA sense strand
cagaagaacugaagauagg

SEQ ID NO: 1761094 - RNA, 19 nt, Homo sapiens
  misc_RNA (1)...(19): siRNA sense strand
gcucaaagaggcagagaaa

SEQ ID NO: 1761095 - RNA, 19 nt, Homo sapiens
  misc_RNA (1)...(19): siRNA sense strand
gggaccagaucaacaaaga

SEQ ID NO: 1761096 - RNA, 19 nt, Homo sapiens
  misc_RNA (1)...(19): siRNA sense strand
ggagacauaugaggccaaa

SEQ ID NO: 1761097 - RNA, 19 nt, Homo sapiens
  misc_RNA (1)...(19): siRNA sense strand
cuaaagcucacgaucguua

SEQ ID NO: 1761098 - RNA, 19 nt, Homo sapiens
  misc_RNA (1)...(19): siRNA sense strand
ucaaagaggcagagaaaga

SEQ ID NO: 1761099 - RNA, 19 nt, Homo sapiens
  misc_RNA (1)...(19): siRNA sense strand
ccagcgagcuugucagcaa

SEQ ID NO: 1761100 - RNA, 19 nt, Homo sapiens
  misc_RNA (1)...(19): siRNA sense strand
cuacaagccuaucguggaa

SEQ ID NO: 1761101 - RNA, 19 nt, Homo sapiens
  misc_RNA (1)...(19): siRNA sense strand
gcagaugccauuucgaaga

SEQ ID NO: 1761102 - RNA, 19 nt, Homo sapiens
  misc_RNA (1)...(19): siRNA sense strand
caaagcagaugccauuucg

SEQ ID NO: 1761103 - RNA, 19 nt, Homo sapiens
  misc_RNA (1)...(19): siRNA sense strand
gaagaggagaugagacaga

SEQ ID NO: 1761104 - RNA, 19 nt, Homo sapiens
  misc_RNA (1)...(19): siRNA sense strand
gagagcaacgugaggcuaa

SEQ ID NO: 1761105 - RNA, 19 nt, Homo sapiens
  misc_RNA (1)...(19): siRNA sense strand
gcacagaagaacugaagau

SEQ ID NO: 1761106 - RNA, 19 nt, Homo sapiens
  misc_RNA (1)...(19): siRNA sense strand
gaauccaugucugcuugua

SEQ ID NO: 1761107 - RNA, 19 nt, Homo sapiens
  misc_RNA (1)...(19): siRNA sense strand
gcaggaagagcuaaagauc

SEQ ID NO: 1761108 - RNA, 19 nt, Homo sapiens
  misc_RNA (1)...(19): siRNA sense strand
guccagaucuaucaguuuc

SEQ ID NO: 1761109 - RNA, 19 nt, Homo sapiens
  misc_RNA (1)...(19): siRNA sense strand
guguccagcuccagucuaa

SEQ ID NO: 1761110 - RNA, 19 nt, Homo sapiens
  misc_RNA (1)...(19): siRNA sense strand
gaguccagaucuaucaguu

SEQ ID NO: 1761111 - RNA, 19 nt, Homo sapiens
  misc_RNA (1)...(19): siRNA sense strand
guccagcuccagucuaaua

SEQ ID NO: 1761112 - RNA, 19 nt, Homo sapiens
  misc_RNA (1)...(19): siRNA sense strand
gcuccagucuaauaccuau

SEQ ID NO: 1761113 - RNA, 19 nt, Homo sapiens
  misc_RNA (1)...(19): siRNA sense strand
gaaacuggaggauaagaag

SEQ ID NO: 1761114 - RNA, 19 nt, Homo sapiens
  misc_RNA (1)...(19): siRNA sense strand
caacggaguccagaucuau

SEQ ID NO: 1761115 - RNA, 19 nt, Homo sapiens
  misc_RNA (1)...(19): siRNA sense strand
auucaucgaugcacaauuc

SEQ ID NO: 1761116 - RNA, 19 nt, Homo sapiens
  misc_RNA (1)...(19): siRNA sense strand
ugaagucucuggaccuagu

SEQ ID NO: 1761117 - RNA, 19 nt, Homo sapiens
  misc_RNA (1)...(19): siRNA sense strand
acaagccuaucguggaauu

SEQ ID NO: 1761118 - RNA, 19 nt, Homo sapiens
  misc_RNA (1)...(19): siRNA sense strand
caccgacccugacagcaaa

SEQ ID NO: 1761119 - RNA, 19 nt, Homo sapiens
  misc_RNA (1)...(19): siRNA sense strand
gaacugaagauaggcaaca

SEQ ID NO: 1761120 - RNA, 19 nt, Homo sapiens
  misc_RNA (1)...(19): siRNA sense strand
gaagagugagcuaacaaag

SEQ ID NO: 1761121 - RNA, 19 nt, Homo sapiens
  misc_RNA (1)...(19): siRNA sense strand
acaguaaggugaacaucau

SEQ ID NO: 1761122 - RNA, 19 nt, Homo sapiens
  misc_RNA (1)...(19): siRNA sense strand
ggaauucaucgaugcacaa

SEQ ID NO: 1761123 - RNA, 19 nt, Homo sapiens
  misc_RNA (1)...(19): siRNA sense strand
augaugaagugaaugcuuu

SEQ ID NO: 1761124 - RNA, 19 nt, Homo sapiens
  misc_RNA (1)...(19): siRNA sense strand
gaggagaugagacagaugu

SEQ ID NO: 1761125 - RNA, 19 nt, Homo sapiens
  misc_RNA (1)...(19): siRNA sense strand
ggugaagguugccgaacug

SEQ ID NO: 1761126 - RNA, 19 nt, Homo sapiens
  misc_RNA (1)...(19): siRNA sense strand
caugucugcuuguauuuca

SEQ ID NO: 1761127 - RNA, 19 nt, Homo sapiens
  misc_RNA (1)...(19): siRNA sense strand
guucaacaccaaauucgaa

SEQ ID NO: 1761128 - RNA, 19 nt, Homo sapiens
  misc_RNA (1)...(19): siRNA sense strand
gaaguuugaccgucugaag

SEQ ID NO: 1761129 - RNA, 19 nt, Homo sapiens
  misc_RNA (1)...(19): siRNA sense strand
gaacaucauccccaucauu

SEQ ID NO: 1761130 - RNA, 19 nt, Homo sapiens
  misc_RNA (1)...(19): siRNA sense strand
ucuaucaguuuccuacaga

SEQ ID NO: 1761131 - RNA, 19 nt, Homo sapiens
  misc_RNA (1)...(19): siRNA sense strand
cgaagagugagcuaacaaa

SEQ ID NO: 1761132 - RNA, 19 nt, Homo sapiens
  misc_RNA (1)...(19): siRNA sense strand
uaauaccuaugaccuccaa

SEQ ID NO: 1761133 - RNA, 19 nt, Homo sapiens
  misc_RNA (1)...(19): siRNA sense strand
ggcuaaagcucacgaucgu

SEQ ID NO: 1761134 - RNA, 19 nt, Homo sapiens
  misc_RNA (1)...(19): siRNA sense strand
cacagaagaacugaagaua

SEQ ID NO: 1761135 - RNA, 19 nt, Homo sapiens
  misc_RNA (1)...(19): siRNA sense strand
cagaugccauuucgaagag

SEQ ID NO: 1761136 - RNA, 19 nt, Homo sapiens
  misc_RNA (1)...(19): siRNA sense strand
aagcagaugccauuucgaa

SEQ ID NO: 1761137 - RNA, 19 nt, Homo sapiens
  misc_RNA (1)...(19): siRNA sense strand
gacaguaaggugaacauca

SEQ ID NO: 1761138 - RNA, 19 nt, Homo sapiens
  misc_RNA (1)...(19): siRNA sense strand
ccugaagucucuggaccua

SEQ ID NO: 1761139 - RNA, 19 nt, Homo sapiens
  misc_RNA (1)...(19): siRNA sense strand
cuacacaccuaccaugacu

SEQ ID NO: 1761140 - RNA, 19 nt, Homo sapiens
  misc_RNA (1)...(19): siRNA sense strand
aagaagaaacuggaggaua

SEQ ID NO: 1761141 - RNA, 19 nt, Homo sapiens
  misc_RNA (1)...(19): siRNA sense strand
ucaguuuacaggagacaua

SEQ ID NO: 1761142 - RNA, 19 nt, Homo sapiens
  misc_RNA (1)...(19): siRNA sense strand
ccaaagcagaugccauuuc

SEQ ID NO: 1761143 - RNA, 19 nt, Homo sapiens
  misc_RNA (1)...(19): siRNA sense strand
caaagaggacagcuacaag

SEQ ID NO: 1761144 - RNA, 19 nt, Homo sapiens
  misc_RNA (1)...(19): siRNA sense strand
gggcaaguccacccucaug

SEQ ID NO: 1761145 - RNA, 19 nt, Homo sapiens
  misc_RNA (1)...(19): siRNA sense strand
gagcuaaagauccgaagag

SEQ ID NO: 1761146 - RNA, 19 nt, Homo sapiens
  misc_RNA (1)...(19): siRNA sense strand
gaugaugaagugaaugcuu

SEQ ID NO: 1761147 - RNA, 19 nt, Homo sapiens
  misc_RNA (1)...(19): siRNA sense strand
guuuacaggagacauauga

SEQ ID NO: 1761148 - RNA, 19 nt, Homo sapiens
  misc_RNA (1)...(19): siRNA sense strand
ccacugcgacuuugugaag

SEQ ID NO: 1761149 - RNA, 19 nt, Homo sapiens
  misc_RNA (1)...(19): siRNA sense strand
gacagcaaacccuucaguu

SEQ ID NO: 1761150 - RNA, 19 nt, Homo sapiens
  misc_RNA (1)...(19): siRNA sense strand
gagagacaaagagaagaaa

SEQ ID NO: 1761151 - RNA, 19 nt, Homo sapiens
  misc_RNA (1)...(19): siRNA sense strand
gagcugcacgagaaguuug

SEQ ID NO: 1761152 - RNA, 19 nt, Homo sapiens
  misc_RNA (1)...(19): siRNA sense strand
caaagaggcagagaaagag

SEQ ID NO: 1761153 - RNA, 19 nt, Homo sapiens
  misc_RNA (1)...(19): siRNA sense strand
acaaagaggacagcuacaa

SEQ ID NO: 1761154 - RNA, 19 nt, Homo sapiens
  misc_RNA (1)...(19): siRNA sense strand
gaagaaacuggaggauaag

SEQ ID NO: 1761155 - RNA, 19 nt, Homo sapiens
  misc_RNA (1)...(19): siRNA sense strand
aagaggagaugagacagau

SEQ ID NO: 1761156 - RNA, 19 nt, Homo sapiens
  misc_RNA (1)...(19): siRNA sense strand
ugccaaagcagaugccauu

SEQ ID NO: 1761157 - RNA, 19 nt, Homo sapiens
  misc_RNA (1)...(19): siRNA sense strand
gucauucccugaagucucu

SEQ ID NO: 1761158 - RNA, 19 nt, Homo sapiens
  misc_RNA (1)...(19): siRNA sense strand
aggccuaccugcaggaaga

SEQ ID NO: 1761159 - RNA, 19 nt, Homo sapiens
  misc_RNA (1)...(19): siRNA sense strand
gaaagagcugcacgagaag

SEQ ID NO: 1761160 - RNA, 19 nt, Homo sapiens
  misc_RNA (1)...(19): siRNA sense strand
gaagaagaaacuggaggau

SEQ ID NO: 1761161 - RNA, 19 nt, Homo sapiens
  misc_RNA (1)...(19): siRNA sense strand
aagauaggcaacaagauga

SEQ ID NO: 1761162 - RNA, 19 nt, Homo sapiens
  misc_RNA (1)...(19): siRNA sense strand
aagaagcggagcucaaaga

SEQ ID NO: 1761163 - RNA, 19 nt, Homo sapiens
  misc_RNA (1)...(19): siRNA sense strand
gggugaagguugccgaacu

SEQ ID NO: 1761164 - RNA, 19 nt, Homo sapiens
  misc_RNA (1)...(19): siRNA sense strand
agaaagaagcggagcucaa

SEQ ID NO: 1761165 - RNA, 19 nt, Homo sapiens
  misc_RNA (1)...(19): siRNA sense strand
ggagaugagacagauguuc

SEQ ID NO: 1761166 - RNA, 19 nt, Homo sapiens
  misc_RNA (1)...(19): siRNA sense strand
auccaugucugcuuguauu

SEQ ID NO: 1761167 - RNA, 19 nt, Homo sapiens
  misc_RNA (1)...(19): siRNA sense strand
agagagacaaagagaagaa

SEQ ID NO: 1761168 - RNA, 19 nt, Homo sapiens
  misc_RNA (1)...(19): siRNA sense strand
ucaacaaagaggacagcua

SEQ ID NO: 1761169 - RNA, 19 nt, Homo sapiens
  misc_RNA (1)...(19): siRNA sense strand
ugaagagagacaaagagaa

SEQ ID NO: 1761170 - RNA, 19 nt, Homo sapiens
  misc_RNA (1)...(19): siRNA sense strand
ccacgggucauucccugaa

SEQ ID NO: 1761171 - RNA, 19 nt, Homo sapiens
  misc_RNA (1)...(19): siRNA sense strand
aagaagaggagaugagaca

SEQ ID NO: 1761172 - RNA, 19 nt, Homo sapiens
  misc_RNA (1)...(19): siRNA sense strand
acagaagaacugaagauag

SEQ ID NO: 1761173 - RNA, 19 nt, Homo sapiens
  misc_RNA (1)...(19): siRNA sense strand
uaccaugacucccgaaucc

SEQ ID NO: 1761174 - RNA, 19 nt, Homo sapiens
  misc_RNA (1)...(19): siRNA sense strand
ccuggaugaugaagugaau

SEQ ID NO: 1761175 - RNA, 19 nt, Homo sapiens
  misc_RNA (1)...(19): siRNA sense strand
cacgaucguuagcacaguu

SEQ ID NO: 1761176 - RNA, 19 nt, Homo sapiens
  misc_RNA (1)...(19): siRNA sense strand
ccagcgagucaaagagaaa

SEQ ID NO: 1761177 - RNA, 19 nt, Homo sapiens
  misc_RNA (1)...(19): siRNA sense strand
uggaggagaugggcuucaa

SEQ ID NO: 1761178 - RNA, 19 nt, Homo sapiens
  misc_RNA (1)...(19): siRNA sense strand
caucauugccaaagcagau

SEQ ID NO: 1761179 - RNA, 19 nt, Homo sapiens
  misc_RNA (1)...(19): siRNA sense strand
gaagaagcuggacaguaag

SEQ ID NO: 1761180 - RNA, 19 nt, Homo sapiens
  misc_RNA (1)...(19): siRNA sense strand
ucaguuuccuacagaugau

SEQ ID NO: 1761181 - RNA, 19 nt, Homo sapiens
  misc_RNA (1)...(19): siRNA sense strand
cagcacagaagaacugaag

SEQ ID NO: 1761182 - RNA, 19 nt, Homo sapiens
  misc_RNA (1)...(19): siRNA sense strand
gcagagaucaauggaacca

SEQ ID NO: 1761183 - RNA, 19 nt, Homo sapiens
  misc_RNA (1)...(19): siRNA sense strand
ccucuaaacucaacuauga

SEQ ID NO: 1761184 - RNA, 19 nt, Homo sapiens
  misc_RNA (1)...(19): siRNA sense strand
auaaugcucugauuccuaa

SEQ ID NO: 1761185 - RNA, 19 nt, Homo sapiens
  misc_RNA (1)...(19): siRNA sense strand
guuagaagaauuccuauug

SEQ ID NO: 1761186 - RNA, 19 nt, Homo sapiens
  misc_RNA (1)...(19): siRNA sense strand
cgaaagaagaauauacuga

SEQ ID NO: 1761187 - RNA, 19 nt, Homo sapiens
  misc_RNA (1)...(19): siRNA sense strand
gguguuaaaucuacaagca

SEQ ID NO: 1761188 - RNA, 19 nt, Homo sapiens
  misc_RNA (1)...(19): siRNA sense strand
ccaaugcgcagacgaaaga

SEQ ID NO: 1761189 - RNA, 19 nt, Homo sapiens
  misc_RNA (1)...(19): siRNA sense strand
gauaaugcucugauuccua

SEQ ID NO: 1761190 - RNA, 19 nt, Homo sapiens
  misc_RNA (1)...(19): siRNA sense strand
uagaagaauuccuauugga

SEQ ID NO: 1761191 - RNA, 19 nt, Homo sapiens
  misc_RNA (1)...(19): siRNA sense strand
gcagacgaaagaagaauau

SEQ ID NO: 1761192 - RNA, 19 nt, Homo sapiens
  misc_RNA (1)...(19): siRNA sense strand
acaagcaagacauauguua

SEQ ID NO: 1761193 - RNA, 19 nt, Homo sapiens
  misc_RNA (1)...(19): siRNA sense strand
uauuggagguguuaaaucu

SEQ ID NO: 1761194 - RNA, 19 nt, Homo sapiens
  misc_RNA (1)...(19): siRNA sense strand
ggagagagaagcugaaagc

SEQ ID NO: 1761195 - RNA, 19 nt, Homo sapiens
  misc_RNA (1)...(19): siRNA sense strand
gaugauaaugcucugauuc

SEQ ID NO: 1761196 - RNA, 19 nt, Homo sapiens
  misc_RNA (1)...(19): siRNA sense strand
caagcaagacauauguuau

SEQ ID NO: 1761197 - RNA, 19 nt, Homo sapiens
  misc_RNA (1)...(19): siRNA sense strand
gacuuaaagaagcagauua

SEQ ID NO: 1761198 - RNA, 19 nt, Homo sapiens
  misc_RNA (1)...(19): siRNA sense strand
uuagaagaauuccuauugg

SEQ ID NO: 1761199 - RNA, 19 nt, Homo sapiens
  misc_RNA (1)...(19): siRNA sense strand
uaugauaccgucaccuuug

SEQ ID NO: 1761200 - RNA, 19 nt, Homo sapiens
  misc_RNA (1)...(19): siRNA sense strand
ugaugauaaugcucugauu

SEQ ID NO: 1761201 - RNA, 19 nt, Homo sapiens
  misc_RNA (1)...(19): siRNA sense strand
gaaccagcgauggcaacua

SEQ ID NO: 1761202 - RNA, 19 nt, Homo sapiens
  misc_RNA (1)...(19): siRNA sense strand
uguuauaagucgaacugaa

SEQ ID NO: 1761203 - RNA, 19 nt, Homo sapiens
  misc_RNA (1)...(19): siRNA sense strand
cuacaagcaagacauaugu

SEQ ID NO: 1761204 - RNA, 19 nt, Homo sapiens
  misc_RNA (1)...(19): siRNA sense strand
uuaaagaagcagauuaugg

SEQ ID NO: 1761205 - RNA, 19 nt, Homo sapiens
  misc_RNA (1)...(19): siRNA sense strand
aaucuacaagcaagacaua

SEQ ID NO: 1761206 - RNA, 19 nt, Homo sapiens
  misc_RNA (1)...(19): siRNA sense strand
gcaagacauauguuauaag

SEQ ID NO: 1761207 - RNA, 19 nt, Homo sapiens
  misc_RNA (1)...(19): siRNA sense strand
gacgaaagaagaauauacu

SEQ ID NO: 1761208 - RNA, 19 nt, Homo sapiens
  misc_RNA (1)...(19): siRNA sense strand
ccugugugcauuauaaauu

SEQ ID NO: 1761209 - RNA, 19 nt, Homo sapiens
  misc_RNA (1)...(19): siRNA sense strand
caucucccucugcgacuua

SEQ ID NO: 1761210 - RNA, 19 nt, Homo sapiens
  misc_RNA (1)...(19): siRNA sense strand
ucaccaaugcgcagacgaa

SEQ ID NO: 1761211 - RNA, 19 nt, Homo sapiens
  misc_RNA (1)...(19): siRNA sense strand
cgacuuaaagaagcagauu

SEQ ID NO: 1761212 - RNA, 19 nt, Homo sapiens
  misc_RNA (1)...(19): siRNA sense strand
aaccagcgauggcaacuac

SEQ ID NO: 1761213 - RNA, 19 nt, Homo sapiens
  misc_RNA (1)...(19): siRNA sense strand
augauaccgucaccuuuga

SEQ ID NO: 1761214 - RNA, 19 nt, Homo sapiens
  misc_RNA (1)...(19): siRNA sense strand
gauaccgucaccuuugaug

SEQ ID NO: 1761215 - RNA, 19 nt, Homo sapiens
  misc_RNA (1)...(19): siRNA sense strand
ggagguguuaaaucuacaa

SEQ ID NO: 1761216 - RNA, 19 nt, Homo sapiens
  misc_RNA (1)...(19): siRNA sense strand
guuauaagucgaacugaac

SEQ ID NO: 1761217 - RNA, 19 nt, Homo sapiens
  misc_RNA (1)...(19): siRNA sense strand
cagcgauggcaacuacaaa

SEQ ID NO: 1761218 - RNA, 19 nt, Homo sapiens
  misc_RNA (1)...(19): siRNA sense strand
gaccugcagaucaccaaug

SEQ ID NO: 1761219 - RNA, 19 nt, Homo sapiens
  misc_RNA (1)...(19): siRNA sense strand
agacgaaagaagaauauac

SEQ ID NO: 1761220 - RNA, 19 nt, Homo sapiens
  misc_RNA (1)...(19): siRNA sense strand
cagacgaaagaagaauaua

SEQ ID NO: 1761221 - RNA, 19 nt, Homo sapiens
  misc_RNA (1)...(19): siRNA sense strand
ccucuaaacucaacuauga

SEQ ID NO: 1761222 - RNA, 19 nt, Homo sapiens
  misc_RNA (1)...(19): siRNA sense strand
auaaugcucugauuccuaa

SEQ ID NO: 1761223 - RNA, 19 nt, Homo sapiens
  misc_RNA (1)...(19): siRNA sense strand
guuagaagaauuccuauug

SEQ ID NO: 1761224 - RNA, 19 nt, Homo sapiens
  misc_RNA (1)...(19): siRNA sense strand
cgaaagaagaauauacuga

SEQ ID NO: 1761225 - RNA, 19 nt, Homo sapiens
  misc_RNA (1)...(19): siRNA sense strand
gguguuaaaucuacaagca

SEQ ID NO: 1761226 - RNA, 19 nt, Homo sapiens
  misc_RNA (1)...(19): siRNA sense strand
ccaaugcgcagacgaaaga

SEQ ID NO: 1761227 - RNA, 19 nt, Homo sapiens
  misc_RNA (1)...(19): siRNA sense strand
gauaaugcucugauuccua

SEQ ID NO: 1761228 - RNA, 19 nt, Homo sapiens
  misc_RNA (1)...(19): siRNA sense strand
uagaagaauuccuauugga

SEQ ID NO: 1761229 - RNA, 19 nt, Homo sapiens
  misc_RNA (1)...(19): siRNA sense strand
gcagacgaaagaagaauau

SEQ ID NO: 1761230 - RNA, 19 nt, Homo sapiens
  misc_RNA (1)...(19): siRNA sense strand
acaagcaagacauauguua

SEQ ID NO: 1761231 - RNA, 19 nt, Homo sapiens
  misc_RNA (1)...(19): siRNA sense strand
uauuggagguguuaaaucu

SEQ ID NO: 1761232 - RNA, 19 nt, Homo sapiens
  misc_RNA (1)...(19): siRNA sense strand
ggagagagaagcugaaagc

SEQ ID NO: 1761233 - RNA, 19 nt, Homo sapiens
  misc_RNA (1)...(19): siRNA sense strand
gaugauaaugcucugauuc

SEQ ID NO: 1761234 - RNA, 19 nt, Homo sapiens
  misc_RNA (1)...(19): siRNA sense strand
caagcaagacauauguuau

SEQ ID NO: 1761235 - RNA, 19 nt, Homo sapiens
  misc_RNA (1)...(19): siRNA sense strand
gacuuaaagaagcagauua

SEQ ID NO: 1761236 - RNA, 19 nt, Homo sapiens
  misc_RNA (1)...(19): siRNA sense strand
uuagaagaauuccuauugg

SEQ ID NO: 1761237 - RNA, 19 nt, Homo sapiens
  misc_RNA (1)...(19): siRNA sense strand
uaugauaccgucaccuuug

SEQ ID NO: 1761238 - RNA, 19 nt, Homo sapiens
  misc_RNA (1)...(19): siRNA sense strand
ugaugauaaugcucugauu

SEQ ID NO: 1761239 - RNA, 19 nt, Homo sapiens
  misc_RNA (1)...(19): siRNA sense strand
gaaccagcgauggcaacua

SEQ ID NO: 1761240 - RNA, 19 nt, Homo sapiens
  misc_RNA (1)...(19): siRNA sense strand
uguuauaagucgaacugaa

SEQ ID NO: 1761241 - RNA, 19 nt, Homo sapiens
  misc_RNA (1)...(19): siRNA sense strand
cuacaagcaagacauaugu

SEQ ID NO: 1761242 - RNA, 19 nt, Homo sapiens
  misc_RNA (1)...(19): siRNA sense strand
uuaaagaagcagauuaugg

SEQ ID NO: 1761243 - RNA, 19 nt, Homo sapiens
  misc_RNA (1)...(19): siRNA sense strand
aaucuacaagcaagacaua

SEQ ID NO: 1761244 - RNA, 19 nt, Homo sapiens
  misc_RNA (1)...(19): siRNA sense strand
gcaagacauauguuauaag

SEQ ID NO: 1761245 - RNA, 19 nt, Homo sapiens
  misc_RNA (1)...(19): siRNA sense strand
gacgaaagaagaauauacu

SEQ ID NO: 1761246 - RNA, 19 nt, Homo sapiens
  misc_RNA (1)...(19): siRNA sense strand
ccugugugcauuauaaauu

SEQ ID NO: 1761247 - RNA, 19 nt, Homo sapiens
  misc_RNA (1)...(19): siRNA sense strand
caucucccucugcgacuua

SEQ ID NO: 1761248 - RNA, 19 nt, Homo sapiens
  misc_RNA (1)...(19): siRNA sense strand
ucaccaaugcgcagacgaa

SEQ ID NO: 1761249 - RNA, 19 nt, Homo sapiens
  misc_RNA (1)...(19): siRNA sense strand
cgacuuaaagaagcagauu

SEQ ID NO: 1761250 - RNA, 19 nt, Homo sapiens
  misc_RNA (1)...(19): siRNA sense strand
aaccagcgauggcaacuac

SEQ ID NO: 1761251 - RNA, 19 nt, Homo sapiens
  misc_RNA (1)...(19): siRNA sense strand
augauaccgucaccuuuga

SEQ ID NO: 1761252 - RNA, 19 nt, Homo sapiens
  misc_RNA (1)...(19): siRNA sense strand
gauaccgucaccuuugaug

SEQ ID NO: 1761253 - RNA, 19 nt, Homo sapiens
  misc_RNA (1)...(19): siRNA sense strand
ggagguguuaaaucuacaa

SEQ ID NO: 1761254 - RNA, 19 nt, Homo sapiens
  misc_RNA (1)...(19): siRNA sense strand
guuauaagucgaacugaac

SEQ ID NO: 1761255 - RNA, 19 nt, Homo sapiens
  misc_RNA (1)...(19): siRNA sense strand
cagcgauggcaacuacaaa

SEQ ID NO: 1761256 - RNA, 19 nt, Homo sapiens
  misc_RNA (1)...(19): siRNA sense strand
gaccugcagaucaccaaug

SEQ ID NO: 1761257 - RNA, 19 nt, Homo sapiens
  misc_RNA (1)...(19): siRNA sense strand
agacgaaagaagaauauac

SEQ ID NO: 1761258 - RNA, 19 nt, Homo sapiens
  misc_RNA (1)...(19): siRNA sense strand
cagacgaaagaagaauaua

SEQ ID NO: 1761259 - RNA, 19 nt, Homo sapiens
  misc_RNA (1)...(19): siRNA sense strand
ccucuaaacucaacuauga

SEQ ID NO: 1761260 - RNA, 19 nt, Homo sapiens
  misc_RNA (1)...(19): siRNA sense strand
auaaugcucugauuccuaa

SEQ ID NO: 1761261 - RNA, 19 nt, Homo sapiens
  misc_RNA (1)...(19): siRNA sense strand
guuagaagaauuccuauug

SEQ ID NO: 1761262 - RNA, 19 nt, Homo sapiens
  misc_RNA (1)...(19): siRNA sense strand
cgaaagaagaauauacuga

SEQ ID NO: 1761263 - RNA, 19 nt, Homo sapiens
  misc_RNA (1)...(19): siRNA sense strand
gguguuaaaucuacaagca

SEQ ID NO: 1761264 - RNA, 19 nt, Homo sapiens
  misc_RNA (1)...(19): siRNA sense strand
ccaaugcgcagacgaaaga

SEQ ID NO: 1761265 - RNA, 19 nt, Homo sapiens
  misc_RNA (1)...(19): siRNA sense strand
gauaaugcucugauuccua

SEQ ID NO: 1761266 - RNA, 19 nt, Homo sapiens
  misc_RNA (1)...(19): siRNA sense strand
uagaagaauuccuauugga

SEQ ID NO: 1761267 - RNA, 19 nt, Homo sapiens
  misc_RNA (1)...(19): siRNA sense strand
gcagacgaaagaagaauau

SEQ ID NO: 1761268 - RNA, 19 nt, Homo sapiens
  misc_RNA (1)...(19): siRNA sense strand
acaagcaagacauauguua

SEQ ID NO: 1761269 - RNA, 19 nt, Homo sapiens
  misc_RNA (1)...(19): siRNA sense strand
uauuggagguguuaaaucu

SEQ ID NO: 1761270 - RNA, 19 nt, Homo sapiens
  misc_RNA (1)...(19): siRNA sense strand
ggagagagaagcugaaagc

SEQ ID NO: 1761271 - RNA, 19 nt, Homo sapiens
  misc_RNA (1)...(19): siRNA sense strand
gaugauaaugcucugauuc

SEQ ID NO: 1761272 - RNA, 19 nt, Homo sapiens
  misc_RNA (1)...(19): siRNA sense strand
caagcaagacauauguuau

SEQ ID NO: 1761273 - RNA, 19 nt, Homo sapiens
  misc_RNA (1)...(19): siRNA sense strand
gacuuaaagaagcagauua

SEQ ID NO: 1761274 - RNA, 19 nt, Homo sapiens
  misc_RNA (1)...(19): siRNA sense strand
uuagaagaauuccuauugg

SEQ ID NO: 1761275 - RNA, 19 nt, Homo sapiens
  misc_RNA (1)...(19): siRNA sense strand
uaugauaccgucaccuuug

SEQ ID NO: 1761276 - RNA, 19 nt, Homo sapiens
  misc_RNA (1)...(19): siRNA sense strand
ugaugauaaugcucugauu

SEQ ID NO: 1761277 - RNA, 19 nt, Homo sapiens
  misc_RNA (1)...(19): siRNA sense strand
gaaccagcgauggcaacua

SEQ ID NO: 1761278 - RNA, 19 nt, Homo sapiens
  misc_RNA (1)...(19): siRNA sense strand
uguuauaagucgaacugaa

SEQ ID NO: 1761279 - RNA, 19 nt, Homo sapiens
  misc_RNA (1)...(19): siRNA sense strand
cuacaagcaagacauaugu

SEQ ID NO: 1761280 - RNA, 19 nt, Homo sapiens
  misc_RNA (1)...(19): siRNA sense strand
uuaaagaagcagauuaugg

SEQ ID NO: 1761281 - RNA, 19 nt, Homo sapiens
  misc_RNA (1)...(19): siRNA sense strand
aaucuacaagcaagacaua

SEQ ID NO: 1761282 - RNA, 19 nt, Homo sapiens
  misc_RNA (1)...(19): siRNA sense strand
gcaagacauauguuauaag

SEQ ID NO: 1761283 - RNA, 19 nt, Homo sapiens
  misc_RNA (1)...(19): siRNA sense strand
gacgaaagaagaauauacu

SEQ ID NO: 1761284 - RNA, 19 nt, Homo sapiens
  misc_RNA (1)...(19): siRNA sense strand
ccugugugcauuauaaauu

SEQ ID NO: 1761285 - RNA, 19 nt, Homo sapiens
  misc_RNA (1)...(19): siRNA sense strand
caucucccucugcgacuua

SEQ ID NO: 1761286 - RNA, 19 nt, Homo sapiens
  misc_RNA (1)...(19): siRNA sense strand
ucaccaaugcgcagacgaa

SEQ ID NO: 1761287 - RNA, 19 nt, Homo sapiens
  misc_RNA (1)...(19): siRNA sense strand
cgacuuaaagaagcagauu

SEQ ID NO: 1761288 - RNA, 19 nt, Homo sapiens
  misc_RNA (1)...(19): siRNA sense strand
aaccagcgauggcaacuac

SEQ ID NO: 1761289 - RNA, 19 nt, Homo sapiens
  misc_RNA (1)...(19): siRNA sense strand
augauaccgucaccuuuga

SEQ ID NO: 1761290 - RNA, 19 nt, Homo sapiens
  misc_RNA (1)...(19): siRNA sense strand
gauaccgucaccuuugaug

SEQ ID NO: 1761291 - RNA, 19 nt, Homo sapiens
  misc_RNA (1)...(19): siRNA sense strand
ggagguguuaaaucuacaa

SEQ ID NO: 1761292 - RNA, 19 nt, Homo sapiens
  misc_RNA (1)...(19): siRNA sense strand
guuauaagucgaacugaac

SEQ ID NO: 1761293 - RNA, 19 nt, Homo sapiens
  misc_RNA (1)...(19): siRNA sense strand
cagcgauggcaacuacaaa

SEQ ID NO: 1761294 - RNA, 19 nt, Homo sapiens
  misc_RNA (1)...(19): siRNA sense strand
gaccugcagaucaccaaug

SEQ ID NO: 1761295 - RNA, 19 nt, Homo sapiens
  misc_RNA (1)...(19): siRNA sense strand
agacgaaagaagaauauac

SEQ ID NO: 1761296 - RNA, 19 nt, Homo sapiens
  misc_RNA (1)...(19): siRNA sense strand
cagacgaaagaagaauaua

SEQ ID NO: 1761297 - RNA, 19 nt, Homo sapiens
  misc_RNA (1)...(19): siRNA sense strand
cgacaaaugugauaccuua

SEQ ID NO: 1761298 - RNA, 19 nt, Homo sapiens
  misc_RNA (1)...(19): siRNA sense strand
ggacguagaaugaaauuua

SEQ ID NO: 1761299 - RNA, 19 nt, Homo sapiens
  misc_RNA (1)...(19): siRNA sense strand
gaaaugauguacuggauga

SEQ ID NO: 1761300 - RNA, 19 nt, Homo sapiens
  misc_RNA (1)...(19): siRNA sense strand
ggaaagcacugcaaguaug

SEQ ID NO: 1761301 - RNA, 19 nt, Homo sapiens
  misc_RNA (1)...(19): siRNA sense strand
ggacacaaaugauaucugu

SEQ ID NO: 1761302 - RNA, 19 nt, Homo sapiens
  misc_RNA (1)...(19): siRNA sense strand
ggaaugcugugguagagua

SEQ ID NO: 1761303 - RNA, 19 nt, Homo sapiens
  misc_RNA (1)...(19): siRNA sense strand
gaagauaguggauugagua

SEQ ID NO: 1761304 - RNA, 19 nt, Homo sapiens
  misc_RNA (1)...(19): siRNA sense strand
ggccagcaguuucuauuua

SEQ ID NO: 1761305 - RNA, 19 nt, Homo sapiens
  misc_RNA (1)...(19): siRNA sense strand
uaaccuggcuggugacgua

SEQ ID NO: 1761306 - RNA, 19 nt, Homo sapiens
  misc_RNA (1)...(19): siRNA sense strand
gagaaaaccuucaacacua

SEQ ID NO: 1761307 - RNA, 19 nt, Homo sapiens
  misc_RNA (1)...(19): siRNA sense strand
acaagaagaugaagaggaa

SEQ ID NO: 1761308 - RNA, 19 nt, Homo sapiens
  misc_RNA (1)...(19): siRNA sense strand
cugcagagcucacgacaaa

SEQ ID NO: 1761309 - RNA, 19 nt, Homo sapiens
  misc_RNA (1)...(19): siRNA sense strand
agacggcucuggugcaaua

SEQ ID NO: 1761310 - RNA, 19 nt, Homo sapiens
  misc_RNA (1)...(19): siRNA sense strand
caguaaaggugaauucuug

SEQ ID NO: 1761311 - RNA, 19 nt, Homo sapiens
  misc_RNA (1)...(19): siRNA sense strand
ugauacugcuguucucuua

SEQ ID NO: 1761312 - RNA, 19 nt, Homo sapiens
  misc_RNA (1)...(19): siRNA sense strand
gauguacgcuauucuuuca

SEQ ID NO: 1761313 - RNA, 19 nt, Homo sapiens
  misc_RNA (1)...(19): siRNA sense strand
caacgugaauaaacaaugu

SEQ ID NO: 1761314 - RNA, 19 nt, Homo sapiens
  misc_RNA (1)...(19): siRNA sense strand
agaauuaacucaacagauc

SEQ ID NO: 1761315 - RNA, 19 nt, Homo sapiens
  misc_RNA (1)...(19): siRNA sense strand
gcagacaacagaaugguuu

SEQ ID NO: 1761316 - RNA, 19 nt, Homo sapiens
  misc_RNA (1)...(19): siRNA sense strand
ggugaauucuugcuaaaug

SEQ ID NO: 1761317 - RNA, 19 nt, Homo sapiens
  misc_RNA (1)...(19): siRNA sense strand
ugacaacuacuuagcuuua

SEQ ID NO: 1761318 - RNA, 19 nt, Homo sapiens
  misc_RNA (1)...(19): siRNA sense strand
gaacacagccuacuaucag

SEQ ID NO: 1761319 - RNA, 19 nt, Homo sapiens
  misc_RNA (1)...(19): siRNA sense strand
gccagcaguuucuauuuaa

SEQ ID NO: 1761320 - RNA, 19 nt, Homo sapiens
  misc_RNA (1)...(19): siRNA sense strand
gcaggaacauuuaauacag

SEQ ID NO: 1761321 - RNA, 19 nt, Homo sapiens
  misc_RNA (1)...(19): siRNA sense strand
uauaaagacccaaguauug

SEQ ID NO: 1761322 - RNA, 19 nt, Homo sapiens
  misc_RNA (1)...(19): siRNA sense strand
caucuacugugccaaauau

SEQ ID NO: 1761323 - RNA, 19 nt, Homo sapiens
  misc_RNA (1)...(19): siRNA sense strand
ggacaucuacugugccaaa

SEQ ID NO: 1761324 - RNA, 19 nt, Homo sapiens
  misc_RNA (1)...(19): siRNA sense strand
gaugacaacuacuuagcuu

SEQ ID NO: 1761325 - RNA, 19 nt, Homo sapiens
  misc_RNA (1)...(19): siRNA sense strand
gcacugcaaguauggauuu

SEQ ID NO: 1761326 - RNA, 19 nt, Homo sapiens
  misc_RNA (1)...(19): siRNA sense strand
aaaggugaauucuugcuaa

SEQ ID NO: 1761327 - RNA, 19 nt, Homo sapiens
  misc_RNA (1)...(19): siRNA sense strand
caagcacuguuucuacaaa

SEQ ID NO: 1761328 - RNA, 19 nt, Homo sapiens
  misc_RNA (1)...(19): siRNA sense strand
cgaggcaagugaaauuauu

SEQ ID NO: 1761329 - RNA, 19 nt, Homo sapiens
  misc_RNA (1)...(19): siRNA sense strand
acaacagaaugguuucaua

SEQ ID NO: 1761330 - RNA, 19 nt, Homo sapiens
  misc_RNA (1)...(19): siRNA sense strand
uacaaaggcuaugucaaua

SEQ ID NO: 1761331 - RNA, 19 nt, Homo sapiens
  misc_RNA (1)...(19): siRNA sense strand
ggagaagggcuauuugugu

SEQ ID NO: 1761332 - RNA, 19 nt, Homo sapiens
  misc_RNA (1)...(19): siRNA sense strand
gcagagcucacgacaaaug

SEQ ID NO: 1761333 - RNA, 19 nt, Homo sapiens
  misc_RNA (1)...(19): siRNA sense strand
aaacagacgaugacaacua

SEQ ID NO: 1761334 - RNA, 19 nt, Homo sapiens
  misc_RNA (1)...(19): siRNA sense strand
gcacauuccggucucauga

SEQ ID NO: 1761335 - RNA, 19 nt, Homo sapiens
  misc_RNA (1)...(19): siRNA sense strand
ccacgaacguccacuucaa

SEQ ID NO: 1761336 - RNA, 19 nt, Homo sapiens
  misc_RNA (1)...(19): siRNA sense strand
gauaguggauugaguacag

SEQ ID NO: 1761337 - RNA, 19 nt, Homo sapiens
  misc_RNA (1)...(19): siRNA sense strand
cuacaaaggcuaugucaau

SEQ ID NO: 1761338 - RNA, 19 nt, Homo sapiens
  misc_RNA (1)...(19): siRNA sense strand
cgauaauucuucaugcaaa

SEQ ID NO: 1761339 - RNA, 19 nt, Homo sapiens
  misc_RNA (1)...(19): siRNA sense strand
gaggcaagugaaauuauua

SEQ ID NO: 1761340 - RNA, 19 nt, Homo sapiens
  misc_RNA (1)...(19): siRNA sense strand
ucucaggugugcccauaua

SEQ ID NO: 1761341 - RNA, 19 nt, Homo sapiens
  misc_RNA (1)...(19): siRNA sense strand
gcaaaugcacacaucaaga

SEQ ID NO: 1761342 - RNA, 19 nt, Homo sapiens
  misc_RNA (1)...(19): siRNA sense strand
gaacugggaaccauuugug

SEQ ID NO: 1761343 - RNA, 19 nt, Homo sapiens
  misc_RNA (1)...(19): siRNA sense strand
caagagaaaguuaccauuc

SEQ ID NO: 1761344 - RNA, 19 nt, Homo sapiens
  misc_RNA (1)...(19): siRNA sense strand
uagagacccugagcgaaua

SEQ ID NO: 1761345 - RNA, 19 nt, Homo sapiens
  misc_RNA (1)...(19): siRNA sense strand
gaugacaacaacaaaugua

SEQ ID NO: 1761346 - RNA, 19 nt, Homo sapiens
  misc_RNA (1)...(19): siRNA sense strand
agagagcccucaacaggaa

SEQ ID NO: 1761347 - RNA, 19 nt, Homo sapiens
  misc_RNA (1)...(19): siRNA sense strand
cagggaaucugaucagcuu

SEQ ID NO: 1761348 - RNA, 19 nt, Homo sapiens
  misc_RNA (1)...(19): siRNA sense strand
ggaaacagacgaugacaac

SEQ ID NO: 1761349 - RNA, 19 nt, Homo sapiens
  misc_RNA (1)...(19): siRNA sense strand
uaaauacaguggaauucug

SEQ ID NO: 1761350 - RNA, 19 nt, Homo sapiens
  misc_RNA (1)...(19): siRNA sense strand
gagcugggccauguguuua

SEQ ID NO: 1761351 - RNA, 19 nt, Homo sapiens
  misc_RNA (1)...(19): siRNA sense strand
ggccaggacacaaaugaua

SEQ ID NO: 1761352 - RNA, 19 nt, Homo sapiens
  misc_RNA (1)...(19): siRNA sense strand
gcacacaucaagagaaagu

SEQ ID NO: 1761353 - RNA, 19 nt, Homo sapiens
  misc_RNA (1)...(19): siRNA sense strand
gaacggaaacgaaaacuug

SEQ ID NO: 1761354 - RNA, 19 nt, Homo sapiens
  misc_RNA (1)...(19): siRNA sense strand
aagagaaaguuaccauuca

SEQ ID NO: 1761355 - RNA, 19 nt, Homo sapiens
  misc_RNA (1)...(19): siRNA sense strand
gaagguugaugaugguuuu

SEQ ID NO: 1761356 - RNA, 19 nt, Homo sapiens
  misc_RNA (1)...(19): siRNA sense strand
gaaaagaggacccacagaa

SEQ ID NO: 1761357 - RNA, 19 nt, Homo sapiens
  misc_RNA (1)...(19): siRNA sense strand
gaacgcgacggagcauuaa

SEQ ID NO: 1761358 - RNA, 19 nt, Homo sapiens
  misc_RNA (1)...(19): siRNA sense strand
gagaacccuuucccacgaa

SEQ ID NO: 1761359 - RNA, 19 nt, Homo sapiens
  misc_RNA (1)...(19): siRNA sense strand
gcaagaaaauggggagaaa

SEQ ID NO: 1761360 - RNA, 19 nt, Homo sapiens
  misc_RNA (1)...(19): siRNA sense strand
acacaucaagagaaaguua

SEQ ID NO: 1761361 - RNA, 19 nt, Homo sapiens
  misc_RNA (1)...(19): siRNA sense strand
gaagggcuauuugugucaa

SEQ ID NO: 1761362 - RNA, 19 nt, Homo sapiens
  misc_RNA (1)...(19): siRNA sense strand
ggaacacagccuacuauca

SEQ ID NO: 1761363 - RNA, 19 nt, Homo sapiens
  misc_RNA (1)...(19): siRNA sense strand
gaagcuguucuauuaguga

SEQ ID NO: 1761364 - RNA, 19 nt, Homo sapiens
  misc_RNA (1)...(19): siRNA sense strand
uaaagaagaaggaguuaag

SEQ ID NO: 1761365 - RNA, 19 nt, Homo sapiens
  misc_RNA (1)...(19): siRNA sense strand
uaacucaacagaucgcauu

SEQ ID NO: 1761366 - RNA, 19 nt, Homo sapiens
  misc_RNA (1)...(19): siRNA sense strand
gaagaaaaccagagcaaga

SEQ ID NO: 1761367 - RNA, 19 nt, Homo sapiens
  misc_RNA (1)...(19): siRNA sense strand
gucaauacccgaaaugaug

SEQ ID NO: 1761368 - RNA, 19 nt, Homo sapiens
  misc_RNA (1)...(19): siRNA sense strand
agacugagaagguugauga

SEQ ID NO: 1761369 - RNA, 19 nt, Homo sapiens
  misc_RNA (1)...(19): siRNA sense strand
gacaacuacuuagcuuuau

SEQ ID NO: 1761370 - RNA, 19 nt, Homo sapiens
  misc_RNA (1)...(19): siRNA sense strand
gaaggaccggugcaaguug

SEQ ID NO: 1761371 - RNA, 19 nt, Homo sapiens
  misc_RNA (1)...(19): siRNA sense strand
guggaauucugaugaagga

SEQ ID NO: 1761372 - RNA, 19 nt, Homo sapiens
  misc_RNA (1)...(19): siRNA sense strand
caacagaccagaaccaaaa

SEQ ID NO: 1761373 - RNA, 19 nt, Homo sapiens
  misc_RNA (1)...(19): siRNA sense strand
ggaaccugcuccagaacau

SEQ ID NO: 1761374 - RNA, 19 nt, Homo sapiens
  misc_RNA (1)...(19): siRNA sense strand
guucucaggugugcccaua

SEQ ID NO: 1761375 - RNA, 19 nt, Homo sapiens
  misc_RNA (1)...(19): siRNA sense strand
uagccucuaucuauaaaga

SEQ ID NO: 1761376 - RNA, 19 nt, Homo sapiens
  misc_RNA (1)...(19): siRNA sense strand
gucuauggaugaacaagaa

SEQ ID NO: 1761377 - RNA, 19 nt, Homo sapiens
  misc_RNA (1)...(19): siRNA sense strand
agaacgcgacggagcauua

SEQ ID NO: 1761378 - RNA, 19 nt, Homo sapiens
  misc_RNA (1)...(19): siRNA sense strand
gacagcaaaugcacacauc

SEQ ID NO: 1761379 - RNA, 19 nt, Homo sapiens
  misc_RNA (1)...(19): siRNA sense strand
ggaagacugagaagguuga

SEQ ID NO: 1761380 - RNA, 19 nt, Homo sapiens
  misc_RNA (1)...(19): siRNA sense strand
guccgagacugccguagaa

SEQ ID NO: 1761381 - RNA, 19 nt, Homo sapiens
  misc_RNA (1)...(19): siRNA sense strand
ggauuuaucgcuccacugu

SEQ ID NO: 1761382 - RNA, 19 nt, Homo sapiens
  misc_RNA (1)...(19): siRNA sense strand
gcaguaaaggugaauucuu

SEQ ID NO: 1761383 - RNA, 19 nt, Homo sapiens
  misc_RNA (1)...(19): siRNA sense strand
aaauuuaaguccugcaaca

SEQ ID NO: 1761384 - RNA, 19 nt, Homo sapiens
  misc_RNA (1)...(19): siRNA sense strand
uguaggacguagaaugaaa

SEQ ID NO: 1761385 - RNA, 19 nt, Homo sapiens
  misc_RNA (1)...(19): siRNA sense strand
gcaacagaccagaaccaaa

SEQ ID NO: 1761386 - RNA, 19 nt, Homo sapiens
  misc_RNA (1)...(19): siRNA sense strand
aaacaaaccccacaucauu

SEQ ID NO: 1761387 - RNA, 19 nt, Homo sapiens
  misc_RNA (1)...(19): siRNA sense strand
aaaccaagcaaccgugaaa

SEQ ID NO: 1761388 - RNA, 19 nt, Homo sapiens
  misc_RNA (1)...(19): siRNA sense strand
cugaucagcuuacuguuuc

SEQ ID NO: 1761389 - RNA, 19 nt, Homo sapiens
  misc_RNA (1)...(19): siRNA sense strand
gcauuaacucugccacuga

SEQ ID NO: 1761390 - RNA, 19 nt, Homo sapiens
  misc_RNA (1)...(19): siRNA sense strand
uagugaagauaguggauug

SEQ ID NO: 1761391 - RNA, 19 nt, Homo sapiens
  misc_RNA (1)...(19): siRNA sense strand
cuauaaagacccaaguauu

SEQ ID NO: 1761392 - RNA, 19 nt, Homo sapiens
  misc_RNA (1)...(19): siRNA sense strand
ugacguagcagcauuaaac

SEQ ID NO: 1761393 - RNA, 19 nt, Homo sapiens
  misc_RNA (1)...(19): siRNA sense strand
caggaaggcaugcauguga

SEQ ID NO: 1761394 - RNA, 19 nt, Homo sapiens
  misc_RNA (1)...(19): siRNA sense strand
uaacaucaacggucugcuu

SEQ ID NO: 1761395 - RNA, 19 nt, Homo sapiens
  misc_RNA (1)...(19): siRNA sense strand
cagaggagaagggcuauuu

SEQ ID NO: 1761396 - RNA, 19 nt, Homo sapiens
  misc_RNA (1)...(19): siRNA sense strand
gcaagugaaauuauuagag

SEQ ID NO: 1761397 - RNA, 19 nt, Homo sapiens
  misc_RNA (1)...(19): siRNA sense strand
cgacaaaugugauaccuua

SEQ ID NO: 1761398 - RNA, 19 nt, Homo sapiens
  misc_RNA (1)...(19): siRNA sense strand
ggacguagaaugaaauuua

SEQ ID NO: 1761399 - RNA, 19 nt, Homo sapiens
  misc_RNA (1)...(19): siRNA sense strand
gaaaugauguacuggauga

SEQ ID NO: 1761400 - RNA, 19 nt, Homo sapiens
  misc_RNA (1)...(19): siRNA sense strand
ggaaagcacugcaaguaug

SEQ ID NO: 1761401 - RNA, 19 nt, Homo sapiens
  misc_RNA (1)...(19): siRNA sense strand
ggacacaaaugauaucugu

SEQ ID NO: 1761402 - RNA, 19 nt, Homo sapiens
  misc_RNA (1)...(19): siRNA sense strand
ggaaugcugugguagagua

SEQ ID NO: 1761403 - RNA, 19 nt, Homo sapiens
  misc_RNA (1)...(19): siRNA sense strand
gaagauaguggauugagua

SEQ ID NO: 1761404 - RNA, 19 nt, Homo sapiens
  misc_RNA (1)...(19): siRNA sense strand
ggccagcaguuucuauuua

SEQ ID NO: 1761405 - RNA, 19 nt, Homo sapiens
  misc_RNA (1)...(19): siRNA sense strand
uaaccuggcuggugacgua

SEQ ID NO: 1761406 - RNA, 19 nt, Homo sapiens
  misc_RNA (1)...(19): siRNA sense strand
gagaaaaccuucaacacua

SEQ ID NO: 1761407 - RNA, 19 nt, Homo sapiens
  misc_RNA (1)...(19): siRNA sense strand
acaagaagaugaagaggaa

SEQ ID NO: 1761408 - RNA, 19 nt, Homo sapiens
  misc_RNA (1)...(19): siRNA sense strand
cugcagagcucacgacaaa

SEQ ID NO: 1761409 - RNA, 19 nt, Homo sapiens
  misc_RNA (1)...(19): siRNA sense strand
agacggcucuggugcaaua

SEQ ID NO: 1761410 - RNA, 19 nt, Homo sapiens
  misc_RNA (1)...(19): siRNA sense strand
caguaaaggugaauucuug

SEQ ID NO: 1761411 - RNA, 19 nt, Homo sapiens
  misc_RNA (1)...(19): siRNA sense strand
ugauacugcuguucucuua

SEQ ID NO: 1761412 - RNA, 19 nt, Homo sapiens
  misc_RNA (1)...(19): siRNA sense strand
gauguacgcuauucuuuca

SEQ ID NO: 1761413 - RNA, 19 nt, Homo sapiens
  misc_RNA (1)...(19): siRNA sense strand
caacgugaauaaacaaugu

SEQ ID NO: 1761414 - RNA, 19 nt, Homo sapiens
  misc_RNA (1)...(19): siRNA sense strand
agaauuaacucaacagauc

SEQ ID NO: 1761415 - RNA, 19 nt, Homo sapiens
  misc_RNA (1)...(19): siRNA sense strand
gcagacaacagaaugguuu

SEQ ID NO: 1761416 - RNA, 19 nt, Homo sapiens
  misc_RNA (1)...(19): siRNA sense strand
ggugaauucuugcuaaaug

SEQ ID NO: 1761417 - RNA, 19 nt, Homo sapiens
  misc_RNA (1)...(19): siRNA sense strand
ugacaacuacuuagcuuua

SEQ ID NO: 1761418 - RNA, 19 nt, Homo sapiens
  misc_RNA (1)...(19): siRNA sense strand
gaacacagccuacuaucag

SEQ ID NO: 1761419 - RNA, 19 nt, Homo sapiens
  misc_RNA (1)...(19): siRNA sense strand
gccagcaguuucuauuuaa

SEQ ID NO: 1761420 - RNA, 19 nt, Homo sapiens
  misc_RNA (1)...(19): siRNA sense strand
gcaggaacauuuaauacag

SEQ ID NO: 1761421 - RNA, 19 nt, Homo sapiens
  misc_RNA (1)...(19): siRNA sense strand
uauaaagacccaaguauug

SEQ ID NO: 1761422 - RNA, 19 nt, Homo sapiens
  misc_RNA (1)...(19): siRNA sense strand
caucuacugugccaaauau

SEQ ID NO: 1761423 - RNA, 19 nt, Homo sapiens
  misc_RNA (1)...(19): siRNA sense strand
ggacaucuacugugccaaa

SEQ ID NO: 1761424 - RNA, 19 nt, Homo sapiens
  misc_RNA (1)...(19): siRNA sense strand
gaugacaacuacuuagcuu

SEQ ID NO: 1761425 - RNA, 19 nt, Homo sapiens
  misc_RNA (1)...(19): siRNA sense strand
gcacugcaaguauggauuu

SEQ ID NO: 1761426 - RNA, 19 nt, Homo sapiens
  misc_RNA (1)...(19): siRNA sense strand
aaaggugaauucuugcuaa

SEQ ID NO: 1761427 - RNA, 19 nt, Homo sapiens
  misc_RNA (1)...(19): siRNA sense strand
caagcacuguuucuacaaa

SEQ ID NO: 1761428 - RNA, 19 nt, Homo sapiens
  misc_RNA (1)...(19): siRNA sense strand
cgaggcaagugaaauuauu

SEQ ID NO: 1761429 - RNA, 19 nt, Homo sapiens
  misc_RNA (1)...(19): siRNA sense strand
acaacagaaugguuucaua

SEQ ID NO: 1761430 - RNA, 19 nt, Homo sapiens
  misc_RNA (1)...(19): siRNA sense strand
uacaaaggcuaugucaaua

SEQ ID NO: 1761431 - RNA, 19 nt, Homo sapiens
  misc_RNA (1)...(19): siRNA sense strand
ggagaagggcuauuugugu

SEQ ID NO: 1761432 - RNA, 19 nt, Homo sapiens
  misc_RNA (1)...(19): siRNA sense strand
gcagagcucacgacaaaug

SEQ ID NO: 1761433 - RNA, 19 nt, Homo sapiens
  misc_RNA (1)...(19): siRNA sense strand
aaacagacgaugacaacua

SEQ ID NO: 1761434 - RNA, 19 nt, Homo sapiens
  misc_RNA (1)...(19): siRNA sense strand
gcacauuccggucucauga

SEQ ID NO: 1761435 - RNA, 19 nt, Homo sapiens
  misc_RNA (1)...(19): siRNA sense strand
ccacgaacguccacuucaa

SEQ ID NO: 1761436 - RNA, 19 nt, Homo sapiens
  misc_RNA (1)...(19): siRNA sense strand
gauaguggauugaguacag

SEQ ID NO: 1761437 - RNA, 19 nt, Homo sapiens
  misc_RNA (1)...(19): siRNA sense strand
cuacaaaggcuaugucaau

SEQ ID NO: 1761438 - RNA, 19 nt, Homo sapiens
  misc_RNA (1)...(19): siRNA sense strand
cgauaauucuucaugcaaa

SEQ ID NO: 1761439 - RNA, 19 nt, Homo sapiens
  misc_RNA (1)...(19): siRNA sense strand
gaggcaagugaaauuauua

SEQ ID NO: 1761440 - RNA, 19 nt, Homo sapiens
  misc_RNA (1)...(19): siRNA sense strand
ucucaggugugcccauaua

SEQ ID NO: 1761441 - RNA, 19 nt, Homo sapiens
  misc_RNA (1)...(19): siRNA sense strand
gcaaaugcacacaucaaga

SEQ ID NO: 1761442 - RNA, 19 nt, Homo sapiens
  misc_RNA (1)...(19): siRNA sense strand
gaacugggaaccauuugug

SEQ ID NO: 1761443 - RNA, 19 nt, Homo sapiens
  misc_RNA (1)...(19): siRNA sense strand
caagagaaaguuaccauuc

SEQ ID NO: 1761444 - RNA, 19 nt, Homo sapiens
  misc_RNA (1)...(19): siRNA sense strand
uagagacccugagcgaaua

SEQ ID NO: 1761445 - RNA, 19 nt, Homo sapiens
  misc_RNA (1)...(19): siRNA sense strand
gaugacaacaacaaaugua

SEQ ID NO: 1761446 - RNA, 19 nt, Homo sapiens
  misc_RNA (1)...(19): siRNA sense strand
agagagcccucaacaggaa

SEQ ID NO: 1761447 - RNA, 19 nt, Homo sapiens
  misc_RNA (1)...(19): siRNA sense strand
cagggaaucugaucagcuu

SEQ ID NO: 1761448 - RNA, 19 nt, Homo sapiens
  misc_RNA (1)...(19): siRNA sense strand
ggaaacagacgaugacaac

SEQ ID NO: 1761449 - RNA, 19 nt, Homo sapiens
  misc_RNA (1)...(19): siRNA sense strand
uaaauacaguggaauucug

SEQ ID NO: 1761450 - RNA, 19 nt, Homo sapiens
  misc_RNA (1)...(19): siRNA sense strand
gagcugggccauguguuua

SEQ ID NO: 1761451 - RNA, 19 nt, Homo sapiens
  misc_RNA (1)...(19): siRNA sense strand
ggccaggacacaaaugaua

SEQ ID NO: 1761452 - RNA, 19 nt, Homo sapiens
  misc_RNA (1)...(19): siRNA sense strand
gcacacaucaagagaaagu

SEQ ID NO: 1761453 - RNA, 19 nt, Homo sapiens
  misc_RNA (1)...(19): siRNA sense strand
gaacggaaacgaaaacuug

SEQ ID NO: 1761454 - RNA, 19 nt, Homo sapiens
  misc_RNA (1)...(19): siRNA sense strand
aagagaaaguuaccauuca

SEQ ID NO: 1761455 - RNA, 19 nt, Homo sapiens
  misc_RNA (1)...(19): siRNA sense strand
gaagguugaugaugguuuu

SEQ ID NO: 1761456 - RNA, 19 nt, Homo sapiens
  misc_RNA (1)...(19): siRNA sense strand
gaaaagaggacccacagaa

SEQ ID NO: 1761457 - RNA, 19 nt, Homo sapiens
  misc_RNA (1)...(19): siRNA sense strand
gaacgcgacggagcauuaa

SEQ ID NO: 1761458 - RNA, 19 nt, Homo sapiens
  misc_RNA (1)...(19): siRNA sense strand
gagaacccuuucccacgaa

SEQ ID NO: 1761459 - RNA, 19 nt, Homo sapiens
  misc_RNA (1)...(19): siRNA sense strand
gcaagaaaauggggagaaa

SEQ ID NO: 1761460 - RNA, 19 nt, Homo sapiens
  misc_RNA (1)...(19): siRNA sense strand
acacaucaagagaaaguua

SEQ ID NO: 1761461 - RNA, 19 nt, Homo sapiens
  misc_RNA (1)...(19): siRNA sense strand
gaagggcuauuugugucaa

SEQ ID NO: 1761462 - RNA, 19 nt, Homo sapiens
  misc_RNA (1)...(19): siRNA sense strand
ggaacacagccuacuauca

SEQ ID NO: 1761463 - RNA, 19 nt, Homo sapiens
  misc_RNA (1)...(19): siRNA sense strand
gaagcuguucuauuaguga

SEQ ID NO: 1761464 - RNA, 19 nt, Homo sapiens
  misc_RNA (1)...(19): siRNA sense strand
uaaagaagaaggaguuaag

SEQ ID NO: 1761465 - RNA, 19 nt, Homo sapiens
  misc_RNA (1)...(19): siRNA sense strand
uaacucaacagaucgcauu

SEQ ID NO: 1761466 - RNA, 19 nt, Homo sapiens
  misc_RNA (1)...(19): siRNA sense strand
gaagaaaaccagagcaaga

SEQ ID NO: 1761467 - RNA, 19 nt, Homo sapiens
  misc_RNA (1)...(19): siRNA sense strand
gucaauacccgaaaugaug

SEQ ID NO: 1761468 - RNA, 19 nt, Homo sapiens
  misc_RNA (1)...(19): siRNA sense strand
agacugagaagguugauga

SEQ ID NO: 1761469 - RNA, 19 nt, Homo sapiens
  misc_RNA (1)...(19): siRNA sense strand
gacaacuacuuagcuuuau

SEQ ID NO: 1761470 - RNA, 19 nt, Homo sapiens
  misc_RNA (1)...(19): siRNA sense strand
gaaggaccggugcaaguug

SEQ ID NO: 1761471 - RNA, 19 nt, Homo sapiens
  misc_RNA (1)...(19): siRNA sense strand
guggaauucugaugaagga

SEQ ID NO: 1761472 - RNA, 19 nt, Homo sapiens
  misc_RNA (1)...(19): siRNA sense strand
caacagaccagaaccaaaa

SEQ ID NO: 1761473 - RNA, 19 nt, Homo sapiens
  misc_RNA (1)...(19): siRNA sense strand
ggaaccugcuccagaacau

SEQ ID NO: 1761474 - RNA, 19 nt, Homo sapiens
  misc_RNA (1)...(19): siRNA sense strand
guucucaggugugcccaua

SEQ ID NO: 1761475 - RNA, 19 nt, Homo sapiens
  misc_RNA (1)...(19): siRNA sense strand
uagccucuaucuauaaaga

SEQ ID NO: 1761476 - RNA, 19 nt, Homo sapiens
  misc_RNA (1)...(19): siRNA sense strand
gucuauggaugaacaagaa

SEQ ID NO: 1761477 - RNA, 19 nt, Homo sapiens
  misc_RNA (1)...(19): siRNA sense strand
agaacgcgacggagcauua

SEQ ID NO: 1761478 - RNA, 19 nt, Homo sapiens
  misc_RNA (1)...(19): siRNA sense strand
gacagcaaaugcacacauc

SEQ ID NO: 1761479 - RNA, 19 nt, Homo sapiens
  misc_RNA (1)...(19): siRNA sense strand
ggaagacugagaagguuga

SEQ ID NO: 1761480 - RNA, 19 nt, Homo sapiens
  misc_RNA (1)...(19): siRNA sense strand
guccgagacugccguagaa

SEQ ID NO: 1761481 - RNA, 19 nt, Homo sapiens
  misc_RNA (1)...(19): siRNA sense strand
ggauuuaucgcuccacugu

SEQ ID NO: 1761482 - RNA, 19 nt, Homo sapiens
  misc_RNA (1)...(19): siRNA sense strand
gcaguaaaggugaauucuu

SEQ ID NO: 1761483 - RNA, 19 nt, Homo sapiens
  misc_RNA (1)...(19): siRNA sense strand
aaauuuaaguccugcaaca

SEQ ID NO: 1761484 - RNA, 19 nt, Homo sapiens
  misc_RNA (1)...(19): siRNA sense strand
uguaggacguagaaugaaa

SEQ ID NO: 1761485 - RNA, 19 nt, Homo sapiens
  misc_RNA (1)...(19): siRNA sense strand
gcaacagaccagaaccaaa

SEQ ID NO: 1761486 - RNA, 19 nt, Homo sapiens
  misc_RNA (1)...(19): siRNA sense strand
aaacaaaccccacaucauu

SEQ ID NO: 1761487 - RNA, 19 nt, Homo sapiens
  misc_RNA (1)...(19): siRNA sense strand
aaaccaagcaaccgugaaa

SEQ ID NO: 1761488 - RNA, 19 nt, Homo sapiens
  misc_RNA (1)...(19): siRNA sense strand
cugaucagcuuacuguuuc

SEQ ID NO: 1761489 - RNA, 19 nt, Homo sapiens
  misc_RNA (1)...(19): siRNA sense strand
gcauuaacucugccacuga

SEQ ID NO: 1761490 - RNA, 19 nt, Homo sapiens
  misc_RNA (1)...(19): siRNA sense strand
uagugaagauaguggauug

SEQ ID NO: 1761491 - RNA, 19 nt, Homo sapiens
  misc_RNA (1)...(19): siRNA sense strand
cuauaaagacccaaguauu

SEQ ID NO: 1761492 - RNA, 19 nt, Homo sapiens
  misc_RNA (1)...(19): siRNA sense strand
ugacguagcagcauuaaac

SEQ ID NO: 1761493 - RNA, 19 nt, Homo sapiens
  misc_RNA (1)...(19): siRNA sense strand
caggaaggcaugcauguga

SEQ ID NO: 1761494 - RNA, 19 nt, Homo sapiens
  misc_RNA (1)...(19): siRNA sense strand
uaacaucaacggucugcuu

SEQ ID NO: 1761495 - RNA, 19 nt, Homo sapiens
  misc_RNA (1)...(19): siRNA sense strand
cagaggagaagggcuauuu

SEQ ID NO: 1761496 - RNA, 19 nt, Homo sapiens
  misc_RNA (1)...(19): siRNA sense strand
gcaagugaaauuauuagag

SEQ ID NO: 1761497 - RNA, 19 nt, Homo sapiens
  misc_RNA (1)...(19): siRNA sense strand
cgacaaaugugauaccuua

SEQ ID NO: 1761498 - RNA, 19 nt, Homo sapiens
  misc_RNA (1)...(19): siRNA sense strand
ggacguagaaugaaauuua

SEQ ID NO: 1761499 - RNA, 19 nt, Homo sapiens
  misc_RNA (1)...(19): siRNA sense strand
gaaaugauguacuggauga

SEQ ID NO: 1761500 - RNA, 19 nt, Homo sapiens
  misc_RNA (1)...(19): siRNA sense strand
ggaaagcacugcaaguaug

SEQ ID NO: 1761501 - RNA, 19 nt, Homo sapiens
  misc_RNA (1)...(19): siRNA sense strand
ggacacaaaugauaucugu

SEQ ID NO: 1761502 - RNA, 19 nt, Homo sapiens
  misc_RNA (1)...(19): siRNA sense strand
ggaaugcugugguagagua

SEQ ID NO: 1761503 - RNA, 19 nt, Homo sapiens
  misc_RNA (1)...(19): siRNA sense strand
gaagauaguggauugagua

SEQ ID NO: 1761504 - RNA, 19 nt, Homo sapiens
  misc_RNA (1)...(19): siRNA sense strand
ggccagcaguuucuauuua

SEQ ID NO: 1761505 - RNA, 19 nt, Homo sapiens
  misc_RNA (1)...(19): siRNA sense strand
uaaccuggcuggugacgua

SEQ ID NO: 1761506 - RNA, 19 nt, Homo sapiens
  misc_RNA (1)...(19): siRNA sense strand
gagaaaaccuucaacacua

SEQ ID NO: 1761507 - RNA, 19 nt, Homo sapiens
  misc_RNA (1)...(19): siRNA sense strand
acaagaagaugaagaggaa

SEQ ID NO: 1761508 - RNA, 19 nt, Homo sapiens
  misc_RNA (1)...(19): siRNA sense strand
cugcagagcucacgacaaa

SEQ ID NO: 1761509 - RNA, 19 nt, Homo sapiens
  misc_RNA (1)...(19): siRNA sense strand
agacggcucuggugcaaua

SEQ ID NO: 1761510 - RNA, 19 nt, Homo sapiens
  misc_RNA (1)...(19): siRNA sense strand
caguaaaggugaauucuug

SEQ ID NO: 1761511 - RNA, 19 nt, Homo sapiens
  misc_RNA (1)...(19): siRNA sense strand
ugauacugcuguucucuua

SEQ ID NO: 1761512 - RNA, 19 nt, Homo sapiens
  misc_RNA (1)...(19): siRNA sense strand
gauguacgcuauucuuuca

SEQ ID NO: 1761513 - RNA, 19 nt, Homo sapiens
  misc_RNA (1)...(19): siRNA sense strand
caacgugaauaaacaaugu

SEQ ID NO: 1761514 - RNA, 19 nt, Homo sapiens
  misc_RNA (1)...(19): siRNA sense strand
agaauuaacucaacagauc

SEQ ID NO: 1761515 - RNA, 19 nt, Homo sapiens
  misc_RNA (1)...(19): siRNA sense strand
gcagacaacagaaugguuu

SEQ ID NO: 1761516 - RNA, 19 nt, Homo sapiens
  misc_RNA (1)...(19): siRNA sense strand
ggugaauucuugcuaaaug

SEQ ID NO: 1761517 - RNA, 19 nt, Homo sapiens
  misc_RNA (1)...(19): siRNA sense strand
ugacaacuacuuagcuuua

SEQ ID NO: 1761518 - RNA, 19 nt, Homo sapiens
  misc_RNA (1)...(19): siRNA sense strand
gaacacagccuacuaucag

SEQ ID NO: 1761519 - RNA, 19 nt, Homo sapiens
  misc_RNA (1)...(19): siRNA sense strand
gccagcaguuucuauuuaa

SEQ ID NO: 1761520 - RNA, 19 nt, Homo sapiens
  misc_RNA (1)...(19): siRNA sense strand
gcaggaacauuuaauacag

SEQ ID NO: 1761521 - RNA, 19 nt, Homo sapiens
  misc_RNA (1)...(19): siRNA sense strand
uauaaagacccaaguauug

SEQ ID NO: 1761522 - RNA, 19 nt, Homo sapiens
  misc_RNA (1)...(19): siRNA sense strand
caucuacugugccaaauau

SEQ ID NO: 1761523 - RNA, 19 nt, Homo sapiens
  misc_RNA (1)...(19): siRNA sense strand
ggacaucuacugugccaaa

SEQ ID NO: 1761524 - RNA, 19 nt, Homo sapiens
  misc_RNA (1)...(19): siRNA sense strand
gaugacaacuacuuagcuu

SEQ ID NO: 1761525 - RNA, 19 nt, Homo sapiens
  misc_RNA (1)...(19): siRNA sense strand
gcacugcaaguauggauuu

SEQ ID NO: 1761526 - RNA, 19 nt, Homo sapiens
  misc_RNA (1)...(19): siRNA sense strand
aaaggugaauucuugcuaa

SEQ ID NO: 1761527 - RNA, 19 nt, Homo sapiens
  misc_RNA (1)...(19): siRNA sense strand
caagcacuguuucuacaaa

SEQ ID NO: 1761528 - RNA, 19 nt, Homo sapiens
  misc_RNA (1)...(19): siRNA sense strand
cgaggcaagugaaauuauu

SEQ ID NO: 1761529 - RNA, 19 nt, Homo sapiens
  misc_RNA (1)...(19): siRNA sense strand
acaacagaaugguuucaua

SEQ ID NO: 1761530 - RNA, 19 nt, Homo sapiens
  misc_RNA (1)...(19): siRNA sense strand
uacaaaggcuaugucaaua

SEQ ID NO: 1761531 - RNA, 19 nt, Homo sapiens
  misc_RNA (1)...(19): siRNA sense strand
ggagaagggcuauuugugu

SEQ ID NO: 1761532 - RNA, 19 nt, Homo sapiens
  misc_RNA (1)...(19): siRNA sense strand
gcagagcucacgacaaaug

SEQ ID NO: 1761533 - RNA, 19 nt, Homo sapiens
  misc_RNA (1)...(19): siRNA sense strand
aaacagacgaugacaacua

SEQ ID NO: 1761534 - RNA, 19 nt, Homo sapiens
  misc_RNA (1)...(19): siRNA sense strand
gcacauuccggucucauga

SEQ ID NO: 1761535 - RNA, 19 nt, Homo sapiens
  misc_RNA (1)...(19): siRNA sense strand
ccacgaacguccacuucaa

SEQ ID NO: 1761536 - RNA, 19 nt, Homo sapiens
  misc_RNA (1)...(19): siRNA sense strand
gauaguggauugaguacag

SEQ ID NO: 1761537 - RNA, 19 nt, Homo sapiens
  misc_RNA (1)...(19): siRNA sense strand
cuacaaaggcuaugucaau

SEQ ID NO: 1761538 - RNA, 19 nt, Homo sapiens
  misc_RNA (1)...(19): siRNA sense strand
cgauaauucuucaugcaaa

SEQ ID NO: 1761539 - RNA, 19 nt, Homo sapiens
  misc_RNA (1)...(19): siRNA sense strand
gaggcaagugaaauuauua

SEQ ID NO: 1761540 - RNA, 19 nt, Homo sapiens
  misc_RNA (1)...(19): siRNA sense strand
ucucaggugugcccauaua

SEQ ID NO: 1761541 - RNA, 19 nt, Homo sapiens
  misc_RNA (1)...(19): siRNA sense strand
gcaaaugcacacaucaaga

SEQ ID NO: 1761542 - RNA, 19 nt, Homo sapiens
  misc_RNA (1)...(19): siRNA sense strand
gaacugggaaccauuugug

SEQ ID NO: 1761543 - RNA, 19 nt, Homo sapiens
  misc_RNA (1)...(19): siRNA sense strand
caagagaaaguuaccauuc

SEQ ID NO: 1761544 - RNA, 19 nt, Homo sapiens
  misc_RNA (1)...(19): siRNA sense strand
uagagacccugagcgaaua

SEQ ID NO: 1761545 - RNA, 19 nt, Homo sapiens
  misc_RNA (1)...(19): siRNA sense strand
gaugacaacaacaaaugua

SEQ ID NO: 1761546 - RNA, 19 nt, Homo sapiens
  misc_RNA (1)...(19): siRNA sense strand
agagagcccucaacaggaa

SEQ ID NO: 1761547 - RNA, 19 nt, Homo sapiens
  misc_RNA (1)...(19): siRNA sense strand
cagggaaucugaucagcuu

SEQ ID NO: 1761548 - RNA, 19 nt, Homo sapiens
  misc_RNA (1)...(19): siRNA sense strand
ggaaacagacgaugacaac

SEQ ID NO: 1761549 - RNA, 19 nt, Homo sapiens
  misc_RNA (1)...(19): siRNA sense strand
uaaauacaguggaauucug

SEQ ID NO: 1761550 - RNA, 19 nt, Homo sapiens
  misc_RNA (1)...(19): siRNA sense strand
gagcugggccauguguuua

SEQ ID NO: 1761551 - RNA, 19 nt, Homo sapiens
  misc_RNA (1)...(19): siRNA sense strand
ggccaggacacaaaugaua

SEQ ID NO: 1761552 - RNA, 19 nt, Homo sapiens
  misc_RNA (1)...(19): siRNA sense strand
gcacacaucaagagaaagu

SEQ ID NO: 1761553 - RNA, 19 nt, Homo sapiens
  misc_RNA (1)...(19): siRNA sense strand
gaacggaaacgaaaacuug

SEQ ID NO: 1761554 - RNA, 19 nt, Homo sapiens
  misc_RNA (1)...(19): siRNA sense strand
aagagaaaguuaccauuca

SEQ ID NO: 1761555 - RNA, 19 nt, Homo sapiens
  misc_RNA (1)...(19): siRNA sense strand
gaagguugaugaugguuuu

SEQ ID NO: 1761556 - RNA, 19 nt, Homo sapiens
  misc_RNA (1)...(19): siRNA sense strand
gaaaagaggacccacagaa

SEQ ID NO: 1761557 - RNA, 19 nt, Homo sapiens
  misc_RNA (1)...(19): siRNA sense strand
gaacgcgacggagcauuaa

SEQ ID NO: 1761558 - RNA, 19 nt, Homo sapiens
  misc_RNA (1)...(19): siRNA sense strand
gagaacccuuucccacgaa

SEQ ID NO: 1761559 - RNA, 19 nt, Homo sapiens
  misc_RNA (1)...(19): siRNA sense strand
gcaagaaaauggggagaaa

SEQ ID NO: 1761560 - RNA, 19 nt, Homo sapiens
  misc_RNA (1)...(19): siRNA sense strand
acacaucaagagaaaguua

SEQ ID NO: 1761561 - RNA, 19 nt, Homo sapiens
  misc_RNA (1)...(19): siRNA sense strand
gaagggcuauuugugucaa

SEQ ID NO: 1761562 - RNA, 19 nt, Homo sapiens
  misc_RNA (1)...(19): siRNA sense strand
ggaacacagccuacuauca

SEQ ID NO: 1761563 - RNA, 19 nt, Homo sapiens
  misc_RNA (1)...(19): siRNA sense strand
gaagcuguucuauuaguga

SEQ ID NO: 1761564 - RNA, 19 nt, Homo sapiens
  misc_RNA (1)...(19): siRNA sense strand
uaaagaagaaggaguuaag

SEQ ID NO: 1761565 - RNA, 19 nt, Homo sapiens
  misc_RNA (1)...(19): siRNA sense strand
uaacucaacagaucgcauu

SEQ ID NO: 1761566 - RNA, 19 nt, Homo sapiens
  misc_RNA (1)...(19): siRNA sense strand
gaagaaaaccagagcaaga

SEQ ID NO: 1761567 - RNA, 19 nt, Homo sapiens
  misc_RNA (1)...(19): siRNA sense strand
gucaauacccgaaaugaug

SEQ ID NO: 1761568 - RNA, 19 nt, Homo sapiens
  misc_RNA (1)...(19): siRNA sense strand
agacugagaagguugauga

SEQ ID NO: 1761569 - RNA, 19 nt, Homo sapiens
  misc_RNA (1)...(19): siRNA sense strand
gacaacuacuuagcuuuau

SEQ ID NO: 1761570 - RNA, 19 nt, Homo sapiens
  misc_RNA (1)...(19): siRNA sense strand
gaaggaccggugcaaguug

SEQ ID NO: 1761571 - RNA, 19 nt, Homo sapiens
  misc_RNA (1)...(19): siRNA sense strand
guggaauucugaugaagga

SEQ ID NO: 1761572 - RNA, 19 nt, Homo sapiens
  misc_RNA (1)...(19): siRNA sense strand
caacagaccagaaccaaaa

SEQ ID NO: 1761573 - RNA, 19 nt, Homo sapiens
  misc_RNA (1)...(19): siRNA sense strand
ggaaccugcuccagaacau

SEQ ID NO: 1761574 - RNA, 19 nt, Homo sapiens
  misc_RNA (1)...(19): siRNA sense strand
guucucaggugugcccaua

SEQ ID NO: 1761575 - RNA, 19 nt, Homo sapiens
  misc_RNA (1)...(19): siRNA sense strand
uagccucuaucuauaaaga

SEQ ID NO: 1761576 - RNA, 19 nt, Homo sapiens
  misc_RNA (1)...(19): siRNA sense strand
gucuauggaugaacaagaa

SEQ ID NO: 1761577 - RNA, 19 nt, Homo sapiens
  misc_RNA (1)...(19): siRNA sense strand
agaacgcgacggagcauua

SEQ ID NO: 1761578 - RNA, 19 nt, Homo sapiens
  misc_RNA (1)...(19): siRNA sense strand
gacagcaaaugcacacauc

SEQ ID NO: 1761579 - RNA, 19 nt, Homo sapiens
  misc_RNA (1)...(19): siRNA sense strand
ggaagacugagaagguuga

SEQ ID NO: 1761580 - RNA, 19 nt, Homo sapiens
  misc_RNA (1)...(19): siRNA sense strand
guccgagacugccguagaa

SEQ ID NO: 1761581 - RNA, 19 nt, Homo sapiens
  misc_RNA (1)...(19): siRNA sense strand
ggauuuaucgcuccacugu

SEQ ID NO: 1761582 - RNA, 19 nt, Homo sapiens
  misc_RNA (1)...(19): siRNA sense strand
gcaguaaaggugaauucuu

SEQ ID NO: 1761583 - RNA, 19 nt, Homo sapiens
  misc_RNA (1)...(19): siRNA sense strand
aaauuuaaguccugcaaca

SEQ ID NO: 1761584 - RNA, 19 nt, Homo sapiens
  misc_RNA (1)...(19): siRNA sense strand
uguaggacguagaaugaaa

SEQ ID NO: 1761585 - RNA, 19 nt, Homo sapiens
  misc_RNA (1)...(19): siRNA sense strand
gcaacagaccagaaccaaa

SEQ ID NO: 1761586 - RNA, 19 nt, Homo sapiens
  misc_RNA (1)...(19): siRNA sense strand
aaacaaaccccacaucauu

SEQ ID NO: 1761587 - RNA, 19 nt, Homo sapiens
  misc_RNA (1)...(19): siRNA sense strand
aaaccaagcaaccgugaaa

SEQ ID NO: 1761588 - RNA, 19 nt, Homo sapiens
  misc_RNA (1)...(19): siRNA sense strand
cugaucagcuuacuguuuc

SEQ ID NO: 1761589 - RNA, 19 nt, Homo sapiens
  misc_RNA (1)...(19): siRNA sense strand
gcauuaacucugccacuga

SEQ ID NO: 1761590 - RNA, 19 nt, Homo sapiens
  misc_RNA (1)...(19): siRNA sense strand
uagugaagauaguggauug

SEQ ID NO: 1761591 - RNA, 19 nt, Homo sapiens
  misc_RNA (1)...(19): siRNA sense strand
cuauaaagacccaaguauu

SEQ ID NO: 1761592 - RNA, 19 nt, Homo sapiens
  misc_RNA (1)...(19): siRNA sense strand
ugacguagcagcauuaaac

SEQ ID NO: 1761593 - RNA, 19 nt, Homo sapiens
  misc_RNA (1)...(19): siRNA sense strand
caggaaggcaugcauguga

SEQ ID NO: 1761594 - RNA, 19 nt, Homo sapiens
  misc_RNA (1)...(19): siRNA sense strand
uaacaucaacggucugcuu

SEQ ID NO: 1761595 - RNA, 19 nt, Homo sapiens
  misc_RNA (1)...(19): siRNA sense strand
cagaggagaagggcuauuu

SEQ ID NO: 1761596 - RNA, 19 nt, Homo sapiens
  misc_RNA (1)...(19): siRNA sense strand
gcaagugaaauuauuagag

SEQ ID NO: 1761597 - RNA, 19 nt, Homo sapiens
  misc_RNA (1)...(19): siRNA sense strand
gagcuagccuccuaugaua

SEQ ID NO: 1761598 - RNA, 19 nt, Homo sapiens
  misc_RNA (1)...(19): siRNA sense strand
ggacuuauuugccaacgua

SEQ ID NO: 1761599 - RNA, 19 nt, Homo sapiens
  misc_RNA (1)...(19): siRNA sense strand
gcagaauccuuaccaguuu

SEQ ID NO: 1761600 - RNA, 19 nt, Homo sapiens
  misc_RNA (1)...(19): siRNA sense strand
gaacaaaguggccaucauu

SEQ ID NO: 1761601 - RNA, 19 nt, Homo sapiens
  misc_RNA (1)...(19): siRNA sense strand
ugagugaggugcagaauau

SEQ ID NO: 1761602 - RNA, 19 nt, Homo sapiens
  misc_RNA (1)...(19): siRNA sense strand
ugaagaaggugaucaaagu

SEQ ID NO: 1761603 - RNA, 19 nt, Homo sapiens
  misc_RNA (1)...(19): siRNA sense strand
gcagugggcaggaauauag

SEQ ID NO: 1761604 - RNA, 19 nt, Homo sapiens
  misc_RNA (1)...(19): siRNA sense strand
guacagcucucuggaacau

SEQ ID NO: 1761605 - RNA, 19 nt, Homo sapiens
  misc_RNA (1)...(19): siRNA sense strand
gaagaaggugaucaaaguu

SEQ ID NO: 1761606 - RNA, 19 nt, Homo sapiens
  misc_RNA (1)...(19): siRNA sense strand
gcauggagaggucugagua

SEQ ID NO: 1761607 - RNA, 19 nt, Homo sapiens
  misc_RNA (1)...(19): siRNA sense strand
ccacaaggccaacaucaug

SEQ ID NO: 1761608 - RNA, 19 nt, Homo sapiens
  misc_RNA (1)...(19): siRNA sense strand
gcagugcugugaggaaguu

SEQ ID NO: 1761609 - RNA, 19 nt, Homo sapiens
  misc_RNA (1)...(19): siRNA sense strand
ggccaucauuggaaagauu

SEQ ID NO: 1761610 - RNA, 19 nt, Homo sapiens
  misc_RNA (1)...(19): siRNA sense strand
agacaaugaucauagacaa

SEQ ID NO: 1761611 - RNA, 19 nt, Homo sapiens
  misc_RNA (1)...(19): siRNA sense strand
caaaguggccaucauugga

SEQ ID NO: 1761612 - RNA, 19 nt, Homo sapiens
  misc_RNA (1)...(19): siRNA sense strand
gcugucggcuuccaacaug

SEQ ID NO: 1761613 - RNA, 19 nt, Homo sapiens
  misc_RNA (1)...(19): siRNA sense strand
gugauugaguguuugaaga

SEQ ID NO: 1761614 - RNA, 19 nt, Homo sapiens
  misc_RNA (1)...(19): siRNA sense strand
gagcuauagugcagaauac

SEQ ID NO: 1761615 - RNA, 19 nt, Homo sapiens
  misc_RNA (1)...(19): siRNA sense strand
ugaguuccaugaaggagaa

SEQ ID NO: 1761616 - RNA, 19 nt, Homo sapiens
  misc_RNA (1)...(19): siRNA sense strand
cagaauacgcagucuuuga

SEQ ID NO: 1761617 - RNA, 19 nt, Homo sapiens
  misc_RNA (1)...(19): siRNA sense strand
caacguaguccaugugaag

SEQ ID NO: 1761618 - RNA, 19 nt, Homo sapiens
  misc_RNA (1)...(19): siRNA sense strand
acagcucucuggaacauga

SEQ ID NO: 1761619 - RNA, 19 nt, Homo sapiens
  misc_RNA (1)...(19): siRNA sense strand
gcaggaauauagccaaucc

SEQ ID NO: 1761620 - RNA, 19 nt, Homo sapiens
  misc_RNA (1)...(19): siRNA sense strand
gccaacaucaugaaacuug

SEQ ID NO: 1761621 - RNA, 19 nt, Homo sapiens
  misc_RNA (1)...(19): siRNA sense strand
gauugaguguuugaagauu

SEQ ID NO: 1761622 - RNA, 19 nt, Homo sapiens
  misc_RNA (1)...(19): siRNA sense strand
ggucacugcuguccacaag

SEQ ID NO: 1761623 - RNA, 19 nt, Homo sapiens
  misc_RNA (1)...(19): siRNA sense strand
gcaucuuaaucuugaguau

SEQ ID NO: 1761624 - RNA, 19 nt, Homo sapiens
  misc_RNA (1)...(19): siRNA sense strand
ugagagcuauagugcagaa

SEQ ID NO: 1761625 - RNA, 19 nt, Homo sapiens
  misc_RNA (1)...(19): siRNA sense strand
ggaguacagcucucuggaa

SEQ ID NO: 1761626 - RNA, 19 nt, Homo sapiens
  misc_RNA (1)...(19): siRNA sense strand
cagaugcggugaagaaggu

SEQ ID NO: 1761627 - RNA, 19 nt, Homo sapiens
  misc_RNA (1)...(19): siRNA sense strand
gggcaggaauauagccaau

SEQ ID NO: 1761628 - RNA, 19 nt, Homo sapiens
  misc_RNA (1)...(19): siRNA sense strand
cagaauccuuaccaguuug

SEQ ID NO: 1761629 - RNA, 19 nt, Homo sapiens
  misc_RNA (1)...(19): siRNA sense strand
gaacuguaccccaaaauca

SEQ ID NO: 1761630 - RNA, 19 nt, Homo sapiens
  misc_RNA (1)...(19): siRNA sense strand
gaauacgcagucuuugaga

SEQ ID NO: 1761631 - RNA, 19 nt, Homo sapiens
  misc_RNA (1)...(19): siRNA sense strand
gcuagccuccuaugauaug

SEQ ID NO: 1761632 - RNA, 19 nt, Homo sapiens
  misc_RNA (1)...(19): siRNA sense strand
caaucucuaugggaacauu

SEQ ID NO: 1761633 - RNA, 19 nt, Homo sapiens
  misc_RNA (1)...(19): siRNA sense strand
gagacaaugaucauagaca

SEQ ID NO: 1761634 - RNA, 19 nt, Homo sapiens
  misc_RNA (1)...(19): siRNA sense strand
agagcuauagugcagaaua

SEQ ID NO: 1761635 - RNA, 19 nt, Homo sapiens
  misc_RNA (1)...(19): siRNA sense strand
aaaguggccaucauuggaa

SEQ ID NO: 1761636 - RNA, 19 nt, Homo sapiens
  misc_RNA (1)...(19): siRNA sense strand
guauaugacucggcacaac

SEQ ID NO: 1761637 - RNA, 19 nt, Homo sapiens
  misc_RNA (1)...(19): siRNA sense strand
ucacuuccuggguauauga

SEQ ID NO: 1761638 - RNA, 19 nt, Homo sapiens
  misc_RNA (1)...(19): siRNA sense strand
uugagacaaugaucauaga

SEQ ID NO: 1761639 - RNA, 19 nt, Homo sapiens
  misc_RNA (1)...(19): siRNA sense strand
gcagaauacgcagucuuug

SEQ ID NO: 1761640 - RNA, 19 nt, Homo sapiens
  misc_RNA (1)...(19): siRNA sense strand
ccaacguaguccaugugaa

SEQ ID NO: 1761641 - RNA, 19 nt, Homo sapiens
  misc_RNA (1)...(19): siRNA sense strand
ugcggcaucuuaaucuuga

SEQ ID NO: 1761642 - RNA, 19 nt, Homo sapiens
  misc_RNA (1)...(19): siRNA sense strand
ugcagaauacgcagucuuu

SEQ ID NO: 1761643 - RNA, 19 nt, Homo sapiens
  misc_RNA (1)...(19): siRNA sense strand
ucuaugggaacauuauuga

SEQ ID NO: 1761644 - RNA, 19 nt, Homo sapiens
  misc_RNA (1)...(19): siRNA sense strand
agaacaaaguggccaucau

SEQ ID NO: 1761645 - RNA, 19 nt, Homo sapiens
  misc_RNA (1)...(19): siRNA sense strand
ccaugaaggagaacaaagu

SEQ ID NO: 1761646 - RNA, 19 nt, Homo sapiens
  misc_RNA (1)...(19): siRNA sense strand
gagaacaaaguggccauca

SEQ ID NO: 1761647 - RNA, 19 nt, Homo sapiens
  misc_RNA (1)...(19): siRNA sense strand
gcugcggcaucuuaaucuu

SEQ ID NO: 1761648 - RNA, 19 nt, Homo sapiens
  misc_RNA (1)...(19): siRNA sense strand
caaggccaacaucaugaaa

SEQ ID NO: 1761649 - RNA, 19 nt, Homo sapiens
  misc_RNA (1)...(19): siRNA sense strand
caaauuugagacaaugauc

SEQ ID NO: 1761650 - RNA, 19 nt, Homo sapiens
  misc_RNA (1)...(19): siRNA sense strand
aagaaggugaucaaaguug

SEQ ID NO: 1761651 - RNA, 19 nt, Homo sapiens
  misc_RNA (1)...(19): siRNA sense strand
gugaagaaggugaucaaag

SEQ ID NO: 1761652 - RNA, 19 nt, Homo sapiens
  misc_RNA (1)...(19): siRNA sense strand
ugcagaauccuuaccaguu

SEQ ID NO: 1761653 - RNA, 19 nt, Homo sapiens
  misc_RNA (1)...(19): siRNA sense strand
ugacucggcacaacaaucu

SEQ ID NO: 1761654 - RNA, 19 nt, Homo sapiens
  misc_RNA (1)...(19): siRNA sense strand
uaugggaacauuauugaca

SEQ ID NO: 1761655 - RNA, 19 nt, Homo sapiens
  misc_RNA (1)...(19): siRNA sense strand
cacaaggccaacaucauga

SEQ ID NO: 1761656 - RNA, 19 nt, Homo sapiens
  misc_RNA (1)...(19): siRNA sense strand
ggggugugauugaguguuu

SEQ ID NO: 1761657 - RNA, 19 nt, Homo sapiens
  misc_RNA (1)...(19): siRNA sense strand
ucacacgagccaagucuca

SEQ ID NO: 1761658 - RNA, 19 nt, Homo sapiens
  misc_RNA (1)...(19): siRNA sense strand
ccaguuugaugugcuugug

SEQ ID NO: 1761659 - RNA, 19 nt, Homo sapiens
  misc_RNA (1)...(19): siRNA sense strand
cguaguccaugugaaguca

SEQ ID NO: 1761660 - RNA, 19 nt, Homo sapiens
  misc_RNA (1)...(19): siRNA sense strand
caaugaucauagacaacug

SEQ ID NO: 1761661 - RNA, 19 nt, Homo sapiens
  misc_RNA (1)...(19): siRNA sense strand
cucagcggauugcaaaguu

SEQ ID NO: 1761662 - RNA, 19 nt, Homo sapiens
  misc_RNA (1)...(19): siRNA sense strand
ggugaagaaggugaucaaa

SEQ ID NO: 1761663 - RNA, 19 nt, Homo sapiens
  misc_RNA (1)...(19): siRNA sense strand
ggcagugggcaggaauaua

SEQ ID NO: 1761664 - RNA, 19 nt, Homo sapiens
  misc_RNA (1)...(19): siRNA sense strand
ggugcugaguuccaugaag

SEQ ID NO: 1761665 - RNA, 19 nt, Homo sapiens
  misc_RNA (1)...(19): siRNA sense strand
ucagcggauugcaaaguuc

SEQ ID NO: 1761666 - RNA, 19 nt, Homo sapiens
  misc_RNA (1)...(19): siRNA sense strand
caugaaggagaacaaagug

SEQ ID NO: 1761667 - RNA, 19 nt, Homo sapiens
  misc_RNA (1)...(19): siRNA sense strand
agaauacgcagucuuugag

SEQ ID NO: 1761668 - RNA, 19 nt, Homo sapiens
  misc_RNA (1)...(19): siRNA sense strand
gcugaacuguaccccaaaa

SEQ ID NO: 1761669 - RNA, 19 nt, Homo sapiens
  misc_RNA (1)...(19): siRNA sense strand
gagcuagccuccuaugaua

SEQ ID NO: 1761670 - RNA, 19 nt, Homo sapiens
  misc_RNA (1)...(19): siRNA sense strand
ggacuuauuugccaacgua

SEQ ID NO: 1761671 - RNA, 19 nt, Homo sapiens
  misc_RNA (1)...(19): siRNA sense strand
gcagaauccuuaccaguuu

SEQ ID NO: 1761672 - RNA, 19 nt, Homo sapiens
  misc_RNA (1)...(19): siRNA sense strand
gaacaaaguggccaucauu

SEQ ID NO: 1761673 - RNA, 19 nt, Homo sapiens
  misc_RNA (1)...(19): siRNA sense strand
ugagugaggugcagaauau

SEQ ID NO: 1761674 - RNA, 19 nt, Homo sapiens
  misc_RNA (1)...(19): siRNA sense strand
ugaagaaggugaucaaagu

SEQ ID NO: 1761675 - RNA, 19 nt, Homo sapiens
  misc_RNA (1)...(19): siRNA sense strand
gcagugggcaggaauauag

SEQ ID NO: 1761676 - RNA, 19 nt, Homo sapiens
  misc_RNA (1)...(19): siRNA sense strand
guacagcucucuggaacau

SEQ ID NO: 1761677 - RNA, 19 nt, Homo sapiens
  misc_RNA (1)...(19): siRNA sense strand
gaagaaggugaucaaaguu

SEQ ID NO: 1761678 - RNA, 19 nt, Homo sapiens
  misc_RNA (1)...(19): siRNA sense strand
gcauggagaggucugagua

SEQ ID NO: 1761679 - RNA, 19 nt, Homo sapiens
  misc_RNA (1)...(19): siRNA sense strand
ccacaaggccaacaucaug

SEQ ID NO: 1761680 - RNA, 19 nt, Homo sapiens
  misc_RNA (1)...(19): siRNA sense strand
gcagugcugugaggaaguu

SEQ ID NO: 1761681 - RNA, 19 nt, Homo sapiens
  misc_RNA (1)...(19): siRNA sense strand
ggccaucauuggaaagauu

SEQ ID NO: 1761682 - RNA, 19 nt, Homo sapiens
  misc_RNA (1)...(19): siRNA sense strand
agacaaugaucauagacaa

SEQ ID NO: 1761683 - RNA, 19 nt, Homo sapiens
  misc_RNA (1)...(19): siRNA sense strand
caaaguggccaucauugga

SEQ ID NO: 1761684 - RNA, 19 nt, Homo sapiens
  misc_RNA (1)...(19): siRNA sense strand
gcugucggcuuccaacaug

SEQ ID NO: 1761685 - RNA, 19 nt, Homo sapiens
  misc_RNA (1)...(19): siRNA sense strand
gugauugaguguuugaaga

SEQ ID NO: 1761686 - RNA, 19 nt, Homo sapiens
  misc_RNA (1)...(19): siRNA sense strand
gagcuauagugcagaauac

SEQ ID NO: 1761687 - RNA, 19 nt, Homo sapiens
  misc_RNA (1)...(19): siRNA sense strand
ugaguuccaugaaggagaa

SEQ ID NO: 1761688 - RNA, 19 nt, Homo sapiens
  misc_RNA (1)...(19): siRNA sense strand
cagaauacgcagucuuuga

SEQ ID NO: 1761689 - RNA, 19 nt, Homo sapiens
  misc_RNA (1)...(19): siRNA sense strand
caacguaguccaugugaag

SEQ ID NO: 1761690 - RNA, 19 nt, Homo sapiens
  misc_RNA (1)...(19): siRNA sense strand
acagcucucuggaacauga

SEQ ID NO: 1761691 - RNA, 19 nt, Homo sapiens
  misc_RNA (1)...(19): siRNA sense strand
gcaggaauauagccaaucc

SEQ ID NO: 1761692 - RNA, 19 nt, Homo sapiens
  misc_RNA (1)...(19): siRNA sense strand
gccaacaucaugaaacuug

SEQ ID NO: 1761693 - RNA, 19 nt, Homo sapiens
  misc_RNA (1)...(19): siRNA sense strand
gauugaguguuugaagauu

SEQ ID NO: 1761694 - RNA, 19 nt, Homo sapiens
  misc_RNA (1)...(19): siRNA sense strand
ggucacugcuguccacaag

SEQ ID NO: 1761695 - RNA, 19 nt, Homo sapiens
  misc_RNA (1)...(19): siRNA sense strand
gcaucuuaaucuugaguau

SEQ ID NO: 1761696 - RNA, 19 nt, Homo sapiens
  misc_RNA (1)...(19): siRNA sense strand
ugagagcuauagugcagaa

SEQ ID NO: 1761697 - RNA, 19 nt, Homo sapiens
  misc_RNA (1)...(19): siRNA sense strand
ggaguacagcucucuggaa

SEQ ID NO: 1761698 - RNA, 19 nt, Homo sapiens
  misc_RNA (1)...(19): siRNA sense strand
cagaugcggugaagaaggu

SEQ ID NO: 1761699 - RNA, 19 nt, Homo sapiens
  misc_RNA (1)...(19): siRNA sense strand
gggcaggaauauagccaau

SEQ ID NO: 1761700 - RNA, 19 nt, Homo sapiens
  misc_RNA (1)...(19): siRNA sense strand
cagaauccuuaccaguuug

SEQ ID NO: 1761701 - RNA, 19 nt, Homo sapiens
  misc_RNA (1)...(19): siRNA sense strand
gaacuguaccccaaaauca

SEQ ID NO: 1761702 - RNA, 19 nt, Homo sapiens
  misc_RNA (1)...(19): siRNA sense strand
ugacauggguggcuaugcu

SEQ ID NO: 1761703 - RNA, 19 nt, Homo sapiens
  misc_RNA (1)...(19): siRNA sense strand
gaauacgcagucuuugaga

SEQ ID NO: 1761704 - RNA, 19 nt, Homo sapiens
  misc_RNA (1)...(19): siRNA sense strand
gcuagccuccuaugauaug

SEQ ID NO: 1761705 - RNA, 19 nt, Homo sapiens
  misc_RNA (1)...(19): siRNA sense strand
caaucucuaugggaacauu

SEQ ID NO: 1761706 - RNA, 19 nt, Homo sapiens
  misc_RNA (1)...(19): siRNA sense strand
gagacaaugaucauagaca

SEQ ID NO: 1761707 - RNA, 19 nt, Homo sapiens
  misc_RNA (1)...(19): siRNA sense strand
agagcuauagugcagaaua

SEQ ID NO: 1761708 - RNA, 19 nt, Homo sapiens
  misc_RNA (1)...(19): siRNA sense strand
aaaguggccaucauuggaa

SEQ ID NO: 1761709 - RNA, 19 nt, Homo sapiens
  misc_RNA (1)...(19): siRNA sense strand
guauaugacucggcacaac

SEQ ID NO: 1761710 - RNA, 19 nt, Homo sapiens
  misc_RNA (1)...(19): siRNA sense strand
ucacuuccuggguauauga

SEQ ID NO: 1761711 - RNA, 19 nt, Homo sapiens
  misc_RNA (1)...(19): siRNA sense strand
uugagacaaugaucauaga

SEQ ID NO: 1761712 - RNA, 19 nt, Homo sapiens
  misc_RNA (1)...(19): siRNA sense strand
ucacugaggcugucauugc

SEQ ID NO: 1761713 - RNA, 19 nt, Homo sapiens
  misc_RNA (1)...(19): siRNA sense strand
gcagaauacgcagucuuug

SEQ ID NO: 1761714 - RNA, 19 nt, Homo sapiens
  misc_RNA (1)...(19): siRNA sense strand
ccaacguaguccaugugaa

SEQ ID NO: 1761715 - RNA, 19 nt, Homo sapiens
  misc_RNA (1)...(19): siRNA sense strand
gcuaugcuacuugccauga

SEQ ID NO: 1761716 - RNA, 19 nt, Homo sapiens
  misc_RNA (1)...(19): siRNA sense strand
ugcggcaucuuaaucuuga

SEQ ID NO: 1761717 - RNA, 19 nt, Homo sapiens
  misc_RNA (1)...(19): siRNA sense strand
ugcagaauacgcagucuuu

SEQ ID NO: 1761718 - RNA, 19 nt, Homo sapiens
  misc_RNA (1)...(19): siRNA sense strand
ccaugaaggagaacaaagu

SEQ ID NO: 1761719 - RNA, 19 nt, Homo sapiens
  misc_RNA (1)...(19): siRNA sense strand
ucuaugggaacauuauuga

SEQ ID NO: 1761720 - RNA, 19 nt, Homo sapiens
  misc_RNA (1)...(19): siRNA sense strand
agaacaaaguggccaucau

SEQ ID NO: 1761721 - RNA, 19 nt, Homo sapiens
  misc_RNA (1)...(19): siRNA sense strand
gagaacaaaguggccauca

SEQ ID NO: 1761722 - RNA, 19 nt, Homo sapiens
  misc_RNA (1)...(19): siRNA sense strand
gcugcggcaucuuaaucuu

SEQ ID NO: 1761723 - RNA, 19 nt, Homo sapiens
  misc_RNA (1)...(19): siRNA sense strand
caaggccaacaucaugaaa

SEQ ID NO: 1761724 - RNA, 19 nt, Homo sapiens
  misc_RNA (1)...(19): siRNA sense strand
caaauuugagacaaugauc

SEQ ID NO: 1761725 - RNA, 19 nt, Homo sapiens
  misc_RNA (1)...(19): siRNA sense strand
aagaaggugaucaaaguug

SEQ ID NO: 1761726 - RNA, 19 nt, Homo sapiens
  misc_RNA (1)...(19): siRNA sense strand
gugaagaaggugaucaaag

SEQ ID NO: 1761727 - RNA, 19 nt, Homo sapiens
  misc_RNA (1)...(19): siRNA sense strand
ugcagaauccuuaccaguu

SEQ ID NO: 1761728 - RNA, 19 nt, Homo sapiens
  misc_RNA (1)...(19): siRNA sense strand
ugacucggcacaacaaucu

SEQ ID NO: 1761729 - RNA, 19 nt, Homo sapiens
  misc_RNA (1)...(19): siRNA sense strand
gacauggguggcuaugcua

SEQ ID NO: 1761730 - RNA, 19 nt, Homo sapiens
  misc_RNA (1)...(19): siRNA sense strand
uaugggaacauuauugaca

SEQ ID NO: 1761731 - RNA, 19 nt, Homo sapiens
  misc_RNA (1)...(19): siRNA sense strand
cacaaggccaacaucauga

SEQ ID NO: 1761732 - RNA, 19 nt, Homo sapiens
  misc_RNA (1)...(19): siRNA sense strand
ggggugugauugaguguuu

SEQ ID NO: 1761733 - RNA, 19 nt, Homo sapiens
  misc_RNA (1)...(19): siRNA sense strand
ucacacgagccaagucuca

SEQ ID NO: 1761734 - RNA, 19 nt, Homo sapiens
  misc_RNA (1)...(19): siRNA sense strand
ccaguuugaugugcuugug

SEQ ID NO: 1761735 - RNA, 19 nt, Homo sapiens
  misc_RNA (1)...(19): siRNA sense strand
cguaguccaugugaaguca

SEQ ID NO: 1761736 - RNA, 19 nt, Homo sapiens
  misc_RNA (1)...(19): siRNA sense strand
caaugaucauagacaacug

SEQ ID NO: 1761737 - RNA, 19 nt, Homo sapiens
  misc_RNA (1)...(19): siRNA sense strand
cucagcggauugcaaaguu

SEQ ID NO: 1761738 - RNA, 19 nt, Homo sapiens
  misc_RNA (1)...(19): siRNA sense strand
ggugcugaguuccaugaag

SEQ ID NO: 1761739 - RNA, 19 nt, Homo sapiens
  misc_RNA (1)...(19): siRNA sense strand
ggugaagaaggugaucaaa

SEQ ID NO: 1761740 - RNA, 19 nt, Homo sapiens
  misc_RNA (1)...(19): siRNA sense strand
ggcagugggcaggaauaua

SEQ ID NO: 1761741 - RNA, 19 nt, Homo sapiens
  misc_RNA (1)...(19): siRNA sense strand
ucagcggauugcaaaguuc

SEQ ID NO: 1761742 - RNA, 19 nt, Homo sapiens
  misc_RNA (1)...(19): siRNA sense strand
caugaaggagaacaaagug

SEQ ID NO: 1761743 - RNA, 19 nt, Homo sapiens
  misc_RNA (1)...(19): siRNA sense strand
agaauacgcagucuuugag

SEQ ID NO: 1761744 - RNA, 19 nt, Homo sapiens
  misc_RNA (1)...(19): siRNA sense strand
gcugaacuguaccccaaaa

SEQ ID NO: 1761745 - RNA, 19 nt, Homo sapiens
  misc_RNA (1)...(19): siRNA sense strand
gcagaauccuuaccaguuu

SEQ ID NO: 1761746 - RNA, 19 nt, Homo sapiens
  misc_RNA (1)...(19): siRNA sense strand
ugaagaaggugaucaaagu

SEQ ID NO: 1761747 - RNA, 19 nt, Homo sapiens
  misc_RNA (1)...(19): siRNA sense strand
gcagugggcaggaauauag

SEQ ID NO: 1761748 - RNA, 19 nt, Homo sapiens
  misc_RNA (1)...(19): siRNA sense strand
gaagaaggugaucaaaguu

SEQ ID NO: 1761749 - RNA, 19 nt, Homo sapiens
  misc_RNA (1)...(19): siRNA sense strand
ccacaaggccaacaucaug

SEQ ID NO: 1761750 - RNA, 19 nt, Homo sapiens
  misc_RNA (1)...(19): siRNA sense strand
gcagugcugugaggaaguu

SEQ ID NO: 1761751 - RNA, 19 nt, Homo sapiens
  misc_RNA (1)...(19): siRNA sense strand
agacaaugaucauagacaa

SEQ ID NO: 1761752 - RNA, 19 nt, Homo sapiens
  misc_RNA (1)...(19): siRNA sense strand
gugauugaguguuugaaga

SEQ ID NO: 1761753 - RNA, 19 nt, Homo sapiens
  misc_RNA (1)...(19): siRNA sense strand
gcugucggcuuccaacaug

SEQ ID NO: 1761754 - RNA, 19 nt, Homo sapiens
  misc_RNA (1)...(19): siRNA sense strand
gagcuauagugcagaauac

SEQ ID NO: 1761755 - RNA, 19 nt, Homo sapiens
  misc_RNA (1)...(19): siRNA sense strand
cagaauacgcagucuuuga

SEQ ID NO: 1761756 - RNA, 19 nt, Homo sapiens
  misc_RNA (1)...(19): siRNA sense strand
gauugaguguuugaagauu

SEQ ID NO: 1761757 - RNA, 19 nt, Homo sapiens
  misc_RNA (1)...(19): siRNA sense strand
gcaggaauauagccaaucc

SEQ ID NO: 1761758 - RNA, 19 nt, Homo sapiens
  misc_RNA (1)...(19): siRNA sense strand
gccaacaucaugaaacuug

SEQ ID NO: 1761759 - RNA, 19 nt, Homo sapiens
  misc_RNA (1)...(19): siRNA sense strand
ggucacugcuguccacaag

SEQ ID NO: 1761760 - RNA, 19 nt, Homo sapiens
  misc_RNA (1)...(19): siRNA sense strand
gcaucuuaaucuugaguau

SEQ ID NO: 1761761 - RNA, 19 nt, Homo sapiens
  misc_RNA (1)...(19): siRNA sense strand
ugagagcuauagugcagaa

SEQ ID NO: 1761762 - RNA, 19 nt, Homo sapiens
  misc_RNA (1)...(19): siRNA sense strand
cagaugcggugaagaaggu

SEQ ID NO: 1761763 - RNA, 19 nt, Homo sapiens
  misc_RNA (1)...(19): siRNA sense strand
gggcaggaauauagccaau

SEQ ID NO: 1761764 - RNA, 19 nt, Homo sapiens
  misc_RNA (1)...(19): siRNA sense strand
cagaauccuuaccaguuug

SEQ ID NO: 1761765 - RNA, 19 nt, Homo sapiens
  misc_RNA (1)...(19): siRNA sense strand
gaacuguaccccaaaauca

SEQ ID NO: 1761766 - RNA, 19 nt, Homo sapiens
  misc_RNA (1)...(19): siRNA sense strand
gaauacgcagucuuugaga

SEQ ID NO: 1761767 - RNA, 19 nt, Homo sapiens
  misc_RNA (1)...(19): siRNA sense strand
caaucucuaugggaacauu

SEQ ID NO: 1761768 - RNA, 19 nt, Homo sapiens
  misc_RNA (1)...(19): siRNA sense strand
gagacaaugaucauagaca

SEQ ID NO: 1761769 - RNA, 19 nt, Homo sapiens
  misc_RNA (1)...(19): siRNA sense strand
agagcuauagugcagaaua

SEQ ID NO: 1761770 - RNA, 19 nt, Homo sapiens
  misc_RNA (1)...(19): siRNA sense strand
uugagacaaugaucauaga

SEQ ID NO: 1761771 - RNA, 19 nt, Homo sapiens
  misc_RNA (1)...(19): siRNA sense strand
gcagaauacgcagucuuug

SEQ ID NO: 1761772 - RNA, 19 nt, Homo sapiens
  misc_RNA (1)...(19): siRNA sense strand
ucuaugggaacauuauuga

SEQ ID NO: 1761773 - RNA, 19 nt, Homo sapiens
  misc_RNA (1)...(19): siRNA sense strand
ugcggcaucuuaaucuuga

SEQ ID NO: 1761774 - RNA, 19 nt, Homo sapiens
  misc_RNA (1)...(19): siRNA sense strand
ugcagaauacgcagucuuu

SEQ ID NO: 1761775 - RNA, 19 nt, Homo sapiens
  misc_RNA (1)...(19): siRNA sense strand
caaggccaacaucaugaaa

SEQ ID NO: 1761776 - RNA, 19 nt, Homo sapiens
  misc_RNA (1)...(19): siRNA sense strand
gcugcggcaucuuaaucuu

SEQ ID NO: 1761777 - RNA, 19 nt, Homo sapiens
  misc_RNA (1)...(19): siRNA sense strand
caaauuugagacaaugauc

SEQ ID NO: 1761778 - RNA, 19 nt, Homo sapiens
  misc_RNA (1)...(19): siRNA sense strand
aagaaggugaucaaaguug

SEQ ID NO: 1761779 - RNA, 19 nt, Homo sapiens
  misc_RNA (1)...(19): siRNA sense strand
gugaagaaggugaucaaag

SEQ ID NO: 1761780 - RNA, 19 nt, Homo sapiens
  misc_RNA (1)...(19): siRNA sense strand
ugcagaauccuuaccaguu

SEQ ID NO: 1761781 - RNA, 19 nt, Homo sapiens
  misc_RNA (1)...(19): siRNA sense strand
cacaaggccaacaucauga

SEQ ID NO: 1761782 - RNA, 19 nt, Homo sapiens
  misc_RNA (1)...(19): siRNA sense strand
ggggugugauugaguguuu

SEQ ID NO: 1761783 - RNA, 19 nt, Homo sapiens
  misc_RNA (1)...(19): siRNA sense strand
uaugggaacauuauugaca

SEQ ID NO: 1761784 - RNA, 19 nt, Homo sapiens
  misc_RNA (1)...(19): siRNA sense strand
ucacacgagccaagucuca

SEQ ID NO: 1761785 - RNA, 19 nt, Homo sapiens
  misc_RNA (1)...(19): siRNA sense strand
ccaguuugaugugcuugug

SEQ ID NO: 1761786 - RNA, 19 nt, Homo sapiens
  misc_RNA (1)...(19): siRNA sense strand
caaugaucauagacaacug

SEQ ID NO: 1761787 - RNA, 19 nt, Homo sapiens
  misc_RNA (1)...(19): siRNA sense strand
ucagcggauugcaaaguuc

SEQ ID NO: 1761788 - RNA, 19 nt, Homo sapiens
  misc_RNA (1)...(19): siRNA sense strand
cucagcggauugcaaaguu

SEQ ID NO: 1761789 - RNA, 19 nt, Homo sapiens
  misc_RNA (1)...(19): siRNA sense strand
ggugaagaaggugaucaaa

SEQ ID NO: 1761790 - RNA, 19 nt, Homo sapiens
  misc_RNA (1)...(19): siRNA sense strand
ggcagugggcaggaauaua

SEQ ID NO: 1761791 - RNA, 19 nt, Homo sapiens
  misc_RNA (1)...(19): siRNA sense strand
agaauacgcagucuuugag

SEQ ID NO: 1761792 - RNA, 19 nt, Homo sapiens
  misc_RNA (1)...(19): siRNA sense strand
gcugaacuguaccccaaaa

SEQ ID NO: 1761793 - RNA, 19 nt, Homo sapiens
  misc_RNA (1)...(19): siRNA sense strand
gagcuagccuccuaugaua

SEQ ID NO: 1761794 - RNA, 19 nt, Homo sapiens
  misc_RNA (1)...(19): siRNA sense strand
ggacuuauuugccaacgua

SEQ ID NO: 1761795 - RNA, 19 nt, Homo sapiens
  misc_RNA (1)...(19): siRNA sense strand
gcagaauccuuaccaguuu

SEQ ID NO: 1761796 - RNA, 19 nt, Homo sapiens
  misc_RNA (1)...(19): siRNA sense strand
gaacaaaguggccaucauu

SEQ ID NO: 1761797 - RNA, 19 nt, Homo sapiens
  misc_RNA (1)...(19): siRNA sense strand
ugagugaggugcagaauau

SEQ ID NO: 1761798 - RNA, 19 nt, Homo sapiens
  misc_RNA (1)...(19): siRNA sense strand
ugaagaaggugaucaaagu

SEQ ID NO: 1761799 - RNA, 19 nt, Homo sapiens
  misc_RNA (1)...(19): siRNA sense strand
gcagugggcaggaauauag

SEQ ID NO: 1761800 - RNA, 19 nt, Homo sapiens
  misc_RNA (1)...(19): siRNA sense strand
guacagcucucuggaacau

SEQ ID NO: 1761801 - RNA, 19 nt, Homo sapiens
  misc_RNA (1)...(19): siRNA sense strand
gaagaaggugaucaaaguu

SEQ ID NO: 1761802 - RNA, 19 nt, Homo sapiens
  misc_RNA (1)...(19): siRNA sense strand
gcauggagaggucugagua

SEQ ID NO: 1761803 - RNA, 19 nt, Homo sapiens
  misc_RNA (1)...(19): siRNA sense strand
ccacaaggccaacaucaug

SEQ ID NO: 1761804 - RNA, 19 nt, Homo sapiens
  misc_RNA (1)...(19): siRNA sense strand
gcagugcugugaggaaguu

SEQ ID NO: 1761805 - RNA, 19 nt, Homo sapiens
  misc_RNA (1)...(19): siRNA sense strand
ggccaucauuggaaagauu

SEQ ID NO: 1761806 - RNA, 19 nt, Homo sapiens
  misc_RNA (1)...(19): siRNA sense strand
agacaaugaucauagacaa

SEQ ID NO: 1761807 - RNA, 19 nt, Homo sapiens
  misc_RNA (1)...(19): siRNA sense strand
caaaguggccaucauugga

SEQ ID NO: 1761808 - RNA, 19 nt, Homo sapiens
  misc_RNA (1)...(19): siRNA sense strand
gcugucggcuuccaacaug

SEQ ID NO: 1761809 - RNA, 19 nt, Homo sapiens
  misc_RNA (1)...(19): siRNA sense strand
gugauugaguguuugaaga

SEQ ID NO: 1761810 - RNA, 19 nt, Homo sapiens
  misc_RNA (1)...(19): siRNA sense strand
gagcuauagugcagaauac

SEQ ID NO: 1761811 - RNA, 19 nt, Homo sapiens
  misc_RNA (1)...(19): siRNA sense strand
ugaguuccaugaaggagaa

SEQ ID NO: 1761812 - RNA, 19 nt, Homo sapiens
  misc_RNA (1)...(19): siRNA sense strand
cagaauacgcagucuuuga

SEQ ID NO: 1761813 - RNA, 19 nt, Homo sapiens
  misc_RNA (1)...(19): siRNA sense strand
caacguaguccaugugaag

SEQ ID NO: 1761814 - RNA, 19 nt, Homo sapiens
  misc_RNA (1)...(19): siRNA sense strand
acagcucucuggaacauga

SEQ ID NO: 1761815 - RNA, 19 nt, Homo sapiens
  misc_RNA (1)...(19): siRNA sense strand
gcaggaauauagccaaucc

SEQ ID NO: 1761816 - RNA, 19 nt, Homo sapiens
  misc_RNA (1)...(19): siRNA sense strand
gccaacaucaugaaacuug

SEQ ID NO: 1761817 - RNA, 19 nt, Homo sapiens
  misc_RNA (1)...(19): siRNA sense strand
gauugaguguuugaagauu

SEQ ID NO: 1761818 - RNA, 19 nt, Homo sapiens
  misc_RNA (1)...(19): siRNA sense strand
ggucacugcuguccacaag

SEQ ID NO: 1761819 - RNA, 19 nt, Homo sapiens
  misc_RNA (1)...(19): siRNA sense strand
gcaucuuaaucuugaguau

SEQ ID NO: 1761820 - RNA, 19 nt, Homo sapiens
  misc_RNA (1)...(19): siRNA sense strand
ugagagcuauagugcagaa

SEQ ID NO: 1761821 - RNA, 19 nt, Homo sapiens
  misc_RNA (1)...(19): siRNA sense strand
ggaguacagcucucuggaa

SEQ ID NO: 1761822 - RNA, 19 nt, Homo sapiens
  misc_RNA (1)...(19): siRNA sense strand
cagaugcggugaagaaggu

SEQ ID NO: 1761823 - RNA, 19 nt, Homo sapiens
  misc_RNA (1)...(19): siRNA sense strand
gggcaggaauauagccaau

SEQ ID NO: 1761824 - RNA, 19 nt, Homo sapiens
  misc_RNA (1)...(19): siRNA sense strand
cagaauccuuaccaguuug

SEQ ID NO: 1761825 - RNA, 19 nt, Homo sapiens
  misc_RNA (1)...(19): siRNA sense strand
gaacuguaccccaaaauca

SEQ ID NO: 1761826 - RNA, 19 nt, Homo sapiens
  misc_RNA (1)...(19): siRNA sense strand
gaauacgcagucuuugaga

SEQ ID NO: 1761827 - RNA, 19 nt, Homo sapiens
  misc_RNA (1)...(19): siRNA sense strand
gcuagccuccuaugauaug

SEQ ID NO: 1761828 - RNA, 19 nt, Homo sapiens
  misc_RNA (1)...(19): siRNA sense strand
caaucucuaugggaacauu

SEQ ID NO: 1761829 - RNA, 19 nt, Homo sapiens
  misc_RNA (1)...(19): siRNA sense strand
gagacaaugaucauagaca

SEQ ID NO: 1761830 - RNA, 19 nt, Homo sapiens
  misc_RNA (1)...(19): siRNA sense strand
agagcuauagugcagaaua

SEQ ID NO: 1761831 - RNA, 19 nt, Homo sapiens
  misc_RNA (1)...(19): siRNA sense strand
aaaguggccaucauuggaa

SEQ ID NO: 1761832 - RNA, 19 nt, Homo sapiens
  misc_RNA (1)...(19): siRNA sense strand
guauaugacucggcacaac

SEQ ID NO: 1761833 - RNA, 19 nt, Homo sapiens
  misc_RNA (1)...(19): siRNA sense strand
ucacuuccuggguauauga

SEQ ID NO: 1761834 - RNA, 19 nt, Homo sapiens
  misc_RNA (1)...(19): siRNA sense strand
uugagacaaugaucauaga

SEQ ID NO: 1761835 - RNA, 19 nt, Homo sapiens
  misc_RNA (1)...(19): siRNA sense strand
gcagaauacgcagucuuug

SEQ ID NO: 1761836 - RNA, 19 nt, Homo sapiens
  misc_RNA (1)...(19): siRNA sense strand
ccaacguaguccaugugaa

SEQ ID NO: 1761837 - RNA, 19 nt, Homo sapiens
  misc_RNA (1)...(19): siRNA sense strand
ugcggcaucuuaaucuuga

SEQ ID NO: 1761838 - RNA, 19 nt, Homo sapiens
  misc_RNA (1)...(19): siRNA sense strand
ugcagaauacgcagucuuu

SEQ ID NO: 1761839 - RNA, 19 nt, Homo sapiens
  misc_RNA (1)...(19): siRNA sense strand
ucuaugggaacauuauuga

SEQ ID NO: 1761840 - RNA, 19 nt, Homo sapiens
  misc_RNA (1)...(19): siRNA sense strand
agaacaaaguggccaucau

SEQ ID NO: 1761841 - RNA, 19 nt, Homo sapiens
  misc_RNA (1)...(19): siRNA sense strand
ccaugaaggagaacaaagu

SEQ ID NO: 1761842 - RNA, 19 nt, Homo sapiens
  misc_RNA (1)...(19): siRNA sense strand
gagaacaaaguggccauca

SEQ ID NO: 1761843 - RNA, 19 nt, Homo sapiens
  misc_RNA (1)...(19): siRNA sense strand
gcugcggcaucuuaaucuu

SEQ ID NO: 1761844 - RNA, 19 nt, Homo sapiens
  misc_RNA (1)...(19): siRNA sense strand
caaggccaacaucaugaaa

SEQ ID NO: 1761845 - RNA, 19 nt, Homo sapiens
  misc_RNA (1)...(19): siRNA sense strand
caaauuugagacaaugauc

SEQ ID NO: 1761846 - RNA, 19 nt, Homo sapiens
  misc_RNA (1)...(19): siRNA sense strand
aagaaggugaucaaaguug

SEQ ID NO: 1761847 - RNA, 19 nt, Homo sapiens
  misc_RNA (1)...(19): siRNA sense strand
gugaagaaggugaucaaag

SEQ ID NO: 1761848 - RNA, 19 nt, Homo sapiens
  misc_RNA (1)...(19): siRNA sense strand
ugcagaauccuuaccaguu

SEQ ID NO: 1761849 - RNA, 19 nt, Homo sapiens
  misc_RNA (1)...(19): siRNA sense strand
ugacucggcacaacaaucu

SEQ ID NO: 1761850 - RNA, 19 nt, Homo sapiens
  misc_RNA (1)...(19): siRNA sense strand
uaugggaacauuauugaca

SEQ ID NO: 1761851 - RNA, 19 nt, Homo sapiens
  misc_RNA (1)...(19): siRNA sense strand
cacaaggccaacaucauga

SEQ ID NO: 1761852 - RNA, 19 nt, Homo sapiens
  misc_RNA (1)...(19): siRNA sense strand
ggggugugauugaguguuu

SEQ ID NO: 1761853 - RNA, 19 nt, Homo sapiens
  misc_RNA (1)...(19): siRNA sense strand
ucacacgagccaagucuca

SEQ ID NO: 1761854 - RNA, 19 nt, Homo sapiens
  misc_RNA (1)...(19): siRNA sense strand
ccaguuugaugugcuugug

SEQ ID NO: 1761855 - RNA, 19 nt, Homo sapiens
  misc_RNA (1)...(19): siRNA sense strand
cguaguccaugugaaguca

SEQ ID NO: 1761856 - RNA, 19 nt, Homo sapiens
  misc_RNA (1)...(19): siRNA sense strand
caaugaucauagacaacug

SEQ ID NO: 1761857 - RNA, 19 nt, Homo sapiens
  misc_RNA (1)...(19): siRNA sense strand
cucagcggauugcaaaguu

SEQ ID NO: 1761858 - RNA, 19 nt, Homo sapiens
  misc_RNA (1)...(19): siRNA sense strand
ggugaagaaggugaucaaa

SEQ ID NO: 1761859 - RNA, 19 nt, Homo sapiens
  misc_RNA (1)...(19): siRNA sense strand
ggcagugggcaggaauaua

SEQ ID NO: 1761860 - RNA, 19 nt, Homo sapiens
  misc_RNA (1)...(19): siRNA sense strand
ggugcugaguuccaugaag

SEQ ID NO: 1761861 - RNA, 19 nt, Homo sapiens
  misc_RNA (1)...(19): siRNA sense strand
ucagcggauugcaaaguuc

SEQ ID NO: 1761862 - RNA, 19 nt, Homo sapiens
  misc_RNA (1)...(19): siRNA sense strand
caugaaggagaacaaagug

SEQ ID NO: 1761863 - RNA, 19 nt, Homo sapiens
  misc_RNA (1)...(19): siRNA sense strand
agaauacgcagucuuugag

SEQ ID NO: 1761864 - RNA, 19 nt, Homo sapiens
  misc_RNA (1)...(19): siRNA sense strand
gcugaacuguaccccaaaa

SEQ ID NO: 1761865 - RNA, 19 nt, Homo sapiens
  misc_RNA (1)...(19): siRNA sense strand
gagcuagccuccuaugaua

SEQ ID NO: 1761866 - RNA, 19 nt, Homo sapiens
  misc_RNA (1)...(19): siRNA sense strand
ggacuuauuugccaacgua

SEQ ID NO: 1761867 - RNA, 19 nt, Homo sapiens
  misc_RNA (1)...(19): siRNA sense strand
gcagaauccuuaccaguuu

SEQ ID NO: 1761868 - RNA, 19 nt, Homo sapiens
  misc_RNA (1)...(19): siRNA sense strand
gaacaaaguggccaucauu

SEQ ID NO: 1761869 - RNA, 19 nt, Homo sapiens
  misc_RNA (1)...(19): siRNA sense strand
ugagugaggugcagaauau

SEQ ID NO: 1761870 - RNA, 19 nt, Homo sapiens
  misc_RNA (1)...(19): siRNA sense strand
ugaagaaggugaucaaagu

SEQ ID NO: 1761871 - RNA, 19 nt, Homo sapiens
  misc_RNA (1)...(19): siRNA sense strand
gcagugggcaggaauauag

SEQ ID NO: 1761872 - RNA, 19 nt, Homo sapiens
  misc_RNA (1)...(19): siRNA sense strand
guacagcucucuggaacau

SEQ ID NO: 1761873 - RNA, 19 nt, Homo sapiens
  misc_RNA (1)...(19): siRNA sense strand
gaagaaggugaucaaaguu

SEQ ID NO: 1761874 - RNA, 19 nt, Homo sapiens
  misc_RNA (1)...(19): siRNA sense strand
gcauggagaggucugagua

SEQ ID NO: 1761875 - RNA, 19 nt, Homo sapiens
  misc_RNA (1)...(19): siRNA sense strand
ccacaaggccaacaucaug

SEQ ID NO: 1761876 - RNA, 19 nt, Homo sapiens
  misc_RNA (1)...(19): siRNA sense strand
gcagugcugugaggaaguu

SEQ ID NO: 1761877 - RNA, 19 nt, Homo sapiens
  misc_RNA (1)...(19): siRNA sense strand
ggccaucauuggaaagauu

SEQ ID NO: 1761878 - RNA, 19 nt, Homo sapiens
  misc_RNA (1)...(19): siRNA sense strand
agacaaugaucauagacaa

SEQ ID NO: 1761879 - RNA, 19 nt, Homo sapiens
  misc_RNA (1)...(19): siRNA sense strand
caaaguggccaucauugga

SEQ ID NO: 1761880 - RNA, 19 nt, Homo sapiens
  misc_RNA (1)...(19): siRNA sense strand
gcugucggcuuccaacaug

SEQ ID NO: 1761881 - RNA, 19 nt, Homo sapiens
  misc_RNA (1)...(19): siRNA sense strand
gugauugaguguuugaaga

SEQ ID NO: 1761882 - RNA, 19 nt, Homo sapiens
  misc_RNA (1)...(19): siRNA sense strand
gagcuauagugcagaauac

SEQ ID NO: 1761883 - RNA, 19 nt, Homo sapiens
  misc_RNA (1)...(19): siRNA sense strand
ugaguuccaugaaggagaa

SEQ ID NO: 1761884 - RNA, 19 nt, Homo sapiens
  misc_RNA (1)...(19): siRNA sense strand
cagaauacgcagucuuuga

SEQ ID NO: 1761885 - RNA, 19 nt, Homo sapiens
  misc_RNA (1)...(19): siRNA sense strand
caacguaguccaugugaag

SEQ ID NO: 1761886 - RNA, 19 nt, Homo sapiens
  misc_RNA (1)...(19): siRNA sense strand
acagcucucuggaacauga

SEQ ID NO: 1761887 - RNA, 19 nt, Homo sapiens
  misc_RNA (1)...(19): siRNA sense strand
gcaggaauauagccaaucc

SEQ ID NO: 1761888 - RNA, 19 nt, Homo sapiens
  misc_RNA (1)...(19): siRNA sense strand
gccaacaucaugaaacuug

SEQ ID NO: 1761889 - RNA, 19 nt, Homo sapiens
  misc_RNA (1)...(19): siRNA sense strand
gauugaguguuugaagauu

SEQ ID NO: 1761890 - RNA, 19 nt, Homo sapiens
  misc_RNA (1)...(19): siRNA sense strand
ggucacugcuguccacaag

SEQ ID NO: 1761891 - RNA, 19 nt, Homo sapiens
  misc_RNA (1)...(19): siRNA sense strand
gcaucuuaaucuugaguau

SEQ ID NO: 1761892 - RNA, 19 nt, Homo sapiens
  misc_RNA (1)...(19): siRNA sense strand
ugagagcuauagugcagaa

SEQ ID NO: 1761893 - RNA, 19 nt, Homo sapiens
  misc_RNA (1)...(19): siRNA sense strand
ggaguacagcucucuggaa

SEQ ID NO: 1761894 - RNA, 19 nt, Homo sapiens
  misc_RNA (1)...(19): siRNA sense strand
cagaugcggugaagaaggu

SEQ ID NO: 1761895 - RNA, 19 nt, Homo sapiens
  misc_RNA (1)...(19): siRNA sense strand
gggcaggaauauagccaau

SEQ ID NO: 1761896 - RNA, 19 nt, Homo sapiens
  misc_RNA (1)...(19): siRNA sense strand
cagaauccuuaccaguuug

SEQ ID NO: 1761897 - RNA, 19 nt, Homo sapiens
  misc_RNA (1)...(19): siRNA sense strand
gaacuguaccccaaaauca

SEQ ID NO: 1761898 - RNA, 19 nt, Homo sapiens
  misc_RNA (1)...(19): siRNA sense strand
ugacauggguggcuaugcu

SEQ ID NO: 1761899 - RNA, 19 nt, Homo sapiens
  misc_RNA (1)...(19): siRNA sense strand
gaauacgcagucuuugaga

SEQ ID NO: 1761900 - RNA, 19 nt, Homo sapiens
  misc_RNA (1)...(19): siRNA sense strand
gcuagccuccuaugauaug

SEQ ID NO: 1761901 - RNA, 19 nt, Homo sapiens
  misc_RNA (1)...(19): siRNA sense strand
caaucucuaugggaacauu

SEQ ID NO: 1761902 - RNA, 19 nt, Homo sapiens
  misc_RNA (1)...(19): siRNA sense strand
gagacaaugaucauagaca

SEQ ID NO: 1761903 - RNA, 19 nt, Homo sapiens
  misc_RNA (1)...(19): siRNA sense strand
agagcuauagugcagaaua

SEQ ID NO: 1761904 - RNA, 19 nt, Homo sapiens
  misc_RNA (1)...(19): siRNA sense strand
aaaguggccaucauuggaa

SEQ ID NO: 1761905 - RNA, 19 nt, Homo sapiens
  misc_RNA (1)...(19): siRNA sense strand
guauaugacucggcacaac

SEQ ID NO: 1761906 - RNA, 19 nt, Homo sapiens
  misc_RNA (1)...(19): siRNA sense strand
ucacuuccuggguauauga

SEQ ID NO: 1761907 - RNA, 19 nt, Homo sapiens
  misc_RNA (1)...(19): siRNA sense strand
uugagacaaugaucauaga

SEQ ID NO: 1761908 - RNA, 19 nt, Homo sapiens
  misc_RNA (1)...(19): siRNA sense strand
ucacugaggcugucauugc

SEQ ID NO: 1761909 - RNA, 19 nt, Homo sapiens
  misc_RNA (1)...(19): siRNA sense strand
gcagaauacgcagucuuug

SEQ ID NO: 1761910 - RNA, 19 nt, Homo sapiens
  misc_RNA (1)...(19): siRNA sense strand
ccaacguaguccaugugaa

SEQ ID NO: 1761911 - RNA, 19 nt, Homo sapiens
  misc_RNA (1)...(19): siRNA sense strand
gcuaugcuacuugccauga

SEQ ID NO: 1761912 - RNA, 19 nt, Homo sapiens
  misc_RNA (1)...(19): siRNA sense strand
ugcggcaucuuaaucuuga

SEQ ID NO: 1761913 - RNA, 19 nt, Homo sapiens
  misc_RNA (1)...(19): siRNA sense strand
ugcagaauacgcagucuuu

SEQ ID NO: 1761914 - RNA, 19 nt, Homo sapiens
  misc_RNA (1)...(19): siRNA sense strand
ccaugaaggagaacaaagu

SEQ ID NO: 1761915 - RNA, 19 nt, Homo sapiens
  misc_RNA (1)...(19): siRNA sense strand
ucuaugggaacauuauuga

SEQ ID NO: 1761916 - RNA, 19 nt, Homo sapiens
  misc_RNA (1)...(19): siRNA sense strand
agaacaaaguggccaucau

SEQ ID NO: 1761917 - RNA, 19 nt, Homo sapiens
  misc_RNA (1)...(19): siRNA sense strand
gagaacaaaguggccauca

SEQ ID NO: 1761918 - RNA, 19 nt, Homo sapiens
  misc_RNA (1)...(19): siRNA sense strand
gcugcggcaucuuaaucuu

SEQ ID NO: 1761919 - RNA, 19 nt, Homo sapiens
  misc_RNA (1)...(19): siRNA sense strand
caaggccaacaucaugaaa

SEQ ID NO: 1761920 - RNA, 19 nt, Homo sapiens
  misc_RNA (1)...(19): siRNA sense strand
caaauuugagacaaugauc

SEQ ID NO: 1761921 - RNA, 19 nt, Homo sapiens
  misc_RNA (1)...(19): siRNA sense strand
aagaaggugaucaaaguug

SEQ ID NO: 1761922 - RNA, 19 nt, Homo sapiens
  misc_RNA (1)...(19): siRNA sense strand
gugaagaaggugaucaaag

SEQ ID NO: 1761923 - RNA, 19 nt, Homo sapiens
  misc_RNA (1)...(19): siRNA sense strand
ugcagaauccuuaccaguu

SEQ ID NO: 1761924 - RNA, 19 nt, Homo sapiens
  misc_RNA (1)...(19): siRNA sense strand
ugacucggcacaacaaucu

SEQ ID NO: 1761925 - RNA, 19 nt, Homo sapiens
  misc_RNA (1)...(19): siRNA sense strand
gacauggguggcuaugcua

SEQ ID NO: 1761926 - RNA, 19 nt, Homo sapiens
  misc_RNA (1)...(19): siRNA sense strand
uaugggaacauuauugaca

SEQ ID NO: 1761927 - RNA, 19 nt, Homo sapiens
  misc_RNA (1)...(19): siRNA sense strand
cacaaggccaacaucauga

SEQ ID NO: 1761928 - RNA, 19 nt, Homo sapiens
  misc_RNA (1)...(19): siRNA sense strand
ggggugugauugaguguuu

SEQ ID NO: 1761929 - RNA, 19 nt, Homo sapiens
  misc_RNA (1)...(19): siRNA sense strand
ucacacgagccaagucuca

SEQ ID NO: 1761930 - RNA, 19 nt, Homo sapiens
  misc_RNA (1)...(19): siRNA sense strand
ccaguuugaugugcuugug

SEQ ID NO: 1761931 - RNA, 19 nt, Homo sapiens
  misc_RNA (1)...(19): siRNA sense strand
cguaguccaugugaaguca

SEQ ID NO: 1761932 - RNA, 19 nt, Homo sapiens
  misc_RNA (1)...(19): siRNA sense strand
caaugaucauagacaacug

SEQ ID NO: 1761933 - RNA, 19 nt, Homo sapiens
  misc_RNA (1)...(19): siRNA sense strand
cucagcggauugcaaaguu

SEQ ID NO: 1761934 - RNA, 19 nt, Homo sapiens
  misc_RNA (1)...(19): siRNA sense strand
ggugcugaguuccaugaag

SEQ ID NO: 1761935 - RNA, 19 nt, Homo sapiens
  misc_RNA (1)...(19): siRNA sense strand
ggugaagaaggugaucaaa

SEQ ID NO: 1761936 - RNA, 19 nt, Homo sapiens
  misc_RNA (1)...(19): siRNA sense strand
ggcagugggcaggaauaua

SEQ ID NO: 1761937 - RNA, 19 nt, Homo sapiens
  misc_RNA (1)...(19): siRNA sense strand
ucagcggauugcaaaguuc

SEQ ID NO: 1761938 - RNA, 19 nt, Homo sapiens
  misc_RNA (1)...(19): siRNA sense strand
caugaaggagaacaaagug

SEQ ID NO: 1761939 - RNA, 19 nt, Homo sapiens
  misc_RNA (1)...(19): siRNA sense strand
agaauacgcagucuuugag

SEQ ID NO: 1761940 - RNA, 19 nt, Homo sapiens
  misc_RNA (1)...(19): siRNA sense strand
gcugaacuguaccccaaaa

SEQ ID NO: 1761941 - RNA, 19 nt, Homo sapiens
  misc_RNA (1)...(19): siRNA sense strand
gcagaauccuuaccaguuu

SEQ ID NO: 1761942 - RNA, 19 nt, Homo sapiens
  misc_RNA (1)...(19): siRNA sense strand
ugaagaaggugaucaaagu

SEQ ID NO: 1761943 - RNA, 19 nt, Homo sapiens
  misc_RNA (1)...(19): siRNA sense strand
gcagugggcaggaauauag

SEQ ID NO: 1761944 - RNA, 19 nt, Homo sapiens
  misc_RNA (1)...(19): siRNA sense strand
gaagaaggugaucaaaguu

SEQ ID NO: 1761945 - RNA, 19 nt, Homo sapiens
  misc_RNA (1)...(19): siRNA sense strand
ccacaaggccaacaucaug

SEQ ID NO: 1761946 - RNA, 19 nt, Homo sapiens
  misc_RNA (1)...(19): siRNA sense strand
gcagugcugugaggaaguu

SEQ ID NO: 1761947 - RNA, 19 nt, Homo sapiens
  misc_RNA (1)...(19): siRNA sense strand
agacaaugaucauagacaa

SEQ ID NO: 1761948 - RNA, 19 nt, Homo sapiens
  misc_RNA (1)...(19): siRNA sense strand
gugauugaguguuugaaga

SEQ ID NO: 1761949 - RNA, 19 nt, Homo sapiens
  misc_RNA (1)...(19): siRNA sense strand
gcugucggcuuccaacaug

SEQ ID NO: 1761950 - RNA, 19 nt, Homo sapiens
  misc_RNA (1)...(19): siRNA sense strand
gagcuauagugcagaauac

SEQ ID NO: 1761951 - RNA, 19 nt, Homo sapiens
  misc_RNA (1)...(19): siRNA sense strand
cagaauacgcagucuuuga

SEQ ID NO: 1761952 - RNA, 19 nt, Homo sapiens
  misc_RNA (1)...(19): siRNA sense strand
gauugaguguuugaagauu

SEQ ID NO: 1761953 - RNA, 19 nt, Homo sapiens
  misc_RNA (1)...(19): siRNA sense strand
gcaggaauauagccaaucc

SEQ ID NO: 1761954 - RNA, 19 nt, Homo sapiens
  misc_RNA (1)...(19): siRNA sense strand
gccaacaucaugaaacuug

SEQ ID NO: 1761955 - RNA, 19 nt, Homo sapiens
  misc_RNA (1)...(19): siRNA sense strand
ggucacugcuguccacaag

SEQ ID NO: 1761956 - RNA, 19 nt, Homo sapiens
  misc_RNA (1)...(19): siRNA sense strand
gcaucuuaaucuugaguau

SEQ ID NO: 1761957 - RNA, 19 nt, Homo sapiens
  misc_RNA (1)...(19): siRNA sense strand
ugagagcuauagugcagaa

SEQ ID NO: 1761958 - RNA, 19 nt, Homo sapiens
  misc_RNA (1)...(19): siRNA sense strand
cagaugcggugaagaaggu

SEQ ID NO: 1761959 - RNA, 19 nt, Homo sapiens
  misc_RNA (1)...(19): siRNA sense strand
gggcaggaauauagccaau

SEQ ID NO: 1761960 - RNA, 19 nt, Homo sapiens
  misc_RNA (1)...(19): siRNA sense strand
cagaauccuuaccaguuug

SEQ ID NO: 1761961 - RNA, 19 nt, Homo sapiens
  misc_RNA (1)...(19): siRNA sense strand
gaacuguaccccaaaauca

SEQ ID NO: 1761962 - RNA, 19 nt, Homo sapiens
  misc_RNA (1)...(19): siRNA sense strand
gaauacgcagucuuugaga

SEQ ID NO: 1761963 - RNA, 19 nt, Homo sapiens
  misc_RNA (1)...(19): siRNA sense strand
caaucucuaugggaacauu

SEQ ID NO: 1761964 - RNA, 19 nt, Homo sapiens
  misc_RNA (1)...(19): siRNA sense strand
gagacaaugaucauagaca

SEQ ID NO: 1761965 - RNA, 19 nt, Homo sapiens
  misc_RNA (1)...(19): siRNA sense strand
agagcuauagugcagaaua

SEQ ID NO: 1761966 - RNA, 19 nt, Homo sapiens
  misc_RNA (1)...(19): siRNA sense strand
uugagacaaugaucauaga

SEQ ID NO: 1761967 - RNA, 19 nt, Homo sapiens
  misc_RNA (1)...(19): siRNA sense strand
gcagaauacgcagucuuug

SEQ ID NO: 1761968 - RNA, 19 nt, Homo sapiens
  misc_RNA (1)...(19): siRNA sense strand
ucuaugggaacauuauuga

SEQ ID NO: 1761969 - RNA, 19 nt, Homo sapiens
  misc_RNA (1)...(19): siRNA sense strand
ugcggcaucuuaaucuuga

SEQ ID NO: 1761970 - RNA, 19 nt, Homo sapiens
  misc_RNA (1)...(19): siRNA sense strand
ugcagaauacgcagucuuu

SEQ ID NO: 1761971 - RNA, 19 nt, Homo sapiens
  misc_RNA (1)...(19): siRNA sense strand
caaggccaacaucaugaaa

SEQ ID NO: 1761972 - RNA, 19 nt, Homo sapiens
  misc_RNA (1)...(19): siRNA sense strand
gcugcggcaucuuaaucuu

SEQ ID NO: 1761973 - RNA, 19 nt, Homo sapiens
  misc_RNA (1)...(19): siRNA sense strand
caaauuugagacaaugauc

SEQ ID NO: 1761974 - RNA, 19 nt, Homo sapiens
  misc_RNA (1)...(19): siRNA sense strand
aagaaggugaucaaaguug

SEQ ID NO: 1761975 - RNA, 19 nt, Homo sapiens
  misc_RNA (1)...(19): siRNA sense strand
gugaagaaggugaucaaag

SEQ ID NO: 1761976 - RNA, 19 nt, Homo sapiens
  misc_RNA (1)...(19): siRNA sense strand
ugcagaauccuuaccaguu

SEQ ID NO: 1761977 - RNA, 19 nt, Homo sapiens
  misc_RNA (1)...(19): siRNA sense strand
cacaaggccaacaucauga

SEQ ID NO: 1761978 - RNA, 19 nt, Homo sapiens
  misc_RNA (1)...(19): siRNA sense strand
ggggugugauugaguguuu

SEQ ID NO: 1761979 - RNA, 19 nt, Homo sapiens
  misc_RNA (1)...(19): siRNA sense strand
uaugggaacauuauugaca

SEQ ID NO: 1761980 - RNA, 19 nt, Homo sapiens
  misc_RNA (1)...(19): siRNA sense strand
ucacacgagccaagucuca

SEQ ID NO: 1761981 - RNA, 19 nt, Homo sapiens
  misc_RNA (1)...(19): siRNA sense strand
ccaguuugaugugcuugug

SEQ ID NO: 1761982 - RNA, 19 nt, Homo sapiens
  misc_RNA (1)...(19): siRNA sense strand
caaugaucauagacaacug

SEQ ID NO: 1761983 - RNA, 19 nt, Homo sapiens
  misc_RNA (1)...(19): siRNA sense strand
ucagcggauugcaaaguuc

SEQ ID NO: 1761984 - RNA, 19 nt, Homo sapiens
  misc_RNA (1)...(19): siRNA sense strand
cucagcggauugcaaaguu

SEQ ID NO: 1761985 - RNA, 19 nt, Homo sapiens
  misc_RNA (1)...(19): siRNA sense strand
ggugaagaaggugaucaaa

SEQ ID NO: 1761986 - RNA, 19 nt, Homo sapiens
  misc_RNA (1)...(19): siRNA sense strand
ggcagugggcaggaauaua

SEQ ID NO: 1761987 - RNA, 19 nt, Homo sapiens
  misc_RNA (1)...(19): siRNA sense strand
agaauacgcagucuuugag

SEQ ID NO: 1761988 - RNA, 19 nt, Homo sapiens
  misc_RNA (1)...(19): siRNA sense strand
gcugaacuguaccccaaaa

SEQ ID NO: 1761989 - RNA, 19 nt, Homo sapiens
  misc_RNA (1)...(19): siRNA sense strand
cgacaaaugugauaccuua

SEQ ID NO: 1761990 - RNA, 19 nt, Homo sapiens
  misc_RNA (1)...(19): siRNA sense strand
ggacguagaaugaaauuua

SEQ ID NO: 1761991 - RNA, 19 nt, Homo sapiens
  misc_RNA (1)...(19): siRNA sense strand
gaaaugauguacuggauga

SEQ ID NO: 1761992 - RNA, 19 nt, Homo sapiens
  misc_RNA (1)...(19): siRNA sense strand
ggaaagcacugcaaguaug

SEQ ID NO: 1761993 - RNA, 19 nt, Homo sapiens
  misc_RNA (1)...(19): siRNA sense strand
ggacacaaaugauaucugu

SEQ ID NO: 1761994 - RNA, 19 nt, Homo sapiens
  misc_RNA (1)...(19): siRNA sense strand
ggaaugcugugguagagua

SEQ ID NO: 1761995 - RNA, 19 nt, Homo sapiens
  misc_RNA (1)...(19): siRNA sense strand
gaagauaguggauugagua

SEQ ID NO: 1761996 - RNA, 19 nt, Homo sapiens
  misc_RNA (1)...(19): siRNA sense strand
ggccagcaguuucuauuua

SEQ ID NO: 1761997 - RNA, 19 nt, Homo sapiens
  misc_RNA (1)...(19): siRNA sense strand
uaaccuggcuggugacgua

SEQ ID NO: 1761998 - RNA, 19 nt, Homo sapiens
  misc_RNA (1)...(19): siRNA sense strand
gagaaaaccuucaacacua

SEQ ID NO: 1761999 - RNA, 19 nt, Homo sapiens
  misc_RNA (1)...(19): siRNA sense strand
acaagaagaugaagaggaa

SEQ ID NO: 1762000 - RNA, 19 nt, Homo sapiens
  misc_RNA (1)...(19): siRNA sense strand
cugcagagcucacgacaaa

SEQ ID NO: 1762001 - RNA, 19 nt, Homo sapiens
  misc_RNA (1)...(19): siRNA sense strand
agacggcucuggugcaaua

SEQ ID NO: 1762002 - RNA, 19 nt, Homo sapiens
  misc_RNA (1)...(19): siRNA sense strand
caguaaaggugaauucuug

SEQ ID NO: 1762003 - RNA, 19 nt, Homo sapiens
  misc_RNA (1)...(19): siRNA sense strand
ugauacugcuguucucuua

SEQ ID NO: 1762004 - RNA, 19 nt, Homo sapiens
  misc_RNA (1)...(19): siRNA sense strand
gauguacgcuauucuuuca

SEQ ID NO: 1762005 - RNA, 19 nt, Homo sapiens
  misc_RNA (1)...(19): siRNA sense strand
caacgugaauaaacaaugu

SEQ ID NO: 1762006 - RNA, 19 nt, Homo sapiens
  misc_RNA (1)...(19): siRNA sense strand
agaauuaacucaacagauc

SEQ ID NO: 1762007 - RNA, 19 nt, Homo sapiens
  misc_RNA (1)...(19): siRNA sense strand
gcagacaacagaaugguuu

SEQ ID NO: 1762008 - RNA, 19 nt, Homo sapiens
  misc_RNA (1)...(19): siRNA sense strand
ggugaauucuugcuaaaug

SEQ ID NO: 1762009 - RNA, 19 nt, Homo sapiens
  misc_RNA (1)...(19): siRNA sense strand
ugacaacuacuuagcuuua

SEQ ID NO: 1762010 - RNA, 19 nt, Homo sapiens
  misc_RNA (1)...(19): siRNA sense strand
gaacacagccuacuaucag

SEQ ID NO: 1762011 - RNA, 19 nt, Homo sapiens
  misc_RNA (1)...(19): siRNA sense strand
gccagcaguuucuauuuaa

SEQ ID NO: 1762012 - RNA, 19 nt, Homo sapiens
  misc_RNA (1)...(19): siRNA sense strand
gcaggaacauuuaauacag

SEQ ID NO: 1762013 - RNA, 19 nt, Homo sapiens
  misc_RNA (1)...(19): siRNA sense strand
uauaaagacccaaguauug

SEQ ID NO: 1762014 - RNA, 19 nt, Homo sapiens
  misc_RNA (1)...(19): siRNA sense strand
caucuacugugccaaauau

SEQ ID NO: 1762015 - RNA, 19 nt, Homo sapiens
  misc_RNA (1)...(19): siRNA sense strand
ggacaucuacugugccaaa

SEQ ID NO: 1762016 - RNA, 19 nt, Homo sapiens
  misc_RNA (1)...(19): siRNA sense strand
gaugacaacuacuuagcuu

SEQ ID NO: 1762017 - RNA, 19 nt, Homo sapiens
  misc_RNA (1)...(19): siRNA sense strand
gcacugcaaguauggauuu

SEQ ID NO: 1762018 - RNA, 19 nt, Homo sapiens
  misc_RNA (1)...(19): siRNA sense strand
aaaggugaauucuugcuaa

SEQ ID NO: 1762019 - RNA, 19 nt, Homo sapiens
  misc_RNA (1)...(19): siRNA sense strand
caagcacuguuucuacaaa

SEQ ID NO: 1762020 - RNA, 19 nt, Homo sapiens
  misc_RNA (1)...(19): siRNA sense strand
cgaggcaagugaaauuauu

SEQ ID NO: 1762021 - RNA, 19 nt, Homo sapiens
  misc_RNA (1)...(19): siRNA sense strand
acaacagaaugguuucaua

SEQ ID NO: 1762022 - RNA, 19 nt, Homo sapiens
  misc_RNA (1)...(19): siRNA sense strand
uacaaaggcuaugucaaua

SEQ ID NO: 1762023 - RNA, 19 nt, Homo sapiens
  misc_RNA (1)...(19): siRNA sense strand
ggagaagggcuauuugugu

SEQ ID NO: 1762024 - RNA, 19 nt, Homo sapiens
  misc_RNA (1)...(19): siRNA sense strand
gcagagcucacgacaaaug

SEQ ID NO: 1762025 - RNA, 19 nt, Homo sapiens
  misc_RNA (1)...(19): siRNA sense strand
aaacagacgaugacaacua

SEQ ID NO: 1762026 - RNA, 19 nt, Homo sapiens
  misc_RNA (1)...(19): siRNA sense strand
gcacauuccggucucauga

SEQ ID NO: 1762027 - RNA, 19 nt, Homo sapiens
  misc_RNA (1)...(19): siRNA sense strand
ccacgaacguccacuucaa

SEQ ID NO: 1762028 - RNA, 19 nt, Homo sapiens
  misc_RNA (1)...(19): siRNA sense strand
gauaguggauugaguacag

SEQ ID NO: 1762029 - RNA, 19 nt, Homo sapiens
  misc_RNA (1)...(19): siRNA sense strand
cuacaaaggcuaugucaau

SEQ ID NO: 1762030 - RNA, 19 nt, Homo sapiens
  misc_RNA (1)...(19): siRNA sense strand
cgauaauucuucaugcaaa

SEQ ID NO: 1762031 - RNA, 19 nt, Homo sapiens
  misc_RNA (1)...(19): siRNA sense strand
gaggcaagugaaauuauua

SEQ ID NO: 1762032 - RNA, 19 nt, Homo sapiens
  misc_RNA (1)...(19): siRNA sense strand
ucucaggugugcccauaua

SEQ ID NO: 1762033 - RNA, 19 nt, Homo sapiens
  misc_RNA (1)...(19): siRNA sense strand
gcaaaugcacacaucaaga

SEQ ID NO: 1762034 - RNA, 19 nt, Homo sapiens
  misc_RNA (1)...(19): siRNA sense strand
gaacugggaaccauuugug

SEQ ID NO: 1762035 - RNA, 19 nt, Homo sapiens
  misc_RNA (1)...(19): siRNA sense strand
caagagaaaguuaccauuc

SEQ ID NO: 1762036 - RNA, 19 nt, Homo sapiens
  misc_RNA (1)...(19): siRNA sense strand
uagagacccugagcgaaua

SEQ ID NO: 1762037 - RNA, 19 nt, Homo sapiens
  misc_RNA (1)...(19): siRNA sense strand
gaugacaacaacaaaugua

SEQ ID NO: 1762038 - RNA, 19 nt, Homo sapiens
  misc_RNA (1)...(19): siRNA sense strand
agagagcccucaacaggaa

SEQ ID NO: 1762039 - RNA, 19 nt, Homo sapiens
  misc_RNA (1)...(19): siRNA sense strand
cagggaaucugaucagcuu

SEQ ID NO: 1762040 - RNA, 19 nt, Homo sapiens
  misc_RNA (1)...(19): siRNA sense strand
ggaaacagacgaugacaac

SEQ ID NO: 1762041 - RNA, 19 nt, Homo sapiens
  misc_RNA (1)...(19): siRNA sense strand
uaaauacaguggaauucug

SEQ ID NO: 1762042 - RNA, 19 nt, Homo sapiens
  misc_RNA (1)...(19): siRNA sense strand
gagcugggccauguguuua

SEQ ID NO: 1762043 - RNA, 19 nt, Homo sapiens
  misc_RNA (1)...(19): siRNA sense strand
ggccaggacacaaaugaua

SEQ ID NO: 1762044 - RNA, 19 nt, Homo sapiens
  misc_RNA (1)...(19): siRNA sense strand
gcacacaucaagagaaagu

SEQ ID NO: 1762045 - RNA, 19 nt, Homo sapiens
  misc_RNA (1)...(19): siRNA sense strand
gaacggaaacgaaaacuug

SEQ ID NO: 1762046 - RNA, 19 nt, Homo sapiens
  misc_RNA (1)...(19): siRNA sense strand
aagagaaaguuaccauuca

SEQ ID NO: 1762047 - RNA, 19 nt, Homo sapiens
  misc_RNA (1)...(19): siRNA sense strand
gaagguugaugaugguuuu

SEQ ID NO: 1762048 - RNA, 19 nt, Homo sapiens
  misc_RNA (1)...(19): siRNA sense strand
gaaaagaggacccacagaa

SEQ ID NO: 1762049 - RNA, 19 nt, Homo sapiens
  misc_RNA (1)...(19): siRNA sense strand
gaacgcgacggagcauuaa

SEQ ID NO: 1762050 - RNA, 19 nt, Homo sapiens
  misc_RNA (1)...(19): siRNA sense strand
gagaacccuuucccacgaa

SEQ ID NO: 1762051 - RNA, 19 nt, Homo sapiens
  misc_RNA (1)...(19): siRNA sense strand
gcaagaaaauggggagaaa

SEQ ID NO: 1762052 - RNA, 19 nt, Homo sapiens
  misc_RNA (1)...(19): siRNA sense strand
acacaucaagagaaaguua

SEQ ID NO: 1762053 - RNA, 19 nt, Homo sapiens
  misc_RNA (1)...(19): siRNA sense strand
gaagggcuauuugugucaa

SEQ ID NO: 1762054 - RNA, 19 nt, Homo sapiens
  misc_RNA (1)...(19): siRNA sense strand
ggaacacagccuacuauca

SEQ ID NO: 1762055 - RNA, 19 nt, Homo sapiens
  misc_RNA (1)...(19): siRNA sense strand
gaagcuguucuauuaguga

SEQ ID NO: 1762056 - RNA, 19 nt, Homo sapiens
  misc_RNA (1)...(19): siRNA sense strand
uaaagaagaaggaguuaag

SEQ ID NO: 1762057 - RNA, 19 nt, Homo sapiens
  misc_RNA (1)...(19): siRNA sense strand
uaacucaacagaucgcauu

SEQ ID NO: 1762058 - RNA, 19 nt, Homo sapiens
  misc_RNA (1)...(19): siRNA sense strand
gaagaaaaccagagcaaga

SEQ ID NO: 1762059 - RNA, 19 nt, Homo sapiens
  misc_RNA (1)...(19): siRNA sense strand
gucaauacccgaaaugaug

SEQ ID NO: 1762060 - RNA, 19 nt, Homo sapiens
  misc_RNA (1)...(19): siRNA sense strand
agacugagaagguugauga

SEQ ID NO: 1762061 - RNA, 19 nt, Homo sapiens
  misc_RNA (1)...(19): siRNA sense strand
gacaacuacuuagcuuuau

SEQ ID NO: 1762062 - RNA, 19 nt, Homo sapiens
  misc_RNA (1)...(19): siRNA sense strand
gaaggaccggugcaaguug

SEQ ID NO: 1762063 - RNA, 19 nt, Homo sapiens
  misc_RNA (1)...(19): siRNA sense strand
guggaauucugaugaagga

SEQ ID NO: 1762064 - RNA, 19 nt, Homo sapiens
  misc_RNA (1)...(19): siRNA sense strand
caacagaccagaaccaaaa

SEQ ID NO: 1762065 - RNA, 19 nt, Homo sapiens
  misc_RNA (1)...(19): siRNA sense strand
ggaaccugcuccagaacau

SEQ ID NO: 1762066 - RNA, 19 nt, Homo sapiens
  misc_RNA (1)...(19): siRNA sense strand
guucucaggugugcccaua

SEQ ID NO: 1762067 - RNA, 19 nt, Homo sapiens
  misc_RNA (1)...(19): siRNA sense strand
uagccucuaucuauaaaga

SEQ ID NO: 1762068 - RNA, 19 nt, Homo sapiens
  misc_RNA (1)...(19): siRNA sense strand
gucuauggaugaacaagaa

SEQ ID NO: 1762069 - RNA, 19 nt, Homo sapiens
  misc_RNA (1)...(19): siRNA sense strand
agaacgcgacggagcauua

SEQ ID NO: 1762070 - RNA, 19 nt, Homo sapiens
  misc_RNA (1)...(19): siRNA sense strand
gacagcaaaugcacacauc

SEQ ID NO: 1762071 - RNA, 19 nt, Homo sapiens
  misc_RNA (1)...(19): siRNA sense strand
ggaagacugagaagguuga

SEQ ID NO: 1762072 - RNA, 19 nt, Homo sapiens
  misc_RNA (1)...(19): siRNA sense strand
guccgagacugccguagaa

SEQ ID NO: 1762073 - RNA, 19 nt, Homo sapiens
  misc_RNA (1)...(19): siRNA sense strand
ggauuuaucgcuccacugu

SEQ ID NO: 1762074 - RNA, 19 nt, Homo sapiens
  misc_RNA (1)...(19): siRNA sense strand
gcaguaaaggugaauucuu

SEQ ID NO: 1762075 - RNA, 19 nt, Homo sapiens
  misc_RNA (1)...(19): siRNA sense strand
aaauuuaaguccugcaaca

SEQ ID NO: 1762076 - RNA, 19 nt, Homo sapiens
  misc_RNA (1)...(19): siRNA sense strand
uguaggacguagaaugaaa

SEQ ID NO: 1762077 - RNA, 19 nt, Homo sapiens
  misc_RNA (1)...(19): siRNA sense strand
gcaacagaccagaaccaaa

SEQ ID NO: 1762078 - RNA, 19 nt, Homo sapiens
  misc_RNA (1)...(19): siRNA sense strand
aaacaaaccccacaucauu

SEQ ID NO: 1762079 - RNA, 19 nt, Homo sapiens
  misc_RNA (1)...(19): siRNA sense strand
aaaccaagcaaccgugaaa

SEQ ID NO: 1762080 - RNA, 19 nt, Homo sapiens
  misc_RNA (1)...(19): siRNA sense strand
cugaucagcuuacuguuuc

SEQ ID NO: 1762081 - RNA, 19 nt, Homo sapiens
  misc_RNA (1)...(19): siRNA sense strand
gcauuaacucugccacuga

SEQ ID NO: 1762082 - RNA, 19 nt, Homo sapiens
  misc_RNA (1)...(19): siRNA sense strand
uagugaagauaguggauug

SEQ ID NO: 1762083 - RNA, 19 nt, Homo sapiens
  misc_RNA (1)...(19): siRNA sense strand
cuauaaagacccaaguauu

SEQ ID NO: 1762084 - RNA, 19 nt, Homo sapiens
  misc_RNA (1)...(19): siRNA sense strand
ugacguagcagcauuaaac

SEQ ID NO: 1762085 - RNA, 19 nt, Homo sapiens
  misc_RNA (1)...(19): siRNA sense strand
caggaaggcaugcauguga

SEQ ID NO: 1762086 - RNA, 19 nt, Homo sapiens
  misc_RNA (1)...(19): siRNA sense strand
uaacaucaacggucugcuu

SEQ ID NO: 1762087 - RNA, 19 nt, Homo sapiens
  misc_RNA (1)...(19): siRNA sense strand
cagaggagaagggcuauuu

SEQ ID NO: 1762088 - RNA, 19 nt, Homo sapiens
  misc_RNA (1)...(19): siRNA sense strand
gcaagugaaauuauuagag

SEQ ID NO: 1762089 - RNA, 19 nt, Homo sapiens
  misc_RNA (1)...(19): siRNA sense strand
cgacaaaugugauaccuua

SEQ ID NO: 1762090 - RNA, 19 nt, Homo sapiens
  misc_RNA (1)...(19): siRNA sense strand
ggacguagaaugaaauuua

SEQ ID NO: 1762091 - RNA, 19 nt, Homo sapiens
  misc_RNA (1)...(19): siRNA sense strand
gaaaugauguacuggauga

SEQ ID NO: 1762092 - RNA, 19 nt, Homo sapiens
  misc_RNA (1)...(19): siRNA sense strand
ggaaagcacugcaaguaug

SEQ ID NO: 1762093 - RNA, 19 nt, Homo sapiens
  misc_RNA (1)...(19): siRNA sense strand
ggacacaaaugauaucugu

SEQ ID NO: 1762094 - RNA, 19 nt, Homo sapiens
  misc_RNA (1)...(19): siRNA sense strand
ggaaugcugugguagagua

SEQ ID NO: 1762095 - RNA, 19 nt, Homo sapiens
  misc_RNA (1)...(19): siRNA sense strand
gaagauaguggauugagua

SEQ ID NO: 1762096 - RNA, 19 nt, Homo sapiens
  misc_RNA (1)...(19): siRNA sense strand
ggccagcaguuucuauuua

SEQ ID NO: 1762097 - RNA, 19 nt, Homo sapiens
  misc_RNA (1)...(19): siRNA sense strand
uaaccuggcuggugacgua

SEQ ID NO: 1762098 - RNA, 19 nt, Homo sapiens
  misc_RNA (1)...(19): siRNA sense strand
gagaaaaccuucaacacua

SEQ ID NO: 1762099 - RNA, 19 nt, Homo sapiens
  misc_RNA (1)...(19): siRNA sense strand
acaagaagaugaagaggaa

SEQ ID NO: 1762100 - RNA, 19 nt, Homo sapiens
  misc_RNA (1)...(19): siRNA sense strand
cugcagagcucacgacaaa

SEQ ID NO: 1762101 - RNA, 19 nt, Homo sapiens
  misc_RNA (1)...(19): siRNA sense strand
agacggcucuggugcaaua

SEQ ID NO: 1762102 - RNA, 19 nt, Homo sapiens
  misc_RNA (1)...(19): siRNA sense strand
caguaaaggugaauucuug

SEQ ID NO: 1762103 - RNA, 19 nt, Homo sapiens
  misc_RNA (1)...(19): siRNA sense strand
ugauacugcuguucucuua

SEQ ID NO: 1762104 - RNA, 19 nt, Homo sapiens
  misc_RNA (1)...(19): siRNA sense strand
gauguacgcuauucuuuca

SEQ ID NO: 1762105 - RNA, 19 nt, Homo sapiens
  misc_RNA (1)...(19): siRNA sense strand
caacgugaauaaacaaugu

SEQ ID NO: 1762106 - RNA, 19 nt, Homo sapiens
  misc_RNA (1)...(19): siRNA sense strand
agaauuaacucaacagauc

SEQ ID NO: 1762107 - RNA, 19 nt, Homo sapiens
  misc_RNA (1)...(19): siRNA sense strand
gcagacaacagaaugguuu

SEQ ID NO: 1762108 - RNA, 19 nt, Homo sapiens
  misc_RNA (1)...(19): siRNA sense strand
ggugaauucuugcuaaaug

SEQ ID NO: 1762109 - RNA, 19 nt, Homo sapiens
  misc_RNA (1)...(19): siRNA sense strand
ugacaacuacuuagcuuua

SEQ ID NO: 1762110 - RNA, 19 nt, Homo sapiens
  misc_RNA (1)...(19): siRNA sense strand
gaacacagccuacuaucag

SEQ ID NO: 1762111 - RNA, 19 nt, Homo sapiens
  misc_RNA (1)...(19): siRNA sense strand
gccagcaguuucuauuuaa

SEQ ID NO: 1762112 - RNA, 19 nt, Homo sapiens
  misc_RNA (1)...(19): siRNA sense strand
gcaggaacauuuaauacag

SEQ ID NO: 1762113 - RNA, 19 nt, Homo sapiens
  misc_RNA (1)...(19): siRNA sense strand
uauaaagacccaaguauug

SEQ ID NO: 1762114 - RNA, 19 nt, Homo sapiens
  misc_RNA (1)...(19): siRNA sense strand
caucuacugugccaaauau

SEQ ID NO: 1762115 - RNA, 19 nt, Homo sapiens
  misc_RNA (1)...(19): siRNA sense strand
ggacaucuacugugccaaa

SEQ ID NO: 1762116 - RNA, 19 nt, Homo sapiens
  misc_RNA (1)...(19): siRNA sense strand
gaugacaacuacuuagcuu

SEQ ID NO: 1762117 - RNA, 19 nt, Homo sapiens
  misc_RNA (1)...(19): siRNA sense strand
gcacugcaaguauggauuu

SEQ ID NO: 1762118 - RNA, 19 nt, Homo sapiens
  misc_RNA (1)...(19): siRNA sense strand
aaaggugaauucuugcuaa

SEQ ID NO: 1762119 - RNA, 19 nt, Homo sapiens
  misc_RNA (1)...(19): siRNA sense strand
caagcacuguuucuacaaa

SEQ ID NO: 1762120 - RNA, 19 nt, Homo sapiens
  misc_RNA (1)...(19): siRNA sense strand
cgaggcaagugaaauuauu

SEQ ID NO: 1762121 - RNA, 19 nt, Homo sapiens
  misc_RNA (1)...(19): siRNA sense strand
acaacagaaugguuucaua

SEQ ID NO: 1762122 - RNA, 19 nt, Homo sapiens
  misc_RNA (1)...(19): siRNA sense strand
uacaaaggcuaugucaaua

SEQ ID NO: 1762123 - RNA, 19 nt, Homo sapiens
  misc_RNA (1)...(19): siRNA sense strand
ggagaagggcuauuugugu

SEQ ID NO: 1762124 - RNA, 19 nt, Homo sapiens
  misc_RNA (1)...(19): siRNA sense strand
gcagagcucacgacaaaug

SEQ ID NO: 1762125 - RNA, 19 nt, Homo sapiens
  misc_RNA (1)...(19): siRNA sense strand
aaacagacgaugacaacua

SEQ ID NO: 1762126 - RNA, 19 nt, Homo sapiens
  misc_RNA (1)...(19): siRNA sense strand
gcacauuccggucucauga

SEQ ID NO: 1762127 - RNA, 19 nt, Homo sapiens
  misc_RNA (1)...(19): siRNA sense strand
ccacgaacguccacuucaa

SEQ ID NO: 1762128 - RNA, 19 nt, Homo sapiens
  misc_RNA (1)...(19): siRNA sense strand
gauaguggauugaguacag

SEQ ID NO: 1762129 - RNA, 19 nt, Homo sapiens
  misc_RNA (1)...(19): siRNA sense strand
cuacaaaggcuaugucaau

SEQ ID NO: 1762130 - RNA, 19 nt, Homo sapiens
  misc_RNA (1)...(19): siRNA sense strand
cgauaauucuucaugcaaa

SEQ ID NO: 1762131 - RNA, 19 nt, Homo sapiens
  misc_RNA (1)...(19): siRNA sense strand
gaggcaagugaaauuauua

SEQ ID NO: 1762132 - RNA, 19 nt, Homo sapiens
  misc_RNA (1)...(19): siRNA sense strand
ucucaggugugcccauaua

SEQ ID NO: 1762133 - RNA, 19 nt, Homo sapiens
  misc_RNA (1)...(19): siRNA sense strand
gcaaaugcacacaucaaga

SEQ ID NO: 1762134 - RNA, 19 nt, Homo sapiens
  misc_RNA (1)...(19): siRNA sense strand
gaacugggaaccauuugug

SEQ ID NO: 1762135 - RNA, 19 nt, Homo sapiens
  misc_RNA (1)...(19): siRNA sense strand
caagagaaaguuaccauuc

SEQ ID NO: 1762136 - RNA, 19 nt, Homo sapiens
  misc_RNA (1)...(19): siRNA sense strand
uagagacccugagcgaaua

SEQ ID NO: 1762137 - RNA, 19 nt, Homo sapiens
  misc_RNA (1)...(19): siRNA sense strand
gaugacaacaacaaaugua

SEQ ID NO: 1762138 - RNA, 19 nt, Homo sapiens
  misc_RNA (1)...(19): siRNA sense strand
agagagcccucaacaggaa

SEQ ID NO: 1762139 - RNA, 19 nt, Homo sapiens
  misc_RNA (1)...(19): siRNA sense strand
cagggaaucugaucagcuu

SEQ ID NO: 1762140 - RNA, 19 nt, Homo sapiens
  misc_RNA (1)...(19): siRNA sense strand
ggaaacagacgaugacaac

SEQ ID NO: 1762141 - RNA, 19 nt, Homo sapiens
  misc_RNA (1)...(19): siRNA sense strand
uaaauacaguggaauucug

SEQ ID NO: 1762142 - RNA, 19 nt, Homo sapiens
  misc_RNA (1)...(19): siRNA sense strand
gagcugggccauguguuua

SEQ ID NO: 1762143 - RNA, 19 nt, Homo sapiens
  misc_RNA (1)...(19): siRNA sense strand
ggccaggacacaaaugaua

SEQ ID NO: 1762144 - RNA, 19 nt, Homo sapiens
  misc_RNA (1)...(19): siRNA sense strand
gcacacaucaagagaaagu

SEQ ID NO: 1762145 - RNA, 19 nt, Homo sapiens
  misc_RNA (1)...(19): siRNA sense strand
gaacggaaacgaaaacuug

SEQ ID NO: 1762146 - RNA, 19 nt, Homo sapiens
  misc_RNA (1)...(19): siRNA sense strand
aagagaaaguuaccauuca

SEQ ID NO: 1762147 - RNA, 19 nt, Homo sapiens
  misc_RNA (1)...(19): siRNA sense strand
gaagguugaugaugguuuu

SEQ ID NO: 1762148 - RNA, 19 nt, Homo sapiens
  misc_RNA (1)...(19): siRNA sense strand
gaaaagaggacccacagaa

SEQ ID NO: 1762149 - RNA, 19 nt, Homo sapiens
  misc_RNA (1)...(19): siRNA sense strand
gaacgcgacggagcauuaa

SEQ ID NO: 1762150 - RNA, 19 nt, Homo sapiens
  misc_RNA (1)...(19): siRNA sense strand
gagaacccuuucccacgaa

SEQ ID NO: 1762151 - RNA, 19 nt, Homo sapiens
  misc_RNA (1)...(19): siRNA sense strand
gcaagaaaauggggagaaa

SEQ ID NO: 1762152 - RNA, 19 nt, Homo sapiens
  misc_RNA (1)...(19): siRNA sense strand
acacaucaagagaaaguua

SEQ ID NO: 1762153 - RNA, 19 nt, Homo sapiens
  misc_RNA (1)...(19): siRNA sense strand
gaagggcuauuugugucaa

SEQ ID NO: 1762154 - RNA, 19 nt, Homo sapiens
  misc_RNA (1)...(19): siRNA sense strand
ggaacacagccuacuauca

SEQ ID NO: 1762155 - RNA, 19 nt, Homo sapiens
  misc_RNA (1)...(19): siRNA sense strand
gaagcuguucuauuaguga

SEQ ID NO: 1762156 - RNA, 19 nt, Homo sapiens
  misc_RNA (1)...(19): siRNA sense strand
uaaagaagaaggaguuaag

SEQ ID NO: 1762157 - RNA, 19 nt, Homo sapiens
  misc_RNA (1)...(19): siRNA sense strand
uaacucaacagaucgcauu

SEQ ID NO: 1762158 - RNA, 19 nt, Homo sapiens
  misc_RNA (1)...(19): siRNA sense strand
gaagaaaaccagagcaaga

SEQ ID NO: 1762159 - RNA, 19 nt, Homo sapiens
  misc_RNA (1)...(19): siRNA sense strand
gucaauacccgaaaugaug

SEQ ID NO: 1762160 - RNA, 19 nt, Homo sapiens
  misc_RNA (1)...(19): siRNA sense strand
agacugagaagguugauga

SEQ ID NO: 1762161 - RNA, 19 nt, Homo sapiens
  misc_RNA (1)...(19): siRNA sense strand
gacaacuacuuagcuuuau

SEQ ID NO: 1762162 - RNA, 19 nt, Homo sapiens
  misc_RNA (1)...(19): siRNA sense strand
gaaggaccggugcaaguug

SEQ ID NO: 1762163 - RNA, 19 nt, Homo sapiens
  misc_RNA (1)...(19): siRNA sense strand
guggaauucugaugaagga

SEQ ID NO: 1762164 - RNA, 19 nt, Homo sapiens
  misc_RNA (1)...(19): siRNA sense strand
caacagaccagaaccaaaa

SEQ ID NO: 1762165 - RNA, 19 nt, Homo sapiens
  misc_RNA (1)...(19): siRNA sense strand
ggaaccugcuccagaacau

SEQ ID NO: 1762166 - RNA, 19 nt, Homo sapiens
  misc_RNA (1)...(19): siRNA sense strand
guucucaggugugcccaua

SEQ ID NO: 1762167 - RNA, 19 nt, Homo sapiens
  misc_RNA (1)...(19): siRNA sense strand
uagccucuaucuauaaaga

SEQ ID NO: 1762168 - RNA, 19 nt, Homo sapiens
  misc_RNA (1)...(19): siRNA sense strand
gucuauggaugaacaagaa

SEQ ID NO: 1762169 - RNA, 19 nt, Homo sapiens
  misc_RNA (1)...(19): siRNA sense strand
agaacgcgacggagcauua

SEQ ID NO: 1762170 - RNA, 19 nt, Homo sapiens
  misc_RNA (1)...(19): siRNA sense strand
gacagcaaaugcacacauc

SEQ ID NO: 1762171 - RNA, 19 nt, Homo sapiens
  misc_RNA (1)...(19): siRNA sense strand
ggaagacugagaagguuga

SEQ ID NO: 1762172 - RNA, 19 nt, Homo sapiens
  misc_RNA (1)...(19): siRNA sense strand
guccgagacugccguagaa

SEQ ID NO: 1762173 - RNA, 19 nt, Homo sapiens
  misc_RNA (1)...(19): siRNA sense strand
ggauuuaucgcuccacugu

SEQ ID NO: 1762174 - RNA, 19 nt, Homo sapiens
  misc_RNA (1)...(19): siRNA sense strand
gcaguaaaggugaauucuu

SEQ ID NO: 1762175 - RNA, 19 nt, Homo sapiens
  misc_RNA (1)...(19): siRNA sense strand
aaauuuaaguccugcaaca

SEQ ID NO: 1762176 - RNA, 19 nt, Homo sapiens
  misc_RNA (1)...(19): siRNA sense strand
uguaggacguagaaugaaa

SEQ ID NO: 1762177 - RNA, 19 nt, Homo sapiens
  misc_RNA (1)...(19): siRNA sense strand
gcaacagaccagaaccaaa

SEQ ID NO: 1762178 - RNA, 19 nt, Homo sapiens
  misc_RNA (1)...(19): siRNA sense strand
aaacaaaccccacaucauu

SEQ ID NO: 1762179 - RNA, 19 nt, Homo sapiens
  misc_RNA (1)...(19): siRNA sense strand
aaaccaagcaaccgugaaa

SEQ ID NO: 1762180 - RNA, 19 nt, Homo sapiens
  misc_RNA (1)...(19): siRNA sense strand
cugaucagcuuacuguuuc

SEQ ID NO: 1762181 - RNA, 19 nt, Homo sapiens
  misc_RNA (1)...(19): siRNA sense strand
gcauuaacucugccacuga

SEQ ID NO: 1762182 - RNA, 19 nt, Homo sapiens
  misc_RNA (1)...(19): siRNA sense strand
uagugaagauaguggauug

SEQ ID NO: 1762183 - RNA, 19 nt, Homo sapiens
  misc_RNA (1)...(19): siRNA sense strand
cuauaaagacccaaguauu

SEQ ID NO: 1762184 - RNA, 19 nt, Homo sapiens
  misc_RNA (1)...(19): siRNA sense strand
ugacguagcagcauuaaac

SEQ ID NO: 1762185 - RNA, 19 nt, Homo sapiens
  misc_RNA (1)...(19): siRNA sense strand
caggaaggcaugcauguga

SEQ ID NO: 1762186 - RNA, 19 nt, Homo sapiens
  misc_RNA (1)...(19): siRNA sense strand
uaacaucaacggucugcuu

SEQ ID NO: 1762187 - RNA, 19 nt, Homo sapiens
  misc_RNA (1)...(19): siRNA sense strand
cagaggagaagggcuauuu

SEQ ID NO: 1762188 - RNA, 19 nt, Homo sapiens
  misc_RNA (1)...(19): siRNA sense strand
gcaagugaaauuauuagag

SEQ ID NO: 1762189 - RNA, 19 nt, Homo sapiens
  misc_RNA (1)...(19): siRNA sense strand
cgacaaaugugauaccuua

SEQ ID NO: 1762190 - RNA, 19 nt, Homo sapiens
  misc_RNA (1)...(19): siRNA sense strand
ggacguagaaugaaauuua

SEQ ID NO: 1762191 - RNA, 19 nt, Homo sapiens
  misc_RNA (1)...(19): siRNA sense strand
gaaaugauguacuggauga

SEQ ID NO: 1762192 - RNA, 19 nt, Homo sapiens
  misc_RNA (1)...(19): siRNA sense strand
ggaaagcacugcaaguaug

SEQ ID NO: 1762193 - RNA, 19 nt, Homo sapiens
  misc_RNA (1)...(19): siRNA sense strand
ggacacaaaugauaucugu

SEQ ID NO: 1762194 - RNA, 19 nt, Homo sapiens
  misc_RNA (1)...(19): siRNA sense strand
ggaaugcugugguagagua

SEQ ID NO: 1762195 - RNA, 19 nt, Homo sapiens
  misc_RNA (1)...(19): siRNA sense strand
gaagauaguggauugagua

SEQ ID NO: 1762196 - RNA, 19 nt, Homo sapiens
  misc_RNA (1)...(19): siRNA sense strand
ggccagcaguuucuauuua

SEQ ID NO: 1762197 - RNA, 19 nt, Homo sapiens
  misc_RNA (1)...(19): siRNA sense strand
uaaccuggcuggugacgua

SEQ ID NO: 1762198 - RNA, 19 nt, Homo sapiens
  misc_RNA (1)...(19): siRNA sense strand
gagaaaaccuucaacacua

SEQ ID NO: 1762199 - RNA, 19 nt, Homo sapiens
  misc_RNA (1)...(19): siRNA sense strand
acaagaagaugaagaggaa

SEQ ID NO: 1762200 - RNA, 19 nt, Homo sapiens
  misc_RNA (1)...(19): siRNA sense strand
cugcagagcucacgacaaa

SEQ ID NO: 1762201 - RNA, 19 nt, Homo sapiens
  misc_RNA (1)...(19): siRNA sense strand
agacggcucuggugcaaua

SEQ ID NO: 1762202 - RNA, 19 nt, Homo sapiens
  misc_RNA (1)...(19): siRNA sense strand
caguaaaggugaauucuug

SEQ ID NO: 1762203 - RNA, 19 nt, Homo sapiens
  misc_RNA (1)...(19): siRNA sense strand
ugauacugcuguucucuua

SEQ ID NO: 1762204 - RNA, 19 nt, Homo sapiens
  misc_RNA (1)...(19): siRNA sense strand
gauguacgcuauucuuuca

SEQ ID NO: 1762205 - RNA, 19 nt, Homo sapiens
  misc_RNA (1)...(19): siRNA sense strand
caacgugaauaaacaaugu

SEQ ID NO: 1762206 - RNA, 19 nt, Homo sapiens
  misc_RNA (1)...(19): siRNA sense strand
agaauuaacucaacagauc

SEQ ID NO: 1762207 - RNA, 19 nt, Homo sapiens
  misc_RNA (1)...(19): siRNA sense strand
gcagacaacagaaugguuu

SEQ ID NO: 1762208 - RNA, 19 nt, Homo sapiens
  misc_RNA (1)...(19): siRNA sense strand
ggugaauucuugcuaaaug

SEQ ID NO: 1762209 - RNA, 19 nt, Homo sapiens
  misc_RNA (1)...(19): siRNA sense strand
ugacaacuacuuagcuuua

SEQ ID NO: 1762210 - RNA, 19 nt, Homo sapiens
  misc_RNA (1)...(19): siRNA sense strand
gaacacagccuacuaucag

SEQ ID NO: 1762211 - RNA, 19 nt, Homo sapiens
  misc_RNA (1)...(19): siRNA sense strand
gccagcaguuucuauuuaa

SEQ ID NO: 1762212 - RNA, 19 nt, Homo sapiens
  misc_RNA (1)...(19): siRNA sense strand
gcaggaacauuuaauacag

SEQ ID NO: 1762213 - RNA, 19 nt, Homo sapiens
  misc_RNA (1)...(19): siRNA sense strand
uauaaagacccaaguauug

SEQ ID NO: 1762214 - RNA, 19 nt, Homo sapiens
  misc_RNA (1)...(19): siRNA sense strand
caucuacugugccaaauau

SEQ ID NO: 1762215 - RNA, 19 nt, Homo sapiens
  misc_RNA (1)...(19): siRNA sense strand
ggacaucuacugugccaaa

SEQ ID NO: 1762216 - RNA, 19 nt, Homo sapiens
  misc_RNA (1)...(19): siRNA sense strand
gaugacaacuacuuagcuu

SEQ ID NO: 1762217 - RNA, 19 nt, Homo sapiens
  misc_RNA (1)...(19): siRNA sense strand
gcacugcaaguauggauuu

SEQ ID NO: 1762218 - RNA, 19 nt, Homo sapiens
  misc_RNA (1)...(19): siRNA sense strand
aaaggugaauucuugcuaa

SEQ ID NO: 1762219 - RNA, 19 nt, Homo sapiens
  misc_RNA (1)...(19): siRNA sense strand
caagcacuguuucuacaaa

SEQ ID NO: 1762220 - RNA, 19 nt, Homo sapiens
  misc_RNA (1)...(19): siRNA sense strand
cgaggcaagugaaauuauu

SEQ ID NO: 1762221 - RNA, 19 nt, Homo sapiens
  misc_RNA (1)...(19): siRNA sense strand
acaacagaaugguuucaua

SEQ ID NO: 1762222 - RNA, 19 nt, Homo sapiens
  misc_RNA (1)...(19): siRNA sense strand
uacaaaggcuaugucaaua

SEQ ID NO: 1762223 - RNA, 19 nt, Homo sapiens
  misc_RNA (1)...(19): siRNA sense strand
ggagaagggcuauuugugu

SEQ ID NO: 1762224 - RNA, 19 nt, Homo sapiens
  misc_RNA (1)...(19): siRNA sense strand
gcagagcucacgacaaaug

SEQ ID NO: 1762225 - RNA, 19 nt, Homo sapiens
  misc_RNA (1)...(19): siRNA sense strand
aaacagacgaugacaacua

SEQ ID NO: 1762226 - RNA, 19 nt, Homo sapiens
  misc_RNA (1)...(19): siRNA sense strand
gcacauuccggucucauga

SEQ ID NO: 1762227 - RNA, 19 nt, Homo sapiens
  misc_RNA (1)...(19): siRNA sense strand
ccacgaacguccacuucaa

SEQ ID NO: 1762228 - RNA, 19 nt, Homo sapiens
  misc_RNA (1)...(19): siRNA sense strand
gauaguggauugaguacag

SEQ ID NO: 1762229 - RNA, 19 nt, Homo sapiens
  misc_RNA (1)...(19): siRNA sense strand
cuacaaaggcuaugucaau

SEQ ID NO: 1762230 - RNA, 19 nt, Homo sapiens
  misc_RNA (1)...(19): siRNA sense strand
cgauaauucuucaugcaaa

SEQ ID NO: 1762231 - RNA, 19 nt, Homo sapiens
  misc_RNA (1)...(19): siRNA sense strand
gaggcaagugaaauuauua

SEQ ID NO: 1762232 - RNA, 19 nt, Homo sapiens
  misc_RNA (1)...(19): siRNA sense strand
ucucaggugugcccauaua

SEQ ID NO: 1762233 - RNA, 19 nt, Homo sapiens
  misc_RNA (1)...(19): siRNA sense strand
gcaaaugcacacaucaaga

SEQ ID NO: 1762234 - RNA, 19 nt, Homo sapiens
  misc_RNA (1)...(19): siRNA sense strand
gaacugggaaccauuugug

SEQ ID NO: 1762235 - RNA, 19 nt, Homo sapiens
  misc_RNA (1)...(19): siRNA sense strand
caagagaaaguuaccauuc

SEQ ID NO: 1762236 - RNA, 19 nt, Homo sapiens
  misc_RNA (1)...(19): siRNA sense strand
uagagacccugagcgaaua

SEQ ID NO: 1762237 - RNA, 19 nt, Homo sapiens
  misc_RNA (1)...(19): siRNA sense strand
gaugacaacaacaaaugua

SEQ ID NO: 1762238 - RNA, 19 nt, Homo sapiens
  misc_RNA (1)...(19): siRNA sense strand
agagagcccucaacaggaa

SEQ ID NO: 1762239 - RNA, 19 nt, Homo sapiens
  misc_RNA (1)...(19): siRNA sense strand
cagggaaucugaucagcuu

SEQ ID NO: 1762240 - RNA, 19 nt, Homo sapiens
  misc_RNA (1)...(19): siRNA sense strand
ggaaacagacgaugacaac

SEQ ID NO: 1762241 - RNA, 19 nt, Homo sapiens
  misc_RNA (1)...(19): siRNA sense strand
uaaauacaguggaauucug

SEQ ID NO: 1762242 - RNA, 19 nt, Homo sapiens
  misc_RNA (1)...(19): siRNA sense strand
gagcugggccauguguuua

SEQ ID NO: 1762243 - RNA, 19 nt, Homo sapiens
  misc_RNA (1)...(19): siRNA sense strand
ggccaggacacaaaugaua

SEQ ID NO: 1762244 - RNA, 19 nt, Homo sapiens
  misc_RNA (1)...(19): siRNA sense strand
gcacacaucaagagaaagu

SEQ ID NO: 1762245 - RNA, 19 nt, Homo sapiens
  misc_RNA (1)...(19): siRNA sense strand
gaacggaaacgaaaacuug

SEQ ID NO: 1762246 - RNA, 19 nt, Homo sapiens
  misc_RNA (1)...(19): siRNA sense strand
aagagaaaguuaccauuca

SEQ ID NO: 1762247 - RNA, 19 nt, Homo sapiens
  misc_RNA (1)...(19): siRNA sense strand
gaagguugaugaugguuuu

SEQ ID NO: 1762248 - RNA, 19 nt, Homo sapiens
  misc_RNA (1)...(19): siRNA sense strand
gaaaagaggacccacagaa

SEQ ID NO: 1762249 - RNA, 19 nt, Homo sapiens
  misc_RNA (1)...(19): siRNA sense strand
gaacgcgacggagcauuaa

SEQ ID NO: 1762250 - RNA, 19 nt, Homo sapiens
  misc_RNA (1)...(19): siRNA sense strand
gagaacccuuucccacgaa

SEQ ID NO: 1762251 - RNA, 19 nt, Homo sapiens
  misc_RNA (1)...(19): siRNA sense strand
gcaagaaaauggggagaaa

SEQ ID NO: 1762252 - RNA, 19 nt, Homo sapiens
  misc_RNA (1)...(19): siRNA sense strand
acacaucaagagaaaguua

SEQ ID NO: 1762253 - RNA, 19 nt, Homo sapiens
  misc_RNA (1)...(19): siRNA sense strand
gaagggcuauuugugucaa

SEQ ID NO: 1762254 - RNA, 19 nt, Homo sapiens
  misc_RNA (1)...(19): siRNA sense strand
ggaacacagccuacuauca

SEQ ID NO: 1762255 - RNA, 19 nt, Homo sapiens
  misc_RNA (1)...(19): siRNA sense strand
gaagcuguucuauuaguga

SEQ ID NO: 1762256 - RNA, 19 nt, Homo sapiens
  misc_RNA (1)...(19): siRNA sense strand
uaaagaagaaggaguuaag

SEQ ID NO: 1762257 - RNA, 19 nt, Homo sapiens
  misc_RNA (1)...(19): siRNA sense strand
uaacucaacagaucgcauu

SEQ ID NO: 1762258 - RNA, 19 nt, Homo sapiens
  misc_RNA (1)...(19): siRNA sense strand
gaagaaaaccagagcaaga

SEQ ID NO: 1762259 - RNA, 19 nt, Homo sapiens
  misc_RNA (1)...(19): siRNA sense strand
gucaauacccgaaaugaug

SEQ ID NO: 1762260 - RNA, 19 nt, Homo sapiens
  misc_RNA (1)...(19): siRNA sense strand
agacugagaagguugauga

SEQ ID NO: 1762261 - RNA, 19 nt, Homo sapiens
  misc_RNA (1)...(19): siRNA sense strand
gacaacuacuuagcuuuau

SEQ ID NO: 1762262 - RNA, 19 nt, Homo sapiens
  misc_RNA (1)...(19): siRNA sense strand
gaaggaccggugcaaguug

SEQ ID NO: 1762263 - RNA, 19 nt, Homo sapiens
  misc_RNA (1)...(19): siRNA sense strand
guggaauucugaugaagga

SEQ ID NO: 1762264 - RNA, 19 nt, Homo sapiens
  misc_RNA (1)...(19): siRNA sense strand
caacagaccagaaccaaaa

SEQ ID NO: 1762265 - RNA, 19 nt, Homo sapiens
  misc_RNA (1)...(19): siRNA sense strand
ggaaccugcuccagaacau

SEQ ID NO: 1762266 - RNA, 19 nt, Homo sapiens
  misc_RNA (1)...(19): siRNA sense strand
guucucaggugugcccaua

SEQ ID NO: 1762267 - RNA, 19 nt, Homo sapiens
  misc_RNA (1)...(19): siRNA sense strand
uagccucuaucuauaaaga

SEQ ID NO: 1762268 - RNA, 19 nt, Homo sapiens
  misc_RNA (1)...(19): siRNA sense strand
gucuauggaugaacaagaa

SEQ ID NO: 1762269 - RNA, 19 nt, Homo sapiens
  misc_RNA (1)...(19): siRNA sense strand
agaacgcgacggagcauua

SEQ ID NO: 1762270 - RNA, 19 nt, Homo sapiens
  misc_RNA (1)...(19): siRNA sense strand
gacagcaaaugcacacauc

SEQ ID NO: 1762271 - RNA, 19 nt, Homo sapiens
  misc_RNA (1)...(19): siRNA sense strand
ggaagacugagaagguuga

SEQ ID NO: 1762272 - RNA, 19 nt, Homo sapiens
  misc_RNA (1)...(19): siRNA sense strand
guccgagacugccguagaa

SEQ ID NO: 1762273 - RNA, 19 nt, Homo sapiens
  misc_RNA (1)...(19): siRNA sense strand
ggauuuaucgcuccacugu

SEQ ID NO: 1762274 - RNA, 19 nt, Homo sapiens
  misc_RNA (1)...(19): siRNA sense strand
gcaguaaaggugaauucuu

SEQ ID NO: 1762275 - RNA, 19 nt, Homo sapiens
  misc_RNA (1)...(19): siRNA sense strand
aaauuuaaguccugcaaca

SEQ ID NO: 1762276 - RNA, 19 nt, Homo sapiens
  misc_RNA (1)...(19): siRNA sense strand
uguaggacguagaaugaaa

SEQ ID NO: 1762277 - RNA, 19 nt, Homo sapiens
  misc_RNA (1)...(19): siRNA sense strand
gcaacagaccagaaccaaa

SEQ ID NO: 1762278 - RNA, 19 nt, Homo sapiens
  misc_RNA (1)...(19): siRNA sense strand
aaacaaaccccacaucauu

SEQ ID NO: 1762279 - RNA, 19 nt, Homo sapiens
  misc_RNA (1)...(19): siRNA sense strand
aaaccaagcaaccgugaaa

SEQ ID NO: 1762280 - RNA, 19 nt, Homo sapiens
  misc_RNA (1)...(19): siRNA sense strand
cugaucagcuuacuguuuc

SEQ ID NO: 1762281 - RNA, 19 nt, Homo sapiens
  misc_RNA (1)...(19): siRNA sense strand
gcauuaacucugccacuga

SEQ ID NO: 1762282 - RNA, 19 nt, Homo sapiens
  misc_RNA (1)...(19): siRNA sense strand
uagugaagauaguggauug

SEQ ID NO: 1762283 - RNA, 19 nt, Homo sapiens
  misc_RNA (1)...(19): siRNA sense strand
cuauaaagacccaaguauu

SEQ ID NO: 1762284 - RNA, 19 nt, Homo sapiens
  misc_RNA (1)...(19): siRNA sense strand
ugacguagcagcauuaaac

SEQ ID NO: 1762285 - RNA, 19 nt, Homo sapiens
  misc_RNA (1)...(19): siRNA sense strand
caggaaggcaugcauguga

SEQ ID NO: 1762286 - RNA, 19 nt, Homo sapiens
  misc_RNA (1)...(19): siRNA sense strand
uaacaucaacggucugcuu

SEQ ID NO: 1762287 - RNA, 19 nt, Homo sapiens
  misc_RNA (1)...(19): siRNA sense strand
cagaggagaagggcuauuu

SEQ ID NO: 1762288 - RNA, 19 nt, Homo sapiens
  misc_RNA (1)...(19): siRNA sense strand
gcaagugaaauuauuagag

SEQ ID NO: 1762289 - RNA, 19 nt, Homo sapiens
  misc_RNA (1)...(19): siRNA sense strand
cgacaaaugugauaccuua

SEQ ID NO: 1762290 - RNA, 19 nt, Homo sapiens
  misc_RNA (1)...(19): siRNA sense strand
ggacguagaaugaaauuua

SEQ ID NO: 1762291 - RNA, 19 nt, Homo sapiens
  misc_RNA (1)...(19): siRNA sense strand
gaaaugauguacuggauga

SEQ ID NO: 1762292 - RNA, 19 nt, Homo sapiens
  misc_RNA (1)...(19): siRNA sense strand
ggaaagcacugcaaguaug

SEQ ID NO: 1762293 - RNA, 19 nt, Homo sapiens
  misc_RNA (1)...(19): siRNA sense strand
ggacacaaaugauaucugu

SEQ ID NO: 1762294 - RNA, 19 nt, Homo sapiens
  misc_RNA (1)...(19): siRNA sense strand
ggaaugcugugguagagua

SEQ ID NO: 1762295 - RNA, 19 nt, Homo sapiens
  misc_RNA (1)...(19): siRNA sense strand
gaagauaguggauugagua

SEQ ID NO: 1762296 - RNA, 19 nt, Homo sapiens
  misc_RNA (1)...(19): siRNA sense strand
ggccagcaguuucuauuua

SEQ ID NO: 1762297 - RNA, 19 nt, Homo sapiens
  misc_RNA (1)...(19): siRNA sense strand
uaaccuggcuggugacgua

SEQ ID NO: 1762298 - RNA, 19 nt, Homo sapiens
  misc_RNA (1)...(19): siRNA sense strand
gagaaaaccuucaacacua

SEQ ID NO: 1762299 - RNA, 19 nt, Homo sapiens
  misc_RNA (1)...(19): siRNA sense strand
acaagaagaugaagaggaa

SEQ ID NO: 1762300 - RNA, 19 nt, Homo sapiens
  misc_RNA (1)...(19): siRNA sense strand
cugcagagcucacgacaaa

SEQ ID NO: 1762301 - RNA, 19 nt, Homo sapiens
  misc_RNA (1)...(19): siRNA sense strand
agacggcucuggugcaaua

SEQ ID NO: 1762302 - RNA, 19 nt, Homo sapiens
  misc_RNA (1)...(19): siRNA sense strand
caguaaaggugaauucuug

SEQ ID NO: 1762303 - RNA, 19 nt, Homo sapiens
  misc_RNA (1)...(19): siRNA sense strand
ugauacugcuguucucuua

SEQ ID NO: 1762304 - RNA, 19 nt, Homo sapiens
  misc_RNA (1)...(19): siRNA sense strand
gauguacgcuauucuuuca

SEQ ID NO: 1762305 - RNA, 19 nt, Homo sapiens
  misc_RNA (1)...(19): siRNA sense strand
caacgugaauaaacaaugu

SEQ ID NO: 1762306 - RNA, 19 nt, Homo sapiens
  misc_RNA (1)...(19): siRNA sense strand
agaauuaacucaacagauc

SEQ ID NO: 1762307 - RNA, 19 nt, Homo sapiens
  misc_RNA (1)...(19): siRNA sense strand
gcagacaacagaaugguuu

SEQ ID NO: 1762308 - RNA, 19 nt, Homo sapiens
  misc_RNA (1)...(19): siRNA sense strand
ggugaauucuugcuaaaug

SEQ ID NO: 1762309 - RNA, 19 nt, Homo sapiens
  misc_RNA (1)...(19): siRNA sense strand
ugacaacuacuuagcuuua

SEQ ID NO: 1762310 - RNA, 19 nt, Homo sapiens
  misc_RNA (1)...(19): siRNA sense strand
gaacacagccuacuaucag

SEQ ID NO: 1762311 - RNA, 19 nt, Homo sapiens
  misc_RNA (1)...(19): siRNA sense strand
gccagcaguuucuauuuaa

SEQ ID NO: 1762312 - RNA, 19 nt, Homo sapiens
  misc_RNA (1)...(19): siRNA sense strand
gcaggaacauuuaauacag

SEQ ID NO: 1762313 - RNA, 19 nt, Homo sapiens
  misc_RNA (1)...(19): siRNA sense strand
uauaaagacccaaguauug

SEQ ID NO: 1762314 - RNA, 19 nt, Homo sapiens
  misc_RNA (1)...(19): siRNA sense strand
caucuacugugccaaauau

SEQ ID NO: 1762315 - RNA, 19 nt, Homo sapiens
  misc_RNA (1)...(19): siRNA sense strand
ggacaucuacugugccaaa

SEQ ID NO: 1762316 - RNA, 19 nt, Homo sapiens
  misc_RNA (1)...(19): siRNA sense strand
gaugacaacuacuuagcuu

SEQ ID NO: 1762317 - RNA, 19 nt, Homo sapiens
  misc_RNA (1)...(19): siRNA sense strand
gcacugcaaguauggauuu

SEQ ID NO: 1762318 - RNA, 19 nt, Homo sapiens
  misc_RNA (1)...(19): siRNA sense strand
aaaggugaauucuugcuaa

SEQ ID NO: 1762319 - RNA, 19 nt, Homo sapiens
  misc_RNA (1)...(19): siRNA sense strand
caagcacuguuucuacaaa

SEQ ID NO: 1762320 - RNA, 19 nt, Homo sapiens
  misc_RNA (1)...(19): siRNA sense strand
cgaggcaagugaaauuauu

SEQ ID NO: 1762321 - RNA, 19 nt, Homo sapiens
  misc_RNA (1)...(19): siRNA sense strand
acaacagaaugguuucaua

SEQ ID NO: 1762322 - RNA, 19 nt, Homo sapiens
  misc_RNA (1)...(19): siRNA sense strand
uacaaaggcuaugucaaua

SEQ ID NO: 1762323 - RNA, 19 nt, Homo sapiens
  misc_RNA (1)...(19): siRNA sense strand
ggagaagggcuauuugugu

SEQ ID NO: 1762324 - RNA, 19 nt, Homo sapiens
  misc_RNA (1)...(19): siRNA sense strand
gcagagcucacgacaaaug

SEQ ID NO: 1762325 - RNA, 19 nt, Homo sapiens
  misc_RNA (1)...(19): siRNA sense strand
aaacagacgaugacaacua

SEQ ID NO: 1762326 - RNA, 19 nt, Homo sapiens
  misc_RNA (1)...(19): siRNA sense strand
gcacauuccggucucauga

SEQ ID NO: 1762327 - RNA, 19 nt, Homo sapiens
  misc_RNA (1)...(19): siRNA sense strand
ccacgaacguccacuucaa

SEQ ID NO: 1762328 - RNA, 19 nt, Homo sapiens
  misc_RNA (1)...(19): siRNA sense strand
gauaguggauugaguacag

SEQ ID NO: 1762329 - RNA, 19 nt, Homo sapiens
  misc_RNA (1)...(19): siRNA sense strand
cuacaaaggcuaugucaau

SEQ ID NO: 1762330 - RNA, 19 nt, Homo sapiens
  misc_RNA (1)...(19): siRNA sense strand
cgauaauucuucaugcaaa

SEQ ID NO: 1762331 - RNA, 19 nt, Homo sapiens
  misc_RNA (1)...(19): siRNA sense strand
gaggcaagugaaauuauua

SEQ ID NO: 1762332 - RNA, 19 nt, Homo sapiens
  misc_RNA (1)...(19): siRNA sense strand
ucucaggugugcccauaua

SEQ ID NO: 1762333 - RNA, 19 nt, Homo sapiens
  misc_RNA (1)...(19): siRNA sense strand
gcaaaugcacacaucaaga

SEQ ID NO: 1762334 - RNA, 19 nt, Homo sapiens
  misc_RNA (1)...(19): siRNA sense strand
gaacugggaaccauuugug

SEQ ID NO: 1762335 - RNA, 19 nt, Homo sapiens
  misc_RNA (1)...(19): siRNA sense strand
caagagaaaguuaccauuc

SEQ ID NO: 1762336 - RNA, 19 nt, Homo sapiens
  misc_RNA (1)...(19): siRNA sense strand
uagagacccugagcgaaua

SEQ ID NO: 1762337 - RNA, 19 nt, Homo sapiens
  misc_RNA (1)...(19): siRNA sense strand
gaugacaacaacaaaugua

SEQ ID NO: 1762338 - RNA, 19 nt, Homo sapiens
  misc_RNA (1)...(19): siRNA sense strand
agagagcccucaacaggaa

SEQ ID NO: 1762339 - RNA, 19 nt, Homo sapiens
  misc_RNA (1)...(19): siRNA sense strand
cagggaaucugaucagcuu

SEQ ID NO: 1762340 - RNA, 19 nt, Homo sapiens
  misc_RNA (1)...(19): siRNA sense strand
ggaaacagacgaugacaac

SEQ ID NO: 1762341 - RNA, 19 nt, Homo sapiens
  misc_RNA (1)...(19): siRNA sense strand
uaaauacaguggaauucug

SEQ ID NO: 1762342 - RNA, 19 nt, Homo sapiens
  misc_RNA (1)...(19): siRNA sense strand
gagcugggccauguguuua

SEQ ID NO: 1762343 - RNA, 19 nt, Homo sapiens
  misc_RNA (1)...(19): siRNA sense strand
ggccaggacacaaaugaua

SEQ ID NO: 1762344 - RNA, 19 nt, Homo sapiens
  misc_RNA (1)...(19): siRNA sense strand
gcacacaucaagagaaagu

SEQ ID NO: 1762345 - RNA, 19 nt, Homo sapiens
  misc_RNA (1)...(19): siRNA sense strand
gaacggaaacgaaaacuug

SEQ ID NO: 1762346 - RNA, 19 nt, Homo sapiens
  misc_RNA (1)...(19): siRNA sense strand
aagagaaaguuaccauuca

SEQ ID NO: 1762347 - RNA, 19 nt, Homo sapiens
  misc_RNA (1)...(19): siRNA sense strand
gaagguugaugaugguuuu

SEQ ID NO: 1762348 - RNA, 19 nt, Homo sapiens
  misc_RNA (1)...(19): siRNA sense strand
gaaaagaggacccacagaa

SEQ ID NO: 1762349 - RNA, 19 nt, Homo sapiens
  misc_RNA (1)...(19): siRNA sense strand
gaacgcgacggagcauuaa

SEQ ID NO: 1762350 - RNA, 19 nt, Homo sapiens
  misc_RNA (1)...(19): siRNA sense strand
gagaacccuuucccacgaa

SEQ ID NO: 1762351 - RNA, 19 nt, Homo sapiens
  misc_RNA (1)...(19): siRNA sense strand
gcaagaaaauggggagaaa

SEQ ID NO: 1762352 - RNA, 19 nt, Homo sapiens
  misc_RNA (1)...(19): siRNA sense strand
acacaucaagagaaaguua

SEQ ID NO: 1762353 - RNA, 19 nt, Homo sapiens
  misc_RNA (1)...(19): siRNA sense strand
gaagggcuauuugugucaa

SEQ ID NO: 1762354 - RNA, 19 nt, Homo sapiens
  misc_RNA (1)...(19): siRNA sense strand
ggaacacagccuacuauca

SEQ ID NO: 1762355 - RNA, 19 nt, Homo sapiens
  misc_RNA (1)...(19): siRNA sense strand
gaagcuguucuauuaguga

SEQ ID NO: 1762356 - RNA, 19 nt, Homo sapiens
  misc_RNA (1)...(19): siRNA sense strand
uaaagaagaaggaguuaag

SEQ ID NO: 1762357 - RNA, 19 nt, Homo sapiens
  misc_RNA (1)...(19): siRNA sense strand
uaacucaacagaucgcauu

SEQ ID NO: 1762358 - RNA, 19 nt, Homo sapiens
  misc_RNA (1)...(19): siRNA sense strand
gaagaaaaccagagcaaga

SEQ ID NO: 1762359 - RNA, 19 nt, Homo sapiens
  misc_RNA (1)...(19): siRNA sense strand
gucaauacccgaaaugaug

SEQ ID NO: 1762360 - RNA, 19 nt, Homo sapiens
  misc_RNA (1)...(19): siRNA sense strand
agacugagaagguugauga

SEQ ID NO: 1762361 - RNA, 19 nt, Homo sapiens
  misc_RNA (1)...(19): siRNA sense strand
gacaacuacuuagcuuuau

SEQ ID NO: 1762362 - RNA, 19 nt, Homo sapiens
  misc_RNA (1)...(19): siRNA sense strand
gaaggaccggugcaaguug

SEQ ID NO: 1762363 - RNA, 19 nt, Homo sapiens
  misc_RNA (1)...(19): siRNA sense strand
guggaauucugaugaagga

SEQ ID NO: 1762364 - RNA, 19 nt, Homo sapiens
  misc_RNA (1)...(19): siRNA sense strand
caacagaccagaaccaaaa

SEQ ID NO: 1762365 - RNA, 19 nt, Homo sapiens
  misc_RNA (1)...(19): siRNA sense strand
ggaaccugcuccagaacau

SEQ ID NO: 1762366 - RNA, 19 nt, Homo sapiens
  misc_RNA (1)...(19): siRNA sense strand
guucucaggugugcccaua

SEQ ID NO: 1762367 - RNA, 19 nt, Homo sapiens
  misc_RNA (1)...(19): siRNA sense strand
uagccucuaucuauaaaga

SEQ ID NO: 1762368 - RNA, 19 nt, Homo sapiens
  misc_RNA (1)...(19): siRNA sense strand
gucuauggaugaacaagaa

SEQ ID NO: 1762369 - RNA, 19 nt, Homo sapiens
  misc_RNA (1)...(19): siRNA sense strand
agaacgcgacggagcauua

SEQ ID NO: 1762370 - RNA, 19 nt, Homo sapiens
  misc_RNA (1)...(19): siRNA sense strand
gacagcaaaugcacacauc

SEQ ID NO: 1762371 - RNA, 19 nt, Homo sapiens
  misc_RNA (1)...(19): siRNA sense strand
ggaagacugagaagguuga

SEQ ID NO: 1762372 - RNA, 19 nt, Homo sapiens
  misc_RNA (1)...(19): siRNA sense strand
guccgagacugccguagaa

SEQ ID NO: 1762373 - RNA, 19 nt, Homo sapiens
  misc_RNA (1)...(19): siRNA sense strand
ggauuuaucgcuccacugu

SEQ ID NO: 1762374 - RNA, 19 nt, Homo sapiens
  misc_RNA (1)...(19): siRNA sense strand
gcaguaaaggugaauucuu

SEQ ID NO: 1762375 - RNA, 19 nt, Homo sapiens
  misc_RNA (1)...(19): siRNA sense strand
aaauuuaaguccugcaaca

SEQ ID NO: 1762376 - RNA, 19 nt, Homo sapiens
  misc_RNA (1)...(19): siRNA sense strand
uguaggacguagaaugaaa

SEQ ID NO: 1762377 - RNA, 19 nt, Homo sapiens
  misc_RNA (1)...(19): siRNA sense strand
gcaacagaccagaaccaaa

SEQ ID NO: 1762378 - RNA, 19 nt, Homo sapiens
  misc_RNA (1)...(19): siRNA sense strand
aaacaaaccccacaucauu

SEQ ID NO: 1762379 - RNA, 19 nt, Homo sapiens
  misc_RNA (1)...(19): siRNA sense strand
aaaccaagcaaccgugaaa

SEQ ID NO: 1762380 - RNA, 19 nt, Homo sapiens
  misc_RNA (1)...(19): siRNA sense strand
cugaucagcuuacuguuuc

SEQ ID NO: 1762381 - RNA, 19 nt, Homo sapiens
  misc_RNA (1)...(19): siRNA sense strand
gcauuaacucugccacuga

SEQ ID NO: 1762382 - RNA, 19 nt, Homo sapiens
  misc_RNA (1)...(19): siRNA sense strand
uagugaagauaguggauug

SEQ ID NO: 1762383 - RNA, 19 nt, Homo sapiens
  misc_RNA (1)...(19): siRNA sense strand
cuauaaagacccaaguauu

SEQ ID NO: 1762384 - RNA, 19 nt, Homo sapiens
  misc_RNA (1)...(19): siRNA sense strand
ugacguagcagcauuaaac

SEQ ID NO: 1762385 - RNA, 19 nt, Homo sapiens
  misc_RNA (1)...(19): siRNA sense strand
caggaaggcaugcauguga

SEQ ID NO: 1762386 - RNA, 19 nt, Homo sapiens
  misc_RNA (1)...(19): siRNA sense strand
uaacaucaacggucugcuu

SEQ ID NO: 1762387 - RNA, 19 nt, Homo sapiens
  misc_RNA (1)...(19): siRNA sense strand
cagaggagaagggcuauuu

SEQ ID NO: 1762388 - RNA, 19 nt, Homo sapiens
  misc_RNA (1)...(19): siRNA sense strand
gcaagugaaauuauuagag

SEQ ID NO: 1762389 - RNA, 19 nt, Homo sapiens
  misc_RNA (1)...(19): siRNA sense strand
cgacaaaugugauaccuua

SEQ ID NO: 1762390 - RNA, 19 nt, Homo sapiens
  misc_RNA (1)...(19): siRNA sense strand
ggacguagaaugaaauuua

SEQ ID NO: 1762391 - RNA, 19 nt, Homo sapiens
  misc_RNA (1)...(19): siRNA sense strand
gaaaugauguacuggauga

SEQ ID NO: 1762392 - RNA, 19 nt, Homo sapiens
  misc_RNA (1)...(19): siRNA sense strand
ggaaagcacugcaaguaug

SEQ ID NO: 1762393 - RNA, 19 nt, Homo sapiens
  misc_RNA (1)...(19): siRNA sense strand
ggacacaaaugauaucugu

SEQ ID NO: 1762394 - RNA, 19 nt, Homo sapiens
  misc_RNA (1)...(19): siRNA sense strand
ggaaugcugugguagagua

SEQ ID NO: 1762395 - RNA, 19 nt, Homo sapiens
  misc_RNA (1)...(19): siRNA sense strand
gaagauaguggauugagua

SEQ ID NO: 1762396 - RNA, 19 nt, Homo sapiens
  misc_RNA (1)...(19): siRNA sense strand
ggccagcaguuucuauuua

SEQ ID NO: 1762397 - RNA, 19 nt, Homo sapiens
  misc_RNA (1)...(19): siRNA sense strand
uaaccuggcuggugacgua

SEQ ID NO: 1762398 - RNA, 19 nt, Homo sapiens
  misc_RNA (1)...(19): siRNA sense strand
gagaaaaccuucaacacua

SEQ ID NO: 1762399 - RNA, 19 nt, Homo sapiens
  misc_RNA (1)...(19): siRNA sense strand
acaagaagaugaagaggaa

SEQ ID NO: 1762400 - RNA, 19 nt, Homo sapiens
  misc_RNA (1)...(19): siRNA sense strand
cugcagagcucacgacaaa

SEQ ID NO: 1762401 - RNA, 19 nt, Homo sapiens
  misc_RNA (1)...(19): siRNA sense strand
agacggcucuggugcaaua

SEQ ID NO: 1762402 - RNA, 19 nt, Homo sapiens
  misc_RNA (1)...(19): siRNA sense strand
caguaaaggugaauucuug

SEQ ID NO: 1762403 - RNA, 19 nt, Homo sapiens
  misc_RNA (1)...(19): siRNA sense strand
ugauacugcuguucucuua

SEQ ID NO: 1762404 - RNA, 19 nt, Homo sapiens
  misc_RNA (1)...(19): siRNA sense strand
gauguacgcuauucuuuca

SEQ ID NO: 1762405 - RNA, 19 nt, Homo sapiens
  misc_RNA (1)...(19): siRNA sense strand
caacgugaauaaacaaugu

SEQ ID NO: 1762406 - RNA, 19 nt, Homo sapiens
  misc_RNA (1)...(19): siRNA sense strand
agaauuaacucaacagauc

SEQ ID NO: 1762407 - RNA, 19 nt, Homo sapiens
  misc_RNA (1)...(19): siRNA sense strand
gcagacaacagaaugguuu

SEQ ID NO: 1762408 - RNA, 19 nt, Homo sapiens
  misc_RNA (1)...(19): siRNA sense strand
ggugaauucuugcuaaaug

SEQ ID NO: 1762409 - RNA, 19 nt, Homo sapiens
  misc_RNA (1)...(19): siRNA sense strand
ugacaacuacuuagcuuua

SEQ ID NO: 1762410 - RNA, 19 nt, Homo sapiens
  misc_RNA (1)...(19): siRNA sense strand
gaacacagccuacuaucag

SEQ ID NO: 1762411 - RNA, 19 nt, Homo sapiens
  misc_RNA (1)...(19): siRNA sense strand
gccagcaguuucuauuuaa

SEQ ID NO: 1762412 - RNA, 19 nt, Homo sapiens
  misc_RNA (1)...(19): siRNA sense strand
gcaggaacauuuaauacag

SEQ ID NO: 1762413 - RNA, 19 nt, Homo sapiens
  misc_RNA (1)...(19): siRNA sense strand
uauaaagacccaaguauug

SEQ ID NO: 1762414 - RNA, 19 nt, Homo sapiens
  misc_RNA (1)...(19): siRNA sense strand
caucuacugugccaaauau

SEQ ID NO: 1762415 - RNA, 19 nt, Homo sapiens
  misc_RNA (1)...(19): siRNA sense strand
ggacaucuacugugccaaa

SEQ ID NO: 1762416 - RNA, 19 nt, Homo sapiens
  misc_RNA (1)...(19): siRNA sense strand
gaugacaacuacuuagcuu

SEQ ID NO: 1762417 - RNA, 19 nt, Homo sapiens
  misc_RNA (1)...(19): siRNA sense strand
gcacugcaaguauggauuu

SEQ ID NO: 1762418 - RNA, 19 nt, Homo sapiens
  misc_RNA (1)...(19): siRNA sense strand
aaaggugaauucuugcuaa

SEQ ID NO: 1762419 - RNA, 19 nt, Homo sapiens
  misc_RNA (1)...(19): siRNA sense strand
caagcacuguuucuacaaa

SEQ ID NO: 1762420 - RNA, 19 nt, Homo sapiens
  misc_RNA (1)...(19): siRNA sense strand
cgaggcaagugaaauuauu

SEQ ID NO: 1762421 - RNA, 19 nt, Homo sapiens
  misc_RNA (1)...(19): siRNA sense strand
acaacagaaugguuucaua

SEQ ID NO: 1762422 - RNA, 19 nt, Homo sapiens
  misc_RNA (1)...(19): siRNA sense strand
uacaaaggcuaugucaaua

SEQ ID NO: 1762423 - RNA, 19 nt, Homo sapiens
  misc_RNA (1)...(19): siRNA sense strand
ggagaagggcuauuugugu

SEQ ID NO: 1762424 - RNA, 19 nt, Homo sapiens
  misc_RNA (1)...(19): siRNA sense strand
gcagagcucacgacaaaug

SEQ ID NO: 1762425 - RNA, 19 nt, Homo sapiens
  misc_RNA (1)...(19): siRNA sense strand
aaacagacgaugacaacua

SEQ ID NO: 1762426 - RNA, 19 nt, Homo sapiens
  misc_RNA (1)...(19): siRNA sense strand
gcacauuccggucucauga

SEQ ID NO: 1762427 - RNA, 19 nt, Homo sapiens
  misc_RNA (1)...(19): siRNA sense strand
ccacgaacguccacuucaa

SEQ ID NO: 1762428 - RNA, 19 nt, Homo sapiens
  misc_RNA (1)...(19): siRNA sense strand
gauaguggauugaguacag

SEQ ID NO: 1762429 - RNA, 19 nt, Homo sapiens
  misc_RNA (1)...(19): siRNA sense strand
cuacaaaggcuaugucaau

SEQ ID NO: 1762430 - RNA, 19 nt, Homo sapiens
  misc_RNA (1)...(19): siRNA sense strand
cgauaauucuucaugcaaa

SEQ ID NO: 1762431 - RNA, 19 nt, Homo sapiens
  misc_RNA (1)...(19): siRNA sense strand
gaggcaagugaaauuauua

SEQ ID NO: 1762432 - RNA, 19 nt, Homo sapiens
  misc_RNA (1)...(19): siRNA sense strand
ucucaggugugcccauaua

SEQ ID NO: 1762433 - RNA, 19 nt, Homo sapiens
  misc_RNA (1)...(19): siRNA sense strand
gcaaaugcacacaucaaga

SEQ ID NO: 1762434 - RNA, 19 nt, Homo sapiens
  misc_RNA (1)...(19): siRNA sense strand
gaacugggaaccauuugug

SEQ ID NO: 1762435 - RNA, 19 nt, Homo sapiens
  misc_RNA (1)...(19): siRNA sense strand
caagagaaaguuaccauuc

SEQ ID NO: 1762436 - RNA, 19 nt, Homo sapiens
  misc_RNA (1)...(19): siRNA sense strand
uagagacccugagcgaaua

SEQ ID NO: 1762437 - RNA, 19 nt, Homo sapiens
  misc_RNA (1)...(19): siRNA sense strand
gaugacaacaacaaaugua

SEQ ID NO: 1762438 - RNA, 19 nt, Homo sapiens
  misc_RNA (1)...(19): siRNA sense strand
agagagcccucaacaggaa

SEQ ID NO: 1762439 - RNA, 19 nt, Homo sapiens
  misc_RNA (1)...(19): siRNA sense strand
cagggaaucugaucagcuu

SEQ ID NO: 1762440 - RNA, 19 nt, Homo sapiens
  misc_RNA (1)...(19): siRNA sense strand
ggaaacagacgaugacaac

SEQ ID NO: 1762441 - RNA, 19 nt, Homo sapiens
  misc_RNA (1)...(19): siRNA sense strand
uaaauacaguggaauucug

SEQ ID NO: 1762442 - RNA, 19 nt, Homo sapiens
  misc_RNA (1)...(19): siRNA sense strand
gagcugggccauguguuua

SEQ ID NO: 1762443 - RNA, 19 nt, Homo sapiens
  misc_RNA (1)...(19): siRNA sense strand
ggccaggacacaaaugaua

SEQ ID NO: 1762444 - RNA, 19 nt, Homo sapiens
  misc_RNA (1)...(19): siRNA sense strand
gcacacaucaagagaaagu

SEQ ID NO: 1762445 - RNA, 19 nt, Homo sapiens
  misc_RNA (1)...(19): siRNA sense strand
gaacggaaacgaaaacuug

SEQ ID NO: 1762446 - RNA, 19 nt, Homo sapiens
  misc_RNA (1)...(19): siRNA sense strand
aagagaaaguuaccauuca

SEQ ID NO: 1762447 - RNA, 19 nt, Homo sapiens
  misc_RNA (1)...(19): siRNA sense strand
gaagguugaugaugguuuu

SEQ ID NO: 1762448 - RNA, 19 nt, Homo sapiens
  misc_RNA (1)...(19): siRNA sense strand
gaaaagaggacccacagaa

SEQ ID NO: 1762449 - RNA, 19 nt, Homo sapiens
  misc_RNA (1)...(19): siRNA sense strand
gaacgcgacggagcauuaa

SEQ ID NO: 1762450 - RNA, 19 nt, Homo sapiens
  misc_RNA (1)...(19): siRNA sense strand
gagaacccuuucccacgaa

SEQ ID NO: 1762451 - RNA, 19 nt, Homo sapiens
  misc_RNA (1)...(19): siRNA sense strand
gcaagaaaauggggagaaa

SEQ ID NO: 1762452 - RNA, 19 nt, Homo sapiens
  misc_RNA (1)...(19): siRNA sense strand
acacaucaagagaaaguua

SEQ ID NO: 1762453 - RNA, 19 nt, Homo sapiens
  misc_RNA (1)...(19): siRNA sense strand
gaagggcuauuugugucaa

SEQ ID NO: 1762454 - RNA, 19 nt, Homo sapiens
  misc_RNA (1)...(19): siRNA sense strand
ggaacacagccuacuauca

SEQ ID NO: 1762455 - RNA, 19 nt, Homo sapiens
  misc_RNA (1)...(19): siRNA sense strand
gaagcuguucuauuaguga

SEQ ID NO: 1762456 - RNA, 19 nt, Homo sapiens
  misc_RNA (1)...(19): siRNA sense strand
uaaagaagaaggaguuaag

SEQ ID NO: 1762457 - RNA, 19 nt, Homo sapiens
  misc_RNA (1)...(19): siRNA sense strand
uaacucaacagaucgcauu

SEQ ID NO: 1762458 - RNA, 19 nt, Homo sapiens
  misc_RNA (1)...(19): siRNA sense strand
gaagaaaaccagagcaaga

SEQ ID NO: 1762459 - RNA, 19 nt, Homo sapiens
  misc_RNA (1)...(19): siRNA sense strand
gucaauacccgaaaugaug

SEQ ID NO: 1762460 - RNA, 19 nt, Homo sapiens
  misc_RNA (1)...(19): siRNA sense strand
agacugagaagguugauga

SEQ ID NO: 1762461 - RNA, 19 nt, Homo sapiens
  misc_RNA (1)...(19): siRNA sense strand
gacaacuacuuagcuuuau

SEQ ID NO: 1762462 - RNA, 19 nt, Homo sapiens
  misc_RNA (1)...(19): siRNA sense strand
gaaggaccggugcaaguug

SEQ ID NO: 1762463 - RNA, 19 nt, Homo sapiens
  misc_RNA (1)...(19): siRNA sense strand
guggaauucugaugaagga

SEQ ID NO: 1762464 - RNA, 19 nt, Homo sapiens
  misc_RNA (1)...(19): siRNA sense strand
caacagaccagaaccaaaa

SEQ ID NO: 1762465 - RNA, 19 nt, Homo sapiens
  misc_RNA (1)...(19): siRNA sense strand
ggaaccugcuccagaacau

SEQ ID NO: 1762466 - RNA, 19 nt, Homo sapiens
  misc_RNA (1)...(19): siRNA sense strand
guucucaggugugcccaua

SEQ ID NO: 1762467 - RNA, 19 nt, Homo sapiens
  misc_RNA (1)...(19): siRNA sense strand
uagccucuaucuauaaaga

SEQ ID NO: 1762468 - RNA, 19 nt, Homo sapiens
  misc_RNA (1)...(19): siRNA sense strand
gucuauggaugaacaagaa

SEQ ID NO: 1762469 - RNA, 19 nt, Homo sapiens
  misc_RNA (1)...(19): siRNA sense strand
agaacgcgacggagcauua

SEQ ID NO: 1762470 - RNA, 19 nt, Homo sapiens
  misc_RNA (1)...(19): siRNA sense strand
gacagcaaaugcacacauc

SEQ ID NO: 1762471 - RNA, 19 nt, Homo sapiens
  misc_RNA (1)...(19): siRNA sense strand
ggaagacugagaagguuga

SEQ ID NO: 1762472 - RNA, 19 nt, Homo sapiens
  misc_RNA (1)...(19): siRNA sense strand
guccgagacugccguagaa

SEQ ID NO: 1762473 - RNA, 19 nt, Homo sapiens
  misc_RNA (1)...(19): siRNA sense strand
ggauuuaucgcuccacugu

SEQ ID NO: 1762474 - RNA, 19 nt, Homo sapiens
  misc_RNA (1)...(19): siRNA sense strand
gcaguaaaggugaauucuu

SEQ ID NO: 1762475 - RNA, 19 nt, Homo sapiens
  misc_RNA (1)...(19): siRNA sense strand
aaauuuaaguccugcaaca

SEQ ID NO: 1762476 - RNA, 19 nt, Homo sapiens
  misc_RNA (1)...(19): siRNA sense strand
uguaggacguagaaugaaa

SEQ ID NO: 1762477 - RNA, 19 nt, Homo sapiens
  misc_RNA (1)...(19): siRNA sense strand
gcaacagaccagaaccaaa

SEQ ID NO: 1762478 - RNA, 19 nt, Homo sapiens
  misc_RNA (1)...(19): siRNA sense strand
aaacaaaccccacaucauu

SEQ ID NO: 1762479 - RNA, 19 nt, Homo sapiens
  misc_RNA (1)...(19): siRNA sense strand
aaaccaagcaaccgugaaa

SEQ ID NO: 1762480 - RNA, 19 nt, Homo sapiens
  misc_RNA (1)...(19): siRNA sense strand
cugaucagcuuacuguuuc

SEQ ID NO: 1762481 - RNA, 19 nt, Homo sapiens
  misc_RNA (1)...(19): siRNA sense strand
gcauuaacucugccacuga

SEQ ID NO: 1762482 - RNA, 19 nt, Homo sapiens
  misc_RNA (1)...(19): siRNA sense strand
uagugaagauaguggauug

SEQ ID NO: 1762483 - RNA, 19 nt, Homo sapiens
  misc_RNA (1)...(19): siRNA sense strand
cuauaaagacccaaguauu

SEQ ID NO: 1762484 - RNA, 19 nt, Homo sapiens
  misc_RNA (1)...(19): siRNA sense strand
ugacguagcagcauuaaac

SEQ ID NO: 1762485 - RNA, 19 nt, Homo sapiens
  misc_RNA (1)...(19): siRNA sense strand
caggaaggcaugcauguga

SEQ ID NO: 1762486 - RNA, 19 nt, Homo sapiens
  misc_RNA (1)...(19): siRNA sense strand
uaacaucaacggucugcuu

SEQ ID NO: 1762487 - RNA, 19 nt, Homo sapiens
  misc_RNA (1)...(19): siRNA sense strand
cagaggagaagggcuauuu

SEQ ID NO: 1762488 - RNA, 19 nt, Homo sapiens
  misc_RNA (1)...(19): siRNA sense strand
gcaagugaaauuauuagag

SEQ ID NO: 1762489 - RNA, 19 nt, Homo sapiens
  misc_RNA (1)...(19): siRNA sense strand
cgacaaaugugauaccuua

SEQ ID NO: 1762490 - RNA, 19 nt, Homo sapiens
  misc_RNA (1)...(19): siRNA sense strand
ggacguagaaugaaauuua

SEQ ID NO: 1762491 - RNA, 19 nt, Homo sapiens
  misc_RNA (1)...(19): siRNA sense strand
gaaaugauguacuggauga

SEQ ID NO: 1762492 - RNA, 19 nt, Homo sapiens
  misc_RNA (1)...(19): siRNA sense strand
ggaaagcacugcaaguaug

SEQ ID NO: 1762493 - RNA, 19 nt, Homo sapiens
  misc_RNA (1)...(19): siRNA sense strand
ggacacaaaugauaucugu

SEQ ID NO: 1762494 - RNA, 19 nt, Homo sapiens
  misc_RNA (1)...(19): siRNA sense strand
ggaaugcugugguagagua

SEQ ID NO: 1762495 - RNA, 19 nt, Homo sapiens
  misc_RNA (1)...(19): siRNA sense strand
gaagauaguggauugagua

SEQ ID NO: 1762496 - RNA, 19 nt, Homo sapiens
  misc_RNA (1)...(19): siRNA sense strand
ggccagcaguuucuauuua

SEQ ID NO: 1762497 - RNA, 19 nt, Homo sapiens
  misc_RNA (1)...(19): siRNA sense strand
uaaccuggcuggugacgua

SEQ ID NO: 1762498 - RNA, 19 nt, Homo sapiens
  misc_RNA (1)...(19): siRNA sense strand
gagaaaaccuucaacacua

SEQ ID NO: 1762499 - RNA, 19 nt, Homo sapiens
  misc_RNA (1)...(19): siRNA sense strand
acaagaagaugaagaggaa

SEQ ID NO: 1762500 - RNA, 19 nt, Homo sapiens
  misc_RNA (1)...(19): siRNA sense strand
cugcagagcucacgacaaa

SEQ ID NO: 1762501 - RNA, 19 nt, Homo sapiens
  misc_RNA (1)...(19): siRNA sense strand
agacggcucuggugcaaua

SEQ ID NO: 1762502 - RNA, 19 nt, Homo sapiens
  misc_RNA (1)...(19): siRNA sense strand
caguaaaggugaauucuug

SEQ ID NO: 1762503 - RNA, 19 nt, Homo sapiens
  misc_RNA (1)...(19): siRNA sense strand
ugauacugcuguucucuua

SEQ ID NO: 1762504 - RNA, 19 nt, Homo sapiens
  misc_RNA (1)...(19): siRNA sense strand
gauguacgcuauucuuuca

SEQ ID NO: 1762505 - RNA, 19 nt, Homo sapiens
  misc_RNA (1)...(19): siRNA sense strand
caacgugaauaaacaaugu

SEQ ID NO: 1762506 - RNA, 19 nt, Homo sapiens
  misc_RNA (1)...(19): siRNA sense strand
agaauuaacucaacagauc

SEQ ID NO: 1762507 - RNA, 19 nt, Homo sapiens
  misc_RNA (1)...(19): siRNA sense strand
gcagacaacagaaugguuu

SEQ ID NO: 1762508 - RNA, 19 nt, Homo sapiens
  misc_RNA (1)...(19): siRNA sense strand
ggugaauucuugcuaaaug

SEQ ID NO: 1762509 - RNA, 19 nt, Homo sapiens
  misc_RNA (1)...(19): siRNA sense strand
ugacaacuacuuagcuuua

SEQ ID NO: 1762510 - RNA, 19 nt, Homo sapiens
  misc_RNA (1)...(19): siRNA sense strand
gaacacagccuacuaucag

SEQ ID NO: 1762511 - RNA, 19 nt, Homo sapiens
  misc_RNA (1)...(19): siRNA sense strand
gccagcaguuucuauuuaa

SEQ ID NO: 1762512 - RNA, 19 nt, Homo sapiens
  misc_RNA (1)...(19): siRNA sense strand
gcaggaacauuuaauacag

SEQ ID NO: 1762513 - RNA, 19 nt, Homo sapiens
  misc_RNA (1)...(19): siRNA sense strand
uauaaagacccaaguauug

SEQ ID NO: 1762514 - RNA, 19 nt, Homo sapiens
  misc_RNA (1)...(19): siRNA sense strand
caucuacugugccaaauau

SEQ ID NO: 1762515 - RNA, 19 nt, Homo sapiens
  misc_RNA (1)...(19): siRNA sense strand
ggacaucuacugugccaaa

SEQ ID NO: 1762516 - RNA, 19 nt, Homo sapiens
  misc_RNA (1)...(19): siRNA sense strand
gaugacaacuacuuagcuu

SEQ ID NO: 1762517 - RNA, 19 nt, Homo sapiens
  misc_RNA (1)...(19): siRNA sense strand
gcacugcaaguauggauuu

SEQ ID NO: 1762518 - RNA, 19 nt, Homo sapiens
  misc_RNA (1)...(19): siRNA sense strand
aaaggugaauucuugcuaa

SEQ ID NO: 1762519 - RNA, 19 nt, Homo sapiens
  misc_RNA (1)...(19): siRNA sense strand
caagcacuguuucuacaaa

SEQ ID NO: 1762520 - RNA, 19 nt, Homo sapiens
  misc_RNA (1)...(19): siRNA sense strand
cgaggcaagugaaauuauu

SEQ ID NO: 1762521 - RNA, 19 nt, Homo sapiens
  misc_RNA (1)...(19): siRNA sense strand
acaacagaaugguuucaua

SEQ ID NO: 1762522 - RNA, 19 nt, Homo sapiens
  misc_RNA (1)...(19): siRNA sense strand
uacaaaggcuaugucaaua

SEQ ID NO: 1762523 - RNA, 19 nt, Homo sapiens
  misc_RNA (1)...(19): siRNA sense strand
ggagaagggcuauuugugu

SEQ ID NO: 1762524 - RNA, 19 nt, Homo sapiens
  misc_RNA (1)...(19): siRNA sense strand
gcagagcucacgacaaaug

SEQ ID NO: 1762525 - RNA, 19 nt, Homo sapiens
  misc_RNA (1)...(19): siRNA sense strand
aaacagacgaugacaacua

SEQ ID NO: 1762526 - RNA, 19 nt, Homo sapiens
  misc_RNA (1)...(19): siRNA sense strand
gcacauuccggucucauga

SEQ ID NO: 1762527 - RNA, 19 nt, Homo sapiens
  misc_RNA (1)...(19): siRNA sense strand
ccacgaacguccacuucaa

SEQ ID NO: 1762528 - RNA, 19 nt, Homo sapiens
  misc_RNA (1)...(19): siRNA sense strand
gauaguggauugaguacag

SEQ ID NO: 1762529 - RNA, 19 nt, Homo sapiens
  misc_RNA (1)...(19): siRNA sense strand
cuacaaaggcuaugucaau

SEQ ID NO: 1762530 - RNA, 19 nt, Homo sapiens
  misc_RNA (1)...(19): siRNA sense strand
cgauaauucuucaugcaaa

SEQ ID NO: 1762531 - RNA, 19 nt, Homo sapiens
  misc_RNA (1)...(19): siRNA sense strand
gaggcaagugaaauuauua

SEQ ID NO: 1762532 - RNA, 19 nt, Homo sapiens
  misc_RNA (1)...(19): siRNA sense strand
ucucaggugugcccauaua

SEQ ID NO: 1762533 - RNA, 19 nt, Homo sapiens
  misc_RNA (1)...(19): siRNA sense strand
gcaaaugcacacaucaaga

SEQ ID NO: 1762534 - RNA, 19 nt, Homo sapiens
  misc_RNA (1)...(19): siRNA sense strand
gaacugggaaccauuugug

SEQ ID NO: 1762535 - RNA, 19 nt, Homo sapiens
  misc_RNA (1)...(19): siRNA sense strand
caagagaaaguuaccauuc

SEQ ID NO: 1762536 - RNA, 19 nt, Homo sapiens
  misc_RNA (1)...(19): siRNA sense strand
uagagacccugagcgaaua

SEQ ID NO: 1762537 - RNA, 19 nt, Homo sapiens
  misc_RNA (1)...(19): siRNA sense strand
gaugacaacaacaaaugua

SEQ ID NO: 1762538 - RNA, 19 nt, Homo sapiens
  misc_RNA (1)...(19): siRNA sense strand
agagagcccucaacaggaa

SEQ ID NO: 1762539 - RNA, 19 nt, Homo sapiens
  misc_RNA (1)...(19): siRNA sense strand
cagggaaucugaucagcuu

SEQ ID NO: 1762540 - RNA, 19 nt, Homo sapiens
  misc_RNA (1)...(19): siRNA sense strand
ggaaacagacgaugacaac

SEQ ID NO: 1762541 - RNA, 19 nt, Homo sapiens
  misc_RNA (1)...(19): siRNA sense strand
uaaauacaguggaauucug

SEQ ID NO: 1762542 - RNA, 19 nt, Homo sapiens
  misc_RNA (1)...(19): siRNA sense strand
gagcugggccauguguuua

SEQ ID NO: 1762543 - RNA, 19 nt, Homo sapiens
  misc_RNA (1)...(19): siRNA sense strand
ggccaggacacaaaugaua

SEQ ID NO: 1762544 - RNA, 19 nt, Homo sapiens
  misc_RNA (1)...(19): siRNA sense strand
gcacacaucaagagaaagu

SEQ ID NO: 1762545 - RNA, 19 nt, Homo sapiens
  misc_RNA (1)...(19): siRNA sense strand
gaacggaaacgaaaacuug

SEQ ID NO: 1762546 - RNA, 19 nt, Homo sapiens
  misc_RNA (1)...(19): siRNA sense strand
aagagaaaguuaccauuca

SEQ ID NO: 1762547 - RNA, 19 nt, Homo sapiens
  misc_RNA (1)...(19): siRNA sense strand
gaagguugaugaugguuuu

SEQ ID NO: 1762548 - RNA, 19 nt, Homo sapiens
  misc_RNA (1)...(19): siRNA sense strand
gaaaagaggacccacagaa

SEQ ID NO: 1762549 - RNA, 19 nt, Homo sapiens
  misc_RNA (1)...(19): siRNA sense strand
gaacgcgacggagcauuaa

SEQ ID NO: 1762550 - RNA, 19 nt, Homo sapiens
  misc_RNA (1)...(19): siRNA sense strand
gagaacccuuucccacgaa

SEQ ID NO: 1762551 - RNA, 19 nt, Homo sapiens
  misc_RNA (1)...(19): siRNA sense strand
gcaagaaaauggggagaaa

SEQ ID NO: 1762552 - RNA, 19 nt, Homo sapiens
  misc_RNA (1)...(19): siRNA sense strand
acacaucaagagaaaguua

SEQ ID NO: 1762553 - RNA, 19 nt, Homo sapiens
  misc_RNA (1)...(19): siRNA sense strand
gaagggcuauuugugucaa

SEQ ID NO: 1762554 - RNA, 19 nt, Homo sapiens
  misc_RNA (1)...(19): siRNA sense strand
ggaacacagccuacuauca

SEQ ID NO: 1762555 - RNA, 19 nt, Homo sapiens
  misc_RNA (1)...(19): siRNA sense strand
gaagcuguucuauuaguga

SEQ ID NO: 1762556 - RNA, 19 nt, Homo sapiens
  misc_RNA (1)...(19): siRNA sense strand
uaaagaagaaggaguuaag

SEQ ID NO: 1762557 - RNA, 19 nt, Homo sapiens
  misc_RNA (1)...(19): siRNA sense strand
uaacucaacagaucgcauu

SEQ ID NO: 1762558 - RNA, 19 nt, Homo sapiens
  misc_RNA (1)...(19): siRNA sense strand
gaagaaaaccagagcaaga

SEQ ID NO: 1762559 - RNA, 19 nt, Homo sapiens
  misc_RNA (1)...(19): siRNA sense strand
gucaauacccgaaaugaug

SEQ ID NO: 1762560 - RNA, 19 nt, Homo sapiens
  misc_RNA (1)...(19): siRNA sense strand
agacugagaagguugauga

SEQ ID NO: 1762561 - RNA, 19 nt, Homo sapiens
  misc_RNA (1)...(19): siRNA sense strand
gacaacuacuuagcuuuau

SEQ ID NO: 1762562 - RNA, 19 nt, Homo sapiens
  misc_RNA (1)...(19): siRNA sense strand
gaaggaccggugcaaguug

SEQ ID NO: 1762563 - RNA, 19 nt, Homo sapiens
  misc_RNA (1)...(19): siRNA sense strand
guggaauucugaugaagga

SEQ ID NO: 1762564 - RNA, 19 nt, Homo sapiens
  misc_RNA (1)...(19): siRNA sense strand
caacagaccagaaccaaaa

SEQ ID NO: 1762565 - RNA, 19 nt, Homo sapiens
  misc_RNA (1)...(19): siRNA sense strand
ggaaccugcuccagaacau

SEQ ID NO: 1762566 - RNA, 19 nt, Homo sapiens
  misc_RNA (1)...(19): siRNA sense strand
guucucaggugugcccaua

SEQ ID NO: 1762567 - RNA, 19 nt, Homo sapiens
  misc_RNA (1)...(19): siRNA sense strand
uagccucuaucuauaaaga

SEQ ID NO: 1762568 - RNA, 19 nt, Homo sapiens
  misc_RNA (1)...(19): siRNA sense strand
gucuauggaugaacaagaa

SEQ ID NO: 1762569 - RNA, 19 nt, Homo sapiens
  misc_RNA (1)...(19): siRNA sense strand
agaacgcgacggagcauua

SEQ ID NO: 1762570 - RNA, 19 nt, Homo sapiens
  misc_RNA (1)...(19): siRNA sense strand
gacagcaaaugcacacauc

SEQ ID NO: 1762571 - RNA, 19 nt, Homo sapiens
  misc_RNA (1)...(19): siRNA sense strand
ggaagacugagaagguuga

SEQ ID NO: 1762572 - RNA, 19 nt, Homo sapiens
  misc_RNA (1)...(19): siRNA sense strand
guccgagacugccguagaa

SEQ ID NO: 1762573 - RNA, 19 nt, Homo sapiens
  misc_RNA (1)...(19): siRNA sense strand
ggauuuaucgcuccacugu

SEQ ID NO: 1762574 - RNA, 19 nt, Homo sapiens
  misc_RNA (1)...(19): siRNA sense strand
gcaguaaaggugaauucuu

SEQ ID NO: 1762575 - RNA, 19 nt, Homo sapiens
  misc_RNA (1)...(19): siRNA sense strand
aaauuuaaguccugcaaca

SEQ ID NO: 1762576 - RNA, 19 nt, Homo sapiens
  misc_RNA (1)...(19): siRNA sense strand
uguaggacguagaaugaaa

SEQ ID NO: 1762577 - RNA, 19 nt, Homo sapiens
  misc_RNA (1)...(19): siRNA sense strand
gcaacagaccagaaccaaa

SEQ ID NO: 1762578 - RNA, 19 nt, Homo sapiens
  misc_RNA (1)...(19): siRNA sense strand
aaacaaaccccacaucauu

SEQ ID NO: 1762579 - RNA, 19 nt, Homo sapiens
  misc_RNA (1)...(19): siRNA sense strand
aaaccaagcaaccgugaaa

SEQ ID NO: 1762580 - RNA, 19 nt, Homo sapiens
  misc_RNA (1)...(19): siRNA sense strand
cugaucagcuuacuguuuc

SEQ ID NO: 1762581 - RNA, 19 nt, Homo sapiens
  misc_RNA (1)...(19): siRNA sense strand
gcauuaacucugccacuga

SEQ ID NO: 1762582 - RNA, 19 nt, Homo sapiens
  misc_RNA (1)...(19): siRNA sense strand
uagugaagauaguggauug

SEQ ID NO: 1762583 - RNA, 19 nt, Homo sapiens
  misc_RNA (1)...(19): siRNA sense strand
cuauaaagacccaaguauu

SEQ ID NO: 1762584 - RNA, 19 nt, Homo sapiens
  misc_RNA (1)...(19): siRNA sense strand
ugacguagcagcauuaaac

SEQ ID NO: 1762585 - RNA, 19 nt, Homo sapiens
  misc_RNA (1)...(19): siRNA sense strand
caggaaggcaugcauguga

SEQ ID NO: 1762586 - RNA, 19 nt, Homo sapiens
  misc_RNA (1)...(19): siRNA sense strand
uaacaucaacggucugcuu

SEQ ID NO: 1762587 - RNA, 19 nt, Homo sapiens
  misc_RNA (1)...(19): siRNA sense strand
cagaggagaagggcuauuu

SEQ ID NO: 1762588 - RNA, 19 nt, Homo sapiens
  misc_RNA (1)...(19): siRNA sense strand
gcaagugaaauuauuagag

SEQ ID NO: 1762589 - RNA, 19 nt, Homo sapiens
  misc_RNA (1)...(19): siRNA sense strand
gaaagaagaucuaaaugug

SEQ ID NO: 1762590 - RNA, 19 nt, Homo sapiens
  misc_RNA (1)...(19): siRNA sense strand
gaacaucagugaaagaaga

SEQ ID NO: 1762591 - RNA, 19 nt, Homo sapiens
  misc_RNA (1)...(19): siRNA sense strand
gaacuaacgcauucaagua

SEQ ID NO: 1762592 - RNA, 19 nt, Homo sapiens
  misc_RNA (1)...(19): siRNA sense strand
gaagaugucagacuaaugu

SEQ ID NO: 1762593 - RNA, 19 nt, Homo sapiens
  misc_RNA (1)...(19): siRNA sense strand
caaguaugauucagcgaua

SEQ ID NO: 1762594 - RNA, 19 nt, Homo sapiens
  misc_RNA (1)...(19): siRNA sense strand
gagcgacaaauucaaguua

SEQ ID NO: 1762595 - RNA, 19 nt, Homo sapiens
  misc_RNA (1)...(19): siRNA sense strand
ggaagucacuccggucaga

SEQ ID NO: 1762596 - RNA, 19 nt, Homo sapiens
  misc_RNA (1)...(19): siRNA sense strand
ggaagucgccauaaagaug

SEQ ID NO: 1762597 - RNA, 19 nt, Homo sapiens
  misc_RNA (1)...(19): siRNA sense strand
gaaaguaguagccgaagug

SEQ ID NO: 1762598 - RNA, 19 nt, Homo sapiens
  misc_RNA (1)...(19): siRNA sense strand
ugaugaagaugucagacua

SEQ ID NO: 1762599 - RNA, 19 nt, Homo sapiens
  misc_RNA (1)...(19): siRNA sense strand
cuacagaacaucagugaaa

SEQ ID NO: 1762600 - RNA, 19 nt, Homo sapiens
  misc_RNA (1)...(19): siRNA sense strand
gaauucagguacccucaau

SEQ ID NO: 1762601 - RNA, 19 nt, Homo sapiens
  misc_RNA (1)...(19): siRNA sense strand
ggaugauucuuguauaaag

SEQ ID NO: 1762602 - RNA, 19 nt, Homo sapiens
  misc_RNA (1)...(19): siRNA sense strand
ggagauauaccaacuguac

SEQ ID NO: 1762603 - RNA, 19 nt, Homo sapiens
  misc_RNA (1)...(19): siRNA sense strand
uaauacaucugguggaagu

SEQ ID NO: 1762604 - RNA, 19 nt, Homo sapiens
  misc_RNA (1)...(19): siRNA sense strand
ggaggaagauauggaaguc

SEQ ID NO: 1762605 - RNA, 19 nt, Homo sapiens
  misc_RNA (1)...(19): siRNA sense strand
cuaacgcauucaaguagua

SEQ ID NO: 1762606 - RNA, 19 nt, Homo sapiens
  misc_RNA (1)...(19): siRNA sense strand
gcgacaaauucaaguuaau

SEQ ID NO: 1762607 - RNA, 19 nt, Homo sapiens
  misc_RNA (1)...(19): siRNA sense strand
acaaauagcugaggaucca

SEQ ID NO: 1762608 - RNA, 19 nt, Homo sapiens
  misc_RNA (1)...(19): siRNA sense strand
gaugucagacuaauguuau

SEQ ID NO: 1762609 - RNA, 19 nt, Homo sapiens
  misc_RNA (1)...(19): siRNA sense strand
cuggaugauucuuguauaa

SEQ ID NO: 1762610 - RNA, 19 nt, Homo sapiens
  misc_RNA (1)...(19): siRNA sense strand
caacuguacuugugcaaaa

SEQ ID NO: 1762611 - RNA, 19 nt, Homo sapiens
  misc_RNA (1)...(19): siRNA sense strand
gaugaagaugucagacuaa

SEQ ID NO: 1762612 - RNA, 19 nt, Homo sapiens
  misc_RNA (1)...(19): siRNA sense strand
gauggugguuguagggaau

SEQ ID NO: 1762613 - RNA, 19 nt, Homo sapiens
  misc_RNA (1)...(19): siRNA sense strand
gaauggagcaguuggaaaa

SEQ ID NO: 1762614 - RNA, 19 nt, Homo sapiens
  misc_RNA (1)...(19): siRNA sense strand
ggaauggagcaguuggaaa

SEQ ID NO: 1762615 - RNA, 19 nt, Homo sapiens
  misc_RNA (1)...(19): siRNA sense strand
cagaaacucaaacaacaaa

SEQ ID NO: 1762616 - RNA, 19 nt, Homo sapiens
  misc_RNA (1)...(19): siRNA sense strand
gaagugggagauauaccaa

SEQ ID NO: 1762617 - RNA, 19 nt, Homo sapiens
  misc_RNA (1)...(19): siRNA sense strand
caaacaaaggaccaagaaa

SEQ ID NO: 1762618 - RNA, 19 nt, Homo sapiens
  misc_RNA (1)...(19): siRNA sense strand
uauaccaacuguacuugug

SEQ ID NO: 1762619 - RNA, 19 nt, Homo sapiens
  misc_RNA (1)...(19): siRNA sense strand
gcauucaaguaguaacaag

SEQ ID NO: 1762620 - RNA, 19 nt, Homo sapiens
  misc_RNA (1)...(19): siRNA sense strand
ucuggaugauucuuguaua

SEQ ID NO: 1762621 - RNA, 19 nt, Homo sapiens
  misc_RNA (1)...(19): siRNA sense strand
uugaagcaguuuccaguug

SEQ ID NO: 1762622 - RNA, 19 nt, Homo sapiens
  misc_RNA (1)...(19): siRNA sense strand
cgacaaauucaaguuaaug

SEQ ID NO: 1762623 - RNA, 19 nt, Homo sapiens
  misc_RNA (1)...(19): siRNA sense strand
guuggaaaaucaaguauga

SEQ ID NO: 1762624 - RNA, 19 nt, Homo sapiens
  misc_RNA (1)...(19): siRNA sense strand
acaaacaaaggaccaagaa

SEQ ID NO: 1762625 - RNA, 19 nt, Homo sapiens
  misc_RNA (1)...(19): siRNA sense strand
ucaaguaguaacaagauug

SEQ ID NO: 1762626 - RNA, 19 nt, Homo sapiens
  misc_RNA (1)...(19): siRNA sense strand
uuacaaaggccuacuaucg

SEQ ID NO: 1762627 - RNA, 19 nt, Homo sapiens
  misc_RNA (1)...(19): siRNA sense strand
cagaacaucagugaaagaa

SEQ ID NO: 1762628 - RNA, 19 nt, Homo sapiens
  misc_RNA (1)...(19): siRNA sense strand
aaacaaaggaccaagaaaa

SEQ ID NO: 1762629 - RNA, 19 nt, Homo sapiens
  misc_RNA (1)...(19): siRNA sense strand
gaagaucuaaaugugaaug

SEQ ID NO: 1762630 - RNA, 19 nt, Homo sapiens
  misc_RNA (1)...(19): siRNA sense strand
gauccagaacuaacgcauu

SEQ ID NO: 1762631 - RNA, 19 nt, Homo sapiens
  misc_RNA (1)...(19): siRNA sense strand
ggagcgacaaauucaaguu

SEQ ID NO: 1762632 - RNA, 19 nt, Homo sapiens
  misc_RNA (1)...(19): siRNA sense strand
uuuaauacaucugguggaa

SEQ ID NO: 1762633 - RNA, 19 nt, Homo sapiens
  misc_RNA (1)...(19): siRNA sense strand
gaucuaaaugugaaugaag

SEQ ID NO: 1762634 - RNA, 19 nt, Homo sapiens
  misc_RNA (1)...(19): siRNA sense strand
caauuacaaaggccuacua

SEQ ID NO: 1762635 - RNA, 19 nt, Homo sapiens
  misc_RNA (1)...(19): siRNA sense strand
gaaaaccauuggaguugau

SEQ ID NO: 1762636 - RNA, 19 nt, Homo sapiens
  misc_RNA (1)...(19): siRNA sense strand
uuuagcagcuguagcauac

SEQ ID NO: 1762637 - RNA, 19 nt, Homo sapiens
  misc_RNA (1)...(19): siRNA sense strand
gauauaccaacuguacuug

SEQ ID NO: 1762638 - RNA, 19 nt, Homo sapiens
  misc_RNA (1)...(19): siRNA sense strand
ucacuccggucagaauuca

SEQ ID NO: 1762639 - RNA, 19 nt, Homo sapiens
  misc_RNA (1)...(19): siRNA sense strand
caagaaaaccauuggaguu

SEQ ID NO: 1762640 - RNA, 19 nt, Homo sapiens
  misc_RNA (1)...(19): siRNA sense strand
uucagaaacucaaacaaca

SEQ ID NO: 1762641 - RNA, 19 nt, Homo sapiens
  misc_RNA (1)...(19): siRNA sense strand
agcgacaaauucaaguuaa

SEQ ID NO: 1762642 - RNA, 19 nt, Homo sapiens
  misc_RNA (1)...(19): siRNA sense strand
uguagggaauggagcaguu

SEQ ID NO: 1762643 - RNA, 19 nt, Homo sapiens
  misc_RNA (1)...(19): siRNA sense strand
ugggagauauaccaacugu

SEQ ID NO: 1762644 - RNA, 19 nt, Homo sapiens
  misc_RNA (1)...(19): siRNA sense strand
agaugucagacuaauguua

SEQ ID NO: 1762645 - RNA, 19 nt, Homo sapiens
  misc_RNA (1)...(19): siRNA sense strand
agauuggugucuuuaauac

SEQ ID NO: 1762646 - RNA, 19 nt, Homo sapiens
  misc_RNA (1)...(19): siRNA sense strand
ucagaaacucaaacaacaa

SEQ ID NO: 1762647 - RNA, 19 nt, Homo sapiens
  misc_RNA (1)...(19): siRNA sense strand
caggaggaauuugaugcaa

SEQ ID NO: 1762648 - RNA, 19 nt, Homo sapiens
  misc_RNA (1)...(19): siRNA sense strand
uacaaaggccuacuaucga

SEQ ID NO: 1762649 - RNA, 19 nt, Homo sapiens
  misc_RNA (1)...(19): siRNA sense strand
uaacgcauucaaguaguaa

SEQ ID NO: 1762650 - RNA, 19 nt, Homo sapiens
  misc_RNA (1)...(19): siRNA sense strand
gugaaagaagaucuaaaug

SEQ ID NO: 1762651 - RNA, 19 nt, Homo sapiens
  misc_RNA (1)...(19): siRNA sense strand
uagccgaagugggagauau

SEQ ID NO: 1762652 - RNA, 19 nt, Homo sapiens
  misc_RNA (1)...(19): siRNA sense strand
gauagggaaucuuuugaag

SEQ ID NO: 1762653 - RNA, 19 nt, Homo sapiens
  misc_RNA (1)...(19): siRNA sense strand
gaagucacuccggucagaa

SEQ ID NO: 1762654 - RNA, 19 nt, Homo sapiens
  misc_RNA (1)...(19): siRNA sense strand
gggaauggagcaguuggaa

SEQ ID NO: 1762655 - RNA, 19 nt, Homo sapiens
  misc_RNA (1)...(19): siRNA sense strand
gcaguuggaaaaucaagua

SEQ ID NO: 1762656 - RNA, 19 nt, Homo sapiens
  misc_RNA (1)...(19): siRNA sense strand
caggucaggaggaauuuga

SEQ ID NO: 1762657 - RNA, 19 nt, Homo sapiens
  misc_RNA (1)...(19): siRNA sense strand
ccucaaugguggagauguc

SEQ ID NO: 1762658 - RNA, 19 nt, Homo sapiens
  misc_RNA (1)...(19): siRNA sense strand
auccagaacuaacgcauuc

SEQ ID NO: 1762659 - RNA, 19 nt, Homo sapiens
  misc_RNA (1)...(19): siRNA sense strand
uuggagagagaaaguagua

SEQ ID NO: 1762660 - RNA, 19 nt, Homo sapiens
  misc_RNA (1)...(19): siRNA sense strand
gcugaggauccagaacuaa

SEQ ID NO: 1762661 - RNA, 19 nt, Homo sapiens
  misc_RNA (1)...(19): siRNA sense strand
ggucaggaggaauuugaug

SEQ ID NO: 1762662 - RNA, 19 nt, Homo sapiens
  misc_RNA (1)...(19): siRNA sense strand
aaacagaaauccuuuuagc

SEQ ID NO: 1762663 - RNA, 19 nt, Homo sapiens
  misc_RNA (1)...(19): siRNA sense strand
caaguaguaacaagauugg

SEQ ID NO: 1762664 - RNA, 19 nt, Homo sapiens
  misc_RNA (1)...(19): siRNA sense strand
ccagaacuaacgcauucaa

SEQ ID NO: 1762665 - RNA, 19 nt, Homo sapiens
  misc_RNA (1)...(19): siRNA sense strand
agauauaccaacuguacuu

SEQ ID NO: 1762666 - RNA, 19 nt, Homo sapiens
  misc_RNA (1)...(19): siRNA sense strand
uauaaagaaugaggaagcu

SEQ ID NO: 1762667 - RNA, 19 nt, Homo sapiens
  misc_RNA (1)...(19): siRNA sense strand
agaacuaacgcauucaagu

SEQ ID NO: 1762668 - RNA, 19 nt, Homo sapiens
  misc_RNA (1)...(19): siRNA sense strand
ucagugaaagaagaucuaa

SEQ ID NO: 1762669 - RNA, 19 nt, Homo sapiens
  misc_RNA (1)...(19): siRNA sense strand
aggaggaauuugaugcaau

SEQ ID NO: 1762670 - RNA, 19 nt, Homo sapiens
  misc_RNA (1)...(19): siRNA sense strand
aaucuuagacccaacaaac

SEQ ID NO: 1762671 - RNA, 19 nt, Homo sapiens
  misc_RNA (1)...(19): siRNA sense strand
cgaagugggagauauacca

SEQ ID NO: 1762672 - RNA, 19 nt, Homo sapiens
  misc_RNA (1)...(19): siRNA sense strand
agaaaguaguagccgaagu

SEQ ID NO: 1762673 - RNA, 19 nt, Homo sapiens
  misc_RNA (1)...(19): siRNA sense strand
cguguucucuaccacagau

SEQ ID NO: 1762674 - RNA, 19 nt, Homo sapiens
  misc_RNA (1)...(19): siRNA sense strand
cgauauugcaaaggcauuu

SEQ ID NO: 1762675 - RNA, 19 nt, Homo sapiens
  misc_RNA (1)...(19): siRNA sense strand
cugcaggucaggaggaauu

SEQ ID NO: 1762676 - RNA, 19 nt, Homo sapiens
  misc_RNA (1)...(19): siRNA sense strand
uacagaacaucagugaaag

SEQ ID NO: 1762677 - RNA, 19 nt, Homo sapiens
  misc_RNA (1)...(19): siRNA sense strand
aagcugaggcacuggcaaa

SEQ ID NO: 1762678 - RNA, 19 nt, Homo sapiens
  misc_RNA (1)...(19): siRNA sense strand
uagggaaucuuuugaagca

SEQ ID NO: 1762679 - RNA, 19 nt, Homo sapiens
  misc_RNA (1)...(19): siRNA sense strand
cauaaagauggugguugua

SEQ ID NO: 1762680 - RNA, 19 nt, Homo sapiens
  misc_RNA (1)...(19): siRNA sense strand
ugaagaugucagacuaaug

SEQ ID NO: 1762681 - RNA, 19 nt, Homo sapiens
  misc_RNA (1)...(19): siRNA sense strand
gaaagaagaucuaaaugug

SEQ ID NO: 1762682 - RNA, 19 nt, Homo sapiens
  misc_RNA (1)...(19): siRNA sense strand
gaacaucagugaaagaaga

SEQ ID NO: 1762683 - RNA, 19 nt, Homo sapiens
  misc_RNA (1)...(19): siRNA sense strand
gaacuaacgcauucaagua

SEQ ID NO: 1762684 - RNA, 19 nt, Homo sapiens
  misc_RNA (1)...(19): siRNA sense strand
gaagaugucagacuaaugu

SEQ ID NO: 1762685 - RNA, 19 nt, Homo sapiens
  misc_RNA (1)...(19): siRNA sense strand
caaguaugauucagcgaua

SEQ ID NO: 1762686 - RNA, 19 nt, Homo sapiens
  misc_RNA (1)...(19): siRNA sense strand
gagcgacaaauucaaguua

SEQ ID NO: 1762687 - RNA, 19 nt, Homo sapiens
  misc_RNA (1)...(19): siRNA sense strand
ggaagucacuccggucaga

SEQ ID NO: 1762688 - RNA, 19 nt, Homo sapiens
  misc_RNA (1)...(19): siRNA sense strand
ggaagucgccauaaagaug

SEQ ID NO: 1762689 - RNA, 19 nt, Homo sapiens
  misc_RNA (1)...(19): siRNA sense strand
gaaaguaguagccgaagug

SEQ ID NO: 1762690 - RNA, 19 nt, Homo sapiens
  misc_RNA (1)...(19): siRNA sense strand
ugaugaagaugucagacua

SEQ ID NO: 1762691 - RNA, 19 nt, Homo sapiens
  misc_RNA (1)...(19): siRNA sense strand
cuacagaacaucagugaaa

SEQ ID NO: 1762692 - RNA, 19 nt, Homo sapiens
  misc_RNA (1)...(19): siRNA sense strand
gaauucagguacccucaau

SEQ ID NO: 1762693 - RNA, 19 nt, Homo sapiens
  misc_RNA (1)...(19): siRNA sense strand
ggaugauucuuguauaaag

SEQ ID NO: 1762694 - RNA, 19 nt, Homo sapiens
  misc_RNA (1)...(19): siRNA sense strand
ggagauauaccaacuguac

SEQ ID NO: 1762695 - RNA, 19 nt, Homo sapiens
  misc_RNA (1)...(19): siRNA sense strand
uaauacaucugguggaagu

SEQ ID NO: 1762696 - RNA, 19 nt, Homo sapiens
  misc_RNA (1)...(19): siRNA sense strand
ggaggaagauauggaaguc

SEQ ID NO: 1762697 - RNA, 19 nt, Homo sapiens
  misc_RNA (1)...(19): siRNA sense strand
cuaacgcauucaaguagua

SEQ ID NO: 1762698 - RNA, 19 nt, Homo sapiens
  misc_RNA (1)...(19): siRNA sense strand
gcgacaaauucaaguuaau

SEQ ID NO: 1762699 - RNA, 19 nt, Homo sapiens
  misc_RNA (1)...(19): siRNA sense strand
acaaauagcugaggaucca

SEQ ID NO: 1762700 - RNA, 19 nt, Homo sapiens
  misc_RNA (1)...(19): siRNA sense strand
gaugucagacuaauguuau

SEQ ID NO: 1762701 - RNA, 19 nt, Homo sapiens
  misc_RNA (1)...(19): siRNA sense strand
cuggaugauucuuguauaa

SEQ ID NO: 1762702 - RNA, 19 nt, Homo sapiens
  misc_RNA (1)...(19): siRNA sense strand
caacuguacuugugcaaaa

SEQ ID NO: 1762703 - RNA, 19 nt, Homo sapiens
  misc_RNA (1)...(19): siRNA sense strand
gaugaagaugucagacuaa

SEQ ID NO: 1762704 - RNA, 19 nt, Homo sapiens
  misc_RNA (1)...(19): siRNA sense strand
gauggugguuguagggaau

SEQ ID NO: 1762705 - RNA, 19 nt, Homo sapiens
  misc_RNA (1)...(19): siRNA sense strand
gaauggagcaguuggaaaa

SEQ ID NO: 1762706 - RNA, 19 nt, Homo sapiens
  misc_RNA (1)...(19): siRNA sense strand
ggaauggagcaguuggaaa

SEQ ID NO: 1762707 - RNA, 19 nt, Homo sapiens
  misc_RNA (1)...(19): siRNA sense strand
cagaaacucaaacaacaaa

SEQ ID NO: 1762708 - RNA, 19 nt, Homo sapiens
  misc_RNA (1)...(19): siRNA sense strand
gaagugggagauauaccaa

SEQ ID NO: 1762709 - RNA, 19 nt, Homo sapiens
  misc_RNA (1)...(19): siRNA sense strand
caaacaaaggaccaagaaa

SEQ ID NO: 1762710 - RNA, 19 nt, Homo sapiens
  misc_RNA (1)...(19): siRNA sense strand
uauaccaacuguacuugug

SEQ ID NO: 1762711 - RNA, 19 nt, Homo sapiens
  misc_RNA (1)...(19): siRNA sense strand
gcauucaaguaguaacaag

SEQ ID NO: 1762712 - RNA, 19 nt, Homo sapiens
  misc_RNA (1)...(19): siRNA sense strand
ucuggaugauucuuguaua

SEQ ID NO: 1762713 - RNA, 19 nt, Homo sapiens
  misc_RNA (1)...(19): siRNA sense strand
uugaagcaguuuccaguug

SEQ ID NO: 1762714 - RNA, 19 nt, Homo sapiens
  misc_RNA (1)...(19): siRNA sense strand
cgacaaauucaaguuaaug

SEQ ID NO: 1762715 - RNA, 19 nt, Homo sapiens
  misc_RNA (1)...(19): siRNA sense strand
guuggaaaaucaaguauga

SEQ ID NO: 1762716 - RNA, 19 nt, Homo sapiens
  misc_RNA (1)...(19): siRNA sense strand
acaaacaaaggaccaagaa

SEQ ID NO: 1762717 - RNA, 19 nt, Homo sapiens
  misc_RNA (1)...(19): siRNA sense strand
ucaaguaguaacaagauug

SEQ ID NO: 1762718 - RNA, 19 nt, Homo sapiens
  misc_RNA (1)...(19): siRNA sense strand
uuacaaaggccuacuaucg

SEQ ID NO: 1762719 - RNA, 19 nt, Homo sapiens
  misc_RNA (1)...(19): siRNA sense strand
cagaacaucagugaaagaa

SEQ ID NO: 1762720 - RNA, 19 nt, Homo sapiens
  misc_RNA (1)...(19): siRNA sense strand
aaacaaaggaccaagaaaa

SEQ ID NO: 1762721 - RNA, 19 nt, Homo sapiens
  misc_RNA (1)...(19): siRNA sense strand
gaagaucuaaaugugaaug

SEQ ID NO: 1762722 - RNA, 19 nt, Homo sapiens
  misc_RNA (1)...(19): siRNA sense strand
gauccagaacuaacgcauu

SEQ ID NO: 1762723 - RNA, 19 nt, Homo sapiens
  misc_RNA (1)...(19): siRNA sense strand
ggagcgacaaauucaaguu

SEQ ID NO: 1762724 - RNA, 19 nt, Homo sapiens
  misc_RNA (1)...(19): siRNA sense strand
uuuaauacaucugguggaa

SEQ ID NO: 1762725 - RNA, 19 nt, Homo sapiens
  misc_RNA (1)...(19): siRNA sense strand
gaucuaaaugugaaugaag

SEQ ID NO: 1762726 - RNA, 19 nt, Homo sapiens
  misc_RNA (1)...(19): siRNA sense strand
caauuacaaaggccuacua

SEQ ID NO: 1762727 - RNA, 19 nt, Homo sapiens
  misc_RNA (1)...(19): siRNA sense strand
gaaaaccauuggaguugau

SEQ ID NO: 1762728 - RNA, 19 nt, Homo sapiens
  misc_RNA (1)...(19): siRNA sense strand
uuuagcagcuguagcauac

SEQ ID NO: 1762729 - RNA, 19 nt, Homo sapiens
  misc_RNA (1)...(19): siRNA sense strand
gauauaccaacuguacuug

SEQ ID NO: 1762730 - RNA, 19 nt, Homo sapiens
  misc_RNA (1)...(19): siRNA sense strand
ucacuccggucagaauuca

SEQ ID NO: 1762731 - RNA, 19 nt, Homo sapiens
  misc_RNA (1)...(19): siRNA sense strand
caagaaaaccauuggaguu

SEQ ID NO: 1762732 - RNA, 19 nt, Homo sapiens
  misc_RNA (1)...(19): siRNA sense strand
uucagaaacucaaacaaca

SEQ ID NO: 1762733 - RNA, 19 nt, Homo sapiens
  misc_RNA (1)...(19): siRNA sense strand
agcgacaaauucaaguuaa

SEQ ID NO: 1762734 - RNA, 19 nt, Homo sapiens
  misc_RNA (1)...(19): siRNA sense strand
uguagggaauggagcaguu

SEQ ID NO: 1762735 - RNA, 19 nt, Homo sapiens
  misc_RNA (1)...(19): siRNA sense strand
ugggagauauaccaacugu

SEQ ID NO: 1762736 - RNA, 19 nt, Homo sapiens
  misc_RNA (1)...(19): siRNA sense strand
agaugucagacuaauguua

SEQ ID NO: 1762737 - RNA, 19 nt, Homo sapiens
  misc_RNA (1)...(19): siRNA sense strand
agauuggugucuuuaauac

SEQ ID NO: 1762738 - RNA, 19 nt, Homo sapiens
  misc_RNA (1)...(19): siRNA sense strand
ucagaaacucaaacaacaa

SEQ ID NO: 1762739 - RNA, 19 nt, Homo sapiens
  misc_RNA (1)...(19): siRNA sense strand
caggaggaauuugaugcaa

SEQ ID NO: 1762740 - RNA, 19 nt, Homo sapiens
  misc_RNA (1)...(19): siRNA sense strand
uacaaaggccuacuaucga

SEQ ID NO: 1762741 - RNA, 19 nt, Homo sapiens
  misc_RNA (1)...(19): siRNA sense strand
uaacgcauucaaguaguaa

SEQ ID NO: 1762742 - RNA, 19 nt, Homo sapiens
  misc_RNA (1)...(19): siRNA sense strand
gugaaagaagaucuaaaug

SEQ ID NO: 1762743 - RNA, 19 nt, Homo sapiens
  misc_RNA (1)...(19): siRNA sense strand
uagccgaagugggagauau

SEQ ID NO: 1762744 - RNA, 19 nt, Homo sapiens
  misc_RNA (1)...(19): siRNA sense strand
gauagggaaucuuuugaag

SEQ ID NO: 1762745 - RNA, 19 nt, Homo sapiens
  misc_RNA (1)...(19): siRNA sense strand
gaagucacuccggucagaa

SEQ ID NO: 1762746 - RNA, 19 nt, Homo sapiens
  misc_RNA (1)...(19): siRNA sense strand
gggaauggagcaguuggaa

SEQ ID NO: 1762747 - RNA, 19 nt, Homo sapiens
  misc_RNA (1)...(19): siRNA sense strand
gcaguuggaaaaucaagua

SEQ ID NO: 1762748 - RNA, 19 nt, Homo sapiens
  misc_RNA (1)...(19): siRNA sense strand
caggucaggaggaauuuga

SEQ ID NO: 1762749 - RNA, 19 nt, Homo sapiens
  misc_RNA (1)...(19): siRNA sense strand
ccucaaugguggagauguc

SEQ ID NO: 1762750 - RNA, 19 nt, Homo sapiens
  misc_RNA (1)...(19): siRNA sense strand
auccagaacuaacgcauuc

SEQ ID NO: 1762751 - RNA, 19 nt, Homo sapiens
  misc_RNA (1)...(19): siRNA sense strand
uuggagagagaaaguagua

SEQ ID NO: 1762752 - RNA, 19 nt, Homo sapiens
  misc_RNA (1)...(19): siRNA sense strand
gcugaggauccagaacuaa

SEQ ID NO: 1762753 - RNA, 19 nt, Homo sapiens
  misc_RNA (1)...(19): siRNA sense strand
ggucaggaggaauuugaug

SEQ ID NO: 1762754 - RNA, 19 nt, Homo sapiens
  misc_RNA (1)...(19): siRNA sense strand
aaacagaaauccuuuuagc

SEQ ID NO: 1762755 - RNA, 19 nt, Homo sapiens
  misc_RNA (1)...(19): siRNA sense strand
caaguaguaacaagauugg

SEQ ID NO: 1762756 - RNA, 19 nt, Homo sapiens
  misc_RNA (1)...(19): siRNA sense strand
ccagaacuaacgcauucaa

SEQ ID NO: 1762757 - RNA, 19 nt, Homo sapiens
  misc_RNA (1)...(19): siRNA sense strand
agauauaccaacuguacuu

SEQ ID NO: 1762758 - RNA, 19 nt, Homo sapiens
  misc_RNA (1)...(19): siRNA sense strand
uauaaagaaugaggaagcu

SEQ ID NO: 1762759 - RNA, 19 nt, Homo sapiens
  misc_RNA (1)...(19): siRNA sense strand
agaacuaacgcauucaagu

SEQ ID NO: 1762760 - RNA, 19 nt, Homo sapiens
  misc_RNA (1)...(19): siRNA sense strand
ucagugaaagaagaucuaa

SEQ ID NO: 1762761 - RNA, 19 nt, Homo sapiens
  misc_RNA (1)...(19): siRNA sense strand
aggaggaauuugaugcaau

SEQ ID NO: 1762762 - RNA, 19 nt, Homo sapiens
  misc_RNA (1)...(19): siRNA sense strand
aaucuuagacccaacaaac

SEQ ID NO: 1762763 - RNA, 19 nt, Homo sapiens
  misc_RNA (1)...(19): siRNA sense strand
cgaagugggagauauacca

SEQ ID NO: 1762764 - RNA, 19 nt, Homo sapiens
  misc_RNA (1)...(19): siRNA sense strand
agaaaguaguagccgaagu

SEQ ID NO: 1762765 - RNA, 19 nt, Homo sapiens
  misc_RNA (1)...(19): siRNA sense strand
cguguucucuaccacagau

SEQ ID NO: 1762766 - RNA, 19 nt, Homo sapiens
  misc_RNA (1)...(19): siRNA sense strand
cgauauugcaaaggcauuu

SEQ ID NO: 1762767 - RNA, 19 nt, Homo sapiens
  misc_RNA (1)...(19): siRNA sense strand
cugcaggucaggaggaauu

SEQ ID NO: 1762768 - RNA, 19 nt, Homo sapiens
  misc_RNA (1)...(19): siRNA sense strand
uacagaacaucagugaaag

SEQ ID NO: 1762769 - RNA, 19 nt, Homo sapiens
  misc_RNA (1)...(19): siRNA sense strand
aagcugaggcacuggcaaa

SEQ ID NO: 1762770 - RNA, 19 nt, Homo sapiens
  misc_RNA (1)...(19): siRNA sense strand
uagggaaucuuuugaagca

SEQ ID NO: 1762771 - RNA, 19 nt, Homo sapiens
  misc_RNA (1)...(19): siRNA sense strand
cauaaagauggugguugua

SEQ ID NO: 1762772 - RNA, 19 nt, Homo sapiens
  misc_RNA (1)...(19): siRNA sense strand
ugaagaugucagacuaaug

SEQ ID NO: 1762773 - RNA, 19 nt, Homo sapiens
  misc_RNA (1)...(19): siRNA sense strand
gaaagaagaucuaaaugug

SEQ ID NO: 1762774 - RNA, 19 nt, Homo sapiens
  misc_RNA (1)...(19): siRNA sense strand
gaacaucagugaaagaaga

SEQ ID NO: 1762775 - RNA, 19 nt, Homo sapiens
  misc_RNA (1)...(19): siRNA sense strand
gaacuaacgcauucaagua

SEQ ID NO: 1762776 - RNA, 19 nt, Homo sapiens
  misc_RNA (1)...(19): siRNA sense strand
gaagaugucagacuaaugu

SEQ ID NO: 1762777 - RNA, 19 nt, Homo sapiens
  misc_RNA (1)...(19): siRNA sense strand
caaguaugauucagcgaua

SEQ ID NO: 1762778 - RNA, 19 nt, Homo sapiens
  misc_RNA (1)...(19): siRNA sense strand
gagcgacaaauucaaguua

SEQ ID NO: 1762779 - RNA, 19 nt, Homo sapiens
  misc_RNA (1)...(19): siRNA sense strand
ggaagucacuccggucaga

SEQ ID NO: 1762780 - RNA, 19 nt, Homo sapiens
  misc_RNA (1)...(19): siRNA sense strand
ggaagucgccauaaagaug

SEQ ID NO: 1762781 - RNA, 19 nt, Homo sapiens
  misc_RNA (1)...(19): siRNA sense strand
gaaaguaguagccgaagug

SEQ ID NO: 1762782 - RNA, 19 nt, Homo sapiens
  misc_RNA (1)...(19): siRNA sense strand
ugaugaagaugucagacua

SEQ ID NO: 1762783 - RNA, 19 nt, Homo sapiens
  misc_RNA (1)...(19): siRNA sense strand
cuacagaacaucagugaaa

SEQ ID NO: 1762784 - RNA, 19 nt, Homo sapiens
  misc_RNA (1)...(19): siRNA sense strand
gaauucagguacccucaau

SEQ ID NO: 1762785 - RNA, 19 nt, Homo sapiens
  misc_RNA (1)...(19): siRNA sense strand
ggaugauucuuguauaaag

SEQ ID NO: 1762786 - RNA, 19 nt, Homo sapiens
  misc_RNA (1)...(19): siRNA sense strand
ggagauauaccaacuguac

SEQ ID NO: 1762787 - RNA, 19 nt, Homo sapiens
  misc_RNA (1)...(19): siRNA sense strand
uaauacaucugguggaagu

SEQ ID NO: 1762788 - RNA, 19 nt, Homo sapiens
  misc_RNA (1)...(19): siRNA sense strand
ggaggaagauauggaaguc

SEQ ID NO: 1762789 - RNA, 19 nt, Homo sapiens
  misc_RNA (1)...(19): siRNA sense strand
cuaacgcauucaaguagua

SEQ ID NO: 1762790 - RNA, 19 nt, Homo sapiens
  misc_RNA (1)...(19): siRNA sense strand
gcgacaaauucaaguuaau

SEQ ID NO: 1762791 - RNA, 19 nt, Homo sapiens
  misc_RNA (1)...(19): siRNA sense strand
acaaauagcugaggaucca

SEQ ID NO: 1762792 - RNA, 19 nt, Homo sapiens
  misc_RNA (1)...(19): siRNA sense strand
gaugucagacuaauguuau

SEQ ID NO: 1762793 - RNA, 19 nt, Homo sapiens
  misc_RNA (1)...(19): siRNA sense strand
cuggaugauucuuguauaa

SEQ ID NO: 1762794 - RNA, 19 nt, Homo sapiens
  misc_RNA (1)...(19): siRNA sense strand
caacuguacuugugcaaaa

SEQ ID NO: 1762795 - RNA, 19 nt, Homo sapiens
  misc_RNA (1)...(19): siRNA sense strand
gaugaagaugucagacuaa

SEQ ID NO: 1762796 - RNA, 19 nt, Homo sapiens
  misc_RNA (1)...(19): siRNA sense strand
gauggugguuguagggaau

SEQ ID NO: 1762797 - RNA, 19 nt, Homo sapiens
  misc_RNA (1)...(19): siRNA sense strand
gaauggagcaguuggaaaa

SEQ ID NO: 1762798 - RNA, 19 nt, Homo sapiens
  misc_RNA (1)...(19): siRNA sense strand
ggaauggagcaguuggaaa

SEQ ID NO: 1762799 - RNA, 19 nt, Homo sapiens
  misc_RNA (1)...(19): siRNA sense strand
cagaaacucaaacaacaaa

SEQ ID NO: 1762800 - RNA, 19 nt, Homo sapiens
  misc_RNA (1)...(19): siRNA sense strand
gaagugggagauauaccaa

SEQ ID NO: 1762801 - RNA, 19 nt, Homo sapiens
  misc_RNA (1)...(19): siRNA sense strand
caaacaaaggaccaagaaa

SEQ ID NO: 1762802 - RNA, 19 nt, Homo sapiens
  misc_RNA (1)...(19): siRNA sense strand
uauaccaacuguacuugug

SEQ ID NO: 1762803 - RNA, 19 nt, Homo sapiens
  misc_RNA (1)...(19): siRNA sense strand
gcauucaaguaguaacaag

SEQ ID NO: 1762804 - RNA, 19 nt, Homo sapiens
  misc_RNA (1)...(19): siRNA sense strand
ucuggaugauucuuguaua

SEQ ID NO: 1762805 - RNA, 19 nt, Homo sapiens
  misc_RNA (1)...(19): siRNA sense strand
uugaagcaguuuccaguug

SEQ ID NO: 1762806 - RNA, 19 nt, Homo sapiens
  misc_RNA (1)...(19): siRNA sense strand
cgacaaauucaaguuaaug

SEQ ID NO: 1762807 - RNA, 19 nt, Homo sapiens
  misc_RNA (1)...(19): siRNA sense strand
guuggaaaaucaaguauga

SEQ ID NO: 1762808 - RNA, 19 nt, Homo sapiens
  misc_RNA (1)...(19): siRNA sense strand
acaaacaaaggaccaagaa

SEQ ID NO: 1762809 - RNA, 19 nt, Homo sapiens
  misc_RNA (1)...(19): siRNA sense strand
ucaaguaguaacaagauug

SEQ ID NO: 1762810 - RNA, 19 nt, Homo sapiens
  misc_RNA (1)...(19): siRNA sense strand
uuacaaaggccuacuaucg

SEQ ID NO: 1762811 - RNA, 19 nt, Homo sapiens
  misc_RNA (1)...(19): siRNA sense strand
cagaacaucagugaaagaa

SEQ ID NO: 1762812 - RNA, 19 nt, Homo sapiens
  misc_RNA (1)...(19): siRNA sense strand
aaacaaaggaccaagaaaa

SEQ ID NO: 1762813 - RNA, 19 nt, Homo sapiens
  misc_RNA (1)...(19): siRNA sense strand
gaagaucuaaaugugaaug

SEQ ID NO: 1762814 - RNA, 19 nt, Homo sapiens
  misc_RNA (1)...(19): siRNA sense strand
gauccagaacuaacgcauu

SEQ ID NO: 1762815 - RNA, 19 nt, Homo sapiens
  misc_RNA (1)...(19): siRNA sense strand
ggagcgacaaauucaaguu

SEQ ID NO: 1762816 - RNA, 19 nt, Homo sapiens
  misc_RNA (1)...(19): siRNA sense strand
uuuaauacaucugguggaa

SEQ ID NO: 1762817 - RNA, 19 nt, Homo sapiens
  misc_RNA (1)...(19): siRNA sense strand
gaucuaaaugugaaugaag

SEQ ID NO: 1762818 - RNA, 19 nt, Homo sapiens
  misc_RNA (1)...(19): siRNA sense strand
caauuacaaaggccuacua

SEQ ID NO: 1762819 - RNA, 19 nt, Homo sapiens
  misc_RNA (1)...(19): siRNA sense strand
gaaaaccauuggaguugau

SEQ ID NO: 1762820 - RNA, 19 nt, Homo sapiens
  misc_RNA (1)...(19): siRNA sense strand
uuuagcagcuguagcauac

SEQ ID NO: 1762821 - RNA, 19 nt, Homo sapiens
  misc_RNA (1)...(19): siRNA sense strand
gauauaccaacuguacuug

SEQ ID NO: 1762822 - RNA, 19 nt, Homo sapiens
  misc_RNA (1)...(19): siRNA sense strand
ucacuccggucagaauuca

SEQ ID NO: 1762823 - RNA, 19 nt, Homo sapiens
  misc_RNA (1)...(19): siRNA sense strand
caagaaaaccauuggaguu

SEQ ID NO: 1762824 - RNA, 19 nt, Homo sapiens
  misc_RNA (1)...(19): siRNA sense strand
uucagaaacucaaacaaca

SEQ ID NO: 1762825 - RNA, 19 nt, Homo sapiens
  misc_RNA (1)...(19): siRNA sense strand
agcgacaaauucaaguuaa

SEQ ID NO: 1762826 - RNA, 19 nt, Homo sapiens
  misc_RNA (1)...(19): siRNA sense strand
uguagggaauggagcaguu

SEQ ID NO: 1762827 - RNA, 19 nt, Homo sapiens
  misc_RNA (1)...(19): siRNA sense strand
ugggagauauaccaacugu

SEQ ID NO: 1762828 - RNA, 19 nt, Homo sapiens
  misc_RNA (1)...(19): siRNA sense strand
agaugucagacuaauguua

SEQ ID NO: 1762829 - RNA, 19 nt, Homo sapiens
  misc_RNA (1)...(19): siRNA sense strand
agauuggugucuuuaauac

SEQ ID NO: 1762830 - RNA, 19 nt, Homo sapiens
  misc_RNA (1)...(19): siRNA sense strand
ucagaaacucaaacaacaa

SEQ ID NO: 1762831 - RNA, 19 nt, Homo sapiens
  misc_RNA (1)...(19): siRNA sense strand
caggaggaauuugaugcaa

SEQ ID NO: 1762832 - RNA, 19 nt, Homo sapiens
  misc_RNA (1)...(19): siRNA sense strand
uacaaaggccuacuaucga

SEQ ID NO: 1762833 - RNA, 19 nt, Homo sapiens
  misc_RNA (1)...(19): siRNA sense strand
uaacgcauucaaguaguaa

SEQ ID NO: 1762834 - RNA, 19 nt, Homo sapiens
  misc_RNA (1)...(19): siRNA sense strand
gugaaagaagaucuaaaug

SEQ ID NO: 1762835 - RNA, 19 nt, Homo sapiens
  misc_RNA (1)...(19): siRNA sense strand
uagccgaagugggagauau

SEQ ID NO: 1762836 - RNA, 19 nt, Homo sapiens
  misc_RNA (1)...(19): siRNA sense strand
gauagggaaucuuuugaag

SEQ ID NO: 1762837 - RNA, 19 nt, Homo sapiens
  misc_RNA (1)...(19): siRNA sense strand
gaagucacuccggucagaa

SEQ ID NO: 1762838 - RNA, 19 nt, Homo sapiens
  misc_RNA (1)...(19): siRNA sense strand
gggaauggagcaguuggaa

SEQ ID NO: 1762839 - RNA, 19 nt, Homo sapiens
  misc_RNA (1)...(19): siRNA sense strand
gcaguuggaaaaucaagua

SEQ ID NO: 1762840 - RNA, 19 nt, Homo sapiens
  misc_RNA (1)...(19): siRNA sense strand
caggucaggaggaauuuga

SEQ ID NO: 1762841 - RNA, 19 nt, Homo sapiens
  misc_RNA (1)...(19): siRNA sense strand
ccucaaugguggagauguc

SEQ ID NO: 1762842 - RNA, 19 nt, Homo sapiens
  misc_RNA (1)...(19): siRNA sense strand
auccagaacuaacgcauuc

SEQ ID NO: 1762843 - RNA, 19 nt, Homo sapiens
  misc_RNA (1)...(19): siRNA sense strand
uuggagagagaaaguagua

SEQ ID NO: 1762844 - RNA, 19 nt, Homo sapiens
  misc_RNA (1)...(19): siRNA sense strand
gcugaggauccagaacuaa

SEQ ID NO: 1762845 - RNA, 19 nt, Homo sapiens
  misc_RNA (1)...(19): siRNA sense strand
ggucaggaggaauuugaug

SEQ ID NO: 1762846 - RNA, 19 nt, Homo sapiens
  misc_RNA (1)...(19): siRNA sense strand
aaacagaaauccuuuuagc

SEQ ID NO: 1762847 - RNA, 19 nt, Homo sapiens
  misc_RNA (1)...(19): siRNA sense strand
caaguaguaacaagauugg

SEQ ID NO: 1762848 - RNA, 19 nt, Homo sapiens
  misc_RNA (1)...(19): siRNA sense strand
ccagaacuaacgcauucaa

SEQ ID NO: 1762849 - RNA, 19 nt, Homo sapiens
  misc_RNA (1)...(19): siRNA sense strand
agauauaccaacuguacuu

SEQ ID NO: 1762850 - RNA, 19 nt, Homo sapiens
  misc_RNA (1)...(19): siRNA sense strand
uauaaagaaugaggaagcu

SEQ ID NO: 1762851 - RNA, 19 nt, Homo sapiens
  misc_RNA (1)...(19): siRNA sense strand
agaacuaacgcauucaagu

SEQ ID NO: 1762852 - RNA, 19 nt, Homo sapiens
  misc_RNA (1)...(19): siRNA sense strand
ucagugaaagaagaucuaa

SEQ ID NO: 1762853 - RNA, 19 nt, Homo sapiens
  misc_RNA (1)...(19): siRNA sense strand
aggaggaauuugaugcaau

SEQ ID NO: 1762854 - RNA, 19 nt, Homo sapiens
  misc_RNA (1)...(19): siRNA sense strand
aaucuuagacccaacaaac

SEQ ID NO: 1762855 - RNA, 19 nt, Homo sapiens
  misc_RNA (1)...(19): siRNA sense strand
cgaagugggagauauacca

SEQ ID NO: 1762856 - RNA, 19 nt, Homo sapiens
  misc_RNA (1)...(19): siRNA sense strand
agaaaguaguagccgaagu

SEQ ID NO: 1762857 - RNA, 19 nt, Homo sapiens
  misc_RNA (1)...(19): siRNA sense strand
cguguucucuaccacagau

SEQ ID NO: 1762858 - RNA, 19 nt, Homo sapiens
  misc_RNA (1)...(19): siRNA sense strand
cgauauugcaaaggcauuu

SEQ ID NO: 1762859 - RNA, 19 nt, Homo sapiens
  misc_RNA (1)...(19): siRNA sense strand
cugcaggucaggaggaauu

SEQ ID NO: 1762860 - RNA, 19 nt, Homo sapiens
  misc_RNA (1)...(19): siRNA sense strand
uacagaacaucagugaaag

SEQ ID NO: 1762861 - RNA, 19 nt, Homo sapiens
  misc_RNA (1)...(19): siRNA sense strand
aagcugaggcacuggcaaa

SEQ ID NO: 1762862 - RNA, 19 nt, Homo sapiens
  misc_RNA (1)...(19): siRNA sense strand
uagggaaucuuuugaagca

SEQ ID NO: 1762863 - RNA, 19 nt, Homo sapiens
  misc_RNA (1)...(19): siRNA sense strand
cauaaagauggugguugua

SEQ ID NO: 1762864 - RNA, 19 nt, Homo sapiens
  misc_RNA (1)...(19): siRNA sense strand
ugaagaugucagacuaaug

SEQ ID NO: 1762865 - RNA, 19 nt, Homo sapiens
  misc_RNA (1)...(19): siRNA sense strand
gaaagaagaucuaaaugug

SEQ ID NO: 1762866 - RNA, 19 nt, Homo sapiens
  misc_RNA (1)...(19): siRNA sense strand
gaacaucagugaaagaaga

SEQ ID NO: 1762867 - RNA, 19 nt, Homo sapiens
  misc_RNA (1)...(19): siRNA sense strand
gaacuaacgcauucaagua

SEQ ID NO: 1762868 - RNA, 19 nt, Homo sapiens
  misc_RNA (1)...(19): siRNA sense strand
gaagaugucagacuaaugu

SEQ ID NO: 1762869 - RNA, 19 nt, Homo sapiens
  misc_RNA (1)...(19): siRNA sense strand
caaguaugauucagcgaua

SEQ ID NO: 1762870 - RNA, 19 nt, Homo sapiens
  misc_RNA (1)...(19): siRNA sense strand
gagcgacaaauucaaguua

SEQ ID NO: 1762871 - RNA, 19 nt, Homo sapiens
  misc_RNA (1)...(19): siRNA sense strand
ggaagucacuccggucaga

SEQ ID NO: 1762872 - RNA, 19 nt, Homo sapiens
  misc_RNA (1)...(19): siRNA sense strand
ggaagucgccauaaagaug

SEQ ID NO: 1762873 - RNA, 19 nt, Homo sapiens
  misc_RNA (1)...(19): siRNA sense strand
gaaaguaguagccgaagug

SEQ ID NO: 1762874 - RNA, 19 nt, Homo sapiens
  misc_RNA (1)...(19): siRNA sense strand
ugaugaagaugucagacua

SEQ ID NO: 1762875 - RNA, 19 nt, Homo sapiens
  misc_RNA (1)...(19): siRNA sense strand
cuacagaacaucagugaaa

SEQ ID NO: 1762876 - RNA, 19 nt, Homo sapiens
  misc_RNA (1)...(19): siRNA sense strand
gaauucagguacccucaau

SEQ ID NO: 1762877 - RNA, 19 nt, Homo sapiens
  misc_RNA (1)...(19): siRNA sense strand
ggaugauucuuguauaaag

SEQ ID NO: 1762878 - RNA, 19 nt, Homo sapiens
  misc_RNA (1)...(19): siRNA sense strand
ggagauauaccaacuguac

SEQ ID NO: 1762879 - RNA, 19 nt, Homo sapiens
  misc_RNA (1)...(19): siRNA sense strand
uaauacaucugguggaagu

SEQ ID NO: 1762880 - RNA, 19 nt, Homo sapiens
  misc_RNA (1)...(19): siRNA sense strand
ggaggaagauauggaaguc

SEQ ID NO: 1762881 - RNA, 19 nt, Homo sapiens
  misc_RNA (1)...(19): siRNA sense strand
cuaacgcauucaaguagua

SEQ ID NO: 1762882 - RNA, 19 nt, Homo sapiens
  misc_RNA (1)...(19): siRNA sense strand
gcgacaaauucaaguuaau

SEQ ID NO: 1762883 - RNA, 19 nt, Homo sapiens
  misc_RNA (1)...(19): siRNA sense strand
acaaauagcugaggaucca

SEQ ID NO: 1762884 - RNA, 19 nt, Homo sapiens
  misc_RNA (1)...(19): siRNA sense strand
gaugucagacuaauguuau

SEQ ID NO: 1762885 - RNA, 19 nt, Homo sapiens
  misc_RNA (1)...(19): siRNA sense strand
cuggaugauucuuguauaa

SEQ ID NO: 1762886 - RNA, 19 nt, Homo sapiens
  misc_RNA (1)...(19): siRNA sense strand
caacuguacuugugcaaaa

SEQ ID NO: 1762887 - RNA, 19 nt, Homo sapiens
  misc_RNA (1)...(19): siRNA sense strand
gaugaagaugucagacuaa

SEQ ID NO: 1762888 - RNA, 19 nt, Homo sapiens
  misc_RNA (1)...(19): siRNA sense strand
gauggugguuguagggaau

SEQ ID NO: 1762889 - RNA, 19 nt, Homo sapiens
  misc_RNA (1)...(19): siRNA sense strand
gaauggagcaguuggaaaa

SEQ ID NO: 1762890 - RNA, 19 nt, Homo sapiens
  misc_RNA (1)...(19): siRNA sense strand
ggaauggagcaguuggaaa

SEQ ID NO: 1762891 - RNA, 19 nt, Homo sapiens
  misc_RNA (1)...(19): siRNA sense strand
cagaaacucaaacaacaaa

SEQ ID NO: 1762892 - RNA, 19 nt, Homo sapiens
  misc_RNA (1)...(19): siRNA sense strand
gaagugggagauauaccaa

SEQ ID NO: 1762893 - RNA, 19 nt, Homo sapiens
  misc_RNA (1)...(19): siRNA sense strand
caaacaaaggaccaagaaa

SEQ ID NO: 1762894 - RNA, 19 nt, Homo sapiens
  misc_RNA (1)...(19): siRNA sense strand
uauaccaacuguacuugug

SEQ ID NO: 1762895 - RNA, 19 nt, Homo sapiens
  misc_RNA (1)...(19): siRNA sense strand
gcauucaaguaguaacaag

SEQ ID NO: 1762896 - RNA, 19 nt, Homo sapiens
  misc_RNA (1)...(19): siRNA sense strand
ucuggaugauucuuguaua

SEQ ID NO: 1762897 - RNA, 19 nt, Homo sapiens
  misc_RNA (1)...(19): siRNA sense strand
uugaagcaguuuccaguug

SEQ ID NO: 1762898 - RNA, 19 nt, Homo sapiens
  misc_RNA (1)...(19): siRNA sense strand
cgacaaauucaaguuaaug

SEQ ID NO: 1762899 - RNA, 19 nt, Homo sapiens
  misc_RNA (1)...(19): siRNA sense strand
guuggaaaaucaaguauga

SEQ ID NO: 1762900 - RNA, 19 nt, Homo sapiens
  misc_RNA (1)...(19): siRNA sense strand
acaaacaaaggaccaagaa

SEQ ID NO: 1762901 - RNA, 19 nt, Homo sapiens
  misc_RNA (1)...(19): siRNA sense strand
ucaaguaguaacaagauug

SEQ ID NO: 1762902 - RNA, 19 nt, Homo sapiens
  misc_RNA (1)...(19): siRNA sense strand
uuacaaaggccuacuaucg

SEQ ID NO: 1762903 - RNA, 19 nt, Homo sapiens
  misc_RNA (1)...(19): siRNA sense strand
cagaacaucagugaaagaa

SEQ ID NO: 1762904 - RNA, 19 nt, Homo sapiens
  misc_RNA (1)...(19): siRNA sense strand
aaacaaaggaccaagaaaa

SEQ ID NO: 1762905 - RNA, 19 nt, Homo sapiens
  misc_RNA (1)...(19): siRNA sense strand
gaagaucuaaaugugaaug

SEQ ID NO: 1762906 - RNA, 19 nt, Homo sapiens
  misc_RNA (1)...(19): siRNA sense strand
gauccagaacuaacgcauu

SEQ ID NO: 1762907 - RNA, 19 nt, Homo sapiens
  misc_RNA (1)...(19): siRNA sense strand
ggagcgacaaauucaaguu

SEQ ID NO: 1762908 - RNA, 19 nt, Homo sapiens
  misc_RNA (1)...(19): siRNA sense strand
uuuaauacaucugguggaa

SEQ ID NO: 1762909 - RNA, 19 nt, Homo sapiens
  misc_RNA (1)...(19): siRNA sense strand
gaucuaaaugugaaugaag

SEQ ID NO: 1762910 - RNA, 19 nt, Homo sapiens
  misc_RNA (1)...(19): siRNA sense strand
caauuacaaaggccuacua

SEQ ID NO: 1762911 - RNA, 19 nt, Homo sapiens
  misc_RNA (1)...(19): siRNA sense strand
gaaaaccauuggaguugau

SEQ ID NO: 1762912 - RNA, 19 nt, Homo sapiens
  misc_RNA (1)...(19): siRNA sense strand
uuuagcagcuguagcauac

SEQ ID NO: 1762913 - RNA, 19 nt, Homo sapiens
  misc_RNA (1)...(19): siRNA sense strand
gauauaccaacuguacuug

SEQ ID NO: 1762914 - RNA, 19 nt, Homo sapiens
  misc_RNA (1)...(19): siRNA sense strand
ucacuccggucagaauuca

SEQ ID NO: 1762915 - RNA, 19 nt, Homo sapiens
  misc_RNA (1)...(19): siRNA sense strand
caagaaaaccauuggaguu

SEQ ID NO: 1762916 - RNA, 19 nt, Homo sapiens
  misc_RNA (1)...(19): siRNA sense strand
uucagaaacucaaacaaca

SEQ ID NO: 1762917 - RNA, 19 nt, Homo sapiens
  misc_RNA (1)...(19): siRNA sense strand
agcgacaaauucaaguuaa

SEQ ID NO: 1762918 - RNA, 19 nt, Homo sapiens
  misc_RNA (1)...(19): siRNA sense strand
uguagggaauggagcaguu

SEQ ID NO: 1762919 - RNA, 19 nt, Homo sapiens
  misc_RNA (1)...(19): siRNA sense strand
ugggagauauaccaacugu

SEQ ID NO: 1762920 - RNA, 19 nt, Homo sapiens
  misc_RNA (1)...(19): siRNA sense strand
agaugucagacuaauguua

SEQ ID NO: 1762921 - RNA, 19 nt, Homo sapiens
  misc_RNA (1)...(19): siRNA sense strand
agauuggugucuuuaauac

SEQ ID NO: 1762922 - RNA, 19 nt, Homo sapiens
  misc_RNA (1)...(19): siRNA sense strand
ucagaaacucaaacaacaa

SEQ ID NO: 1762923 - RNA, 19 nt, Homo sapiens
  misc_RNA (1)...(19): siRNA sense strand
caggaggaauuugaugcaa

SEQ ID NO: 1762924 - RNA, 19 nt, Homo sapiens
  misc_RNA (1)...(19): siRNA sense strand
uacaaaggccuacuaucga

SEQ ID NO: 1762925 - RNA, 19 nt, Homo sapiens
  misc_RNA (1)...(19): siRNA sense strand
uaacgcauucaaguaguaa

SEQ ID NO: 1762926 - RNA, 19 nt, Homo sapiens
  misc_RNA (1)...(19): siRNA sense strand
gugaaagaagaucuaaaug

SEQ ID NO: 1762927 - RNA, 19 nt, Homo sapiens
  misc_RNA (1)...(19): siRNA sense strand
uagccgaagugggagauau

SEQ ID NO: 1762928 - RNA, 19 nt, Homo sapiens
  misc_RNA (1)...(19): siRNA sense strand
gauagggaaucuuuugaag

SEQ ID NO: 1762929 - RNA, 19 nt, Homo sapiens
  misc_RNA (1)...(19): siRNA sense strand
gaagucacuccggucagaa

SEQ ID NO: 1762930 - RNA, 19 nt, Homo sapiens
  misc_RNA (1)...(19): siRNA sense strand
gggaauggagcaguuggaa

SEQ ID NO: 1762931 - RNA, 19 nt, Homo sapiens
  misc_RNA (1)...(19): siRNA sense strand
gcaguuggaaaaucaagua

SEQ ID NO: 1762932 - RNA, 19 nt, Homo sapiens
  misc_RNA (1)...(19): siRNA sense strand
caggucaggaggaauuuga

SEQ ID NO: 1762933 - RNA, 19 nt, Homo sapiens
  misc_RNA (1)...(19): siRNA sense strand
ccucaaugguggagauguc

SEQ ID NO: 1762934 - RNA, 19 nt, Homo sapiens
  misc_RNA (1)...(19): siRNA sense strand
auccagaacuaacgcauuc

SEQ ID NO: 1762935 - RNA, 19 nt, Homo sapiens
  misc_RNA (1)...(19): siRNA sense strand
uuggagagagaaaguagua

SEQ ID NO: 1762936 - RNA, 19 nt, Homo sapiens
  misc_RNA (1)...(19): siRNA sense strand
gcugaggauccagaacuaa

SEQ ID NO: 1762937 - RNA, 19 nt, Homo sapiens
  misc_RNA (1)...(19): siRNA sense strand
ggucaggaggaauuugaug

SEQ ID NO: 1762938 - RNA, 19 nt, Homo sapiens
  misc_RNA (1)...(19): siRNA sense strand
aaacagaaauccuuuuagc

SEQ ID NO: 1762939 - RNA, 19 nt, Homo sapiens
  misc_RNA (1)...(19): siRNA sense strand
caaguaguaacaagauugg

SEQ ID NO: 1762940 - RNA, 19 nt, Homo sapiens
  misc_RNA (1)...(19): siRNA sense strand
ccagaacuaacgcauucaa

SEQ ID NO: 1762941 - RNA, 19 nt, Homo sapiens
  misc_RNA (1)...(19): siRNA sense strand
agauauaccaacuguacuu

SEQ ID NO: 1762942 - RNA, 19 nt, Homo sapiens
  misc_RNA (1)...(19): siRNA sense strand
uauaaagaaugaggaagcu

SEQ ID NO: 1762943 - RNA, 19 nt, Homo sapiens
  misc_RNA (1)...(19): siRNA sense strand
agaacuaacgcauucaagu

SEQ ID NO: 1762944 - RNA, 19 nt, Homo sapiens
  misc_RNA (1)...(19): siRNA sense strand
ucagugaaagaagaucuaa

SEQ ID NO: 1762945 - RNA, 19 nt, Homo sapiens
  misc_RNA (1)...(19): siRNA sense strand
aggaggaauuugaugcaau

SEQ ID NO: 1762946 - RNA, 19 nt, Homo sapiens
  misc_RNA (1)...(19): siRNA sense strand
aaucuuagacccaacaaac

SEQ ID NO: 1762947 - RNA, 19 nt, Homo sapiens
  misc_RNA (1)...(19): siRNA sense strand
cgaagugggagauauacca

SEQ ID NO: 1762948 - RNA, 19 nt, Homo sapiens
  misc_RNA (1)...(19): siRNA sense strand
agaaaguaguagccgaagu

SEQ ID NO: 1762949 - RNA, 19 nt, Homo sapiens
  misc_RNA (1)...(19): siRNA sense strand
cguguucucuaccacagau

SEQ ID NO: 1762950 - RNA, 19 nt, Homo sapiens
  misc_RNA (1)...(19): siRNA sense strand
cgauauugcaaaggcauuu

SEQ ID NO: 1762951 - RNA, 19 nt, Homo sapiens
  misc_RNA (1)...(19): siRNA sense strand
cugcaggucaggaggaauu

SEQ ID NO: 1762952 - RNA, 19 nt, Homo sapiens
  misc_RNA (1)...(19): siRNA sense strand
uacagaacaucagugaaag

SEQ ID NO: 1762953 - RNA, 19 nt, Homo sapiens
  misc_RNA (1)...(19): siRNA sense strand
aagcugaggcacuggcaaa

SEQ ID NO: 1762954 - RNA, 19 nt, Homo sapiens
  misc_RNA (1)...(19): siRNA sense strand
uagggaaucuuuugaagca

SEQ ID NO: 1762955 - RNA, 19 nt, Homo sapiens
  misc_RNA (1)...(19): siRNA sense strand
cauaaagauggugguugua

SEQ ID NO: 1762956 - RNA, 19 nt, Homo sapiens
  misc_RNA (1)...(19): siRNA sense strand
ugaagaugucagacuaaug

SEQ ID NO: 1762957 - RNA, 19 nt, Homo sapiens
  misc_RNA (1)...(19): siRNA sense strand
ccacagaacugaaacaucu

SEQ ID NO: 1762958 - RNA, 19 nt, Homo sapiens
  misc_RNA (1)...(19): siRNA sense strand
ggaggaagugcuaaauuua

SEQ ID NO: 1762959 - RNA, 19 nt, Homo sapiens
  misc_RNA (1)...(19): siRNA sense strand
gaacuaaagggaucugaaa

SEQ ID NO: 1762960 - RNA, 19 nt, Homo sapiens
  misc_RNA (1)...(19): siRNA sense strand
gaacagauggauuaccuuu

SEQ ID NO: 1762961 - RNA, 19 nt, Homo sapiens
  misc_RNA (1)...(19): siRNA sense strand
ccaggaugcucacauuuaa

SEQ ID NO: 1762962 - RNA, 19 nt, Homo sapiens
  misc_RNA (1)...(19): siRNA sense strand
ggaugcaacuccugucuug

SEQ ID NO: 1762963 - RNA, 19 nt, Homo sapiens
  misc_RNA (1)...(19): siRNA sense strand
uggaggaagugcuaaauuu

SEQ ID NO: 1762964 - RNA, 19 nt, Homo sapiens
  misc_RNA (1)...(19): siRNA sense strand
cagcaaccauuguagaauu

SEQ ID NO: 1762965 - RNA, 19 nt, Homo sapiens
  misc_RNA (1)...(19): siRNA sense strand
aaagggaucugaaacaaca

SEQ ID NO: 1762966 - RNA, 19 nt, Homo sapiens
  misc_RNA (1)...(19): siRNA sense strand
caacuccugucuugcauug

SEQ ID NO: 1762967 - RNA, 19 nt, Homo sapiens
  misc_RNA (1)...(19): siRNA sense strand
ugaauaugcugaugagaca

SEQ ID NO: 1762968 - RNA, 19 nt, Homo sapiens
  misc_RNA (1)...(19): siRNA sense strand
ucaccaggaugcucacauu

SEQ ID NO: 1762969 - RNA, 19 nt, Homo sapiens
  misc_RNA (1)...(19): siRNA sense strand
cuaaagggaucugaaacaa

SEQ ID NO: 1762970 - RNA, 19 nt, Homo sapiens
  misc_RNA (1)...(19): siRNA sense strand
gaaggccacagaacugaaa

SEQ ID NO: 1762971 - RNA, 19 nt, Homo sapiens
  misc_RNA (1)...(19): siRNA sense strand
gaugagacagcaaccauug

SEQ ID NO: 1762972 - RNA, 19 nt, Homo sapiens
  misc_RNA (1)...(19): siRNA sense strand
aaucagcaauaucaacgua

SEQ ID NO: 1762973 - RNA, 19 nt, Homo sapiens
  misc_RNA (1)...(19): siRNA sense strand
gaugcucacauuuaaguuu

SEQ ID NO: 1762974 - RNA, 19 nt, Homo sapiens
  misc_RNA (1)...(19): siRNA sense strand
caagaaggccacagaacug

SEQ ID NO: 1762975 - RNA, 19 nt, Homo sapiens
  misc_RNA (1)...(19): siRNA sense strand
caacguaauaguucuggaa

SEQ ID NO: 1762976 - RNA, 19 nt, Homo sapiens
  misc_RNA (1)...(19): siRNA sense strand
ugagacagcaaccauugua

SEQ ID NO: 1762977 - RNA, 19 nt, Homo sapiens
  misc_RNA (1)...(19): siRNA sense strand
gacagcaaccauuguagaa

SEQ ID NO: 1762978 - RNA, 19 nt, Homo sapiens
  misc_RNA (1)...(19): siRNA sense strand
gcauuuacugcuggauuua

SEQ ID NO: 1762979 - RNA, 19 nt, Homo sapiens
  misc_RNA (1)...(19): siRNA sense strand
ggacuuaaucagcaauauc

SEQ ID NO: 1762980 - RNA, 19 nt, Homo sapiens
  misc_RNA (1)...(19): siRNA sense strand
ggaacuaaagggaucugaa

SEQ ID NO: 1762981 - RNA, 19 nt, Homo sapiens
  misc_RNA (1)...(19): siRNA sense strand
gacuuaaucagcaauauca

SEQ ID NO: 1762982 - RNA, 19 nt, Homo sapiens
  misc_RNA (1)...(19): siRNA sense strand
ucagcaauaucaacguaau

SEQ ID NO: 1762983 - RNA, 19 nt, Homo sapiens
  misc_RNA (1)...(19): siRNA sense strand
uuacaagaaucccaaacuc

SEQ ID NO: 1762984 - RNA, 19 nt, Homo sapiens
  misc_RNA (1)...(19): siRNA sense strand
ucuagaagaagaacucaaa

SEQ ID NO: 1762985 - RNA, 19 nt, Homo sapiens
  misc_RNA (1)...(19): siRNA sense strand
gaaacaucuucagugucua

SEQ ID NO: 1762986 - RNA, 19 nt, Homo sapiens
  misc_RNA (1)...(19): siRNA sense strand
cagcaauaucaacguaaua

SEQ ID NO: 1762987 - RNA, 19 nt, Homo sapiens
  misc_RNA (1)...(19): siRNA sense strand
ccaagaaggccacagaacu

SEQ ID NO: 1762988 - RNA, 19 nt, Homo sapiens
  misc_RNA (1)...(19): siRNA sense strand
ugucaaagcaucaucucaa

SEQ ID NO: 1762989 - RNA, 19 nt, Homo sapiens
  misc_RNA (1)...(19): siRNA sense strand
acagauggauuaccuuuug

SEQ ID NO: 1762990 - RNA, 19 nt, Homo sapiens
  misc_RNA (1)...(19): siRNA sense strand
aaacagugcaccuacuuca

SEQ ID NO: 1762991 - RNA, 19 nt, Homo sapiens
  misc_RNA (1)...(19): siRNA sense strand
ccagggacuuaaucagcaa

SEQ ID NO: 1762992 - RNA, 19 nt, Homo sapiens
  misc_RNA (1)...(19): siRNA sense strand
accaggaugcucacauuua

SEQ ID NO: 1762993 - RNA, 19 nt, Homo sapiens
  misc_RNA (1)...(19): siRNA sense strand
agcaaccauuguagaauuu

SEQ ID NO: 1762994 - RNA, 19 nt, Homo sapiens
  misc_RNA (1)...(19): siRNA sense strand
agcuacaacuggagcauuu

SEQ ID NO: 1762995 - RNA, 19 nt, Homo sapiens
  misc_RNA (1)...(19): siRNA sense strand
gggacuuaaucagcaauau

SEQ ID NO: 1762996 - RNA, 19 nt, Homo sapiens
  misc_RNA (1)...(19): siRNA sense strand
gcaauaucaacguaauagu

SEQ ID NO: 1762997 - RNA, 19 nt, Homo sapiens
  misc_RNA (1)...(19): siRNA sense strand
cugcuggauuuacagauga

SEQ ID NO: 1762998 - RNA, 19 nt, Homo sapiens
  misc_RNA (1)...(19): siRNA sense strand
agacagcaaccauuguaga

SEQ ID NO: 1762999 - RNA, 19 nt, Homo sapiens
  misc_RNA (1)...(19): siRNA sense strand
gcuacaacuggagcauuua

SEQ ID NO: 1763000 - RNA, 19 nt, Homo sapiens
  misc_RNA (1)...(19): siRNA sense strand
cagaugauuuugaauggaa

SEQ ID NO: 1763001 - RNA, 19 nt, Homo sapiens
  misc_RNA (1)...(19): siRNA sense strand
gaaaacacagcuacaacug

SEQ ID NO: 1763002 - RNA, 19 nt, Homo sapiens
  misc_RNA (1)...(19): siRNA sense strand
caaagcaucaucucaacac

SEQ ID NO: 1763003 - RNA, 19 nt, Homo sapiens
  misc_RNA (1)...(19): siRNA sense strand
gucaaagcaucaucucaac

SEQ ID NO: 1763004 - RNA, 19 nt, Homo sapiens
  misc_RNA (1)...(19): siRNA sense strand
acaaacagugcaccuacuu

SEQ ID NO: 1763005 - RNA, 19 nt, Homo sapiens
  misc_RNA (1)...(19): siRNA sense strand
caaacagugcaccuacuuc

SEQ ID NO: 1763006 - RNA, 19 nt, Homo sapiens
  misc_RNA (1)...(19): siRNA sense strand
aaacaucuucagugucuag

SEQ ID NO: 1763007 - RNA, 19 nt, Homo sapiens
  misc_RNA (1)...(19): siRNA sense strand
uacaagaaucccaaacuca

SEQ ID NO: 1763008 - RNA, 19 nt, Homo sapiens
  misc_RNA (1)...(19): siRNA sense strand
caccaggaugcucacauuu

SEQ ID NO: 1763009 - RNA, 19 nt, Homo sapiens
  misc_RNA (1)...(19): siRNA sense strand
cugaacagauggauuaccu

SEQ ID NO: 1763010 - RNA, 19 nt, Homo sapiens
  misc_RNA (1)...(19): siRNA sense strand
gugugaauaugcugaugag

SEQ ID NO: 1763011 - RNA, 19 nt, Homo sapiens
  misc_RNA (1)...(19): siRNA sense strand
gagacagcaaccauuguag

SEQ ID NO: 1763012 - RNA, 19 nt, Homo sapiens
  misc_RNA (1)...(19): siRNA sense strand
gagcuagccuccuaugaua

SEQ ID NO: 1763013 - RNA, 19 nt, Homo sapiens
  misc_RNA (1)...(19): siRNA sense strand
ggacuuauuugccaacgua

SEQ ID NO: 1763014 - RNA, 19 nt, Homo sapiens
  misc_RNA (1)...(19): siRNA sense strand
gcagaauccuuaccaguuu

SEQ ID NO: 1763015 - RNA, 19 nt, Homo sapiens
  misc_RNA (1)...(19): siRNA sense strand
gaacaaaguggccaucauu

SEQ ID NO: 1763016 - RNA, 19 nt, Homo sapiens
  misc_RNA (1)...(19): siRNA sense strand
ugagugaggugcagaauau

SEQ ID NO: 1763017 - RNA, 19 nt, Homo sapiens
  misc_RNA (1)...(19): siRNA sense strand
ugaagaaggugaucaaagu

SEQ ID NO: 1763018 - RNA, 19 nt, Homo sapiens
  misc_RNA (1)...(19): siRNA sense strand
gcagugggcaggaauauag

SEQ ID NO: 1763019 - RNA, 19 nt, Homo sapiens
  misc_RNA (1)...(19): siRNA sense strand
guacagcucucuggaacau

SEQ ID NO: 1763020 - RNA, 19 nt, Homo sapiens
  misc_RNA (1)...(19): siRNA sense strand
gaagaaggugaucaaaguu

SEQ ID NO: 1763021 - RNA, 19 nt, Homo sapiens
  misc_RNA (1)...(19): siRNA sense strand
gcauggagaggucugagua

SEQ ID NO: 1763022 - RNA, 19 nt, Homo sapiens
  misc_RNA (1)...(19): siRNA sense strand
ccacaaggccaacaucaug

SEQ ID NO: 1763023 - RNA, 19 nt, Homo sapiens
  misc_RNA (1)...(19): siRNA sense strand
gcagugcugugaggaaguu

SEQ ID NO: 1763024 - RNA, 19 nt, Homo sapiens
  misc_RNA (1)...(19): siRNA sense strand
ggccaucauuggaaagauu

SEQ ID NO: 1763025 - RNA, 19 nt, Homo sapiens
  misc_RNA (1)...(19): siRNA sense strand
agacaaugaucauagacaa

SEQ ID NO: 1763026 - RNA, 19 nt, Homo sapiens
  misc_RNA (1)...(19): siRNA sense strand
caaaguggccaucauugga

SEQ ID NO: 1763027 - RNA, 19 nt, Homo sapiens
  misc_RNA (1)...(19): siRNA sense strand
gcugucggcuuccaacaug

SEQ ID NO: 1763028 - RNA, 19 nt, Homo sapiens
  misc_RNA (1)...(19): siRNA sense strand
gugauugaguguuugaaga

SEQ ID NO: 1763029 - RNA, 19 nt, Homo sapiens
  misc_RNA (1)...(19): siRNA sense strand
gagcuauagugcagaauac

SEQ ID NO: 1763030 - RNA, 19 nt, Homo sapiens
  misc_RNA (1)...(19): siRNA sense strand
ugaguuccaugaaggagaa

SEQ ID NO: 1763031 - RNA, 19 nt, Homo sapiens
  misc_RNA (1)...(19): siRNA sense strand
cagaauacgcagucuuuga

SEQ ID NO: 1763032 - RNA, 19 nt, Homo sapiens
  misc_RNA (1)...(19): siRNA sense strand
caacguaguccaugugaag

SEQ ID NO: 1763033 - RNA, 19 nt, Homo sapiens
  misc_RNA (1)...(19): siRNA sense strand
acagcucucuggaacauga

SEQ ID NO: 1763034 - RNA, 19 nt, Homo sapiens
  misc_RNA (1)...(19): siRNA sense strand
gcaggaauauagccaaucc

SEQ ID NO: 1763035 - RNA, 19 nt, Homo sapiens
  misc_RNA (1)...(19): siRNA sense strand
gccaacaucaugaaacuug

SEQ ID NO: 1763036 - RNA, 19 nt, Homo sapiens
  misc_RNA (1)...(19): siRNA sense strand
gauugaguguuugaagauu

SEQ ID NO: 1763037 - RNA, 19 nt, Homo sapiens
  misc_RNA (1)...(19): siRNA sense strand
ggucacugcuguccacaag

SEQ ID NO: 1763038 - RNA, 19 nt, Homo sapiens
  misc_RNA (1)...(19): siRNA sense strand
gcaucuuaaucuugaguau

SEQ ID NO: 1763039 - RNA, 19 nt, Homo sapiens
  misc_RNA (1)...(19): siRNA sense strand
ugagagcuauagugcagaa

SEQ ID NO: 1763040 - RNA, 19 nt, Homo sapiens
  misc_RNA (1)...(19): siRNA sense strand
ggaguacagcucucuggaa

SEQ ID NO: 1763041 - RNA, 19 nt, Homo sapiens
  misc_RNA (1)...(19): siRNA sense strand
cagaugcggugaagaaggu

SEQ ID NO: 1763042 - RNA, 19 nt, Homo sapiens
  misc_RNA (1)...(19): siRNA sense strand
gggcaggaauauagccaau

SEQ ID NO: 1763043 - RNA, 19 nt, Homo sapiens
  misc_RNA (1)...(19): siRNA sense strand
cagaauccuuaccaguuug

SEQ ID NO: 1763044 - RNA, 19 nt, Homo sapiens
  misc_RNA (1)...(19): siRNA sense strand
gaacuguaccccaaaauca

SEQ ID NO: 1763045 - RNA, 19 nt, Homo sapiens
  misc_RNA (1)...(19): siRNA sense strand
gaauacgcagucuuugaga

SEQ ID NO: 1763046 - RNA, 19 nt, Homo sapiens
  misc_RNA (1)...(19): siRNA sense strand
gcuagccuccuaugauaug

SEQ ID NO: 1763047 - RNA, 19 nt, Homo sapiens
  misc_RNA (1)...(19): siRNA sense strand
caaucucuaugggaacauu

SEQ ID NO: 1763048 - RNA, 19 nt, Homo sapiens
  misc_RNA (1)...(19): siRNA sense strand
gagacaaugaucauagaca

SEQ ID NO: 1763049 - RNA, 19 nt, Homo sapiens
  misc_RNA (1)...(19): siRNA sense strand
agagcuauagugcagaaua

SEQ ID NO: 1763050 - RNA, 19 nt, Homo sapiens
  misc_RNA (1)...(19): siRNA sense strand
aaaguggccaucauuggaa

SEQ ID NO: 1763051 - RNA, 19 nt, Homo sapiens
  misc_RNA (1)...(19): siRNA sense strand
guauaugacucggcacaac

SEQ ID NO: 1763052 - RNA, 19 nt, Homo sapiens
  misc_RNA (1)...(19): siRNA sense strand
ucacuuccuggguauauga

SEQ ID NO: 1763053 - RNA, 19 nt, Homo sapiens
  misc_RNA (1)...(19): siRNA sense strand
uugagacaaugaucauaga

SEQ ID NO: 1763054 - RNA, 19 nt, Homo sapiens
  misc_RNA (1)...(19): siRNA sense strand
gcagaauacgcagucuuug

SEQ ID NO: 1763055 - RNA, 19 nt, Homo sapiens
  misc_RNA (1)...(19): siRNA sense strand
ccaacguaguccaugugaa

SEQ ID NO: 1763056 - RNA, 19 nt, Homo sapiens
  misc_RNA (1)...(19): siRNA sense strand
ugcggcaucuuaaucuuga

SEQ ID NO: 1763057 - RNA, 19 nt, Homo sapiens
  misc_RNA (1)...(19): siRNA sense strand
ugcagaauacgcagucuuu

SEQ ID NO: 1763058 - RNA, 19 nt, Homo sapiens
  misc_RNA (1)...(19): siRNA sense strand
ucuaugggaacauuauuga

SEQ ID NO: 1763059 - RNA, 19 nt, Homo sapiens
  misc_RNA (1)...(19): siRNA sense strand
agaacaaaguggccaucau

SEQ ID NO: 1763060 - RNA, 19 nt, Homo sapiens
  misc_RNA (1)...(19): siRNA sense strand
ccaugaaggagaacaaagu

SEQ ID NO: 1763061 - RNA, 19 nt, Homo sapiens
  misc_RNA (1)...(19): siRNA sense strand
gagaacaaaguggccauca

SEQ ID NO: 1763062 - RNA, 19 nt, Homo sapiens
  misc_RNA (1)...(19): siRNA sense strand
gcugcggcaucuuaaucuu

SEQ ID NO: 1763063 - RNA, 19 nt, Homo sapiens
  misc_RNA (1)...(19): siRNA sense strand
caaggccaacaucaugaaa

SEQ ID NO: 1763064 - RNA, 19 nt, Homo sapiens
  misc_RNA (1)...(19): siRNA sense strand
caaauuugagacaaugauc

SEQ ID NO: 1763065 - RNA, 19 nt, Homo sapiens
  misc_RNA (1)...(19): siRNA sense strand
aagaaggugaucaaaguug

SEQ ID NO: 1763066 - RNA, 19 nt, Homo sapiens
  misc_RNA (1)...(19): siRNA sense strand
gugaagaaggugaucaaag

SEQ ID NO: 1763067 - RNA, 19 nt, Homo sapiens
  misc_RNA (1)...(19): siRNA sense strand
ugcagaauccuuaccaguu

SEQ ID NO: 1763068 - RNA, 19 nt, Homo sapiens
  misc_RNA (1)...(19): siRNA sense strand
ugacucggcacaacaaucu

SEQ ID NO: 1763069 - RNA, 19 nt, Homo sapiens
  misc_RNA (1)...(19): siRNA sense strand
uaugggaacauuauugaca

SEQ ID NO: 1763070 - RNA, 19 nt, Homo sapiens
  misc_RNA (1)...(19): siRNA sense strand
cacaaggccaacaucauga

SEQ ID NO: 1763071 - RNA, 19 nt, Homo sapiens
  misc_RNA (1)...(19): siRNA sense strand
ggggugugauugaguguuu

SEQ ID NO: 1763072 - RNA, 19 nt, Homo sapiens
  misc_RNA (1)...(19): siRNA sense strand
ucacacgagccaagucuca

SEQ ID NO: 1763073 - RNA, 19 nt, Homo sapiens
  misc_RNA (1)...(19): siRNA sense strand
ccaguuugaugugcuugug

SEQ ID NO: 1763074 - RNA, 19 nt, Homo sapiens
  misc_RNA (1)...(19): siRNA sense strand
cguaguccaugugaaguca

SEQ ID NO: 1763075 - RNA, 19 nt, Homo sapiens
  misc_RNA (1)...(19): siRNA sense strand
caaugaucauagacaacug

SEQ ID NO: 1763076 - RNA, 19 nt, Homo sapiens
  misc_RNA (1)...(19): siRNA sense strand
cucagcggauugcaaaguu

SEQ ID NO: 1763077 - RNA, 19 nt, Homo sapiens
  misc_RNA (1)...(19): siRNA sense strand
ggugaagaaggugaucaaa

SEQ ID NO: 1763078 - RNA, 19 nt, Homo sapiens
  misc_RNA (1)...(19): siRNA sense strand
ggcagugggcaggaauaua

SEQ ID NO: 1763079 - RNA, 19 nt, Homo sapiens
  misc_RNA (1)...(19): siRNA sense strand
ggugcugaguuccaugaag

SEQ ID NO: 1763080 - RNA, 19 nt, Homo sapiens
  misc_RNA (1)...(19): siRNA sense strand
ucagcggauugcaaaguuc

SEQ ID NO: 1763081 - RNA, 19 nt, Homo sapiens
  misc_RNA (1)...(19): siRNA sense strand
caugaaggagaacaaagug

SEQ ID NO: 1763082 - RNA, 19 nt, Homo sapiens
  misc_RNA (1)...(19): siRNA sense strand
agaauacgcagucuuugag

SEQ ID NO: 1763083 - RNA, 19 nt, Homo sapiens
  misc_RNA (1)...(19): siRNA sense strand
gcugaacuguaccccaaaa

SEQ ID NO: 1763084 - RNA, 19 nt, Homo sapiens
  misc_RNA (1)...(19): siRNA sense strand
gagcuagccuccuaugaua

SEQ ID NO: 1763085 - RNA, 19 nt, Homo sapiens
  misc_RNA (1)...(19): siRNA sense strand
ggacuuauuugccaacgua

SEQ ID NO: 1763086 - RNA, 19 nt, Homo sapiens
  misc_RNA (1)...(19): siRNA sense strand
gcagaauccuuaccaguuu

SEQ ID NO: 1763087 - RNA, 19 nt, Homo sapiens
  misc_RNA (1)...(19): siRNA sense strand
gaacaaaguggccaucauu

SEQ ID NO: 1763088 - RNA, 19 nt, Homo sapiens
  misc_RNA (1)...(19): siRNA sense strand
ugagugaggugcagaauau

SEQ ID NO: 1763089 - RNA, 19 nt, Homo sapiens
  misc_RNA (1)...(19): siRNA sense strand
ugaagaaggugaucaaagu

SEQ ID NO: 1763090 - RNA, 19 nt, Homo sapiens
  misc_RNA (1)...(19): siRNA sense strand
gcagugggcaggaauauag

SEQ ID NO: 1763091 - RNA, 19 nt, Homo sapiens
  misc_RNA (1)...(19): siRNA sense strand
guacagcucucuggaacau

SEQ ID NO: 1763092 - RNA, 19 nt, Homo sapiens
  misc_RNA (1)...(19): siRNA sense strand
gaagaaggugaucaaaguu

SEQ ID NO: 1763093 - RNA, 19 nt, Homo sapiens
  misc_RNA (1)...(19): siRNA sense strand
gcauggagaggucugagua

SEQ ID NO: 1763094 - RNA, 19 nt, Homo sapiens
  misc_RNA (1)...(19): siRNA sense strand
ccacaaggccaacaucaug

SEQ ID NO: 1763095 - RNA, 19 nt, Homo sapiens
  misc_RNA (1)...(19): siRNA sense strand
gcagugcugugaggaaguu

SEQ ID NO: 1763096 - RNA, 19 nt, Homo sapiens
  misc_RNA (1)...(19): siRNA sense strand
ggccaucauuggaaagauu

SEQ ID NO: 1763097 - RNA, 19 nt, Homo sapiens
  misc_RNA (1)...(19): siRNA sense strand
agacaaugaucauagacaa

SEQ ID NO: 1763098 - RNA, 19 nt, Homo sapiens
  misc_RNA (1)...(19): siRNA sense strand
caaaguggccaucauugga

SEQ ID NO: 1763099 - RNA, 19 nt, Homo sapiens
  misc_RNA (1)...(19): siRNA sense strand
gcugucggcuuccaacaug

SEQ ID NO: 1763100 - RNA, 19 nt, Homo sapiens
  misc_RNA (1)...(19): siRNA sense strand
gugauugaguguuugaaga

SEQ ID NO: 1763101 - RNA, 19 nt, Homo sapiens
  misc_RNA (1)...(19): siRNA sense strand
gagcuauagugcagaauac

SEQ ID NO: 1763102 - RNA, 19 nt, Homo sapiens
  misc_RNA (1)...(19): siRNA sense strand
ugaguuccaugaaggagaa

SEQ ID NO: 1763103 - RNA, 19 nt, Homo sapiens
  misc_RNA (1)...(19): siRNA sense strand
cagaauacgcagucuuuga

SEQ ID NO: 1763104 - RNA, 19 nt, Homo sapiens
  misc_RNA (1)...(19): siRNA sense strand
caacguaguccaugugaag

SEQ ID NO: 1763105 - RNA, 19 nt, Homo sapiens
  misc_RNA (1)...(19): siRNA sense strand
acagcucucuggaacauga

SEQ ID NO: 1763106 - RNA, 19 nt, Homo sapiens
  misc_RNA (1)...(19): siRNA sense strand
gcaggaauauagccaaucc

SEQ ID NO: 1763107 - RNA, 19 nt, Homo sapiens
  misc_RNA (1)...(19): siRNA sense strand
gccaacaucaugaaacuug

SEQ ID NO: 1763108 - RNA, 19 nt, Homo sapiens
  misc_RNA (1)...(19): siRNA sense strand
gauugaguguuugaagauu

SEQ ID NO: 1763109 - RNA, 19 nt, Homo sapiens
  misc_RNA (1)...(19): siRNA sense strand
ggucacugcuguccacaag

SEQ ID NO: 1763110 - RNA, 19 nt, Homo sapiens
  misc_RNA (1)...(19): siRNA sense strand
gcaucuuaaucuugaguau

SEQ ID NO: 1763111 - RNA, 19 nt, Homo sapiens
  misc_RNA (1)...(19): siRNA sense strand
ugagagcuauagugcagaa

SEQ ID NO: 1763112 - RNA, 19 nt, Homo sapiens
  misc_RNA (1)...(19): siRNA sense strand
ggaguacagcucucuggaa

SEQ ID NO: 1763113 - RNA, 19 nt, Homo sapiens
  misc_RNA (1)...(19): siRNA sense strand
cagaugcggugaagaaggu

SEQ ID NO: 1763114 - RNA, 19 nt, Homo sapiens
  misc_RNA (1)...(19): siRNA sense strand
gggcaggaauauagccaau

SEQ ID NO: 1763115 - RNA, 19 nt, Homo sapiens
  misc_RNA (1)...(19): siRNA sense strand
cagaauccuuaccaguuug

SEQ ID NO: 1763116 - RNA, 19 nt, Homo sapiens
  misc_RNA (1)...(19): siRNA sense strand
gaacuguaccccaaaauca

SEQ ID NO: 1763117 - RNA, 19 nt, Homo sapiens
  misc_RNA (1)...(19): siRNA sense strand
ugacauggguggcuaugcu

SEQ ID NO: 1763118 - RNA, 19 nt, Homo sapiens
  misc_RNA (1)...(19): siRNA sense strand
gaauacgcagucuuugaga

SEQ ID NO: 1763119 - RNA, 19 nt, Homo sapiens
  misc_RNA (1)...(19): siRNA sense strand
gcuagccuccuaugauaug

SEQ ID NO: 1763120 - RNA, 19 nt, Homo sapiens
  misc_RNA (1)...(19): siRNA sense strand
caaucucuaugggaacauu

SEQ ID NO: 1763121 - RNA, 19 nt, Homo sapiens
  misc_RNA (1)...(19): siRNA sense strand
gagacaaugaucauagaca

SEQ ID NO: 1763122 - RNA, 19 nt, Homo sapiens
  misc_RNA (1)...(19): siRNA sense strand
agagcuauagugcagaaua

SEQ ID NO: 1763123 - RNA, 19 nt, Homo sapiens
  misc_RNA (1)...(19): siRNA sense strand
aaaguggccaucauuggaa

SEQ ID NO: 1763124 - RNA, 19 nt, Homo sapiens
  misc_RNA (1)...(19): siRNA sense strand
guauaugacucggcacaac

SEQ ID NO: 1763125 - RNA, 19 nt, Homo sapiens
  misc_RNA (1)...(19): siRNA sense strand
ucacuuccuggguauauga

SEQ ID NO: 1763126 - RNA, 19 nt, Homo sapiens
  misc_RNA (1)...(19): siRNA sense strand
uugagacaaugaucauaga

SEQ ID NO: 1763127 - RNA, 19 nt, Homo sapiens
  misc_RNA (1)...(19): siRNA sense strand
ucacugaggcugucauugc

SEQ ID NO: 1763128 - RNA, 19 nt, Homo sapiens
  misc_RNA (1)...(19): siRNA sense strand
gcagaauacgcagucuuug

SEQ ID NO: 1763129 - RNA, 19 nt, Homo sapiens
  misc_RNA (1)...(19): siRNA sense strand
ccaacguaguccaugugaa

SEQ ID NO: 1763130 - RNA, 19 nt, Homo sapiens
  misc_RNA (1)...(19): siRNA sense strand
gcuaugcuacuugccauga

SEQ ID NO: 1763131 - RNA, 19 nt, Homo sapiens
  misc_RNA (1)...(19): siRNA sense strand
ugcggcaucuuaaucuuga

SEQ ID NO: 1763132 - RNA, 19 nt, Homo sapiens
  misc_RNA (1)...(19): siRNA sense strand
ugcagaauacgcagucuuu

SEQ ID NO: 1763133 - RNA, 19 nt, Homo sapiens
  misc_RNA (1)...(19): siRNA sense strand
ccaugaaggagaacaaagu

SEQ ID NO: 1763134 - RNA, 19 nt, Homo sapiens
  misc_RNA (1)...(19): siRNA sense strand
ucuaugggaacauuauuga

SEQ ID NO: 1763135 - RNA, 19 nt, Homo sapiens
  misc_RNA (1)...(19): siRNA sense strand
agaacaaaguggccaucau

SEQ ID NO: 1763136 - RNA, 19 nt, Homo sapiens
  misc_RNA (1)...(19): siRNA sense strand
gagaacaaaguggccauca

SEQ ID NO: 1763137 - RNA, 19 nt, Homo sapiens
  misc_RNA (1)...(19): siRNA sense strand
gcugcggcaucuuaaucuu

SEQ ID NO: 1763138 - RNA, 19 nt, Homo sapiens
  misc_RNA (1)...(19): siRNA sense strand
caaggccaacaucaugaaa

SEQ ID NO: 1763139 - RNA, 19 nt, Homo sapiens
  misc_RNA (1)...(19): siRNA sense strand
caaauuugagacaaugauc

SEQ ID NO: 1763140 - RNA, 19 nt, Homo sapiens
  misc_RNA (1)...(19): siRNA sense strand
aagaaggugaucaaaguug

SEQ ID NO: 1763141 - RNA, 19 nt, Homo sapiens
  misc_RNA (1)...(19): siRNA sense strand
gugaagaaggugaucaaag

SEQ ID NO: 1763142 - RNA, 19 nt, Homo sapiens
  misc_RNA (1)...(19): siRNA sense strand
ugcagaauccuuaccaguu

SEQ ID NO: 1763143 - RNA, 19 nt, Homo sapiens
  misc_RNA (1)...(19): siRNA sense strand
ugacucggcacaacaaucu

SEQ ID NO: 1763144 - RNA, 19 nt, Homo sapiens
  misc_RNA (1)...(19): siRNA sense strand
gacauggguggcuaugcua

SEQ ID NO: 1763145 - RNA, 19 nt, Homo sapiens
  misc_RNA (1)...(19): siRNA sense strand
uaugggaacauuauugaca

SEQ ID NO: 1763146 - RNA, 19 nt, Homo sapiens
  misc_RNA (1)...(19): siRNA sense strand
cacaaggccaacaucauga

SEQ ID NO: 1763147 - RNA, 19 nt, Homo sapiens
  misc_RNA (1)...(19): siRNA sense strand
ggggugugauugaguguuu

SEQ ID NO: 1763148 - RNA, 19 nt, Homo sapiens
  misc_RNA (1)...(19): siRNA sense strand
ucacacgagccaagucuca

SEQ ID NO: 1763149 - RNA, 19 nt, Homo sapiens
  misc_RNA (1)...(19): siRNA sense strand
ccaguuugaugugcuugug

SEQ ID NO: 1763150 - RNA, 19 nt, Homo sapiens
  misc_RNA (1)...(19): siRNA sense strand
cguaguccaugugaaguca

SEQ ID NO: 1763151 - RNA, 19 nt, Homo sapiens
  misc_RNA (1)...(19): siRNA sense strand
caaugaucauagacaacug

SEQ ID NO: 1763152 - RNA, 19 nt, Homo sapiens
  misc_RNA (1)...(19): siRNA sense strand
cucagcggauugcaaaguu

SEQ ID NO: 1763153 - RNA, 19 nt, Homo sapiens
  misc_RNA (1)...(19): siRNA sense strand
ggugcugaguuccaugaag

SEQ ID NO: 1763154 - RNA, 19 nt, Homo sapiens
  misc_RNA (1)...(19): siRNA sense strand
ggugaagaaggugaucaaa

SEQ ID NO: 1763155 - RNA, 19 nt, Homo sapiens
  misc_RNA (1)...(19): siRNA sense strand
ggcagugggcaggaauaua

SEQ ID NO: 1763156 - RNA, 19 nt, Homo sapiens
  misc_RNA (1)...(19): siRNA sense strand
ucagcggauugcaaaguuc

SEQ ID NO: 1763157 - RNA, 19 nt, Homo sapiens
  misc_RNA (1)...(19): siRNA sense strand
caugaaggagaacaaagug

SEQ ID NO: 1763158 - RNA, 19 nt, Homo sapiens
  misc_RNA (1)...(19): siRNA sense strand
agaauacgcagucuuugag

SEQ ID NO: 1763159 - RNA, 19 nt, Homo sapiens
  misc_RNA (1)...(19): siRNA sense strand
gcugaacuguaccccaaaa

SEQ ID NO: 1763160 - RNA, 19 nt, Homo sapiens
  misc_RNA (1)...(19): siRNA sense strand
gcagaauccuuaccaguuu

SEQ ID NO: 1763161 - RNA, 19 nt, Homo sapiens
  misc_RNA (1)...(19): siRNA sense strand
ugaagaaggugaucaaagu

SEQ ID NO: 1763162 - RNA, 19 nt, Homo sapiens
  misc_RNA (1)...(19): siRNA sense strand
gcagugggcaggaauauag

SEQ ID NO: 1763163 - RNA, 19 nt, Homo sapiens
  misc_RNA (1)...(19): siRNA sense strand
gaagaaggugaucaaaguu

SEQ ID NO: 1763164 - RNA, 19 nt, Homo sapiens
  misc_RNA (1)...(19): siRNA sense strand
ccacaaggccaacaucaug

SEQ ID NO: 1763165 - RNA, 19 nt, Homo sapiens
  misc_RNA (1)...(19): siRNA sense strand
gcagugcugugaggaaguu

SEQ ID NO: 1763166 - RNA, 19 nt, Homo sapiens
  misc_RNA (1)...(19): siRNA sense strand
agacaaugaucauagacaa

SEQ ID NO: 1763167 - RNA, 19 nt, Homo sapiens
  misc_RNA (1)...(19): siRNA sense strand
gugauugaguguuugaaga

SEQ ID NO: 1763168 - RNA, 19 nt, Homo sapiens
  misc_RNA (1)...(19): siRNA sense strand
gcugucggcuuccaacaug

SEQ ID NO: 1763169 - RNA, 19 nt, Homo sapiens
  misc_RNA (1)...(19): siRNA sense strand
gagcuauagugcagaauac

SEQ ID NO: 1763170 - RNA, 19 nt, Homo sapiens
  misc_RNA (1)...(19): siRNA sense strand
cagaauacgcagucuuuga

SEQ ID NO: 1763171 - RNA, 19 nt, Homo sapiens
  misc_RNA (1)...(19): siRNA sense strand
gauugaguguuugaagauu

SEQ ID NO: 1763172 - RNA, 19 nt, Homo sapiens
  misc_RNA (1)...(19): siRNA sense strand
gcaggaauauagccaaucc

SEQ ID NO: 1763173 - RNA, 19 nt, Homo sapiens
  misc_RNA (1)...(19): siRNA sense strand
gccaacaucaugaaacuug

SEQ ID NO: 1763174 - RNA, 19 nt, Homo sapiens
  misc_RNA (1)...(19): siRNA sense strand
ggucacugcuguccacaag

SEQ ID NO: 1763175 - RNA, 19 nt, Homo sapiens
  misc_RNA (1)...(19): siRNA sense strand
gcaucuuaaucuugaguau

SEQ ID NO: 1763176 - RNA, 19 nt, Homo sapiens
  misc_RNA (1)...(19): siRNA sense strand
ugagagcuauagugcagaa

SEQ ID NO: 1763177 - RNA, 19 nt, Homo sapiens
  misc_RNA (1)...(19): siRNA sense strand
cagaugcggugaagaaggu

SEQ ID NO: 1763178 - RNA, 19 nt, Homo sapiens
  misc_RNA (1)...(19): siRNA sense strand
gggcaggaauauagccaau

SEQ ID NO: 1763179 - RNA, 19 nt, Homo sapiens
  misc_RNA (1)...(19): siRNA sense strand
cagaauccuuaccaguuug

SEQ ID NO: 1763180 - RNA, 19 nt, Homo sapiens
  misc_RNA (1)...(19): siRNA sense strand
gaacuguaccccaaaauca

SEQ ID NO: 1763181 - RNA, 19 nt, Homo sapiens
  misc_RNA (1)...(19): siRNA sense strand
gaauacgcagucuuugaga

SEQ ID NO: 1763182 - RNA, 19 nt, Homo sapiens
  misc_RNA (1)...(19): siRNA sense strand
caaucucuaugggaacauu

SEQ ID NO: 1763183 - RNA, 19 nt, Homo sapiens
  misc_RNA (1)...(19): siRNA sense strand
gagacaaugaucauagaca

SEQ ID NO: 1763184 - RNA, 19 nt, Homo sapiens
  misc_RNA (1)...(19): siRNA sense strand
agagcuauagugcagaaua

SEQ ID NO: 1763185 - RNA, 19 nt, Homo sapiens
  misc_RNA (1)...(19): siRNA sense strand
uugagacaaugaucauaga

SEQ ID NO: 1763186 - RNA, 19 nt, Homo sapiens
  misc_RNA (1)...(19): siRNA sense strand
gcagaauacgcagucuuug

SEQ ID NO: 1763187 - RNA, 19 nt, Homo sapiens
  misc_RNA (1)...(19): siRNA sense strand
ucuaugggaacauuauuga

SEQ ID NO: 1763188 - RNA, 19 nt, Homo sapiens
  misc_RNA (1)...(19): siRNA sense strand
ugcggcaucuuaaucuuga

SEQ ID NO: 1763189 - RNA, 19 nt, Homo sapiens
  misc_RNA (1)...(19): siRNA sense strand
ugcagaauacgcagucuuu

SEQ ID NO: 1763190 - RNA, 19 nt, Homo sapiens
  misc_RNA (1)...(19): siRNA sense strand
caaggccaacaucaugaaa

SEQ ID NO: 1763191 - RNA, 19 nt, Homo sapiens
  misc_RNA (1)...(19): siRNA sense strand
gcugcggcaucuuaaucuu

SEQ ID NO: 1763192 - RNA, 19 nt, Homo sapiens
  misc_RNA (1)...(19): siRNA sense strand
caaauuugagacaaugauc

SEQ ID NO: 1763193 - RNA, 19 nt, Homo sapiens
  misc_RNA (1)...(19): siRNA sense strand
aagaaggugaucaaaguug

SEQ ID NO: 1763194 - RNA, 19 nt, Homo sapiens
  misc_RNA (1)...(19): siRNA sense strand
gugaagaaggugaucaaag

SEQ ID NO: 1763195 - RNA, 19 nt, Homo sapiens
  misc_RNA (1)...(19): siRNA sense strand
ugcagaauccuuaccaguu

SEQ ID NO: 1763196 - RNA, 19 nt, Homo sapiens
  misc_RNA (1)...(19): siRNA sense strand
cacaaggccaacaucauga

SEQ ID NO: 1763197 - RNA, 19 nt, Homo sapiens
  misc_RNA (1)...(19): siRNA sense strand
ggggugugauugaguguuu

SEQ ID NO: 1763198 - RNA, 19 nt, Homo sapiens
  misc_RNA (1)...(19): siRNA sense strand
uaugggaacauuauugaca

SEQ ID NO: 1763199 - RNA, 19 nt, Homo sapiens
  misc_RNA (1)...(19): siRNA sense strand
ucacacgagccaagucuca

SEQ ID NO: 1763200 - RNA, 19 nt, Homo sapiens
  misc_RNA (1)...(19): siRNA sense strand
ccaguuugaugugcuugug

SEQ ID NO: 1763201 - RNA, 19 nt, Homo sapiens
  misc_RNA (1)...(19): siRNA sense strand
caaugaucauagacaacug

SEQ ID NO: 1763202 - RNA, 19 nt, Homo sapiens
  misc_RNA (1)...(19): siRNA sense strand
ucagcggauugcaaaguuc

SEQ ID NO: 1763203 - RNA, 19 nt, Homo sapiens
  misc_RNA (1)...(19): siRNA sense strand
cucagcggauugcaaaguu

SEQ ID NO: 1763204 - RNA, 19 nt, Homo sapiens
  misc_RNA (1)...(19): siRNA sense strand
ggugaagaaggugaucaaa

SEQ ID NO: 1763205 - RNA, 19 nt, Homo sapiens
  misc_RNA (1)...(19): siRNA sense strand
ggcagugggcaggaauaua

SEQ ID NO: 1763206 - RNA, 19 nt, Homo sapiens
  misc_RNA (1)...(19): siRNA sense strand
agaauacgcagucuuugag

SEQ ID NO: 1763207 - RNA, 19 nt, Homo sapiens
  misc_RNA (1)...(19): siRNA sense strand
gcugaacuguaccccaaaa

SEQ ID NO: 1763208 - RNA, 19 nt, Homo sapiens
  misc_RNA (1)...(19): siRNA sense strand
caaacuagaagucaucauu

SEQ ID NO: 1763209 - RNA, 19 nt, Homo sapiens
  misc_RNA (1)...(19): siRNA sense strand
acaggaagcugacuaugga

SEQ ID NO: 1763210 - RNA, 19 nt, Homo sapiens
  misc_RNA (1)...(19): siRNA sense strand
gaagcugacuauggaagaa

SEQ ID NO: 1763211 - RNA, 19 nt, Homo sapiens
  misc_RNA (1)...(19): siRNA sense strand
ucucaaagauucagucaca

SEQ ID NO: 1763212 - RNA, 19 nt, Homo sapiens
  misc_RNA (1)...(19): siRNA sense strand
uggacaaacugaucaagaa

SEQ ID NO: 1763213 - RNA, 19 nt, Homo sapiens
  misc_RNA (1)...(19): siRNA sense strand
gcacuucggcugcaccauu

SEQ ID NO: 1763214 - RNA, 19 nt, Homo sapiens
  misc_RNA (1)...(19): siRNA sense strand
agacaaaccuggccuuggu

SEQ ID NO: 1763215 - RNA, 19 nt, Homo sapiens
  misc_RNA (1)...(19): siRNA sense strand
ccauuggucucaaagauuc

SEQ ID NO: 1763216 - RNA, 19 nt, Homo sapiens
  misc_RNA (1)...(19): siRNA sense strand
gcaucagcgugcucuugua

SEQ ID NO: 1763217 - RNA, 19 nt, Homo sapiens
  misc_RNA (1)...(19): siRNA sense strand
gaugggaaagccaguauug

SEQ ID NO: 1763218 - RNA, 19 nt, Homo sapiens
  misc_RNA (1)...(19): siRNA sense strand
gggaugaggaugaggauga

SEQ ID NO: 1763219 - RNA, 19 nt, Homo sapiens
  misc_RNA (1)...(19): siRNA sense strand
gaagaguccuaugaguuca

SEQ ID NO: 1763220 - RNA, 19 nt, Homo sapiens
  misc_RNA (1)...(19): siRNA sense strand
ggaugaggaugaggaugaa

SEQ ID NO: 1763221 - RNA, 19 nt, Homo sapiens
  misc_RNA (1)...(19): siRNA sense strand
ccaagaggauagcagagau

SEQ ID NO: 1763222 - RNA, 19 nt, Homo sapiens
  misc_RNA (1)...(19): siRNA sense strand
uagaagucaucauugaaga

SEQ ID NO: 1763223 - RNA, 19 nt, Homo sapiens
  misc_RNA (1)...(19): siRNA sense strand
ugaagaguccuaugaguuc

SEQ ID NO: 1763224 - RNA, 19 nt, Homo sapiens
  misc_RNA (1)...(19): siRNA sense strand
gcaacgccgucaaugucuu

SEQ ID NO: 1763225 - RNA, 19 nt, Homo sapiens
  misc_RNA (1)...(19): siRNA sense strand
ggagggaccaguucaugga

SEQ ID NO: 1763226 - RNA, 19 nt, Homo sapiens
  misc_RNA (1)...(19): siRNA sense strand
ccuaugaguucaagacuac

SEQ ID NO: 1763227 - RNA, 19 nt, Homo sapiens
  misc_RNA (1)...(19): siRNA sense strand
gcagcaacgccgucaaugu

SEQ ID NO: 1763228 - RNA, 19 nt, Homo sapiens
  misc_RNA (1)...(19): siRNA sense strand
aaacuagaagucaucauug

SEQ ID NO: 1763229 - RNA, 19 nt, Homo sapiens
  misc_RNA (1)...(19): siRNA sense strand
ggaagcugacuauggaaga

SEQ ID NO: 1763230 - RNA, 19 nt, Homo sapiens
  misc_RNA (1)...(19): siRNA sense strand
aacuagaagucaucauuga

SEQ ID NO: 1763231 - RNA, 19 nt, Homo sapiens
  misc_RNA (1)...(19): siRNA sense strand
gcugcaagcucgccacaac

SEQ ID NO: 1763232 - RNA, 19 nt, Homo sapiens
  misc_RNA (1)...(19): siRNA sense strand
agacuacgguggacaaacu

SEQ ID NO: 1763233 - RNA, 19 nt, Homo sapiens
  misc_RNA (1)...(19): siRNA sense strand
gacaaacugaucaagaaga

SEQ ID NO: 1763234 - RNA, 19 nt, Homo sapiens
  misc_RNA (1)...(19): siRNA sense strand
aaacugaucaagaagacaa

SEQ ID NO: 1763235 - RNA, 19 nt, Homo sapiens
  misc_RNA (1)...(19): siRNA sense strand
gaagucaucauugaagagu

SEQ ID NO: 1763236 - RNA, 19 nt, Homo sapiens
  misc_RNA (1)...(19): siRNA sense strand
gacaggaagcugacuaugg

SEQ ID NO: 1763237 - RNA, 19 nt, Homo sapiens
  misc_RNA (1)...(19): siRNA sense strand
ggacaaacugaucaagaag

SEQ ID NO: 1763238 - RNA, 19 nt, Homo sapiens
  misc_RNA (1)...(19): siRNA sense strand
gagaugggaaagccaguau

SEQ ID NO: 1763239 - RNA, 19 nt, Homo sapiens
  misc_RNA (1)...(19): siRNA sense strand
cagcaacgccgucaauguc

SEQ ID NO: 1763240 - RNA, 19 nt, Homo sapiens
  misc_RNA (1)...(19): siRNA sense strand
ggauagcagagaugggaaa

SEQ ID NO: 1763241 - RNA, 19 nt, Homo sapiens
  misc_RNA (1)...(19): siRNA sense strand
cauacucuuugccacacua

SEQ ID NO: 1763242 - RNA, 19 nt, Homo sapiens
  misc_RNA (1)...(19): siRNA sense strand
cuagaggccuauugcuaca

SEQ ID NO: 1763243 - RNA, 19 nt, Homo sapiens
  misc_RNA (1)...(19): siRNA sense strand
gcuccucuacauacucuuu

SEQ ID NO: 1763244 - RNA, 19 nt, Homo sapiens
  misc_RNA (1)...(19): siRNA sense strand
cacuagaggccuauugcua

SEQ ID NO: 1763245 - RNA, 19 nt, Homo sapiens
  misc_RNA (1)...(19): siRNA sense strand
cacuucggcugcaccauug

SEQ ID NO: 1763246 - RNA, 19 nt, Homo sapiens
  misc_RNA (1)...(19): siRNA sense strand
gggcagcaacgccgucaau

SEQ ID NO: 1763247 - RNA, 19 nt, Homo sapiens
  misc_RNA (1)...(19): siRNA sense strand
gccuguggcuccucuacau

SEQ ID NO: 1763248 - RNA, 19 nt, Homo sapiens
  misc_RNA (1)...(19): siRNA sense strand
caagaggauagcagagaug

SEQ ID NO: 1763249 - RNA, 19 nt, Homo sapiens
  misc_RNA (1)...(19): siRNA sense strand
aggcugcccuccugcuuug

SEQ ID NO: 1763250 - RNA, 19 nt, Homo sapiens
  misc_RNA (1)...(19): siRNA sense strand
acaaacugaucaagaagac

SEQ ID NO: 1763251 - RNA, 19 nt, Homo sapiens
  misc_RNA (1)...(19): siRNA sense strand
guggacaaacugaucaaga

SEQ ID NO: 1763252 - RNA, 19 nt, Homo sapiens
  misc_RNA (1)...(19): siRNA sense strand
gccaagaggauagcagaga

SEQ ID NO: 1763253 - RNA, 19 nt, Homo sapiens
  misc_RNA (1)...(19): siRNA sense strand
cugcugcccuccaggaugu

SEQ ID NO: 1763254 - RNA, 19 nt, Homo sapiens
  misc_RNA (1)...(19): siRNA sense strand
gaagaagaggaggccaaga

SEQ ID NO: 1763255 - RNA, 19 nt, Homo sapiens
  misc_RNA (1)...(19): siRNA sense strand
uugaagaguccuaugaguu

SEQ ID NO: 1763256 - RNA, 19 nt, Homo sapiens
  misc_RNA (1)...(19): siRNA sense strand
gaggaggccaagaggauag

SEQ ID NO: 1763257 - RNA, 19 nt, Homo sapiens
  misc_RNA (1)...(19): siRNA sense strand
agucacagcuguuguuuuc

SEQ ID NO: 1763258 - RNA, 19 nt, Homo sapiens
  misc_RNA (1)...(19): siRNA sense strand
cuagaagucaucauugaag

SEQ ID NO: 1763259 - RNA, 19 nt, Homo sapiens
  misc_RNA (1)...(19): siRNA sense strand
ccacacuagaggccuauug

SEQ ID NO: 1763260 - RNA, 19 nt, Homo sapiens
  misc_RNA (1)...(19): siRNA sense strand
gcaagcucgccacaacaug

SEQ ID NO: 1763261 - RNA, 19 nt, Homo sapiens
  misc_RNA (1)...(19): siRNA sense strand
caccaucuuugcauuuguc

SEQ ID NO: 1763262 - RNA, 19 nt, Homo sapiens
  misc_RNA (1)...(19): siRNA sense strand
ucaagacuacgguggacaa

SEQ ID NO: 1763263 - RNA, 19 nt, Homo sapiens
  misc_RNA (1)...(19): siRNA sense strand
caugcucaccgccaucauu

SEQ ID NO: 1763264 - RNA, 19 nt, Homo sapiens
  misc_RNA (1)...(19): siRNA sense strand
gcacuuccugacugucuuc

SEQ ID NO: 1763265 - RNA, 19 nt, Homo sapiens
  misc_RNA (1)...(19): siRNA sense strand
caacgccgucaaugucuuc

SEQ ID NO: 1763266 - RNA, 19 nt, Homo sapiens
  misc_RNA (1)...(19): siRNA sense strand
ccuccaggauguauaugca

SEQ ID NO: 1763267 - RNA, 19 nt, Homo sapiens
  misc_RNA (1)...(19): siRNA sense strand
ucuggaaggugcuguuugc

SEQ ID NO: 1763268 - RNA, 19 nt, Homo sapiens
  misc_RNA (1)...(19): siRNA sense strand
uccuaugaguucaagacua

SEQ ID NO: 1763269 - RNA, 19 nt, Homo sapiens
  misc_RNA (1)...(19): siRNA sense strand
cagacaggaagcugacuau

SEQ ID NO: 1763270 - RNA, 19 nt, Homo sapiens
  misc_RNA (1)...(19): siRNA sense strand
ucaccaucuuugcauuugu

SEQ ID NO: 1763271 - RNA, 19 nt, Homo sapiens
  misc_RNA (1)...(19): siRNA sense strand
agaggaggccaagaggaua

SEQ ID NO: 1763272 - RNA, 19 nt, Homo sapiens
  misc_RNA (1)...(19): siRNA sense strand
aagaggaggccaagaggau

SEQ ID NO: 1763273 - RNA, 19 nt, Homo sapiens
  misc_RNA (1)...(19): siRNA sense strand
caaacuagaagucaucauu

SEQ ID NO: 1763274 - RNA, 19 nt, Homo sapiens
  misc_RNA (1)...(19): siRNA sense strand
acaggaagcugacuaugga

SEQ ID NO: 1763275 - RNA, 19 nt, Homo sapiens
  misc_RNA (1)...(19): siRNA sense strand
gaagcugacuauggaagaa

SEQ ID NO: 1763276 - RNA, 19 nt, Homo sapiens
  misc_RNA (1)...(19): siRNA sense strand
ucucaaagauucagucaca

SEQ ID NO: 1763277 - RNA, 19 nt, Homo sapiens
  misc_RNA (1)...(19): siRNA sense strand
uggacaaacugaucaagaa

SEQ ID NO: 1763278 - RNA, 19 nt, Homo sapiens
  misc_RNA (1)...(19): siRNA sense strand
gcacuucggcugcaccauu

SEQ ID NO: 1763279 - RNA, 19 nt, Homo sapiens
  misc_RNA (1)...(19): siRNA sense strand
agacaaaccuggccuuggu

SEQ ID NO: 1763280 - RNA, 19 nt, Homo sapiens
  misc_RNA (1)...(19): siRNA sense strand
ccauuggucucaaagauuc

SEQ ID NO: 1763281 - RNA, 19 nt, Homo sapiens
  misc_RNA (1)...(19): siRNA sense strand
gcaucagcgugcucuugua

SEQ ID NO: 1763282 - RNA, 19 nt, Homo sapiens
  misc_RNA (1)...(19): siRNA sense strand
gaugggaaagccaguauug

SEQ ID NO: 1763283 - RNA, 19 nt, Homo sapiens
  misc_RNA (1)...(19): siRNA sense strand
gggaugaggaugaggauga

SEQ ID NO: 1763284 - RNA, 19 nt, Homo sapiens
  misc_RNA (1)...(19): siRNA sense strand
gaagaguccuaugaguuca

SEQ ID NO: 1763285 - RNA, 19 nt, Homo sapiens
  misc_RNA (1)...(19): siRNA sense strand
ggaugaggaugaggaugaa

SEQ ID NO: 1763286 - RNA, 19 nt, Homo sapiens
  misc_RNA (1)...(19): siRNA sense strand
ccaagaggauagcagagau

SEQ ID NO: 1763287 - RNA, 19 nt, Homo sapiens
  misc_RNA (1)...(19): siRNA sense strand
uagaagucaucauugaaga

SEQ ID NO: 1763288 - RNA, 19 nt, Homo sapiens
  misc_RNA (1)...(19): siRNA sense strand
ugaagaguccuaugaguuc

SEQ ID NO: 1763289 - RNA, 19 nt, Homo sapiens
  misc_RNA (1)...(19): siRNA sense strand
gcaacgccgucaaugucuu

SEQ ID NO: 1763290 - RNA, 19 nt, Homo sapiens
  misc_RNA (1)...(19): siRNA sense strand
ggagggaccaguucaugga

SEQ ID NO: 1763291 - RNA, 19 nt, Homo sapiens
  misc_RNA (1)...(19): siRNA sense strand
ccuaugaguucaagacuac

SEQ ID NO: 1763292 - RNA, 19 nt, Homo sapiens
  misc_RNA (1)...(19): siRNA sense strand
gcagcaacgccgucaaugu

SEQ ID NO: 1763293 - RNA, 19 nt, Homo sapiens
  misc_RNA (1)...(19): siRNA sense strand
aaacuagaagucaucauug

SEQ ID NO: 1763294 - RNA, 19 nt, Homo sapiens
  misc_RNA (1)...(19): siRNA sense strand
ggaagcugacuauggaaga

SEQ ID NO: 1763295 - RNA, 19 nt, Homo sapiens
  misc_RNA (1)...(19): siRNA sense strand
aacuagaagucaucauuga

SEQ ID NO: 1763296 - RNA, 19 nt, Homo sapiens
  misc_RNA (1)...(19): siRNA sense strand
gcugcaagcucgccacaac

SEQ ID NO: 1763297 - RNA, 19 nt, Homo sapiens
  misc_RNA (1)...(19): siRNA sense strand
agacuacgguggacaaacu

SEQ ID NO: 1763298 - RNA, 19 nt, Homo sapiens
  misc_RNA (1)...(19): siRNA sense strand
gacaaacugaucaagaaga

SEQ ID NO: 1763299 - RNA, 19 nt, Homo sapiens
  misc_RNA (1)...(19): siRNA sense strand
aaacugaucaagaagacaa

SEQ ID NO: 1763300 - RNA, 19 nt, Homo sapiens
  misc_RNA (1)...(19): siRNA sense strand
gaagucaucauugaagagu

SEQ ID NO: 1763301 - RNA, 19 nt, Homo sapiens
  misc_RNA (1)...(19): siRNA sense strand
gacaggaagcugacuaugg

SEQ ID NO: 1763302 - RNA, 19 nt, Homo sapiens
  misc_RNA (1)...(19): siRNA sense strand
ggacaaacugaucaagaag

SEQ ID NO: 1763303 - RNA, 19 nt, Homo sapiens
  misc_RNA (1)...(19): siRNA sense strand
gagaugggaaagccaguau

SEQ ID NO: 1763304 - RNA, 19 nt, Homo sapiens
  misc_RNA (1)...(19): siRNA sense strand
cagcaacgccgucaauguc

SEQ ID NO: 1763305 - RNA, 19 nt, Homo sapiens
  misc_RNA (1)...(19): siRNA sense strand
ggauagcagagaugggaaa

SEQ ID NO: 1763306 - RNA, 19 nt, Homo sapiens
  misc_RNA (1)...(19): siRNA sense strand
cauacucuuugccacacua

SEQ ID NO: 1763307 - RNA, 19 nt, Homo sapiens
  misc_RNA (1)...(19): siRNA sense strand
cuagaggccuauugcuaca

SEQ ID NO: 1763308 - RNA, 19 nt, Homo sapiens
  misc_RNA (1)...(19): siRNA sense strand
gcuccucuacauacucuuu

SEQ ID NO: 1763309 - RNA, 19 nt, Homo sapiens
  misc_RNA (1)...(19): siRNA sense strand
cacuagaggccuauugcua

SEQ ID NO: 1763310 - RNA, 19 nt, Homo sapiens
  misc_RNA (1)...(19): siRNA sense strand
cacuucggcugcaccauug

SEQ ID NO: 1763311 - RNA, 19 nt, Homo sapiens
  misc_RNA (1)...(19): siRNA sense strand
gggcagcaacgccgucaau

SEQ ID NO: 1763312 - RNA, 19 nt, Homo sapiens
  misc_RNA (1)...(19): siRNA sense strand
gccuguggcuccucuacau

SEQ ID NO: 1763313 - RNA, 19 nt, Homo sapiens
  misc_RNA (1)...(19): siRNA sense strand
caagaggauagcagagaug

SEQ ID NO: 1763314 - RNA, 19 nt, Homo sapiens
  misc_RNA (1)...(19): siRNA sense strand
aggcugcccuccugcuuug

SEQ ID NO: 1763315 - RNA, 19 nt, Homo sapiens
  misc_RNA (1)...(19): siRNA sense strand
acaaacugaucaagaagac

SEQ ID NO: 1763316 - RNA, 19 nt, Homo sapiens
  misc_RNA (1)...(19): siRNA sense strand
guggacaaacugaucaaga

SEQ ID NO: 1763317 - RNA, 19 nt, Homo sapiens
  misc_RNA (1)...(19): siRNA sense strand
gccaagaggauagcagaga

SEQ ID NO: 1763318 - RNA, 19 nt, Homo sapiens
  misc_RNA (1)...(19): siRNA sense strand
cugcugcccuccaggaugu

SEQ ID NO: 1763319 - RNA, 19 nt, Homo sapiens
  misc_RNA (1)...(19): siRNA sense strand
gaagaagaggaggccaaga

SEQ ID NO: 1763320 - RNA, 19 nt, Homo sapiens
  misc_RNA (1)...(19): siRNA sense strand
uugaagaguccuaugaguu

SEQ ID NO: 1763321 - RNA, 19 nt, Homo sapiens
  misc_RNA (1)...(19): siRNA sense strand
gaggaggccaagaggauag

SEQ ID NO: 1763322 - RNA, 19 nt, Homo sapiens
  misc_RNA (1)...(19): siRNA sense strand
agucacagcuguuguuuuc

SEQ ID NO: 1763323 - RNA, 19 nt, Homo sapiens
  misc_RNA (1)...(19): siRNA sense strand
cuagaagucaucauugaag

SEQ ID NO: 1763324 - RNA, 19 nt, Homo sapiens
  misc_RNA (1)...(19): siRNA sense strand
ccacacuagaggccuauug

SEQ ID NO: 1763325 - RNA, 19 nt, Homo sapiens
  misc_RNA (1)...(19): siRNA sense strand
gcaagcucgccacaacaug

SEQ ID NO: 1763326 - RNA, 19 nt, Homo sapiens
  misc_RNA (1)...(19): siRNA sense strand
caccaucuuugcauuuguc

SEQ ID NO: 1763327 - RNA, 19 nt, Homo sapiens
  misc_RNA (1)...(19): siRNA sense strand
ucaagacuacgguggacaa

SEQ ID NO: 1763328 - RNA, 19 nt, Homo sapiens
  misc_RNA (1)...(19): siRNA sense strand
caugcucaccgccaucauu

SEQ ID NO: 1763329 - RNA, 19 nt, Homo sapiens
  misc_RNA (1)...(19): siRNA sense strand
gcacuuccugacugucuuc

SEQ ID NO: 1763330 - RNA, 19 nt, Homo sapiens
  misc_RNA (1)...(19): siRNA sense strand
caacgccgucaaugucuuc

SEQ ID NO: 1763331 - RNA, 19 nt, Homo sapiens
  misc_RNA (1)...(19): siRNA sense strand
ccuccaggauguauaugca

SEQ ID NO: 1763332 - RNA, 19 nt, Homo sapiens
  misc_RNA (1)...(19): siRNA sense strand
ucuggaaggugcuguuugc

SEQ ID NO: 1763333 - RNA, 19 nt, Homo sapiens
  misc_RNA (1)...(19): siRNA sense strand
uccuaugaguucaagacua

SEQ ID NO: 1763334 - RNA, 19 nt, Homo sapiens
  misc_RNA (1)...(19): siRNA sense strand
cagacaggaagcugacuau

SEQ ID NO: 1763335 - RNA, 19 nt, Homo sapiens
  misc_RNA (1)...(19): siRNA sense strand
ucaccaucuuugcauuugu

SEQ ID NO: 1763336 - RNA, 19 nt, Homo sapiens
  misc_RNA (1)...(19): siRNA sense strand
agaggaggccaagaggaua

SEQ ID NO: 1763337 - RNA, 19 nt, Homo sapiens
  misc_RNA (1)...(19): siRNA sense strand
aagaggaggccaagaggau

SEQ ID NO: 1763338 - RNA, 19 nt, Homo sapiens
  misc_RNA (1)...(19): siRNA sense strand
caaacuagaagucaucauu

SEQ ID NO: 1763339 - RNA, 19 nt, Homo sapiens
  misc_RNA (1)...(19): siRNA sense strand
acaggaagcugacuaugga

SEQ ID NO: 1763340 - RNA, 19 nt, Homo sapiens
  misc_RNA (1)...(19): siRNA sense strand
gaagcugacuauggaagaa

SEQ ID NO: 1763341 - RNA, 19 nt, Homo sapiens
  misc_RNA (1)...(19): siRNA sense strand
ucucaaagauucagucaca

SEQ ID NO: 1763342 - RNA, 19 nt, Homo sapiens
  misc_RNA (1)...(19): siRNA sense strand
uggacaaacugaucaagaa

SEQ ID NO: 1763343 - RNA, 19 nt, Homo sapiens
  misc_RNA (1)...(19): siRNA sense strand
gcacuucggcugcaccauu

SEQ ID NO: 1763344 - RNA, 19 nt, Homo sapiens
  misc_RNA (1)...(19): siRNA sense strand
agacaaaccuggccuuggu

SEQ ID NO: 1763345 - RNA, 19 nt, Homo sapiens
  misc_RNA (1)...(19): siRNA sense strand
ccauuggucucaaagauuc

SEQ ID NO: 1763346 - RNA, 19 nt, Homo sapiens
  misc_RNA (1)...(19): siRNA sense strand
gcaucagcgugcucuugua

SEQ ID NO: 1763347 - RNA, 19 nt, Homo sapiens
  misc_RNA (1)...(19): siRNA sense strand
gaugggaaagccaguauug

SEQ ID NO: 1763348 - RNA, 19 nt, Homo sapiens
  misc_RNA (1)...(19): siRNA sense strand
gggaugaggaugaggauga

SEQ ID NO: 1763349 - RNA, 19 nt, Homo sapiens
  misc_RNA (1)...(19): siRNA sense strand
gaagaguccuaugaguuca

SEQ ID NO: 1763350 - RNA, 19 nt, Homo sapiens
  misc_RNA (1)...(19): siRNA sense strand
ggaugaggaugaggaugaa

SEQ ID NO: 1763351 - RNA, 19 nt, Homo sapiens
  misc_RNA (1)...(19): siRNA sense strand
ccaagaggauagcagagau

SEQ ID NO: 1763352 - RNA, 19 nt, Homo sapiens
  misc_RNA (1)...(19): siRNA sense strand
uagaagucaucauugaaga

SEQ ID NO: 1763353 - RNA, 19 nt, Homo sapiens
  misc_RNA (1)...(19): siRNA sense strand
ugaagaguccuaugaguuc

SEQ ID NO: 1763354 - RNA, 19 nt, Homo sapiens
  misc_RNA (1)...(19): siRNA sense strand
gcaacgccgucaaugucuu

SEQ ID NO: 1763355 - RNA, 19 nt, Homo sapiens
  misc_RNA (1)...(19): siRNA sense strand
ggagggaccaguucaugga

SEQ ID NO: 1763356 - RNA, 19 nt, Homo sapiens
  misc_RNA (1)...(19): siRNA sense strand
ccuaugaguucaagacuac

SEQ ID NO: 1763357 - RNA, 19 nt, Homo sapiens
  misc_RNA (1)...(19): siRNA sense strand
gcagcaacgccgucaaugu

SEQ ID NO: 1763358 - RNA, 19 nt, Homo sapiens
  misc_RNA (1)...(19): siRNA sense strand
aaacuagaagucaucauug

SEQ ID NO: 1763359 - RNA, 19 nt, Homo sapiens
  misc_RNA (1)...(19): siRNA sense strand
ggaagcugacuauggaaga

SEQ ID NO: 1763360 - RNA, 19 nt, Homo sapiens
  misc_RNA (1)...(19): siRNA sense strand
aacuagaagucaucauuga

SEQ ID NO: 1763361 - RNA, 19 nt, Homo sapiens
  misc_RNA (1)...(19): siRNA sense strand
gcugcaagcucgccacaac

SEQ ID NO: 1763362 - RNA, 19 nt, Homo sapiens
  misc_RNA (1)...(19): siRNA sense strand
agacuacgguggacaaacu

SEQ ID NO: 1763363 - RNA, 19 nt, Homo sapiens
  misc_RNA (1)...(19): siRNA sense strand
gacaaacugaucaagaaga

SEQ ID NO: 1763364 - RNA, 19 nt, Homo sapiens
  misc_RNA (1)...(19): siRNA sense strand
aaacugaucaagaagacaa

SEQ ID NO: 1763365 - RNA, 19 nt, Homo sapiens
  misc_RNA (1)...(19): siRNA sense strand
gaagucaucauugaagagu

SEQ ID NO: 1763366 - RNA, 19 nt, Homo sapiens
  misc_RNA (1)...(19): siRNA sense strand
gacaggaagcugacuaugg

SEQ ID NO: 1763367 - RNA, 19 nt, Homo sapiens
  misc_RNA (1)...(19): siRNA sense strand
ggacaaacugaucaagaag

SEQ ID NO: 1763368 - RNA, 19 nt, Homo sapiens
  misc_RNA (1)...(19): siRNA sense strand
gagaugggaaagccaguau

SEQ ID NO: 1763369 - RNA, 19 nt, Homo sapiens
  misc_RNA (1)...(19): siRNA sense strand
cagcaacgccgucaauguc

SEQ ID NO: 1763370 - RNA, 19 nt, Homo sapiens
  misc_RNA (1)...(19): siRNA sense strand
ggauagcagagaugggaaa

SEQ ID NO: 1763371 - RNA, 19 nt, Homo sapiens
  misc_RNA (1)...(19): siRNA sense strand
cauacucuuugccacacua

SEQ ID NO: 1763372 - RNA, 19 nt, Homo sapiens
  misc_RNA (1)...(19): siRNA sense strand
cuagaggccuauugcuaca

SEQ ID NO: 1763373 - RNA, 19 nt, Homo sapiens
  misc_RNA (1)...(19): siRNA sense strand
gcuccucuacauacucuuu

SEQ ID NO: 1763374 - RNA, 19 nt, Homo sapiens
  misc_RNA (1)...(19): siRNA sense strand
cacuagaggccuauugcua

SEQ ID NO: 1763375 - RNA, 19 nt, Homo sapiens
  misc_RNA (1)...(19): siRNA sense strand
cacuucggcugcaccauug

SEQ ID NO: 1763376 - RNA, 19 nt, Homo sapiens
  misc_RNA (1)...(19): siRNA sense strand
gggcagcaacgccgucaau

SEQ ID NO: 1763377 - RNA, 19 nt, Homo sapiens
  misc_RNA (1)...(19): siRNA sense strand
gccuguggcuccucuacau

SEQ ID NO: 1763378 - RNA, 19 nt, Homo sapiens
  misc_RNA (1)...(19): siRNA sense strand
caagaggauagcagagaug

SEQ ID NO: 1763379 - RNA, 19 nt, Homo sapiens
  misc_RNA (1)...(19): siRNA sense strand
aggcugcccuccugcuuug

SEQ ID NO: 1763380 - RNA, 19 nt, Homo sapiens
  misc_RNA (1)...(19): siRNA sense strand
acaaacugaucaagaagac

SEQ ID NO: 1763381 - RNA, 19 nt, Homo sapiens
  misc_RNA (1)...(19): siRNA sense strand
guggacaaacugaucaaga

SEQ ID NO: 1763382 - RNA, 19 nt, Homo sapiens
  misc_RNA (1)...(19): siRNA sense strand
gccaagaggauagcagaga

SEQ ID NO: 1763383 - RNA, 19 nt, Homo sapiens
  misc_RNA (1)...(19): siRNA sense strand
cugcugcccuccaggaugu

SEQ ID NO: 1763384 - RNA, 19 nt, Homo sapiens
  misc_RNA (1)...(19): siRNA sense strand
gaagaagaggaggccaaga

SEQ ID NO: 1763385 - RNA, 19 nt, Homo sapiens
  misc_RNA (1)...(19): siRNA sense strand
uugaagaguccuaugaguu

SEQ ID NO: 1763386 - RNA, 19 nt, Homo sapiens
  misc_RNA (1)...(19): siRNA sense strand
gaggaggccaagaggauag

SEQ ID NO: 1763387 - RNA, 19 nt, Homo sapiens
  misc_RNA (1)...(19): siRNA sense strand
agucacagcuguuguuuuc

SEQ ID NO: 1763388 - RNA, 19 nt, Homo sapiens
  misc_RNA (1)...(19): siRNA sense strand
cuagaagucaucauugaag

SEQ ID NO: 1763389 - RNA, 19 nt, Homo sapiens
  misc_RNA (1)...(19): siRNA sense strand
ccacacuagaggccuauug

SEQ ID NO: 1763390 - RNA, 19 nt, Homo sapiens
  misc_RNA (1)...(19): siRNA sense strand
gcaagcucgccacaacaug

SEQ ID NO: 1763391 - RNA, 19 nt, Homo sapiens
  misc_RNA (1)...(19): siRNA sense strand
caccaucuuugcauuuguc

SEQ ID NO: 1763392 - RNA, 19 nt, Homo sapiens
  misc_RNA (1)...(19): siRNA sense strand
ucaagacuacgguggacaa

SEQ ID NO: 1763393 - RNA, 19 nt, Homo sapiens
  misc_RNA (1)...(19): siRNA sense strand
caugcucaccgccaucauu

SEQ ID NO: 1763394 - RNA, 19 nt, Homo sapiens
  misc_RNA (1)...(19): siRNA sense strand
gcacuuccugacugucuuc

SEQ ID NO: 1763395 - RNA, 19 nt, Homo sapiens
  misc_RNA (1)...(19): siRNA sense strand
caacgccgucaaugucuuc

SEQ ID NO: 1763396 - RNA, 19 nt, Homo sapiens
  misc_RNA (1)...(19): siRNA sense strand
ccuccaggauguauaugca

SEQ ID NO: 1763397 - RNA, 19 nt, Homo sapiens
  misc_RNA (1)...(19): siRNA sense strand
ucuggaaggugcuguuugc

SEQ ID NO: 1763398 - RNA, 19 nt, Homo sapiens
  misc_RNA (1)...(19): siRNA sense strand
uccuaugaguucaagacua

SEQ ID NO: 1763399 - RNA, 19 nt, Homo sapiens
  misc_RNA (1)...(19): siRNA sense strand
cagacaggaagcugacuau

SEQ ID NO: 1763400 - RNA, 19 nt, Homo sapiens
  misc_RNA (1)...(19): siRNA sense strand
ucaccaucuuugcauuugu

SEQ ID NO: 1763401 - RNA, 19 nt, Homo sapiens
  misc_RNA (1)...(19): siRNA sense strand
agaggaggccaagaggaua

SEQ ID NO: 1763402 - RNA, 19 nt, Homo sapiens
  misc_RNA (1)...(19): siRNA sense strand
aagaggaggccaagaggau

SEQ ID NO: 1763403 - RNA, 19 nt, Homo sapiens
  misc_RNA (1)...(19): siRNA sense strand
acaggaagcugacuaugga

SEQ ID NO: 1763404 - RNA, 19 nt, Homo sapiens
  misc_RNA (1)...(19): siRNA sense strand
gaagcugacuauggaagaa

SEQ ID NO: 1763405 - RNA, 19 nt, Homo sapiens
  misc_RNA (1)...(19): siRNA sense strand
gaugggaaagccaguauug

SEQ ID NO: 1763406 - RNA, 19 nt, Homo sapiens
  misc_RNA (1)...(19): siRNA sense strand
ccaagaggauagcagagau

SEQ ID NO: 1763407 - RNA, 19 nt, Homo sapiens
  misc_RNA (1)...(19): siRNA sense strand
ggaagcugacuauggaaga

SEQ ID NO: 1763408 - RNA, 19 nt, Homo sapiens
  misc_RNA (1)...(19): siRNA sense strand
gacaggaagcugacuaugg

SEQ ID NO: 1763409 - RNA, 19 nt, Homo sapiens
  misc_RNA (1)...(19): siRNA sense strand
gagaugggaaagccaguau

SEQ ID NO: 1763410 - RNA, 19 nt, Homo sapiens
  misc_RNA (1)...(19): siRNA sense strand
ggauagcagagaugggaaa

SEQ ID NO: 1763411 - RNA, 19 nt, Homo sapiens
  misc_RNA (1)...(19): siRNA sense strand
caagaggauagcagagaug

SEQ ID NO: 1763412 - RNA, 19 nt, Homo sapiens
  misc_RNA (1)...(19): siRNA sense strand
gaagaagaggaggccaaga

SEQ ID NO: 1763413 - RNA, 19 nt, Homo sapiens
  misc_RNA (1)...(19): siRNA sense strand
gccaagaggauagcagaga

SEQ ID NO: 1763414 - RNA, 19 nt, Homo sapiens
  misc_RNA (1)...(19): siRNA sense strand
gaggaggccaagaggauag

SEQ ID NO: 1763415 - RNA, 19 nt, Homo sapiens
  misc_RNA (1)...(19): siRNA sense strand
agaggaggccaagaggaua

SEQ ID NO: 1763416 - RNA, 19 nt, Homo sapiens
  misc_RNA (1)...(19): siRNA sense strand
cagacaggaagcugacuau

SEQ ID NO: 1763417 - RNA, 19 nt, Homo sapiens
  misc_RNA (1)...(19): siRNA sense strand
aagaggaggccaagaggau

SEQ ID NO: 1763418 - RNA, 19 nt, Homo sapiens
  misc_RNA (1)...(19): siRNA sense strand
caaacuagaagucaucauu

SEQ ID NO: 1763419 - RNA, 19 nt, Homo sapiens
  misc_RNA (1)...(19): siRNA sense strand
ucucaaagauucagucaca

SEQ ID NO: 1763420 - RNA, 19 nt, Homo sapiens
  misc_RNA (1)...(19): siRNA sense strand
uggacaaacugaucaagaa

SEQ ID NO: 1763421 - RNA, 19 nt, Homo sapiens
  misc_RNA (1)...(19): siRNA sense strand
gcacuucggcugcaccauu

SEQ ID NO: 1763422 - RNA, 19 nt, Homo sapiens
  misc_RNA (1)...(19): siRNA sense strand
agacaaaccuggccuuggu

SEQ ID NO: 1763423 - RNA, 19 nt, Homo sapiens
  misc_RNA (1)...(19): siRNA sense strand
ccauuggucucaaagauuc

SEQ ID NO: 1763424 - RNA, 19 nt, Homo sapiens
  misc_RNA (1)...(19): siRNA sense strand
gcaucagcgugcucuugua

SEQ ID NO: 1763425 - RNA, 19 nt, Homo sapiens
  misc_RNA (1)...(19): siRNA sense strand
gaugggaaagccaguauug

SEQ ID NO: 1763426 - RNA, 19 nt, Homo sapiens
  misc_RNA (1)...(19): siRNA sense strand
gggaugaggaugaggauga

SEQ ID NO: 1763427 - RNA, 19 nt, Homo sapiens
  misc_RNA (1)...(19): siRNA sense strand
gaagaguccuaugaguuca

SEQ ID NO: 1763428 - RNA, 19 nt, Homo sapiens
  misc_RNA (1)...(19): siRNA sense strand
ggaugaggaugaggaugaa

SEQ ID NO: 1763429 - RNA, 19 nt, Homo sapiens
  misc_RNA (1)...(19): siRNA sense strand
uagaagucaucauugaaga

SEQ ID NO: 1763430 - RNA, 19 nt, Homo sapiens
  misc_RNA (1)...(19): siRNA sense strand
ccaagaggauagcagagau

SEQ ID NO: 1763431 - RNA, 19 nt, Homo sapiens
  misc_RNA (1)...(19): siRNA sense strand
ugaagaguccuaugaguuc

SEQ ID NO: 1763432 - RNA, 19 nt, Homo sapiens
  misc_RNA (1)...(19): siRNA sense strand
gcaacgccgucaaugucuu

SEQ ID NO: 1763433 - RNA, 19 nt, Homo sapiens
  misc_RNA (1)...(19): siRNA sense strand
ggagggaccaguucaugga

SEQ ID NO: 1763434 - RNA, 19 nt, Homo sapiens
  misc_RNA (1)...(19): siRNA sense strand
ccuaugaguucaagacuac

SEQ ID NO: 1763435 - RNA, 19 nt, Homo sapiens
  misc_RNA (1)...(19): siRNA sense strand
gcagcaacgccgucaaugu

SEQ ID NO: 1763436 - RNA, 19 nt, Homo sapiens
  misc_RNA (1)...(19): siRNA sense strand
aaacuagaagucaucauug

SEQ ID NO: 1763437 - RNA, 19 nt, Homo sapiens
  misc_RNA (1)...(19): siRNA sense strand
aacuagaagucaucauuga

SEQ ID NO: 1763438 - RNA, 19 nt, Homo sapiens
  misc_RNA (1)...(19): siRNA sense strand
gcugcaagcucgccacaac

SEQ ID NO: 1763439 - RNA, 19 nt, Homo sapiens
  misc_RNA (1)...(19): siRNA sense strand
agacuacgguggacaaacu

SEQ ID NO: 1763440 - RNA, 19 nt, Homo sapiens
  misc_RNA (1)...(19): siRNA sense strand
gacaaacugaucaagaaga

SEQ ID NO: 1763441 - RNA, 19 nt, Homo sapiens
  misc_RNA (1)...(19): siRNA sense strand
aaacugaucaagaagacaa

SEQ ID NO: 1763442 - RNA, 19 nt, Homo sapiens
  misc_RNA (1)...(19): siRNA sense strand
gaagucaucauugaagagu

SEQ ID NO: 1763443 - RNA, 19 nt, Homo sapiens
  misc_RNA (1)...(19): siRNA sense strand
ggacaaacugaucaagaag

SEQ ID NO: 1763444 - RNA, 19 nt, Homo sapiens
  misc_RNA (1)...(19): siRNA sense strand
gagaugggaaagccaguau

SEQ ID NO: 1763445 - RNA, 19 nt, Homo sapiens
  misc_RNA (1)...(19): siRNA sense strand
cagcaacgccgucaauguc

SEQ ID NO: 1763446 - RNA, 19 nt, Homo sapiens
  misc_RNA (1)...(19): siRNA sense strand
ggauagcagagaugggaaa

SEQ ID NO: 1763447 - RNA, 19 nt, Homo sapiens
  misc_RNA (1)...(19): siRNA sense strand
cauacucuuugccacacua

SEQ ID NO: 1763448 - RNA, 19 nt, Homo sapiens
  misc_RNA (1)...(19): siRNA sense strand
cuagaggccuauugcuaca

SEQ ID NO: 1763449 - RNA, 19 nt, Homo sapiens
  misc_RNA (1)...(19): siRNA sense strand
gcuccucuacauacucuuu

SEQ ID NO: 1763450 - RNA, 19 nt, Homo sapiens
  misc_RNA (1)...(19): siRNA sense strand
cacuagaggccuauugcua

SEQ ID NO: 1763451 - RNA, 19 nt, Homo sapiens
  misc_RNA (1)...(19): siRNA sense strand
cacuucggcugcaccauug

SEQ ID NO: 1763452 - RNA, 19 nt, Homo sapiens
  misc_RNA (1)...(19): siRNA sense strand
gggcagcaacgccgucaau

SEQ ID NO: 1763453 - RNA, 19 nt, Homo sapiens
  misc_RNA (1)...(19): siRNA sense strand
gccuguggcuccucuacau

SEQ ID NO: 1763454 - RNA, 19 nt, Homo sapiens
  misc_RNA (1)...(19): siRNA sense strand
guggacaaacugaucaaga

SEQ ID NO: 1763455 - RNA, 19 nt, Homo sapiens
  misc_RNA (1)...(19): siRNA sense strand
caagaggauagcagagaug

SEQ ID NO: 1763456 - RNA, 19 nt, Homo sapiens
  misc_RNA (1)...(19): siRNA sense strand
aggcugcccuccugcuuug

SEQ ID NO: 1763457 - RNA, 19 nt, Homo sapiens
  misc_RNA (1)...(19): siRNA sense strand
acaaacugaucaagaagac

SEQ ID NO: 1763458 - RNA, 19 nt, Homo sapiens
  misc_RNA (1)...(19): siRNA sense strand
gccaagaggauagcagaga

SEQ ID NO: 1763459 - RNA, 19 nt, Homo sapiens
  misc_RNA (1)...(19): siRNA sense strand
gaagaagaggaggccaaga

SEQ ID NO: 1763460 - RNA, 19 nt, Homo sapiens
  misc_RNA (1)...(19): siRNA sense strand
cugcugcccuccaggaugu

SEQ ID NO: 1763461 - RNA, 19 nt, Homo sapiens
  misc_RNA (1)...(19): siRNA sense strand
uugaagaguccuaugaguu

SEQ ID NO: 1763462 - RNA, 19 nt, Homo sapiens
  misc_RNA (1)...(19): siRNA sense strand
agucacagcuguuguuuuc

SEQ ID NO: 1763463 - RNA, 19 nt, Homo sapiens
  misc_RNA (1)...(19): siRNA sense strand
gaggaggccaagaggauag

SEQ ID NO: 1763464 - RNA, 19 nt, Homo sapiens
  misc_RNA (1)...(19): siRNA sense strand
ucaagacuacgguggacaa

SEQ ID NO: 1763465 - RNA, 19 nt, Homo sapiens
  misc_RNA (1)...(19): siRNA sense strand
ccacacuagaggccuauug

SEQ ID NO: 1763466 - RNA, 19 nt, Homo sapiens
  misc_RNA (1)...(19): siRNA sense strand
gcaagcucgccacaacaug

SEQ ID NO: 1763467 - RNA, 19 nt, Homo sapiens
  misc_RNA (1)...(19): siRNA sense strand
caccaucuuugcauuuguc

SEQ ID NO: 1763468 - RNA, 19 nt, Homo sapiens
  misc_RNA (1)...(19): siRNA sense strand
cuagaagucaucauugaag

SEQ ID NO: 1763469 - RNA, 19 nt, Homo sapiens
  misc_RNA (1)...(19): siRNA sense strand
caugcucaccgccaucauu

SEQ ID NO: 1763470 - RNA, 19 nt, Homo sapiens
  misc_RNA (1)...(19): siRNA sense strand
gcacuuccugacugucuuc

SEQ ID NO: 1763471 - RNA, 19 nt, Homo sapiens
  misc_RNA (1)...(19): siRNA sense strand
caacgccgucaaugucuuc

SEQ ID NO: 1763472 - RNA, 19 nt, Homo sapiens
  misc_RNA (1)...(19): siRNA sense strand
ccuccaggauguauaugca

SEQ ID NO: 1763473 - RNA, 19 nt, Homo sapiens
  misc_RNA (1)...(19): siRNA sense strand
ucuggaaggugcuguuugc

SEQ ID NO: 1763474 - RNA, 19 nt, Homo sapiens
  misc_RNA (1)...(19): siRNA sense strand
uccuaugaguucaagacua

SEQ ID NO: 1763475 - RNA, 19 nt, Homo sapiens
  misc_RNA (1)...(19): siRNA sense strand
agaggaggccaagaggaua

SEQ ID NO: 1763476 - RNA, 19 nt, Homo sapiens
  misc_RNA (1)...(19): siRNA sense strand
ucaccaucuuugcauuugu

SEQ ID NO: 1763477 - RNA, 19 nt, Homo sapiens
  misc_RNA (1)...(19): siRNA sense strand
aagaggaggccaagaggau

SEQ ID NO: 1763478 - RNA, 19 nt, Homo sapiens
  misc_RNA (1)...(19): siRNA sense strand
caaacuagaagucaucauu

SEQ ID NO: 1763479 - RNA, 19 nt, Homo sapiens
  misc_RNA (1)...(19): siRNA sense strand
acaggaagcugacuaugga

SEQ ID NO: 1763480 - RNA, 19 nt, Homo sapiens
  misc_RNA (1)...(19): siRNA sense strand
gaagcugacuauggaagaa

SEQ ID NO: 1763481 - RNA, 19 nt, Homo sapiens
  misc_RNA (1)...(19): siRNA sense strand
ucucaaagauucagucaca

SEQ ID NO: 1763482 - RNA, 19 nt, Homo sapiens
  misc_RNA (1)...(19): siRNA sense strand
uggacaaacugaucaagaa

SEQ ID NO: 1763483 - RNA, 19 nt, Homo sapiens
  misc_RNA (1)...(19): siRNA sense strand
gcacuucggcugcaccauu

SEQ ID NO: 1763484 - RNA, 19 nt, Homo sapiens
  misc_RNA (1)...(19): siRNA sense strand
agacaaaccuggccuuggu

SEQ ID NO: 1763485 - RNA, 19 nt, Homo sapiens
  misc_RNA (1)...(19): siRNA sense strand
ccauuggucucaaagauuc

SEQ ID NO: 1763486 - RNA, 19 nt, Homo sapiens
  misc_RNA (1)...(19): siRNA sense strand
gcaucagcgugcucuugua

SEQ ID NO: 1763487 - RNA, 19 nt, Homo sapiens
  misc_RNA (1)...(19): siRNA sense strand
gaugggaaagccaguauug

SEQ ID NO: 1763488 - RNA, 19 nt, Homo sapiens
  misc_RNA (1)...(19): siRNA sense strand
gggaugaggaugaggauga

SEQ ID NO: 1763489 - RNA, 19 nt, Homo sapiens
  misc_RNA (1)...(19): siRNA sense strand
gaagaguccuaugaguuca

SEQ ID NO: 1763490 - RNA, 19 nt, Homo sapiens
  misc_RNA (1)...(19): siRNA sense strand
ggaugaggaugaggaugaa

SEQ ID NO: 1763491 - RNA, 19 nt, Homo sapiens
  misc_RNA (1)...(19): siRNA sense strand
ccaagaggauagcagagau

SEQ ID NO: 1763492 - RNA, 19 nt, Homo sapiens
  misc_RNA (1)...(19): siRNA sense strand
uagaagucaucauugaaga

SEQ ID NO: 1763493 - RNA, 19 nt, Homo sapiens
  misc_RNA (1)...(19): siRNA sense strand
ugaagaguccuaugaguuc

SEQ ID NO: 1763494 - RNA, 19 nt, Homo sapiens
  misc_RNA (1)...(19): siRNA sense strand
gcaacgccgucaaugucuu

SEQ ID NO: 1763495 - RNA, 19 nt, Homo sapiens
  misc_RNA (1)...(19): siRNA sense strand
ggagggaccaguucaugga

SEQ ID NO: 1763496 - RNA, 19 nt, Homo sapiens
  misc_RNA (1)...(19): siRNA sense strand
ccuaugaguucaagacuac

SEQ ID NO: 1763497 - RNA, 19 nt, Homo sapiens
  misc_RNA (1)...(19): siRNA sense strand
gcagcaacgccgucaaugu

SEQ ID NO: 1763498 - RNA, 19 nt, Homo sapiens
  misc_RNA (1)...(19): siRNA sense strand
aaacuagaagucaucauug

SEQ ID NO: 1763499 - RNA, 19 nt, Homo sapiens
  misc_RNA (1)...(19): siRNA sense strand
ggaagcugacuauggaaga

SEQ ID NO: 1763500 - RNA, 19 nt, Homo sapiens
  misc_RNA (1)...(19): siRNA sense strand
aacuagaagucaucauuga

SEQ ID NO: 1763501 - RNA, 19 nt, Homo sapiens
  misc_RNA (1)...(19): siRNA sense strand
gcugcaagcucgccacaac

SEQ ID NO: 1763502 - RNA, 19 nt, Homo sapiens
  misc_RNA (1)...(19): siRNA sense strand
agacuacgguggacaaacu

SEQ ID NO: 1763503 - RNA, 19 nt, Homo sapiens
  misc_RNA (1)...(19): siRNA sense strand
gacaaacugaucaagaaga

SEQ ID NO: 1763504 - RNA, 19 nt, Homo sapiens
  misc_RNA (1)...(19): siRNA sense strand
aaacugaucaagaagacaa

SEQ ID NO: 1763505 - RNA, 19 nt, Homo sapiens
  misc_RNA (1)...(19): siRNA sense strand
gaagucaucauugaagagu

SEQ ID NO: 1763506 - RNA, 19 nt, Homo sapiens
  misc_RNA (1)...(19): siRNA sense strand
gacaggaagcugacuaugg

SEQ ID NO: 1763507 - RNA, 19 nt, Homo sapiens
  misc_RNA (1)...(19): siRNA sense strand
ggacaaacugaucaagaag

SEQ ID NO: 1763508 - RNA, 19 nt, Homo sapiens
  misc_RNA (1)...(19): siRNA sense strand
gagaugggaaagccaguau

SEQ ID NO: 1763509 - RNA, 19 nt, Homo sapiens
  misc_RNA (1)...(19): siRNA sense strand
cagcaacgccgucaauguc

SEQ ID NO: 1763510 - RNA, 19 nt, Homo sapiens
  misc_RNA (1)...(19): siRNA sense strand
ggauagcagagaugggaaa

SEQ ID NO: 1763511 - RNA, 19 nt, Homo sapiens
  misc_RNA (1)...(19): siRNA sense strand
cauacucuuugccacacua

SEQ ID NO: 1763512 - RNA, 19 nt, Homo sapiens
  misc_RNA (1)...(19): siRNA sense strand
cuagaggccuauugcuaca

SEQ ID NO: 1763513 - RNA, 19 nt, Homo sapiens
  misc_RNA (1)...(19): siRNA sense strand
gcuccucuacauacucuuu

SEQ ID NO: 1763514 - RNA, 19 nt, Homo sapiens
  misc_RNA (1)...(19): siRNA sense strand
cacuagaggccuauugcua

SEQ ID NO: 1763515 - RNA, 19 nt, Homo sapiens
  misc_RNA (1)...(19): siRNA sense strand
cacuucggcugcaccauug

SEQ ID NO: 1763516 - RNA, 19 nt, Homo sapiens
  misc_RNA (1)...(19): siRNA sense strand
gggcagcaacgccgucaau

SEQ ID NO: 1763517 - RNA, 19 nt, Homo sapiens
  misc_RNA (1)...(19): siRNA sense strand
gccuguggcuccucuacau

SEQ ID NO: 1763518 - RNA, 19 nt, Homo sapiens
  misc_RNA (1)...(19): siRNA sense strand
caagaggauagcagagaug

SEQ ID NO: 1763519 - RNA, 19 nt, Homo sapiens
  misc_RNA (1)...(19): siRNA sense strand
aggcugcccuccugcuuug

SEQ ID NO: 1763520 - RNA, 19 nt, Homo sapiens
  misc_RNA (1)...(19): siRNA sense strand
acaaacugaucaagaagac

SEQ ID NO: 1763521 - RNA, 19 nt, Homo sapiens
  misc_RNA (1)...(19): siRNA sense strand
guggacaaacugaucaaga

SEQ ID NO: 1763522 - RNA, 19 nt, Homo sapiens
  misc_RNA (1)...(19): siRNA sense strand
gccaagaggauagcagaga

SEQ ID NO: 1763523 - RNA, 19 nt, Homo sapiens
  misc_RNA (1)...(19): siRNA sense strand
cugcugcccuccaggaugu

SEQ ID NO: 1763524 - RNA, 19 nt, Homo sapiens
  misc_RNA (1)...(19): siRNA sense strand
gaagaagaggaggccaaga

SEQ ID NO: 1763525 - RNA, 19 nt, Homo sapiens
  misc_RNA (1)...(19): siRNA sense strand
uugaagaguccuaugaguu

SEQ ID NO: 1763526 - RNA, 19 nt, Homo sapiens
  misc_RNA (1)...(19): siRNA sense strand
gaggaggccaagaggauag

SEQ ID NO: 1763527 - RNA, 19 nt, Homo sapiens
  misc_RNA (1)...(19): siRNA sense strand
agucacagcuguuguuuuc

SEQ ID NO: 1763528 - RNA, 19 nt, Homo sapiens
  misc_RNA (1)...(19): siRNA sense strand
cuagaagucaucauugaag

SEQ ID NO: 1763529 - RNA, 19 nt, Homo sapiens
  misc_RNA (1)...(19): siRNA sense strand
ccacacuagaggccuauug

SEQ ID NO: 1763530 - RNA, 19 nt, Homo sapiens
  misc_RNA (1)...(19): siRNA sense strand
gcaagcucgccacaacaug

SEQ ID NO: 1763531 - RNA, 19 nt, Homo sapiens
  misc_RNA (1)...(19): siRNA sense strand
caccaucuuugcauuuguc

SEQ ID NO: 1763532 - RNA, 19 nt, Homo sapiens
  misc_RNA (1)...(19): siRNA sense strand
ucaagacuacgguggacaa

SEQ ID NO: 1763533 - RNA, 19 nt, Homo sapiens
  misc_RNA (1)...(19): siRNA sense strand
caugcucaccgccaucauu

SEQ ID NO: 1763534 - RNA, 19 nt, Homo sapiens
  misc_RNA (1)...(19): siRNA sense strand
gcacuuccugacugucuuc

SEQ ID NO: 1763535 - RNA, 19 nt, Homo sapiens
  misc_RNA (1)...(19): siRNA sense strand
caacgccgucaaugucuuc

SEQ ID NO: 1763536 - RNA, 19 nt, Homo sapiens
  misc_RNA (1)...(19): siRNA sense strand
ccuccaggauguauaugca

SEQ ID NO: 1763537 - RNA, 19 nt, Homo sapiens
  misc_RNA (1)...(19): siRNA sense strand
ucuggaaggugcuguuugc

SEQ ID NO: 1763538 - RNA, 19 nt, Homo sapiens
  misc_RNA (1)...(19): siRNA sense strand
uccuaugaguucaagacua

SEQ ID NO: 1763539 - RNA, 19 nt, Homo sapiens
  misc_RNA (1)...(19): siRNA sense strand
cagacaggaagcugacuau

SEQ ID NO: 1763540 - RNA, 19 nt, Homo sapiens
  misc_RNA (1)...(19): siRNA sense strand
ucaccaucuuugcauuugu

SEQ ID NO: 1763541 - RNA, 19 nt, Homo sapiens
  misc_RNA (1)...(19): siRNA sense strand
agaggaggccaagaggaua

SEQ ID NO: 1763542 - RNA, 19 nt, Homo sapiens
  misc_RNA (1)...(19): siRNA sense strand
aagaggaggccaagaggau

SEQ ID NO: 1763543 - RNA, 19 nt, Homo sapiens
  misc_RNA (1)...(19): siRNA sense strand
caaacuagaagucaucauu

SEQ ID NO: 1763544 - RNA, 19 nt, Homo sapiens
  misc_RNA (1)...(19): siRNA sense strand
acaggaagcugacuaugga

SEQ ID NO: 1763545 - RNA, 19 nt, Homo sapiens
  misc_RNA (1)...(19): siRNA sense strand
gaagcugacuauggaagaa

SEQ ID NO: 1763546 - RNA, 19 nt, Homo sapiens
  misc_RNA (1)...(19): siRNA sense strand
ucucaaagauucagucaca

SEQ ID NO: 1763547 - RNA, 19 nt, Homo sapiens
  misc_RNA (1)...(19): siRNA sense strand
uggacaaacugaucaagaa

SEQ ID NO: 1763548 - RNA, 19 nt, Homo sapiens
  misc_RNA (1)...(19): siRNA sense strand
gcacuucggcugcaccauu

SEQ ID NO: 1763549 - RNA, 19 nt, Homo sapiens
  misc_RNA (1)...(19): siRNA sense strand
agacaaaccuggccuuggu

SEQ ID NO: 1763550 - RNA, 19 nt, Homo sapiens
  misc_RNA (1)...(19): siRNA sense strand
ccauuggucucaaagauuc

SEQ ID NO: 1763551 - RNA, 19 nt, Homo sapiens
  misc_RNA (1)...(19): siRNA sense strand
gcaucagcgugcucuugua

SEQ ID NO: 1763552 - RNA, 19 nt, Homo sapiens
  misc_RNA (1)...(19): siRNA sense strand
gaugggaaagccaguauug

SEQ ID NO: 1763553 - RNA, 19 nt, Homo sapiens
  misc_RNA (1)...(19): siRNA sense strand
gggaugaggaugaggauga

SEQ ID NO: 1763554 - RNA, 19 nt, Homo sapiens
  misc_RNA (1)...(19): siRNA sense strand
gaagaguccuaugaguuca

SEQ ID NO: 1763555 - RNA, 19 nt, Homo sapiens
  misc_RNA (1)...(19): siRNA sense strand
ggaugaggaugaggaugaa

SEQ ID NO: 1763556 - RNA, 19 nt, Homo sapiens
  misc_RNA (1)...(19): siRNA sense strand
ccaagaggauagcagagau

SEQ ID NO: 1763557 - RNA, 19 nt, Homo sapiens
  misc_RNA (1)...(19): siRNA sense strand
uagaagucaucauugaaga

SEQ ID NO: 1763558 - RNA, 19 nt, Homo sapiens
  misc_RNA (1)...(19): siRNA sense strand
ugaagaguccuaugaguuc

SEQ ID NO: 1763559 - RNA, 19 nt, Homo sapiens
  misc_RNA (1)...(19): siRNA sense strand
gcaacgccgucaaugucuu

SEQ ID NO: 1763560 - RNA, 19 nt, Homo sapiens
  misc_RNA (1)...(19): siRNA sense strand
ggagggaccaguucaugga

SEQ ID NO: 1763561 - RNA, 19 nt, Homo sapiens
  misc_RNA (1)...(19): siRNA sense strand
ccuaugaguucaagacuac

SEQ ID NO: 1763562 - RNA, 19 nt, Homo sapiens
  misc_RNA (1)...(19): siRNA sense strand
gcagcaacgccgucaaugu

SEQ ID NO: 1763563 - RNA, 19 nt, Homo sapiens
  misc_RNA (1)...(19): siRNA sense strand
aaacuagaagucaucauug

SEQ ID NO: 1763564 - RNA, 19 nt, Homo sapiens
  misc_RNA (1)...(19): siRNA sense strand
ggaagcugacuauggaaga

SEQ ID NO: 1763565 - RNA, 19 nt, Homo sapiens
  misc_RNA (1)...(19): siRNA sense strand
aacuagaagucaucauuga

SEQ ID NO: 1763566 - RNA, 19 nt, Homo sapiens
  misc_RNA (1)...(19): siRNA sense strand
gcugcaagcucgccacaac

SEQ ID NO: 1763567 - RNA, 19 nt, Homo sapiens
  misc_RNA (1)...(19): siRNA sense strand
agacuacgguggacaaacu

SEQ ID NO: 1763568 - RNA, 19 nt, Homo sapiens
  misc_RNA (1)...(19): siRNA sense strand
gacaaacugaucaagaaga

SEQ ID NO: 1763569 - RNA, 19 nt, Homo sapiens
  misc_RNA (1)...(19): siRNA sense strand
aaacugaucaagaagacaa

SEQ ID NO: 1763570 - RNA, 19 nt, Homo sapiens
  misc_RNA (1)...(19): siRNA sense strand
gaagucaucauugaagagu

SEQ ID NO: 1763571 - RNA, 19 nt, Homo sapiens
  misc_RNA (1)...(19): siRNA sense strand
gacaggaagcugacuaugg

SEQ ID NO: 1763572 - RNA, 19 nt, Homo sapiens
  misc_RNA (1)...(19): siRNA sense strand
ggacaaacugaucaagaag

SEQ ID NO: 1763573 - RNA, 19 nt, Homo sapiens
  misc_RNA (1)...(19): siRNA sense strand
gagaugggaaagccaguau

SEQ ID NO: 1763574 - RNA, 19 nt, Homo sapiens
  misc_RNA (1)...(19): siRNA sense strand
cagcaacgccgucaauguc

SEQ ID NO: 1763575 - RNA, 19 nt, Homo sapiens
  misc_RNA (1)...(19): siRNA sense strand
ggauagcagagaugggaaa

SEQ ID NO: 1763576 - RNA, 19 nt, Homo sapiens
  misc_RNA (1)...(19): siRNA sense strand
cauacucuuugccacacua

SEQ ID NO: 1763577 - RNA, 19 nt, Homo sapiens
  misc_RNA (1)...(19): siRNA sense strand
cuagaggccuauugcuaca

SEQ ID NO: 1763578 - RNA, 19 nt, Homo sapiens
  misc_RNA (1)...(19): siRNA sense strand
gcuccucuacauacucuuu

SEQ ID NO: 1763579 - RNA, 19 nt, Homo sapiens
  misc_RNA (1)...(19): siRNA sense strand
cacuagaggccuauugcua

SEQ ID NO: 1763580 - RNA, 19 nt, Homo sapiens
  misc_RNA (1)...(19): siRNA sense strand
cacuucggcugcaccauug

SEQ ID NO: 1763581 - RNA, 19 nt, Homo sapiens
  misc_RNA (1)...(19): siRNA sense strand
gggcagcaacgccgucaau

SEQ ID NO: 1763582 - RNA, 19 nt, Homo sapiens
  misc_RNA (1)...(19): siRNA sense strand
gccuguggcuccucuacau

SEQ ID NO: 1763583 - RNA, 19 nt, Homo sapiens
  misc_RNA (1)...(19): siRNA sense strand
caagaggauagcagagaug

SEQ ID NO: 1763584 - RNA, 19 nt, Homo sapiens
  misc_RNA (1)...(19): siRNA sense strand
aggcugcccuccugcuuug

SEQ ID NO: 1763585 - RNA, 19 nt, Homo sapiens
  misc_RNA (1)...(19): siRNA sense strand
acaaacugaucaagaagac

SEQ ID NO: 1763586 - RNA, 19 nt, Homo sapiens
  misc_RNA (1)...(19): siRNA sense strand
guggacaaacugaucaaga

SEQ ID NO: 1763587 - RNA, 19 nt, Homo sapiens
  misc_RNA (1)...(19): siRNA sense strand
gccaagaggauagcagaga

SEQ ID NO: 1763588 - RNA, 19 nt, Homo sapiens
  misc_RNA (1)...(19): siRNA sense strand
cugcugcccuccaggaugu

SEQ ID NO: 1763589 - RNA, 19 nt, Homo sapiens
  misc_RNA (1)...(19): siRNA sense strand
gaagaagaggaggccaaga

SEQ ID NO: 1763590 - RNA, 19 nt, Homo sapiens
  misc_RNA (1)...(19): siRNA sense strand
uugaagaguccuaugaguu

SEQ ID NO: 1763591 - RNA, 19 nt, Homo sapiens
  misc_RNA (1)...(19): siRNA sense strand
gaggaggccaagaggauag

SEQ ID NO: 1763592 - RNA, 19 nt, Homo sapiens
  misc_RNA (1)...(19): siRNA sense strand
agucacagcuguuguuuuc

SEQ ID NO: 1763593 - RNA, 19 nt, Homo sapiens
  misc_RNA (1)...(19): siRNA sense strand
cuagaagucaucauugaag

SEQ ID NO: 1763594 - RNA, 19 nt, Homo sapiens
  misc_RNA (1)...(19): siRNA sense strand
ccacacuagaggccuauug

SEQ ID NO: 1763595 - RNA, 19 nt, Homo sapiens
  misc_RNA (1)...(19): siRNA sense strand
gcaagcucgccacaacaug

SEQ ID NO: 1763596 - RNA, 19 nt, Homo sapiens
  misc_RNA (1)...(19): siRNA sense strand
caccaucuuugcauuuguc

SEQ ID NO: 1763597 - RNA, 19 nt, Homo sapiens
  misc_RNA (1)...(19): siRNA sense strand
ucaagacuacgguggacaa

SEQ ID NO: 1763598 - RNA, 19 nt, Homo sapiens
  misc_RNA (1)...(19): siRNA sense strand
caugcucaccgccaucauu

SEQ ID NO: 1763599 - RNA, 19 nt, Homo sapiens
  misc_RNA (1)...(19): siRNA sense strand
gcacuuccugacugucuuc

SEQ ID NO: 1763600 - RNA, 19 nt, Homo sapiens
  misc_RNA (1)...(19): siRNA sense strand
caacgccgucaaugucuuc

SEQ ID NO: 1763601 - RNA, 19 nt, Homo sapiens
  misc_RNA (1)...(19): siRNA sense strand
ccuccaggauguauaugca

SEQ ID NO: 1763602 - RNA, 19 nt, Homo sapiens
  misc_RNA (1)...(19): siRNA sense strand
ucuggaaggugcuguuugc

SEQ ID NO: 1763603 - RNA, 19 nt, Homo sapiens
  misc_RNA (1)...(19): siRNA sense strand
uccuaugaguucaagacua

SEQ ID NO: 1763604 - RNA, 19 nt, Homo sapiens
  misc_RNA (1)...(19): siRNA sense strand
cagacaggaagcugacuau

SEQ ID NO: 1763605 - RNA, 19 nt, Homo sapiens
  misc_RNA (1)...(19): siRNA sense strand
ucaccaucuuugcauuugu

SEQ ID NO: 1763606 - RNA, 19 nt, Homo sapiens
  misc_RNA (1)...(19): siRNA sense strand
agaggaggccaagaggaua

SEQ ID NO: 1763607 - RNA, 19 nt, Homo sapiens
  misc_RNA (1)...(19): siRNA sense strand
aagaggaggccaagaggau

SEQ ID NO: 1763608 - RNA, 19 nt, Homo sapiens
  misc_RNA (1)...(19): siRNA sense strand
caaacuagaagucaucauu

SEQ ID NO: 1763609 - RNA, 19 nt, Homo sapiens
  misc_RNA (1)...(19): siRNA sense strand
acaggaagcugacuaugga

SEQ ID NO: 1763610 - RNA, 19 nt, Homo sapiens
  misc_RNA (1)...(19): siRNA sense strand
gaagcugacuauggaagaa

SEQ ID NO: 1763611 - RNA, 19 nt, Homo sapiens
  misc_RNA (1)...(19): siRNA sense strand
ucucaaagauucagucaca

SEQ ID NO: 1763612 - RNA, 19 nt, Homo sapiens
  misc_RNA (1)...(19): siRNA sense strand
uggacaaacugaucaagaa

SEQ ID NO: 1763613 - RNA, 19 nt, Homo sapiens
  misc_RNA (1)...(19): siRNA sense strand
gcacuucggcugcaccauu

SEQ ID NO: 1763614 - RNA, 19 nt, Homo sapiens
  misc_RNA (1)...(19): siRNA sense strand
agacaaaccuggccuuggu

SEQ ID NO: 1763615 - RNA, 19 nt, Homo sapiens
  misc_RNA (1)...(19): siRNA sense strand
ccauuggucucaaagauuc

SEQ ID NO: 1763616 - RNA, 19 nt, Homo sapiens
  misc_RNA (1)...(19): siRNA sense strand
gcaucagcgugcucuugua

SEQ ID NO: 1763617 - RNA, 19 nt, Homo sapiens
  misc_RNA (1)...(19): siRNA sense strand
gaugggaaagccaguauug

SEQ ID NO: 1763618 - RNA, 19 nt, Homo sapiens
  misc_RNA (1)...(19): siRNA sense strand
gggaugaggaugaggauga

SEQ ID NO: 1763619 - RNA, 19 nt, Homo sapiens
  misc_RNA (1)...(19): siRNA sense strand
gaagaguccuaugaguuca

SEQ ID NO: 1763620 - RNA, 19 nt, Homo sapiens
  misc_RNA (1)...(19): siRNA sense strand
ggaugaggaugaggaugaa

SEQ ID NO: 1763621 - RNA, 19 nt, Homo sapiens
  misc_RNA (1)...(19): siRNA sense strand
ccaagaggauagcagagau

SEQ ID NO: 1763622 - RNA, 19 nt, Homo sapiens
  misc_RNA (1)...(19): siRNA sense strand
uagaagucaucauugaaga

SEQ ID NO: 1763623 - RNA, 19 nt, Homo sapiens
  misc_RNA (1)...(19): siRNA sense strand
ugaagaguccuaugaguuc

SEQ ID NO: 1763624 - RNA, 19 nt, Homo sapiens
  misc_RNA (1)...(19): siRNA sense strand
gcaacgccgucaaugucuu

SEQ ID NO: 1763625 - RNA, 19 nt, Homo sapiens
  misc_RNA (1)...(19): siRNA sense strand
ggagggaccaguucaugga

SEQ ID NO: 1763626 - RNA, 19 nt, Homo sapiens
  misc_RNA (1)...(19): siRNA sense strand
ccuaugaguucaagacuac

SEQ ID NO: 1763627 - RNA, 19 nt, Homo sapiens
  misc_RNA (1)...(19): siRNA sense strand
gcagcaacgccgucaaugu

SEQ ID NO: 1763628 - RNA, 19 nt, Homo sapiens
  misc_RNA (1)...(19): siRNA sense strand
aaacuagaagucaucauug

SEQ ID NO: 1763629 - RNA, 19 nt, Homo sapiens
  misc_RNA (1)...(19): siRNA sense strand
ggaagcugacuauggaaga

SEQ ID NO: 1763630 - RNA, 19 nt, Homo sapiens
  misc_RNA (1)...(19): siRNA sense strand
aacuagaagucaucauuga

SEQ ID NO: 1763631 - RNA, 19 nt, Homo sapiens
  misc_RNA (1)...(19): siRNA sense strand
gcugcaagcucgccacaac

SEQ ID NO: 1763632 - RNA, 19 nt, Homo sapiens
  misc_RNA (1)...(19): siRNA sense strand
agacuacgguggacaaacu

SEQ ID NO: 1763633 - RNA, 19 nt, Homo sapiens
  misc_RNA (1)...(19): siRNA sense strand
gacaaacugaucaagaaga

SEQ ID NO: 1763634 - RNA, 19 nt, Homo sapiens
  misc_RNA (1)...(19): siRNA sense strand
aaacugaucaagaagacaa

SEQ ID NO: 1763635 - RNA, 19 nt, Homo sapiens
  misc_RNA (1)...(19): siRNA sense strand
gaagucaucauugaagagu

SEQ ID NO: 1763636 - RNA, 19 nt, Homo sapiens
  misc_RNA (1)...(19): siRNA sense strand
gacaggaagcugacuaugg

SEQ ID NO: 1763637 - RNA, 19 nt, Homo sapiens
  misc_RNA (1)...(19): siRNA sense strand
ggacaaacugaucaagaag

SEQ ID NO: 1763638 - RNA, 19 nt, Homo sapiens
  misc_RNA (1)...(19): siRNA sense strand
gagaugggaaagccaguau

SEQ ID NO: 1763639 - RNA, 19 nt, Homo sapiens
  misc_RNA (1)...(19): siRNA sense strand
cagcaacgccgucaauguc

SEQ ID NO: 1763640 - RNA, 19 nt, Homo sapiens
  misc_RNA (1)...(19): siRNA sense strand
ggauagcagagaugggaaa

SEQ ID NO: 1763641 - RNA, 19 nt, Homo sapiens
  misc_RNA (1)...(19): siRNA sense strand
cauacucuuugccacacua

SEQ ID NO: 1763642 - RNA, 19 nt, Homo sapiens
  misc_RNA (1)...(19): siRNA sense strand
cuagaggccuauugcuaca

SEQ ID NO: 1763643 - RNA, 19 nt, Homo sapiens
  misc_RNA (1)...(19): siRNA sense strand
gcuccucuacauacucuuu

SEQ ID NO: 1763644 - RNA, 19 nt, Homo sapiens
  misc_RNA (1)...(19): siRNA sense strand
cacuagaggccuauugcua

SEQ ID NO: 1763645 - RNA, 19 nt, Homo sapiens
  misc_RNA (1)...(19): siRNA sense strand
cacuucggcugcaccauug

SEQ ID NO: 1763646 - RNA, 19 nt, Homo sapiens
  misc_RNA (1)...(19): siRNA sense strand
gggcagcaacgccgucaau

SEQ ID NO: 1763647 - RNA, 19 nt, Homo sapiens
  misc_RNA (1)...(19): siRNA sense strand
gccuguggcuccucuacau

SEQ ID NO: 1763648 - RNA, 19 nt, Homo sapiens
  misc_RNA (1)...(19): siRNA sense strand
caagaggauagcagagaug

SEQ ID NO: 1763649 - RNA, 19 nt, Homo sapiens
  misc_RNA (1)...(19): siRNA sense strand
aggcugcccuccugcuuug

SEQ ID NO: 1763650 - RNA, 19 nt, Homo sapiens
  misc_RNA (1)...(19): siRNA sense strand
acaaacugaucaagaagac

SEQ ID NO: 1763651 - RNA, 19 nt, Homo sapiens
  misc_RNA (1)...(19): siRNA sense strand
guggacaaacugaucaaga

SEQ ID NO: 1763652 - RNA, 19 nt, Homo sapiens
  misc_RNA (1)...(19): siRNA sense strand
gccaagaggauagcagaga

SEQ ID NO: 1763653 - RNA, 19 nt, Homo sapiens
  misc_RNA (1)...(19): siRNA sense strand
cugcugcccuccaggaugu

SEQ ID NO: 1763654 - RNA, 19 nt, Homo sapiens
  misc_RNA (1)...(19): siRNA sense strand
gaagaagaggaggccaaga

SEQ ID NO: 1763655 - RNA, 19 nt, Homo sapiens
  misc_RNA (1)...(19): siRNA sense strand
uugaagaguccuaugaguu

SEQ ID NO: 1763656 - RNA, 19 nt, Homo sapiens
  misc_RNA (1)...(19): siRNA sense strand
gaggaggccaagaggauag

SEQ ID NO: 1763657 - RNA, 19 nt, Homo sapiens
  misc_RNA (1)...(19): siRNA sense strand
agucacagcuguuguuuuc

SEQ ID NO: 1763658 - RNA, 19 nt, Homo sapiens
  misc_RNA (1)...(19): siRNA sense strand
cuagaagucaucauugaag

SEQ ID NO: 1763659 - RNA, 19 nt, Homo sapiens
  misc_RNA (1)...(19): siRNA sense strand
ccacacuagaggccuauug

SEQ ID NO: 1763660 - RNA, 19 nt, Homo sapiens
  misc_RNA (1)...(19): siRNA sense strand
gcaagcucgccacaacaug

SEQ ID NO: 1763661 - RNA, 19 nt, Homo sapiens
  misc_RNA (1)...(19): siRNA sense strand
caccaucuuugcauuuguc

SEQ ID NO: 1763662 - RNA, 19 nt, Homo sapiens
  misc_RNA (1)...(19): siRNA sense strand
ucaagacuacgguggacaa

SEQ ID NO: 1763663 - RNA, 19 nt, Homo sapiens
  misc_RNA (1)...(19): siRNA sense strand
caugcucaccgccaucauu

SEQ ID NO: 1763664 - RNA, 19 nt, Homo sapiens
  misc_RNA (1)...(19): siRNA sense strand
gcacuuccugacugucuuc

SEQ ID NO: 1763665 - RNA, 19 nt, Homo sapiens
  misc_RNA (1)...(19): siRNA sense strand
caacgccgucaaugucuuc

SEQ ID NO: 1763666 - RNA, 19 nt, Homo sapiens
  misc_RNA (1)...(19): siRNA sense strand
ccuccaggauguauaugca

SEQ ID NO: 1763667 - RNA, 19 nt, Homo sapiens
  misc_RNA (1)...(19): siRNA sense strand
ucuggaaggugcuguuugc

SEQ ID NO: 1763668 - RNA, 19 nt, Homo sapiens
  misc_RNA (1)...(19): siRNA sense strand
uccuaugaguucaagacua

SEQ ID NO: 1763669 - RNA, 19 nt, Homo sapiens
  misc_RNA (1)...(19): siRNA sense strand
cagacaggaagcugacuau

SEQ ID NO: 1763670 - RNA, 19 nt, Homo sapiens
  misc_RNA (1)...(19): siRNA sense strand
ucaccaucuuugcauuugu

SEQ ID NO: 1763671 - RNA, 19 nt, Homo sapiens
  misc_RNA (1)...(19): siRNA sense strand
agaggaggccaagaggaua

SEQ ID NO: 1763672 - RNA, 19 nt, Homo sapiens
  misc_RNA (1)...(19): siRNA sense strand
aagaggaggccaagaggau

SEQ ID NO: 1763673 - RNA, 19 nt, Homo sapiens
  misc_RNA (1)...(19): siRNA sense strand
caaacuagaagucaucauu

SEQ ID NO: 1763674 - RNA, 19 nt, Homo sapiens
  misc_RNA (1)...(19): siRNA sense strand
acaggaagcugacuaugga

SEQ ID NO: 1763675 - RNA, 19 nt, Homo sapiens
  misc_RNA (1)...(19): siRNA sense strand
gaagcugacuauggaagaa

SEQ ID NO: 1763676 - RNA, 19 nt, Homo sapiens
  misc_RNA (1)...(19): siRNA sense strand
ucucaaagauucagucaca

SEQ ID NO: 1763677 - RNA, 19 nt, Homo sapiens
  misc_RNA (1)...(19): siRNA sense strand
uggacaaacugaucaagaa

SEQ ID NO: 1763678 - RNA, 19 nt, Homo sapiens
  misc_RNA (1)...(19): siRNA sense strand
gcacuucggcugcaccauu

SEQ ID NO: 1763679 - RNA, 19 nt, Homo sapiens
  misc_RNA (1)...(19): siRNA sense strand
agacaaaccuggccuuggu

SEQ ID NO: 1763680 - RNA, 19 nt, Homo sapiens
  misc_RNA (1)...(19): siRNA sense strand
ccauuggucucaaagauuc

SEQ ID NO: 1763681 - RNA, 19 nt, Homo sapiens
  misc_RNA (1)...(19): siRNA sense strand
gcaucagcgugcucuugua

SEQ ID NO: 1763682 - RNA, 19 nt, Homo sapiens
  misc_RNA (1)...(19): siRNA sense strand
gaugggaaagccaguauug

SEQ ID NO: 1763683 - RNA, 19 nt, Homo sapiens
  misc_RNA (1)...(19): siRNA sense strand
gggaugaggaugaggauga

SEQ ID NO: 1763684 - RNA, 19 nt, Homo sapiens
  misc_RNA (1)...(19): siRNA sense strand
gaagaguccuaugaguuca

SEQ ID NO: 1763685 - RNA, 19 nt, Homo sapiens
  misc_RNA (1)...(19): siRNA sense strand
ggaugaggaugaggaugaa

SEQ ID NO: 1763686 - RNA, 19 nt, Homo sapiens
  misc_RNA (1)...(19): siRNA sense strand
ccaagaggauagcagagau

SEQ ID NO: 1763687 - RNA, 19 nt, Homo sapiens
  misc_RNA (1)...(19): siRNA sense strand
uagaagucaucauugaaga

SEQ ID NO: 1763688 - RNA, 19 nt, Homo sapiens
  misc_RNA (1)...(19): siRNA sense strand
ugaagaguccuaugaguuc

SEQ ID NO: 1763689 - RNA, 19 nt, Homo sapiens
  misc_RNA (1)...(19): siRNA sense strand
gcaacgccgucaaugucuu

SEQ ID NO: 1763690 - RNA, 19 nt, Homo sapiens
  misc_RNA (1)...(19): siRNA sense strand
ggagggaccaguucaugga

SEQ ID NO: 1763691 - RNA, 19 nt, Homo sapiens
  misc_RNA (1)...(19): siRNA sense strand
ccuaugaguucaagacuac

SEQ ID NO: 1763692 - RNA, 19 nt, Homo sapiens
  misc_RNA (1)...(19): siRNA sense strand
gcagcaacgccgucaaugu

SEQ ID NO: 1763693 - RNA, 19 nt, Homo sapiens
  misc_RNA (1)...(19): siRNA sense strand
aaacuagaagucaucauug

SEQ ID NO: 1763694 - RNA, 19 nt, Homo sapiens
  misc_RNA (1)...(19): siRNA sense strand
ggaagcugacuauggaaga

SEQ ID NO: 1763695 - RNA, 19 nt, Homo sapiens
  misc_RNA (1)...(19): siRNA sense strand
aacuagaagucaucauuga

SEQ ID NO: 1763696 - RNA, 19 nt, Homo sapiens
  misc_RNA (1)...(19): siRNA sense strand
gcugcaagcucgccacaac

SEQ ID NO: 1763697 - RNA, 19 nt, Homo sapiens
  misc_RNA (1)...(19): siRNA sense strand
agacuacgguggacaaacu

SEQ ID NO: 1763698 - RNA, 19 nt, Homo sapiens
  misc_RNA (1)...(19): siRNA sense strand
gacaaacugaucaagaaga

SEQ ID NO: 1763699 - RNA, 19 nt, Homo sapiens
  misc_RNA (1)...(19): siRNA sense strand
aaacugaucaagaagacaa

SEQ ID NO: 1763700 - RNA, 19 nt, Homo sapiens
  misc_RNA (1)...(19): siRNA sense strand
gaagucaucauugaagagu

SEQ ID NO: 1763701 - RNA, 19 nt, Homo sapiens
  misc_RNA (1)...(19): siRNA sense strand
gacaggaagcugacuaugg

SEQ ID NO: 1763702 - RNA, 19 nt, Homo sapiens
  misc_RNA (1)...(19): siRNA sense strand
ggacaaacugaucaagaag

SEQ ID NO: 1763703 - RNA, 19 nt, Homo sapiens
  misc_RNA (1)...(19): siRNA sense strand
gagaugggaaagccaguau

SEQ ID NO: 1763704 - RNA, 19 nt, Homo sapiens
  misc_RNA (1)...(19): siRNA sense strand
cagcaacgccgucaauguc

SEQ ID NO: 1763705 - RNA, 19 nt, Homo sapiens
  misc_RNA (1)...(19): siRNA sense strand
ggauagcagagaugggaaa

SEQ ID NO: 1763706 - RNA, 19 nt, Homo sapiens
  misc_RNA (1)...(19): siRNA sense strand
cauacucuuugccacacua

SEQ ID NO: 1763707 - RNA, 19 nt, Homo sapiens
  misc_RNA (1)...(19): siRNA sense strand
cuagaggccuauugcuaca

SEQ ID NO: 1763708 - RNA, 19 nt, Homo sapiens
  misc_RNA (1)...(19): siRNA sense strand
gcuccucuacauacucuuu

SEQ ID NO: 1763709 - RNA, 19 nt, Homo sapiens
  misc_RNA (1)...(19): siRNA sense strand
cacuagaggccuauugcua

SEQ ID NO: 1763710 - RNA, 19 nt, Homo sapiens
  misc_RNA (1)...(19): siRNA sense strand
cacuucggcugcaccauug

SEQ ID NO: 1763711 - RNA, 19 nt, Homo sapiens
  misc_RNA (1)...(19): siRNA sense strand
gggcagcaacgccgucaau

SEQ ID NO: 1763712 - RNA, 19 nt, Homo sapiens
  misc_RNA (1)...(19): siRNA sense strand
gccuguggcuccucuacau

SEQ ID NO: 1763713 - RNA, 19 nt, Homo sapiens
  misc_RNA (1)...(19): siRNA sense strand
caagaggauagcagagaug

SEQ ID NO: 1763714 - RNA, 19 nt, Homo sapiens
  misc_RNA (1)...(19): siRNA sense strand
aggcugcccuccugcuuug

SEQ ID NO: 1763715 - RNA, 19 nt, Homo sapiens
  misc_RNA (1)...(19): siRNA sense strand
acaaacugaucaagaagac

SEQ ID NO: 1763716 - RNA, 19 nt, Homo sapiens
  misc_RNA (1)...(19): siRNA sense strand
guggacaaacugaucaaga

SEQ ID NO: 1763717 - RNA, 19 nt, Homo sapiens
  misc_RNA (1)...(19): siRNA sense strand
gccaagaggauagcagaga

SEQ ID NO: 1763718 - RNA, 19 nt, Homo sapiens
  misc_RNA (1)...(19): siRNA sense strand
cugcugcccuccaggaugu

SEQ ID NO: 1763719 - RNA, 19 nt, Homo sapiens
  misc_RNA (1)...(19): siRNA sense strand
gaagaagaggaggccaaga

SEQ ID NO: 1763720 - RNA, 19 nt, Homo sapiens
  misc_RNA (1)...(19): siRNA sense strand
uugaagaguccuaugaguu

SEQ ID NO: 1763721 - RNA, 19 nt, Homo sapiens
  misc_RNA (1)...(19): siRNA sense strand
gaggaggccaagaggauag

SEQ ID NO: 1763722 - RNA, 19 nt, Homo sapiens
  misc_RNA (1)...(19): siRNA sense strand
agucacagcuguuguuuuc

SEQ ID NO: 1763723 - RNA, 19 nt, Homo sapiens
  misc_RNA (1)...(19): siRNA sense strand
cuagaagucaucauugaag

SEQ ID NO: 1763724 - RNA, 19 nt, Homo sapiens
  misc_RNA (1)...(19): siRNA sense strand
ccacacuagaggccuauug

SEQ ID NO: 1763725 - RNA, 19 nt, Homo sapiens
  misc_RNA (1)...(19): siRNA sense strand
gcaagcucgccacaacaug

SEQ ID NO: 1763726 - RNA, 19 nt, Homo sapiens
  misc_RNA (1)...(19): siRNA sense strand
caccaucuuugcauuuguc

SEQ ID NO: 1763727 - RNA, 19 nt, Homo sapiens
  misc_RNA (1)...(19): siRNA sense strand
ucaagacuacgguggacaa

SEQ ID NO: 1763728 - RNA, 19 nt, Homo sapiens
  misc_RNA (1)...(19): siRNA sense strand
caugcucaccgccaucauu

SEQ ID NO: 1763729 - RNA, 19 nt, Homo sapiens
  misc_RNA (1)...(19): siRNA sense strand
gcacuuccugacugucuuc

SEQ ID NO: 1763730 - RNA, 19 nt, Homo sapiens
  misc_RNA (1)...(19): siRNA sense strand
caacgccgucaaugucuuc

SEQ ID NO: 1763731 - RNA, 19 nt, Homo sapiens
  misc_RNA (1)...(19): siRNA sense strand
ccuccaggauguauaugca

SEQ ID NO: 1763732 - RNA, 19 nt, Homo sapiens
  misc_RNA (1)...(19): siRNA sense strand
ucuggaaggugcuguuugc

SEQ ID NO: 1763733 - RNA, 19 nt, Homo sapiens
  misc_RNA (1)...(19): siRNA sense strand
uccuaugaguucaagacua

SEQ ID NO: 1763734 - RNA, 19 nt, Homo sapiens
  misc_RNA (1)...(19): siRNA sense strand
cagacaggaagcugacuau

SEQ ID NO: 1763735 - RNA, 19 nt, Homo sapiens
  misc_RNA (1)...(19): siRNA sense strand
ucaccaucuuugcauuugu

SEQ ID NO: 1763736 - RNA, 19 nt, Homo sapiens
  misc_RNA (1)...(19): siRNA sense strand
agaggaggccaagaggaua

SEQ ID NO: 1763737 - RNA, 19 nt, Homo sapiens
  misc_RNA (1)...(19): siRNA sense strand
aagaggaggccaagaggau

SEQ ID NO: 1763738 - RNA, 19 nt, Homo sapiens
  misc_RNA (1)...(19): siRNA sense strand
acaggaagcugacuaugga

SEQ ID NO: 1763739 - RNA, 19 nt, Homo sapiens
  misc_RNA (1)...(19): siRNA sense strand
gaagcugacuauggaagaa

SEQ ID NO: 1763740 - RNA, 19 nt, Homo sapiens
  misc_RNA (1)...(19): siRNA sense strand
gaugggaaagccaguauug

SEQ ID NO: 1763741 - RNA, 19 nt, Homo sapiens
  misc_RNA (1)...(19): siRNA sense strand
ccaagaggauagcagagau

SEQ ID NO: 1763742 - RNA, 19 nt, Homo sapiens
  misc_RNA (1)...(19): siRNA sense strand
ggaagcugacuauggaaga

SEQ ID NO: 1763743 - RNA, 19 nt, Homo sapiens
  misc_RNA (1)...(19): siRNA sense strand
gacaggaagcugacuaugg

SEQ ID NO: 1763744 - RNA, 19 nt, Homo sapiens
  misc_RNA (1)...(19): siRNA sense strand
gagaugggaaagccaguau

SEQ ID NO: 1763745 - RNA, 19 nt, Homo sapiens
  misc_RNA (1)...(19): siRNA sense strand
ggauagcagagaugggaaa

SEQ ID NO: 1763746 - RNA, 19 nt, Homo sapiens
  misc_RNA (1)...(19): siRNA sense strand
caagaggauagcagagaug

SEQ ID NO: 1763747 - RNA, 19 nt, Homo sapiens
  misc_RNA (1)...(19): siRNA sense strand
gaagaagaggaggccaaga

SEQ ID NO: 1763748 - RNA, 19 nt, Homo sapiens
  misc_RNA (1)...(19): siRNA sense strand
gccaagaggauagcagaga

SEQ ID NO: 1763749 - RNA, 19 nt, Homo sapiens
  misc_RNA (1)...(19): siRNA sense strand
gaggaggccaagaggauag

SEQ ID NO: 1763750 - RNA, 19 nt, Homo sapiens
  misc_RNA (1)...(19): siRNA sense strand
agaggaggccaagaggaua

SEQ ID NO: 1763751 - RNA, 19 nt, Homo sapiens
  misc_RNA (1)...(19): siRNA sense strand
cagacaggaagcugacuau

SEQ ID NO: 1763752 - RNA, 19 nt, Homo sapiens
  misc_RNA (1)...(19): siRNA sense strand
aagaggaggccaagaggau

SEQ ID NO: 1763753 - RNA, 19 nt, Homo sapiens
  misc_RNA (1)...(19): siRNA sense strand
caaacuagaagucaucauu

SEQ ID NO: 1763754 - RNA, 19 nt, Homo sapiens
  misc_RNA (1)...(19): siRNA sense strand
ucucaaagauucagucaca

SEQ ID NO: 1763755 - RNA, 19 nt, Homo sapiens
  misc_RNA (1)...(19): siRNA sense strand
uggacaaacugaucaagaa

SEQ ID NO: 1763756 - RNA, 19 nt, Homo sapiens
  misc_RNA (1)...(19): siRNA sense strand
gcacuucggcugcaccauu

SEQ ID NO: 1763757 - RNA, 19 nt, Homo sapiens
  misc_RNA (1)...(19): siRNA sense strand
agacaaaccuggccuuggu

SEQ ID NO: 1763758 - RNA, 19 nt, Homo sapiens
  misc_RNA (1)...(19): siRNA sense strand
ccauuggucucaaagauuc

SEQ ID NO: 1763759 - RNA, 19 nt, Homo sapiens
  misc_RNA (1)...(19): siRNA sense strand
gcaucagcgugcucuugua

SEQ ID NO: 1763760 - RNA, 19 nt, Homo sapiens
  misc_RNA (1)...(19): siRNA sense strand
gaugggaaagccaguauug

SEQ ID NO: 1763761 - RNA, 19 nt, Homo sapiens
  misc_RNA (1)...(19): siRNA sense strand
gggaugaggaugaggauga

SEQ ID NO: 1763762 - RNA, 19 nt, Homo sapiens
  misc_RNA (1)...(19): siRNA sense strand
gaagaguccuaugaguuca

SEQ ID NO: 1763763 - RNA, 19 nt, Homo sapiens
  misc_RNA (1)...(19): siRNA sense strand
ggaugaggaugaggaugaa

SEQ ID NO: 1763764 - RNA, 19 nt, Homo sapiens
  misc_RNA (1)...(19): siRNA sense strand
uagaagucaucauugaaga

SEQ ID NO: 1763765 - RNA, 19 nt, Homo sapiens
  misc_RNA (1)...(19): siRNA sense strand
ccaagaggauagcagagau

SEQ ID NO: 1763766 - RNA, 19 nt, Homo sapiens
  misc_RNA (1)...(19): siRNA sense strand
ugaagaguccuaugaguuc

SEQ ID NO: 1763767 - RNA, 19 nt, Homo sapiens
  misc_RNA (1)...(19): siRNA sense strand
gcaacgccgucaaugucuu

SEQ ID NO: 1763768 - RNA, 19 nt, Homo sapiens
  misc_RNA (1)...(19): siRNA sense strand
ggagggaccaguucaugga

SEQ ID NO: 1763769 - RNA, 19 nt, Homo sapiens
  misc_RNA (1)...(19): siRNA sense strand
ccuaugaguucaagacuac

SEQ ID NO: 1763770 - RNA, 19 nt, Homo sapiens
  misc_RNA (1)...(19): siRNA sense strand
gcagcaacgccgucaaugu

SEQ ID NO: 1763771 - RNA, 19 nt, Homo sapiens
  misc_RNA (1)...(19): siRNA sense strand
aaacuagaagucaucauug

SEQ ID NO: 1763772 - RNA, 19 nt, Homo sapiens
  misc_RNA (1)...(19): siRNA sense strand
aacuagaagucaucauuga

SEQ ID NO: 1763773 - RNA, 19 nt, Homo sapiens
  misc_RNA (1)...(19): siRNA sense strand
gcugcaagcucgccacaac

SEQ ID NO: 1763774 - RNA, 19 nt, Homo sapiens
  misc_RNA (1)...(19): siRNA sense strand
agacuacgguggacaaacu

SEQ ID NO: 1763775 - RNA, 19 nt, Homo sapiens
  misc_RNA (1)...(19): siRNA sense strand
gacaaacugaucaagaaga

SEQ ID NO: 1763776 - RNA, 19 nt, Homo sapiens
  misc_RNA (1)...(19): siRNA sense strand
aaacugaucaagaagacaa

SEQ ID NO: 1763777 - RNA, 19 nt, Homo sapiens
  misc_RNA (1)...(19): siRNA sense strand
gaagucaucauugaagagu

SEQ ID NO: 1763778 - RNA, 19 nt, Homo sapiens
  misc_RNA (1)...(19): siRNA sense strand
ggacaaacugaucaagaag

SEQ ID NO: 1763779 - RNA, 19 nt, Homo sapiens
  misc_RNA (1)...(19): siRNA sense strand
gagaugggaaagccaguau

SEQ ID NO: 1763780 - RNA, 19 nt, Homo sapiens
  misc_RNA (1)...(19): siRNA sense strand
cagcaacgccgucaauguc

SEQ ID NO: 1763781 - RNA, 19 nt, Homo sapiens
  misc_RNA (1)...(19): siRNA sense strand
ggauagcagagaugggaaa

SEQ ID NO: 1763782 - RNA, 19 nt, Homo sapiens
  misc_RNA (1)...(19): siRNA sense strand
cauacucuuugccacacua

SEQ ID NO: 1763783 - RNA, 19 nt, Homo sapiens
  misc_RNA (1)...(19): siRNA sense strand
cuagaggccuauugcuaca

SEQ ID NO: 1763784 - RNA, 19 nt, Homo sapiens
  misc_RNA (1)...(19): siRNA sense strand
gcuccucuacauacucuuu

SEQ ID NO: 1763785 - RNA, 19 nt, Homo sapiens
  misc_RNA (1)...(19): siRNA sense strand
cacuagaggccuauugcua

SEQ ID NO: 1763786 - RNA, 19 nt, Homo sapiens
  misc_RNA (1)...(19): siRNA sense strand
cacuucggcugcaccauug

SEQ ID NO: 1763787 - RNA, 19 nt, Homo sapiens
  misc_RNA (1)...(19): siRNA sense strand
gggcagcaacgccgucaau

SEQ ID NO: 1763788 - RNA, 19 nt, Homo sapiens
  misc_RNA (1)...(19): siRNA sense strand
gccuguggcuccucuacau

SEQ ID NO: 1763789 - RNA, 19 nt, Homo sapiens
  misc_RNA (1)...(19): siRNA sense strand
guggacaaacugaucaaga

SEQ ID NO: 1763790 - RNA, 19 nt, Homo sapiens
  misc_RNA (1)...(19): siRNA sense strand
caagaggauagcagagaug

SEQ ID NO: 1763791 - RNA, 19 nt, Homo sapiens
  misc_RNA (1)...(19): siRNA sense strand
aggcugcccuccugcuuug

SEQ ID NO: 1763792 - RNA, 19 nt, Homo sapiens
  misc_RNA (1)...(19): siRNA sense strand
acaaacugaucaagaagac

SEQ ID NO: 1763793 - RNA, 19 nt, Homo sapiens
  misc_RNA (1)...(19): siRNA sense strand
gccaagaggauagcagaga

SEQ ID NO: 1763794 - RNA, 19 nt, Homo sapiens
  misc_RNA (1)...(19): siRNA sense strand
gaagaagaggaggccaaga

SEQ ID NO: 1763795 - RNA, 19 nt, Homo sapiens
  misc_RNA (1)...(19): siRNA sense strand
cugcugcccuccaggaugu

SEQ ID NO: 1763796 - RNA, 19 nt, Homo sapiens
  misc_RNA (1)...(19): siRNA sense strand
uugaagaguccuaugaguu

SEQ ID NO: 1763797 - RNA, 19 nt, Homo sapiens
  misc_RNA (1)...(19): siRNA sense strand
agucacagcuguuguuuuc

SEQ ID NO: 1763798 - RNA, 19 nt, Homo sapiens
  misc_RNA (1)...(19): siRNA sense strand
gaggaggccaagaggauag

SEQ ID NO: 1763799 - RNA, 19 nt, Homo sapiens
  misc_RNA (1)...(19): siRNA sense strand
ucaagacuacgguggacaa

SEQ ID NO: 1763800 - RNA, 19 nt, Homo sapiens
  misc_RNA (1)...(19): siRNA sense strand
ccacacuagaggccuauug

SEQ ID NO: 1763801 - RNA, 19 nt, Homo sapiens
  misc_RNA (1)...(19): siRNA sense strand
gcaagcucgccacaacaug

SEQ ID NO: 1763802 - RNA, 19 nt, Homo sapiens
  misc_RNA (1)...(19): siRNA sense strand
caccaucuuugcauuuguc

SEQ ID NO: 1763803 - RNA, 19 nt, Homo sapiens
  misc_RNA (1)...(19): siRNA sense strand
cuagaagucaucauugaag

SEQ ID NO: 1763804 - RNA, 19 nt, Homo sapiens
  misc_RNA (1)...(19): siRNA sense strand
caugcucaccgccaucauu

SEQ ID NO: 1763805 - RNA, 19 nt, Homo sapiens
  misc_RNA (1)...(19): siRNA sense strand
gcacuuccugacugucuuc

SEQ ID NO: 1763806 - RNA, 19 nt, Homo sapiens
  misc_RNA (1)...(19): siRNA sense strand
caacgccgucaaugucuuc

SEQ ID NO: 1763807 - RNA, 19 nt, Homo sapiens
  misc_RNA (1)...(19): siRNA sense strand
ccuccaggauguauaugca

SEQ ID NO: 1763808 - RNA, 19 nt, Homo sapiens
  misc_RNA (1)...(19): siRNA sense strand
ucuggaaggugcuguuugc

SEQ ID NO: 1763809 - RNA, 19 nt, Homo sapiens
  misc_RNA (1)...(19): siRNA sense strand
uccuaugaguucaagacua

SEQ ID NO: 1763810 - RNA, 19 nt, Homo sapiens
  misc_RNA (1)...(19): siRNA sense strand
agaggaggccaagaggaua

SEQ ID NO: 1763811 - RNA, 19 nt, Homo sapiens
  misc_RNA (1)...(19): siRNA sense strand
ucaccaucuuugcauuugu

SEQ ID NO: 1763812 - RNA, 19 nt, Homo sapiens
  misc_RNA (1)...(19): siRNA sense strand
aagaggaggccaagaggau

SEQ ID NO: 1763813 - RNA, 19 nt, Homo sapiens
  misc_RNA (1)...(19): siRNA sense strand
caaacuagaagucaucauu

SEQ ID NO: 1763814 - RNA, 19 nt, Homo sapiens
  misc_RNA (1)...(19): siRNA sense strand
acaggaagcugacuaugga

SEQ ID NO: 1763815 - RNA, 19 nt, Homo sapiens
  misc_RNA (1)...(19): siRNA sense strand
gaagcugacuauggaagaa

SEQ ID NO: 1763816 - RNA, 19 nt, Homo sapiens
  misc_RNA (1)...(19): siRNA sense strand
ucucaaagauucagucaca

SEQ ID NO: 1763817 - RNA, 19 nt, Homo sapiens
  misc_RNA (1)...(19): siRNA sense strand
uggacaaacugaucaagaa

SEQ ID NO: 1763818 - RNA, 19 nt, Homo sapiens
  misc_RNA (1)...(19): siRNA sense strand
gcacuucggcugcaccauu

SEQ ID NO: 1763819 - RNA, 19 nt, Homo sapiens
  misc_RNA (1)...(19): siRNA sense strand
agacaaaccuggccuuggu

SEQ ID NO: 1763820 - RNA, 19 nt, Homo sapiens
  misc_RNA (1)...(19): siRNA sense strand
ccauuggucucaaagauuc

SEQ ID NO: 1763821 - RNA, 19 nt, Homo sapiens
  misc_RNA (1)...(19): siRNA sense strand
gcaucagcgugcucuugua

SEQ ID NO: 1763822 - RNA, 19 nt, Homo sapiens
  misc_RNA (1)...(19): siRNA sense strand
gaugggaaagccaguauug

SEQ ID NO: 1763823 - RNA, 19 nt, Homo sapiens
  misc_RNA (1)...(19): siRNA sense strand
gggaugaggaugaggauga

SEQ ID NO: 1763824 - RNA, 19 nt, Homo sapiens
  misc_RNA (1)...(19): siRNA sense strand
gaagaguccuaugaguuca

SEQ ID NO: 1763825 - RNA, 19 nt, Homo sapiens
  misc_RNA (1)...(19): siRNA sense strand
ggaugaggaugaggaugaa

SEQ ID NO: 1763826 - RNA, 19 nt, Homo sapiens
  misc_RNA (1)...(19): siRNA sense strand
ccaagaggauagcagagau

SEQ ID NO: 1763827 - RNA, 19 nt, Homo sapiens
  misc_RNA (1)...(19): siRNA sense strand
uagaagucaucauugaaga

SEQ ID NO: 1763828 - RNA, 19 nt, Homo sapiens
  misc_RNA (1)...(19): siRNA sense strand
ugaagaguccuaugaguuc

SEQ ID NO: 1763829 - RNA, 19 nt, Homo sapiens
  misc_RNA (1)...(19): siRNA sense strand
gcaacgccgucaaugucuu

SEQ ID NO: 1763830 - RNA, 19 nt, Homo sapiens
  misc_RNA (1)...(19): siRNA sense strand
ggagggaccaguucaugga

SEQ ID NO: 1763831 - RNA, 19 nt, Homo sapiens
  misc_RNA (1)...(19): siRNA sense strand
ccuaugaguucaagacuac

SEQ ID NO: 1763832 - RNA, 19 nt, Homo sapiens
  misc_RNA (1)...(19): siRNA sense strand
gcagcaacgccgucaaugu

SEQ ID NO: 1763833 - RNA, 19 nt, Homo sapiens
  misc_RNA (1)...(19): siRNA sense strand
aaacuagaagucaucauug

SEQ ID NO: 1763834 - RNA, 19 nt, Homo sapiens
  misc_RNA (1)...(19): siRNA sense strand
ggaagcugacuauggaaga

SEQ ID NO: 1763835 - RNA, 19 nt, Homo sapiens
  misc_RNA (1)...(19): siRNA sense strand
aacuagaagucaucauuga

SEQ ID NO: 1763836 - RNA, 19 nt, Homo sapiens
  misc_RNA (1)...(19): siRNA sense strand
gcugcaagcucgccacaac

SEQ ID NO: 1763837 - RNA, 19 nt, Homo sapiens
  misc_RNA (1)...(19): siRNA sense strand
agacuacgguggacaaacu

SEQ ID NO: 1763838 - RNA, 19 nt, Homo sapiens
  misc_RNA (1)...(19): siRNA sense strand
gacaaacugaucaagaaga

SEQ ID NO: 1763839 - RNA, 19 nt, Homo sapiens
  misc_RNA (1)...(19): siRNA sense strand
aaacugaucaagaagacaa

SEQ ID NO: 1763840 - RNA, 19 nt, Homo sapiens
  misc_RNA (1)...(19): siRNA sense strand
gaagucaucauugaagagu

SEQ ID NO: 1763841 - RNA, 19 nt, Homo sapiens
  misc_RNA (1)...(19): siRNA sense strand
gacaggaagcugacuaugg

SEQ ID NO: 1763842 - RNA, 19 nt, Homo sapiens
  misc_RNA (1)...(19): siRNA sense strand
ggacaaacugaucaagaag

SEQ ID NO: 1763843 - RNA, 19 nt, Homo sapiens
  misc_RNA (1)...(19): siRNA sense strand
gagaugggaaagccaguau

SEQ ID NO: 1763844 - RNA, 19 nt, Homo sapiens
  misc_RNA (1)...(19): siRNA sense strand
cagcaacgccgucaauguc

SEQ ID NO: 1763845 - RNA, 19 nt, Homo sapiens
  misc_RNA (1)...(19): siRNA sense strand
ggauagcagagaugggaaa

SEQ ID NO: 1763846 - RNA, 19 nt, Homo sapiens
  misc_RNA (1)...(19): siRNA sense strand
cauacucuuugccacacua

SEQ ID NO: 1763847 - RNA, 19 nt, Homo sapiens
  misc_RNA (1)...(19): siRNA sense strand
cuagaggccuauugcuaca

SEQ ID NO: 1763848 - RNA, 19 nt, Homo sapiens
  misc_RNA (1)...(19): siRNA sense strand
gcuccucuacauacucuuu

SEQ ID NO: 1763849 - RNA, 19 nt, Homo sapiens
  misc_RNA (1)...(19): siRNA sense strand
cacuagaggccuauugcua

SEQ ID NO: 1763850 - RNA, 19 nt, Homo sapiens
  misc_RNA (1)...(19): siRNA sense strand
cacuucggcugcaccauug

SEQ ID NO: 1763851 - RNA, 19 nt, Homo sapiens
  misc_RNA (1)...(19): siRNA sense strand
gggcagcaacgccgucaau

SEQ ID NO: 1763852 - RNA, 19 nt, Homo sapiens
  misc_RNA (1)...(19): siRNA sense strand
gccuguggcuccucuacau

SEQ ID NO: 1763853 - RNA, 19 nt, Homo sapiens
  misc_RNA (1)...(19): siRNA sense strand
caagaggauagcagagaug

SEQ ID NO: 1763854 - RNA, 19 nt, Homo sapiens
  misc_RNA (1)...(19): siRNA sense strand
aggcugcccuccugcuuug

SEQ ID NO: 1763855 - RNA, 19 nt, Homo sapiens
  misc_RNA (1)...(19): siRNA sense strand
acaaacugaucaagaagac

SEQ ID NO: 1763856 - RNA, 19 nt, Homo sapiens
  misc_RNA (1)...(19): siRNA sense strand
guggacaaacugaucaaga

SEQ ID NO: 1763857 - RNA, 19 nt, Homo sapiens
  misc_RNA (1)...(19): siRNA sense strand
gccaagaggauagcagaga

SEQ ID NO: 1763858 - RNA, 19 nt, Homo sapiens
  misc_RNA (1)...(19): siRNA sense strand
cugcugcccuccaggaugu

SEQ ID NO: 1763859 - RNA, 19 nt, Homo sapiens
  misc_RNA (1)...(19): siRNA sense strand
gaagaagaggaggccaaga

SEQ ID NO: 1763860 - RNA, 19 nt, Homo sapiens
  misc_RNA (1)...(19): siRNA sense strand
uugaagaguccuaugaguu

SEQ ID NO: 1763861 - RNA, 19 nt, Homo sapiens
  misc_RNA (1)...(19): siRNA sense strand
gaggaggccaagaggauag

SEQ ID NO: 1763862 - RNA, 19 nt, Homo sapiens
  misc_RNA (1)...(19): siRNA sense strand
agucacagcuguuguuuuc

SEQ ID NO: 1763863 - RNA, 19 nt, Homo sapiens
  misc_RNA (1)...(19): siRNA sense strand
cuagaagucaucauugaag

SEQ ID NO: 1763864 - RNA, 19 nt, Homo sapiens
  misc_RNA (1)...(19): siRNA sense strand
ccacacuagaggccuauug

SEQ ID NO: 1763865 - RNA, 19 nt, Homo sapiens
  misc_RNA (1)...(19): siRNA sense strand
gcaagcucgccacaacaug

SEQ ID NO: 1763866 - RNA, 19 nt, Homo sapiens
  misc_RNA (1)...(19): siRNA sense strand
caccaucuuugcauuuguc

SEQ ID NO: 1763867 - RNA, 19 nt, Homo sapiens
  misc_RNA (1)...(19): siRNA sense strand
ucaagacuacgguggacaa

SEQ ID NO: 1763868 - RNA, 19 nt, Homo sapiens
  misc_RNA (1)...(19): siRNA sense strand
caugcucaccgccaucauu

SEQ ID NO: 1763869 - RNA, 19 nt, Homo sapiens
  misc_RNA (1)...(19): siRNA sense strand
gcacuuccugacugucuuc

SEQ ID NO: 1763870 - RNA, 19 nt, Homo sapiens
  misc_RNA (1)...(19): siRNA sense strand
caacgccgucaaugucuuc

SEQ ID NO: 1763871 - RNA, 19 nt, Homo sapiens
  misc_RNA (1)...(19): siRNA sense strand
ccuccaggauguauaugca

SEQ ID NO: 1763872 - RNA, 19 nt, Homo sapiens
  misc_RNA (1)...(19): siRNA sense strand
ucuggaaggugcuguuugc

SEQ ID NO: 1763873 - RNA, 19 nt, Homo sapiens
  misc_RNA (1)...(19): siRNA sense strand
uccuaugaguucaagacua

SEQ ID NO: 1763874 - RNA, 19 nt, Homo sapiens
  misc_RNA (1)...(19): siRNA sense strand
cagacaggaagcugacuau

SEQ ID NO: 1763875 - RNA, 19 nt, Homo sapiens
  misc_RNA (1)...(19): siRNA sense strand
ucaccaucuuugcauuugu

SEQ ID NO: 1763876 - RNA, 19 nt, Homo sapiens
  misc_RNA (1)...(19): siRNA sense strand
agaggaggccaagaggaua

SEQ ID NO: 1763877 - RNA, 19 nt, Homo sapiens
  misc_RNA (1)...(19): siRNA sense strand
aagaggaggccaagaggau

SEQ ID NO: 1763878 - RNA, 19 nt, Homo sapiens
  misc_RNA (1)...(19): siRNA sense strand
agaaugagcuccaauguau

SEQ ID NO: 1763879 - RNA, 19 nt, Homo sapiens
  misc_RNA (1)...(19): siRNA sense strand
ggagauagcccaaggagaa

SEQ ID NO: 1763880 - RNA, 19 nt, Homo sapiens
  misc_RNA (1)...(19): siRNA sense strand
caaagaaaguugugcaaau

SEQ ID NO: 1763881 - RNA, 19 nt, Homo sapiens
  misc_RNA (1)...(19): siRNA sense strand
gagcuccaauguauuauuu

SEQ ID NO: 1763882 - RNA, 19 nt, Homo sapiens
  misc_RNA (1)...(19): siRNA sense strand
cagagaagcuuacagaugu

SEQ ID NO: 1763883 - RNA, 19 nt, Homo sapiens
  misc_RNA (1)...(19): siRNA sense strand
gcaggaacuucaggacuua

SEQ ID NO: 1763884 - RNA, 19 nt, Homo sapiens
  misc_RNA (1)...(19): siRNA sense strand
gagggccaauggacaauua

SEQ ID NO: 1763885 - RNA, 19 nt, Homo sapiens
  misc_RNA (1)...(19): siRNA sense strand
ggacaauuauggacaacaa

SEQ ID NO: 1763886 - RNA, 19 nt, Homo sapiens
  misc_RNA (1)...(19): siRNA sense strand
uaaagugucuugugaaucu

SEQ ID NO: 1763887 - RNA, 19 nt, Homo sapiens
  misc_RNA (1)...(19): siRNA sense strand
gaagaagacugggagacaa

SEQ ID NO: 1763888 - RNA, 19 nt, Homo sapiens
  misc_RNA (1)...(19): siRNA sense strand
gcagaaagccucaaacucu

SEQ ID NO: 1763889 - RNA, 19 nt, Homo sapiens
  misc_RNA (1)...(19): siRNA sense strand
caauuuggauccuaaguug

SEQ ID NO: 1763890 - RNA, 19 nt, Homo sapiens
  misc_RNA (1)...(19): siRNA sense strand
ugaaugaugugcuagagaa

SEQ ID NO: 1763891 - RNA, 19 nt, Homo sapiens
  misc_RNA (1)...(19): siRNA sense strand
gagcgcgucuggaaccuuu

SEQ ID NO: 1763892 - RNA, 19 nt, Homo sapiens
  misc_RNA (1)...(19): siRNA sense strand
gagaaugagcuccaaugua

SEQ ID NO: 1763893 - RNA, 19 nt, Homo sapiens
  misc_RNA (1)...(19): siRNA sense strand
ggacgaggauuugguguca

SEQ ID NO: 1763894 - RNA, 19 nt, Homo sapiens
  misc_RNA (1)...(19): siRNA sense strand
aaagaaaguugugcaaaug

SEQ ID NO: 1763895 - RNA, 19 nt, Homo sapiens
  misc_RNA (1)...(19): siRNA sense strand
caacaagagucuaaauggu

SEQ ID NO: 1763896 - RNA, 19 nt, Homo sapiens
  misc_RNA (1)...(19): siRNA sense strand
gaaggacuuugaagcaauc

SEQ ID NO: 1763897 - RNA, 19 nt, Homo sapiens
  misc_RNA (1)...(19): siRNA sense strand
ggaaauucaguuuggauga

SEQ ID NO: 1763898 - RNA, 19 nt, Homo sapiens
  misc_RNA (1)...(19): siRNA sense strand
aaugagcuccaauguauua

SEQ ID NO: 1763899 - RNA, 19 nt, Homo sapiens
  misc_RNA (1)...(19): siRNA sense strand
gaagcuuacagauguuuaa

SEQ ID NO: 1763900 - RNA, 19 nt, Homo sapiens
  misc_RNA (1)...(19): siRNA sense strand
cagaaagccucaaacucuu

SEQ ID NO: 1763901 - RNA, 19 nt, Homo sapiens
  misc_RNA (1)...(19): siRNA sense strand
guacacccucugacaauuu

SEQ ID NO: 1763902 - RNA, 19 nt, Homo sapiens
  misc_RNA (1)...(19): siRNA sense strand
ggacuuugaagcaaucauu

SEQ ID NO: 1763903 - RNA, 19 nt, Homo sapiens
  misc_RNA (1)...(19): siRNA sense strand
gcagcaagaaggacuuuga

SEQ ID NO: 1763904 - RNA, 19 nt, Homo sapiens
  misc_RNA (1)...(19): siRNA sense strand
ggacaacaagagucuaaau

SEQ ID NO: 1763905 - RNA, 19 nt, Homo sapiens
  misc_RNA (1)...(19): siRNA sense strand
caagaaggacuuugaagca

SEQ ID NO: 1763906 - RNA, 19 nt, Homo sapiens
  misc_RNA (1)...(19): siRNA sense strand
gaaugcggaguaugaauau

SEQ ID NO: 1763907 - RNA, 19 nt, Homo sapiens
  misc_RNA (1)...(19): siRNA sense strand
gcuccaauguauuauuugu

SEQ ID NO: 1763908 - RNA, 19 nt, Homo sapiens
  misc_RNA (1)...(19): siRNA sense strand
ccaaagaaugaccaaauga

SEQ ID NO: 1763909 - RNA, 19 nt, Homo sapiens
  misc_RNA (1)...(19): siRNA sense strand
agaaugcggaguaugaaua

SEQ ID NO: 1763910 - RNA, 19 nt, Homo sapiens
  misc_RNA (1)...(19): siRNA sense strand
ggaguaugaauaugaaguu

SEQ ID NO: 1763911 - RNA, 19 nt, Homo sapiens
  misc_RNA (1)...(19): siRNA sense strand
gcaaauggagcaggaacuu

SEQ ID NO: 1763912 - RNA, 19 nt, Homo sapiens
  misc_RNA (1)...(19): siRNA sense strand
guucuuagccacaugaaug

SEQ ID NO: 1763913 - RNA, 19 nt, Homo sapiens
  misc_RNA (1)...(19): siRNA sense strand
uuaagggucuauuccauuc

SEQ ID NO: 1763914 - RNA, 19 nt, Homo sapiens
  misc_RNA (1)...(19): siRNA sense strand
gaaguucuuagccacauga

SEQ ID NO: 1763915 - RNA, 19 nt, Homo sapiens
  misc_RNA (1)...(19): siRNA sense strand
cccaaagaaugaccaaaug

SEQ ID NO: 1763916 - RNA, 19 nt, Homo sapiens
  misc_RNA (1)...(19): siRNA sense strand
caauauauccuugucuuuc

SEQ ID NO: 1763917 - RNA, 19 nt, Homo sapiens
  misc_RNA (1)...(19): siRNA sense strand
gagcuaaaucgcagcaaga

SEQ ID NO: 1763918 - RNA, 19 nt, Homo sapiens
  misc_RNA (1)...(19): siRNA sense strand
aacagcaucuucaggguuu

SEQ ID NO: 1763919 - RNA, 19 nt, Homo sapiens
  misc_RNA (1)...(19): siRNA sense strand
caaagaaugaccaaaugau

SEQ ID NO: 1763920 - RNA, 19 nt, Homo sapiens
  misc_RNA (1)...(19): siRNA sense strand
gacaacaagagucuaaaug

SEQ ID NO: 1763921 - RNA, 19 nt, Homo sapiens
  misc_RNA (1)...(19): siRNA sense strand
ucagagaagcuuacagaug

SEQ ID NO: 1763922 - RNA, 19 nt, Homo sapiens
  misc_RNA (1)...(19): siRNA sense strand
uaaguugacugcccuugag

SEQ ID NO: 1763923 - RNA, 19 nt, Homo sapiens
  misc_RNA (1)...(19): siRNA sense strand
uaaaugguguuuggcugaa

SEQ ID NO: 1763924 - RNA, 19 nt, Homo sapiens
  misc_RNA (1)...(19): siRNA sense strand
gaggauuuggugucacaua

SEQ ID NO: 1763925 - RNA, 19 nt, Homo sapiens
  misc_RNA (1)...(19): siRNA sense strand
uaaggagaaugcggaguau

SEQ ID NO: 1763926 - RNA, 19 nt, Homo sapiens
  misc_RNA (1)...(19): siRNA sense strand
gaagaugcaagcacagaag

SEQ ID NO: 1763927 - RNA, 19 nt, Homo sapiens
  misc_RNA (1)...(19): siRNA sense strand
ccacaggggcucccauuua

SEQ ID NO: 1763928 - RNA, 19 nt, Homo sapiens
  misc_RNA (1)...(19): siRNA sense strand
gaagacugggagacaauau

SEQ ID NO: 1763929 - RNA, 19 nt, Homo sapiens
  misc_RNA (1)...(19): siRNA sense strand
gaauaugaaguuacugaag

SEQ ID NO: 1763930 - RNA, 19 nt, Homo sapiens
  misc_RNA (1)...(19): siRNA sense strand
agaaggacuuugaagcaau

SEQ ID NO: 1763931 - RNA, 19 nt, Homo sapiens
  misc_RNA (1)...(19): siRNA sense strand
ggagacuacauccaacuug

SEQ ID NO: 1763932 - RNA, 19 nt, Homo sapiens
  misc_RNA (1)...(19): siRNA sense strand
guucagaauacuucauuga

SEQ ID NO: 1763933 - RNA, 19 nt, Homo sapiens
  misc_RNA (1)...(19): siRNA sense strand
ccaaggaagagaaggagaa

SEQ ID NO: 1763934 - RNA, 19 nt, Homo sapiens
  misc_RNA (1)...(19): siRNA sense strand
agaaaguugugcaaaugga

SEQ ID NO: 1763935 - RNA, 19 nt, Homo sapiens
  misc_RNA (1)...(19): siRNA sense strand
gagcagaaagccucaaacu

SEQ ID NO: 1763936 - RNA, 19 nt, Homo sapiens
  misc_RNA (1)...(19): siRNA sense strand
ggagaaugcggaguaugaa

SEQ ID NO: 1763937 - RNA, 19 nt, Homo sapiens
  misc_RNA (1)...(19): siRNA sense strand
gaaugagcuccaauguauu

SEQ ID NO: 1763938 - RNA, 19 nt, Homo sapiens
  misc_RNA (1)...(19): siRNA sense strand
gcacagaaggaagaaguuc

SEQ ID NO: 1763939 - RNA, 19 nt, Homo sapiens
  misc_RNA (1)...(19): siRNA sense strand
aagaaggacuuugaagcaa

SEQ ID NO: 1763940 - RNA, 19 nt, Homo sapiens
  misc_RNA (1)...(19): siRNA sense strand
acaugaagccguuaugaau

SEQ ID NO: 1763941 - RNA, 19 nt, Homo sapiens
  misc_RNA (1)...(19): siRNA sense strand
aaacaugaagccguuauga

SEQ ID NO: 1763942 - RNA, 19 nt, Homo sapiens
  misc_RNA (1)...(19): siRNA sense strand
gagugccucuggaaaauaa

SEQ ID NO: 1763943 - RNA, 19 nt, Homo sapiens
  misc_RNA (1)...(19): siRNA sense strand
gagaagaugcaagcacaga

SEQ ID NO: 1763944 - RNA, 19 nt, Homo sapiens
  misc_RNA (1)...(19): siRNA sense strand
ccaagaacaaagaauuaga

SEQ ID NO: 1763945 - RNA, 19 nt, Homo sapiens
  misc_RNA (1)...(19): siRNA sense strand
aaaaggaccugaagcaaca

SEQ ID NO: 1763946 - RNA, 19 nt, Homo sapiens
  misc_RNA (1)...(19): siRNA sense strand
gagaagcuuacagauguuu

SEQ ID NO: 1763947 - RNA, 19 nt, Homo sapiens
  misc_RNA (1)...(19): siRNA sense strand
gaaagccucaaacucuuca

SEQ ID NO: 1763948 - RNA, 19 nt, Homo sapiens
  misc_RNA (1)...(19): siRNA sense strand
gacuguaggacgaggauuu

SEQ ID NO: 1763949 - RNA, 19 nt, Homo sapiens
  misc_RNA (1)...(19): siRNA sense strand
ugaaguuacugaagaagac

SEQ ID NO: 1763950 - RNA, 19 nt, Homo sapiens
  misc_RNA (1)...(19): siRNA sense strand
auaaggagaaugcggagua

SEQ ID NO: 1763951 - RNA, 19 nt, Homo sapiens
  misc_RNA (1)...(19): siRNA sense strand
aaauacagaugcaggaaaa

SEQ ID NO: 1763952 - RNA, 19 nt, Homo sapiens
  misc_RNA (1)...(19): siRNA sense strand
gagucuaaaugguguuugg

SEQ ID NO: 1763953 - RNA, 19 nt, Homo sapiens
  misc_RNA (1)...(19): siRNA sense strand
gagcagaccaaggaagaga

SEQ ID NO: 1763954 - RNA, 19 nt, Homo sapiens
  misc_RNA (1)...(19): siRNA sense strand
gagauagcccaaggagaaa

SEQ ID NO: 1763955 - RNA, 19 nt, Homo sapiens
  misc_RNA (1)...(19): siRNA sense strand
gaguggagcaacuagagaa

SEQ ID NO: 1763956 - RNA, 19 nt, Homo sapiens
  misc_RNA (1)...(19): siRNA sense strand
ucaaagaaaguugugcaaa

SEQ ID NO: 1763957 - RNA, 19 nt, Homo sapiens
  misc_RNA (1)...(19): siRNA sense strand
agaaugaccaaaugauaga

SEQ ID NO: 1763958 - RNA, 19 nt, Homo sapiens
  misc_RNA (1)...(19): siRNA sense strand
gguggcugcugcuggaaga

SEQ ID NO: 1763959 - RNA, 19 nt, Homo sapiens
  misc_RNA (1)...(19): siRNA sense strand
caagaacaaagaauuagag

SEQ ID NO: 1763960 - RNA, 19 nt, Homo sapiens
  misc_RNA (1)...(19): siRNA sense strand
gaacuucaggacuuacagu

SEQ ID NO: 1763961 - RNA, 19 nt, Homo sapiens
  misc_RNA (1)...(19): siRNA sense strand
caguuuggaugaauuagca

SEQ ID NO: 1763962 - RNA, 19 nt, Homo sapiens
  misc_RNA (1)...(19): siRNA sense strand
ucagggagacuacauccaa

SEQ ID NO: 1763963 - RNA, 19 nt, Homo sapiens
  misc_RNA (1)...(19): siRNA sense strand
aaaggaaauucaguuugga

SEQ ID NO: 1763964 - RNA, 19 nt, Homo sapiens
  misc_RNA (1)...(19): siRNA sense strand
gcuagagaaugagcuccaa

SEQ ID NO: 1763965 - RNA, 19 nt, Homo sapiens
  misc_RNA (1)...(19): siRNA sense strand
agccaagaacaaagaauua

SEQ ID NO: 1763966 - RNA, 19 nt, Homo sapiens
  misc_RNA (1)...(19): siRNA sense strand
caugaagccguuaugaaug

SEQ ID NO: 1763967 - RNA, 19 nt, Homo sapiens
  misc_RNA (1)...(19): siRNA sense strand
gcugaaggccccucaaauu

SEQ ID NO: 1763968 - RNA, 19 nt, Homo sapiens
  misc_RNA (1)...(19): siRNA sense strand
gaauugagaacuaaaagga

SEQ ID NO: 1763969 - RNA, 19 nt, Homo sapiens
  misc_RNA (1)...(19): siRNA sense strand
augaugugcuagagaauga

SEQ ID NO: 1763970 - RNA, 19 nt, Homo sapiens
  misc_RNA (1)...(19): siRNA sense strand
gaugcaagcacagaaggaa

SEQ ID NO: 1763971 - RNA, 19 nt, Homo sapiens
  misc_RNA (1)...(19): siRNA sense strand
cugacaauuuggauccuaa

SEQ ID NO: 1763972 - RNA, 19 nt, Homo sapiens
  misc_RNA (1)...(19): siRNA sense strand
gagaaugcggaguaugaau

SEQ ID NO: 1763973 - RNA, 19 nt, Homo sapiens
  misc_RNA (1)...(19): siRNA sense strand
augaagccguuaugaaugu

SEQ ID NO: 1763974 - RNA, 19 nt, Homo sapiens
  misc_RNA (1)...(19): siRNA sense strand
ccaguacacccucugacaa

SEQ ID NO: 1763975 - RNA, 19 nt, Homo sapiens
  misc_RNA (1)...(19): siRNA sense strand
cagcaagaaggacuuugaa

SEQ ID NO: 1763976 - RNA, 19 nt, Homo sapiens
  misc_RNA (1)...(19): siRNA sense strand
ggaagagaaggagaagaug

SEQ ID NO: 1763977 - RNA, 19 nt, Homo sapiens
  misc_RNA (1)...(19): siRNA sense strand
uagagcagaccaaggaaga

SEQ ID NO: 1763978 - RNA, 19 nt, Homo sapiens
  misc_RNA (1)...(19): siRNA sense strand
gcaaagagauuguucugaa

SEQ ID NO: 1763979 - RNA, 19 nt, Homo sapiens
  misc_RNA (1)...(19): siRNA sense strand
agaaugagcuccaauguau

SEQ ID NO: 1763980 - RNA, 19 nt, Homo sapiens
  misc_RNA (1)...(19): siRNA sense strand
ggagauagcccaaggagaa

SEQ ID NO: 1763981 - RNA, 19 nt, Homo sapiens
  misc_RNA (1)...(19): siRNA sense strand
caaagaaaguugugcaaau

SEQ ID NO: 1763982 - RNA, 19 nt, Homo sapiens
  misc_RNA (1)...(19): siRNA sense strand
gagcuccaauguauuauuu

SEQ ID NO: 1763983 - RNA, 19 nt, Homo sapiens
  misc_RNA (1)...(19): siRNA sense strand
cagagaagcuuacagaugu

SEQ ID NO: 1763984 - RNA, 19 nt, Homo sapiens
  misc_RNA (1)...(19): siRNA sense strand
gcaggaacuucaggacuua

SEQ ID NO: 1763985 - RNA, 19 nt, Homo sapiens
  misc_RNA (1)...(19): siRNA sense strand
gagggccaauggacaauua

SEQ ID NO: 1763986 - RNA, 19 nt, Homo sapiens
  misc_RNA (1)...(19): siRNA sense strand
ggacaauuauggacaacaa

SEQ ID NO: 1763987 - RNA, 19 nt, Homo sapiens
  misc_RNA (1)...(19): siRNA sense strand
uaaagugucuugugaaucu

SEQ ID NO: 1763988 - RNA, 19 nt, Homo sapiens
  misc_RNA (1)...(19): siRNA sense strand
gaagaagacugggagacaa

SEQ ID NO: 1763989 - RNA, 19 nt, Homo sapiens
  misc_RNA (1)...(19): siRNA sense strand
gcagaaagccucaaacucu

SEQ ID NO: 1763990 - RNA, 19 nt, Homo sapiens
  misc_RNA (1)...(19): siRNA sense strand
gagauggucuggaggauuc

SEQ ID NO: 1763991 - RNA, 19 nt, Homo sapiens
  misc_RNA (1)...(19): siRNA sense strand
caauuuggauccuaaguug

SEQ ID NO: 1763992 - RNA, 19 nt, Homo sapiens
  misc_RNA (1)...(19): siRNA sense strand
ugaaugaugugcuagagaa

SEQ ID NO: 1763993 - RNA, 19 nt, Homo sapiens
  misc_RNA (1)...(19): siRNA sense strand
gagcgcgucuggaaccuuu

SEQ ID NO: 1763994 - RNA, 19 nt, Homo sapiens
  misc_RNA (1)...(19): siRNA sense strand
gagaaugagcuccaaugua

SEQ ID NO: 1763995 - RNA, 19 nt, Homo sapiens
  misc_RNA (1)...(19): siRNA sense strand
aaagaaaguugugcaaaug

SEQ ID NO: 1763996 - RNA, 19 nt, Homo sapiens
  misc_RNA (1)...(19): siRNA sense strand
ggacgaggauuugguguca

SEQ ID NO: 1763997 - RNA, 19 nt, Homo sapiens
  misc_RNA (1)...(19): siRNA sense strand
caacaagagucuaaauggu

SEQ ID NO: 1763998 - RNA, 19 nt, Homo sapiens
  misc_RNA (1)...(19): siRNA sense strand
gaaggacuuugaagcaauc

SEQ ID NO: 1763999 - RNA, 19 nt, Homo sapiens
  misc_RNA (1)...(19): siRNA sense strand
gcucuaagggcauuugaaa

SEQ ID NO: 1764000 - RNA, 19 nt, Homo sapiens
  misc_RNA (1)...(19): siRNA sense strand
ggaaauucaguuuggauga

SEQ ID NO: 1764001 - RNA, 19 nt, Homo sapiens
  misc_RNA (1)...(19): siRNA sense strand
aaugagcuccaauguauua

SEQ ID NO: 1764002 - RNA, 19 nt, Homo sapiens
  misc_RNA (1)...(19): siRNA sense strand
gaagcuuacagauguuuaa

SEQ ID NO: 1764003 - RNA, 19 nt, Homo sapiens
  misc_RNA (1)...(19): siRNA sense strand
cagaaagccucaaacucuu

SEQ ID NO: 1764004 - RNA, 19 nt, Homo sapiens
  misc_RNA (1)...(19): siRNA sense strand
guacacccucugacaauuu

SEQ ID NO: 1764005 - RNA, 19 nt, Homo sapiens
  misc_RNA (1)...(19): siRNA sense strand
ggacuuugaagcaaucauu

SEQ ID NO: 1764006 - RNA, 19 nt, Homo sapiens
  misc_RNA (1)...(19): siRNA sense strand
gcagcaagaaggacuuuga

SEQ ID NO: 1764007 - RNA, 19 nt, Homo sapiens
  misc_RNA (1)...(19): siRNA sense strand
caaagagauuguucugaag

SEQ ID NO: 1764008 - RNA, 19 nt, Homo sapiens
  misc_RNA (1)...(19): siRNA sense strand
ggacaacaagagucuaaau

SEQ ID NO: 1764009 - RNA, 19 nt, Homo sapiens
  misc_RNA (1)...(19): siRNA sense strand
caagaaggacuuugaagca

SEQ ID NO: 1764010 - RNA, 19 nt, Homo sapiens
  misc_RNA (1)...(19): siRNA sense strand
gaaugcggaguaugaauau

SEQ ID NO: 1764011 - RNA, 19 nt, Homo sapiens
  misc_RNA (1)...(19): siRNA sense strand
gcuccaauguauuauuugu

SEQ ID NO: 1764012 - RNA, 19 nt, Homo sapiens
  misc_RNA (1)...(19): siRNA sense strand
ccaaagaaugaccaaauga

SEQ ID NO: 1764013 - RNA, 19 nt, Homo sapiens
  misc_RNA (1)...(19): siRNA sense strand
agaaugcggaguaugaaua

SEQ ID NO: 1764014 - RNA, 19 nt, Homo sapiens
  misc_RNA (1)...(19): siRNA sense strand
ggaguaugaauaugaaguu

SEQ ID NO: 1764015 - RNA, 19 nt, Homo sapiens
  misc_RNA (1)...(19): siRNA sense strand
gcaaauggagcaggaacuu

SEQ ID NO: 1764016 - RNA, 19 nt, Homo sapiens
  misc_RNA (1)...(19): siRNA sense strand
guucuuagccacaugaaug

SEQ ID NO: 1764017 - RNA, 19 nt, Homo sapiens
  misc_RNA (1)...(19): siRNA sense strand
uuaagggucuauuccauuc

SEQ ID NO: 1764018 - RNA, 19 nt, Homo sapiens
  misc_RNA (1)...(19): siRNA sense strand
gaaguucuuagccacauga

SEQ ID NO: 1764019 - RNA, 19 nt, Homo sapiens
  misc_RNA (1)...(19): siRNA sense strand
cccaaagaaugaccaaaug

SEQ ID NO: 1764020 - RNA, 19 nt, Homo sapiens
  misc_RNA (1)...(19): siRNA sense strand
caauauauccuugucuuuc

SEQ ID NO: 1764021 - RNA, 19 nt, Homo sapiens
  misc_RNA (1)...(19): siRNA sense strand
ucuaagggcauuugaaaga

SEQ ID NO: 1764022 - RNA, 19 nt, Homo sapiens
  misc_RNA (1)...(19): siRNA sense strand
gagcuaaaucgcagcaaga

SEQ ID NO: 1764023 - RNA, 19 nt, Homo sapiens
  misc_RNA (1)...(19): siRNA sense strand
aacagcaucuucaggguuu

SEQ ID NO: 1764024 - RNA, 19 nt, Homo sapiens
  misc_RNA (1)...(19): siRNA sense strand
caaagaaugaccaaaugau

SEQ ID NO: 1764025 - RNA, 19 nt, Homo sapiens
  misc_RNA (1)...(19): siRNA sense strand
gacaacaagagucuaaaug

SEQ ID NO: 1764026 - RNA, 19 nt, Homo sapiens
  misc_RNA (1)...(19): siRNA sense strand
ucagagaagcuuacagaug

SEQ ID NO: 1764027 - RNA, 19 nt, Homo sapiens
  misc_RNA (1)...(19): siRNA sense strand
uaaguugacugcccuugag

SEQ ID NO: 1764028 - RNA, 19 nt, Homo sapiens
  misc_RNA (1)...(19): siRNA sense strand
uaaaugguguuuggcugaa

SEQ ID NO: 1764029 - RNA, 19 nt, Homo sapiens
  misc_RNA (1)...(19): siRNA sense strand
gaggauuuggugucacaua

SEQ ID NO: 1764030 - RNA, 19 nt, Homo sapiens
  misc_RNA (1)...(19): siRNA sense strand
uaaggagaaugcggaguau

SEQ ID NO: 1764031 - RNA, 19 nt, Homo sapiens
  misc_RNA (1)...(19): siRNA sense strand
gaagaugcaagcacagaag

SEQ ID NO: 1764032 - RNA, 19 nt, Homo sapiens
  misc_RNA (1)...(19): siRNA sense strand
ccacaggggcucccauuua

SEQ ID NO: 1764033 - RNA, 19 nt, Homo sapiens
  misc_RNA (1)...(19): siRNA sense strand
gaagacugggagacaauau

SEQ ID NO: 1764034 - RNA, 19 nt, Homo sapiens
  misc_RNA (1)...(19): siRNA sense strand
gaauaugaaguuacugaag

SEQ ID NO: 1764035 - RNA, 19 nt, Homo sapiens
  misc_RNA (1)...(19): siRNA sense strand
agaaggacuuugaagcaau

SEQ ID NO: 1764036 - RNA, 19 nt, Homo sapiens
  misc_RNA (1)...(19): siRNA sense strand
ggagacuacauccaacuug

SEQ ID NO: 1764037 - RNA, 19 nt, Homo sapiens
  misc_RNA (1)...(19): siRNA sense strand
guucagaauacuucauuga

SEQ ID NO: 1764038 - RNA, 19 nt, Homo sapiens
  misc_RNA (1)...(19): siRNA sense strand
ccaaggaagagaaggagaa

SEQ ID NO: 1764039 - RNA, 19 nt, Homo sapiens
  misc_RNA (1)...(19): siRNA sense strand
agaaaguugugcaaaugga

SEQ ID NO: 1764040 - RNA, 19 nt, Homo sapiens
  misc_RNA (1)...(19): siRNA sense strand
gagcagaaagccucaaacu

SEQ ID NO: 1764041 - RNA, 19 nt, Homo sapiens
  misc_RNA (1)...(19): siRNA sense strand
ggagaaugcggaguaugaa

SEQ ID NO: 1764042 - RNA, 19 nt, Homo sapiens
  misc_RNA (1)...(19): siRNA sense strand
gaaugagcuccaauguauu

SEQ ID NO: 1764043 - RNA, 19 nt, Homo sapiens
  misc_RNA (1)...(19): siRNA sense strand
gcacagaaggaagaaguuc

SEQ ID NO: 1764044 - RNA, 19 nt, Homo sapiens
  misc_RNA (1)...(19): siRNA sense strand
aagaaggacuuugaagcaa

SEQ ID NO: 1764045 - RNA, 19 nt, Homo sapiens
  misc_RNA (1)...(19): siRNA sense strand
acaugaagccguuaugaau

SEQ ID NO: 1764046 - RNA, 19 nt, Homo sapiens
  misc_RNA (1)...(19): siRNA sense strand
aaacaugaagccguuauga

SEQ ID NO: 1764047 - RNA, 19 nt, Homo sapiens
  misc_RNA (1)...(19): siRNA sense strand
gagugccucuggaaaauaa

SEQ ID NO: 1764048 - RNA, 19 nt, Homo sapiens
  misc_RNA (1)...(19): siRNA sense strand
gagaagaugcaagcacaga

SEQ ID NO: 1764049 - RNA, 19 nt, Homo sapiens
  misc_RNA (1)...(19): siRNA sense strand
ccaagaacaaagaauuaga

SEQ ID NO: 1764050 - RNA, 19 nt, Homo sapiens
  misc_RNA (1)...(19): siRNA sense strand
aaaaggaccugaagcaaca

SEQ ID NO: 1764051 - RNA, 19 nt, Homo sapiens
  misc_RNA (1)...(19): siRNA sense strand
gagaagcuuacagauguuu

SEQ ID NO: 1764052 - RNA, 19 nt, Homo sapiens
  misc_RNA (1)...(19): siRNA sense strand
gaaagccucaaacucuuca

SEQ ID NO: 1764053 - RNA, 19 nt, Homo sapiens
  misc_RNA (1)...(19): siRNA sense strand
gacuguaggacgaggauuu

SEQ ID NO: 1764054 - RNA, 19 nt, Homo sapiens
  misc_RNA (1)...(19): siRNA sense strand
ugaaguuacugaagaagac

SEQ ID NO: 1764055 - RNA, 19 nt, Homo sapiens
  misc_RNA (1)...(19): siRNA sense strand
auaaggagaaugcggagua

SEQ ID NO: 1764056 - RNA, 19 nt, Homo sapiens
  misc_RNA (1)...(19): siRNA sense strand
aaauacagaugcaggaaaa

SEQ ID NO: 1764057 - RNA, 19 nt, Homo sapiens
  misc_RNA (1)...(19): siRNA sense strand
ugaagaccgugcucuaagg

SEQ ID NO: 1764058 - RNA, 19 nt, Homo sapiens
  misc_RNA (1)...(19): siRNA sense strand
gagucuaaaugguguuugg

SEQ ID NO: 1764059 - RNA, 19 nt, Homo sapiens
  misc_RNA (1)...(19): siRNA sense strand
gagcagaccaaggaagaga

SEQ ID NO: 1764060 - RNA, 19 nt, Homo sapiens
  misc_RNA (1)...(19): siRNA sense strand
gagauagcccaaggagaaa

SEQ ID NO: 1764061 - RNA, 19 nt, Homo sapiens
  misc_RNA (1)...(19): siRNA sense strand
gaguggagcaacuagagaa

SEQ ID NO: 1764062 - RNA, 19 nt, Homo sapiens
  misc_RNA (1)...(19): siRNA sense strand
ucaaagaaaguugugcaaa

SEQ ID NO: 1764063 - RNA, 19 nt, Homo sapiens
  misc_RNA (1)...(19): siRNA sense strand
agaaugaccaaaugauaga

SEQ ID NO: 1764064 - RNA, 19 nt, Homo sapiens
  misc_RNA (1)...(19): siRNA sense strand
aaagagauuguucugaaga

SEQ ID NO: 1764065 - RNA, 19 nt, Homo sapiens
  misc_RNA (1)...(19): siRNA sense strand
gguggcugcugcuggaaga

SEQ ID NO: 1764066 - RNA, 19 nt, Homo sapiens
  misc_RNA (1)...(19): siRNA sense strand
caagaacaaagaauuagag

SEQ ID NO: 1764067 - RNA, 19 nt, Homo sapiens
  misc_RNA (1)...(19): siRNA sense strand
ucagggagacuacauccaa

SEQ ID NO: 1764068 - RNA, 19 nt, Homo sapiens
  misc_RNA (1)...(19): siRNA sense strand
gaacuucaggacuuacagu

SEQ ID NO: 1764069 - RNA, 19 nt, Homo sapiens
  misc_RNA (1)...(19): siRNA sense strand
caguuuggaugaauuagca

SEQ ID NO: 1764070 - RNA, 19 nt, Homo sapiens
  misc_RNA (1)...(19): siRNA sense strand
aaaggaaauucaguuugga

SEQ ID NO: 1764071 - RNA, 19 nt, Homo sapiens
  misc_RNA (1)...(19): siRNA sense strand
gcuagagaaugagcuccaa

SEQ ID NO: 1764072 - RNA, 19 nt, Homo sapiens
  misc_RNA (1)...(19): siRNA sense strand
agccaagaacaaagaauua

SEQ ID NO: 1764073 - RNA, 19 nt, Homo sapiens
  misc_RNA (1)...(19): siRNA sense strand
caugaagccguuaugaaug

SEQ ID NO: 1764074 - RNA, 19 nt, Homo sapiens
  misc_RNA (1)...(19): siRNA sense strand
gcugaaggccccucaaauu

SEQ ID NO: 1764075 - RNA, 19 nt, Homo sapiens
  misc_RNA (1)...(19): siRNA sense strand
cugacaauuuggauccuaa

SEQ ID NO: 1764076 - RNA, 19 nt, Homo sapiens
  misc_RNA (1)...(19): siRNA sense strand
augaugugcuagagaauga

SEQ ID NO: 1764077 - RNA, 19 nt, Homo sapiens
  misc_RNA (1)...(19): siRNA sense strand
gaugcaagcacagaaggaa

SEQ ID NO: 1764078 - RNA, 19 nt, Homo sapiens
  misc_RNA (1)...(19): siRNA sense strand
gcaggcccaucauacauuu

SEQ ID NO: 1764079 - RNA, 19 nt, Homo sapiens
  misc_RNA (1)...(19): siRNA sense strand
gugaaaacaugcaccguua

SEQ ID NO: 1764080 - RNA, 19 nt, Homo sapiens
  misc_RNA (1)...(19): siRNA sense strand
gugcacgacugcgucaaua

SEQ ID NO: 1764081 - RNA, 19 nt, Homo sapiens
  misc_RNA (1)...(19): siRNA sense strand
gaccguuacuaucgugaaa

SEQ ID NO: 1764082 - RNA, 19 nt, Homo sapiens
  misc_RNA (1)...(19): siRNA sense strand
gaccugggccucugcaaga

SEQ ID NO: 1764083 - RNA, 19 nt, Homo sapiens
  misc_RNA (1)...(19): siRNA sense strand
gaucgagcaugguccucuu

SEQ ID NO: 1764084 - RNA, 19 nt, Homo sapiens
  misc_RNA (1)...(19): siRNA sense strand
ucaccgagaccgacguuaa

SEQ ID NO: 1764085 - RNA, 19 nt, Homo sapiens
  misc_RNA (1)...(19): siRNA sense strand
ccugaucucuuuccucauc

SEQ ID NO: 1764086 - RNA, 19 nt, Homo sapiens
  misc_RNA (1)...(19): siRNA sense strand
gcacgacugcgucaauauc

SEQ ID NO: 1764087 - RNA, 19 nt, Homo sapiens
  misc_RNA (1)...(19): siRNA sense strand
aaaccaacaugaagcacau

SEQ ID NO: 1764088 - RNA, 19 nt, Homo sapiens
  misc_RNA (1)...(19): siRNA sense strand
agauguguaucacccagua

SEQ ID NO: 1764089 - RNA, 19 nt, Homo sapiens
  misc_RNA (1)...(19): siRNA sense strand
gagcaggcccaucauacau

SEQ ID NO: 1764090 - RNA, 19 nt, Homo sapiens
  misc_RNA (1)...(19): siRNA sense strand
gaugauggagcgcgugguu

SEQ ID NO: 1764091 - RNA, 19 nt, Homo sapiens
  misc_RNA (1)...(19): siRNA sense strand
ggaugcugguucucuuugu

SEQ ID NO: 1764092 - RNA, 19 nt, Homo sapiens
  misc_RNA (1)...(19): siRNA sense strand
gaugcugguucucuuugug

SEQ ID NO: 1764093 - RNA, 19 nt, Homo sapiens
  misc_RNA (1)...(19): siRNA sense strand
gcuggaugcugguucucuu

SEQ ID NO: 1764094 - RNA, 19 nt, Homo sapiens
  misc_RNA (1)...(19): siRNA sense strand
gccaugagcaggcccauca

SEQ ID NO: 1764095 - RNA, 19 nt, Homo sapiens
  misc_RNA (1)...(19): siRNA sense strand
agaccgacguuaagaugau

SEQ ID NO: 1764096 - RNA, 19 nt, Homo sapiens
  misc_RNA (1)...(19): siRNA sense strand
gcgucaauaucacaaucaa

SEQ ID NO: 1764097 - RNA, 19 nt, Homo sapiens
  misc_RNA (1)...(19): siRNA sense strand
acaggcccauggaugagua

SEQ ID NO: 1764098 - RNA, 19 nt, Homo sapiens
  misc_RNA (1)...(19): siRNA sense strand
gagaccgacguuaagauga

SEQ ID NO: 1764099 - RNA, 19 nt, Homo sapiens
  misc_RNA (1)...(19): siRNA sense strand
cgagaccgacguuaagaug

SEQ ID NO: 1764100 - RNA, 19 nt, Homo sapiens
  misc_RNA (1)...(19): siRNA sense strand
cagcaaccagaacaacuuu

SEQ ID NO: 1764101 - RNA, 19 nt, Homo sapiens
  misc_RNA (1)...(19): siRNA sense strand
gugacuaugaggaccguua

SEQ ID NO: 1764102 - RNA, 19 nt, Homo sapiens
  misc_RNA (1)...(19): siRNA sense strand
gcgcgugguugagcagaug

SEQ ID NO: 1764103 - RNA, 19 nt, Homo sapiens
  misc_RNA (1)...(19): siRNA sense strand
ugauggagcgcgugguuga

SEQ ID NO: 1764104 - RNA, 19 nt, Homo sapiens
  misc_RNA (1)...(19): siRNA sense strand
ucauacauuucggcaguga

SEQ ID NO: 1764105 - RNA, 19 nt, Homo sapiens
  misc_RNA (1)...(19): siRNA sense strand
gaccgacguuaagaugaug

SEQ ID NO: 1764106 - RNA, 19 nt, Homo sapiens
  misc_RNA (1)...(19): siRNA sense strand
gaguacagcaaccagaaca

SEQ ID NO: 1764107 - RNA, 19 nt, Homo sapiens
  misc_RNA (1)...(19): siRNA sense strand
ggaccguuacuaucgugaa

SEQ ID NO: 1764108 - RNA, 19 nt, Homo sapiens
  misc_RNA (1)...(19): siRNA sense strand
cuaugaggaccguuacuau

SEQ ID NO: 1764109 - RNA, 19 nt, Homo sapiens
  misc_RNA (1)...(19): siRNA sense strand
guugagcagauguguauca

SEQ ID NO: 1764110 - RNA, 19 nt, Homo sapiens
  misc_RNA (1)...(19): siRNA sense strand
acuacaggcccauggauga

SEQ ID NO: 1764111 - RNA, 19 nt, Homo sapiens
  misc_RNA (1)...(19): siRNA sense strand
uuccucaucuuccugauag

SEQ ID NO: 1764112 - RNA, 19 nt, Homo sapiens
  misc_RNA (1)...(19): siRNA sense strand
ugguugagcagauguguau

SEQ ID NO: 1764113 - RNA, 19 nt, Homo sapiens
  misc_RNA (1)...(19): siRNA sense strand
uaugaggaccguuacuauc

SEQ ID NO: 1764114 - RNA, 19 nt, Homo sapiens
  misc_RNA (1)...(19): siRNA sense strand
ugagcaggcccaucauaca

SEQ ID NO: 1764115 - RNA, 19 nt, Homo sapiens
  misc_RNA (1)...(19): siRNA sense strand
acagcaaccagaacaacuu

SEQ ID NO: 1764116 - RNA, 19 nt, Homo sapiens
  misc_RNA (1)...(19): siRNA sense strand
guacuacaggcccauggau

SEQ ID NO: 1764117 - RNA, 19 nt, Homo sapiens
  misc_RNA (1)...(19): siRNA sense strand
gcaggcccaucauacauuu

SEQ ID NO: 1764118 - RNA, 19 nt, Homo sapiens
  misc_RNA (1)...(19): siRNA sense strand
gugaaaacaugcaccguua

SEQ ID NO: 1764119 - RNA, 19 nt, Homo sapiens
  misc_RNA (1)...(19): siRNA sense strand
gugcacgacugcgucaaua

SEQ ID NO: 1764120 - RNA, 19 nt, Homo sapiens
  misc_RNA (1)...(19): siRNA sense strand
gaccguuacuaucgugaaa

SEQ ID NO: 1764121 - RNA, 19 nt, Homo sapiens
  misc_RNA (1)...(19): siRNA sense strand
gaccugggccucugcaaga

SEQ ID NO: 1764122 - RNA, 19 nt, Homo sapiens
  misc_RNA (1)...(19): siRNA sense strand
gaucgagcaugguccucuu

SEQ ID NO: 1764123 - RNA, 19 nt, Homo sapiens
  misc_RNA (1)...(19): siRNA sense strand
ucaccgagaccgacguuaa

SEQ ID NO: 1764124 - RNA, 19 nt, Homo sapiens
  misc_RNA (1)...(19): siRNA sense strand
ccugaucucuuuccucauc

SEQ ID NO: 1764125 - RNA, 19 nt, Homo sapiens
  misc_RNA (1)...(19): siRNA sense strand
gcacgacugcgucaauauc

SEQ ID NO: 1764126 - RNA, 19 nt, Homo sapiens
  misc_RNA (1)...(19): siRNA sense strand
aaaccaacaugaagcacau

SEQ ID NO: 1764127 - RNA, 19 nt, Homo sapiens
  misc_RNA (1)...(19): siRNA sense strand
agauguguaucacccagua

SEQ ID NO: 1764128 - RNA, 19 nt, Homo sapiens
  misc_RNA (1)...(19): siRNA sense strand
gagcaggcccaucauacau

SEQ ID NO: 1764129 - RNA, 19 nt, Homo sapiens
  misc_RNA (1)...(19): siRNA sense strand
gaugauggagcgcgugguu

SEQ ID NO: 1764130 - RNA, 19 nt, Homo sapiens
  misc_RNA (1)...(19): siRNA sense strand
ggaugcugguucucuuugu

SEQ ID NO: 1764131 - RNA, 19 nt, Homo sapiens
  misc_RNA (1)...(19): siRNA sense strand
gaugcugguucucuuugug

SEQ ID NO: 1764132 - RNA, 19 nt, Homo sapiens
  misc_RNA (1)...(19): siRNA sense strand
gcuggaugcugguucucuu

SEQ ID NO: 1764133 - RNA, 19 nt, Homo sapiens
  misc_RNA (1)...(19): siRNA sense strand
gccaugagcaggcccauca

SEQ ID NO: 1764134 - RNA, 19 nt, Homo sapiens
  misc_RNA (1)...(19): siRNA sense strand
agaccgacguuaagaugau

SEQ ID NO: 1764135 - RNA, 19 nt, Homo sapiens
  misc_RNA (1)...(19): siRNA sense strand
gcgucaauaucacaaucaa

SEQ ID NO: 1764136 - RNA, 19 nt, Homo sapiens
  misc_RNA (1)...(19): siRNA sense strand
acaggcccauggaugagua

SEQ ID NO: 1764137 - RNA, 19 nt, Homo sapiens
  misc_RNA (1)...(19): siRNA sense strand
gagaccgacguuaagauga

SEQ ID NO: 1764138 - RNA, 19 nt, Homo sapiens
  misc_RNA (1)...(19): siRNA sense strand
cgagaccgacguuaagaug

SEQ ID NO: 1764139 - RNA, 19 nt, Homo sapiens
  misc_RNA (1)...(19): siRNA sense strand
cagcaaccagaacaacuuu

SEQ ID NO: 1764140 - RNA, 19 nt, Homo sapiens
  misc_RNA (1)...(19): siRNA sense strand
gugacuaugaggaccguua

SEQ ID NO: 1764141 - RNA, 19 nt, Homo sapiens
  misc_RNA (1)...(19): siRNA sense strand
gcgcgugguugagcagaug

SEQ ID NO: 1764142 - RNA, 19 nt, Homo sapiens
  misc_RNA (1)...(19): siRNA sense strand
ugauggagcgcgugguuga

SEQ ID NO: 1764143 - RNA, 19 nt, Homo sapiens
  misc_RNA (1)...(19): siRNA sense strand
ucauacauuucggcaguga

SEQ ID NO: 1764144 - RNA, 19 nt, Homo sapiens
  misc_RNA (1)...(19): siRNA sense strand
gaccgacguuaagaugaug

SEQ ID NO: 1764145 - RNA, 19 nt, Homo sapiens
  misc_RNA (1)...(19): siRNA sense strand
gaguacagcaaccagaaca

SEQ ID NO: 1764146 - RNA, 19 nt, Homo sapiens
  misc_RNA (1)...(19): siRNA sense strand
ggaccguuacuaucgugaa

SEQ ID NO: 1764147 - RNA, 19 nt, Homo sapiens
  misc_RNA (1)...(19): siRNA sense strand
cuaugaggaccguuacuau

SEQ ID NO: 1764148 - RNA, 19 nt, Homo sapiens
  misc_RNA (1)...(19): siRNA sense strand
guugagcagauguguauca

SEQ ID NO: 1764149 - RNA, 19 nt, Homo sapiens
  misc_RNA (1)...(19): siRNA sense strand
acuacaggcccauggauga

SEQ ID NO: 1764150 - RNA, 19 nt, Homo sapiens
  misc_RNA (1)...(19): siRNA sense strand
uuccucaucuuccugauag

SEQ ID NO: 1764151 - RNA, 19 nt, Homo sapiens
  misc_RNA (1)...(19): siRNA sense strand
ugguugagcagauguguau

SEQ ID NO: 1764152 - RNA, 19 nt, Homo sapiens
  misc_RNA (1)...(19): siRNA sense strand
uaugaggaccguuacuauc

SEQ ID NO: 1764153 - RNA, 19 nt, Homo sapiens
  misc_RNA (1)...(19): siRNA sense strand
ugagcaggcccaucauaca

SEQ ID NO: 1764154 - RNA, 19 nt, Homo sapiens
  misc_RNA (1)...(19): siRNA sense strand
acagcaaccagaacaacuu

SEQ ID NO: 1764155 - RNA, 19 nt, Homo sapiens
  misc_RNA (1)...(19): siRNA sense strand
guacuacaggcccauggau

SEQ ID NO: 1764156 - RNA, 19 nt, Homo sapiens
  misc_RNA (1)...(19): siRNA sense strand
gauaaugggucaccaauuu

SEQ ID NO: 1764157 - RNA, 19 nt, Homo sapiens
  misc_RNA (1)...(19): siRNA sense strand
ccaaagcccuagcaaauuu

SEQ ID NO: 1764158 - RNA, 19 nt, Homo sapiens
  misc_RNA (1)...(19): siRNA sense strand
gcagcuggauaaagaguua

SEQ ID NO: 1764159 - RNA, 19 nt, Homo sapiens
  misc_RNA (1)...(19): siRNA sense strand
gagaaugacugcugaccaa

SEQ ID NO: 1764160 - RNA, 19 nt, Homo sapiens
  misc_RNA (1)...(19): siRNA sense strand
ccaccuaguuugcaaauug

SEQ ID NO: 1764161 - RNA, 19 nt, Homo sapiens
  misc_RNA (1)...(19): siRNA sense strand
uggaaggacucaaagauaa

SEQ ID NO: 1764162 - RNA, 19 nt, Homo sapiens
  misc_RNA (1)...(19): siRNA sense strand
ggaauuuacucaguuucua

SEQ ID NO: 1764163 - RNA, 19 nt, Homo sapiens
  misc_RNA (1)...(19): siRNA sense strand
gaaaguggcuucacauacc

SEQ ID NO: 1764164 - RNA, 19 nt, Homo sapiens
  misc_RNA (1)...(19): siRNA sense strand
gaaaauggaccaacaguuu

SEQ ID NO: 1764165 - RNA, 19 nt, Homo sapiens
  misc_RNA (1)...(19): siRNA sense strand
caccuuaccucaauaucua

SEQ ID NO: 1764166 - RNA, 19 nt, Homo sapiens
  misc_RNA (1)...(19): siRNA sense strand
ccaugcagcuggauaaaga

SEQ ID NO: 1764167 - RNA, 19 nt, Homo sapiens
  misc_RNA (1)...(19): siRNA sense strand
ggacagcaccagacuauuc

SEQ ID NO: 1764168 - RNA, 19 nt, Homo sapiens
  misc_RNA (1)...(19): siRNA sense strand
gaaggaucauuccaaagga

SEQ ID NO: 1764169 - RNA, 19 nt, Homo sapiens
  misc_RNA (1)...(19): siRNA sense strand
guagaaauguggcagaaag

SEQ ID NO: 1764170 - RNA, 19 nt, Homo sapiens
  misc_RNA (1)...(19): siRNA sense strand
gagcuuaauucccgagaug

SEQ ID NO: 1764171 - RNA, 19 nt, Homo sapiens
  misc_RNA (1)...(19): siRNA sense strand
cgguagagcuugcaaguau

SEQ ID NO: 1764172 - RNA, 19 nt, Homo sapiens
  misc_RNA (1)...(19): siRNA sense strand
ggagaaguaccacaucauu

SEQ ID NO: 1764173 - RNA, 19 nt, Homo sapiens
  misc_RNA (1)...(19): siRNA sense strand
ggaacccucuggaacaaga

SEQ ID NO: 1764174 - RNA, 19 nt, Homo sapiens
  misc_RNA (1)...(19): siRNA sense strand
cuacagugacucagauuua

SEQ ID NO: 1764175 - RNA, 19 nt, Homo sapiens
  misc_RNA (1)...(19): siRNA sense strand
cauccugggucacugauaa

SEQ ID NO: 1764176 - RNA, 19 nt, Homo sapiens
  misc_RNA (1)...(19): siRNA sense strand
uaagggaauuuacucaguu

SEQ ID NO: 1764177 - RNA, 19 nt, Homo sapiens
  misc_RNA (1)...(19): siRNA sense strand
uagcgucucuuacuacuau

SEQ ID NO: 1764178 - RNA, 19 nt, Homo sapiens
  misc_RNA (1)...(19): siRNA sense strand
ccaaugagcaacaguuuga

SEQ ID NO: 1764179 - RNA, 19 nt, Homo sapiens
  misc_RNA (1)...(19): siRNA sense strand
ggcauuuacuucuacaauu

SEQ ID NO: 1764180 - RNA, 19 nt, Homo sapiens
  misc_RNA (1)...(19): siRNA sense strand
ggugaugacauuugccuua

SEQ ID NO: 1764181 - RNA, 19 nt, Homo sapiens
  misc_RNA (1)...(19): siRNA sense strand
uaacuccucuccgcaauau

SEQ ID NO: 1764182 - RNA, 19 nt, Homo sapiens
  misc_RNA (1)...(19): siRNA sense strand
gguguagcgucucuuacua

SEQ ID NO: 1764183 - RNA, 19 nt, Homo sapiens
  misc_RNA (1)...(19): siRNA sense strand
ggccaaagcccuagcaaau

SEQ ID NO: 1764184 - RNA, 19 nt, Homo sapiens
  misc_RNA (1)...(19): siRNA sense strand
gggcaaagcgacccaauuc

SEQ ID NO: 1764185 - RNA, 19 nt, Homo sapiens
  misc_RNA (1)...(19): siRNA sense strand
gcgagcagaugccgcagaa

SEQ ID NO: 1764186 - RNA, 19 nt, Homo sapiens
  misc_RNA (1)...(19): siRNA sense strand
gaacaggccagugaugaug

SEQ ID NO: 1764187 - RNA, 19 nt, Homo sapiens
  misc_RNA (1)...(19): siRNA sense strand
cauaagccauuguuacauc

SEQ ID NO: 1764188 - RNA, 19 nt, Homo sapiens
  misc_RNA (1)...(19): siRNA sense strand
cugggucacugauaauaua

SEQ ID NO: 1764189 - RNA, 19 nt, Homo sapiens
  misc_RNA (1)...(19): siRNA sense strand
gcauuacagucugaauuga

SEQ ID NO: 1764190 - RNA, 19 nt, Homo sapiens
  misc_RNA (1)...(19): siRNA sense strand
gcugucaccuuaccucaau

SEQ ID NO: 1764191 - RNA, 19 nt, Homo sapiens
  misc_RNA (1)...(19): siRNA sense strand
gucaucugcuucaugguua

SEQ ID NO: 1764192 - RNA, 19 nt, Homo sapiens
  misc_RNA (1)...(19): siRNA sense strand
caacugaaggagccuguaa

SEQ ID NO: 1764193 - RNA, 19 nt, Homo sapiens
  misc_RNA (1)...(19): siRNA sense strand
aaaggaagguagaaaugug

SEQ ID NO: 1764194 - RNA, 19 nt, Homo sapiens
  misc_RNA (1)...(19): siRNA sense strand
ucacccagcuuugcaaaug

SEQ ID NO: 1764195 - RNA, 19 nt, Homo sapiens
  misc_RNA (1)...(19): siRNA sense strand
gagaacaggccagugauga

SEQ ID NO: 1764196 - RNA, 19 nt, Homo sapiens
  misc_RNA (1)...(19): siRNA sense strand
gcagcacacuuucuuucug

SEQ ID NO: 1764197 - RNA, 19 nt, Homo sapiens
  misc_RNA (1)...(19): siRNA sense strand
gagaaguaccacaucauug

SEQ ID NO: 1764198 - RNA, 19 nt, Homo sapiens
  misc_RNA (1)...(19): siRNA sense strand
gcagacaauucccguggau

SEQ ID NO: 1764199 - RNA, 19 nt, Homo sapiens
  misc_RNA (1)...(19): siRNA sense strand
agaaguaccacaucauuga

SEQ ID NO: 1764200 - RNA, 19 nt, Homo sapiens
  misc_RNA (1)...(19): siRNA sense strand
acaagaaaguggcuucaca

SEQ ID NO: 1764201 - RNA, 19 nt, Homo sapiens
  misc_RNA (1)...(19): siRNA sense strand
ccauuaaggcauucacuaa

SEQ ID NO: 1764202 - RNA, 19 nt, Homo sapiens
  misc_RNA (1)...(19): siRNA sense strand
agauggagcuugggaaaga

SEQ ID NO: 1764203 - RNA, 19 nt, Homo sapiens
  misc_RNA (1)...(19): siRNA sense strand
uacagugacucagauuuaa

SEQ ID NO: 1764204 - RNA, 19 nt, Homo sapiens
  misc_RNA (1)...(19): siRNA sense strand
uuaauagccuguuacuuag

SEQ ID NO: 1764205 - RNA, 19 nt, Homo sapiens
  misc_RNA (1)...(19): siRNA sense strand
cgacccaauuccauacaaa

SEQ ID NO: 1764206 - RNA, 19 nt, Homo sapiens
  misc_RNA (1)...(19): siRNA sense strand
caacaccaaaguacacaaa

SEQ ID NO: 1764207 - RNA, 19 nt, Homo sapiens
  misc_RNA (1)...(19): siRNA sense strand
gaacguccaacaccaaagu

SEQ ID NO: 1764208 - RNA, 19 nt, Homo sapiens
  misc_RNA (1)...(19): siRNA sense strand
gagcaggagcaagccauua

SEQ ID NO: 1764209 - RNA, 19 nt, Homo sapiens
  misc_RNA (1)...(19): siRNA sense strand
aaaaguagcuauccauugu

SEQ ID NO: 1764210 - RNA, 19 nt, Homo sapiens
  misc_RNA (1)...(19): siRNA sense strand
caaagcccuagcaaauuua

SEQ ID NO: 1764211 - RNA, 19 nt, Homo sapiens
  misc_RNA (1)...(19): siRNA sense strand
gacagugccugcccagauc

SEQ ID NO: 1764212 - RNA, 19 nt, Homo sapiens
  misc_RNA (1)...(19): siRNA sense strand
ggccagugaugaugaagga

SEQ ID NO: 1764213 - RNA, 19 nt, Homo sapiens
  misc_RNA (1)...(19): siRNA sense strand
gaccaagcaauuauauuug

SEQ ID NO: 1764214 - RNA, 19 nt, Homo sapiens
  misc_RNA (1)...(19): siRNA sense strand
gcggagaacaggccaguga

SEQ ID NO: 1764215 - RNA, 19 nt, Homo sapiens
  misc_RNA (1)...(19): siRNA sense strand
aagcacaguucuugguuga

SEQ ID NO: 1764216 - RNA, 19 nt, Homo sapiens
  misc_RNA (1)...(19): siRNA sense strand
uugcaaauguccauaagga

SEQ ID NO: 1764217 - RNA, 19 nt, Homo sapiens
  misc_RNA (1)...(19): siRNA sense strand
cauggaggcuggcauuuac

SEQ ID NO: 1764218 - RNA, 19 nt, Homo sapiens
  misc_RNA (1)...(19): siRNA sense strand
ggaaggacucaaagauaau

SEQ ID NO: 1764219 - RNA, 19 nt, Homo sapiens
  misc_RNA (1)...(19): siRNA sense strand
gcaaagcgacccaauucca

SEQ ID NO: 1764220 - RNA, 19 nt, Homo sapiens
  misc_RNA (1)...(19): siRNA sense strand
gacauuugccuuacaggaa

SEQ ID NO: 1764221 - RNA, 19 nt, Homo sapiens
  misc_RNA (1)...(19): siRNA sense strand
ggaaaaggcggaauguuga

SEQ ID NO: 1764222 - RNA, 19 nt, Homo sapiens
  misc_RNA (1)...(19): siRNA sense strand
uauauucucuugcugugau

SEQ ID NO: 1764223 - RNA, 19 nt, Homo sapiens
  misc_RNA (1)...(19): siRNA sense strand
gaaggacucaaagauaaug

SEQ ID NO: 1764224 - RNA, 19 nt, Homo sapiens
  misc_RNA (1)...(19): siRNA sense strand
ucucucugcugaaauagaa

SEQ ID NO: 1764225 - RNA, 19 nt, Homo sapiens
  misc_RNA (1)...(19): siRNA sense strand
uggugaaggugaugacauu

SEQ ID NO: 1764226 - RNA, 19 nt, Homo sapiens
  misc_RNA (1)...(19): siRNA sense strand
uagugaaccugcagacaau

SEQ ID NO: 1764227 - RNA, 19 nt, Homo sapiens
  misc_RNA (1)...(19): siRNA sense strand
gccaaagcccuagcaaauu

SEQ ID NO: 1764228 - RNA, 19 nt, Homo sapiens
  misc_RNA (1)...(19): siRNA sense strand
caguaaagaucugucugaa

SEQ ID NO: 1764229 - RNA, 19 nt, Homo sapiens
  misc_RNA (1)...(19): siRNA sense strand
guagagcuugcaaguauga

SEQ ID NO: 1764230 - RNA, 19 nt, Homo sapiens
  misc_RNA (1)...(19): siRNA sense strand
caaauugcugcuggacuua

SEQ ID NO: 1764231 - RNA, 19 nt, Homo sapiens
  misc_RNA (1)...(19): siRNA sense strand
gaacaagaaaguggcuuca

SEQ ID NO: 1764232 - RNA, 19 nt, Homo sapiens
  misc_RNA (1)...(19): siRNA sense strand
gcagcuugauguggucuug

SEQ ID NO: 1764233 - RNA, 19 nt, Homo sapiens
  misc_RNA (1)...(19): siRNA sense strand
gcagaaagagcuuaauucc

SEQ ID NO: 1764234 - RNA, 19 nt, Homo sapiens
  misc_RNA (1)...(19): siRNA sense strand
caaagcacaguucuugguu

SEQ ID NO: 1764235 - RNA, 19 nt, Homo sapiens
  misc_RNA (1)...(19): siRNA sense strand
cagaagcucauaagccauu

SEQ ID NO: 1764236 - RNA, 19 nt, Homo sapiens
  misc_RNA (1)...(19): siRNA sense strand
uggucucucugcugaaaua

SEQ ID NO: 1764237 - RNA, 19 nt, Homo sapiens
  misc_RNA (1)...(19): siRNA sense strand
ucauggaggcuggcauuua

SEQ ID NO: 1764238 - RNA, 19 nt, Homo sapiens
  misc_RNA (1)...(19): siRNA sense strand
gaaaaguagcuauccauug

SEQ ID NO: 1764239 - RNA, 19 nt, Homo sapiens
  misc_RNA (1)...(19): siRNA sense strand
ggaccaacaguuuacaaca

SEQ ID NO: 1764240 - RNA, 19 nt, Homo sapiens
  misc_RNA (1)...(19): siRNA sense strand
guuugacccucuuuggaaa

SEQ ID NO: 1764241 - RNA, 19 nt, Homo sapiens
  misc_RNA (1)...(19): siRNA sense strand
aaagcgacccaauuccaua

SEQ ID NO: 1764242 - RNA, 19 nt, Homo sapiens
  misc_RNA (1)...(19): siRNA sense strand
ccaagcaauuauauuugug

SEQ ID NO: 1764243 - RNA, 19 nt, Homo sapiens
  misc_RNA (1)...(19): siRNA sense strand
gaugacauuugccuuacag

SEQ ID NO: 1764244 - RNA, 19 nt, Homo sapiens
  misc_RNA (1)...(19): siRNA sense strand
gaccaacaguuuacaacac

SEQ ID NO: 1764245 - RNA, 19 nt, Homo sapiens
  misc_RNA (1)...(19): siRNA sense strand
gcucauaagccauuguuac

SEQ ID NO: 1764246 - RNA, 19 nt, Homo sapiens
  misc_RNA (1)...(19): siRNA sense strand
gcaacaguuugacccucuu

SEQ ID NO: 1764247 - RNA, 19 nt, Homo sapiens
  misc_RNA (1)...(19): siRNA sense strand
ggagaacaggccagugaug

SEQ ID NO: 1764248 - RNA, 19 nt, Homo sapiens
  misc_RNA (1)...(19): siRNA sense strand
aagggaauuuacucaguuu

SEQ ID NO: 1764249 - RNA, 19 nt, Homo sapiens
  misc_RNA (1)...(19): siRNA sense strand
aauagccuguuacuuaguu

SEQ ID NO: 1764250 - RNA, 19 nt, Homo sapiens
  misc_RNA (1)...(19): siRNA sense strand
aagaaaguggcuucacaua

SEQ ID NO: 1764251 - RNA, 19 nt, Homo sapiens
  misc_RNA (1)...(19): siRNA sense strand
uuacaacacccugaagaaa

SEQ ID NO: 1764252 - RNA, 19 nt, Homo sapiens
  misc_RNA (1)...(19): siRNA sense strand
ggucuuggguggagcaacu

SEQ ID NO: 1764253 - RNA, 19 nt, Homo sapiens
  misc_RNA (1)...(19): siRNA sense strand
gauggagcuugggaaagaa

SEQ ID NO: 1764254 - RNA, 19 nt, Homo sapiens
  misc_RNA (1)...(19): siRNA sense strand
ggucacugauaauauacug

SEQ ID NO: 1764255 - RNA, 19 nt, Homo sapiens
  misc_RNA (1)...(19): siRNA sense strand
cuggaaggacucaaagaua

SEQ ID NO: 1764256 - RNA, 19 nt, Homo sapiens
  misc_RNA (1)...(19): siRNA sense strand
gauaaugggucaccaauuu

SEQ ID NO: 1764257 - RNA, 19 nt, Homo sapiens
  misc_RNA (1)...(19): siRNA sense strand
ccaaagcccuagcaaauuu

SEQ ID NO: 1764258 - RNA, 19 nt, Homo sapiens
  misc_RNA (1)...(19): siRNA sense strand
gcagcuggauaaagaguua

SEQ ID NO: 1764259 - RNA, 19 nt, Homo sapiens
  misc_RNA (1)...(19): siRNA sense strand
gagaaugacugcugaccaa

SEQ ID NO: 1764260 - RNA, 19 nt, Homo sapiens
  misc_RNA (1)...(19): siRNA sense strand
ccaccuaguuugcaaauug

SEQ ID NO: 1764261 - RNA, 19 nt, Homo sapiens
  misc_RNA (1)...(19): siRNA sense strand
uggaaggacucaaagauaa

SEQ ID NO: 1764262 - RNA, 19 nt, Homo sapiens
  misc_RNA (1)...(19): siRNA sense strand
ggaauuuacucaguuucua

SEQ ID NO: 1764263 - RNA, 19 nt, Homo sapiens
  misc_RNA (1)...(19): siRNA sense strand
gaaaguggcuucacauacc

SEQ ID NO: 1764264 - RNA, 19 nt, Homo sapiens
  misc_RNA (1)...(19): siRNA sense strand
gaaaauggaccaacaguuu

SEQ ID NO: 1764265 - RNA, 19 nt, Homo sapiens
  misc_RNA (1)...(19): siRNA sense strand
caccuuaccucaauaucua

SEQ ID NO: 1764266 - RNA, 19 nt, Homo sapiens
  misc_RNA (1)...(19): siRNA sense strand
ccaugcagcuggauaaaga

SEQ ID NO: 1764267 - RNA, 19 nt, Homo sapiens
  misc_RNA (1)...(19): siRNA sense strand
ggacagcaccagacuauuc

SEQ ID NO: 1764268 - RNA, 19 nt, Homo sapiens
  misc_RNA (1)...(19): siRNA sense strand
gaaggaucauuccaaagga

SEQ ID NO: 1764269 - RNA, 19 nt, Homo sapiens
  misc_RNA (1)...(19): siRNA sense strand
guagaaauguggcagaaag

SEQ ID NO: 1764270 - RNA, 19 nt, Homo sapiens
  misc_RNA (1)...(19): siRNA sense strand
gagcuuaauucccgagaug

SEQ ID NO: 1764271 - RNA, 19 nt, Homo sapiens
  misc_RNA (1)...(19): siRNA sense strand
cgguagagcuugcaaguau

SEQ ID NO: 1764272 - RNA, 19 nt, Homo sapiens
  misc_RNA (1)...(19): siRNA sense strand
ggagaaguaccacaucauu

SEQ ID NO: 1764273 - RNA, 19 nt, Homo sapiens
  misc_RNA (1)...(19): siRNA sense strand
ggaacccucuggaacaaga

SEQ ID NO: 1764274 - RNA, 19 nt, Homo sapiens
  misc_RNA (1)...(19): siRNA sense strand
cuacagugacucagauuua

SEQ ID NO: 1764275 - RNA, 19 nt, Homo sapiens
  misc_RNA (1)...(19): siRNA sense strand
cauccugggucacugauaa

SEQ ID NO: 1764276 - RNA, 19 nt, Homo sapiens
  misc_RNA (1)...(19): siRNA sense strand
uaagggaauuuacucaguu

SEQ ID NO: 1764277 - RNA, 19 nt, Homo sapiens
  misc_RNA (1)...(19): siRNA sense strand
uagcgucucuuacuacuau

SEQ ID NO: 1764278 - RNA, 19 nt, Homo sapiens
  misc_RNA (1)...(19): siRNA sense strand
ccaaugagcaacaguuuga

SEQ ID NO: 1764279 - RNA, 19 nt, Homo sapiens
  misc_RNA (1)...(19): siRNA sense strand
ggcauuuacuucuacaauu

SEQ ID NO: 1764280 - RNA, 19 nt, Homo sapiens
  misc_RNA (1)...(19): siRNA sense strand
ggugaugacauuugccuua

SEQ ID NO: 1764281 - RNA, 19 nt, Homo sapiens
  misc_RNA (1)...(19): siRNA sense strand
uaacuccucuccgcaauau

SEQ ID NO: 1764282 - RNA, 19 nt, Homo sapiens
  misc_RNA (1)...(19): siRNA sense strand
gguguagcgucucuuacua

SEQ ID NO: 1764283 - RNA, 19 nt, Homo sapiens
  misc_RNA (1)...(19): siRNA sense strand
ggccaaagcccuagcaaau

SEQ ID NO: 1764284 - RNA, 19 nt, Homo sapiens
  misc_RNA (1)...(19): siRNA sense strand
gggcaaagcgacccaauuc

SEQ ID NO: 1764285 - RNA, 19 nt, Homo sapiens
  misc_RNA (1)...(19): siRNA sense strand
gcgagcagaugccgcagaa

SEQ ID NO: 1764286 - RNA, 19 nt, Homo sapiens
  misc_RNA (1)...(19): siRNA sense strand
gaacaggccagugaugaug

SEQ ID NO: 1764287 - RNA, 19 nt, Homo sapiens
  misc_RNA (1)...(19): siRNA sense strand
cauaagccauuguuacauc

SEQ ID NO: 1764288 - RNA, 19 nt, Homo sapiens
  misc_RNA (1)...(19): siRNA sense strand
cugggucacugauaauaua

SEQ ID NO: 1764289 - RNA, 19 nt, Homo sapiens
  misc_RNA (1)...(19): siRNA sense strand
gcauuacagucugaauuga

SEQ ID NO: 1764290 - RNA, 19 nt, Homo sapiens
  misc_RNA (1)...(19): siRNA sense strand
gcugucaccuuaccucaau

SEQ ID NO: 1764291 - RNA, 19 nt, Homo sapiens
  misc_RNA (1)...(19): siRNA sense strand
gucaucugcuucaugguua

SEQ ID NO: 1764292 - RNA, 19 nt, Homo sapiens
  misc_RNA (1)...(19): siRNA sense strand
caacugaaggagccuguaa

SEQ ID NO: 1764293 - RNA, 19 nt, Homo sapiens
  misc_RNA (1)...(19): siRNA sense strand
aaaggaagguagaaaugug

SEQ ID NO: 1764294 - RNA, 19 nt, Homo sapiens
  misc_RNA (1)...(19): siRNA sense strand
ucacccagcuuugcaaaug

SEQ ID NO: 1764295 - RNA, 19 nt, Homo sapiens
  misc_RNA (1)...(19): siRNA sense strand
gagaacaggccagugauga

SEQ ID NO: 1764296 - RNA, 19 nt, Homo sapiens
  misc_RNA (1)...(19): siRNA sense strand
gcagcacacuuucuuucug

SEQ ID NO: 1764297 - RNA, 19 nt, Homo sapiens
  misc_RNA (1)...(19): siRNA sense strand
gagaaguaccacaucauug

SEQ ID NO: 1764298 - RNA, 19 nt, Homo sapiens
  misc_RNA (1)...(19): siRNA sense strand
gcagacaauucccguggau

SEQ ID NO: 1764299 - RNA, 19 nt, Homo sapiens
  misc_RNA (1)...(19): siRNA sense strand
agaaguaccacaucauuga

SEQ ID NO: 1764300 - RNA, 19 nt, Homo sapiens
  misc_RNA (1)...(19): siRNA sense strand
acaagaaaguggcuucaca

SEQ ID NO: 1764301 - RNA, 19 nt, Homo sapiens
  misc_RNA (1)...(19): siRNA sense strand
ccauuaaggcauucacuaa

SEQ ID NO: 1764302 - RNA, 19 nt, Homo sapiens
  misc_RNA (1)...(19): siRNA sense strand
agauggagcuugggaaaga

SEQ ID NO: 1764303 - RNA, 19 nt, Homo sapiens
  misc_RNA (1)...(19): siRNA sense strand
uacagugacucagauuuaa

SEQ ID NO: 1764304 - RNA, 19 nt, Homo sapiens
  misc_RNA (1)...(19): siRNA sense strand
uuaauagccuguuacuuag

SEQ ID NO: 1764305 - RNA, 19 nt, Homo sapiens
  misc_RNA (1)...(19): siRNA sense strand
cgacccaauuccauacaaa

SEQ ID NO: 1764306 - RNA, 19 nt, Homo sapiens
  misc_RNA (1)...(19): siRNA sense strand
caacaccaaaguacacaaa

SEQ ID NO: 1764307 - RNA, 19 nt, Homo sapiens
  misc_RNA (1)...(19): siRNA sense strand
gaacguccaacaccaaagu

SEQ ID NO: 1764308 - RNA, 19 nt, Homo sapiens
  misc_RNA (1)...(19): siRNA sense strand
gagcaggagcaagccauua

SEQ ID NO: 1764309 - RNA, 19 nt, Homo sapiens
  misc_RNA (1)...(19): siRNA sense strand
aaaaguagcuauccauugu

SEQ ID NO: 1764310 - RNA, 19 nt, Homo sapiens
  misc_RNA (1)...(19): siRNA sense strand
caaagcccuagcaaauuua

SEQ ID NO: 1764311 - RNA, 19 nt, Homo sapiens
  misc_RNA (1)...(19): siRNA sense strand
gacagugccugcccagauc

SEQ ID NO: 1764312 - RNA, 19 nt, Homo sapiens
  misc_RNA (1)...(19): siRNA sense strand
ggccagugaugaugaagga

SEQ ID NO: 1764313 - RNA, 19 nt, Homo sapiens
  misc_RNA (1)...(19): siRNA sense strand
gaccaagcaauuauauuug

SEQ ID NO: 1764314 - RNA, 19 nt, Homo sapiens
  misc_RNA (1)...(19): siRNA sense strand
gcggagaacaggccaguga

SEQ ID NO: 1764315 - RNA, 19 nt, Homo sapiens
  misc_RNA (1)...(19): siRNA sense strand
aagcacaguucuugguuga

SEQ ID NO: 1764316 - RNA, 19 nt, Homo sapiens
  misc_RNA (1)...(19): siRNA sense strand
uugcaaauguccauaagga

SEQ ID NO: 1764317 - RNA, 19 nt, Homo sapiens
  misc_RNA (1)...(19): siRNA sense strand
cauggaggcuggcauuuac

SEQ ID NO: 1764318 - RNA, 19 nt, Homo sapiens
  misc_RNA (1)...(19): siRNA sense strand
ggaaggacucaaagauaau

SEQ ID NO: 1764319 - RNA, 19 nt, Homo sapiens
  misc_RNA (1)...(19): siRNA sense strand
gcaaagcgacccaauucca

SEQ ID NO: 1764320 - RNA, 19 nt, Homo sapiens
  misc_RNA (1)...(19): siRNA sense strand
gacauuugccuuacaggaa

SEQ ID NO: 1764321 - RNA, 19 nt, Homo sapiens
  misc_RNA (1)...(19): siRNA sense strand
ggaaaaggcggaauguuga

SEQ ID NO: 1764322 - RNA, 19 nt, Homo sapiens
  misc_RNA (1)...(19): siRNA sense strand
uauauucucuugcugugau

SEQ ID NO: 1764323 - RNA, 19 nt, Homo sapiens
  misc_RNA (1)...(19): siRNA sense strand
gaaggacucaaagauaaug

SEQ ID NO: 1764324 - RNA, 19 nt, Homo sapiens
  misc_RNA (1)...(19): siRNA sense strand
ucucucugcugaaauagaa

SEQ ID NO: 1764325 - RNA, 19 nt, Homo sapiens
  misc_RNA (1)...(19): siRNA sense strand
uggugaaggugaugacauu

SEQ ID NO: 1764326 - RNA, 19 nt, Homo sapiens
  misc_RNA (1)...(19): siRNA sense strand
uagugaaccugcagacaau

SEQ ID NO: 1764327 - RNA, 19 nt, Homo sapiens
  misc_RNA (1)...(19): siRNA sense strand
gccaaagcccuagcaaauu

SEQ ID NO: 1764328 - RNA, 19 nt, Homo sapiens
  misc_RNA (1)...(19): siRNA sense strand
caguaaagaucugucugaa

SEQ ID NO: 1764329 - RNA, 19 nt, Homo sapiens
  misc_RNA (1)...(19): siRNA sense strand
guagagcuugcaaguauga

SEQ ID NO: 1764330 - RNA, 19 nt, Homo sapiens
  misc_RNA (1)...(19): siRNA sense strand
caaauugcugcuggacuua

SEQ ID NO: 1764331 - RNA, 19 nt, Homo sapiens
  misc_RNA (1)...(19): siRNA sense strand
gaacaagaaaguggcuuca

SEQ ID NO: 1764332 - RNA, 19 nt, Homo sapiens
  misc_RNA (1)...(19): siRNA sense strand
gcagcuugauguggucuug

SEQ ID NO: 1764333 - RNA, 19 nt, Homo sapiens
  misc_RNA (1)...(19): siRNA sense strand
gcagaaagagcuuaauucc

SEQ ID NO: 1764334 - RNA, 19 nt, Homo sapiens
  misc_RNA (1)...(19): siRNA sense strand
caaagcacaguucuugguu

SEQ ID NO: 1764335 - RNA, 19 nt, Homo sapiens
  misc_RNA (1)...(19): siRNA sense strand
cagaagcucauaagccauu

SEQ ID NO: 1764336 - RNA, 19 nt, Homo sapiens
  misc_RNA (1)...(19): siRNA sense strand
uggucucucugcugaaaua

SEQ ID NO: 1764337 - RNA, 19 nt, Homo sapiens
  misc_RNA (1)...(19): siRNA sense strand
ucauggaggcuggcauuua

SEQ ID NO: 1764338 - RNA, 19 nt, Homo sapiens
  misc_RNA (1)...(19): siRNA sense strand
gaaaaguagcuauccauug

SEQ ID NO: 1764339 - RNA, 19 nt, Homo sapiens
  misc_RNA (1)...(19): siRNA sense strand
ggaccaacaguuuacaaca

SEQ ID NO: 1764340 - RNA, 19 nt, Homo sapiens
  misc_RNA (1)...(19): siRNA sense strand
guuugacccucuuuggaaa

SEQ ID NO: 1764341 - RNA, 19 nt, Homo sapiens
  misc_RNA (1)...(19): siRNA sense strand
aaagcgacccaauuccaua

SEQ ID NO: 1764342 - RNA, 19 nt, Homo sapiens
  misc_RNA (1)...(19): siRNA sense strand
ccaagcaauuauauuugug

SEQ ID NO: 1764343 - RNA, 19 nt, Homo sapiens
  misc_RNA (1)...(19): siRNA sense strand
gaugacauuugccuuacag

SEQ ID NO: 1764344 - RNA, 19 nt, Homo sapiens
  misc_RNA (1)...(19): siRNA sense strand
gaccaacaguuuacaacac

SEQ ID NO: 1764345 - RNA, 19 nt, Homo sapiens
  misc_RNA (1)...(19): siRNA sense strand
gcucauaagccauuguuac

SEQ ID NO: 1764346 - RNA, 19 nt, Homo sapiens
  misc_RNA (1)...(19): siRNA sense strand
gcaacaguuugacccucuu

SEQ ID NO: 1764347 - RNA, 19 nt, Homo sapiens
  misc_RNA (1)...(19): siRNA sense strand
ggagaacaggccagugaug

SEQ ID NO: 1764348 - RNA, 19 nt, Homo sapiens
  misc_RNA (1)...(19): siRNA sense strand
aagggaauuuacucaguuu

SEQ ID NO: 1764349 - RNA, 19 nt, Homo sapiens
  misc_RNA (1)...(19): siRNA sense strand
aauagccuguuacuuaguu

SEQ ID NO: 1764350 - RNA, 19 nt, Homo sapiens
  misc_RNA (1)...(19): siRNA sense strand
aagaaaguggcuucacaua

SEQ ID NO: 1764351 - RNA, 19 nt, Homo sapiens
  misc_RNA (1)...(19): siRNA sense strand
uuacaacacccugaagaaa

SEQ ID NO: 1764352 - RNA, 19 nt, Homo sapiens
  misc_RNA (1)...(19): siRNA sense strand
ggucuuggguggagcaacu

SEQ ID NO: 1764353 - RNA, 19 nt, Homo sapiens
  misc_RNA (1)...(19): siRNA sense strand
gauggagcuugggaaagaa

SEQ ID NO: 1764354 - RNA, 19 nt, Homo sapiens
  misc_RNA (1)...(19): siRNA sense strand
ggucacugauaauauacug

SEQ ID NO: 1764355 - RNA, 19 nt, Homo sapiens
  misc_RNA (1)...(19): siRNA sense strand
cuggaaggacucaaagaua

SEQ ID NO: 1764356 - RNA, 19 nt, Homo sapiens
  misc_RNA (1)...(19): siRNA sense strand
gaaaguggaggucugguuu

SEQ ID NO: 1764357 - RNA, 19 nt, Homo sapiens
  misc_RNA (1)...(19): siRNA sense strand
gcggagaaguggaacaaga

SEQ ID NO: 1764358 - RNA, 19 nt, Homo sapiens
  misc_RNA (1)...(19): siRNA sense strand
guggaggucugguuuaaga

SEQ ID NO: 1764359 - RNA, 19 nt, Homo sapiens
  misc_RNA (1)...(19): siRNA sense strand
gagggaagaggaagguaaa

SEQ ID NO: 1764360 - RNA, 19 nt, Homo sapiens
  misc_RNA (1)...(19): siRNA sense strand
caucagaggagucggagaa

SEQ ID NO: 1764361 - RNA, 19 nt, Homo sapiens
  misc_RNA (1)...(19): siRNA sense strand
ggagaagagggaagaggaa

SEQ ID NO: 1764362 - RNA, 19 nt, Homo sapiens
  misc_RNA (1)...(19): siRNA sense strand
cagcaucgacaacauccua

SEQ ID NO: 1764363 - RNA, 19 nt, Homo sapiens
  misc_RNA (1)...(19): siRNA sense strand
gcagaagcgguccucauca

SEQ ID NO: 1764364 - RNA, 19 nt, Homo sapiens
  misc_RNA (1)...(19): siRNA sense strand
aaaguggaggucugguuua

SEQ ID NO: 1764365 - RNA, 19 nt, Homo sapiens
  misc_RNA (1)...(19): siRNA sense strand
aaguggaggucugguuuaa

SEQ ID NO: 1764366 - RNA, 19 nt, Homo sapiens
  misc_RNA (1)...(19): siRNA sense strand
gcuacaacaacuacuucua

SEQ ID NO: 1764367 - RNA, 19 nt, Homo sapiens
  misc_RNA (1)...(19): siRNA sense strand
ggacuauggcgccuucuac

SEQ ID NO: 1764368 - RNA, 19 nt, Homo sapiens
  misc_RNA (1)...(19): siRNA sense strand
gaagagggaagaggaaggu

SEQ ID NO: 1764369 - RNA, 19 nt, Homo sapiens
  misc_RNA (1)...(19): siRNA sense strand
cagaagcgguccucaucag

SEQ ID NO: 1764370 - RNA, 19 nt, Homo sapiens
  misc_RNA (1)...(19): siRNA sense strand
cagaugcugcccuacauga

SEQ ID NO: 1764371 - RNA, 19 nt, Homo sapiens
  misc_RNA (1)...(19): siRNA sense strand
cuacaacaacuacuucuac

SEQ ID NO: 1764372 - RNA, 19 nt, Homo sapiens
  misc_RNA (1)...(19): siRNA sense strand
ggcagaagcgguccucauc

SEQ ID NO: 1764373 - RNA, 19 nt, Homo sapiens
  misc_RNA (1)...(19): siRNA sense strand
ccaaauggaggcggcagaa

SEQ ID NO: 1764374 - RNA, 19 nt, Homo sapiens
  misc_RNA (1)...(19): siRNA sense strand
agagggaagaggaagguaa

SEQ ID NO: 1764375 - RNA, 19 nt, Homo sapiens
  misc_RNA (1)...(19): siRNA sense strand
agaaaguggaggucugguu

SEQ ID NO: 1764376 - RNA, 19 nt, Homo sapiens
  misc_RNA (1)...(19): siRNA sense strand
cggagaacgcggagaagug

SEQ ID NO: 1764377 - RNA, 19 nt, Homo sapiens
  misc_RNA (1)...(19): siRNA sense strand
ggaaauacaucagagcuua

SEQ ID NO: 1764378 - RNA, 19 nt, Homo sapiens
  misc_RNA (1)...(19): siRNA sense strand
gaaaguaugugucuuaagu

SEQ ID NO: 1764379 - RNA, 19 nt, Homo sapiens
  misc_RNA (1)...(19): siRNA sense strand
ggaaaccucucauugcuaa

SEQ ID NO: 1764380 - RNA, 19 nt, Homo sapiens
  misc_RNA (1)...(19): siRNA sense strand
gcagauagcugucauugca

SEQ ID NO: 1764381 - RNA, 19 nt, Homo sapiens
  misc_RNA (1)...(19): siRNA sense strand
agagacaacugaugaaaua

SEQ ID NO: 1764382 - RNA, 19 nt, Homo sapiens
  misc_RNA (1)...(19): siRNA sense strand
gggaguauauggguuauua

SEQ ID NO: 1764383 - RNA, 19 nt, Homo sapiens
  misc_RNA (1)...(19): siRNA sense strand
ccagagagcuuccagagaa

SEQ ID NO: 1764384 - RNA, 19 nt, Homo sapiens
  misc_RNA (1)...(19): siRNA sense strand
gcaaauggaaucuuuauga

SEQ ID NO: 1764385 - RNA, 19 nt, Homo sapiens
  misc_RNA (1)...(19): siRNA sense strand
caaacaggcucuagagauu

SEQ ID NO: 1764386 - RNA, 19 nt, Homo sapiens
  misc_RNA (1)...(19): siRNA sense strand
ggucacagcuggauguuug

SEQ ID NO: 1764387 - RNA, 19 nt, Homo sapiens
  misc_RNA (1)...(19): siRNA sense strand
gaaguaaugugccaguaga

SEQ ID NO: 1764388 - RNA, 19 nt, Homo sapiens
  misc_RNA (1)...(19): siRNA sense strand
gaagguagaaaucaucaua

SEQ ID NO: 1764389 - RNA, 19 nt, Homo sapiens
  misc_RNA (1)...(19): siRNA sense strand
caaaggaucuucccaagca

SEQ ID NO: 1764390 - RNA, 19 nt, Homo sapiens
  misc_RNA (1)...(19): siRNA sense strand
gcaguguucucuuaaggua

SEQ ID NO: 1764391 - RNA, 19 nt, Homo sapiens
  misc_RNA (1)...(19): siRNA sense strand
ggaagugaauguugggaaa

SEQ ID NO: 1764392 - RNA, 19 nt, Homo sapiens
  misc_RNA (1)...(19): siRNA sense strand
cgaaguaguuuaucugaga

SEQ ID NO: 1764393 - RNA, 19 nt, Homo sapiens
  misc_RNA (1)...(19): siRNA sense strand
gaauuaccauuaacacaug

SEQ ID NO: 1764394 - RNA, 19 nt, Homo sapiens
  misc_RNA (1)...(19): siRNA sense strand
guaugugucuuaaguuuga

SEQ ID NO: 1764395 - RNA, 19 nt, Homo sapiens
  misc_RNA (1)...(19): siRNA sense strand
gcaagaagguagaaaucau

SEQ ID NO: 1764396 - RNA, 19 nt, Homo sapiens
  misc_RNA (1)...(19): siRNA sense strand
ccagaaaguaugugucuua

SEQ ID NO: 1764397 - RNA, 19 nt, Homo sapiens
  misc_RNA (1)...(19): siRNA sense strand
gcaaaucuguguugaacca

SEQ ID NO: 1764398 - RNA, 19 nt, Homo sapiens
  misc_RNA (1)...(19): siRNA sense strand
ggccaaggcucaugaacuu

SEQ ID NO: 1764399 - RNA, 19 nt, Homo sapiens
  misc_RNA (1)...(19): siRNA sense strand
gaagagagcacuuacugau

SEQ ID NO: 1764400 - RNA, 19 nt, Homo sapiens
  misc_RNA (1)...(19): siRNA sense strand
gaaaagaaaugacuacgau

SEQ ID NO: 1764401 - RNA, 19 nt, Homo sapiens
  misc_RNA (1)...(19): siRNA sense strand
gguaauccaaguaauguua

SEQ ID NO: 1764402 - RNA, 19 nt, Homo sapiens
  misc_RNA (1)...(19): siRNA sense strand
caucuagucuucacaguau

SEQ ID NO: 1764403 - RNA, 19 nt, Homo sapiens
  misc_RNA (1)...(19): siRNA sense strand
auaaagagauuccaaaugg

SEQ ID NO: 1764404 - RNA, 19 nt, Homo sapiens
  misc_RNA (1)...(19): siRNA sense strand
gaucgagacagucaagaua

SEQ ID NO: 1764405 - RNA, 19 nt, Homo sapiens
  misc_RNA (1)...(19): siRNA sense strand
gcagcuacuugguaucaaa

SEQ ID NO: 1764406 - RNA, 19 nt, Homo sapiens
  misc_RNA (1)...(19): siRNA sense strand
ugacuacgaugauaccauu

SEQ ID NO: 1764407 - RNA, 19 nt, Homo sapiens
  misc_RNA (1)...(19): siRNA sense strand
agaaaugacuacgaugaua

SEQ ID NO: 1764408 - RNA, 19 nt, Homo sapiens
  misc_RNA (1)...(19): siRNA sense strand
aaacuggacuuaauguguu

SEQ ID NO: 1764409 - RNA, 19 nt, Homo sapiens
  misc_RNA (1)...(19): siRNA sense strand
guaaugcuguggaugaguu

SEQ ID NO: 1764410 - RNA, 19 nt, Homo sapiens
  misc_RNA (1)...(19): siRNA sense strand
ugagacagcuggacuucaa

SEQ ID NO: 1764411 - RNA, 19 nt, Homo sapiens
  misc_RNA (1)...(19): siRNA sense strand
gaaguaguuuaucugagaa

SEQ ID NO: 1764412 - RNA, 19 nt, Homo sapiens
  misc_RNA (1)...(19): siRNA sense strand
ggaugaaguugcagaagau

SEQ ID NO: 1764413 - RNA, 19 nt, Homo sapiens
  misc_RNA (1)...(19): siRNA sense strand
gaaacuggacuuaaugugu

SEQ ID NO: 1764414 - RNA, 19 nt, Homo sapiens
  misc_RNA (1)...(19): siRNA sense strand
cuacuggugucauguauau

SEQ ID NO: 1764415 - RNA, 19 nt, Homo sapiens
  misc_RNA (1)...(19): siRNA sense strand
uguuggaucuuacugaaua

SEQ ID NO: 1764416 - RNA, 19 nt, Homo sapiens
  misc_RNA (1)...(19): siRNA sense strand
caagggaguauauggguua

SEQ ID NO: 1764417 - RNA, 19 nt, Homo sapiens
  misc_RNA (1)...(19): siRNA sense strand
aaaggaacaucuagucuuc

SEQ ID NO: 1764418 - RNA, 19 nt, Homo sapiens
  misc_RNA (1)...(19): siRNA sense strand
gcaaacaggcucuagagau

SEQ ID NO: 1764419 - RNA, 19 nt, Homo sapiens
  misc_RNA (1)...(19): siRNA sense strand
agucuuggcuggacaguuu

SEQ ID NO: 1764420 - RNA, 19 nt, Homo sapiens
  misc_RNA (1)...(19): siRNA sense strand
ccagaugcauuuauuucaa

SEQ ID NO: 1764421 - RNA, 19 nt, Homo sapiens
  misc_RNA (1)...(19): siRNA sense strand
gaaggaagacuugcuuuca

SEQ ID NO: 1764422 - RNA, 19 nt, Homo sapiens
  misc_RNA (1)...(19): siRNA sense strand
guacgaauugacuaacuua

SEQ ID NO: 1764423 - RNA, 19 nt, Homo sapiens
  misc_RNA (1)...(19): siRNA sense strand
cgaauugacuaacuuacug

SEQ ID NO: 1764424 - RNA, 19 nt, Homo sapiens
  misc_RNA (1)...(19): siRNA sense strand
cagaaaguaugugucuuaa

SEQ ID NO: 1764425 - RNA, 19 nt, Homo sapiens
  misc_RNA (1)...(19): siRNA sense strand
gaagcccuauuccucacua

SEQ ID NO: 1764426 - RNA, 19 nt, Homo sapiens
  misc_RNA (1)...(19): siRNA sense strand
ugacugugguguucagauu

SEQ ID NO: 1764427 - RNA, 19 nt, Homo sapiens
  misc_RNA (1)...(19): siRNA sense strand
ucagcgagcuccuggauca

SEQ ID NO: 1764428 - RNA, 19 nt, Homo sapiens
  misc_RNA (1)...(19): siRNA sense strand
gagaagagagcacuuacug

SEQ ID NO: 1764429 - RNA, 19 nt, Homo sapiens
  misc_RNA (1)...(19): siRNA sense strand
gaugauaccauuccaaucu

SEQ ID NO: 1764430 - RNA, 19 nt, Homo sapiens
  misc_RNA (1)...(19): siRNA sense strand
gaauaugagaugcguaaug

SEQ ID NO: 1764431 - RNA, 19 nt, Homo sapiens
  misc_RNA (1)...(19): siRNA sense strand
ccaaugucaugaucaucua

SEQ ID NO: 1764432 - RNA, 19 nt, Homo sapiens
  misc_RNA (1)...(19): siRNA sense strand
gagauucgaaguaguuuau

SEQ ID NO: 1764433 - RNA, 19 nt, Homo sapiens
  misc_RNA (1)...(19): siRNA sense strand
cagaagauauggguaagug

SEQ ID NO: 1764434 - RNA, 19 nt, Homo sapiens
  misc_RNA (1)...(19): siRNA sense strand
gaaaaucacuguguuacug

SEQ ID NO: 1764435 - RNA, 19 nt, Homo sapiens
  misc_RNA (1)...(19): siRNA sense strand
gcucaugaacuuccagaaa

SEQ ID NO: 1764436 - RNA, 19 nt, Homo sapiens
  misc_RNA (1)...(19): siRNA sense strand
gagauaauaaugugugaug

SEQ ID NO: 1764437 - RNA, 19 nt, Homo sapiens
  misc_RNA (1)...(19): siRNA sense strand
cuggagcaguguucucuua

SEQ ID NO: 1764438 - RNA, 19 nt, Homo sapiens
  misc_RNA (1)...(19): siRNA sense strand
agacaugcaucgagguuug

SEQ ID NO: 1764439 - RNA, 19 nt, Homo sapiens
  misc_RNA (1)...(19): siRNA sense strand
gaauccaaguugcaaaucu

SEQ ID NO: 1764440 - RNA, 19 nt, Homo sapiens
  misc_RNA (1)...(19): siRNA sense strand
ggacuuaauguguucuuau

SEQ ID NO: 1764441 - RNA, 19 nt, Homo sapiens
  misc_RNA (1)...(19): siRNA sense strand
uaaaggcacaccugaagaa

SEQ ID NO: 1764442 - RNA, 19 nt, Homo sapiens
  misc_RNA (1)...(19): siRNA sense strand
caaaccaccggagauaaua

SEQ ID NO: 1764443 - RNA, 19 nt, Homo sapiens
  misc_RNA (1)...(19): siRNA sense strand
aaagaaaugacuacgauga

SEQ ID NO: 1764444 - RNA, 19 nt, Homo sapiens
  misc_RNA (1)...(19): siRNA sense strand
auaaagagcaaacaacuga

SEQ ID NO: 1764445 - RNA, 19 nt, Homo sapiens
  misc_RNA (1)...(19): siRNA sense strand
caauacagggaacagaaua

SEQ ID NO: 1764446 - RNA, 19 nt, Homo sapiens
  misc_RNA (1)...(19): siRNA sense strand
gaaaugacuacgaugauac

SEQ ID NO: 1764447 - RNA, 19 nt, Homo sapiens
  misc_RNA (1)...(19): siRNA sense strand
ggacaagcaggaagugaau

SEQ ID NO: 1764448 - RNA, 19 nt, Homo sapiens
  misc_RNA (1)...(19): siRNA sense strand
ggaaccuacuggugucaug

SEQ ID NO: 1764449 - RNA, 19 nt, Homo sapiens
  misc_RNA (1)...(19): siRNA sense strand
agacuugcuuucaaacuug

SEQ ID NO: 1764450 - RNA, 19 nt, Homo sapiens
  misc_RNA (1)...(19): siRNA sense strand
aggaagacuugcuuucaaa

SEQ ID NO: 1764451 - RNA, 19 nt, Homo sapiens
  misc_RNA (1)...(19): siRNA sense strand
gagcaguguucucuuaagg

SEQ ID NO: 1764452 - RNA, 19 nt, Homo sapiens
  misc_RNA (1)...(19): siRNA sense strand
cagauucaauuaggauuug

SEQ ID NO: 1764453 - RNA, 19 nt, Homo sapiens
  misc_RNA (1)...(19): siRNA sense strand
caaauggaaauacaucaga

SEQ ID NO: 1764454 - RNA, 19 nt, Homo sapiens
  misc_RNA (1)...(19): siRNA sense strand
ccauuuaguuucucugaca

SEQ ID NO: 1764455 - RNA, 19 nt, Homo sapiens
  misc_RNA (1)...(19): siRNA sense strand
ggaaggaagacuugcuuuc

SEQ ID NO: 1764456 - RNA, 19 nt, Homo sapiens
  misc_RNA (1)...(19): siRNA sense strand
ggacaugguuaugaaaauu

SEQ ID NO: 1764457 - RNA, 19 nt, Homo sapiens
  misc_RNA (1)...(19): siRNA sense strand
gaaauacaucagagcuuau

SEQ ID NO: 1764458 - RNA, 19 nt, Homo sapiens
  misc_RNA (1)...(19): siRNA sense strand
uggaugaaguugcagaaga

SEQ ID NO: 1764459 - RNA, 19 nt, Homo sapiens
  misc_RNA (1)...(19): siRNA sense strand
caacugaugaaauaccauu

SEQ ID NO: 1764460 - RNA, 19 nt, Homo sapiens
  misc_RNA (1)...(19): siRNA sense strand
uaaaggaacaucuagucuu

SEQ ID NO: 1764461 - RNA, 19 nt, Homo sapiens
  misc_RNA (1)...(19): siRNA sense strand
cacuugaucuagauauuga

SEQ ID NO: 1764462 - RNA, 19 nt, Homo sapiens
  misc_RNA (1)...(19): siRNA sense strand
uuacaaaccaccggagaua

SEQ ID NO: 1764463 - RNA, 19 nt, Homo sapiens
  misc_RNA (1)...(19): siRNA sense strand
gcucuagagauucgaagua

SEQ ID NO: 1764464 - RNA, 19 nt, Homo sapiens
  misc_RNA (1)...(19): siRNA sense strand
ccaggcagcacauugguuu

SEQ ID NO: 1764465 - RNA, 19 nt, Homo sapiens
  misc_RNA (1)...(19): siRNA sense strand
gcauuuauuucaaguuucg

SEQ ID NO: 1764466 - RNA, 19 nt, Homo sapiens
  misc_RNA (1)...(19): siRNA sense strand
aaagucaccgccaauauug

SEQ ID NO: 1764467 - RNA, 19 nt, Homo sapiens
  misc_RNA (1)...(19): siRNA sense strand
gacuccagaugcauuuauu

SEQ ID NO: 1764468 - RNA, 19 nt, Homo sapiens
  misc_RNA (1)...(19): siRNA sense strand
aaggaagacuugcuuucaa

SEQ ID NO: 1764469 - RNA, 19 nt, Homo sapiens
  misc_RNA (1)...(19): siRNA sense strand
ggagcaguguucucuuaag

SEQ ID NO: 1764470 - RNA, 19 nt, Homo sapiens
  misc_RNA (1)...(19): siRNA sense strand
ccauauaggucugaaaauu

SEQ ID NO: 1764471 - RNA, 19 nt, Homo sapiens
  misc_RNA (1)...(19): siRNA sense strand
aaacaacugaccagccuuu

SEQ ID NO: 1764472 - RNA, 19 nt, Homo sapiens
  misc_RNA (1)...(19): siRNA sense strand
guagagacaacugaugaaa

SEQ ID NO: 1764473 - RNA, 19 nt, Homo sapiens
  misc_RNA (1)...(19): siRNA sense strand
caccggagauaauaaugug

SEQ ID NO: 1764474 - RNA, 19 nt, Homo sapiens
  misc_RNA (1)...(19): siRNA sense strand
gaauugacuaacuuacuga

SEQ ID NO: 1764475 - RNA, 19 nt, Homo sapiens
  misc_RNA (1)...(19): siRNA sense strand
caauaucagugguucaaaa

SEQ ID NO: 1764476 - RNA, 19 nt, Homo sapiens
  misc_RNA (1)...(19): siRNA sense strand
aaagaaacuggacuuaaug

SEQ ID NO: 1764477 - RNA, 19 nt, Homo sapiens
  misc_RNA (1)...(19): siRNA sense strand
ggaaauacaucagagcuua

SEQ ID NO: 1764478 - RNA, 19 nt, Homo sapiens
  misc_RNA (1)...(19): siRNA sense strand
gaaaguaugugucuuaagu

SEQ ID NO: 1764479 - RNA, 19 nt, Homo sapiens
  misc_RNA (1)...(19): siRNA sense strand
ggaaaccucucauugcuaa

SEQ ID NO: 1764480 - RNA, 19 nt, Homo sapiens
  misc_RNA (1)...(19): siRNA sense strand
gcagauagcugucauugca

SEQ ID NO: 1764481 - RNA, 19 nt, Homo sapiens
  misc_RNA (1)...(19): siRNA sense strand
agagacaacugaugaaaua

SEQ ID NO: 1764482 - RNA, 19 nt, Homo sapiens
  misc_RNA (1)...(19): siRNA sense strand
gggaguauauggguuauua

SEQ ID NO: 1764483 - RNA, 19 nt, Homo sapiens
  misc_RNA (1)...(19): siRNA sense strand
ccagagagcuuccagagaa

SEQ ID NO: 1764484 - RNA, 19 nt, Homo sapiens
  misc_RNA (1)...(19): siRNA sense strand
gcaaauggaaucuuuauga

SEQ ID NO: 1764485 - RNA, 19 nt, Homo sapiens
  misc_RNA (1)...(19): siRNA sense strand
caaacaggcucuagagauu

SEQ ID NO: 1764486 - RNA, 19 nt, Homo sapiens
  misc_RNA (1)...(19): siRNA sense strand
ggucacagcuggauguuug

SEQ ID NO: 1764487 - RNA, 19 nt, Homo sapiens
  misc_RNA (1)...(19): siRNA sense strand
gaaguaaugugccaguaga

SEQ ID NO: 1764488 - RNA, 19 nt, Homo sapiens
  misc_RNA (1)...(19): siRNA sense strand
gaagguagaaaucaucaua

SEQ ID NO: 1764489 - RNA, 19 nt, Homo sapiens
  misc_RNA (1)...(19): siRNA sense strand
caaaggaucuucccaagca

SEQ ID NO: 1764490 - RNA, 19 nt, Homo sapiens
  misc_RNA (1)...(19): siRNA sense strand
gcaguguucucuuaaggua

SEQ ID NO: 1764491 - RNA, 19 nt, Homo sapiens
  misc_RNA (1)...(19): siRNA sense strand
ggaagugaauguugggaaa

SEQ ID NO: 1764492 - RNA, 19 nt, Homo sapiens
  misc_RNA (1)...(19): siRNA sense strand
cgaaguaguuuaucugaga

SEQ ID NO: 1764493 - RNA, 19 nt, Homo sapiens
  misc_RNA (1)...(19): siRNA sense strand
gaauuaccauuaacacaug

SEQ ID NO: 1764494 - RNA, 19 nt, Homo sapiens
  misc_RNA (1)...(19): siRNA sense strand
guaugugucuuaaguuuga

SEQ ID NO: 1764495 - RNA, 19 nt, Homo sapiens
  misc_RNA (1)...(19): siRNA sense strand
gcaagaagguagaaaucau

SEQ ID NO: 1764496 - RNA, 19 nt, Homo sapiens
  misc_RNA (1)...(19): siRNA sense strand
ccagaaaguaugugucuua

SEQ ID NO: 1764497 - RNA, 19 nt, Homo sapiens
  misc_RNA (1)...(19): siRNA sense strand
gcaaaucuguguugaacca

SEQ ID NO: 1764498 - RNA, 19 nt, Homo sapiens
  misc_RNA (1)...(19): siRNA sense strand
ggccaaggcucaugaacuu

SEQ ID NO: 1764499 - RNA, 19 nt, Homo sapiens
  misc_RNA (1)...(19): siRNA sense strand
gaagagagcacuuacugau

SEQ ID NO: 1764500 - RNA, 19 nt, Homo sapiens
  misc_RNA (1)...(19): siRNA sense strand
gaaaagaaaugacuacgau

SEQ ID NO: 1764501 - RNA, 19 nt, Homo sapiens
  misc_RNA (1)...(19): siRNA sense strand
gguaauccaaguaauguua

SEQ ID NO: 1764502 - RNA, 19 nt, Homo sapiens
  misc_RNA (1)...(19): siRNA sense strand
caucuagucuucacaguau

SEQ ID NO: 1764503 - RNA, 19 nt, Homo sapiens
  misc_RNA (1)...(19): siRNA sense strand
auaaagagauuccaaaugg

SEQ ID NO: 1764504 - RNA, 19 nt, Homo sapiens
  misc_RNA (1)...(19): siRNA sense strand
gaucgagacagucaagaua

SEQ ID NO: 1764505 - RNA, 19 nt, Homo sapiens
  misc_RNA (1)...(19): siRNA sense strand
gcagcuacuugguaucaaa

SEQ ID NO: 1764506 - RNA, 19 nt, Homo sapiens
  misc_RNA (1)...(19): siRNA sense strand
ugacuacgaugauaccauu

SEQ ID NO: 1764507 - RNA, 19 nt, Homo sapiens
  misc_RNA (1)...(19): siRNA sense strand
agaaaugacuacgaugaua

SEQ ID NO: 1764508 - RNA, 19 nt, Homo sapiens
  misc_RNA (1)...(19): siRNA sense strand
aaacuggacuuaauguguu

SEQ ID NO: 1764509 - RNA, 19 nt, Homo sapiens
  misc_RNA (1)...(19): siRNA sense strand
guaaugcuguggaugaguu

SEQ ID NO: 1764510 - RNA, 19 nt, Homo sapiens
  misc_RNA (1)...(19): siRNA sense strand
ugagacagcuggacuucaa

SEQ ID NO: 1764511 - RNA, 19 nt, Homo sapiens
  misc_RNA (1)...(19): siRNA sense strand
gaaguaguuuaucugagaa

SEQ ID NO: 1764512 - RNA, 19 nt, Homo sapiens
  misc_RNA (1)...(19): siRNA sense strand
ggaugaaguugcagaagau

SEQ ID NO: 1764513 - RNA, 19 nt, Homo sapiens
  misc_RNA (1)...(19): siRNA sense strand
gaaacuggacuuaaugugu

SEQ ID NO: 1764514 - RNA, 19 nt, Homo sapiens
  misc_RNA (1)...(19): siRNA sense strand
cuacuggugucauguauau

SEQ ID NO: 1764515 - RNA, 19 nt, Homo sapiens
  misc_RNA (1)...(19): siRNA sense strand
uguuggaucuuacugaaua

SEQ ID NO: 1764516 - RNA, 19 nt, Homo sapiens
  misc_RNA (1)...(19): siRNA sense strand
caagggaguauauggguua

SEQ ID NO: 1764517 - RNA, 19 nt, Homo sapiens
  misc_RNA (1)...(19): siRNA sense strand
aaaggaacaucuagucuuc

SEQ ID NO: 1764518 - RNA, 19 nt, Homo sapiens
  misc_RNA (1)...(19): siRNA sense strand
gcaaacaggcucuagagau

SEQ ID NO: 1764519 - RNA, 19 nt, Homo sapiens
  misc_RNA (1)...(19): siRNA sense strand
agucuuggcuggacaguuu

SEQ ID NO: 1764520 - RNA, 19 nt, Homo sapiens
  misc_RNA (1)...(19): siRNA sense strand
ccagaugcauuuauuucaa

SEQ ID NO: 1764521 - RNA, 19 nt, Homo sapiens
  misc_RNA (1)...(19): siRNA sense strand
gaaggaagacuugcuuuca

SEQ ID NO: 1764522 - RNA, 19 nt, Homo sapiens
  misc_RNA (1)...(19): siRNA sense strand
guacgaauugacuaacuua

SEQ ID NO: 1764523 - RNA, 19 nt, Homo sapiens
  misc_RNA (1)...(19): siRNA sense strand
cgaauugacuaacuuacug

SEQ ID NO: 1764524 - RNA, 19 nt, Homo sapiens
  misc_RNA (1)...(19): siRNA sense strand
cagaaaguaugugucuuaa

SEQ ID NO: 1764525 - RNA, 19 nt, Homo sapiens
  misc_RNA (1)...(19): siRNA sense strand
gaagcccuauuccucacua

SEQ ID NO: 1764526 - RNA, 19 nt, Homo sapiens
  misc_RNA (1)...(19): siRNA sense strand
ugacugugguguucagauu

SEQ ID NO: 1764527 - RNA, 19 nt, Homo sapiens
  misc_RNA (1)...(19): siRNA sense strand
ucagcgagcuccuggauca

SEQ ID NO: 1764528 - RNA, 19 nt, Homo sapiens
  misc_RNA (1)...(19): siRNA sense strand
gagaagagagcacuuacug

SEQ ID NO: 1764529 - RNA, 19 nt, Homo sapiens
  misc_RNA (1)...(19): siRNA sense strand
gaugauaccauuccaaucu

SEQ ID NO: 1764530 - RNA, 19 nt, Homo sapiens
  misc_RNA (1)...(19): siRNA sense strand
gaauaugagaugcguaaug

SEQ ID NO: 1764531 - RNA, 19 nt, Homo sapiens
  misc_RNA (1)...(19): siRNA sense strand
ccaaugucaugaucaucua

SEQ ID NO: 1764532 - RNA, 19 nt, Homo sapiens
  misc_RNA (1)...(19): siRNA sense strand
gagauucgaaguaguuuau

SEQ ID NO: 1764533 - RNA, 19 nt, Homo sapiens
  misc_RNA (1)...(19): siRNA sense strand
cagaagauauggguaagug

SEQ ID NO: 1764534 - RNA, 19 nt, Homo sapiens
  misc_RNA (1)...(19): siRNA sense strand
gaaaaucacuguguuacug

SEQ ID NO: 1764535 - RNA, 19 nt, Homo sapiens
  misc_RNA (1)...(19): siRNA sense strand
gcucaugaacuuccagaaa

SEQ ID NO: 1764536 - RNA, 19 nt, Homo sapiens
  misc_RNA (1)...(19): siRNA sense strand
gagauaauaaugugugaug

SEQ ID NO: 1764537 - RNA, 19 nt, Homo sapiens
  misc_RNA (1)...(19): siRNA sense strand
cuggagcaguguucucuua

SEQ ID NO: 1764538 - RNA, 19 nt, Homo sapiens
  misc_RNA (1)...(19): siRNA sense strand
agacaugcaucgagguuug

SEQ ID NO: 1764539 - RNA, 19 nt, Homo sapiens
  misc_RNA (1)...(19): siRNA sense strand
gaauccaaguugcaaaucu

SEQ ID NO: 1764540 - RNA, 19 nt, Homo sapiens
  misc_RNA (1)...(19): siRNA sense strand
ggacuuaauguguucuuau

SEQ ID NO: 1764541 - RNA, 19 nt, Homo sapiens
  misc_RNA (1)...(19): siRNA sense strand
uaaaggcacaccugaagaa

SEQ ID NO: 1764542 - RNA, 19 nt, Homo sapiens
  misc_RNA (1)...(19): siRNA sense strand
caaaccaccggagauaaua

SEQ ID NO: 1764543 - RNA, 19 nt, Homo sapiens
  misc_RNA (1)...(19): siRNA sense strand
aaagaaaugacuacgauga

SEQ ID NO: 1764544 - RNA, 19 nt, Homo sapiens
  misc_RNA (1)...(19): siRNA sense strand
auaaagagcaaacaacuga

SEQ ID NO: 1764545 - RNA, 19 nt, Homo sapiens
  misc_RNA (1)...(19): siRNA sense strand
caauacagggaacagaaua

SEQ ID NO: 1764546 - RNA, 19 nt, Homo sapiens
  misc_RNA (1)...(19): siRNA sense strand
gaaaugacuacgaugauac

SEQ ID NO: 1764547 - RNA, 19 nt, Homo sapiens
  misc_RNA (1)...(19): siRNA sense strand
ggacaagcaggaagugaau

SEQ ID NO: 1764548 - RNA, 19 nt, Homo sapiens
  misc_RNA (1)...(19): siRNA sense strand
ggaaccuacuggugucaug

SEQ ID NO: 1764549 - RNA, 19 nt, Homo sapiens
  misc_RNA (1)...(19): siRNA sense strand
agacuugcuuucaaacuug

SEQ ID NO: 1764550 - RNA, 19 nt, Homo sapiens
  misc_RNA (1)...(19): siRNA sense strand
aggaagacuugcuuucaaa

SEQ ID NO: 1764551 - RNA, 19 nt, Homo sapiens
  misc_RNA (1)...(19): siRNA sense strand
gagcaguguucucuuaagg

SEQ ID NO: 1764552 - RNA, 19 nt, Homo sapiens
  misc_RNA (1)...(19): siRNA sense strand
cagauucaauuaggauuug

SEQ ID NO: 1764553 - RNA, 19 nt, Homo sapiens
  misc_RNA (1)...(19): siRNA sense strand
caaauggaaauacaucaga

SEQ ID NO: 1764554 - RNA, 19 nt, Homo sapiens
  misc_RNA (1)...(19): siRNA sense strand
ccauuuaguuucucugaca

SEQ ID NO: 1764555 - RNA, 19 nt, Homo sapiens
  misc_RNA (1)...(19): siRNA sense strand
ggaaggaagacuugcuuuc

SEQ ID NO: 1764556 - RNA, 19 nt, Homo sapiens
  misc_RNA (1)...(19): siRNA sense strand
ggacaugguuaugaaaauu

SEQ ID NO: 1764557 - RNA, 19 nt, Homo sapiens
  misc_RNA (1)...(19): siRNA sense strand
gaaauacaucagagcuuau

SEQ ID NO: 1764558 - RNA, 19 nt, Homo sapiens
  misc_RNA (1)...(19): siRNA sense strand
uggaugaaguugcagaaga

SEQ ID NO: 1764559 - RNA, 19 nt, Homo sapiens
  misc_RNA (1)...(19): siRNA sense strand
caacugaugaaauaccauu

SEQ ID NO: 1764560 - RNA, 19 nt, Homo sapiens
  misc_RNA (1)...(19): siRNA sense strand
uaaaggaacaucuagucuu

SEQ ID NO: 1764561 - RNA, 19 nt, Homo sapiens
  misc_RNA (1)...(19): siRNA sense strand
cacuugaucuagauauuga

SEQ ID NO: 1764562 - RNA, 19 nt, Homo sapiens
  misc_RNA (1)...(19): siRNA sense strand
uuacaaaccaccggagaua

SEQ ID NO: 1764563 - RNA, 19 nt, Homo sapiens
  misc_RNA (1)...(19): siRNA sense strand
gcucuagagauucgaagua

SEQ ID NO: 1764564 - RNA, 19 nt, Homo sapiens
  misc_RNA (1)...(19): siRNA sense strand
ccaggcagcacauugguuu

SEQ ID NO: 1764565 - RNA, 19 nt, Homo sapiens
  misc_RNA (1)...(19): siRNA sense strand
gcauuuauuucaaguuucg

SEQ ID NO: 1764566 - RNA, 19 nt, Homo sapiens
  misc_RNA (1)...(19): siRNA sense strand
aaagucaccgccaauauug

SEQ ID NO: 1764567 - RNA, 19 nt, Homo sapiens
  misc_RNA (1)...(19): siRNA sense strand
gacuccagaugcauuuauu

SEQ ID NO: 1764568 - RNA, 19 nt, Homo sapiens
  misc_RNA (1)...(19): siRNA sense strand
aaggaagacuugcuuucaa

SEQ ID NO: 1764569 - RNA, 19 nt, Homo sapiens
  misc_RNA (1)...(19): siRNA sense strand
ggagcaguguucucuuaag

SEQ ID NO: 1764570 - RNA, 19 nt, Homo sapiens
  misc_RNA (1)...(19): siRNA sense strand
ccauauaggucugaaaauu

SEQ ID NO: 1764571 - RNA, 19 nt, Homo sapiens
  misc_RNA (1)...(19): siRNA sense strand
aaacaacugaccagccuuu

SEQ ID NO: 1764572 - RNA, 19 nt, Homo sapiens
  misc_RNA (1)...(19): siRNA sense strand
guagagacaacugaugaaa

SEQ ID NO: 1764573 - RNA, 19 nt, Homo sapiens
  misc_RNA (1)...(19): siRNA sense strand
caccggagauaauaaugug

SEQ ID NO: 1764574 - RNA, 19 nt, Homo sapiens
  misc_RNA (1)...(19): siRNA sense strand
gaauugacuaacuuacuga

SEQ ID NO: 1764575 - RNA, 19 nt, Homo sapiens
  misc_RNA (1)...(19): siRNA sense strand
caauaucagugguucaaaa

SEQ ID NO: 1764576 - RNA, 19 nt, Homo sapiens
  misc_RNA (1)...(19): siRNA sense strand
aaagaaacuggacuuaaug

SEQ ID NO: 1764577 - RNA, 19 nt, Homo sapiens
  misc_RNA (1)...(19): siRNA sense strand
ggaaauacaucagagcuua

SEQ ID NO: 1764578 - RNA, 19 nt, Homo sapiens
  misc_RNA (1)...(19): siRNA sense strand
gaaaguaugugucuuaagu

SEQ ID NO: 1764579 - RNA, 19 nt, Homo sapiens
  misc_RNA (1)...(19): siRNA sense strand
ggaaaccucucauugcuaa

SEQ ID NO: 1764580 - RNA, 19 nt, Homo sapiens
  misc_RNA (1)...(19): siRNA sense strand
gcagauagcugucauugca

SEQ ID NO: 1764581 - RNA, 19 nt, Homo sapiens
  misc_RNA (1)...(19): siRNA sense strand
agagacaacugaugaaaua

SEQ ID NO: 1764582 - RNA, 19 nt, Homo sapiens
  misc_RNA (1)...(19): siRNA sense strand
gggaguauauggguuauua

SEQ ID NO: 1764583 - RNA, 19 nt, Homo sapiens
  misc_RNA (1)...(19): siRNA sense strand
ccagagagcuuccagagaa

SEQ ID NO: 1764584 - RNA, 19 nt, Homo sapiens
  misc_RNA (1)...(19): siRNA sense strand
gcaaauggaaucuuuauga

SEQ ID NO: 1764585 - RNA, 19 nt, Homo sapiens
  misc_RNA (1)...(19): siRNA sense strand
caaacaggcucuagagauu

SEQ ID NO: 1764586 - RNA, 19 nt, Homo sapiens
  misc_RNA (1)...(19): siRNA sense strand
ggucacagcuggauguuug

SEQ ID NO: 1764587 - RNA, 19 nt, Homo sapiens
  misc_RNA (1)...(19): siRNA sense strand
gaaguaaugugccaguaga

SEQ ID NO: 1764588 - RNA, 19 nt, Homo sapiens
  misc_RNA (1)...(19): siRNA sense strand
gaagguagaaaucaucaua

SEQ ID NO: 1764589 - RNA, 19 nt, Homo sapiens
  misc_RNA (1)...(19): siRNA sense strand
caaaggaucuucccaagca

SEQ ID NO: 1764590 - RNA, 19 nt, Homo sapiens
  misc_RNA (1)...(19): siRNA sense strand
gcaguguucucuuaaggua

SEQ ID NO: 1764591 - RNA, 19 nt, Homo sapiens
  misc_RNA (1)...(19): siRNA sense strand
ggaagugaauguugggaaa

SEQ ID NO: 1764592 - RNA, 19 nt, Homo sapiens
  misc_RNA (1)...(19): siRNA sense strand
cgaaguaguuuaucugaga

SEQ ID NO: 1764593 - RNA, 19 nt, Homo sapiens
  misc_RNA (1)...(19): siRNA sense strand
gaauuaccauuaacacaug

SEQ ID NO: 1764594 - RNA, 19 nt, Homo sapiens
  misc_RNA (1)...(19): siRNA sense strand
guaugugucuuaaguuuga

SEQ ID NO: 1764595 - RNA, 19 nt, Homo sapiens
  misc_RNA (1)...(19): siRNA sense strand
gcaagaagguagaaaucau

SEQ ID NO: 1764596 - RNA, 19 nt, Homo sapiens
  misc_RNA (1)...(19): siRNA sense strand
ccagaaaguaugugucuua

SEQ ID NO: 1764597 - RNA, 19 nt, Homo sapiens
  misc_RNA (1)...(19): siRNA sense strand
gcaaaucuguguugaacca

SEQ ID NO: 1764598 - RNA, 19 nt, Homo sapiens
  misc_RNA (1)...(19): siRNA sense strand
ggccaaggcucaugaacuu

SEQ ID NO: 1764599 - RNA, 19 nt, Homo sapiens
  misc_RNA (1)...(19): siRNA sense strand
gaagagagcacuuacugau

SEQ ID NO: 1764600 - RNA, 19 nt, Homo sapiens
  misc_RNA (1)...(19): siRNA sense strand
gaaaagaaaugacuacgau

SEQ ID NO: 1764601 - RNA, 19 nt, Homo sapiens
  misc_RNA (1)...(19): siRNA sense strand
gguaauccaaguaauguua

SEQ ID NO: 1764602 - RNA, 19 nt, Homo sapiens
  misc_RNA (1)...(19): siRNA sense strand
caucuagucuucacaguau

SEQ ID NO: 1764603 - RNA, 19 nt, Homo sapiens
  misc_RNA (1)...(19): siRNA sense strand
auaaagagauuccaaaugg

SEQ ID NO: 1764604 - RNA, 19 nt, Homo sapiens
  misc_RNA (1)...(19): siRNA sense strand
gaucgagacagucaagaua

SEQ ID NO: 1764605 - RNA, 19 nt, Homo sapiens
  misc_RNA (1)...(19): siRNA sense strand
gcagcuacuugguaucaaa

SEQ ID NO: 1764606 - RNA, 19 nt, Homo sapiens
  misc_RNA (1)...(19): siRNA sense strand
ugacuacgaugauaccauu

SEQ ID NO: 1764607 - RNA, 19 nt, Homo sapiens
  misc_RNA (1)...(19): siRNA sense strand
agaaaugacuacgaugaua

SEQ ID NO: 1764608 - RNA, 19 nt, Homo sapiens
  misc_RNA (1)...(19): siRNA sense strand
aaacuggacuuaauguguu

SEQ ID NO: 1764609 - RNA, 19 nt, Homo sapiens
  misc_RNA (1)...(19): siRNA sense strand
guaaugcuguggaugaguu

SEQ ID NO: 1764610 - RNA, 19 nt, Homo sapiens
  misc_RNA (1)...(19): siRNA sense strand
ugagacagcuggacuucaa

SEQ ID NO: 1764611 - RNA, 19 nt, Homo sapiens
  misc_RNA (1)...(19): siRNA sense strand
gaaguaguuuaucugagaa

SEQ ID NO: 1764612 - RNA, 19 nt, Homo sapiens
  misc_RNA (1)...(19): siRNA sense strand
ggaugaaguugcagaagau

SEQ ID NO: 1764613 - RNA, 19 nt, Homo sapiens
  misc_RNA (1)...(19): siRNA sense strand
gaaacuggacuuaaugugu

SEQ ID NO: 1764614 - RNA, 19 nt, Homo sapiens
  misc_RNA (1)...(19): siRNA sense strand
cuacuggugucauguauau

SEQ ID NO: 1764615 - RNA, 19 nt, Homo sapiens
  misc_RNA (1)...(19): siRNA sense strand
uguuggaucuuacugaaua

SEQ ID NO: 1764616 - RNA, 19 nt, Homo sapiens
  misc_RNA (1)...(19): siRNA sense strand
caagggaguauauggguua

SEQ ID NO: 1764617 - RNA, 19 nt, Homo sapiens
  misc_RNA (1)...(19): siRNA sense strand
aaaggaacaucuagucuuc

SEQ ID NO: 1764618 - RNA, 19 nt, Homo sapiens
  misc_RNA (1)...(19): siRNA sense strand
gcaaacaggcucuagagau

SEQ ID NO: 1764619 - RNA, 19 nt, Homo sapiens
  misc_RNA (1)...(19): siRNA sense strand
agucuuggcuggacaguuu

SEQ ID NO: 1764620 - RNA, 19 nt, Homo sapiens
  misc_RNA (1)...(19): siRNA sense strand
ccagaugcauuuauuucaa

SEQ ID NO: 1764621 - RNA, 19 nt, Homo sapiens
  misc_RNA (1)...(19): siRNA sense strand
gaaggaagacuugcuuuca

SEQ ID NO: 1764622 - RNA, 19 nt, Homo sapiens
  misc_RNA (1)...(19): siRNA sense strand
guacgaauugacuaacuua

SEQ ID NO: 1764623 - RNA, 19 nt, Homo sapiens
  misc_RNA (1)...(19): siRNA sense strand
cgaauugacuaacuuacug

SEQ ID NO: 1764624 - RNA, 19 nt, Homo sapiens
  misc_RNA (1)...(19): siRNA sense strand
cagaaaguaugugucuuaa

SEQ ID NO: 1764625 - RNA, 19 nt, Homo sapiens
  misc_RNA (1)...(19): siRNA sense strand
gaagcccuauuccucacua

SEQ ID NO: 1764626 - RNA, 19 nt, Homo sapiens
  misc_RNA (1)...(19): siRNA sense strand
ugacugugguguucagauu

SEQ ID NO: 1764627 - RNA, 19 nt, Homo sapiens
  misc_RNA (1)...(19): siRNA sense strand
ucagcgagcuccuggauca

SEQ ID NO: 1764628 - RNA, 19 nt, Homo sapiens
  misc_RNA (1)...(19): siRNA sense strand
gagaagagagcacuuacug

SEQ ID NO: 1764629 - RNA, 19 nt, Homo sapiens
  misc_RNA (1)...(19): siRNA sense strand
gaugauaccauuccaaucu

SEQ ID NO: 1764630 - RNA, 19 nt, Homo sapiens
  misc_RNA (1)...(19): siRNA sense strand
gaauaugagaugcguaaug

SEQ ID NO: 1764631 - RNA, 19 nt, Homo sapiens
  misc_RNA (1)...(19): siRNA sense strand
ccaaugucaugaucaucua

SEQ ID NO: 1764632 - RNA, 19 nt, Homo sapiens
  misc_RNA (1)...(19): siRNA sense strand
gagauucgaaguaguuuau

SEQ ID NO: 1764633 - RNA, 19 nt, Homo sapiens
  misc_RNA (1)...(19): siRNA sense strand
cagaagauauggguaagug

SEQ ID NO: 1764634 - RNA, 19 nt, Homo sapiens
  misc_RNA (1)...(19): siRNA sense strand
gaaaaucacuguguuacug

SEQ ID NO: 1764635 - RNA, 19 nt, Homo sapiens
  misc_RNA (1)...(19): siRNA sense strand
gcucaugaacuuccagaaa

SEQ ID NO: 1764636 - RNA, 19 nt, Homo sapiens
  misc_RNA (1)...(19): siRNA sense strand
gagauaauaaugugugaug

SEQ ID NO: 1764637 - RNA, 19 nt, Homo sapiens
  misc_RNA (1)...(19): siRNA sense strand
cuggagcaguguucucuua

SEQ ID NO: 1764638 - RNA, 19 nt, Homo sapiens
  misc_RNA (1)...(19): siRNA sense strand
agacaugcaucgagguuug

SEQ ID NO: 1764639 - RNA, 19 nt, Homo sapiens
  misc_RNA (1)...(19): siRNA sense strand
gaauccaaguugcaaaucu

SEQ ID NO: 1764640 - RNA, 19 nt, Homo sapiens
  misc_RNA (1)...(19): siRNA sense strand
ggacuuaauguguucuuau

SEQ ID NO: 1764641 - RNA, 19 nt, Homo sapiens
  misc_RNA (1)...(19): siRNA sense strand
uaaaggcacaccugaagaa

SEQ ID NO: 1764642 - RNA, 19 nt, Homo sapiens
  misc_RNA (1)...(19): siRNA sense strand
caaaccaccggagauaaua

SEQ ID NO: 1764643 - RNA, 19 nt, Homo sapiens
  misc_RNA (1)...(19): siRNA sense strand
aaagaaaugacuacgauga

SEQ ID NO: 1764644 - RNA, 19 nt, Homo sapiens
  misc_RNA (1)...(19): siRNA sense strand
auaaagagcaaacaacuga

SEQ ID NO: 1764645 - RNA, 19 nt, Homo sapiens
  misc_RNA (1)...(19): siRNA sense strand
caauacagggaacagaaua

SEQ ID NO: 1764646 - RNA, 19 nt, Homo sapiens
  misc_RNA (1)...(19): siRNA sense strand
gaaaugacuacgaugauac

SEQ ID NO: 1764647 - RNA, 19 nt, Homo sapiens
  misc_RNA (1)...(19): siRNA sense strand
ggacaagcaggaagugaau

SEQ ID NO: 1764648 - RNA, 19 nt, Homo sapiens
  misc_RNA (1)...(19): siRNA sense strand
ggaaccuacuggugucaug

SEQ ID NO: 1764649 - RNA, 19 nt, Homo sapiens
  misc_RNA (1)...(19): siRNA sense strand
agacuugcuuucaaacuug

SEQ ID NO: 1764650 - RNA, 19 nt, Homo sapiens
  misc_RNA (1)...(19): siRNA sense strand
aggaagacuugcuuucaaa

SEQ ID NO: 1764651 - RNA, 19 nt, Homo sapiens
  misc_RNA (1)...(19): siRNA sense strand
gagcaguguucucuuaagg

SEQ ID NO: 1764652 - RNA, 19 nt, Homo sapiens
  misc_RNA (1)...(19): siRNA sense strand
cagauucaauuaggauuug

SEQ ID NO: 1764653 - RNA, 19 nt, Homo sapiens
  misc_RNA (1)...(19): siRNA sense strand
caaauggaaauacaucaga

SEQ ID NO: 1764654 - RNA, 19 nt, Homo sapiens
  misc_RNA (1)...(19): siRNA sense strand
ccauuuaguuucucugaca

SEQ ID NO: 1764655 - RNA, 19 nt, Homo sapiens
  misc_RNA (1)...(19): siRNA sense strand
ggaaggaagacuugcuuuc

SEQ ID NO: 1764656 - RNA, 19 nt, Homo sapiens
  misc_RNA (1)...(19): siRNA sense strand
ggacaugguuaugaaaauu

SEQ ID NO: 1764657 - RNA, 19 nt, Homo sapiens
  misc_RNA (1)...(19): siRNA sense strand
gaaauacaucagagcuuau

SEQ ID NO: 1764658 - RNA, 19 nt, Homo sapiens
  misc_RNA (1)...(19): siRNA sense strand
uggaugaaguugcagaaga

SEQ ID NO: 1764659 - RNA, 19 nt, Homo sapiens
  misc_RNA (1)...(19): siRNA sense strand
caacugaugaaauaccauu

SEQ ID NO: 1764660 - RNA, 19 nt, Homo sapiens
  misc_RNA (1)...(19): siRNA sense strand
uaaaggaacaucuagucuu

SEQ ID NO: 1764661 - RNA, 19 nt, Homo sapiens
  misc_RNA (1)...(19): siRNA sense strand
cacuugaucuagauauuga

SEQ ID NO: 1764662 - RNA, 19 nt, Homo sapiens
  misc_RNA (1)...(19): siRNA sense strand
uuacaaaccaccggagaua

SEQ ID NO: 1764663 - RNA, 19 nt, Homo sapiens
  misc_RNA (1)...(19): siRNA sense strand
gcucuagagauucgaagua

SEQ ID NO: 1764664 - RNA, 19 nt, Homo sapiens
  misc_RNA (1)...(19): siRNA sense strand
ccaggcagcacauugguuu

SEQ ID NO: 1764665 - RNA, 19 nt, Homo sapiens
  misc_RNA (1)...(19): siRNA sense strand
gcauuuauuucaaguuucg

SEQ ID NO: 1764666 - RNA, 19 nt, Homo sapiens
  misc_RNA (1)...(19): siRNA sense strand
aaagucaccgccaauauug

SEQ ID NO: 1764667 - RNA, 19 nt, Homo sapiens
  misc_RNA (1)...(19): siRNA sense strand
gacuccagaugcauuuauu

SEQ ID NO: 1764668 - RNA, 19 nt, Homo sapiens
  misc_RNA (1)...(19): siRNA sense strand
aaggaagacuugcuuucaa

SEQ ID NO: 1764669 - RNA, 19 nt, Homo sapiens
  misc_RNA (1)...(19): siRNA sense strand
ggagcaguguucucuuaag

SEQ ID NO: 1764670 - RNA, 19 nt, Homo sapiens
  misc_RNA (1)...(19): siRNA sense strand
ccauauaggucugaaaauu

SEQ ID NO: 1764671 - RNA, 19 nt, Homo sapiens
  misc_RNA (1)...(19): siRNA sense strand
aaacaacugaccagccuuu

SEQ ID NO: 1764672 - RNA, 19 nt, Homo sapiens
  misc_RNA (1)...(19): siRNA sense strand
guagagacaacugaugaaa

SEQ ID NO: 1764673 - RNA, 19 nt, Homo sapiens
  misc_RNA (1)...(19): siRNA sense strand
caccggagauaauaaugug

SEQ ID NO: 1764674 - RNA, 19 nt, Homo sapiens
  misc_RNA (1)...(19): siRNA sense strand
gaauugacuaacuuacuga

SEQ ID NO: 1764675 - RNA, 19 nt, Homo sapiens
  misc_RNA (1)...(19): siRNA sense strand
caauaucagugguucaaaa

SEQ ID NO: 1764676 - RNA, 19 nt, Homo sapiens
  misc_RNA (1)...(19): siRNA sense strand
aaagaaacuggacuuaaug

SEQ ID NO: 1764677 - RNA, 19 nt, Homo sapiens
  misc_RNA (1)...(19): siRNA sense strand
ggaaauacaucagagcuua

SEQ ID NO: 1764678 - RNA, 19 nt, Homo sapiens
  misc_RNA (1)...(19): siRNA sense strand
gaaaguaugugucuuaagu

SEQ ID NO: 1764679 - RNA, 19 nt, Homo sapiens
  misc_RNA (1)...(19): siRNA sense strand
ggaaaccucucauugcuaa

SEQ ID NO: 1764680 - RNA, 19 nt, Homo sapiens
  misc_RNA (1)...(19): siRNA sense strand
gcagauagcugucauugca

SEQ ID NO: 1764681 - RNA, 19 nt, Homo sapiens
  misc_RNA (1)...(19): siRNA sense strand
agagacaacugaugaaaua

SEQ ID NO: 1764682 - RNA, 19 nt, Homo sapiens
  misc_RNA (1)...(19): siRNA sense strand
gggaguauauggguuauua

SEQ ID NO: 1764683 - RNA, 19 nt, Homo sapiens
  misc_RNA (1)...(19): siRNA sense strand
ccagagagcuuccagagaa

SEQ ID NO: 1764684 - RNA, 19 nt, Homo sapiens
  misc_RNA (1)...(19): siRNA sense strand
gcaaauggaaucuuuauga

SEQ ID NO: 1764685 - RNA, 19 nt, Homo sapiens
  misc_RNA (1)...(19): siRNA sense strand
caaacaggcucuagagauu

SEQ ID NO: 1764686 - RNA, 19 nt, Homo sapiens
  misc_RNA (1)...(19): siRNA sense strand
ggucacagcuggauguuug

SEQ ID NO: 1764687 - RNA, 19 nt, Homo sapiens
  misc_RNA (1)...(19): siRNA sense strand
gaaguaaugugccaguaga

SEQ ID NO: 1764688 - RNA, 19 nt, Homo sapiens
  misc_RNA (1)...(19): siRNA sense strand
gaagguagaaaucaucaua

SEQ ID NO: 1764689 - RNA, 19 nt, Homo sapiens
  misc_RNA (1)...(19): siRNA sense strand
caaaggaucuucccaagca

SEQ ID NO: 1764690 - RNA, 19 nt, Homo sapiens
  misc_RNA (1)...(19): siRNA sense strand
gcaguguucucuuaaggua

SEQ ID NO: 1764691 - RNA, 19 nt, Homo sapiens
  misc_RNA (1)...(19): siRNA sense strand
ggaagugaauguugggaaa

SEQ ID NO: 1764692 - RNA, 19 nt, Homo sapiens
  misc_RNA (1)...(19): siRNA sense strand
cgaaguaguuuaucugaga

SEQ ID NO: 1764693 - RNA, 19 nt, Homo sapiens
  misc_RNA (1)...(19): siRNA sense strand
gaauuaccauuaacacaug

SEQ ID NO: 1764694 - RNA, 19 nt, Homo sapiens
  misc_RNA (1)...(19): siRNA sense strand
guaugugucuuaaguuuga

SEQ ID NO: 1764695 - RNA, 19 nt, Homo sapiens
  misc_RNA (1)...(19): siRNA sense strand
gcaagaagguagaaaucau

SEQ ID NO: 1764696 - RNA, 19 nt, Homo sapiens
  misc_RNA (1)...(19): siRNA sense strand
ccagaaaguaugugucuua

SEQ ID NO: 1764697 - RNA, 19 nt, Homo sapiens
  misc_RNA (1)...(19): siRNA sense strand
gcaaaucuguguugaacca

SEQ ID NO: 1764698 - RNA, 19 nt, Homo sapiens
  misc_RNA (1)...(19): siRNA sense strand
ggccaaggcucaugaacuu

SEQ ID NO: 1764699 - RNA, 19 nt, Homo sapiens
  misc_RNA (1)...(19): siRNA sense strand
gaagagagcacuuacugau

SEQ ID NO: 1764700 - RNA, 19 nt, Homo sapiens
  misc_RNA (1)...(19): siRNA sense strand
gaaaagaaaugacuacgau

SEQ ID NO: 1764701 - RNA, 19 nt, Homo sapiens
  misc_RNA (1)...(19): siRNA sense strand
gguaauccaaguaauguua

SEQ ID NO: 1764702 - RNA, 19 nt, Homo sapiens
  misc_RNA (1)...(19): siRNA sense strand
caucuagucuucacaguau

SEQ ID NO: 1764703 - RNA, 19 nt, Homo sapiens
  misc_RNA (1)...(19): siRNA sense strand
auaaagagauuccaaaugg

SEQ ID NO: 1764704 - RNA, 19 nt, Homo sapiens
  misc_RNA (1)...(19): siRNA sense strand
gaucgagacagucaagaua

SEQ ID NO: 1764705 - RNA, 19 nt, Homo sapiens
  misc_RNA (1)...(19): siRNA sense strand
gcagcuacuugguaucaaa

SEQ ID NO: 1764706 - RNA, 19 nt, Homo sapiens
  misc_RNA (1)...(19): siRNA sense strand
ugacuacgaugauaccauu

SEQ ID NO: 1764707 - RNA, 19 nt, Homo sapiens
  misc_RNA (1)...(19): siRNA sense strand
agaaaugacuacgaugaua

SEQ ID NO: 1764708 - RNA, 19 nt, Homo sapiens
  misc_RNA (1)...(19): siRNA sense strand
aaacuggacuuaauguguu

SEQ ID NO: 1764709 - RNA, 19 nt, Homo sapiens
  misc_RNA (1)...(19): siRNA sense strand
guaaugcuguggaugaguu

SEQ ID NO: 1764710 - RNA, 19 nt, Homo sapiens
  misc_RNA (1)...(19): siRNA sense strand
ugagacagcuggacuucaa

SEQ ID NO: 1764711 - RNA, 19 nt, Homo sapiens
  misc_RNA (1)...(19): siRNA sense strand
gaaguaguuuaucugagaa

SEQ ID NO: 1764712 - RNA, 19 nt, Homo sapiens
  misc_RNA (1)...(19): siRNA sense strand
ggaugaaguugcagaagau

SEQ ID NO: 1764713 - RNA, 19 nt, Homo sapiens
  misc_RNA (1)...(19): siRNA sense strand
gaaacuggacuuaaugugu

SEQ ID NO: 1764714 - RNA, 19 nt, Homo sapiens
  misc_RNA (1)...(19): siRNA sense strand
cuacuggugucauguauau

SEQ ID NO: 1764715 - RNA, 19 nt, Homo sapiens
  misc_RNA (1)...(19): siRNA sense strand
uguuggaucuuacugaaua

SEQ ID NO: 1764716 - RNA, 19 nt, Homo sapiens
  misc_RNA (1)...(19): siRNA sense strand
caagggaguauauggguua

SEQ ID NO: 1764717 - RNA, 19 nt, Homo sapiens
  misc_RNA (1)...(19): siRNA sense strand
aaaggaacaucuagucuuc

SEQ ID NO: 1764718 - RNA, 19 nt, Homo sapiens
  misc_RNA (1)...(19): siRNA sense strand
gcaaacaggcucuagagau

SEQ ID NO: 1764719 - RNA, 19 nt, Homo sapiens
  misc_RNA (1)...(19): siRNA sense strand
agucuuggcuggacaguuu

SEQ ID NO: 1764720 - RNA, 19 nt, Homo sapiens
  misc_RNA (1)...(19): siRNA sense strand
ccagaugcauuuauuucaa

SEQ ID NO: 1764721 - RNA, 19 nt, Homo sapiens
  misc_RNA (1)...(19): siRNA sense strand
gaaggaagacuugcuuuca

SEQ ID NO: 1764722 - RNA, 19 nt, Homo sapiens
  misc_RNA (1)...(19): siRNA sense strand
guacgaauugacuaacuua

SEQ ID NO: 1764723 - RNA, 19 nt, Homo sapiens
  misc_RNA (1)...(19): siRNA sense strand
cgaauugacuaacuuacug

SEQ ID NO: 1764724 - RNA, 19 nt, Homo sapiens
  misc_RNA (1)...(19): siRNA sense strand
cagaaaguaugugucuuaa

SEQ ID NO: 1764725 - RNA, 19 nt, Homo sapiens
  misc_RNA (1)...(19): siRNA sense strand
gaagcccuauuccucacua

SEQ ID NO: 1764726 - RNA, 19 nt, Homo sapiens
  misc_RNA (1)...(19): siRNA sense strand
ugacugugguguucagauu

SEQ ID NO: 1764727 - RNA, 19 nt, Homo sapiens
  misc_RNA (1)...(19): siRNA sense strand
ucagcgagcuccuggauca

SEQ ID NO: 1764728 - RNA, 19 nt, Homo sapiens
  misc_RNA (1)...(19): siRNA sense strand
gagaagagagcacuuacug

SEQ ID NO: 1764729 - RNA, 19 nt, Homo sapiens
  misc_RNA (1)...(19): siRNA sense strand
gaugauaccauuccaaucu

SEQ ID NO: 1764730 - RNA, 19 nt, Homo sapiens
  misc_RNA (1)...(19): siRNA sense strand
gaauaugagaugcguaaug

SEQ ID NO: 1764731 - RNA, 19 nt, Homo sapiens
  misc_RNA (1)...(19): siRNA sense strand
ccaaugucaugaucaucua

SEQ ID NO: 1764732 - RNA, 19 nt, Homo sapiens
  misc_RNA (1)...(19): siRNA sense strand
gagauucgaaguaguuuau

SEQ ID NO: 1764733 - RNA, 19 nt, Homo sapiens
  misc_RNA (1)...(19): siRNA sense strand
cagaagauauggguaagug

SEQ ID NO: 1764734 - RNA, 19 nt, Homo sapiens
  misc_RNA (1)...(19): siRNA sense strand
gaaaaucacuguguuacug

SEQ ID NO: 1764735 - RNA, 19 nt, Homo sapiens
  misc_RNA (1)...(19): siRNA sense strand
gcucaugaacuuccagaaa

SEQ ID NO: 1764736 - RNA, 19 nt, Homo sapiens
  misc_RNA (1)...(19): siRNA sense strand
gagauaauaaugugugaug

SEQ ID NO: 1764737 - RNA, 19 nt, Homo sapiens
  misc_RNA (1)...(19): siRNA sense strand
cuggagcaguguucucuua

SEQ ID NO: 1764738 - RNA, 19 nt, Homo sapiens
  misc_RNA (1)...(19): siRNA sense strand
agacaugcaucgagguuug

SEQ ID NO: 1764739 - RNA, 19 nt, Homo sapiens
  misc_RNA (1)...(19): siRNA sense strand
gaauccaaguugcaaaucu

SEQ ID NO: 1764740 - RNA, 19 nt, Homo sapiens
  misc_RNA (1)...(19): siRNA sense strand
ggacuuaauguguucuuau

SEQ ID NO: 1764741 - RNA, 19 nt, Homo sapiens
  misc_RNA (1)...(19): siRNA sense strand
uaaaggcacaccugaagaa

SEQ ID NO: 1764742 - RNA, 19 nt, Homo sapiens
  misc_RNA (1)...(19): siRNA sense strand
caaaccaccggagauaaua

SEQ ID NO: 1764743 - RNA, 19 nt, Homo sapiens
  misc_RNA (1)...(19): siRNA sense strand
aaagaaaugacuacgauga

SEQ ID NO: 1764744 - RNA, 19 nt, Homo sapiens
  misc_RNA (1)...(19): siRNA sense strand
auaaagagcaaacaacuga

SEQ ID NO: 1764745 - RNA, 19 nt, Homo sapiens
  misc_RNA (1)...(19): siRNA sense strand
caauacagggaacagaaua

SEQ ID NO: 1764746 - RNA, 19 nt, Homo sapiens
  misc_RNA (1)...(19): siRNA sense strand
gaaaugacuacgaugauac

SEQ ID NO: 1764747 - RNA, 19 nt, Homo sapiens
  misc_RNA (1)...(19): siRNA sense strand
ggacaagcaggaagugaau

SEQ ID NO: 1764748 - RNA, 19 nt, Homo sapiens
  misc_RNA (1)...(19): siRNA sense strand
ggaaccuacuggugucaug

SEQ ID NO: 1764749 - RNA, 19 nt, Homo sapiens
  misc_RNA (1)...(19): siRNA sense strand
agacuugcuuucaaacuug

SEQ ID NO: 1764750 - RNA, 19 nt, Homo sapiens
  misc_RNA (1)...(19): siRNA sense strand
aggaagacuugcuuucaaa

SEQ ID NO: 1764751 - RNA, 19 nt, Homo sapiens
  misc_RNA (1)...(19): siRNA sense strand
gagcaguguucucuuaagg

SEQ ID NO: 1764752 - RNA, 19 nt, Homo sapiens
  misc_RNA (1)...(19): siRNA sense strand
cagauucaauuaggauuug

SEQ ID NO: 1764753 - RNA, 19 nt, Homo sapiens
  misc_RNA (1)...(19): siRNA sense strand
caaauggaaauacaucaga

SEQ ID NO: 1764754 - RNA, 19 nt, Homo sapiens
  misc_RNA (1)...(19): siRNA sense strand
ccauuuaguuucucugaca

SEQ ID NO: 1764755 - RNA, 19 nt, Homo sapiens
  misc_RNA (1)...(19): siRNA sense strand
ggaaggaagacuugcuuuc

SEQ ID NO: 1764756 - RNA, 19 nt, Homo sapiens
  misc_RNA (1)...(19): siRNA sense strand
ggacaugguuaugaaaauu

SEQ ID NO: 1764757 - RNA, 19 nt, Homo sapiens
  misc_RNA (1)...(19): siRNA sense strand
gaaauacaucagagcuuau

SEQ ID NO: 1764758 - RNA, 19 nt, Homo sapiens
  misc_RNA (1)...(19): siRNA sense strand
uggaugaaguugcagaaga

SEQ ID NO: 1764759 - RNA, 19 nt, Homo sapiens
  misc_RNA (1)...(19): siRNA sense strand
caacugaugaaauaccauu

SEQ ID NO: 1764760 - RNA, 19 nt, Homo sapiens
  misc_RNA (1)...(19): siRNA sense strand
uaaaggaacaucuagucuu

SEQ ID NO: 1764761 - RNA, 19 nt, Homo sapiens
  misc_RNA (1)...(19): siRNA sense strand
cacuugaucuagauauuga

SEQ ID NO: 1764762 - RNA, 19 nt, Homo sapiens
  misc_RNA (1)...(19): siRNA sense strand
uuacaaaccaccggagaua

SEQ ID NO: 1764763 - RNA, 19 nt, Homo sapiens
  misc_RNA (1)...(19): siRNA sense strand
gcucuagagauucgaagua

SEQ ID NO: 1764764 - RNA, 19 nt, Homo sapiens
  misc_RNA (1)...(19): siRNA sense strand
ccaggcagcacauugguuu

SEQ ID NO: 1764765 - RNA, 19 nt, Homo sapiens
  misc_RNA (1)...(19): siRNA sense strand
gcauuuauuucaaguuucg

SEQ ID NO: 1764766 - RNA, 19 nt, Homo sapiens
  misc_RNA (1)...(19): siRNA sense strand
aaagucaccgccaauauug

SEQ ID NO: 1764767 - RNA, 19 nt, Homo sapiens
  misc_RNA (1)...(19): siRNA sense strand
gacuccagaugcauuuauu

SEQ ID NO: 1764768 - RNA, 19 nt, Homo sapiens
  misc_RNA (1)...(19): siRNA sense strand
aaggaagacuugcuuucaa

SEQ ID NO: 1764769 - RNA, 19 nt, Homo sapiens
  misc_RNA (1)...(19): siRNA sense strand
ggagcaguguucucuuaag

SEQ ID NO: 1764770 - RNA, 19 nt, Homo sapiens
  misc_RNA (1)...(19): siRNA sense strand
ccauauaggucugaaaauu

SEQ ID NO: 1764771 - RNA, 19 nt, Homo sapiens
  misc_RNA (1)...(19): siRNA sense strand
aaacaacugaccagccuuu

SEQ ID NO: 1764772 - RNA, 19 nt, Homo sapiens
  misc_RNA (1)...(19): siRNA sense strand
guagagacaacugaugaaa

SEQ ID NO: 1764773 - RNA, 19 nt, Homo sapiens
  misc_RNA (1)...(19): siRNA sense strand
caccggagauaauaaugug

SEQ ID NO: 1764774 - RNA, 19 nt, Homo sapiens
  misc_RNA (1)...(19): siRNA sense strand
gaauugacuaacuuacuga

SEQ ID NO: 1764775 - RNA, 19 nt, Homo sapiens
  misc_RNA (1)...(19): siRNA sense strand
caauaucagugguucaaaa

SEQ ID NO: 1764776 - RNA, 19 nt, Homo sapiens
  misc_RNA (1)...(19): siRNA sense strand
aaagaaacuggacuuaaug

SEQ ID NO: 1764777 - RNA, 19 nt, Homo sapiens
  misc_RNA (1)...(19): siRNA sense strand
caaacuagaagucaucauu

SEQ ID NO: 1764778 - RNA, 19 nt, Homo sapiens
  misc_RNA (1)...(19): siRNA sense strand
acaggaagcugacuaugga

SEQ ID NO: 1764779 - RNA, 19 nt, Homo sapiens
  misc_RNA (1)...(19): siRNA sense strand
gaagcugacuauggaagaa

SEQ ID NO: 1764780 - RNA, 19 nt, Homo sapiens
  misc_RNA (1)...(19): siRNA sense strand
ucucaaagauucagucaca

SEQ ID NO: 1764781 - RNA, 19 nt, Homo sapiens
  misc_RNA (1)...(19): siRNA sense strand
uggacaaacugaucaagaa

SEQ ID NO: 1764782 - RNA, 19 nt, Homo sapiens
  misc_RNA (1)...(19): siRNA sense strand
gcacuucggcugcaccauu

SEQ ID NO: 1764783 - RNA, 19 nt, Homo sapiens
  misc_RNA (1)...(19): siRNA sense strand
agacaaaccuggccuuggu

SEQ ID NO: 1764784 - RNA, 19 nt, Homo sapiens
  misc_RNA (1)...(19): siRNA sense strand
ccauuggucucaaagauuc

SEQ ID NO: 1764785 - RNA, 19 nt, Homo sapiens
  misc_RNA (1)...(19): siRNA sense strand
gcaucagcgugcucuugua

SEQ ID NO: 1764786 - RNA, 19 nt, Homo sapiens
  misc_RNA (1)...(19): siRNA sense strand
gaugggaaagccaguauug

SEQ ID NO: 1764787 - RNA, 19 nt, Homo sapiens
  misc_RNA (1)...(19): siRNA sense strand
gggaugaggaugaggauga

SEQ ID NO: 1764788 - RNA, 19 nt, Homo sapiens
  misc_RNA (1)...(19): siRNA sense strand
gaagaguccuaugaguuca

SEQ ID NO: 1764789 - RNA, 19 nt, Homo sapiens
  misc_RNA (1)...(19): siRNA sense strand
ggaugaggaugaggaugaa

SEQ ID NO: 1764790 - RNA, 19 nt, Homo sapiens
  misc_RNA (1)...(19): siRNA sense strand
ccaagaggauagcagagau

SEQ ID NO: 1764791 - RNA, 19 nt, Homo sapiens
  misc_RNA (1)...(19): siRNA sense strand
uagaagucaucauugaaga

SEQ ID NO: 1764792 - RNA, 19 nt, Homo sapiens
  misc_RNA (1)...(19): siRNA sense strand
ugaagaguccuaugaguuc

SEQ ID NO: 1764793 - RNA, 19 nt, Homo sapiens
  misc_RNA (1)...(19): siRNA sense strand
gcaacgccgucaaugucuu

SEQ ID NO: 1764794 - RNA, 19 nt, Homo sapiens
  misc_RNA (1)...(19): siRNA sense strand
ggagggaccaguucaugga

SEQ ID NO: 1764795 - RNA, 19 nt, Homo sapiens
  misc_RNA (1)...(19): siRNA sense strand
ccuaugaguucaagacuac

SEQ ID NO: 1764796 - RNA, 19 nt, Homo sapiens
  misc_RNA (1)...(19): siRNA sense strand
gcagcaacgccgucaaugu

SEQ ID NO: 1764797 - RNA, 19 nt, Homo sapiens
  misc_RNA (1)...(19): siRNA sense strand
aaacuagaagucaucauug

SEQ ID NO: 1764798 - RNA, 19 nt, Homo sapiens
  misc_RNA (1)...(19): siRNA sense strand
ggaagcugacuauggaaga

SEQ ID NO: 1764799 - RNA, 19 nt, Homo sapiens
  misc_RNA (1)...(19): siRNA sense strand
aacuagaagucaucauuga

SEQ ID NO: 1764800 - RNA, 19 nt, Homo sapiens
  misc_RNA (1)...(19): siRNA sense strand
gcugcaagcucgccacaac

SEQ ID NO: 1764801 - RNA, 19 nt, Homo sapiens
  misc_RNA (1)...(19): siRNA sense strand
agacuacgguggacaaacu

SEQ ID NO: 1764802 - RNA, 19 nt, Homo sapiens
  misc_RNA (1)...(19): siRNA sense strand
gacaaacugaucaagaaga

SEQ ID NO: 1764803 - RNA, 19 nt, Homo sapiens
  misc_RNA (1)...(19): siRNA sense strand
aaacugaucaagaagacaa

SEQ ID NO: 1764804 - RNA, 19 nt, Homo sapiens
  misc_RNA (1)...(19): siRNA sense strand
gaagucaucauugaagagu

SEQ ID NO: 1764805 - RNA, 19 nt, Homo sapiens
  misc_RNA (1)...(19): siRNA sense strand
gacaggaagcugacuaugg

SEQ ID NO: 1764806 - RNA, 19 nt, Homo sapiens
  misc_RNA (1)...(19): siRNA sense strand
ggacaaacugaucaagaag

SEQ ID NO: 1764807 - RNA, 19 nt, Homo sapiens
  misc_RNA (1)...(19): siRNA sense strand
gagaugggaaagccaguau

SEQ ID NO: 1764808 - RNA, 19 nt, Homo sapiens
  misc_RNA (1)...(19): siRNA sense strand
cagcaacgccgucaauguc

SEQ ID NO: 1764809 - RNA, 19 nt, Homo sapiens
  misc_RNA (1)...(19): siRNA sense strand
ggauagcagagaugggaaa

SEQ ID NO: 1764810 - RNA, 19 nt, Homo sapiens
  misc_RNA (1)...(19): siRNA sense strand
cauacucuuugccacacua

SEQ ID NO: 1764811 - RNA, 19 nt, Homo sapiens
  misc_RNA (1)...(19): siRNA sense strand
cuagaggccuauugcuaca

SEQ ID NO: 1764812 - RNA, 19 nt, Homo sapiens
  misc_RNA (1)...(19): siRNA sense strand
gcuccucuacauacucuuu

SEQ ID NO: 1764813 - RNA, 19 nt, Homo sapiens
  misc_RNA (1)...(19): siRNA sense strand
cacuagaggccuauugcua

SEQ ID NO: 1764814 - RNA, 19 nt, Homo sapiens
  misc_RNA (1)...(19): siRNA sense strand
cacuucggcugcaccauug

SEQ ID NO: 1764815 - RNA, 19 nt, Homo sapiens
  misc_RNA (1)...(19): siRNA sense strand
gggcagcaacgccgucaau

SEQ ID NO: 1764816 - RNA, 19 nt, Homo sapiens
  misc_RNA (1)...(19): siRNA sense strand
gccuguggcuccucuacau

SEQ ID NO: 1764817 - RNA, 19 nt, Homo sapiens
  misc_RNA (1)...(19): siRNA sense strand
caagaggauagcagagaug

SEQ ID NO: 1764818 - RNA, 19 nt, Homo sapiens
  misc_RNA (1)...(19): siRNA sense strand
aggcugcccuccugcuuug

SEQ ID NO: 1764819 - RNA, 19 nt, Homo sapiens
  misc_RNA (1)...(19): siRNA sense strand
acaaacugaucaagaagac

SEQ ID NO: 1764820 - RNA, 19 nt, Homo sapiens
  misc_RNA (1)...(19): siRNA sense strand
guggacaaacugaucaaga

SEQ ID NO: 1764821 - RNA, 19 nt, Homo sapiens
  misc_RNA (1)...(19): siRNA sense strand
gccaagaggauagcagaga

SEQ ID NO: 1764822 - RNA, 19 nt, Homo sapiens
  misc_RNA (1)...(19): siRNA sense strand
cugcugcccuccaggaugu

SEQ ID NO: 1764823 - RNA, 19 nt, Homo sapiens
  misc_RNA (1)...(19): siRNA sense strand
gaagaagaggaggccaaga

SEQ ID NO: 1764824 - RNA, 19 nt, Homo sapiens
  misc_RNA (1)...(19): siRNA sense strand
uugaagaguccuaugaguu

SEQ ID NO: 1764825 - RNA, 19 nt, Homo sapiens
  misc_RNA (1)...(19): siRNA sense strand
gaggaggccaagaggauag

SEQ ID NO: 1764826 - RNA, 19 nt, Homo sapiens
  misc_RNA (1)...(19): siRNA sense strand
agucacagcuguuguuuuc

SEQ ID NO: 1764827 - RNA, 19 nt, Homo sapiens
  misc_RNA (1)...(19): siRNA sense strand
cuagaagucaucauugaag

SEQ ID NO: 1764828 - RNA, 19 nt, Homo sapiens
  misc_RNA (1)...(19): siRNA sense strand
ccacacuagaggccuauug

SEQ ID NO: 1764829 - RNA, 19 nt, Homo sapiens
  misc_RNA (1)...(19): siRNA sense strand
gcaagcucgccacaacaug

SEQ ID NO: 1764830 - RNA, 19 nt, Homo sapiens
  misc_RNA (1)...(19): siRNA sense strand
caccaucuuugcauuuguc

SEQ ID NO: 1764831 - RNA, 19 nt, Homo sapiens
  misc_RNA (1)...(19): siRNA sense strand
ucaagacuacgguggacaa

SEQ ID NO: 1764832 - RNA, 19 nt, Homo sapiens
  misc_RNA (1)...(19): siRNA sense strand
caugcucaccgccaucauu

SEQ ID NO: 1764833 - RNA, 19 nt, Homo sapiens
  misc_RNA (1)...(19): siRNA sense strand
gcacuuccugacugucuuc

SEQ ID NO: 1764834 - RNA, 19 nt, Homo sapiens
  misc_RNA (1)...(19): siRNA sense strand
caacgccgucaaugucuuc

SEQ ID NO: 1764835 - RNA, 19 nt, Homo sapiens
  misc_RNA (1)...(19): siRNA sense strand
ccuccaggauguauaugca

SEQ ID NO: 1764836 - RNA, 19 nt, Homo sapiens
  misc_RNA (1)...(19): siRNA sense strand
ucuggaaggugcuguuugc

SEQ ID NO: 1764837 - RNA, 19 nt, Homo sapiens
  misc_RNA (1)...(19): siRNA sense strand
uccuaugaguucaagacua

SEQ ID NO: 1764838 - RNA, 19 nt, Homo sapiens
  misc_RNA (1)...(19): siRNA sense strand
cagacaggaagcugacuau

SEQ ID NO: 1764839 - RNA, 19 nt, Homo sapiens
  misc_RNA (1)...(19): siRNA sense strand
ucaccaucuuugcauuugu

SEQ ID NO: 1764840 - RNA, 19 nt, Homo sapiens
  misc_RNA (1)...(19): siRNA sense strand
agaggaggccaagaggaua

SEQ ID NO: 1764841 - RNA, 19 nt, Homo sapiens
  misc_RNA (1)...(19): siRNA sense strand
aagaggaggccaagaggau

SEQ ID NO: 1764842 - RNA, 19 nt, Homo sapiens
  misc_RNA (1)...(19): siRNA sense strand
caaacuagaagucaucauu

SEQ ID NO: 1764843 - RNA, 19 nt, Homo sapiens
  misc_RNA (1)...(19): siRNA sense strand
acaggaagcugacuaugga

SEQ ID NO: 1764844 - RNA, 19 nt, Homo sapiens
  misc_RNA (1)...(19): siRNA sense strand
gaagcugacuauggaagaa

SEQ ID NO: 1764845 - RNA, 19 nt, Homo sapiens
  misc_RNA (1)...(19): siRNA sense strand
ucucaaagauucagucaca

SEQ ID NO: 1764846 - RNA, 19 nt, Homo sapiens
  misc_RNA (1)...(19): siRNA sense strand
uggacaaacugaucaagaa

SEQ ID NO: 1764847 - RNA, 19 nt, Homo sapiens
  misc_RNA (1)...(19): siRNA sense strand
gcacuucggcugcaccauu

SEQ ID NO: 1764848 - RNA, 19 nt, Homo sapiens
  misc_RNA (1)...(19): siRNA sense strand
agacaaaccuggccuuggu

SEQ ID NO: 1764849 - RNA, 19 nt, Homo sapiens
  misc_RNA (1)...(19): siRNA sense strand
ccauuggucucaaagauuc

SEQ ID NO: 1764850 - RNA, 19 nt, Homo sapiens
  misc_RNA (1)...(19): siRNA sense strand
gcaucagcgugcucuugua

SEQ ID NO: 1764851 - RNA, 19 nt, Homo sapiens
  misc_RNA (1)...(19): siRNA sense strand
gaugggaaagccaguauug

SEQ ID NO: 1764852 - RNA, 19 nt, Homo sapiens
  misc_RNA (1)...(19): siRNA sense strand
gggaugaggaugaggauga

SEQ ID NO: 1764853 - RNA, 19 nt, Homo sapiens
  misc_RNA (1)...(19): siRNA sense strand
gaagaguccuaugaguuca

SEQ ID NO: 1764854 - RNA, 19 nt, Homo sapiens
  misc_RNA (1)...(19): siRNA sense strand
ggaugaggaugaggaugaa

SEQ ID NO: 1764855 - RNA, 19 nt, Homo sapiens
  misc_RNA (1)...(19): siRNA sense strand
ccaagaggauagcagagau

SEQ ID NO: 1764856 - RNA, 19 nt, Homo sapiens
  misc_RNA (1)...(19): siRNA sense strand
uagaagucaucauugaaga

SEQ ID NO: 1764857 - RNA, 19 nt, Homo sapiens
  misc_RNA (1)...(19): siRNA sense strand
ugaagaguccuaugaguuc

SEQ ID NO: 1764858 - RNA, 19 nt, Homo sapiens
  misc_RNA (1)...(19): siRNA sense strand
gcaacgccgucaaugucuu

SEQ ID NO: 1764859 - RNA, 19 nt, Homo sapiens
  misc_RNA (1)...(19): siRNA sense strand
ggagggaccaguucaugga

SEQ ID NO: 1764860 - RNA, 19 nt, Homo sapiens
  misc_RNA (1)...(19): siRNA sense strand
ccuaugaguucaagacuac

SEQ ID NO: 1764861 - RNA, 19 nt, Homo sapiens
  misc_RNA (1)...(19): siRNA sense strand
gcagcaacgccgucaaugu

SEQ ID NO: 1764862 - RNA, 19 nt, Homo sapiens
  misc_RNA (1)...(19): siRNA sense strand
aaacuagaagucaucauug

SEQ ID NO: 1764863 - RNA, 19 nt, Homo sapiens
  misc_RNA (1)...(19): siRNA sense strand
ggaagcugacuauggaaga

SEQ ID NO: 1764864 - RNA, 19 nt, Homo sapiens
  misc_RNA (1)...(19): siRNA sense strand
aacuagaagucaucauuga

SEQ ID NO: 1764865 - RNA, 19 nt, Homo sapiens
  misc_RNA (1)...(19): siRNA sense strand
gcugcaagcucgccacaac

SEQ ID NO: 1764866 - RNA, 19 nt, Homo sapiens
  misc_RNA (1)...(19): siRNA sense strand
agacuacgguggacaaacu

SEQ ID NO: 1764867 - RNA, 19 nt, Homo sapiens
  misc_RNA (1)...(19): siRNA sense strand
gacaaacugaucaagaaga

SEQ ID NO: 1764868 - RNA, 19 nt, Homo sapiens
  misc_RNA (1)...(19): siRNA sense strand
aaacugaucaagaagacaa

SEQ ID NO: 1764869 - RNA, 19 nt, Homo sapiens
  misc_RNA (1)...(19): siRNA sense strand
gaagucaucauugaagagu

SEQ ID NO: 1764870 - RNA, 19 nt, Homo sapiens
  misc_RNA (1)...(19): siRNA sense strand
gacaggaagcugacuaugg

SEQ ID NO: 1764871 - RNA, 19 nt, Homo sapiens
  misc_RNA (1)...(19): siRNA sense strand
ggacaaacugaucaagaag

SEQ ID NO: 1764872 - RNA, 19 nt, Homo sapiens
  misc_RNA (1)...(19): siRNA sense strand
gagaugggaaagccaguau

SEQ ID NO: 1764873 - RNA, 19 nt, Homo sapiens
  misc_RNA (1)...(19): siRNA sense strand
cagcaacgccgucaauguc

SEQ ID NO: 1764874 - RNA, 19 nt, Homo sapiens
  misc_RNA (1)...(19): siRNA sense strand
ggauagcagagaugggaaa

SEQ ID NO: 1764875 - RNA, 19 nt, Homo sapiens
  misc_RNA (1)...(19): siRNA sense strand
cauacucuuugccacacua

SEQ ID NO: 1764876 - RNA, 19 nt, Homo sapiens
  misc_RNA (1)...(19): siRNA sense strand
cuagaggccuauugcuaca

SEQ ID NO: 1764877 - RNA, 19 nt, Homo sapiens
  misc_RNA (1)...(19): siRNA sense strand
gcuccucuacauacucuuu

SEQ ID NO: 1764878 - RNA, 19 nt, Homo sapiens
  misc_RNA (1)...(19): siRNA sense strand
cacuagaggccuauugcua

SEQ ID NO: 1764879 - RNA, 19 nt, Homo sapiens
  misc_RNA (1)...(19): siRNA sense strand
cacuucggcugcaccauug

SEQ ID NO: 1764880 - RNA, 19 nt, Homo sapiens
  misc_RNA (1)...(19): siRNA sense strand
gggcagcaacgccgucaau

SEQ ID NO: 1764881 - RNA, 19 nt, Homo sapiens
  misc_RNA (1)...(19): siRNA sense strand
gccuguggcuccucuacau

SEQ ID NO: 1764882 - RNA, 19 nt, Homo sapiens
  misc_RNA (1)...(19): siRNA sense strand
caagaggauagcagagaug

SEQ ID NO: 1764883 - RNA, 19 nt, Homo sapiens
  misc_RNA (1)...(19): siRNA sense strand
aggcugcccuccugcuuug

SEQ ID NO: 1764884 - RNA, 19 nt, Homo sapiens
  misc_RNA (1)...(19): siRNA sense strand
acaaacugaucaagaagac

SEQ ID NO: 1764885 - RNA, 19 nt, Homo sapiens
  misc_RNA (1)...(19): siRNA sense strand
guggacaaacugaucaaga

SEQ ID NO: 1764886 - RNA, 19 nt, Homo sapiens
  misc_RNA (1)...(19): siRNA sense strand
gccaagaggauagcagaga

SEQ ID NO: 1764887 - RNA, 19 nt, Homo sapiens
  misc_RNA (1)...(19): siRNA sense strand
cugcugcccuccaggaugu

SEQ ID NO: 1764888 - RNA, 19 nt, Homo sapiens
  misc_RNA (1)...(19): siRNA sense strand
gaagaagaggaggccaaga

SEQ ID NO: 1764889 - RNA, 19 nt, Homo sapiens
  misc_RNA (1)...(19): siRNA sense strand
uugaagaguccuaugaguu

SEQ ID NO: 1764890 - RNA, 19 nt, Homo sapiens
  misc_RNA (1)...(19): siRNA sense strand
gaggaggccaagaggauag

SEQ ID NO: 1764891 - RNA, 19 nt, Homo sapiens
  misc_RNA (1)...(19): siRNA sense strand
agucacagcuguuguuuuc

SEQ ID NO: 1764892 - RNA, 19 nt, Homo sapiens
  misc_RNA (1)...(19): siRNA sense strand
cuagaagucaucauugaag

SEQ ID NO: 1764893 - RNA, 19 nt, Homo sapiens
  misc_RNA (1)...(19): siRNA sense strand
ccacacuagaggccuauug

SEQ ID NO: 1764894 - RNA, 19 nt, Homo sapiens
  misc_RNA (1)...(19): siRNA sense strand
gcaagcucgccacaacaug

SEQ ID NO: 1764895 - RNA, 19 nt, Homo sapiens
  misc_RNA (1)...(19): siRNA sense strand
caccaucuuugcauuuguc

SEQ ID NO: 1764896 - RNA, 19 nt, Homo sapiens
  misc_RNA (1)...(19): siRNA sense strand
ucaagacuacgguggacaa

SEQ ID NO: 1764897 - RNA, 19 nt, Homo sapiens
  misc_RNA (1)...(19): siRNA sense strand
caugcucaccgccaucauu

SEQ ID NO: 1764898 - RNA, 19 nt, Homo sapiens
  misc_RNA (1)...(19): siRNA sense strand
gcacuuccugacugucuuc

SEQ ID NO: 1764899 - RNA, 19 nt, Homo sapiens
  misc_RNA (1)...(19): siRNA sense strand
caacgccgucaaugucuuc

SEQ ID NO: 1764900 - RNA, 19 nt, Homo sapiens
  misc_RNA (1)...(19): siRNA sense strand
ccuccaggauguauaugca

SEQ ID NO: 1764901 - RNA, 19 nt, Homo sapiens
  misc_RNA (1)...(19): siRNA sense strand
ucuggaaggugcuguuugc

SEQ ID NO: 1764902 - RNA, 19 nt, Homo sapiens
  misc_RNA (1)...(19): siRNA sense strand
uccuaugaguucaagacua

SEQ ID NO: 1764903 - RNA, 19 nt, Homo sapiens
  misc_RNA (1)...(19): siRNA sense strand
cagacaggaagcugacuau

SEQ ID NO: 1764904 - RNA, 19 nt, Homo sapiens
  misc_RNA (1)...(19): siRNA sense strand
ucaccaucuuugcauuugu

SEQ ID NO: 1764905 - RNA, 19 nt, Homo sapiens
  misc_RNA (1)...(19): siRNA sense strand
agaggaggccaagaggaua

SEQ ID NO: 1764906 - RNA, 19 nt, Homo sapiens
  misc_RNA (1)...(19): siRNA sense strand
aagaggaggccaagaggau

SEQ ID NO: 1764907 - RNA, 19 nt, Homo sapiens
  misc_RNA (1)...(19): siRNA sense strand
caaacuagaagucaucauu

SEQ ID NO: 1764908 - RNA, 19 nt, Homo sapiens
  misc_RNA (1)...(19): siRNA sense strand
acaggaagcugacuaugga

SEQ ID NO: 1764909 - RNA, 19 nt, Homo sapiens
  misc_RNA (1)...(19): siRNA sense strand
gaagcugacuauggaagaa

SEQ ID NO: 1764910 - RNA, 19 nt, Homo sapiens
  misc_RNA (1)...(19): siRNA sense strand
ucucaaagauucagucaca

SEQ ID NO: 1764911 - RNA, 19 nt, Homo sapiens
  misc_RNA (1)...(19): siRNA sense strand
uggacaaacugaucaagaa

SEQ ID NO: 1764912 - RNA, 19 nt, Homo sapiens
  misc_RNA (1)...(19): siRNA sense strand
gcacuucggcugcaccauu

SEQ ID NO: 1764913 - RNA, 19 nt, Homo sapiens
  misc_RNA (1)...(19): siRNA sense strand
agacaaaccuggccuuggu

SEQ ID NO: 1764914 - RNA, 19 nt, Homo sapiens
  misc_RNA (1)...(19): siRNA sense strand
ccauuggucucaaagauuc

SEQ ID NO: 1764915 - RNA, 19 nt, Homo sapiens
  misc_RNA (1)...(19): siRNA sense strand
gcaucagcgugcucuugua

SEQ ID NO: 1764916 - RNA, 19 nt, Homo sapiens
  misc_RNA (1)...(19): siRNA sense strand
gaugggaaagccaguauug

SEQ ID NO: 1764917 - RNA, 19 nt, Homo sapiens
  misc_RNA (1)...(19): siRNA sense strand
gggaugaggaugaggauga

SEQ ID NO: 1764918 - RNA, 19 nt, Homo sapiens
  misc_RNA (1)...(19): siRNA sense strand
gaagaguccuaugaguuca

SEQ ID NO: 1764919 - RNA, 19 nt, Homo sapiens
  misc_RNA (1)...(19): siRNA sense strand
ggaugaggaugaggaugaa

SEQ ID NO: 1764920 - RNA, 19 nt, Homo sapiens
  misc_RNA (1)...(19): siRNA sense strand
ccaagaggauagcagagau

SEQ ID NO: 1764921 - RNA, 19 nt, Homo sapiens
  misc_RNA (1)...(19): siRNA sense strand
uagaagucaucauugaaga

SEQ ID NO: 1764922 - RNA, 19 nt, Homo sapiens
  misc_RNA (1)...(19): siRNA sense strand
ugaagaguccuaugaguuc

SEQ ID NO: 1764923 - RNA, 19 nt, Homo sapiens
  misc_RNA (1)...(19): siRNA sense strand
gcaacgccgucaaugucuu

SEQ ID NO: 1764924 - RNA, 19 nt, Homo sapiens
  misc_RNA (1)...(19): siRNA sense strand
ggagggaccaguucaugga

SEQ ID NO: 1764925 - RNA, 19 nt, Homo sapiens
  misc_RNA (1)...(19): siRNA sense strand
ccuaugaguucaagacuac

SEQ ID NO: 1764926 - RNA, 19 nt, Homo sapiens
  misc_RNA (1)...(19): siRNA sense strand
gcagcaacgccgucaaugu

SEQ ID NO: 1764927 - RNA, 19 nt, Homo sapiens
  misc_RNA (1)...(19): siRNA sense strand
aaacuagaagucaucauug

SEQ ID NO: 1764928 - RNA, 19 nt, Homo sapiens
  misc_RNA (1)...(19): siRNA sense strand
ggaagcugacuauggaaga

SEQ ID NO: 1764929 - RNA, 19 nt, Homo sapiens
  misc_RNA (1)...(19): siRNA sense strand
aacuagaagucaucauuga

SEQ ID NO: 1764930 - RNA, 19 nt, Homo sapiens
  misc_RNA (1)...(19): siRNA sense strand
gcugcaagcucgccacaac

SEQ ID NO: 1764931 - RNA, 19 nt, Homo sapiens
  misc_RNA (1)...(19): siRNA sense strand
agacuacgguggacaaacu

SEQ ID NO: 1764932 - RNA, 19 nt, Homo sapiens
  misc_RNA (1)...(19): siRNA sense strand
gacaaacugaucaagaaga

SEQ ID NO: 1764933 - RNA, 19 nt, Homo sapiens
  misc_RNA (1)...(19): siRNA sense strand
aaacugaucaagaagacaa

SEQ ID NO: 1764934 - RNA, 19 nt, Homo sapiens
  misc_RNA (1)...(19): siRNA sense strand
gaagucaucauugaagagu

SEQ ID NO: 1764935 - RNA, 19 nt, Homo sapiens
  misc_RNA (1)...(19): siRNA sense strand
gacaggaagcugacuaugg

SEQ ID NO: 1764936 - RNA, 19 nt, Homo sapiens
  misc_RNA (1)...(19): siRNA sense strand
ggacaaacugaucaagaag

SEQ ID NO: 1764937 - RNA, 19 nt, Homo sapiens
  misc_RNA (1)...(19): siRNA sense strand
gagaugggaaagccaguau

SEQ ID NO: 1764938 - RNA, 19 nt, Homo sapiens
  misc_RNA (1)...(19): siRNA sense strand
cagcaacgccgucaauguc

SEQ ID NO: 1764939 - RNA, 19 nt, Homo sapiens
  misc_RNA (1)...(19): siRNA sense strand
ggauagcagagaugggaaa

SEQ ID NO: 1764940 - RNA, 19 nt, Homo sapiens
  misc_RNA (1)...(19): siRNA sense strand
cauacucuuugccacacua

SEQ ID NO: 1764941 - RNA, 19 nt, Homo sapiens
  misc_RNA (1)...(19): siRNA sense strand
cuagaggccuauugcuaca

SEQ ID NO: 1764942 - RNA, 19 nt, Homo sapiens
  misc_RNA (1)...(19): siRNA sense strand
gcuccucuacauacucuuu

SEQ ID NO: 1764943 - RNA, 19 nt, Homo sapiens
  misc_RNA (1)...(19): siRNA sense strand
cacuagaggccuauugcua

SEQ ID NO: 1764944 - RNA, 19 nt, Homo sapiens
  misc_RNA (1)...(19): siRNA sense strand
cacuucggcugcaccauug

SEQ ID NO: 1764945 - RNA, 19 nt, Homo sapiens
  misc_RNA (1)...(19): siRNA sense strand
gggcagcaacgccgucaau

SEQ ID NO: 1764946 - RNA, 19 nt, Homo sapiens
  misc_RNA (1)...(19): siRNA sense strand
gccuguggcuccucuacau

SEQ ID NO: 1764947 - RNA, 19 nt, Homo sapiens
  misc_RNA (1)...(19): siRNA sense strand
caagaggauagcagagaug

SEQ ID NO: 1764948 - RNA, 19 nt, Homo sapiens
  misc_RNA (1)...(19): siRNA sense strand
aggcugcccuccugcuuug

SEQ ID NO: 1764949 - RNA, 19 nt, Homo sapiens
  misc_RNA (1)...(19): siRNA sense strand
acaaacugaucaagaagac

SEQ ID NO: 1764950 - RNA, 19 nt, Homo sapiens
  misc_RNA (1)...(19): siRNA sense strand
guggacaaacugaucaaga

SEQ ID NO: 1764951 - RNA, 19 nt, Homo sapiens
  misc_RNA (1)...(19): siRNA sense strand
gccaagaggauagcagaga

SEQ ID NO: 1764952 - RNA, 19 nt, Homo sapiens
  misc_RNA (1)...(19): siRNA sense strand
cugcugcccuccaggaugu

SEQ ID NO: 1764953 - RNA, 19 nt, Homo sapiens
  misc_RNA (1)...(19): siRNA sense strand
gaagaagaggaggccaaga

SEQ ID NO: 1764954 - RNA, 19 nt, Homo sapiens
  misc_RNA (1)...(19): siRNA sense strand
uugaagaguccuaugaguu

SEQ ID NO: 1764955 - RNA, 19 nt, Homo sapiens
  misc_RNA (1)...(19): siRNA sense strand
gaggaggccaagaggauag

SEQ ID NO: 1764956 - RNA, 19 nt, Homo sapiens
  misc_RNA (1)...(19): siRNA sense strand
agucacagcuguuguuuuc

SEQ ID NO: 1764957 - RNA, 19 nt, Homo sapiens
  misc_RNA (1)...(19): siRNA sense strand
cuagaagucaucauugaag

SEQ ID NO: 1764958 - RNA, 19 nt, Homo sapiens
  misc_RNA (1)...(19): siRNA sense strand
ccacacuagaggccuauug

SEQ ID NO: 1764959 - RNA, 19 nt, Homo sapiens
  misc_RNA (1)...(19): siRNA sense strand
gcaagcucgccacaacaug

SEQ ID NO: 1764960 - RNA, 19 nt, Homo sapiens
  misc_RNA (1)...(19): siRNA sense strand
caccaucuuugcauuuguc

SEQ ID NO: 1764961 - RNA, 19 nt, Homo sapiens
  misc_RNA (1)...(19): siRNA sense strand
ucaagacuacgguggacaa

SEQ ID NO: 1764962 - RNA, 19 nt, Homo sapiens
  misc_RNA (1)...(19): siRNA sense strand
caugcucaccgccaucauu

SEQ ID NO: 1764963 - RNA, 19 nt, Homo sapiens
  misc_RNA (1)...(19): siRNA sense strand
gcacuuccugacugucuuc

SEQ ID NO: 1764964 - RNA, 19 nt, Homo sapiens
  misc_RNA (1)...(19): siRNA sense strand
caacgccgucaaugucuuc

SEQ ID NO: 1764965 - RNA, 19 nt, Homo sapiens
  misc_RNA (1)...(19): siRNA sense strand
ccuccaggauguauaugca

SEQ ID NO: 1764966 - RNA, 19 nt, Homo sapiens
  misc_RNA (1)...(19): siRNA sense strand
ucuggaaggugcuguuugc

SEQ ID NO: 1764967 - RNA, 19 nt, Homo sapiens
  misc_RNA (1)...(19): siRNA sense strand
uccuaugaguucaagacua

SEQ ID NO: 1764968 - RNA, 19 nt, Homo sapiens
  misc_RNA (1)...(19): siRNA sense strand
cagacaggaagcugacuau

SEQ ID NO: 1764969 - RNA, 19 nt, Homo sapiens
  misc_RNA (1)...(19): siRNA sense strand
ucaccaucuuugcauuugu

SEQ ID NO: 1764970 - RNA, 19 nt, Homo sapiens
  misc_RNA (1)...(19): siRNA sense strand
agaggaggccaagaggaua

SEQ ID NO: 1764971 - RNA, 19 nt, Homo sapiens
  misc_RNA (1)...(19): siRNA sense strand
aagaggaggccaagaggau

SEQ ID NO: 1764972 - RNA, 19 nt, Homo sapiens
  misc_RNA (1)...(19): siRNA sense strand
acaggaagcugacuaugga

SEQ ID NO: 1764973 - RNA, 19 nt, Homo sapiens
  misc_RNA (1)...(19): siRNA sense strand
gaagcugacuauggaagaa

SEQ ID NO: 1764974 - RNA, 19 nt, Homo sapiens
  misc_RNA (1)...(19): siRNA sense strand
gaugggaaagccaguauug

SEQ ID NO: 1764975 - RNA, 19 nt, Homo sapiens
  misc_RNA (1)...(19): siRNA sense strand
ccaagaggauagcagagau

SEQ ID NO: 1764976 - RNA, 19 nt, Homo sapiens
  misc_RNA (1)...(19): siRNA sense strand
ggaagcugacuauggaaga

SEQ ID NO: 1764977 - RNA, 19 nt, Homo sapiens
  misc_RNA (1)...(19): siRNA sense strand
gacaggaagcugacuaugg

SEQ ID NO: 1764978 - RNA, 19 nt, Homo sapiens
  misc_RNA (1)...(19): siRNA sense strand
gagaugggaaagccaguau

SEQ ID NO: 1764979 - RNA, 19 nt, Homo sapiens
  misc_RNA (1)...(19): siRNA sense strand
ggauagcagagaugggaaa

SEQ ID NO: 1764980 - RNA, 19 nt, Homo sapiens
  misc_RNA (1)...(19): siRNA sense strand
caagaggauagcagagaug

SEQ ID NO: 1764981 - RNA, 19 nt, Homo sapiens
  misc_RNA (1)...(19): siRNA sense strand
gaagaagaggaggccaaga

SEQ ID NO: 1764982 - RNA, 19 nt, Homo sapiens
  misc_RNA (1)...(19): siRNA sense strand
gccaagaggauagcagaga

SEQ ID NO: 1764983 - RNA, 19 nt, Homo sapiens
  misc_RNA (1)...(19): siRNA sense strand
gaggaggccaagaggauag

SEQ ID NO: 1764984 - RNA, 19 nt, Homo sapiens
  misc_RNA (1)...(19): siRNA sense strand
agaggaggccaagaggaua

SEQ ID NO: 1764985 - RNA, 19 nt, Homo sapiens
  misc_RNA (1)...(19): siRNA sense strand
cagacaggaagcugacuau

SEQ ID NO: 1764986 - RNA, 19 nt, Homo sapiens
  misc_RNA (1)...(19): siRNA sense strand
aagaggaggccaagaggau

SEQ ID NO: 1764987 - RNA, 19 nt, Homo sapiens
  misc_RNA (1)...(19): siRNA sense strand
caaacuagaagucaucauu

SEQ ID NO: 1764988 - RNA, 19 nt, Homo sapiens
  misc_RNA (1)...(19): siRNA sense strand
ucucaaagauucagucaca

SEQ ID NO: 1764989 - RNA, 19 nt, Homo sapiens
  misc_RNA (1)...(19): siRNA sense strand
uggacaaacugaucaagaa

SEQ ID NO: 1764990 - RNA, 19 nt, Homo sapiens
  misc_RNA (1)...(19): siRNA sense strand
gcacuucggcugcaccauu

SEQ ID NO: 1764991 - RNA, 19 nt, Homo sapiens
  misc_RNA (1)...(19): siRNA sense strand
agacaaaccuggccuuggu

SEQ ID NO: 1764992 - RNA, 19 nt, Homo sapiens
  misc_RNA (1)...(19): siRNA sense strand
ccauuggucucaaagauuc

SEQ ID NO: 1764993 - RNA, 19 nt, Homo sapiens
  misc_RNA (1)...(19): siRNA sense strand
gcaucagcgugcucuugua

SEQ ID NO: 1764994 - RNA, 19 nt, Homo sapiens
  misc_RNA (1)...(19): siRNA sense strand
gaugggaaagccaguauug

SEQ ID NO: 1764995 - RNA, 19 nt, Homo sapiens
  misc_RNA (1)...(19): siRNA sense strand
gggaugaggaugaggauga

SEQ ID NO: 1764996 - RNA, 19 nt, Homo sapiens
  misc_RNA (1)...(19): siRNA sense strand
gaagaguccuaugaguuca

SEQ ID NO: 1764997 - RNA, 19 nt, Homo sapiens
  misc_RNA (1)...(19): siRNA sense strand
ggaugaggaugaggaugaa

SEQ ID NO: 1764998 - RNA, 19 nt, Homo sapiens
  misc_RNA (1)...(19): siRNA sense strand
uagaagucaucauugaaga

SEQ ID NO: 1764999 - RNA, 19 nt, Homo sapiens
  misc_RNA (1)...(19): siRNA sense strand
ccaagaggauagcagagau

SEQ ID NO: 1765000 - RNA, 19 nt, Homo sapiens
  misc_RNA (1)...(19): siRNA sense strand
ugaagaguccuaugaguuc

SEQ ID NO: 1765001 - RNA, 19 nt, Homo sapiens
  misc_RNA (1)...(19): siRNA sense strand
gcaacgccgucaaugucuu

SEQ ID NO: 1765002 - RNA, 19 nt, Homo sapiens
  misc_RNA (1)...(19): siRNA sense strand
ggagggaccaguucaugga

SEQ ID NO: 1765003 - RNA, 19 nt, Homo sapiens
  misc_RNA (1)...(19): siRNA sense strand
ccuaugaguucaagacuac

SEQ ID NO: 1765004 - RNA, 19 nt, Homo sapiens
  misc_RNA (1)...(19): siRNA sense strand
gcagcaacgccgucaaugu

SEQ ID NO: 1765005 - RNA, 19 nt, Homo sapiens
  misc_RNA (1)...(19): siRNA sense strand
aaacuagaagucaucauug

SEQ ID NO: 1765006 - RNA, 19 nt, Homo sapiens
  misc_RNA (1)...(19): siRNA sense strand
aacuagaagucaucauuga

SEQ ID NO: 1765007 - RNA, 19 nt, Homo sapiens
  misc_RNA (1)...(19): siRNA sense strand
gcugcaagcucgccacaac

SEQ ID NO: 1765008 - RNA, 19 nt, Homo sapiens
  misc_RNA (1)...(19): siRNA sense strand
agacuacgguggacaaacu

SEQ ID NO: 1765009 - RNA, 19 nt, Homo sapiens
  misc_RNA (1)...(19): siRNA sense strand
gacaaacugaucaagaaga

SEQ ID NO: 1765010 - RNA, 19 nt, Homo sapiens
  misc_RNA (1)...(19): siRNA sense strand
aaacugaucaagaagacaa

SEQ ID NO: 1765011 - RNA, 19 nt, Homo sapiens
  misc_RNA (1)...(19): siRNA sense strand
gaagucaucauugaagagu

SEQ ID NO: 1765012 - RNA, 19 nt, Homo sapiens
  misc_RNA (1)...(19): siRNA sense strand
ggacaaacugaucaagaag

SEQ ID NO: 1765013 - RNA, 19 nt, Homo sapiens
  misc_RNA (1)...(19): siRNA sense strand
gagaugggaaagccaguau

SEQ ID NO: 1765014 - RNA, 19 nt, Homo sapiens
  misc_RNA (1)...(19): siRNA sense strand
cagcaacgccgucaauguc

SEQ ID NO: 1765015 - RNA, 19 nt, Homo sapiens
  misc_RNA (1)...(19): siRNA sense strand
ggauagcagagaugggaaa

SEQ ID NO: 1765016 - RNA, 19 nt, Homo sapiens
  misc_RNA (1)...(19): siRNA sense strand
cauacucuuugccacacua

SEQ ID NO: 1765017 - RNA, 19 nt, Homo sapiens
  misc_RNA (1)...(19): siRNA sense strand
cuagaggccuauugcuaca

SEQ ID NO: 1765018 - RNA, 19 nt, Homo sapiens
  misc_RNA (1)...(19): siRNA sense strand
gcuccucuacauacucuuu

SEQ ID NO: 1765019 - RNA, 19 nt, Homo sapiens
  misc_RNA (1)...(19): siRNA sense strand
cacuagaggccuauugcua

SEQ ID NO: 1765020 - RNA, 19 nt, Homo sapiens
  misc_RNA (1)...(19): siRNA sense strand
cacuucggcugcaccauug

SEQ ID NO: 1765021 - RNA, 19 nt, Homo sapiens
  misc_RNA (1)...(19): siRNA sense strand
gggcagcaacgccgucaau

SEQ ID NO: 1765022 - RNA, 19 nt, Homo sapiens
  misc_RNA (1)...(19): siRNA sense strand
gccuguggcuccucuacau

SEQ ID NO: 1765023 - RNA, 19 nt, Homo sapiens
  misc_RNA (1)...(19): siRNA sense strand
guggacaaacugaucaaga

SEQ ID NO: 1765024 - RNA, 19 nt, Homo sapiens
  misc_RNA (1)...(19): siRNA sense strand
caagaggauagcagagaug

SEQ ID NO: 1765025 - RNA, 19 nt, Homo sapiens
  misc_RNA (1)...(19): siRNA sense strand
aggcugcccuccugcuuug

SEQ ID NO: 1765026 - RNA, 19 nt, Homo sapiens
  misc_RNA (1)...(19): siRNA sense strand
acaaacugaucaagaagac

SEQ ID NO: 1765027 - RNA, 19 nt, Homo sapiens
  misc_RNA (1)...(19): siRNA sense strand
gccaagaggauagcagaga

SEQ ID NO: 1765028 - RNA, 19 nt, Homo sapiens
  misc_RNA (1)...(19): siRNA sense strand
gaagaagaggaggccaaga

SEQ ID NO: 1765029 - RNA, 19 nt, Homo sapiens
  misc_RNA (1)...(19): siRNA sense strand
cugcugcccuccaggaugu

SEQ ID NO: 1765030 - RNA, 19 nt, Homo sapiens
  misc_RNA (1)...(19): siRNA sense strand
uugaagaguccuaugaguu

SEQ ID NO: 1765031 - RNA, 19 nt, Homo sapiens
  misc_RNA (1)...(19): siRNA sense strand
agucacagcuguuguuuuc

SEQ ID NO: 1765032 - RNA, 19 nt, Homo sapiens
  misc_RNA (1)...(19): siRNA sense strand
gaggaggccaagaggauag

SEQ ID NO: 1765033 - RNA, 19 nt, Homo sapiens
  misc_RNA (1)...(19): siRNA sense strand
ucaagacuacgguggacaa

SEQ ID NO: 1765034 - RNA, 19 nt, Homo sapiens
  misc_RNA (1)...(19): siRNA sense strand
ccacacuagaggccuauug

SEQ ID NO: 1765035 - RNA, 19 nt, Homo sapiens
  misc_RNA (1)...(19): siRNA sense strand
gcaagcucgccacaacaug

SEQ ID NO: 1765036 - RNA, 19 nt, Homo sapiens
  misc_RNA (1)...(19): siRNA sense strand
caccaucuuugcauuuguc

SEQ ID NO: 1765037 - RNA, 19 nt, Homo sapiens
  misc_RNA (1)...(19): siRNA sense strand
cuagaagucaucauugaag

SEQ ID NO: 1765038 - RNA, 19 nt, Homo sapiens
  misc_RNA (1)...(19): siRNA sense strand
caugcucaccgccaucauu

SEQ ID NO: 1765039 - RNA, 19 nt, Homo sapiens
  misc_RNA (1)...(19): siRNA sense strand
gcacuuccugacugucuuc

SEQ ID NO: 1765040 - RNA, 19 nt, Homo sapiens
  misc_RNA (1)...(19): siRNA sense strand
caacgccgucaaugucuuc

SEQ ID NO: 1765041 - RNA, 19 nt, Homo sapiens
  misc_RNA (1)...(19): siRNA sense strand
ccuccaggauguauaugca

SEQ ID NO: 1765042 - RNA, 19 nt, Homo sapiens
  misc_RNA (1)...(19): siRNA sense strand
ucuggaaggugcuguuugc

SEQ ID NO: 1765043 - RNA, 19 nt, Homo sapiens
  misc_RNA (1)...(19): siRNA sense strand
uccuaugaguucaagacua

SEQ ID NO: 1765044 - RNA, 19 nt, Homo sapiens
  misc_RNA (1)...(19): siRNA sense strand
agaggaggccaagaggaua

SEQ ID NO: 1765045 - RNA, 19 nt, Homo sapiens
  misc_RNA (1)...(19): siRNA sense strand
ucaccaucuuugcauuugu

SEQ ID NO: 1765046 - RNA, 19 nt, Homo sapiens
  misc_RNA (1)...(19): siRNA sense strand
aagaggaggccaagaggau

SEQ ID NO: 1765047 - RNA, 19 nt, Homo sapiens
  misc_RNA (1)...(19): siRNA sense strand
caaacuagaagucaucauu

SEQ ID NO: 1765048 - RNA, 19 nt, Homo sapiens
  misc_RNA (1)...(19): siRNA sense strand
acaggaagcugacuaugga

SEQ ID NO: 1765049 - RNA, 19 nt, Homo sapiens
  misc_RNA (1)...(19): siRNA sense strand
gaagcugacuauggaagaa

SEQ ID NO: 1765050 - RNA, 19 nt, Homo sapiens
  misc_RNA (1)...(19): siRNA sense strand
ucucaaagauucagucaca

SEQ ID NO: 1765051 - RNA, 19 nt, Homo sapiens
  misc_RNA (1)...(19): siRNA sense strand
uggacaaacugaucaagaa

SEQ ID NO: 1765052 - RNA, 19 nt, Homo sapiens
  misc_RNA (1)...(19): siRNA sense strand
gcacuucggcugcaccauu

SEQ ID NO: 1765053 - RNA, 19 nt, Homo sapiens
  misc_RNA (1)...(19): siRNA sense strand
agacaaaccuggccuuggu

SEQ ID NO: 1765054 - RNA, 19 nt, Homo sapiens
  misc_RNA (1)...(19): siRNA sense strand
ccauuggucucaaagauuc

SEQ ID NO: 1765055 - RNA, 19 nt, Homo sapiens
  misc_RNA (1)...(19): siRNA sense strand
gcaucagcgugcucuugua

SEQ ID NO: 1765056 - RNA, 19 nt, Homo sapiens
  misc_RNA (1)...(19): siRNA sense strand
gaugggaaagccaguauug

SEQ ID NO: 1765057 - RNA, 19 nt, Homo sapiens
  misc_RNA (1)...(19): siRNA sense strand
gggaugaggaugaggauga

SEQ ID NO: 1765058 - RNA, 19 nt, Homo sapiens
  misc_RNA (1)...(19): siRNA sense strand
gaagaguccuaugaguuca

SEQ ID NO: 1765059 - RNA, 19 nt, Homo sapiens
  misc_RNA (1)...(19): siRNA sense strand
ggaugaggaugaggaugaa

SEQ ID NO: 1765060 - RNA, 19 nt, Homo sapiens
  misc_RNA (1)...(19): siRNA sense strand
ccaagaggauagcagagau

SEQ ID NO: 1765061 - RNA, 19 nt, Homo sapiens
  misc_RNA (1)...(19): siRNA sense strand
uagaagucaucauugaaga

SEQ ID NO: 1765062 - RNA, 19 nt, Homo sapiens
  misc_RNA (1)...(19): siRNA sense strand
ugaagaguccuaugaguuc

SEQ ID NO: 1765063 - RNA, 19 nt, Homo sapiens
  misc_RNA (1)...(19): siRNA sense strand
gcaacgccgucaaugucuu

SEQ ID NO: 1765064 - RNA, 19 nt, Homo sapiens
  misc_RNA (1)...(19): siRNA sense strand
ggagggaccaguucaugga

SEQ ID NO: 1765065 - RNA, 19 nt, Homo sapiens
  misc_RNA (1)...(19): siRNA sense strand
ccuaugaguucaagacuac

SEQ ID NO: 1765066 - RNA, 19 nt, Homo sapiens
  misc_RNA (1)...(19): siRNA sense strand
gcagcaacgccgucaaugu

SEQ ID NO: 1765067 - RNA, 19 nt, Homo sapiens
  misc_RNA (1)...(19): siRNA sense strand
aaacuagaagucaucauug

SEQ ID NO: 1765068 - RNA, 19 nt, Homo sapiens
  misc_RNA (1)...(19): siRNA sense strand
ggaagcugacuauggaaga

SEQ ID NO: 1765069 - RNA, 19 nt, Homo sapiens
  misc_RNA (1)...(19): siRNA sense strand
aacuagaagucaucauuga

SEQ ID NO: 1765070 - RNA, 19 nt, Homo sapiens
  misc_RNA (1)...(19): siRNA sense strand
gcugcaagcucgccacaac

SEQ ID NO: 1765071 - RNA, 19 nt, Homo sapiens
  misc_RNA (1)...(19): siRNA sense strand
agacuacgguggacaaacu

SEQ ID NO: 1765072 - RNA, 19 nt, Homo sapiens
  misc_RNA (1)...(19): siRNA sense strand
gacaaacugaucaagaaga

SEQ ID NO: 1765073 - RNA, 19 nt, Homo sapiens
  misc_RNA (1)...(19): siRNA sense strand
aaacugaucaagaagacaa

SEQ ID NO: 1765074 - RNA, 19 nt, Homo sapiens
  misc_RNA (1)...(19): siRNA sense strand
gaagucaucauugaagagu

SEQ ID NO: 1765075 - RNA, 19 nt, Homo sapiens
  misc_RNA (1)...(19): siRNA sense strand
gacaggaagcugacuaugg

SEQ ID NO: 1765076 - RNA, 19 nt, Homo sapiens
  misc_RNA (1)...(19): siRNA sense strand
ggacaaacugaucaagaag

SEQ ID NO: 1765077 - RNA, 19 nt, Homo sapiens
  misc_RNA (1)...(19): siRNA sense strand
gagaugggaaagccaguau

SEQ ID NO: 1765078 - RNA, 19 nt, Homo sapiens
  misc_RNA (1)...(19): siRNA sense strand
cagcaacgccgucaauguc

SEQ ID NO: 1765079 - RNA, 19 nt, Homo sapiens
  misc_RNA (1)...(19): siRNA sense strand
ggauagcagagaugggaaa

SEQ ID NO: 1765080 - RNA, 19 nt, Homo sapiens
  misc_RNA (1)...(19): siRNA sense strand
cauacucuuugccacacua

SEQ ID NO: 1765081 - RNA, 19 nt, Homo sapiens
  misc_RNA (1)...(19): siRNA sense strand
cuagaggccuauugcuaca

SEQ ID NO: 1765082 - RNA, 19 nt, Homo sapiens
  misc_RNA (1)...(19): siRNA sense strand
gcuccucuacauacucuuu

SEQ ID NO: 1765083 - RNA, 19 nt, Homo sapiens
  misc_RNA (1)...(19): siRNA sense strand
cacuagaggccuauugcua

SEQ ID NO: 1765084 - RNA, 19 nt, Homo sapiens
  misc_RNA (1)...(19): siRNA sense strand
cacuucggcugcaccauug

SEQ ID NO: 1765085 - RNA, 19 nt, Homo sapiens
  misc_RNA (1)...(19): siRNA sense strand
gggcagcaacgccgucaau

SEQ ID NO: 1765086 - RNA, 19 nt, Homo sapiens
  misc_RNA (1)...(19): siRNA sense strand
gccuguggcuccucuacau

SEQ ID NO: 1765087 - RNA, 19 nt, Homo sapiens
  misc_RNA (1)...(19): siRNA sense strand
caagaggauagcagagaug

SEQ ID NO: 1765088 - RNA, 19 nt, Homo sapiens
  misc_RNA (1)...(19): siRNA sense strand
aggcugcccuccugcuuug

SEQ ID NO: 1765089 - RNA, 19 nt, Homo sapiens
  misc_RNA (1)...(19): siRNA sense strand
acaaacugaucaagaagac

SEQ ID NO: 1765090 - RNA, 19 nt, Homo sapiens
  misc_RNA (1)...(19): siRNA sense strand
guggacaaacugaucaaga

SEQ ID NO: 1765091 - RNA, 19 nt, Homo sapiens
  misc_RNA (1)...(19): siRNA sense strand
gccaagaggauagcagaga

SEQ ID NO: 1765092 - RNA, 19 nt, Homo sapiens
  misc_RNA (1)...(19): siRNA sense strand
cugcugcccuccaggaugu

SEQ ID NO: 1765093 - RNA, 19 nt, Homo sapiens
  misc_RNA (1)...(19): siRNA sense strand
gaagaagaggaggccaaga

SEQ ID NO: 1765094 - RNA, 19 nt, Homo sapiens
  misc_RNA (1)...(19): siRNA sense strand
uugaagaguccuaugaguu

SEQ ID NO: 1765095 - RNA, 19 nt, Homo sapiens
  misc_RNA (1)...(19): siRNA sense strand
gaggaggccaagaggauag

SEQ ID NO: 1765096 - RNA, 19 nt, Homo sapiens
  misc_RNA (1)...(19): siRNA sense strand
agucacagcuguuguuuuc

SEQ ID NO: 1765097 - RNA, 19 nt, Homo sapiens
  misc_RNA (1)...(19): siRNA sense strand
cuagaagucaucauugaag

SEQ ID NO: 1765098 - RNA, 19 nt, Homo sapiens
  misc_RNA (1)...(19): siRNA sense strand
ccacacuagaggccuauug

SEQ ID NO: 1765099 - RNA, 19 nt, Homo sapiens
  misc_RNA (1)...(19): siRNA sense strand
gcaagcucgccacaacaug

SEQ ID NO: 1765100 - RNA, 19 nt, Homo sapiens
  misc_RNA (1)...(19): siRNA sense strand
caccaucuuugcauuuguc

SEQ ID NO: 1765101 - RNA, 19 nt, Homo sapiens
  misc_RNA (1)...(19): siRNA sense strand
ucaagacuacgguggacaa

SEQ ID NO: 1765102 - RNA, 19 nt, Homo sapiens
  misc_RNA (1)...(19): siRNA sense strand
caugcucaccgccaucauu

SEQ ID NO: 1765103 - RNA, 19 nt, Homo sapiens
  misc_RNA (1)...(19): siRNA sense strand
gcacuuccugacugucuuc

SEQ ID NO: 1765104 - RNA, 19 nt, Homo sapiens
  misc_RNA (1)...(19): siRNA sense strand
caacgccgucaaugucuuc

SEQ ID NO: 1765105 - RNA, 19 nt, Homo sapiens
  misc_RNA (1)...(19): siRNA sense strand
ccuccaggauguauaugca

SEQ ID NO: 1765106 - RNA, 19 nt, Homo sapiens
  misc_RNA (1)...(19): siRNA sense strand
ucuggaaggugcuguuugc

SEQ ID NO: 1765107 - RNA, 19 nt, Homo sapiens
  misc_RNA (1)...(19): siRNA sense strand
uccuaugaguucaagacua

SEQ ID NO: 1765108 - RNA, 19 nt, Homo sapiens
  misc_RNA (1)...(19): siRNA sense strand
cagacaggaagcugacuau

SEQ ID NO: 1765109 - RNA, 19 nt, Homo sapiens
  misc_RNA (1)...(19): siRNA sense strand
ucaccaucuuugcauuugu

SEQ ID NO: 1765110 - RNA, 19 nt, Homo sapiens
  misc_RNA (1)...(19): siRNA sense strand
agaggaggccaagaggaua

SEQ ID NO: 1765111 - RNA, 19 nt, Homo sapiens
  misc_RNA (1)...(19): siRNA sense strand
aagaggaggccaagaggau

SEQ ID NO: 1765112 - RNA, 19 nt, Homo sapiens
  misc_RNA (1)...(19): siRNA sense strand
caaacuagaagucaucauu

SEQ ID NO: 1765113 - RNA, 19 nt, Homo sapiens
  misc_RNA (1)...(19): siRNA sense strand
acaggaagcugacuaugga

SEQ ID NO: 1765114 - RNA, 19 nt, Homo sapiens
  misc_RNA (1)...(19): siRNA sense strand
gaagcugacuauggaagaa

SEQ ID NO: 1765115 - RNA, 19 nt, Homo sapiens
  misc_RNA (1)...(19): siRNA sense strand
ucucaaagauucagucaca

SEQ ID NO: 1765116 - RNA, 19 nt, Homo sapiens
  misc_RNA (1)...(19): siRNA sense strand
uggacaaacugaucaagaa

SEQ ID NO: 1765117 - RNA, 19 nt, Homo sapiens
  misc_RNA (1)...(19): siRNA sense strand
gcacuucggcugcaccauu

SEQ ID NO: 1765118 - RNA, 19 nt, Homo sapiens
  misc_RNA (1)...(19): siRNA sense strand
agacaaaccuggccuuggu

SEQ ID NO: 1765119 - RNA, 19 nt, Homo sapiens
  misc_RNA (1)...(19): siRNA sense strand
ccauuggucucaaagauuc

SEQ ID NO: 1765120 - RNA, 19 nt, Homo sapiens
  misc_RNA (1)...(19): siRNA sense strand
gcaucagcgugcucuugua

SEQ ID NO: 1765121 - RNA, 19 nt, Homo sapiens
  misc_RNA (1)...(19): siRNA sense strand
gaugggaaagccaguauug

SEQ ID NO: 1765122 - RNA, 19 nt, Homo sapiens
  misc_RNA (1)...(19): siRNA sense strand
gggaugaggaugaggauga

SEQ ID NO: 1765123 - RNA, 19 nt, Homo sapiens
  misc_RNA (1)...(19): siRNA sense strand
gaagaguccuaugaguuca

SEQ ID NO: 1765124 - RNA, 19 nt, Homo sapiens
  misc_RNA (1)...(19): siRNA sense strand
ggaugaggaugaggaugaa

SEQ ID NO: 1765125 - RNA, 19 nt, Homo sapiens
  misc_RNA (1)...(19): siRNA sense strand
ccaagaggauagcagagau

SEQ ID NO: 1765126 - RNA, 19 nt, Homo sapiens
  misc_RNA (1)...(19): siRNA sense strand
uagaagucaucauugaaga

SEQ ID NO: 1765127 - RNA, 19 nt, Homo sapiens
  misc_RNA (1)...(19): siRNA sense strand
ugaagaguccuaugaguuc

SEQ ID NO: 1765128 - RNA, 19 nt, Homo sapiens
  misc_RNA (1)...(19): siRNA sense strand
gcaacgccgucaaugucuu

SEQ ID NO: 1765129 - RNA, 19 nt, Homo sapiens
  misc_RNA (1)...(19): siRNA sense strand
ggagggaccaguucaugga

SEQ ID NO: 1765130 - RNA, 19 nt, Homo sapiens
  misc_RNA (1)...(19): siRNA sense strand
ccuaugaguucaagacuac

SEQ ID NO: 1765131 - RNA, 19 nt, Homo sapiens
  misc_RNA (1)...(19): siRNA sense strand
gcagcaacgccgucaaugu

SEQ ID NO: 1765132 - RNA, 19 nt, Homo sapiens
  misc_RNA (1)...(19): siRNA sense strand
aaacuagaagucaucauug

SEQ ID NO: 1765133 - RNA, 19 nt, Homo sapiens
  misc_RNA (1)...(19): siRNA sense strand
ggaagcugacuauggaaga

SEQ ID NO: 1765134 - RNA, 19 nt, Homo sapiens
  misc_RNA (1)...(19): siRNA sense strand
aacuagaagucaucauuga

SEQ ID NO: 1765135 - RNA, 19 nt, Homo sapiens
  misc_RNA (1)...(19): siRNA sense strand
gcugcaagcucgccacaac

SEQ ID NO: 1765136 - RNA, 19 nt, Homo sapiens
  misc_RNA (1)...(19): siRNA sense strand
agacuacgguggacaaacu

SEQ ID NO: 1765137 - RNA, 19 nt, Homo sapiens
  misc_RNA (1)...(19): siRNA sense strand
gacaaacugaucaagaaga

SEQ ID NO: 1765138 - RNA, 19 nt, Homo sapiens
  misc_RNA (1)...(19): siRNA sense strand
aaacugaucaagaagacaa

SEQ ID NO: 1765139 - RNA, 19 nt, Homo sapiens
  misc_RNA (1)...(19): siRNA sense strand
gaagucaucauugaagagu

SEQ ID NO: 1765140 - RNA, 19 nt, Homo sapiens
  misc_RNA (1)...(19): siRNA sense strand
gacaggaagcugacuaugg

SEQ ID NO: 1765141 - RNA, 19 nt, Homo sapiens
  misc_RNA (1)...(19): siRNA sense strand
ggacaaacugaucaagaag

SEQ ID NO: 1765142 - RNA, 19 nt, Homo sapiens
  misc_RNA (1)...(19): siRNA sense strand
gagaugggaaagccaguau

SEQ ID NO: 1765143 - RNA, 19 nt, Homo sapiens
  misc_RNA (1)...(19): siRNA sense strand
cagcaacgccgucaauguc

SEQ ID NO: 1765144 - RNA, 19 nt, Homo sapiens
  misc_RNA (1)...(19): siRNA sense strand
ggauagcagagaugggaaa

SEQ ID NO: 1765145 - RNA, 19 nt, Homo sapiens
  misc_RNA (1)...(19): siRNA sense strand
cauacucuuugccacacua

SEQ ID NO: 1765146 - RNA, 19 nt, Homo sapiens
  misc_RNA (1)...(19): siRNA sense strand
cuagaggccuauugcuaca

SEQ ID NO: 1765147 - RNA, 19 nt, Homo sapiens
  misc_RNA (1)...(19): siRNA sense strand
gcuccucuacauacucuuu

SEQ ID NO: 1765148 - RNA, 19 nt, Homo sapiens
  misc_RNA (1)...(19): siRNA sense strand
cacuagaggccuauugcua

SEQ ID NO: 1765149 - RNA, 19 nt, Homo sapiens
  misc_RNA (1)...(19): siRNA sense strand
cacuucggcugcaccauug

SEQ ID NO: 1765150 - RNA, 19 nt, Homo sapiens
  misc_RNA (1)...(19): siRNA sense strand
gggcagcaacgccgucaau

SEQ ID NO: 1765151 - RNA, 19 nt, Homo sapiens
  misc_RNA (1)...(19): siRNA sense strand
gccuguggcuccucuacau

SEQ ID NO: 1765152 - RNA, 19 nt, Homo sapiens
  misc_RNA (1)...(19): siRNA sense strand
caagaggauagcagagaug

SEQ ID NO: 1765153 - RNA, 19 nt, Homo sapiens
  misc_RNA (1)...(19): siRNA sense strand
aggcugcccuccugcuuug

SEQ ID NO: 1765154 - RNA, 19 nt, Homo sapiens
  misc_RNA (1)...(19): siRNA sense strand
acaaacugaucaagaagac

SEQ ID NO: 1765155 - RNA, 19 nt, Homo sapiens
  misc_RNA (1)...(19): siRNA sense strand
guggacaaacugaucaaga

SEQ ID NO: 1765156 - RNA, 19 nt, Homo sapiens
  misc_RNA (1)...(19): siRNA sense strand
gccaagaggauagcagaga

SEQ ID NO: 1765157 - RNA, 19 nt, Homo sapiens
  misc_RNA (1)...(19): siRNA sense strand
cugcugcccuccaggaugu

SEQ ID NO: 1765158 - RNA, 19 nt, Homo sapiens
  misc_RNA (1)...(19): siRNA sense strand
gaagaagaggaggccaaga

SEQ ID NO: 1765159 - RNA, 19 nt, Homo sapiens
  misc_RNA (1)...(19): siRNA sense strand
uugaagaguccuaugaguu

SEQ ID NO: 1765160 - RNA, 19 nt, Homo sapiens
  misc_RNA (1)...(19): siRNA sense strand
gaggaggccaagaggauag

SEQ ID NO: 1765161 - RNA, 19 nt, Homo sapiens
  misc_RNA (1)...(19): siRNA sense strand
agucacagcuguuguuuuc

SEQ ID NO: 1765162 - RNA, 19 nt, Homo sapiens
  misc_RNA (1)...(19): siRNA sense strand
cuagaagucaucauugaag

SEQ ID NO: 1765163 - RNA, 19 nt, Homo sapiens
  misc_RNA (1)...(19): siRNA sense strand
ccacacuagaggccuauug

SEQ ID NO: 1765164 - RNA, 19 nt, Homo sapiens
  misc_RNA (1)...(19): siRNA sense strand
gcaagcucgccacaacaug

SEQ ID NO: 1765165 - RNA, 19 nt, Homo sapiens
  misc_RNA (1)...(19): siRNA sense strand
caccaucuuugcauuuguc

SEQ ID NO: 1765166 - RNA, 19 nt, Homo sapiens
  misc_RNA (1)...(19): siRNA sense strand
ucaagacuacgguggacaa

SEQ ID NO: 1765167 - RNA, 19 nt, Homo sapiens
  misc_RNA (1)...(19): siRNA sense strand
caugcucaccgccaucauu

SEQ ID NO: 1765168 - RNA, 19 nt, Homo sapiens
  misc_RNA (1)...(19): siRNA sense strand
gcacuuccugacugucuuc

SEQ ID NO: 1765169 - RNA, 19 nt, Homo sapiens
  misc_RNA (1)...(19): siRNA sense strand
caacgccgucaaugucuuc

SEQ ID NO: 1765170 - RNA, 19 nt, Homo sapiens
  misc_RNA (1)...(19): siRNA sense strand
ccuccaggauguauaugca

SEQ ID NO: 1765171 - RNA, 19 nt, Homo sapiens
  misc_RNA (1)...(19): siRNA sense strand
ucuggaaggugcuguuugc

SEQ ID NO: 1765172 - RNA, 19 nt, Homo sapiens
  misc_RNA (1)...(19): siRNA sense strand
uccuaugaguucaagacua

SEQ ID NO: 1765173 - RNA, 19 nt, Homo sapiens
  misc_RNA (1)...(19): siRNA sense strand
cagacaggaagcugacuau

SEQ ID NO: 1765174 - RNA, 19 nt, Homo sapiens
  misc_RNA (1)...(19): siRNA sense strand
ucaccaucuuugcauuugu

SEQ ID NO: 1765175 - RNA, 19 nt, Homo sapiens
  misc_RNA (1)...(19): siRNA sense strand
agaggaggccaagaggaua

SEQ ID NO: 1765176 - RNA, 19 nt, Homo sapiens
  misc_RNA (1)...(19): siRNA sense strand
aagaggaggccaagaggau

SEQ ID NO: 1765177 - RNA, 19 nt, Homo sapiens
  misc_RNA (1)...(19): siRNA sense strand
caaacuagaagucaucauu

SEQ ID NO: 1765178 - RNA, 19 nt, Homo sapiens
  misc_RNA (1)...(19): siRNA sense strand
acaggaagcugacuaugga

SEQ ID NO: 1765179 - RNA, 19 nt, Homo sapiens
  misc_RNA (1)...(19): siRNA sense strand
gaagcugacuauggaagaa

SEQ ID NO: 1765180 - RNA, 19 nt, Homo sapiens
  misc_RNA (1)...(19): siRNA sense strand
ucucaaagauucagucaca

SEQ ID NO: 1765181 - RNA, 19 nt, Homo sapiens
  misc_RNA (1)...(19): siRNA sense strand
uggacaaacugaucaagaa

SEQ ID NO: 1765182 - RNA, 19 nt, Homo sapiens
  misc_RNA (1)...(19): siRNA sense strand
gcacuucggcugcaccauu

SEQ ID NO: 1765183 - RNA, 19 nt, Homo sapiens
  misc_RNA (1)...(19): siRNA sense strand
agacaaaccuggccuuggu

SEQ ID NO: 1765184 - RNA, 19 nt, Homo sapiens
  misc_RNA (1)...(19): siRNA sense strand
ccauuggucucaaagauuc

SEQ ID NO: 1765185 - RNA, 19 nt, Homo sapiens
  misc_RNA (1)...(19): siRNA sense strand
gcaucagcgugcucuugua

SEQ ID NO: 1765186 - RNA, 19 nt, Homo sapiens
  misc_RNA (1)...(19): siRNA sense strand
gaugggaaagccaguauug

SEQ ID NO: 1765187 - RNA, 19 nt, Homo sapiens
  misc_RNA (1)...(19): siRNA sense strand
gggaugaggaugaggauga

SEQ ID NO: 1765188 - RNA, 19 nt, Homo sapiens
  misc_RNA (1)...(19): siRNA sense strand
gaagaguccuaugaguuca

SEQ ID NO: 1765189 - RNA, 19 nt, Homo sapiens
  misc_RNA (1)...(19): siRNA sense strand
ggaugaggaugaggaugaa

SEQ ID NO: 1765190 - RNA, 19 nt, Homo sapiens
  misc_RNA (1)...(19): siRNA sense strand
ccaagaggauagcagagau

SEQ ID NO: 1765191 - RNA, 19 nt, Homo sapiens
  misc_RNA (1)...(19): siRNA sense strand
uagaagucaucauugaaga

SEQ ID NO: 1765192 - RNA, 19 nt, Homo sapiens
  misc_RNA (1)...(19): siRNA sense strand
ugaagaguccuaugaguuc

SEQ ID NO: 1765193 - RNA, 19 nt, Homo sapiens
  misc_RNA (1)...(19): siRNA sense strand
gcaacgccgucaaugucuu

SEQ ID NO: 1765194 - RNA, 19 nt, Homo sapiens
  misc_RNA (1)...(19): siRNA sense strand
ggagggaccaguucaugga

SEQ ID NO: 1765195 - RNA, 19 nt, Homo sapiens
  misc_RNA (1)...(19): siRNA sense strand
ccuaugaguucaagacuac

SEQ ID NO: 1765196 - RNA, 19 nt, Homo sapiens
  misc_RNA (1)...(19): siRNA sense strand
gcagcaacgccgucaaugu

SEQ ID NO: 1765197 - RNA, 19 nt, Homo sapiens
  misc_RNA (1)...(19): siRNA sense strand
aaacuagaagucaucauug

SEQ ID NO: 1765198 - RNA, 19 nt, Homo sapiens
  misc_RNA (1)...(19): siRNA sense strand
ggaagcugacuauggaaga

SEQ ID NO: 1765199 - RNA, 19 nt, Homo sapiens
  misc_RNA (1)...(19): siRNA sense strand
aacuagaagucaucauuga

SEQ ID NO: 1765200 - RNA, 19 nt, Homo sapiens
  misc_RNA (1)...(19): siRNA sense strand
gcugcaagcucgccacaac

SEQ ID NO: 1765201 - RNA, 19 nt, Homo sapiens
  misc_RNA (1)...(19): siRNA sense strand
agacuacgguggacaaacu

SEQ ID NO: 1765202 - RNA, 19 nt, Homo sapiens
  misc_RNA (1)...(19): siRNA sense strand
gacaaacugaucaagaaga

SEQ ID NO: 1765203 - RNA, 19 nt, Homo sapiens
  misc_RNA (1)...(19): siRNA sense strand
aaacugaucaagaagacaa

SEQ ID NO: 1765204 - RNA, 19 nt, Homo sapiens
  misc_RNA (1)...(19): siRNA sense strand
gaagucaucauugaagagu

SEQ ID NO: 1765205 - RNA, 19 nt, Homo sapiens
  misc_RNA (1)...(19): siRNA sense strand
gacaggaagcugacuaugg

SEQ ID NO: 1765206 - RNA, 19 nt, Homo sapiens
  misc_RNA (1)...(19): siRNA sense strand
ggacaaacugaucaagaag

SEQ ID NO: 1765207 - RNA, 19 nt, Homo sapiens
  misc_RNA (1)...(19): siRNA sense strand
gagaugggaaagccaguau

SEQ ID NO: 1765208 - RNA, 19 nt, Homo sapiens
  misc_RNA (1)...(19): siRNA sense strand
cagcaacgccgucaauguc

SEQ ID NO: 1765209 - RNA, 19 nt, Homo sapiens
  misc_RNA (1)...(19): siRNA sense strand
ggauagcagagaugggaaa

SEQ ID NO: 1765210 - RNA, 19 nt, Homo sapiens
  misc_RNA (1)...(19): siRNA sense strand
cauacucuuugccacacua

SEQ ID NO: 1765211 - RNA, 19 nt, Homo sapiens
  misc_RNA (1)...(19): siRNA sense strand
cuagaggccuauugcuaca

SEQ ID NO: 1765212 - RNA, 19 nt, Homo sapiens
  misc_RNA (1)...(19): siRNA sense strand
gcuccucuacauacucuuu

SEQ ID NO: 1765213 - RNA, 19 nt, Homo sapiens
  misc_RNA (1)...(19): siRNA sense strand
cacuagaggccuauugcua

SEQ ID NO: 1765214 - RNA, 19 nt, Homo sapiens
  misc_RNA (1)...(19): siRNA sense strand
cacuucggcugcaccauug

SEQ ID NO: 1765215 - RNA, 19 nt, Homo sapiens
  misc_RNA (1)...(19): siRNA sense strand
gggcagcaacgccgucaau

SEQ ID NO: 1765216 - RNA, 19 nt, Homo sapiens
  misc_RNA (1)...(19): siRNA sense strand
gccuguggcuccucuacau

SEQ ID NO: 1765217 - RNA, 19 nt, Homo sapiens
  misc_RNA (1)...(19): siRNA sense strand
caagaggauagcagagaug

SEQ ID NO: 1765218 - RNA, 19 nt, Homo sapiens
  misc_RNA (1)...(19): siRNA sense strand
aggcugcccuccugcuuug

SEQ ID NO: 1765219 - RNA, 19 nt, Homo sapiens
  misc_RNA (1)...(19): siRNA sense strand
acaaacugaucaagaagac

SEQ ID NO: 1765220 - RNA, 19 nt, Homo sapiens
  misc_RNA (1)...(19): siRNA sense strand
guggacaaacugaucaaga

SEQ ID NO: 1765221 - RNA, 19 nt, Homo sapiens
  misc_RNA (1)...(19): siRNA sense strand
gccaagaggauagcagaga

SEQ ID NO: 1765222 - RNA, 19 nt, Homo sapiens
  misc_RNA (1)...(19): siRNA sense strand
cugcugcccuccaggaugu

SEQ ID NO: 1765223 - RNA, 19 nt, Homo sapiens
  misc_RNA (1)...(19): siRNA sense strand
gaagaagaggaggccaaga

SEQ ID NO: 1765224 - RNA, 19 nt, Homo sapiens
  misc_RNA (1)...(19): siRNA sense strand
uugaagaguccuaugaguu

SEQ ID NO: 1765225 - RNA, 19 nt, Homo sapiens
  misc_RNA (1)...(19): siRNA sense strand
gaggaggccaagaggauag

SEQ ID NO: 1765226 - RNA, 19 nt, Homo sapiens
  misc_RNA (1)...(19): siRNA sense strand
agucacagcuguuguuuuc

SEQ ID NO: 1765227 - RNA, 19 nt, Homo sapiens
  misc_RNA (1)...(19): siRNA sense strand
cuagaagucaucauugaag

SEQ ID NO: 1765228 - RNA, 19 nt, Homo sapiens
  misc_RNA (1)...(19): siRNA sense strand
ccacacuagaggccuauug

SEQ ID NO: 1765229 - RNA, 19 nt, Homo sapiens
  misc_RNA (1)...(19): siRNA sense strand
gcaagcucgccacaacaug

SEQ ID NO: 1765230 - RNA, 19 nt, Homo sapiens
  misc_RNA (1)...(19): siRNA sense strand
caccaucuuugcauuuguc

SEQ ID NO: 1765231 - RNA, 19 nt, Homo sapiens
  misc_RNA (1)...(19): siRNA sense strand
ucaagacuacgguggacaa

SEQ ID NO: 1765232 - RNA, 19 nt, Homo sapiens
  misc_RNA (1)...(19): siRNA sense strand
caugcucaccgccaucauu

SEQ ID NO: 1765233 - RNA, 19 nt, Homo sapiens
  misc_RNA (1)...(19): siRNA sense strand
gcacuuccugacugucuuc

SEQ ID NO: 1765234 - RNA, 19 nt, Homo sapiens
  misc_RNA (1)...(19): siRNA sense strand
caacgccgucaaugucuuc

SEQ ID NO: 1765235 - RNA, 19 nt, Homo sapiens
  misc_RNA (1)...(19): siRNA sense strand
ccuccaggauguauaugca

SEQ ID NO: 1765236 - RNA, 19 nt, Homo sapiens
  misc_RNA (1)...(19): siRNA sense strand
ucuggaaggugcuguuugc

SEQ ID NO: 1765237 - RNA, 19 nt, Homo sapiens
  misc_RNA (1)...(19): siRNA sense strand
uccuaugaguucaagacua

SEQ ID NO: 1765238 - RNA, 19 nt, Homo sapiens
  misc_RNA (1)...(19): siRNA sense strand
cagacaggaagcugacuau

SEQ ID NO: 1765239 - RNA, 19 nt, Homo sapiens
  misc_RNA (1)...(19): siRNA sense strand
ucaccaucuuugcauuugu

SEQ ID NO: 1765240 - RNA, 19 nt, Homo sapiens
  misc_RNA (1)...(19): siRNA sense strand
agaggaggccaagaggaua

SEQ ID NO: 1765241 - RNA, 19 nt, Homo sapiens
  misc_RNA (1)...(19): siRNA sense strand
aagaggaggccaagaggau

SEQ ID NO: 1765242 - RNA, 19 nt, Homo sapiens
  misc_RNA (1)...(19): siRNA sense strand
caaacuagaagucaucauu

SEQ ID NO: 1765243 - RNA, 19 nt, Homo sapiens
  misc_RNA (1)...(19): siRNA sense strand
acaggaagcugacuaugga

SEQ ID NO: 1765244 - RNA, 19 nt, Homo sapiens
  misc_RNA (1)...(19): siRNA sense strand
gaagcugacuauggaagaa

SEQ ID NO: 1765245 - RNA, 19 nt, Homo sapiens
  misc_RNA (1)...(19): siRNA sense strand
ucucaaagauucagucaca

SEQ ID NO: 1765246 - RNA, 19 nt, Homo sapiens
  misc_RNA (1)...(19): siRNA sense strand
uggacaaacugaucaagaa

SEQ ID NO: 1765247 - RNA, 19 nt, Homo sapiens
  misc_RNA (1)...(19): siRNA sense strand
gcacuucggcugcaccauu

SEQ ID NO: 1765248 - RNA, 19 nt, Homo sapiens
  misc_RNA (1)...(19): siRNA sense strand
agacaaaccuggccuuggu

SEQ ID NO: 1765249 - RNA, 19 nt, Homo sapiens
  misc_RNA (1)...(19): siRNA sense strand
ccauuggucucaaagauuc

SEQ ID NO: 1765250 - RNA, 19 nt, Homo sapiens
  misc_RNA (1)...(19): siRNA sense strand
gcaucagcgugcucuugua

SEQ ID NO: 1765251 - RNA, 19 nt, Homo sapiens
  misc_RNA (1)...(19): siRNA sense strand
gaugggaaagccaguauug

SEQ ID NO: 1765252 - RNA, 19 nt, Homo sapiens
  misc_RNA (1)...(19): siRNA sense strand
gggaugaggaugaggauga

SEQ ID NO: 1765253 - RNA, 19 nt, Homo sapiens
  misc_RNA (1)...(19): siRNA sense strand
gaagaguccuaugaguuca

SEQ ID NO: 1765254 - RNA, 19 nt, Homo sapiens
  misc_RNA (1)...(19): siRNA sense strand
ggaugaggaugaggaugaa

SEQ ID NO: 1765255 - RNA, 19 nt, Homo sapiens
  misc_RNA (1)...(19): siRNA sense strand
ccaagaggauagcagagau

SEQ ID NO: 1765256 - RNA, 19 nt, Homo sapiens
  misc_RNA (1)...(19): siRNA sense strand
uagaagucaucauugaaga

SEQ ID NO: 1765257 - RNA, 19 nt, Homo sapiens
  misc_RNA (1)...(19): siRNA sense strand
ugaagaguccuaugaguuc

SEQ ID NO: 1765258 - RNA, 19 nt, Homo sapiens
  misc_RNA (1)...(19): siRNA sense strand
gcaacgccgucaaugucuu

SEQ ID NO: 1765259 - RNA, 19 nt, Homo sapiens
  misc_RNA (1)...(19): siRNA sense strand
ggagggaccaguucaugga

SEQ ID NO: 1765260 - RNA, 19 nt, Homo sapiens
  misc_RNA (1)...(19): siRNA sense strand
ccuaugaguucaagacuac

SEQ ID NO: 1765261 - RNA, 19 nt, Homo sapiens
  misc_RNA (1)...(19): siRNA sense strand
gcagcaacgccgucaaugu

SEQ ID NO: 1765262 - RNA, 19 nt, Homo sapiens
  misc_RNA (1)...(19): siRNA sense strand
aaacuagaagucaucauug

SEQ ID NO: 1765263 - RNA, 19 nt, Homo sapiens
  misc_RNA (1)...(19): siRNA sense strand
ggaagcugacuauggaaga

SEQ ID NO: 1765264 - RNA, 19 nt, Homo sapiens
  misc_RNA (1)...(19): siRNA sense strand
aacuagaagucaucauuga

SEQ ID NO: 1765265 - RNA, 19 nt, Homo sapiens
  misc_RNA (1)...(19): siRNA sense strand
gcugcaagcucgccacaac

SEQ ID NO: 1765266 - RNA, 19 nt, Homo sapiens
  misc_RNA (1)...(19): siRNA sense strand
agacuacgguggacaaacu

SEQ ID NO: 1765267 - RNA, 19 nt, Homo sapiens
  misc_RNA (1)...(19): siRNA sense strand
gacaaacugaucaagaaga

SEQ ID NO: 1765268 - RNA, 19 nt, Homo sapiens
  misc_RNA (1)...(19): siRNA sense strand
aaacugaucaagaagacaa

SEQ ID NO: 1765269 - RNA, 19 nt, Homo sapiens
  misc_RNA (1)...(19): siRNA sense strand
gaagucaucauugaagagu

SEQ ID NO: 1765270 - RNA, 19 nt, Homo sapiens
  misc_RNA (1)...(19): siRNA sense strand
gacaggaagcugacuaugg

SEQ ID NO: 1765271 - RNA, 19 nt, Homo sapiens
  misc_RNA (1)...(19): siRNA sense strand
ggacaaacugaucaagaag

SEQ ID NO: 1765272 - RNA, 19 nt, Homo sapiens
  misc_RNA (1)...(19): siRNA sense strand
gagaugggaaagccaguau

SEQ ID NO: 1765273 - RNA, 19 nt, Homo sapiens
  misc_RNA (1)...(19): siRNA sense strand
cagcaacgccgucaauguc

SEQ ID NO: 1765274 - RNA, 19 nt, Homo sapiens
  misc_RNA (1)...(19): siRNA sense strand
ggauagcagagaugggaaa

SEQ ID NO: 1765275 - RNA, 19 nt, Homo sapiens
  misc_RNA (1)...(19): siRNA sense strand
cauacucuuugccacacua

SEQ ID NO: 1765276 - RNA, 19 nt, Homo sapiens
  misc_RNA (1)...(19): siRNA sense strand
cuagaggccuauugcuaca

SEQ ID NO: 1765277 - RNA, 19 nt, Homo sapiens
  misc_RNA (1)...(19): siRNA sense strand
gcuccucuacauacucuuu

SEQ ID NO: 1765278 - RNA, 19 nt, Homo sapiens
  misc_RNA (1)...(19): siRNA sense strand
cacuagaggccuauugcua

SEQ ID NO: 1765279 - RNA, 19 nt, Homo sapiens
  misc_RNA (1)...(19): siRNA sense strand
cacuucggcugcaccauug

SEQ ID NO: 1765280 - RNA, 19 nt, Homo sapiens
  misc_RNA (1)...(19): siRNA sense strand
gggcagcaacgccgucaau

SEQ ID NO: 1765281 - RNA, 19 nt, Homo sapiens
  misc_RNA (1)...(19): siRNA sense strand
gccuguggcuccucuacau

SEQ ID NO: 1765282 - RNA, 19 nt, Homo sapiens
  misc_RNA (1)...(19): siRNA sense strand
caagaggauagcagagaug

SEQ ID NO: 1765283 - RNA, 19 nt, Homo sapiens
  misc_RNA (1)...(19): siRNA sense strand
aggcugcccuccugcuuug

SEQ ID NO: 1765284 - RNA, 19 nt, Homo sapiens
  misc_RNA (1)...(19): siRNA sense strand
acaaacugaucaagaagac

SEQ ID NO: 1765285 - RNA, 19 nt, Homo sapiens
  misc_RNA (1)...(19): siRNA sense strand
guggacaaacugaucaaga

SEQ ID NO: 1765286 - RNA, 19 nt, Homo sapiens
  misc_RNA (1)...(19): siRNA sense strand
gccaagaggauagcagaga

SEQ ID NO: 1765287 - RNA, 19 nt, Homo sapiens
  misc_RNA (1)...(19): siRNA sense strand
cugcugcccuccaggaugu

SEQ ID NO: 1765288 - RNA, 19 nt, Homo sapiens
  misc_RNA (1)...(19): siRNA sense strand
gaagaagaggaggccaaga

SEQ ID NO: 1765289 - RNA, 19 nt, Homo sapiens
  misc_RNA (1)...(19): siRNA sense strand
uugaagaguccuaugaguu

SEQ ID NO: 1765290 - RNA, 19 nt, Homo sapiens
  misc_RNA (1)...(19): siRNA sense strand
gaggaggccaagaggauag

SEQ ID NO: 1765291 - RNA, 19 nt, Homo sapiens
  misc_RNA (1)...(19): siRNA sense strand
agucacagcuguuguuuuc

SEQ ID NO: 1765292 - RNA, 19 nt, Homo sapiens
  misc_RNA (1)...(19): siRNA sense strand
cuagaagucaucauugaag

SEQ ID NO: 1765293 - RNA, 19 nt, Homo sapiens
  misc_RNA (1)...(19): siRNA sense strand
ccacacuagaggccuauug

SEQ ID NO: 1765294 - RNA, 19 nt, Homo sapiens
  misc_RNA (1)...(19): siRNA sense strand
gcaagcucgccacaacaug

SEQ ID NO: 1765295 - RNA, 19 nt, Homo sapiens
  misc_RNA (1)...(19): siRNA sense strand
caccaucuuugcauuuguc

SEQ ID NO: 1765296 - RNA, 19 nt, Homo sapiens
  misc_RNA (1)...(19): siRNA sense strand
ucaagacuacgguggacaa

SEQ ID NO: 1765297 - RNA, 19 nt, Homo sapiens
  misc_RNA (1)...(19): siRNA sense strand
caugcucaccgccaucauu

SEQ ID NO: 1765298 - RNA, 19 nt, Homo sapiens
  misc_RNA (1)...(19): siRNA sense strand
gcacuuccugacugucuuc

SEQ ID NO: 1765299 - RNA, 19 nt, Homo sapiens
  misc_RNA (1)...(19): siRNA sense strand
caacgccgucaaugucuuc

SEQ ID NO: 1765300 - RNA, 19 nt, Homo sapiens
  misc_RNA (1)...(19): siRNA sense strand
ccuccaggauguauaugca

SEQ ID NO: 1765301 - RNA, 19 nt, Homo sapiens
  misc_RNA (1)...(19): siRNA sense strand
ucuggaaggugcuguuugc

SEQ ID NO: 1765302 - RNA, 19 nt, Homo sapiens
  misc_RNA (1)...(19): siRNA sense strand
uccuaugaguucaagacua

SEQ ID NO: 1765303 - RNA, 19 nt, Homo sapiens
  misc_RNA (1)...(19): siRNA sense strand
cagacaggaagcugacuau

SEQ ID NO: 1765304 - RNA, 19 nt, Homo sapiens
  misc_RNA (1)...(19): siRNA sense strand
ucaccaucuuugcauuugu

SEQ ID NO: 1765305 - RNA, 19 nt, Homo sapiens
  misc_RNA (1)...(19): siRNA sense strand
agaggaggccaagaggaua

SEQ ID NO: 1765306 - RNA, 19 nt, Homo sapiens
  misc_RNA (1)...(19): siRNA sense strand
aagaggaggccaagaggau

SEQ ID NO: 1765307 - RNA, 19 nt, Homo sapiens
  misc_RNA (1)...(19): siRNA sense strand
acaggaagcugacuaugga

SEQ ID NO: 1765308 - RNA, 19 nt, Homo sapiens
  misc_RNA (1)...(19): siRNA sense strand
gaagcugacuauggaagaa

SEQ ID NO: 1765309 - RNA, 19 nt, Homo sapiens
  misc_RNA (1)...(19): siRNA sense strand
gaugggaaagccaguauug

SEQ ID NO: 1765310 - RNA, 19 nt, Homo sapiens
  misc_RNA (1)...(19): siRNA sense strand
ccaagaggauagcagagau

SEQ ID NO: 1765311 - RNA, 19 nt, Homo sapiens
  misc_RNA (1)...(19): siRNA sense strand
ggaagcugacuauggaaga

SEQ ID NO: 1765312 - RNA, 19 nt, Homo sapiens
  misc_RNA (1)...(19): siRNA sense strand
gacaggaagcugacuaugg

SEQ ID NO: 1765313 - RNA, 19 nt, Homo sapiens
  misc_RNA (1)...(19): siRNA sense strand
gagaugggaaagccaguau

SEQ ID NO: 1765314 - RNA, 19 nt, Homo sapiens
  misc_RNA (1)...(19): siRNA sense strand
ggauagcagagaugggaaa

SEQ ID NO: 1765315 - RNA, 19 nt, Homo sapiens
  misc_RNA (1)...(19): siRNA sense strand
caagaggauagcagagaug

SEQ ID NO: 1765316 - RNA, 19 nt, Homo sapiens
  misc_RNA (1)...(19): siRNA sense strand
gaagaagaggaggccaaga

SEQ ID NO: 1765317 - RNA, 19 nt, Homo sapiens
  misc_RNA (1)...(19): siRNA sense strand
gccaagaggauagcagaga

SEQ ID NO: 1765318 - RNA, 19 nt, Homo sapiens
  misc_RNA (1)...(19): siRNA sense strand
gaggaggccaagaggauag

SEQ ID NO: 1765319 - RNA, 19 nt, Homo sapiens
  misc_RNA (1)...(19): siRNA sense strand
agaggaggccaagaggaua

SEQ ID NO: 1765320 - RNA, 19 nt, Homo sapiens
  misc_RNA (1)...(19): siRNA sense strand
cagacaggaagcugacuau

SEQ ID NO: 1765321 - RNA, 19 nt, Homo sapiens
  misc_RNA (1)...(19): siRNA sense strand
aagaggaggccaagaggau

SEQ ID NO: 1765322 - RNA, 19 nt, Homo sapiens
  misc_RNA (1)...(19): siRNA sense strand
caaacuagaagucaucauu

SEQ ID NO: 1765323 - RNA, 19 nt, Homo sapiens
  misc_RNA (1)...(19): siRNA sense strand
ucucaaagauucagucaca

SEQ ID NO: 1765324 - RNA, 19 nt, Homo sapiens
  misc_RNA (1)...(19): siRNA sense strand
uggacaaacugaucaagaa

SEQ ID NO: 1765325 - RNA, 19 nt, Homo sapiens
  misc_RNA (1)...(19): siRNA sense strand
gcacuucggcugcaccauu

SEQ ID NO: 1765326 - RNA, 19 nt, Homo sapiens
  misc_RNA (1)...(19): siRNA sense strand
agacaaaccuggccuuggu

SEQ ID NO: 1765327 - RNA, 19 nt, Homo sapiens
  misc_RNA (1)...(19): siRNA sense strand
ccauuggucucaaagauuc

SEQ ID NO: 1765328 - RNA, 19 nt, Homo sapiens
  misc_RNA (1)...(19): siRNA sense strand
gcaucagcgugcucuugua

SEQ ID NO: 1765329 - RNA, 19 nt, Homo sapiens
  misc_RNA (1)...(19): siRNA sense strand
gaugggaaagccaguauug

SEQ ID NO: 1765330 - RNA, 19 nt, Homo sapiens
  misc_RNA (1)...(19): siRNA sense strand
gggaugaggaugaggauga

SEQ ID NO: 1765331 - RNA, 19 nt, Homo sapiens
  misc_RNA (1)...(19): siRNA sense strand
gaagaguccuaugaguuca

SEQ ID NO: 1765332 - RNA, 19 nt, Homo sapiens
  misc_RNA (1)...(19): siRNA sense strand
ggaugaggaugaggaugaa

SEQ ID NO: 1765333 - RNA, 19 nt, Homo sapiens
  misc_RNA (1)...(19): siRNA sense strand
uagaagucaucauugaaga

SEQ ID NO: 1765334 - RNA, 19 nt, Homo sapiens
  misc_RNA (1)...(19): siRNA sense strand
ccaagaggauagcagagau

SEQ ID NO: 1765335 - RNA, 19 nt, Homo sapiens
  misc_RNA (1)...(19): siRNA sense strand
ugaagaguccuaugaguuc

SEQ ID NO: 1765336 - RNA, 19 nt, Homo sapiens
  misc_RNA (1)...(19): siRNA sense strand
gcaacgccgucaaugucuu

SEQ ID NO: 1765337 - RNA, 19 nt, Homo sapiens
  misc_RNA (1)...(19): siRNA sense strand
ggagggaccaguucaugga

SEQ ID NO: 1765338 - RNA, 19 nt, Homo sapiens
  misc_RNA (1)...(19): siRNA sense strand
ccuaugaguucaagacuac

SEQ ID NO: 1765339 - RNA, 19 nt, Homo sapiens
  misc_RNA (1)...(19): siRNA sense strand
gcagcaacgccgucaaugu

SEQ ID NO: 1765340 - RNA, 19 nt, Homo sapiens
  misc_RNA (1)...(19): siRNA sense strand
aaacuagaagucaucauug

SEQ ID NO: 1765341 - RNA, 19 nt, Homo sapiens
  misc_RNA (1)...(19): siRNA sense strand
aacuagaagucaucauuga

SEQ ID NO: 1765342 - RNA, 19 nt, Homo sapiens
  misc_RNA (1)...(19): siRNA sense strand
gcugcaagcucgccacaac

SEQ ID NO: 1765343 - RNA, 19 nt, Homo sapiens
  misc_RNA (1)...(19): siRNA sense strand
agacuacgguggacaaacu

SEQ ID NO: 1765344 - RNA, 19 nt, Homo sapiens
  misc_RNA (1)...(19): siRNA sense strand
gacaaacugaucaagaaga

SEQ ID NO: 1765345 - RNA, 19 nt, Homo sapiens
  misc_RNA (1)...(19): siRNA sense strand
aaacugaucaagaagacaa

SEQ ID NO: 1765346 - RNA, 19 nt, Homo sapiens
  misc_RNA (1)...(19): siRNA sense strand
gaagucaucauugaagagu

SEQ ID NO: 1765347 - RNA, 19 nt, Homo sapiens
  misc_RNA (1)...(19): siRNA sense strand
ggacaaacugaucaagaag

SEQ ID NO: 1765348 - RNA, 19 nt, Homo sapiens
  misc_RNA (1)...(19): siRNA sense strand
gagaugggaaagccaguau

SEQ ID NO: 1765349 - RNA, 19 nt, Homo sapiens
  misc_RNA (1)...(19): siRNA sense strand
cagcaacgccgucaauguc

SEQ ID NO: 1765350 - RNA, 19 nt, Homo sapiens
  misc_RNA (1)...(19): siRNA sense strand
ggauagcagagaugggaaa

SEQ ID NO: 1765351 - RNA, 19 nt, Homo sapiens
  misc_RNA (1)...(19): siRNA sense strand
cauacucuuugccacacua

SEQ ID NO: 1765352 - RNA, 19 nt, Homo sapiens
  misc_RNA (1)...(19): siRNA sense strand
cuagaggccuauugcuaca

SEQ ID NO: 1765353 - RNA, 19 nt, Homo sapiens
  misc_RNA (1)...(19): siRNA sense strand
gcuccucuacauacucuuu

SEQ ID NO: 1765354 - RNA, 19 nt, Homo sapiens
  misc_RNA (1)...(19): siRNA sense strand
cacuagaggccuauugcua

SEQ ID NO: 1765355 - RNA, 19 nt, Homo sapiens
  misc_RNA (1)...(19): siRNA sense strand
cacuucggcugcaccauug

SEQ ID NO: 1765356 - RNA, 19 nt, Homo sapiens
  misc_RNA (1)...(19): siRNA sense strand
gggcagcaacgccgucaau

SEQ ID NO: 1765357 - RNA, 19 nt, Homo sapiens
  misc_RNA (1)...(19): siRNA sense strand
gccuguggcuccucuacau

SEQ ID NO: 1765358 - RNA, 19 nt, Homo sapiens
  misc_RNA (1)...(19): siRNA sense strand
guggacaaacugaucaaga

SEQ ID NO: 1765359 - RNA, 19 nt, Homo sapiens
  misc_RNA (1)...(19): siRNA sense strand
caagaggauagcagagaug

SEQ ID NO: 1765360 - RNA, 19 nt, Homo sapiens
  misc_RNA (1)...(19): siRNA sense strand
aggcugcccuccugcuuug

SEQ ID NO: 1765361 - RNA, 19 nt, Homo sapiens
  misc_RNA (1)...(19): siRNA sense strand
acaaacugaucaagaagac

SEQ ID NO: 1765362 - RNA, 19 nt, Homo sapiens
  misc_RNA (1)...(19): siRNA sense strand
gccaagaggauagcagaga

SEQ ID NO: 1765363 - RNA, 19 nt, Homo sapiens
  misc_RNA (1)...(19): siRNA sense strand
gaagaagaggaggccaaga

SEQ ID NO: 1765364 - RNA, 19 nt, Homo sapiens
  misc_RNA (1)...(19): siRNA sense strand
cugcugcccuccaggaugu

SEQ ID NO: 1765365 - RNA, 19 nt, Homo sapiens
  misc_RNA (1)...(19): siRNA sense strand
uugaagaguccuaugaguu

SEQ ID NO: 1765366 - RNA, 19 nt, Homo sapiens
  misc_RNA (1)...(19): siRNA sense strand
agucacagcuguuguuuuc

SEQ ID NO: 1765367 - RNA, 19 nt, Homo sapiens
  misc_RNA (1)...(19): siRNA sense strand
gaggaggccaagaggauag

SEQ ID NO: 1765368 - RNA, 19 nt, Homo sapiens
  misc_RNA (1)...(19): siRNA sense strand
ucaagacuacgguggacaa

SEQ ID NO: 1765369 - RNA, 19 nt, Homo sapiens
  misc_RNA (1)...(19): siRNA sense strand
ccacacuagaggccuauug

SEQ ID NO: 1765370 - RNA, 19 nt, Homo sapiens
  misc_RNA (1)...(19): siRNA sense strand
gcaagcucgccacaacaug

SEQ ID NO: 1765371 - RNA, 19 nt, Homo sapiens
  misc_RNA (1)...(19): siRNA sense strand
caccaucuuugcauuuguc

SEQ ID NO: 1765372 - RNA, 19 nt, Homo sapiens
  misc_RNA (1)...(19): siRNA sense strand
cuagaagucaucauugaag

SEQ ID NO: 1765373 - RNA, 19 nt, Homo sapiens
  misc_RNA (1)...(19): siRNA sense strand
caugcucaccgccaucauu

SEQ ID NO: 1765374 - RNA, 19 nt, Homo sapiens
  misc_RNA (1)...(19): siRNA sense strand
gcacuuccugacugucuuc

SEQ ID NO: 1765375 - RNA, 19 nt, Homo sapiens
  misc_RNA (1)...(19): siRNA sense strand
caacgccgucaaugucuuc

SEQ ID NO: 1765376 - RNA, 19 nt, Homo sapiens
  misc_RNA (1)...(19): siRNA sense strand
ccuccaggauguauaugca

SEQ ID NO: 1765377 - RNA, 19 nt, Homo sapiens
  misc_RNA (1)...(19): siRNA sense strand
ucuggaaggugcuguuugc

SEQ ID NO: 1765378 - RNA, 19 nt, Homo sapiens
  misc_RNA (1)...(19): siRNA sense strand
uccuaugaguucaagacua

SEQ ID NO: 1765379 - RNA, 19 nt, Homo sapiens
  misc_RNA (1)...(19): siRNA sense strand
agaggaggccaagaggaua

SEQ ID NO: 1765380 - RNA, 19 nt, Homo sapiens
  misc_RNA (1)...(19): siRNA sense strand
ucaccaucuuugcauuugu

SEQ ID NO: 1765381 - RNA, 19 nt, Homo sapiens
  misc_RNA (1)...(19): siRNA sense strand
aagaggaggccaagaggau

SEQ ID NO: 1765382 - RNA, 19 nt, Homo sapiens
  misc_RNA (1)...(19): siRNA sense strand
caaacuagaagucaucauu

SEQ ID NO: 1765383 - RNA, 19 nt, Homo sapiens
  misc_RNA (1)...(19): siRNA sense strand
acaggaagcugacuaugga

SEQ ID NO: 1765384 - RNA, 19 nt, Homo sapiens
  misc_RNA (1)...(19): siRNA sense strand
gaagcugacuauggaagaa

SEQ ID NO: 1765385 - RNA, 19 nt, Homo sapiens
  misc_RNA (1)...(19): siRNA sense strand
ucucaaagauucagucaca

SEQ ID NO: 1765386 - RNA, 19 nt, Homo sapiens
  misc_RNA (1)...(19): siRNA sense strand
uggacaaacugaucaagaa

SEQ ID NO: 1765387 - RNA, 19 nt, Homo sapiens
  misc_RNA (1)...(19): siRNA sense strand
gcacuucggcugcaccauu

SEQ ID NO: 1765388 - RNA, 19 nt, Homo sapiens
  misc_RNA (1)...(19): siRNA sense strand
agacaaaccuggccuuggu

SEQ ID NO: 1765389 - RNA, 19 nt, Homo sapiens
  misc_RNA (1)...(19): siRNA sense strand
ccauuggucucaaagauuc

SEQ ID NO: 1765390 - RNA, 19 nt, Homo sapiens
  misc_RNA (1)...(19): siRNA sense strand
gcaucagcgugcucuugua

SEQ ID NO: 1765391 - RNA, 19 nt, Homo sapiens
  misc_RNA (1)...(19): siRNA sense strand
gaugggaaagccaguauug

SEQ ID NO: 1765392 - RNA, 19 nt, Homo sapiens
  misc_RNA (1)...(19): siRNA sense strand
gggaugaggaugaggauga

SEQ ID NO: 1765393 - RNA, 19 nt, Homo sapiens
  misc_RNA (1)...(19): siRNA sense strand
gaagaguccuaugaguuca

SEQ ID NO: 1765394 - RNA, 19 nt, Homo sapiens
  misc_RNA (1)...(19): siRNA sense strand
ggaugaggaugaggaugaa

SEQ ID NO: 1765395 - RNA, 19 nt, Homo sapiens
  misc_RNA (1)...(19): siRNA sense strand
ccaagaggauagcagagau

SEQ ID NO: 1765396 - RNA, 19 nt, Homo sapiens
  misc_RNA (1)...(19): siRNA sense strand
uagaagucaucauugaaga

SEQ ID NO: 1765397 - RNA, 19 nt, Homo sapiens
  misc_RNA (1)...(19): siRNA sense strand
ugaagaguccuaugaguuc

SEQ ID NO: 1765398 - RNA, 19 nt, Homo sapiens
  misc_RNA (1)...(19): siRNA sense strand
gcaacgccgucaaugucuu

SEQ ID NO: 1765399 - RNA, 19 nt, Homo sapiens
  misc_RNA (1)...(19): siRNA sense strand
ggagggaccaguucaugga

SEQ ID NO: 1765400 - RNA, 19 nt, Homo sapiens
  misc_RNA (1)...(19): siRNA sense strand
ccuaugaguucaagacuac

SEQ ID NO: 1765401 - RNA, 19 nt, Homo sapiens
  misc_RNA (1)...(19): siRNA sense strand
gcagcaacgccgucaaugu

SEQ ID NO: 1765402 - RNA, 19 nt, Homo sapiens
  misc_RNA (1)...(19): siRNA sense strand
aaacuagaagucaucauug

SEQ ID NO: 1765403 - RNA, 19 nt, Homo sapiens
  misc_RNA (1)...(19): siRNA sense strand
ggaagcugacuauggaaga

SEQ ID NO: 1765404 - RNA, 19 nt, Homo sapiens
  misc_RNA (1)...(19): siRNA sense strand
aacuagaagucaucauuga

SEQ ID NO: 1765405 - RNA, 19 nt, Homo sapiens
  misc_RNA (1)...(19): siRNA sense strand
gcugcaagcucgccacaac

SEQ ID NO: 1765406 - RNA, 19 nt, Homo sapiens
  misc_RNA (1)...(19): siRNA sense strand
agacuacgguggacaaacu

SEQ ID NO: 1765407 - RNA, 19 nt, Homo sapiens
  misc_RNA (1)...(19): siRNA sense strand
gacaaacugaucaagaaga

SEQ ID NO: 1765408 - RNA, 19 nt, Homo sapiens
  misc_RNA (1)...(19): siRNA sense strand
aaacugaucaagaagacaa

SEQ ID NO: 1765409 - RNA, 19 nt, Homo sapiens
  misc_RNA (1)...(19): siRNA sense strand
gaagucaucauugaagagu

SEQ ID NO: 1765410 - RNA, 19 nt, Homo sapiens
  misc_RNA (1)...(19): siRNA sense strand
gacaggaagcugacuaugg

SEQ ID NO: 1765411 - RNA, 19 nt, Homo sapiens
  misc_RNA (1)...(19): siRNA sense strand
ggacaaacugaucaagaag

SEQ ID NO: 1765412 - RNA, 19 nt, Homo sapiens
  misc_RNA (1)...(19): siRNA sense strand
gagaugggaaagccaguau

SEQ ID NO: 1765413 - RNA, 19 nt, Homo sapiens
  misc_RNA (1)...(19): siRNA sense strand
cagcaacgccgucaauguc

SEQ ID NO: 1765414 - RNA, 19 nt, Homo sapiens
  misc_RNA (1)...(19): siRNA sense strand
ggauagcagagaugggaaa

SEQ ID NO: 1765415 - RNA, 19 nt, Homo sapiens
  misc_RNA (1)...(19): siRNA sense strand
cauacucuuugccacacua

SEQ ID NO: 1765416 - RNA, 19 nt, Homo sapiens
  misc_RNA (1)...(19): siRNA sense strand
cuagaggccuauugcuaca

SEQ ID NO: 1765417 - RNA, 19 nt, Homo sapiens
  misc_RNA (1)...(19): siRNA sense strand
gcuccucuacauacucuuu

SEQ ID NO: 1765418 - RNA, 19 nt, Homo sapiens
  misc_RNA (1)...(19): siRNA sense strand
cacuagaggccuauugcua

SEQ ID NO: 1765419 - RNA, 19 nt, Homo sapiens
  misc_RNA (1)...(19): siRNA sense strand
cacuucggcugcaccauug

SEQ ID NO: 1765420 - RNA, 19 nt, Homo sapiens
  misc_RNA (1)...(19): siRNA sense strand
gggcagcaacgccgucaau

SEQ ID NO: 1765421 - RNA, 19 nt, Homo sapiens
  misc_RNA (1)...(19): siRNA sense strand
gccuguggcuccucuacau

SEQ ID NO: 1765422 - RNA, 19 nt, Homo sapiens
  misc_RNA (1)...(19): siRNA sense strand
caagaggauagcagagaug

SEQ ID NO: 1765423 - RNA, 19 nt, Homo sapiens
  misc_RNA (1)...(19): siRNA sense strand
aggcugcccuccugcuuug

SEQ ID NO: 1765424 - RNA, 19 nt, Homo sapiens
  misc_RNA (1)...(19): siRNA sense strand
acaaacugaucaagaagac

SEQ ID NO: 1765425 - RNA, 19 nt, Homo sapiens
  misc_RNA (1)...(19): siRNA sense strand
guggacaaacugaucaaga

SEQ ID NO: 1765426 - RNA, 19 nt, Homo sapiens
  misc_RNA (1)...(19): siRNA sense strand
gccaagaggauagcagaga

SEQ ID NO: 1765427 - RNA, 19 nt, Homo sapiens
  misc_RNA (1)...(19): siRNA sense strand
cugcugcccuccaggaugu

SEQ ID NO: 1765428 - RNA, 19 nt, Homo sapiens
  misc_RNA (1)...(19): siRNA sense strand
gaagaagaggaggccaaga

SEQ ID NO: 1765429 - RNA, 19 nt, Homo sapiens
  misc_RNA (1)...(19): siRNA sense strand
uugaagaguccuaugaguu

SEQ ID NO: 1765430 - RNA, 19 nt, Homo sapiens
  misc_RNA (1)...(19): siRNA sense strand
gaggaggccaagaggauag

SEQ ID NO: 1765431 - RNA, 19 nt, Homo sapiens
  misc_RNA (1)...(19): siRNA sense strand
agucacagcuguuguuuuc

SEQ ID NO: 1765432 - RNA, 19 nt, Homo sapiens
  misc_RNA (1)...(19): siRNA sense strand
cuagaagucaucauugaag

SEQ ID NO: 1765433 - RNA, 19 nt, Homo sapiens
  misc_RNA (1)...(19): siRNA sense strand
ccacacuagaggccuauug

SEQ ID NO: 1765434 - RNA, 19 nt, Homo sapiens
  misc_RNA (1)...(19): siRNA sense strand
gcaagcucgccacaacaug

SEQ ID NO: 1765435 - RNA, 19 nt, Homo sapiens
  misc_RNA (1)...(19): siRNA sense strand
caccaucuuugcauuuguc

SEQ ID NO: 1765436 - RNA, 19 nt, Homo sapiens
  misc_RNA (1)...(19): siRNA sense strand
ucaagacuacgguggacaa

SEQ ID NO: 1765437 - RNA, 19 nt, Homo sapiens
  misc_RNA (1)...(19): siRNA sense strand
caugcucaccgccaucauu

SEQ ID NO: 1765438 - RNA, 19 nt, Homo sapiens
  misc_RNA (1)...(19): siRNA sense strand
gcacuuccugacugucuuc

SEQ ID NO: 1765439 - RNA, 19 nt, Homo sapiens
  misc_RNA (1)...(19): siRNA sense strand
caacgccgucaaugucuuc

SEQ ID NO: 1765440 - RNA, 19 nt, Homo sapiens
  misc_RNA (1)...(19): siRNA sense strand
ccuccaggauguauaugca

SEQ ID NO: 1765441 - RNA, 19 nt, Homo sapiens
  misc_RNA (1)...(19): siRNA sense strand
ucuggaaggugcuguuugc

SEQ ID NO: 1765442 - RNA, 19 nt, Homo sapiens
  misc_RNA (1)...(19): siRNA sense strand
uccuaugaguucaagacua

SEQ ID NO: 1765443 - RNA, 19 nt, Homo sapiens
  misc_RNA (1)...(19): siRNA sense strand
cagacaggaagcugacuau

SEQ ID NO: 1765444 - RNA, 19 nt, Homo sapiens
  misc_RNA (1)...(19): siRNA sense strand
ucaccaucuuugcauuugu

SEQ ID NO: 1765445 - RNA, 19 nt, Homo sapiens
  misc_RNA (1)...(19): siRNA sense strand
agaggaggccaagaggaua

SEQ ID NO: 1765446 - RNA, 19 nt, Homo sapiens
  misc_RNA (1)...(19): siRNA sense strand
aagaggaggccaagaggau

SEQ ID NO: 1765447 - RNA, 19 nt, Homo sapiens
  misc_RNA (1)...(19): siRNA sense strand
ggacauacaugaugaacaa

SEQ ID NO: 1765448 - RNA, 19 nt, Homo sapiens
  misc_RNA (1)...(19): siRNA sense strand
gcagaggucuuuagagauu

SEQ ID NO: 1765449 - RNA, 19 nt, Homo sapiens
  misc_RNA (1)...(19): siRNA sense strand
caaaugauguggauaaaga

SEQ ID NO: 1765450 - RNA, 19 nt, Homo sapiens
  misc_RNA (1)...(19): siRNA sense strand
ggagagagcagcaacauuu

SEQ ID NO: 1765451 - RNA, 19 nt, Homo sapiens
  misc_RNA (1)...(19): siRNA sense strand
ggagacacguuuagcuuaa

SEQ ID NO: 1765452 - RNA, 19 nt, Homo sapiens
  misc_RNA (1)...(19): siRNA sense strand
guaaagagcaggagaagaa

SEQ ID NO: 1765453 - RNA, 19 nt, Homo sapiens
  misc_RNA (1)...(19): siRNA sense strand
gauguuaccucauuuauac

SEQ ID NO: 1765454 - RNA, 19 nt, Homo sapiens
  misc_RNA (1)...(19): siRNA sense strand
uagacgggcuuuacaguua

SEQ ID NO: 1765455 - RNA, 19 nt, Homo sapiens
  misc_RNA (1)...(19): siRNA sense strand
gaugacaacuguacagaug

SEQ ID NO: 1765456 - RNA, 19 nt, Homo sapiens
  misc_RNA (1)...(19): siRNA sense strand
ucagaguccuccuugauua

SEQ ID NO: 1765457 - RNA, 19 nt, Homo sapiens
  misc_RNA (1)...(19): siRNA sense strand
caaaguggauucaauuaca

SEQ ID NO: 1765458 - RNA, 19 nt, Homo sapiens
  misc_RNA (1)...(19): siRNA sense strand
cagaacaacuguauaaaca

SEQ ID NO: 1765459 - RNA, 19 nt, Homo sapiens
  misc_RNA (1)...(19): siRNA sense strand
gaaacaguaugauaaagca

SEQ ID NO: 1765460 - RNA, 19 nt, Homo sapiens
  misc_RNA (1)...(19): siRNA sense strand
acacagacuuggagacuaa

SEQ ID NO: 1765461 - RNA, 19 nt, Homo sapiens
  misc_RNA (1)...(19): siRNA sense strand
gcagaagaacuuuaugaaa

SEQ ID NO: 1765462 - RNA, 19 nt, Homo sapiens
  misc_RNA (1)...(19): siRNA sense strand
guuagaagagcuuacauua

SEQ ID NO: 1765463 - RNA, 19 nt, Homo sapiens
  misc_RNA (1)...(19): siRNA sense strand
uagaagagcuuacauuagg

SEQ ID NO: 1765464 - RNA, 19 nt, Homo sapiens
  misc_RNA (1)...(19): siRNA sense strand
gaacaagagcaaauggaaa

SEQ ID NO: 1765465 - RNA, 19 nt, Homo sapiens
  misc_RNA (1)...(19): siRNA sense strand
gggaguccauggcaaauga

SEQ ID NO: 1765466 - RNA, 19 nt, Homo sapiens
  misc_RNA (1)...(19): siRNA sense strand
ggacacaccugauaaugcu

SEQ ID NO: 1765467 - RNA, 19 nt, Homo sapiens
  misc_RNA (1)...(19): siRNA sense strand
aacagaagcugcaugauug

SEQ ID NO: 1765468 - RNA, 19 nt, Homo sapiens
  misc_RNA (1)...(19): siRNA sense strand
cguugaagcuuugccauua

SEQ ID NO: 1765469 - RNA, 19 nt, Homo sapiens
  misc_RNA (1)...(19): siRNA sense strand
gcaagaaccaggaguuguu

SEQ ID NO: 1765470 - RNA, 19 nt, Homo sapiens
  misc_RNA (1)...(19): siRNA sense strand
gcagcucuaugcaaugaaa

SEQ ID NO: 1765471 - RNA, 19 nt, Homo sapiens
  misc_RNA (1)...(19): siRNA sense strand
ugcuguagcuaguuuauua

SEQ ID NO: 1765472 - RNA, 19 nt, Homo sapiens
  misc_RNA (1)...(19): siRNA sense strand
aaacagaagcugcaugauu

SEQ ID NO: 1765473 - RNA, 19 nt, Homo sapiens
  misc_RNA (1)...(19): siRNA sense strand
caccuaaacuuaagagaau

SEQ ID NO: 1765474 - RNA, 19 nt, Homo sapiens
  misc_RNA (1)...(19): siRNA sense strand
gaguaacacugucagaugu

SEQ ID NO: 1765475 - RNA, 19 nt, Homo sapiens
  misc_RNA (1)...(19): siRNA sense strand
acaaguuacuccucuguuu

SEQ ID NO: 1765476 - RNA, 19 nt, Homo sapiens
  misc_RNA (1)...(19): siRNA sense strand
gguaaggacacaccugaua

SEQ ID NO: 1765477 - RNA, 19 nt, Homo sapiens
  misc_RNA (1)...(19): siRNA sense strand
uugcuuagcugaucuuuau

SEQ ID NO: 1765478 - RNA, 19 nt, Homo sapiens
  misc_RNA (1)...(19): siRNA sense strand
ggaacucuauccugagaug

SEQ ID NO: 1765479 - RNA, 19 nt, Homo sapiens
  misc_RNA (1)...(19): siRNA sense strand
auaaagagcuaaugaagca

SEQ ID NO: 1765480 - RNA, 19 nt, Homo sapiens
  misc_RNA (1)...(19): siRNA sense strand
gagcaggcaauuuagauaa

SEQ ID NO: 1765481 - RNA, 19 nt, Homo sapiens
  misc_RNA (1)...(19): siRNA sense strand
gcaaagccaagaucauuga

SEQ ID NO: 1765482 - RNA, 19 nt, Homo sapiens
  misc_RNA (1)...(19): siRNA sense strand
gcgagacaaugggauauuu

SEQ ID NO: 1765483 - RNA, 19 nt, Homo sapiens
  misc_RNA (1)...(19): siRNA sense strand
ugucagauguuaccucauu

SEQ ID NO: 1765484 - RNA, 19 nt, Homo sapiens
  misc_RNA (1)...(19): siRNA sense strand
ggauguggcuugcuuaggu

SEQ ID NO: 1765485 - RNA, 19 nt, Homo sapiens
  misc_RNA (1)...(19): siRNA sense strand
gaaauucgacagaaaucuu

SEQ ID NO: 1765486 - RNA, 19 nt, Homo sapiens
  misc_RNA (1)...(19): siRNA sense strand
ugaacaagcugaacauuuu

SEQ ID NO: 1765487 - RNA, 19 nt, Homo sapiens
  misc_RNA (1)...(19): siRNA sense strand
guaaacagaagcugcauga

SEQ ID NO: 1765488 - RNA, 19 nt, Homo sapiens
  misc_RNA (1)...(19): siRNA sense strand
cagcaacauuugaacauga

SEQ ID NO: 1765489 - RNA, 19 nt, Homo sapiens
  misc_RNA (1)...(19): siRNA sense strand
gaagagcuuacauuaggua

SEQ ID NO: 1765490 - RNA, 19 nt, Homo sapiens
  misc_RNA (1)...(19): siRNA sense strand
gaacugcaggcacuucaaa

SEQ ID NO: 1765491 - RNA, 19 nt, Homo sapiens
  misc_RNA (1)...(19): siRNA sense strand
gaacaugacagagauaaag

SEQ ID NO: 1765492 - RNA, 19 nt, Homo sapiens
  misc_RNA (1)...(19): siRNA sense strand
aaagggcaauggaaauaaa

SEQ ID NO: 1765493 - RNA, 19 nt, Homo sapiens
  misc_RNA (1)...(19): siRNA sense strand
gaaaugagggagcgaguuc

SEQ ID NO: 1765494 - RNA, 19 nt, Homo sapiens
  misc_RNA (1)...(19): siRNA sense strand
guaaggacacaccugauaa

SEQ ID NO: 1765495 - RNA, 19 nt, Homo sapiens
  misc_RNA (1)...(19): siRNA sense strand
uugaagcacuugcaacuuu

SEQ ID NO: 1765496 - RNA, 19 nt, Homo sapiens
  misc_RNA (1)...(19): siRNA sense strand
gaagaaguuuggcaaugca

SEQ ID NO: 1765497 - RNA, 19 nt, Homo sapiens
  misc_RNA (1)...(19): siRNA sense strand
gaagcgaaauaccaagcaa

SEQ ID NO: 1765498 - RNA, 19 nt, Homo sapiens
  misc_RNA (1)...(19): siRNA sense strand
gaguccuccuugauuauua

SEQ ID NO: 1765499 - RNA, 19 nt, Homo sapiens
  misc_RNA (1)...(19): siRNA sense strand
uaaggacuauucaccuaaa

SEQ ID NO: 1765500 - RNA, 19 nt, Homo sapiens
  misc_RNA (1)...(19): siRNA sense strand
gccagugaauguaagagua

SEQ ID NO: 1765501 - RNA, 19 nt, Homo sapiens
  misc_RNA (1)...(19): siRNA sense strand
guacggauuugcccuuuua

SEQ ID NO: 1765502 - RNA, 19 nt, Homo sapiens
  misc_RNA (1)...(19): siRNA sense strand
ggaagaaguuuggcaaugc

SEQ ID NO: 1765503 - RNA, 19 nt, Homo sapiens
  misc_RNA (1)...(19): siRNA sense strand
gcaacagaauacuucgauu

SEQ ID NO: 1765504 - RNA, 19 nt, Homo sapiens
  misc_RNA (1)...(19): siRNA sense strand
uugcugaguugcugaguua

SEQ ID NO: 1765505 - RNA, 19 nt, Homo sapiens
  misc_RNA (1)...(19): siRNA sense strand
gaugaacucccguggcuuu

SEQ ID NO: 1765506 - RNA, 19 nt, Homo sapiens
  misc_RNA (1)...(19): siRNA sense strand
ggcaaaagcuaaucaacua

SEQ ID NO: 1765507 - RNA, 19 nt, Homo sapiens
  misc_RNA (1)...(19): siRNA sense strand
agagaugacugggauauug

SEQ ID NO: 1765508 - RNA, 19 nt, Homo sapiens
  misc_RNA (1)...(19): siRNA sense strand
aaacagcucauucuccuaa

SEQ ID NO: 1765509 - RNA, 19 nt, Homo sapiens
  misc_RNA (1)...(19): siRNA sense strand
ugggagagcaggcaauuua

SEQ ID NO: 1765510 - RNA, 19 nt, Homo sapiens
  misc_RNA (1)...(19): siRNA sense strand
ugacugggauauugcugua

SEQ ID NO: 1765511 - RNA, 19 nt, Homo sapiens
  misc_RNA (1)...(19): siRNA sense strand
ugaagcaucuugccaucuu

SEQ ID NO: 1765512 - RNA, 19 nt, Homo sapiens
  misc_RNA (1)...(19): siRNA sense strand
ggccuacacuucaucuuga

SEQ ID NO: 1765513 - RNA, 19 nt, Homo sapiens
  misc_RNA (1)...(19): siRNA sense strand
aagagcaaauggaaacuuu

SEQ ID NO: 1765514 - RNA, 19 nt, Homo sapiens
  misc_RNA (1)...(19): siRNA sense strand
ggauauugcuguagcuagu

SEQ ID NO: 1765515 - RNA, 19 nt, Homo sapiens
  misc_RNA (1)...(19): siRNA sense strand
ggaguaacacugucagaug

SEQ ID NO: 1765516 - RNA, 19 nt, Homo sapiens
  misc_RNA (1)...(19): siRNA sense strand
gaaggaguacgagaucuuu

SEQ ID NO: 1765517 - RNA, 19 nt, Homo sapiens
  misc_RNA (1)...(19): siRNA sense strand
ccaacacacugauucuuuc

SEQ ID NO: 1765518 - RNA, 19 nt, Homo sapiens
  misc_RNA (1)...(19): siRNA sense strand
caucagaaagcuauaaaga

SEQ ID NO: 1765519 - RNA, 19 nt, Homo sapiens
  misc_RNA (1)...(19): siRNA sense strand
cugcaugauugccuucuua

SEQ ID NO: 1765520 - RNA, 19 nt, Homo sapiens
  misc_RNA (1)...(19): siRNA sense strand
gcagggaaguaaacagaag

SEQ ID NO: 1765521 - RNA, 19 nt, Homo sapiens
  misc_RNA (1)...(19): siRNA sense strand
ggaagacugugaagaagcu

SEQ ID NO: 1765522 - RNA, 19 nt, Homo sapiens
  misc_RNA (1)...(19): siRNA sense strand
uagcugaucuuuaugaaac

SEQ ID NO: 1765523 - RNA, 19 nt, Homo sapiens
  misc_RNA (1)...(19): siRNA sense strand
gcagcaacauuugaacaug

SEQ ID NO: 1765524 - RNA, 19 nt, Homo sapiens
  misc_RNA (1)...(19): siRNA sense strand
ucagcaggcuucuaauuca

SEQ ID NO: 1765525 - RNA, 19 nt, Homo sapiens
  misc_RNA (1)...(19): siRNA sense strand
aaaccucgauuaaucuuuc

SEQ ID NO: 1765526 - RNA, 19 nt, Homo sapiens
  misc_RNA (1)...(19): siRNA sense strand
guagcuaguuuauuacaag

SEQ ID NO: 1765527 - RNA, 19 nt, Homo sapiens
  misc_RNA (1)...(19): siRNA sense strand
gcuuugccauuauaugaaa

SEQ ID NO: 1765528 - RNA, 19 nt, Homo sapiens
  misc_RNA (1)...(19): siRNA sense strand
uugcagaggucuuuagaga

SEQ ID NO: 1765529 - RNA, 19 nt, Homo sapiens
  misc_RNA (1)...(19): siRNA sense strand
gaaggaaaaccucgauuaa

SEQ ID NO: 1765530 - RNA, 19 nt, Homo sapiens
  misc_RNA (1)...(19): siRNA sense strand
gaugaaacccagccugaga

SEQ ID NO: 1765531 - RNA, 19 nt, Homo sapiens
  misc_RNA (1)...(19): siRNA sense strand
caugacagagauaaaguua

SEQ ID NO: 1765532 - RNA, 19 nt, Homo sapiens
  misc_RNA (1)...(19): siRNA sense strand
cagcaaagccaagaucauu

SEQ ID NO: 1765533 - RNA, 19 nt, Homo sapiens
  misc_RNA (1)...(19): siRNA sense strand
ccaaagcacccuaguguag

SEQ ID NO: 1765534 - RNA, 19 nt, Homo sapiens
  misc_RNA (1)...(19): siRNA sense strand
gaagcguuccuuagaaaug

SEQ ID NO: 1765535 - RNA, 19 nt, Homo sapiens
  misc_RNA (1)...(19): siRNA sense strand
uaauucagcccaugaguug

SEQ ID NO: 1765536 - RNA, 19 nt, Homo sapiens
  misc_RNA (1)...(19): siRNA sense strand
gaagcuagaacgacacugu

SEQ ID NO: 1765537 - RNA, 19 nt, Homo sapiens
  misc_RNA (1)...(19): siRNA sense strand
ugauaaagcagaagaacuu

SEQ ID NO: 1765538 - RNA, 19 nt, Homo sapiens
  misc_RNA (1)...(19): siRNA sense strand
gugcucagucuuugaauaa

SEQ ID NO: 1765539 - RNA, 19 nt, Homo sapiens
  misc_RNA (1)...(19): siRNA sense strand
gguguucucuacuaucuuc

SEQ ID NO: 1765540 - RNA, 19 nt, Homo sapiens
  misc_RNA (1)...(19): siRNA sense strand
gaacuugaagcacuugcaa

SEQ ID NO: 1765541 - RNA, 19 nt, Homo sapiens
  misc_RNA (1)...(19): siRNA sense strand
ggauaaagagcuaaugaag

SEQ ID NO: 1765542 - RNA, 19 nt, Homo sapiens
  misc_RNA (1)...(19): siRNA sense strand
ggaacccaaugugaauauu

SEQ ID NO: 1765543 - RNA, 19 nt, Homo sapiens
  misc_RNA (1)...(19): siRNA sense strand
ccacuguuacuucuucaua

SEQ ID NO: 1765544 - RNA, 19 nt, Homo sapiens
  misc_RNA (1)...(19): siRNA sense strand
guaagaaaaugggaaauug

SEQ ID NO: 1765545 - RNA, 19 nt, Homo sapiens
  misc_RNA (1)...(19): siRNA sense strand
gaagcaucuugccaucuug

SEQ ID NO: 1765546 - RNA, 19 nt, Homo sapiens
  misc_RNA (1)...(19): siRNA sense strand
gaaacuugacaaagcugua

SEQ ID NO: 1765547 - RNA, 19 nt, Homo sapiens
  misc_RNA (1)...(19): siRNA sense strand
agaaugagcuccaauguau

SEQ ID NO: 1765548 - RNA, 19 nt, Homo sapiens
  misc_RNA (1)...(19): siRNA sense strand
ggagauagcccaaggagaa

SEQ ID NO: 1765549 - RNA, 19 nt, Homo sapiens
  misc_RNA (1)...(19): siRNA sense strand
caaagaaaguugugcaaau

SEQ ID NO: 1765550 - RNA, 19 nt, Homo sapiens
  misc_RNA (1)...(19): siRNA sense strand
gagcuccaauguauuauuu

SEQ ID NO: 1765551 - RNA, 19 nt, Homo sapiens
  misc_RNA (1)...(19): siRNA sense strand
cagagaagcuuacagaugu

SEQ ID NO: 1765552 - RNA, 19 nt, Homo sapiens
  misc_RNA (1)...(19): siRNA sense strand
gcaggaacuucaggacuua

SEQ ID NO: 1765553 - RNA, 19 nt, Homo sapiens
  misc_RNA (1)...(19): siRNA sense strand
gagggccaauggacaauua

SEQ ID NO: 1765554 - RNA, 19 nt, Homo sapiens
  misc_RNA (1)...(19): siRNA sense strand
ggacaauuauggacaacaa

SEQ ID NO: 1765555 - RNA, 19 nt, Homo sapiens
  misc_RNA (1)...(19): siRNA sense strand
uaaagugucuugugaaucu

SEQ ID NO: 1765556 - RNA, 19 nt, Homo sapiens
  misc_RNA (1)...(19): siRNA sense strand
gaagaagacugggagacaa

SEQ ID NO: 1765557 - RNA, 19 nt, Homo sapiens
  misc_RNA (1)...(19): siRNA sense strand
gcagaaagccucaaacucu

SEQ ID NO: 1765558 - RNA, 19 nt, Homo sapiens
  misc_RNA (1)...(19): siRNA sense strand
caauuuggauccuaaguug

SEQ ID NO: 1765559 - RNA, 19 nt, Homo sapiens
  misc_RNA (1)...(19): siRNA sense strand
ugaaugaugugcuagagaa

SEQ ID NO: 1765560 - RNA, 19 nt, Homo sapiens
  misc_RNA (1)...(19): siRNA sense strand
gagcgcgucuggaaccuuu

SEQ ID NO: 1765561 - RNA, 19 nt, Homo sapiens
  misc_RNA (1)...(19): siRNA sense strand
gagaaugagcuccaaugua

SEQ ID NO: 1765562 - RNA, 19 nt, Homo sapiens
  misc_RNA (1)...(19): siRNA sense strand
ggacgaggauuugguguca

SEQ ID NO: 1765563 - RNA, 19 nt, Homo sapiens
  misc_RNA (1)...(19): siRNA sense strand
aaagaaaguugugcaaaug

SEQ ID NO: 1765564 - RNA, 19 nt, Homo sapiens
  misc_RNA (1)...(19): siRNA sense strand
caacaagagucuaaauggu

SEQ ID NO: 1765565 - RNA, 19 nt, Homo sapiens
  misc_RNA (1)...(19): siRNA sense strand
gaaggacuuugaagcaauc

SEQ ID NO: 1765566 - RNA, 19 nt, Homo sapiens
  misc_RNA (1)...(19): siRNA sense strand
ggaaauucaguuuggauga

SEQ ID NO: 1765567 - RNA, 19 nt, Homo sapiens
  misc_RNA (1)...(19): siRNA sense strand
aaugagcuccaauguauua

SEQ ID NO: 1765568 - RNA, 19 nt, Homo sapiens
  misc_RNA (1)...(19): siRNA sense strand
gaagcuuacagauguuuaa

SEQ ID NO: 1765569 - RNA, 19 nt, Homo sapiens
  misc_RNA (1)...(19): siRNA sense strand
cagaaagccucaaacucuu

SEQ ID NO: 1765570 - RNA, 19 nt, Homo sapiens
  misc_RNA (1)...(19): siRNA sense strand
guacacccucugacaauuu

SEQ ID NO: 1765571 - RNA, 19 nt, Homo sapiens
  misc_RNA (1)...(19): siRNA sense strand
ggacuuugaagcaaucauu

SEQ ID NO: 1765572 - RNA, 19 nt, Homo sapiens
  misc_RNA (1)...(19): siRNA sense strand
gcagcaagaaggacuuuga

SEQ ID NO: 1765573 - RNA, 19 nt, Homo sapiens
  misc_RNA (1)...(19): siRNA sense strand
ggacaacaagagucuaaau

SEQ ID NO: 1765574 - RNA, 19 nt, Homo sapiens
  misc_RNA (1)...(19): siRNA sense strand
caagaaggacuuugaagca

SEQ ID NO: 1765575 - RNA, 19 nt, Homo sapiens
  misc_RNA (1)...(19): siRNA sense strand
gaaugcggaguaugaauau

SEQ ID NO: 1765576 - RNA, 19 nt, Homo sapiens
  misc_RNA (1)...(19): siRNA sense strand
gcuccaauguauuauuugu

SEQ ID NO: 1765577 - RNA, 19 nt, Homo sapiens
  misc_RNA (1)...(19): siRNA sense strand
ccaaagaaugaccaaauga

SEQ ID NO: 1765578 - RNA, 19 nt, Homo sapiens
  misc_RNA (1)...(19): siRNA sense strand
agaaugcggaguaugaaua

SEQ ID NO: 1765579 - RNA, 19 nt, Homo sapiens
  misc_RNA (1)...(19): siRNA sense strand
ggaguaugaauaugaaguu

SEQ ID NO: 1765580 - RNA, 19 nt, Homo sapiens
  misc_RNA (1)...(19): siRNA sense strand
gcaaauggagcaggaacuu

SEQ ID NO: 1765581 - RNA, 19 nt, Homo sapiens
  misc_RNA (1)...(19): siRNA sense strand
guucuuagccacaugaaug

SEQ ID NO: 1765582 - RNA, 19 nt, Homo sapiens
  misc_RNA (1)...(19): siRNA sense strand
uuaagggucuauuccauuc

SEQ ID NO: 1765583 - RNA, 19 nt, Homo sapiens
  misc_RNA (1)...(19): siRNA sense strand
gaaguucuuagccacauga

SEQ ID NO: 1765584 - RNA, 19 nt, Homo sapiens
  misc_RNA (1)...(19): siRNA sense strand
cccaaagaaugaccaaaug

SEQ ID NO: 1765585 - RNA, 19 nt, Homo sapiens
  misc_RNA (1)...(19): siRNA sense strand
caauauauccuugucuuuc

SEQ ID NO: 1765586 - RNA, 19 nt, Homo sapiens
  misc_RNA (1)...(19): siRNA sense strand
gagcuaaaucgcagcaaga

SEQ ID NO: 1765587 - RNA, 19 nt, Homo sapiens
  misc_RNA (1)...(19): siRNA sense strand
aacagcaucuucaggguuu

SEQ ID NO: 1765588 - RNA, 19 nt, Homo sapiens
  misc_RNA (1)...(19): siRNA sense strand
caaagaaugaccaaaugau

SEQ ID NO: 1765589 - RNA, 19 nt, Homo sapiens
  misc_RNA (1)...(19): siRNA sense strand
gacaacaagagucuaaaug

SEQ ID NO: 1765590 - RNA, 19 nt, Homo sapiens
  misc_RNA (1)...(19): siRNA sense strand
ucagagaagcuuacagaug

SEQ ID NO: 1765591 - RNA, 19 nt, Homo sapiens
  misc_RNA (1)...(19): siRNA sense strand
uaaguugacugcccuugag

SEQ ID NO: 1765592 - RNA, 19 nt, Homo sapiens
  misc_RNA (1)...(19): siRNA sense strand
uaaaugguguuuggcugaa

SEQ ID NO: 1765593 - RNA, 19 nt, Homo sapiens
  misc_RNA (1)...(19): siRNA sense strand
gaggauuuggugucacaua

SEQ ID NO: 1765594 - RNA, 19 nt, Homo sapiens
  misc_RNA (1)...(19): siRNA sense strand
uaaggagaaugcggaguau

SEQ ID NO: 1765595 - RNA, 19 nt, Homo sapiens
  misc_RNA (1)...(19): siRNA sense strand
gaagaugcaagcacagaag

SEQ ID NO: 1765596 - RNA, 19 nt, Homo sapiens
  misc_RNA (1)...(19): siRNA sense strand
ccacaggggcucccauuua

SEQ ID NO: 1765597 - RNA, 19 nt, Homo sapiens
  misc_RNA (1)...(19): siRNA sense strand
gaagacugggagacaauau

SEQ ID NO: 1765598 - RNA, 19 nt, Homo sapiens
  misc_RNA (1)...(19): siRNA sense strand
gaauaugaaguuacugaag

SEQ ID NO: 1765599 - RNA, 19 nt, Homo sapiens
  misc_RNA (1)...(19): siRNA sense strand
agaaggacuuugaagcaau

SEQ ID NO: 1765600 - RNA, 19 nt, Homo sapiens
  misc_RNA (1)...(19): siRNA sense strand
ggagacuacauccaacuug

SEQ ID NO: 1765601 - RNA, 19 nt, Homo sapiens
  misc_RNA (1)...(19): siRNA sense strand
guucagaauacuucauuga

SEQ ID NO: 1765602 - RNA, 19 nt, Homo sapiens
  misc_RNA (1)...(19): siRNA sense strand
ccaaggaagagaaggagaa

SEQ ID NO: 1765603 - RNA, 19 nt, Homo sapiens
  misc_RNA (1)...(19): siRNA sense strand
agaaaguugugcaaaugga

SEQ ID NO: 1765604 - RNA, 19 nt, Homo sapiens
  misc_RNA (1)...(19): siRNA sense strand
gagcagaaagccucaaacu

SEQ ID NO: 1765605 - RNA, 19 nt, Homo sapiens
  misc_RNA (1)...(19): siRNA sense strand
ggagaaugcggaguaugaa

SEQ ID NO: 1765606 - RNA, 19 nt, Homo sapiens
  misc_RNA (1)...(19): siRNA sense strand
gaaugagcuccaauguauu

SEQ ID NO: 1765607 - RNA, 19 nt, Homo sapiens
  misc_RNA (1)...(19): siRNA sense strand
gcacagaaggaagaaguuc

SEQ ID NO: 1765608 - RNA, 19 nt, Homo sapiens
  misc_RNA (1)...(19): siRNA sense strand
aagaaggacuuugaagcaa

SEQ ID NO: 1765609 - RNA, 19 nt, Homo sapiens
  misc_RNA (1)...(19): siRNA sense strand
acaugaagccguuaugaau

SEQ ID NO: 1765610 - RNA, 19 nt, Homo sapiens
  misc_RNA (1)...(19): siRNA sense strand
aaacaugaagccguuauga

SEQ ID NO: 1765611 - RNA, 19 nt, Homo sapiens
  misc_RNA (1)...(19): siRNA sense strand
gagugccucuggaaaauaa

SEQ ID NO: 1765612 - RNA, 19 nt, Homo sapiens
  misc_RNA (1)...(19): siRNA sense strand
gagaagaugcaagcacaga

SEQ ID NO: 1765613 - RNA, 19 nt, Homo sapiens
  misc_RNA (1)...(19): siRNA sense strand
ccaagaacaaagaauuaga

SEQ ID NO: 1765614 - RNA, 19 nt, Homo sapiens
  misc_RNA (1)...(19): siRNA sense strand
aaaaggaccugaagcaaca

SEQ ID NO: 1765615 - RNA, 19 nt, Homo sapiens
  misc_RNA (1)...(19): siRNA sense strand
gagaagcuuacagauguuu

SEQ ID NO: 1765616 - RNA, 19 nt, Homo sapiens
  misc_RNA (1)...(19): siRNA sense strand
gaaagccucaaacucuuca

SEQ ID NO: 1765617 - RNA, 19 nt, Homo sapiens
  misc_RNA (1)...(19): siRNA sense strand
gacuguaggacgaggauuu

SEQ ID NO: 1765618 - RNA, 19 nt, Homo sapiens
  misc_RNA (1)...(19): siRNA sense strand
ugaaguuacugaagaagac

SEQ ID NO: 1765619 - RNA, 19 nt, Homo sapiens
  misc_RNA (1)...(19): siRNA sense strand
auaaggagaaugcggagua

SEQ ID NO: 1765620 - RNA, 19 nt, Homo sapiens
  misc_RNA (1)...(19): siRNA sense strand
aaauacagaugcaggaaaa

SEQ ID NO: 1765621 - RNA, 19 nt, Homo sapiens
  misc_RNA (1)...(19): siRNA sense strand
gagucuaaaugguguuugg

SEQ ID NO: 1765622 - RNA, 19 nt, Homo sapiens
  misc_RNA (1)...(19): siRNA sense strand
gagcagaccaaggaagaga

SEQ ID NO: 1765623 - RNA, 19 nt, Homo sapiens
  misc_RNA (1)...(19): siRNA sense strand
gagauagcccaaggagaaa

SEQ ID NO: 1765624 - RNA, 19 nt, Homo sapiens
  misc_RNA (1)...(19): siRNA sense strand
gaguggagcaacuagagaa

SEQ ID NO: 1765625 - RNA, 19 nt, Homo sapiens
  misc_RNA (1)...(19): siRNA sense strand
ucaaagaaaguugugcaaa

SEQ ID NO: 1765626 - RNA, 19 nt, Homo sapiens
  misc_RNA (1)...(19): siRNA sense strand
agaaugaccaaaugauaga

SEQ ID NO: 1765627 - RNA, 19 nt, Homo sapiens
  misc_RNA (1)...(19): siRNA sense strand
gguggcugcugcuggaaga

SEQ ID NO: 1765628 - RNA, 19 nt, Homo sapiens
  misc_RNA (1)...(19): siRNA sense strand
caagaacaaagaauuagag

SEQ ID NO: 1765629 - RNA, 19 nt, Homo sapiens
  misc_RNA (1)...(19): siRNA sense strand
gaacuucaggacuuacagu

SEQ ID NO: 1765630 - RNA, 19 nt, Homo sapiens
  misc_RNA (1)...(19): siRNA sense strand
caguuuggaugaauuagca

SEQ ID NO: 1765631 - RNA, 19 nt, Homo sapiens
  misc_RNA (1)...(19): siRNA sense strand
ucagggagacuacauccaa

SEQ ID NO: 1765632 - RNA, 19 nt, Homo sapiens
  misc_RNA (1)...(19): siRNA sense strand
aaaggaaauucaguuugga

SEQ ID NO: 1765633 - RNA, 19 nt, Homo sapiens
  misc_RNA (1)...(19): siRNA sense strand
gcuagagaaugagcuccaa

SEQ ID NO: 1765634 - RNA, 19 nt, Homo sapiens
  misc_RNA (1)...(19): siRNA sense strand
agccaagaacaaagaauua

SEQ ID NO: 1765635 - RNA, 19 nt, Homo sapiens
  misc_RNA (1)...(19): siRNA sense strand
caugaagccguuaugaaug

SEQ ID NO: 1765636 - RNA, 19 nt, Homo sapiens
  misc_RNA (1)...(19): siRNA sense strand
gcugaaggccccucaaauu

SEQ ID NO: 1765637 - RNA, 19 nt, Homo sapiens
  misc_RNA (1)...(19): siRNA sense strand
gaauugagaacuaaaagga

SEQ ID NO: 1765638 - RNA, 19 nt, Homo sapiens
  misc_RNA (1)...(19): siRNA sense strand
augaugugcuagagaauga

SEQ ID NO: 1765639 - RNA, 19 nt, Homo sapiens
  misc_RNA (1)...(19): siRNA sense strand
gaugcaagcacagaaggaa

SEQ ID NO: 1765640 - RNA, 19 nt, Homo sapiens
  misc_RNA (1)...(19): siRNA sense strand
cugacaauuuggauccuaa

SEQ ID NO: 1765641 - RNA, 19 nt, Homo sapiens
  misc_RNA (1)...(19): siRNA sense strand
gagaaugcggaguaugaau

SEQ ID NO: 1765642 - RNA, 19 nt, Homo sapiens
  misc_RNA (1)...(19): siRNA sense strand
augaagccguuaugaaugu

SEQ ID NO: 1765643 - RNA, 19 nt, Homo sapiens
  misc_RNA (1)...(19): siRNA sense strand
ccaguacacccucugacaa

SEQ ID NO: 1765644 - RNA, 19 nt, Homo sapiens
  misc_RNA (1)...(19): siRNA sense strand
cagcaagaaggacuuugaa

SEQ ID NO: 1765645 - RNA, 19 nt, Homo sapiens
  misc_RNA (1)...(19): siRNA sense strand
ggaagagaaggagaagaug

SEQ ID NO: 1765646 - RNA, 19 nt, Homo sapiens
  misc_RNA (1)...(19): siRNA sense strand
uagagcagaccaaggaaga

SEQ ID NO: 1765647 - RNA, 19 nt, Homo sapiens
  misc_RNA (1)...(19): siRNA sense strand
gcaaagagauuguucugaa

SEQ ID NO: 1765648 - RNA, 19 nt, Homo sapiens
  misc_RNA (1)...(19): siRNA sense strand
agaaugagcuccaauguau

SEQ ID NO: 1765649 - RNA, 19 nt, Homo sapiens
  misc_RNA (1)...(19): siRNA sense strand
ggagauagcccaaggagaa

SEQ ID NO: 1765650 - RNA, 19 nt, Homo sapiens
  misc_RNA (1)...(19): siRNA sense strand
caaagaaaguugugcaaau

SEQ ID NO: 1765651 - RNA, 19 nt, Homo sapiens
  misc_RNA (1)...(19): siRNA sense strand
gagcuccaauguauuauuu

SEQ ID NO: 1765652 - RNA, 19 nt, Homo sapiens
  misc_RNA (1)...(19): siRNA sense strand
cagagaagcuuacagaugu

SEQ ID NO: 1765653 - RNA, 19 nt, Homo sapiens
  misc_RNA (1)...(19): siRNA sense strand
gcaggaacuucaggacuua

SEQ ID NO: 1765654 - RNA, 19 nt, Homo sapiens
  misc_RNA (1)...(19): siRNA sense strand
gagggccaauggacaauua

SEQ ID NO: 1765655 - RNA, 19 nt, Homo sapiens
  misc_RNA (1)...(19): siRNA sense strand
ggacaauuauggacaacaa

SEQ ID NO: 1765656 - RNA, 19 nt, Homo sapiens
  misc_RNA (1)...(19): siRNA sense strand
uaaagugucuugugaaucu

SEQ ID NO: 1765657 - RNA, 19 nt, Homo sapiens
  misc_RNA (1)...(19): siRNA sense strand
gaagaagacugggagacaa

SEQ ID NO: 1765658 - RNA, 19 nt, Homo sapiens
  misc_RNA (1)...(19): siRNA sense strand
gcagaaagccucaaacucu

SEQ ID NO: 1765659 - RNA, 19 nt, Homo sapiens
  misc_RNA (1)...(19): siRNA sense strand
gagauggucuggaggauuc

SEQ ID NO: 1765660 - RNA, 19 nt, Homo sapiens
  misc_RNA (1)...(19): siRNA sense strand
caauuuggauccuaaguug

SEQ ID NO: 1765661 - RNA, 19 nt, Homo sapiens
  misc_RNA (1)...(19): siRNA sense strand
ugaaugaugugcuagagaa

SEQ ID NO: 1765662 - RNA, 19 nt, Homo sapiens
  misc_RNA (1)...(19): siRNA sense strand
gagcgcgucuggaaccuuu

SEQ ID NO: 1765663 - RNA, 19 nt, Homo sapiens
  misc_RNA (1)...(19): siRNA sense strand
gagaaugagcuccaaugua

SEQ ID NO: 1765664 - RNA, 19 nt, Homo sapiens
  misc_RNA (1)...(19): siRNA sense strand
aaagaaaguugugcaaaug

SEQ ID NO: 1765665 - RNA, 19 nt, Homo sapiens
  misc_RNA (1)...(19): siRNA sense strand
ggacgaggauuugguguca

SEQ ID NO: 1765666 - RNA, 19 nt, Homo sapiens
  misc_RNA (1)...(19): siRNA sense strand
caacaagagucuaaauggu

SEQ ID NO: 1765667 - RNA, 19 nt, Homo sapiens
  misc_RNA (1)...(19): siRNA sense strand
gaaggacuuugaagcaauc

SEQ ID NO: 1765668 - RNA, 19 nt, Homo sapiens
  misc_RNA (1)...(19): siRNA sense strand
gcucuaagggcauuugaaa

SEQ ID NO: 1765669 - RNA, 19 nt, Homo sapiens
  misc_RNA (1)...(19): siRNA sense strand
ggaaauucaguuuggauga

SEQ ID NO: 1765670 - RNA, 19 nt, Homo sapiens
  misc_RNA (1)...(19): siRNA sense strand
aaugagcuccaauguauua

SEQ ID NO: 1765671 - RNA, 19 nt, Homo sapiens
  misc_RNA (1)...(19): siRNA sense strand
gaagcuuacagauguuuaa

SEQ ID NO: 1765672 - RNA, 19 nt, Homo sapiens
  misc_RNA (1)...(19): siRNA sense strand
cagaaagccucaaacucuu

SEQ ID NO: 1765673 - RNA, 19 nt, Homo sapiens
  misc_RNA (1)...(19): siRNA sense strand
guacacccucugacaauuu

SEQ ID NO: 1765674 - RNA, 19 nt, Homo sapiens
  misc_RNA (1)...(19): siRNA sense strand
ggacuuugaagcaaucauu

SEQ ID NO: 1765675 - RNA, 19 nt, Homo sapiens
  misc_RNA (1)...(19): siRNA sense strand
gcagcaagaaggacuuuga

SEQ ID NO: 1765676 - RNA, 19 nt, Homo sapiens
  misc_RNA (1)...(19): siRNA sense strand
caaagagauuguucugaag

SEQ ID NO: 1765677 - RNA, 19 nt, Homo sapiens
  misc_RNA (1)...(19): siRNA sense strand
ggacaacaagagucuaaau

SEQ ID NO: 1765678 - RNA, 19 nt, Homo sapiens
  misc_RNA (1)...(19): siRNA sense strand
caagaaggacuuugaagca

SEQ ID NO: 1765679 - RNA, 19 nt, Homo sapiens
  misc_RNA (1)...(19): siRNA sense strand
gaaugcggaguaugaauau

SEQ ID NO: 1765680 - RNA, 19 nt, Homo sapiens
  misc_RNA (1)...(19): siRNA sense strand
gcuccaauguauuauuugu

SEQ ID NO: 1765681 - RNA, 19 nt, Homo sapiens
  misc_RNA (1)...(19): siRNA sense strand
ccaaagaaugaccaaauga

SEQ ID NO: 1765682 - RNA, 19 nt, Homo sapiens
  misc_RNA (1)...(19): siRNA sense strand
agaaugcggaguaugaaua

SEQ ID NO: 1765683 - RNA, 19 nt, Homo sapiens
  misc_RNA (1)...(19): siRNA sense strand
ggaguaugaauaugaaguu

SEQ ID NO: 1765684 - RNA, 19 nt, Homo sapiens
  misc_RNA (1)...(19): siRNA sense strand
gcaaauggagcaggaacuu

SEQ ID NO: 1765685 - RNA, 19 nt, Homo sapiens
  misc_RNA (1)...(19): siRNA sense strand
guucuuagccacaugaaug

SEQ ID NO: 1765686 - RNA, 19 nt, Homo sapiens
  misc_RNA (1)...(19): siRNA sense strand
uuaagggucuauuccauuc

SEQ ID NO: 1765687 - RNA, 19 nt, Homo sapiens
  misc_RNA (1)...(19): siRNA sense strand
gaaguucuuagccacauga

SEQ ID NO: 1765688 - RNA, 19 nt, Homo sapiens
  misc_RNA (1)...(19): siRNA sense strand
cccaaagaaugaccaaaug

SEQ ID NO: 1765689 - RNA, 19 nt, Homo sapiens
  misc_RNA (1)...(19): siRNA sense strand
caauauauccuugucuuuc

SEQ ID NO: 1765690 - RNA, 19 nt, Homo sapiens
  misc_RNA (1)...(19): siRNA sense strand
ucuaagggcauuugaaaga

SEQ ID NO: 1765691 - RNA, 19 nt, Homo sapiens
  misc_RNA (1)...(19): siRNA sense strand
gagcuaaaucgcagcaaga

SEQ ID NO: 1765692 - RNA, 19 nt, Homo sapiens
  misc_RNA (1)...(19): siRNA sense strand
aacagcaucuucaggguuu

SEQ ID NO: 1765693 - RNA, 19 nt, Homo sapiens
  misc_RNA (1)...(19): siRNA sense strand
caaagaaugaccaaaugau

SEQ ID NO: 1765694 - RNA, 19 nt, Homo sapiens
  misc_RNA (1)...(19): siRNA sense strand
gacaacaagagucuaaaug

SEQ ID NO: 1765695 - RNA, 19 nt, Homo sapiens
  misc_RNA (1)...(19): siRNA sense strand
ucagagaagcuuacagaug

SEQ ID NO: 1765696 - RNA, 19 nt, Homo sapiens
  misc_RNA (1)...(19): siRNA sense strand
uaaguugacugcccuugag

SEQ ID NO: 1765697 - RNA, 19 nt, Homo sapiens
  misc_RNA (1)...(19): siRNA sense strand
uaaaugguguuuggcugaa

SEQ ID NO: 1765698 - RNA, 19 nt, Homo sapiens
  misc_RNA (1)...(19): siRNA sense strand
gaggauuuggugucacaua

SEQ ID NO: 1765699 - RNA, 19 nt, Homo sapiens
  misc_RNA (1)...(19): siRNA sense strand
uaaggagaaugcggaguau

SEQ ID NO: 1765700 - RNA, 19 nt, Homo sapiens
  misc_RNA (1)...(19): siRNA sense strand
gaagaugcaagcacagaag

SEQ ID NO: 1765701 - RNA, 19 nt, Homo sapiens
  misc_RNA (1)...(19): siRNA sense strand
ccacaggggcucccauuua

SEQ ID NO: 1765702 - RNA, 19 nt, Homo sapiens
  misc_RNA (1)...(19): siRNA sense strand
gaagacugggagacaauau

SEQ ID NO: 1765703 - RNA, 19 nt, Homo sapiens
  misc_RNA (1)...(19): siRNA sense strand
gaauaugaaguuacugaag

SEQ ID NO: 1765704 - RNA, 19 nt, Homo sapiens
  misc_RNA (1)...(19): siRNA sense strand
agaaggacuuugaagcaau

SEQ ID NO: 1765705 - RNA, 19 nt, Homo sapiens
  misc_RNA (1)...(19): siRNA sense strand
ggagacuacauccaacuug

SEQ ID NO: 1765706 - RNA, 19 nt, Homo sapiens
  misc_RNA (1)...(19): siRNA sense strand
guucagaauacuucauuga

SEQ ID NO: 1765707 - RNA, 19 nt, Homo sapiens
  misc_RNA (1)...(19): siRNA sense strand
ccaaggaagagaaggagaa

SEQ ID NO: 1765708 - RNA, 19 nt, Homo sapiens
  misc_RNA (1)...(19): siRNA sense strand
agaaaguugugcaaaugga

SEQ ID NO: 1765709 - RNA, 19 nt, Homo sapiens
  misc_RNA (1)...(19): siRNA sense strand
gagcagaaagccucaaacu

SEQ ID NO: 1765710 - RNA, 19 nt, Homo sapiens
  misc_RNA (1)...(19): siRNA sense strand
ggagaaugcggaguaugaa

SEQ ID NO: 1765711 - RNA, 19 nt, Homo sapiens
  misc_RNA (1)...(19): siRNA sense strand
gaaugagcuccaauguauu

SEQ ID NO: 1765712 - RNA, 19 nt, Homo sapiens
  misc_RNA (1)...(19): siRNA sense strand
gcacagaaggaagaaguuc

SEQ ID NO: 1765713 - RNA, 19 nt, Homo sapiens
  misc_RNA (1)...(19): siRNA sense strand
aagaaggacuuugaagcaa

SEQ ID NO: 1765714 - RNA, 19 nt, Homo sapiens
  misc_RNA (1)...(19): siRNA sense strand
acaugaagccguuaugaau

SEQ ID NO: 1765715 - RNA, 19 nt, Homo sapiens
  misc_RNA (1)...(19): siRNA sense strand
aaacaugaagccguuauga

SEQ ID NO: 1765716 - RNA, 19 nt, Homo sapiens
  misc_RNA (1)...(19): siRNA sense strand
gagugccucuggaaaauaa

SEQ ID NO: 1765717 - RNA, 19 nt, Homo sapiens
  misc_RNA (1)...(19): siRNA sense strand
gagaagaugcaagcacaga

SEQ ID NO: 1765718 - RNA, 19 nt, Homo sapiens
  misc_RNA (1)...(19): siRNA sense strand
ccaagaacaaagaauuaga

SEQ ID NO: 1765719 - RNA, 19 nt, Homo sapiens
  misc_RNA (1)...(19): siRNA sense strand
aaaaggaccugaagcaaca

SEQ ID NO: 1765720 - RNA, 19 nt, Homo sapiens
  misc_RNA (1)...(19): siRNA sense strand
gagaagcuuacagauguuu

SEQ ID NO: 1765721 - RNA, 19 nt, Homo sapiens
  misc_RNA (1)...(19): siRNA sense strand
gaaagccucaaacucuuca

SEQ ID NO: 1765722 - RNA, 19 nt, Homo sapiens
  misc_RNA (1)...(19): siRNA sense strand
gacuguaggacgaggauuu

SEQ ID NO: 1765723 - RNA, 19 nt, Homo sapiens
  misc_RNA (1)...(19): siRNA sense strand
ugaaguuacugaagaagac

SEQ ID NO: 1765724 - RNA, 19 nt, Homo sapiens
  misc_RNA (1)...(19): siRNA sense strand
auaaggagaaugcggagua

SEQ ID NO: 1765725 - RNA, 19 nt, Homo sapiens
  misc_RNA (1)...(19): siRNA sense strand
aaauacagaugcaggaaaa

SEQ ID NO: 1765726 - RNA, 19 nt, Homo sapiens
  misc_RNA (1)...(19): siRNA sense strand
ugaagaccgugcucuaagg

SEQ ID NO: 1765727 - RNA, 19 nt, Homo sapiens
  misc_RNA (1)...(19): siRNA sense strand
gagucuaaaugguguuugg

SEQ ID NO: 1765728 - RNA, 19 nt, Homo sapiens
  misc_RNA (1)...(19): siRNA sense strand
gagcagaccaaggaagaga

SEQ ID NO: 1765729 - RNA, 19 nt, Homo sapiens
  misc_RNA (1)...(19): siRNA sense strand
gagauagcccaaggagaaa

SEQ ID NO: 1765730 - RNA, 19 nt, Homo sapiens
  misc_RNA (1)...(19): siRNA sense strand
gaguggagcaacuagagaa

SEQ ID NO: 1765731 - RNA, 19 nt, Homo sapiens
  misc_RNA (1)...(19): siRNA sense strand
ucaaagaaaguugugcaaa

SEQ ID NO: 1765732 - RNA, 19 nt, Homo sapiens
  misc_RNA (1)...(19): siRNA sense strand
agaaugaccaaaugauaga

SEQ ID NO: 1765733 - RNA, 19 nt, Homo sapiens
  misc_RNA (1)...(19): siRNA sense strand
aaagagauuguucugaaga

SEQ ID NO: 1765734 - RNA, 19 nt, Homo sapiens
  misc_RNA (1)...(19): siRNA sense strand
gguggcugcugcuggaaga

SEQ ID NO: 1765735 - RNA, 19 nt, Homo sapiens
  misc_RNA (1)...(19): siRNA sense strand
caagaacaaagaauuagag

SEQ ID NO: 1765736 - RNA, 19 nt, Homo sapiens
  misc_RNA (1)...(19): siRNA sense strand
ucagggagacuacauccaa

SEQ ID NO: 1765737 - RNA, 19 nt, Homo sapiens
  misc_RNA (1)...(19): siRNA sense strand
gaacuucaggacuuacagu

SEQ ID NO: 1765738 - RNA, 19 nt, Homo sapiens
  misc_RNA (1)...(19): siRNA sense strand
caguuuggaugaauuagca

SEQ ID NO: 1765739 - RNA, 19 nt, Homo sapiens
  misc_RNA (1)...(19): siRNA sense strand
aaaggaaauucaguuugga

SEQ ID NO: 1765740 - RNA, 19 nt, Homo sapiens
  misc_RNA (1)...(19): siRNA sense strand
gcuagagaaugagcuccaa

SEQ ID NO: 1765741 - RNA, 19 nt, Homo sapiens
  misc_RNA (1)...(19): siRNA sense strand
agccaagaacaaagaauua

SEQ ID NO: 1765742 - RNA, 19 nt, Homo sapiens
  misc_RNA (1)...(19): siRNA sense strand
caugaagccguuaugaaug

SEQ ID NO: 1765743 - RNA, 19 nt, Homo sapiens
  misc_RNA (1)...(19): siRNA sense strand
gcugaaggccccucaaauu

SEQ ID NO: 1765744 - RNA, 19 nt, Homo sapiens
  misc_RNA (1)...(19): siRNA sense strand
cugacaauuuggauccuaa

SEQ ID NO: 1765745 - RNA, 19 nt, Homo sapiens
  misc_RNA (1)...(19): siRNA sense strand
augaugugcuagagaauga

SEQ ID NO: 1765746 - RNA, 19 nt, Homo sapiens
  misc_RNA (1)...(19): siRNA sense strand
gaugcaagcacagaaggaa

SEQ ID NO: 1765747 - RNA, 19 nt, Homo sapiens
  misc_RNA (1)...(19): siRNA sense strand
ucacugaccugagcgagaa

SEQ ID NO: 1765748 - RNA, 19 nt, Homo sapiens
  misc_RNA (1)...(19): siRNA sense strand
gcaaggaccaaaugucaau

SEQ ID NO: 1765749 - RNA, 19 nt, Homo sapiens
  misc_RNA (1)...(19): siRNA sense strand
gaggaacaaccaacuaguu

SEQ ID NO: 1765750 - RNA, 19 nt, Homo sapiens
  misc_RNA (1)...(19): siRNA sense strand
gacaagcgcuucgccuuca

SEQ ID NO: 1765751 - RNA, 19 nt, Homo sapiens
  misc_RNA (1)...(19): siRNA sense strand
gaugcaagccuucagaauc

SEQ ID NO: 1765752 - RNA, 19 nt, Homo sapiens
  misc_RNA (1)...(19): siRNA sense strand
gaacagaaagcaggacaag

SEQ ID NO: 1765753 - RNA, 19 nt, Homo sapiens
  misc_RNA (1)...(19): siRNA sense strand
gaccugagcgagaacagaa

SEQ ID NO: 1765754 - RNA, 19 nt, Homo sapiens
  misc_RNA (1)...(19): siRNA sense strand
caagaugcaagccuucaga

SEQ ID NO: 1765755 - RNA, 19 nt, Homo sapiens
  misc_RNA (1)...(19): siRNA sense strand
uagaugugguacccauuga

SEQ ID NO: 1765756 - RNA, 19 nt, Homo sapiens
  misc_RNA (1)...(19): siRNA sense strand
gggagaaaauccagcaaga

SEQ ID NO: 1765757 - RNA, 19 nt, Homo sapiens
  misc_RNA (1)...(19): siRNA sense strand
ggaggcaguuaacaucacu

SEQ ID NO: 1765758 - RNA, 19 nt, Homo sapiens
  misc_RNA (1)...(19): siRNA sense strand
gagaaaauccagcaagaug

SEQ ID NO: 1765759 - RNA, 19 nt, Homo sapiens
  misc_RNA (1)...(19): siRNA sense strand
ugucaagucuggugaugag

SEQ ID NO: 1765760 - RNA, 19 nt, Homo sapiens
  misc_RNA (1)...(19): siRNA sense strand
augcaagccuucagaaucu

SEQ ID NO: 1765761 - RNA, 19 nt, Homo sapiens
  misc_RNA (1)...(19): siRNA sense strand
agaugugccuguccugugu

SEQ ID NO: 1765762 - RNA, 19 nt, Homo sapiens
  misc_RNA (1)...(19): siRNA sense strand
gcuggaggcaguuaacauc

SEQ ID NO: 1765763 - RNA, 19 nt, Homo sapiens
  misc_RNA (1)...(19): siRNA sense strand
ggucaccaaauucuacuuc

SEQ ID NO: 1765764 - RNA, 19 nt, Homo sapiens
  misc_RNA (1)...(19): siRNA sense strand
gauagaugugguacccauu

SEQ ID NO: 1765765 - RNA, 19 nt, Homo sapiens
  misc_RNA (1)...(19): siRNA sense strand
ucaccaaauucuacuucca

SEQ ID NO: 1765766 - RNA, 19 nt, Homo sapiens
  misc_RNA (1)...(19): siRNA sense strand
gaaucugggauguuaacca

SEQ ID NO: 1765767 - RNA, 19 nt, Homo sapiens
  misc_RNA (1)...(19): siRNA sense strand
uugcaaggaccaaauguca

SEQ ID NO: 1765768 - RNA, 19 nt, Homo sapiens
  misc_RNA (1)...(19): siRNA sense strand
ccuucuaucugaggaacaa

SEQ ID NO: 1765769 - RNA, 19 nt, Homo sapiens
  misc_RNA (1)...(19): siRNA sense strand
ucacugaccugagcgagaa

SEQ ID NO: 1765770 - RNA, 19 nt, Homo sapiens
  misc_RNA (1)...(19): siRNA sense strand
gcaaggaccaaaugucaau

SEQ ID NO: 1765771 - RNA, 19 nt, Homo sapiens
  misc_RNA (1)...(19): siRNA sense strand
gaggaacaaccaacuaguu

SEQ ID NO: 1765772 - RNA, 19 nt, Homo sapiens
  misc_RNA (1)...(19): siRNA sense strand
gacaagcgcuucgccuuca

SEQ ID NO: 1765773 - RNA, 19 nt, Homo sapiens
  misc_RNA (1)...(19): siRNA sense strand
gaugcaagccuucagaauc

SEQ ID NO: 1765774 - RNA, 19 nt, Homo sapiens
  misc_RNA (1)...(19): siRNA sense strand
gaacagaaagcaggacaag

SEQ ID NO: 1765775 - RNA, 19 nt, Homo sapiens
  misc_RNA (1)...(19): siRNA sense strand
gaccugagcgagaacagaa

SEQ ID NO: 1765776 - RNA, 19 nt, Homo sapiens
  misc_RNA (1)...(19): siRNA sense strand
caagaugcaagccuucaga

SEQ ID NO: 1765777 - RNA, 19 nt, Homo sapiens
  misc_RNA (1)...(19): siRNA sense strand
uagaugugguacccauuga

SEQ ID NO: 1765778 - RNA, 19 nt, Homo sapiens
  misc_RNA (1)...(19): siRNA sense strand
gggagaaaauccagcaaga

SEQ ID NO: 1765779 - RNA, 19 nt, Homo sapiens
  misc_RNA (1)...(19): siRNA sense strand
ggaggcaguuaacaucacu

SEQ ID NO: 1765780 - RNA, 19 nt, Homo sapiens
  misc_RNA (1)...(19): siRNA sense strand
gagaaaauccagcaagaug

SEQ ID NO: 1765781 - RNA, 19 nt, Homo sapiens
  misc_RNA (1)...(19): siRNA sense strand
ugucaagucuggugaugag

SEQ ID NO: 1765782 - RNA, 19 nt, Homo sapiens
  misc_RNA (1)...(19): siRNA sense strand
augcaagccuucagaaucu

SEQ ID NO: 1765783 - RNA, 19 nt, Homo sapiens
  misc_RNA (1)...(19): siRNA sense strand
agaugugccuguccugugu

SEQ ID NO: 1765784 - RNA, 19 nt, Homo sapiens
  misc_RNA (1)...(19): siRNA sense strand
gcuggaggcaguuaacauc

SEQ ID NO: 1765785 - RNA, 19 nt, Homo sapiens
  misc_RNA (1)...(19): siRNA sense strand
ggucaccaaauucuacuuc

SEQ ID NO: 1765786 - RNA, 19 nt, Homo sapiens
  misc_RNA (1)...(19): siRNA sense strand
gauagaugugguacccauu

SEQ ID NO: 1765787 - RNA, 19 nt, Homo sapiens
  misc_RNA (1)...(19): siRNA sense strand
ucaccaaauucuacuucca

SEQ ID NO: 1765788 - RNA, 19 nt, Homo sapiens
  misc_RNA (1)...(19): siRNA sense strand
gaaucugggauguuaacca

SEQ ID NO: 1765789 - RNA, 19 nt, Homo sapiens
  misc_RNA (1)...(19): siRNA sense strand
uugcaaggaccaaauguca

SEQ ID NO: 1765790 - RNA, 19 nt, Homo sapiens
  misc_RNA (1)...(19): siRNA sense strand
ccuucuaucugaggaacaa

SEQ ID NO: 1765791 - RNA, 19 nt, Homo sapiens
  misc_RNA (1)...(19): siRNA sense strand
ucacugaccugagcgagaa

SEQ ID NO: 1765792 - RNA, 19 nt, Homo sapiens
  misc_RNA (1)...(19): siRNA sense strand
gcaaggaccaaaugucaau

SEQ ID NO: 1765793 - RNA, 19 nt, Homo sapiens
  misc_RNA (1)...(19): siRNA sense strand
gaggaacaaccaacuaguu

SEQ ID NO: 1765794 - RNA, 19 nt, Homo sapiens
  misc_RNA (1)...(19): siRNA sense strand
gacaagcgcuucgccuuca

SEQ ID NO: 1765795 - RNA, 19 nt, Homo sapiens
  misc_RNA (1)...(19): siRNA sense strand
gaugcaagccuucagaauc

SEQ ID NO: 1765796 - RNA, 19 nt, Homo sapiens
  misc_RNA (1)...(19): siRNA sense strand
gaacagaaagcaggacaag

SEQ ID NO: 1765797 - RNA, 19 nt, Homo sapiens
  misc_RNA (1)...(19): siRNA sense strand
gaccugagcgagaacagaa

SEQ ID NO: 1765798 - RNA, 19 nt, Homo sapiens
  misc_RNA (1)...(19): siRNA sense strand
caagaugcaagccuucaga

SEQ ID NO: 1765799 - RNA, 19 nt, Homo sapiens
  misc_RNA (1)...(19): siRNA sense strand
uagaugugguacccauuga

SEQ ID NO: 1765800 - RNA, 19 nt, Homo sapiens
  misc_RNA (1)...(19): siRNA sense strand
gggagaaaauccagcaaga

SEQ ID NO: 1765801 - RNA, 19 nt, Homo sapiens
  misc_RNA (1)...(19): siRNA sense strand
ggaggcaguuaacaucacu

SEQ ID NO: 1765802 - RNA, 19 nt, Homo sapiens
  misc_RNA (1)...(19): siRNA sense strand
gagaaaauccagcaagaug

SEQ ID NO: 1765803 - RNA, 19 nt, Homo sapiens
  misc_RNA (1)...(19): siRNA sense strand
ugucaagucuggugaugag

SEQ ID NO: 1765804 - RNA, 19 nt, Homo sapiens
  misc_RNA (1)...(19): siRNA sense strand
augcaagccuucagaaucu

SEQ ID NO: 1765805 - RNA, 19 nt, Homo sapiens
  misc_RNA (1)...(19): siRNA sense strand
agaugugccuguccugugu

SEQ ID NO: 1765806 - RNA, 19 nt, Homo sapiens
  misc_RNA (1)...(19): siRNA sense strand
gcuggaggcaguuaacauc

SEQ ID NO: 1765807 - RNA, 19 nt, Homo sapiens
  misc_RNA (1)...(19): siRNA sense strand
ggucaccaaauucuacuuc

SEQ ID NO: 1765808 - RNA, 19 nt, Homo sapiens
  misc_RNA (1)...(19): siRNA sense strand
gauagaugugguacccauu

SEQ ID NO: 1765809 - RNA, 19 nt, Homo sapiens
  misc_RNA (1)...(19): siRNA sense strand
ucaccaaauucuacuucca

SEQ ID NO: 1765810 - RNA, 19 nt, Homo sapiens
  misc_RNA (1)...(19): siRNA sense strand
gaaucugggauguuaacca

SEQ ID NO: 1765811 - RNA, 19 nt, Homo sapiens
  misc_RNA (1)...(19): siRNA sense strand
uugcaaggaccaaauguca

SEQ ID NO: 1765812 - RNA, 19 nt, Homo sapiens
  misc_RNA (1)...(19): siRNA sense strand
ccuucuaucugaggaacaa

SEQ ID NO: 1765813 - RNA, 19 nt, Homo sapiens
  misc_RNA (1)...(19): siRNA sense strand
ucacugaccugagcgagaa

SEQ ID NO: 1765814 - RNA, 19 nt, Homo sapiens
  misc_RNA (1)...(19): siRNA sense strand
gcaaggaccaaaugucaau

SEQ ID NO: 1765815 - RNA, 19 nt, Homo sapiens
  misc_RNA (1)...(19): siRNA sense strand
gaggaacaaccaacuaguu

SEQ ID NO: 1765816 - RNA, 19 nt, Homo sapiens
  misc_RNA (1)...(19): siRNA sense strand
gacaagcgcuucgccuuca

SEQ ID NO: 1765817 - RNA, 19 nt, Homo sapiens
  misc_RNA (1)...(19): siRNA sense strand
gaacagaaagcaggacaag

SEQ ID NO: 1765818 - RNA, 19 nt, Homo sapiens
  misc_RNA (1)...(19): siRNA sense strand
gaccugagcgagaacagaa

SEQ ID NO: 1765819 - RNA, 19 nt, Homo sapiens
  misc_RNA (1)...(19): siRNA sense strand
uagaugugguacccauuga

SEQ ID NO: 1765820 - RNA, 19 nt, Homo sapiens
  misc_RNA (1)...(19): siRNA sense strand
ggaggcaguuaacaucacu

SEQ ID NO: 1765821 - RNA, 19 nt, Homo sapiens
  misc_RNA (1)...(19): siRNA sense strand
ugucaagucuggugaugag

SEQ ID NO: 1765822 - RNA, 19 nt, Homo sapiens
  misc_RNA (1)...(19): siRNA sense strand
agaugugccuguccugugu

SEQ ID NO: 1765823 - RNA, 19 nt, Homo sapiens
  misc_RNA (1)...(19): siRNA sense strand
gcuggaggcaguuaacauc

SEQ ID NO: 1765824 - RNA, 19 nt, Homo sapiens
  misc_RNA (1)...(19): siRNA sense strand
ggucaccaaauucuacuuc

SEQ ID NO: 1765825 - RNA, 19 nt, Homo sapiens
  misc_RNA (1)...(19): siRNA sense strand
gauagaugugguacccauu

SEQ ID NO: 1765826 - RNA, 19 nt, Homo sapiens
  misc_RNA (1)...(19): siRNA sense strand
ucaccaaauucuacuucca

SEQ ID NO: 1765827 - RNA, 19 nt, Homo sapiens
  misc_RNA (1)...(19): siRNA sense strand
uugcaaggaccaaauguca

SEQ ID NO: 1765828 - RNA, 19 nt, Homo sapiens
  misc_RNA (1)...(19): siRNA sense strand
ccuucuaucugaggaacaa

SEQ ID NO: 1765829 - RNA, 19 nt, Homo sapiens
  misc_RNA (1)...(19): siRNA sense strand
gaaucugggauguuaacca

SEQ ID NO: 1765830 - RNA, 19 nt, Homo sapiens
  misc_RNA (1)...(19): siRNA sense strand
ucacugaccugagcgagaa

SEQ ID NO: 1765831 - RNA, 19 nt, Homo sapiens
  misc_RNA (1)...(19): siRNA sense strand
gcaaggaccaaaugucaau

SEQ ID NO: 1765832 - RNA, 19 nt, Homo sapiens
  misc_RNA (1)...(19): siRNA sense strand
gaggaacaaccaacuaguu

SEQ ID NO: 1765833 - RNA, 19 nt, Homo sapiens
  misc_RNA (1)...(19): siRNA sense strand
gacaagcgcuucgccuuca

SEQ ID NO: 1765834 - RNA, 19 nt, Homo sapiens
  misc_RNA (1)...(19): siRNA sense strand
gaugcaagccuucagaauc

SEQ ID NO: 1765835 - RNA, 19 nt, Homo sapiens
  misc_RNA (1)...(19): siRNA sense strand
gaacagaaagcaggacaag

SEQ ID NO: 1765836 - RNA, 19 nt, Homo sapiens
  misc_RNA (1)...(19): siRNA sense strand
gaccugagcgagaacagaa

SEQ ID NO: 1765837 - RNA, 19 nt, Homo sapiens
  misc_RNA (1)...(19): siRNA sense strand
caagaugcaagccuucaga

SEQ ID NO: 1765838 - RNA, 19 nt, Homo sapiens
  misc_RNA (1)...(19): siRNA sense strand
uagaugugguacccauuga

SEQ ID NO: 1765839 - RNA, 19 nt, Homo sapiens
  misc_RNA (1)...(19): siRNA sense strand
gggagaaaauccagcaaga

SEQ ID NO: 1765840 - RNA, 19 nt, Homo sapiens
  misc_RNA (1)...(19): siRNA sense strand
ggaggcaguuaacaucacu

SEQ ID NO: 1765841 - RNA, 19 nt, Homo sapiens
  misc_RNA (1)...(19): siRNA sense strand
gagaaaauccagcaagaug

SEQ ID NO: 1765842 - RNA, 19 nt, Homo sapiens
  misc_RNA (1)...(19): siRNA sense strand
ugucaagucuggugaugag

SEQ ID NO: 1765843 - RNA, 19 nt, Homo sapiens
  misc_RNA (1)...(19): siRNA sense strand
augcaagccuucagaaucu

SEQ ID NO: 1765844 - RNA, 19 nt, Homo sapiens
  misc_RNA (1)...(19): siRNA sense strand
agaugugccuguccugugu

SEQ ID NO: 1765845 - RNA, 19 nt, Homo sapiens
  misc_RNA (1)...(19): siRNA sense strand
gcuggaggcaguuaacauc

SEQ ID NO: 1765846 - RNA, 19 nt, Homo sapiens
  misc_RNA (1)...(19): siRNA sense strand
ggucaccaaauucuacuuc

SEQ ID NO: 1765847 - RNA, 19 nt, Homo sapiens
  misc_RNA (1)...(19): siRNA sense strand
gauagaugugguacccauu

SEQ ID NO: 1765848 - RNA, 19 nt, Homo sapiens
  misc_RNA (1)...(19): siRNA sense strand
ucaccaaauucuacuucca

SEQ ID NO: 1765849 - RNA, 19 nt, Homo sapiens
  misc_RNA (1)...(19): siRNA sense strand
gaaucugggauguuaacca

SEQ ID NO: 1765850 - RNA, 19 nt, Homo sapiens
  misc_RNA (1)...(19): siRNA sense strand
uugcaaggaccaaauguca

SEQ ID NO: 1765851 - RNA, 19 nt, Homo sapiens
  misc_RNA (1)...(19): siRNA sense strand
ccuucuaucugaggaacaa

SEQ ID NO: 1765852 - RNA, 19 nt, Homo sapiens
  misc_RNA (1)...(19): siRNA sense strand
ucacugaccugagcgagaa

SEQ ID NO: 1765853 - RNA, 19 nt, Homo sapiens
  misc_RNA (1)...(19): siRNA sense strand
gcaaggaccaaaugucaau

SEQ ID NO: 1765854 - RNA, 19 nt, Homo sapiens
  misc_RNA (1)...(19): siRNA sense strand
gaggaacaaccaacuaguu

SEQ ID NO: 1765855 - RNA, 19 nt, Homo sapiens
  misc_RNA (1)...(19): siRNA sense strand
gacaagcgcuucgccuuca

SEQ ID NO: 1765856 - RNA, 19 nt, Homo sapiens
  misc_RNA (1)...(19): siRNA sense strand
gaugcaagccuucagaauc

SEQ ID NO: 1765857 - RNA, 19 nt, Homo sapiens
  misc_RNA (1)...(19): siRNA sense strand
gaacagaaagcaggacaag

SEQ ID NO: 1765858 - RNA, 19 nt, Homo sapiens
  misc_RNA (1)...(19): siRNA sense strand
gaccugagcgagaacagaa

SEQ ID NO: 1765859 - RNA, 19 nt, Homo sapiens
  misc_RNA (1)...(19): siRNA sense strand
caagaugcaagccuucaga

SEQ ID NO: 1765860 - RNA, 19 nt, Homo sapiens
  misc_RNA (1)...(19): siRNA sense strand
uagaugugguacccauuga

SEQ ID NO: 1765861 - RNA, 19 nt, Homo sapiens
  misc_RNA (1)...(19): siRNA sense strand
gggagaaaauccagcaaga

SEQ ID NO: 1765862 - RNA, 19 nt, Homo sapiens
  misc_RNA (1)...(19): siRNA sense strand
ggaggcaguuaacaucacu

SEQ ID NO: 1765863 - RNA, 19 nt, Homo sapiens
  misc_RNA (1)...(19): siRNA sense strand
gagaaaauccagcaagaug

SEQ ID NO: 1765864 - RNA, 19 nt, Homo sapiens
  misc_RNA (1)...(19): siRNA sense strand
ugucaagucuggugaugag

SEQ ID NO: 1765865 - RNA, 19 nt, Homo sapiens
  misc_RNA (1)...(19): siRNA sense strand
augcaagccuucagaaucu

SEQ ID NO: 1765866 - RNA, 19 nt, Homo sapiens
  misc_RNA (1)...(19): siRNA sense strand
agaugugccuguccugugu

SEQ ID NO: 1765867 - RNA, 19 nt, Homo sapiens
  misc_RNA (1)...(19): siRNA sense strand
gcuggaggcaguuaacauc

SEQ ID NO: 1765868 - RNA, 19 nt, Homo sapiens
  misc_RNA (1)...(19): siRNA sense strand
ggucaccaaauucuacuuc

SEQ ID NO: 1765869 - RNA, 19 nt, Homo sapiens
  misc_RNA (1)...(19): siRNA sense strand
gauagaugugguacccauu

SEQ ID NO: 1765870 - RNA, 19 nt, Homo sapiens
  misc_RNA (1)...(19): siRNA sense strand
ucaccaaauucuacuucca

SEQ ID NO: 1765871 - RNA, 19 nt, Homo sapiens
  misc_RNA (1)...(19): siRNA sense strand
gaaucugggauguuaacca

SEQ ID NO: 1765872 - RNA, 19 nt, Homo sapiens
  misc_RNA (1)...(19): siRNA sense strand
uugcaaggaccaaauguca

SEQ ID NO: 1765873 - RNA, 19 nt, Homo sapiens
  misc_RNA (1)...(19): siRNA sense strand
ccuucuaucugaggaacaa

SEQ ID NO: 1765874 - RNA, 19 nt, Homo sapiens
  misc_RNA (1)...(19): siRNA sense strand
ucacugaccugagcgagaa

SEQ ID NO: 1765875 - RNA, 19 nt, Homo sapiens
  misc_RNA (1)...(19): siRNA sense strand
gcaaggaccaaaugucaau

SEQ ID NO: 1765876 - RNA, 19 nt, Homo sapiens
  misc_RNA (1)...(19): siRNA sense strand
gaggaacaaccaacuaguu

SEQ ID NO: 1765877 - RNA, 19 nt, Homo sapiens
  misc_RNA (1)...(19): siRNA sense strand
gacaagcgcuucgccuuca

SEQ ID NO: 1765878 - RNA, 19 nt, Homo sapiens
  misc_RNA (1)...(19): siRNA sense strand
gaugcaagccuucagaauc

SEQ ID NO: 1765879 - RNA, 19 nt, Homo sapiens
  misc_RNA (1)...(19): siRNA sense strand
gaacagaaagcaggacaag

SEQ ID NO: 1765880 - RNA, 19 nt, Homo sapiens
  misc_RNA (1)...(19): siRNA sense strand
gaccugagcgagaacagaa

SEQ ID NO: 1765881 - RNA, 19 nt, Homo sapiens
  misc_RNA (1)...(19): siRNA sense strand
caagaugcaagccuucaga

SEQ ID NO: 1765882 - RNA, 19 nt, Homo sapiens
  misc_RNA (1)...(19): siRNA sense strand
uagaugugguacccauuga

SEQ ID NO: 1765883 - RNA, 19 nt, Homo sapiens
  misc_RNA (1)...(19): siRNA sense strand
gggagaaaauccagcaaga

SEQ ID NO: 1765884 - RNA, 19 nt, Homo sapiens
  misc_RNA (1)...(19): siRNA sense strand
ggaggcaguuaacaucacu

SEQ ID NO: 1765885 - RNA, 19 nt, Homo sapiens
  misc_RNA (1)...(19): siRNA sense strand
gagaaaauccagcaagaug

SEQ ID NO: 1765886 - RNA, 19 nt, Homo sapiens
  misc_RNA (1)...(19): siRNA sense strand
ugucaagucuggugaugag

SEQ ID NO: 1765887 - RNA, 19 nt, Homo sapiens
  misc_RNA (1)...(19): siRNA sense strand
augcaagccuucagaaucu

SEQ ID NO: 1765888 - RNA, 19 nt, Homo sapiens
  misc_RNA (1)...(19): siRNA sense strand
agaugugccuguccugugu

SEQ ID NO: 1765889 - RNA, 19 nt, Homo sapiens
  misc_RNA (1)...(19): siRNA sense strand
gcuggaggcaguuaacauc

SEQ ID NO: 1765890 - RNA, 19 nt, Homo sapiens
  misc_RNA (1)...(19): siRNA sense strand
ggucaccaaauucuacuuc

SEQ ID NO: 1765891 - RNA, 19 nt, Homo sapiens
  misc_RNA (1)...(19): siRNA sense strand
gauagaugugguacccauu

SEQ ID NO: 1765892 - RNA, 19 nt, Homo sapiens
  misc_RNA (1)...(19): siRNA sense strand
ucaccaaauucuacuucca

SEQ ID NO: 1765893 - RNA, 19 nt, Homo sapiens
  misc_RNA (1)...(19): siRNA sense strand
gaaucugggauguuaacca

SEQ ID NO: 1765894 - RNA, 19 nt, Homo sapiens
  misc_RNA (1)...(19): siRNA sense strand
uugcaaggaccaaauguca

SEQ ID NO: 1765895 - RNA, 19 nt, Homo sapiens
  misc_RNA (1)...(19): siRNA sense strand
ccuucuaucugaggaacaa

SEQ ID NO: 1765896 - RNA, 19 nt, Homo sapiens
  misc_RNA (1)...(19): siRNA sense strand
ucacugaccugagcgagaa

SEQ ID NO: 1765897 - RNA, 19 nt, Homo sapiens
  misc_RNA (1)...(19): siRNA sense strand
gcaaggaccaaaugucaau

SEQ ID NO: 1765898 - RNA, 19 nt, Homo sapiens
  misc_RNA (1)...(19): siRNA sense strand
gaggaacaaccaacuaguu

SEQ ID NO: 1765899 - RNA, 19 nt, Homo sapiens
  misc_RNA (1)...(19): siRNA sense strand
gacaagcgcuucgccuuca

SEQ ID NO: 1765900 - RNA, 19 nt, Homo sapiens
  misc_RNA (1)...(19): siRNA sense strand
gaacagaaagcaggacaag

SEQ ID NO: 1765901 - RNA, 19 nt, Homo sapiens
  misc_RNA (1)...(19): siRNA sense strand
gaccugagcgagaacagaa

SEQ ID NO: 1765902 - RNA, 19 nt, Homo sapiens
  misc_RNA (1)...(19): siRNA sense strand
uagaugugguacccauuga

SEQ ID NO: 1765903 - RNA, 19 nt, Homo sapiens
  misc_RNA (1)...(19): siRNA sense strand
ggaggcaguuaacaucacu

SEQ ID NO: 1765904 - RNA, 19 nt, Homo sapiens
  misc_RNA (1)...(19): siRNA sense strand
ugucaagucuggugaugag

SEQ ID NO: 1765905 - RNA, 19 nt, Homo sapiens
  misc_RNA (1)...(19): siRNA sense strand
agaugugccuguccugugu

SEQ ID NO: 1765906 - RNA, 19 nt, Homo sapiens
  misc_RNA (1)...(19): siRNA sense strand
gcuggaggcaguuaacauc

SEQ ID NO: 1765907 - RNA, 19 nt, Homo sapiens
  misc_RNA (1)...(19): siRNA sense strand
ggucaccaaauucuacuuc

SEQ ID NO: 1765908 - RNA, 19 nt, Homo sapiens
  misc_RNA (1)...(19): siRNA sense strand
gauagaugugguacccauu

SEQ ID NO: 1765909 - RNA, 19 nt, Homo sapiens
  misc_RNA (1)...(19): siRNA sense strand
ucaccaaauucuacuucca

SEQ ID NO: 1765910 - RNA, 19 nt, Homo sapiens
  misc_RNA (1)...(19): siRNA sense strand
uugcaaggaccaaauguca

SEQ ID NO: 1765911 - RNA, 19 nt, Homo sapiens
  misc_RNA (1)...(19): siRNA sense strand
ccuucuaucugaggaacaa

SEQ ID NO: 1765912 - RNA, 19 nt, Homo sapiens
  misc_RNA (1)...(19): siRNA sense strand
gaaucugggauguuaacca

SEQ ID NO: 1765913 - RNA, 19 nt, Homo sapiens
  misc_RNA (1)...(19): siRNA sense strand
ugucgucacuggcaaauuu

SEQ ID NO: 1765914 - RNA, 19 nt, Homo sapiens
  misc_RNA (1)...(19): siRNA sense strand
gcguuuggcuuggguauug

SEQ ID NO: 1765915 - RNA, 19 nt, Homo sapiens
  misc_RNA (1)...(19): siRNA sense strand
ggaccuggcugucaaugcu

SEQ ID NO: 1765916 - RNA, 19 nt, Homo sapiens
  misc_RNA (1)...(19): siRNA sense strand
caucaacccugccgugacu

SEQ ID NO: 1765917 - RNA, 19 nt, Homo sapiens
  misc_RNA (1)...(19): siRNA sense strand
uacaccggcugcucuauga

SEQ ID NO: 1765918 - RNA, 19 nt, Homo sapiens
  misc_RNA (1)...(19): siRNA sense strand
gcucccuccucuacaacua

SEQ ID NO: 1765919 - RNA, 19 nt, Homo sapiens
  misc_RNA (1)...(19): siRNA sense strand
ccacacuccucuucgucuu

SEQ ID NO: 1765920 - RNA, 19 nt, Homo sapiens
  misc_RNA (1)...(19): siRNA sense strand
cuacaacuacgugcuguuu

SEQ ID NO: 1765921 - RNA, 19 nt, Homo sapiens
  misc_RNA (1)...(19): siRNA sense strand
gggcuguguucgcagaguu

SEQ ID NO: 1765922 - RNA, 19 nt, Homo sapiens
  misc_RNA (1)...(19): siRNA sense strand
gaucacgccagcagacauc

SEQ ID NO: 1765923 - RNA, 19 nt, Homo sapiens
  misc_RNA (1)...(19): siRNA sense strand
ucacuggcaaauuugauga

SEQ ID NO: 1765924 - RNA, 19 nt, Homo sapiens
  misc_RNA (1)...(19): siRNA sense strand
ccgcucugcuccaugagau

SEQ ID NO: 1765925 - RNA, 19 nt, Homo sapiens
  misc_RNA (1)...(19): siRNA sense strand
cagaguuccuggccacacu

SEQ ID NO: 1765926 - RNA, 19 nt, Homo sapiens
  misc_RNA (1)...(19): siRNA sense strand
gaaacacacucuugagaaa

SEQ ID NO: 1765927 - RNA, 19 nt, Homo sapiens
  misc_RNA (1)...(19): siRNA sense strand
gaaauugccugguuacaug

SEQ ID NO: 1765928 - RNA, 19 nt, Homo sapiens
  misc_RNA (1)...(19): siRNA sense strand
gaacgaaacgcacaccuua

SEQ ID NO: 1765929 - RNA, 19 nt, Homo sapiens
  misc_RNA (1)...(19): siRNA sense strand
caagagaaguuuaaucuga

SEQ ID NO: 1765930 - RNA, 19 nt, Homo sapiens
  misc_RNA (1)...(19): siRNA sense strand
ggacauauguugccucaga

SEQ ID NO: 1765931 - RNA, 19 nt, Homo sapiens
  misc_RNA (1)...(19): siRNA sense strand
gaaaauggcuacugaaauu

SEQ ID NO: 1765932 - RNA, 19 nt, Homo sapiens
  misc_RNA (1)...(19): siRNA sense strand
gaaacagaguguaauagaa

SEQ ID NO: 1765933 - RNA, 19 nt, Homo sapiens
  misc_RNA (1)...(19): siRNA sense strand
ggaagucacugaaacauuc

SEQ ID NO: 1765934 - RNA, 19 nt, Homo sapiens
  misc_RNA (1)...(19): siRNA sense strand
gcaagaaguuugugaagau

SEQ ID NO: 1765935 - RNA, 19 nt, Homo sapiens
  misc_RNA (1)...(19): siRNA sense strand
uuaaauagcugugucgaua

SEQ ID NO: 1765936 - RNA, 19 nt, Homo sapiens
  misc_RNA (1)...(19): siRNA sense strand
ggaagaagcuggucuccau

SEQ ID NO: 1765937 - RNA, 19 nt, Homo sapiens
  misc_RNA (1)...(19): siRNA sense strand
uaagugaccuggaagauga

SEQ ID NO: 1765938 - RNA, 19 nt, Homo sapiens
  misc_RNA (1)...(19): siRNA sense strand
gcagagagcucaugaacag

SEQ ID NO: 1765939 - RNA, 19 nt, Homo sapiens
  misc_RNA (1)...(19): siRNA sense strand
uagaagaaccucucaaaua

SEQ ID NO: 1765940 - RNA, 19 nt, Homo sapiens
  misc_RNA (1)...(19): siRNA sense strand
ccgagaagcucaagucuuu

SEQ ID NO: 1765941 - RNA, 19 nt, Homo sapiens
  misc_RNA (1)...(19): siRNA sense strand
gaagagagacugacacaga

SEQ ID NO: 1765942 - RNA, 19 nt, Homo sapiens
  misc_RNA (1)...(19): siRNA sense strand
gaagaacacuuucaagaac

SEQ ID NO: 1765943 - RNA, 19 nt, Homo sapiens
  misc_RNA (1)...(19): siRNA sense strand
gaugaaaucugaccuacga

SEQ ID NO: 1765944 - RNA, 19 nt, Homo sapiens
  misc_RNA (1)...(19): siRNA sense strand
ggaagaauaucgugcacaa

SEQ ID NO: 1765945 - RNA, 19 nt, Homo sapiens
  misc_RNA (1)...(19): siRNA sense strand
gaacccagaugacuugaau

SEQ ID NO: 1765946 - RNA, 19 nt, Homo sapiens
  misc_RNA (1)...(19): siRNA sense strand
gagagagugugaucaguuu

SEQ ID NO: 1765947 - RNA, 19 nt, Homo sapiens
  misc_RNA (1)...(19): siRNA sense strand
ugaaacagcugcacagaug

SEQ ID NO: 1765948 - RNA, 19 nt, Homo sapiens
  misc_RNA (1)...(19): siRNA sense strand
gacuggagcucgaagauaa

SEQ ID NO: 1765949 - RNA, 19 nt, Homo sapiens
  misc_RNA (1)...(19): siRNA sense strand
agucugagcuggaagaaua

SEQ ID NO: 1765950 - RNA, 19 nt, Homo sapiens
  misc_RNA (1)...(19): siRNA sense strand
cagaagaaguugaggcuaa

SEQ ID NO: 1765951 - RNA, 19 nt, Homo sapiens
  misc_RNA (1)...(19): siRNA sense strand
gaaccagacugcucacuag

SEQ ID NO: 1765952 - RNA, 19 nt, Homo sapiens
  misc_RNA (1)...(19): siRNA sense strand
gaacuuaaucaacgucuaa

SEQ ID NO: 1765953 - RNA, 19 nt, Homo sapiens
  misc_RNA (1)...(19): siRNA sense strand
agaagaaccucucaaauag

SEQ ID NO: 1765954 - RNA, 19 nt, Homo sapiens
  misc_RNA (1)...(19): siRNA sense strand
ggagcucucugaaguuaaa

SEQ ID NO: 1765955 - RNA, 19 nt, Homo sapiens
  misc_RNA (1)...(19): siRNA sense strand
ugacacagaugagaaauga

SEQ ID NO: 1765956 - RNA, 19 nt, Homo sapiens
  misc_RNA (1)...(19): siRNA sense strand
gaaacuggaugaagaguac

SEQ ID NO: 1765957 - RNA, 19 nt, Homo sapiens
  misc_RNA (1)...(19): siRNA sense strand
gcggagcucucugaaguua

SEQ ID NO: 1765958 - RNA, 19 nt, Homo sapiens
  misc_RNA (1)...(19): siRNA sense strand
gaaauauacuccagcucaa

SEQ ID NO: 1765959 - RNA, 19 nt, Homo sapiens
  misc_RNA (1)...(19): siRNA sense strand
uagaugaacuccagucuga

SEQ ID NO: 1765960 - RNA, 19 nt, Homo sapiens
  misc_RNA (1)...(19): siRNA sense strand
gaauguggauggagagaug

SEQ ID NO: 1765961 - RNA, 19 nt, Homo sapiens
  misc_RNA (1)...(19): siRNA sense strand
gcacagaaaucuccagacu

SEQ ID NO: 1765962 - RNA, 19 nt, Homo sapiens
  misc_RNA (1)...(19): siRNA sense strand
gaacucaccgucagaagaa

SEQ ID NO: 1765963 - RNA, 19 nt, Homo sapiens
  misc_RNA (1)...(19): siRNA sense strand
guucuaagcuacaacgaaa

SEQ ID NO: 1765964 - RNA, 19 nt, Homo sapiens
  misc_RNA (1)...(19): siRNA sense strand
gggagcagcuguuggaaga

SEQ ID NO: 1765965 - RNA, 19 nt, Homo sapiens
  misc_RNA (1)...(19): siRNA sense strand
gaagagaccaggacugaau

SEQ ID NO: 1765966 - RNA, 19 nt, Homo sapiens
  misc_RNA (1)...(19): siRNA sense strand
aggcagagcuggucauuga

SEQ ID NO: 1765967 - RNA, 19 nt, Homo sapiens
  misc_RNA (1)...(19): siRNA sense strand
ggaaaagguucagaauuua

SEQ ID NO: 1765968 - RNA, 19 nt, Homo sapiens
  misc_RNA (1)...(19): siRNA sense strand
acagaaaucuccagacuuc

SEQ ID NO: 1765969 - RNA, 19 nt, Homo sapiens
  misc_RNA (1)...(19): siRNA sense strand
gacagcagaucgagaaaga

SEQ ID NO: 1765970 - RNA, 19 nt, Homo sapiens
  misc_RNA (1)...(19): siRNA sense strand
ucaaauagaagcccaguuu

SEQ ID NO: 1765971 - RNA, 19 nt, Homo sapiens
  misc_RNA (1)...(19): siRNA sense strand
ggaaacagaguguaauaga

SEQ ID NO: 1765972 - RNA, 19 nt, Homo sapiens
  misc_RNA (1)...(19): siRNA sense strand
ucaggaaacuggaugaaga

SEQ ID NO: 1765973 - RNA, 19 nt, Homo sapiens
  misc_RNA (1)...(19): siRNA sense strand
ugacaagccugguggagaa

SEQ ID NO: 1765974 - RNA, 19 nt, Homo sapiens
  misc_RNA (1)...(19): siRNA sense strand
gcaaaggcaugagaacgaa

SEQ ID NO: 1765975 - RNA, 19 nt, Homo sapiens
  misc_RNA (1)...(19): siRNA sense strand
gaagauaaagugcgccauu

SEQ ID NO: 1765976 - RNA, 19 nt, Homo sapiens
  misc_RNA (1)...(19): siRNA sense strand
ccaaauauaagcuguugua

SEQ ID NO: 1765977 - RNA, 19 nt, Homo sapiens
  misc_RNA (1)...(19): siRNA sense strand
gacuagaaauggaacauga

SEQ ID NO: 1765978 - RNA, 19 nt, Homo sapiens
  misc_RNA (1)...(19): siRNA sense strand
gcaaaugucccggaugaaa

SEQ ID NO: 1765979 - RNA, 19 nt, Homo sapiens
  misc_RNA (1)...(19): siRNA sense strand
ccagaugacuugaaugcuu

SEQ ID NO: 1765980 - RNA, 19 nt, Homo sapiens
  misc_RNA (1)...(19): siRNA sense strand
gaacaauucagacacauca

SEQ ID NO: 1765981 - RNA, 19 nt, Homo sapiens
  misc_RNA (1)...(19): siRNA sense strand
caacaucuccucucucaau

SEQ ID NO: 1765982 - RNA, 19 nt, Homo sapiens
  misc_RNA (1)...(19): siRNA sense strand
agagagagaugcuggagaa

SEQ ID NO: 1765983 - RNA, 19 nt, Homo sapiens
  misc_RNA (1)...(19): siRNA sense strand
gaugagaaaugaauaugag

SEQ ID NO: 1765984 - RNA, 19 nt, Homo sapiens
  misc_RNA (1)...(19): siRNA sense strand
gaagagaaacugcaagaag

SEQ ID NO: 1765985 - RNA, 19 nt, Homo sapiens
  misc_RNA (1)...(19): siRNA sense strand
gcaguaugguuuacagaau

SEQ ID NO: 1765986 - RNA, 19 nt, Homo sapiens
  misc_RNA (1)...(19): siRNA sense strand
caucuaaacccaucaggua

SEQ ID NO: 1765987 - RNA, 19 nt, Homo sapiens
  misc_RNA (1)...(19): siRNA sense strand
ccugggagcugaagaauca

SEQ ID NO: 1765988 - RNA, 19 nt, Homo sapiens
  misc_RNA (1)...(19): siRNA sense strand
gagcagcuguuggaagaaa

SEQ ID NO: 1765989 - RNA, 19 nt, Homo sapiens
  misc_RNA (1)...(19): siRNA sense strand
gaaacgcacaccuuagaaa

SEQ ID NO: 1765990 - RNA, 19 nt, Homo sapiens
  misc_RNA (1)...(19): siRNA sense strand
gagaagcucaagucuuuaa

SEQ ID NO: 1765991 - RNA, 19 nt, Homo sapiens
  misc_RNA (1)...(19): siRNA sense strand
aaagaacaaucuccugcua

SEQ ID NO: 1765992 - RNA, 19 nt, Homo sapiens
  misc_RNA (1)...(19): siRNA sense strand
gaagauagcauuucuaacc

SEQ ID NO: 1765993 - RNA, 19 nt, Homo sapiens
  misc_RNA (1)...(19): siRNA sense strand
gaacacacagcucuuggaa

SEQ ID NO: 1765994 - RNA, 19 nt, Homo sapiens
  misc_RNA (1)...(19): siRNA sense strand
gcucagcccaaauauguua

SEQ ID NO: 1765995 - RNA, 19 nt, Homo sapiens
  misc_RNA (1)...(19): siRNA sense strand
gaacaggcagugaaggaaa

SEQ ID NO: 1765996 - RNA, 19 nt, Homo sapiens
  misc_RNA (1)...(19): siRNA sense strand
gcucaaggcuagacugaca

SEQ ID NO: 1765997 - RNA, 19 nt, Homo sapiens
  misc_RNA (1)...(19): siRNA sense strand
gaagacaccgugcagaaug

SEQ ID NO: 1765998 - RNA, 19 nt, Homo sapiens
  misc_RNA (1)...(19): siRNA sense strand
gcugguggcuucucaggaa

SEQ ID NO: 1765999 - RNA, 19 nt, Homo sapiens
  misc_RNA (1)...(19): siRNA sense strand
ugaaggcaaugaugcauga

SEQ ID NO: 1766000 - RNA, 19 nt, Homo sapiens
  misc_RNA (1)...(19): siRNA sense strand
uacaggagcugacuaggaa

SEQ ID NO: 1766001 - RNA, 19 nt, Homo sapiens
  misc_RNA (1)...(19): siRNA sense strand
aagauaaagugcgccauua

SEQ ID NO: 1766002 - RNA, 19 nt, Homo sapiens
  misc_RNA (1)...(19): siRNA sense strand
gaacuggaacguuguaaag

SEQ ID NO: 1766003 - RNA, 19 nt, Homo sapiens
  misc_RNA (1)...(19): siRNA sense strand
gcagugagaugcagcaaaa

SEQ ID NO: 1766004 - RNA, 19 nt, Homo sapiens
  misc_RNA (1)...(19): siRNA sense strand
ugaagaugcuugagagaau

SEQ ID NO: 1766005 - RNA, 19 nt, Homo sapiens
  misc_RNA (1)...(19): siRNA sense strand
ggaaagacuagaaauggaa

SEQ ID NO: 1766006 - RNA, 19 nt, Homo sapiens
  misc_RNA (1)...(19): siRNA sense strand
ccuaagaaauguaucugaa

SEQ ID NO: 1766007 - RNA, 19 nt, Homo sapiens
  misc_RNA (1)...(19): siRNA sense strand
gacagcagcuacuccaaga

SEQ ID NO: 1766008 - RNA, 19 nt, Homo sapiens
  misc_RNA (1)...(19): siRNA sense strand
cccaggagcugcugaaaga

SEQ ID NO: 1766009 - RNA, 19 nt, Homo sapiens
  misc_RNA (1)...(19): siRNA sense strand
ugaaggaccuccaggaaca

SEQ ID NO: 1766010 - RNA, 19 nt, Homo sapiens
  misc_RNA (1)...(19): siRNA sense strand
gcaagaaggcacaggagaa

SEQ ID NO: 1766011 - RNA, 19 nt, Homo sapiens
  misc_RNA (1)...(19): siRNA sense strand
caaugaguguagaagauuu

SEQ ID NO: 1766012 - RNA, 19 nt, Homo sapiens
  misc_RNA (1)...(19): siRNA sense strand
gaagaugugagccgagaaa

SEQ ID NO: 1766013 - RNA, 19 nt, Homo sapiens
  misc_RNA (1)...(19): siRNA sense strand
ggcaacaucuccucucuca

SEQ ID NO: 1766014 - RNA, 19 nt, Homo sapiens
  misc_RNA (1)...(19): siRNA sense strand
aagaaccucucaaauagaa

SEQ ID NO: 1766015 - RNA, 19 nt, Homo sapiens
  misc_RNA (1)...(19): siRNA sense strand
agaaagaggaguuaagaaa

SEQ ID NO: 1766016 - RNA, 19 nt, Homo sapiens
  misc_RNA (1)...(19): siRNA sense strand
gaaguauuccauaaucuug

SEQ ID NO: 1766017 - RNA, 19 nt, Homo sapiens
  misc_RNA (1)...(19): siRNA sense strand
gaacaagagaaguuuaauc

SEQ ID NO: 1766018 - RNA, 19 nt, Homo sapiens
  misc_RNA (1)...(19): siRNA sense strand
ggaaaacacuacucuccua

SEQ ID NO: 1766019 - RNA, 19 nt, Homo sapiens
  misc_RNA (1)...(19): siRNA sense strand
gaagaaccucucaaauaga

SEQ ID NO: 1766020 - RNA, 19 nt, Homo sapiens
  misc_RNA (1)...(19): siRNA sense strand
uagaagcucagcccaaaua

SEQ ID NO: 1766021 - RNA, 19 nt, Homo sapiens
  misc_RNA (1)...(19): siRNA sense strand
gaaggucagucagaugaau

SEQ ID NO: 1766022 - RNA, 19 nt, Homo sapiens
  misc_RNA (1)...(19): siRNA sense strand
caucagggcuccauaacca

SEQ ID NO: 1766023 - RNA, 19 nt, Homo sapiens
  misc_RNA (1)...(19): siRNA sense strand
gaacuucugagauaugaau

SEQ ID NO: 1766024 - RNA, 19 nt, Homo sapiens
  misc_RNA (1)...(19): siRNA sense strand
aaucgaaccugauggaaau

SEQ ID NO: 1766025 - RNA, 19 nt, Homo sapiens
  misc_RNA (1)...(19): siRNA sense strand
aaaguuagagccaggguua

SEQ ID NO: 1766026 - RNA, 19 nt, Homo sapiens
  misc_RNA (1)...(19): siRNA sense strand
gaaacacacucuugagaaa

SEQ ID NO: 1766027 - RNA, 19 nt, Homo sapiens
  misc_RNA (1)...(19): siRNA sense strand
gaaauugccugguuacaug

SEQ ID NO: 1766028 - RNA, 19 nt, Homo sapiens
  misc_RNA (1)...(19): siRNA sense strand
gaacgaaacgcacaccuua

SEQ ID NO: 1766029 - RNA, 19 nt, Homo sapiens
  misc_RNA (1)...(19): siRNA sense strand
caagagaaguuuaaucuga

SEQ ID NO: 1766030 - RNA, 19 nt, Homo sapiens
  misc_RNA (1)...(19): siRNA sense strand
ggacauauguugccucaga

SEQ ID NO: 1766031 - RNA, 19 nt, Homo sapiens
  misc_RNA (1)...(19): siRNA sense strand
gaaaauggcuacugaaauu

SEQ ID NO: 1766032 - RNA, 19 nt, Homo sapiens
  misc_RNA (1)...(19): siRNA sense strand
gaaacagaguguaauagaa

SEQ ID NO: 1766033 - RNA, 19 nt, Homo sapiens
  misc_RNA (1)...(19): siRNA sense strand
ggaagucacugaaacauuc

SEQ ID NO: 1766034 - RNA, 19 nt, Homo sapiens
  misc_RNA (1)...(19): siRNA sense strand
gcaagaaguuugugaagau

SEQ ID NO: 1766035 - RNA, 19 nt, Homo sapiens
  misc_RNA (1)...(19): siRNA sense strand
uuaaauagcugugucgaua

SEQ ID NO: 1766036 - RNA, 19 nt, Homo sapiens
  misc_RNA (1)...(19): siRNA sense strand
ggaagaagcuggucuccau

SEQ ID NO: 1766037 - RNA, 19 nt, Homo sapiens
  misc_RNA (1)...(19): siRNA sense strand
uaagugaccuggaagauga

SEQ ID NO: 1766038 - RNA, 19 nt, Homo sapiens
  misc_RNA (1)...(19): siRNA sense strand
gcagagagcucaugaacag

SEQ ID NO: 1766039 - RNA, 19 nt, Homo sapiens
  misc_RNA (1)...(19): siRNA sense strand
uagaagaaccucucaaaua

SEQ ID NO: 1766040 - RNA, 19 nt, Homo sapiens
  misc_RNA (1)...(19): siRNA sense strand
ccgagaagcucaagucuuu

SEQ ID NO: 1766041 - RNA, 19 nt, Homo sapiens
  misc_RNA (1)...(19): siRNA sense strand
gaagagagacugacacaga

SEQ ID NO: 1766042 - RNA, 19 nt, Homo sapiens
  misc_RNA (1)...(19): siRNA sense strand
gaagaacacuuucaagaac

SEQ ID NO: 1766043 - RNA, 19 nt, Homo sapiens
  misc_RNA (1)...(19): siRNA sense strand
gaugaaaucugaccuacga

SEQ ID NO: 1766044 - RNA, 19 nt, Homo sapiens
  misc_RNA (1)...(19): siRNA sense strand
ggaagaauaucgugcacaa

SEQ ID NO: 1766045 - RNA, 19 nt, Homo sapiens
  misc_RNA (1)...(19): siRNA sense strand
gaacccagaugacuugaau

SEQ ID NO: 1766046 - RNA, 19 nt, Homo sapiens
  misc_RNA (1)...(19): siRNA sense strand
gagagagugugaucaguuu

SEQ ID NO: 1766047 - RNA, 19 nt, Homo sapiens
  misc_RNA (1)...(19): siRNA sense strand
ugaaacagcugcacagaug

SEQ ID NO: 1766048 - RNA, 19 nt, Homo sapiens
  misc_RNA (1)...(19): siRNA sense strand
gacuggagcucgaagauaa

SEQ ID NO: 1766049 - RNA, 19 nt, Homo sapiens
  misc_RNA (1)...(19): siRNA sense strand
agucugagcuggaagaaua

SEQ ID NO: 1766050 - RNA, 19 nt, Homo sapiens
  misc_RNA (1)...(19): siRNA sense strand
cagaagaaguugaggcuaa

SEQ ID NO: 1766051 - RNA, 19 nt, Homo sapiens
  misc_RNA (1)...(19): siRNA sense strand
gaaccagacugcucacuag

SEQ ID NO: 1766052 - RNA, 19 nt, Homo sapiens
  misc_RNA (1)...(19): siRNA sense strand
gaacuuaaucaacgucuaa

SEQ ID NO: 1766053 - RNA, 19 nt, Homo sapiens
  misc_RNA (1)...(19): siRNA sense strand
agaagaaccucucaaauag

SEQ ID NO: 1766054 - RNA, 19 nt, Homo sapiens
  misc_RNA (1)...(19): siRNA sense strand
ggagcucucugaaguuaaa

SEQ ID NO: 1766055 - RNA, 19 nt, Homo sapiens
  misc_RNA (1)...(19): siRNA sense strand
ugacacagaugagaaauga

SEQ ID NO: 1766056 - RNA, 19 nt, Homo sapiens
  misc_RNA (1)...(19): siRNA sense strand
gaaacuggaugaagaguac

SEQ ID NO: 1766057 - RNA, 19 nt, Homo sapiens
  misc_RNA (1)...(19): siRNA sense strand
gcggagcucucugaaguua

SEQ ID NO: 1766058 - RNA, 19 nt, Homo sapiens
  misc_RNA (1)...(19): siRNA sense strand
gaaauauacuccagcucaa

SEQ ID NO: 1766059 - RNA, 19 nt, Homo sapiens
  misc_RNA (1)...(19): siRNA sense strand
uagaugaacuccagucuga

SEQ ID NO: 1766060 - RNA, 19 nt, Homo sapiens
  misc_RNA (1)...(19): siRNA sense strand
gaauguggauggagagaug

SEQ ID NO: 1766061 - RNA, 19 nt, Homo sapiens
  misc_RNA (1)...(19): siRNA sense strand
gcacagaaaucuccagacu

SEQ ID NO: 1766062 - RNA, 19 nt, Homo sapiens
  misc_RNA (1)...(19): siRNA sense strand
gaacucaccgucagaagaa

SEQ ID NO: 1766063 - RNA, 19 nt, Homo sapiens
  misc_RNA (1)...(19): siRNA sense strand
guucuaagcuacaacgaaa

SEQ ID NO: 1766064 - RNA, 19 nt, Homo sapiens
  misc_RNA (1)...(19): siRNA sense strand
gggagcagcuguuggaaga

SEQ ID NO: 1766065 - RNA, 19 nt, Homo sapiens
  misc_RNA (1)...(19): siRNA sense strand
gaagagaccaggacugaau

SEQ ID NO: 1766066 - RNA, 19 nt, Homo sapiens
  misc_RNA (1)...(19): siRNA sense strand
aggcagagcuggucauuga

SEQ ID NO: 1766067 - RNA, 19 nt, Homo sapiens
  misc_RNA (1)...(19): siRNA sense strand
ggaaaagguucagaauuua

SEQ ID NO: 1766068 - RNA, 19 nt, Homo sapiens
  misc_RNA (1)...(19): siRNA sense strand
acagaaaucuccagacuuc

SEQ ID NO: 1766069 - RNA, 19 nt, Homo sapiens
  misc_RNA (1)...(19): siRNA sense strand
gacagcagaucgagaaaga

SEQ ID NO: 1766070 - RNA, 19 nt, Homo sapiens
  misc_RNA (1)...(19): siRNA sense strand
ucaaauagaagcccaguuu

SEQ ID NO: 1766071 - RNA, 19 nt, Homo sapiens
  misc_RNA (1)...(19): siRNA sense strand
ggaaacagaguguaauaga

SEQ ID NO: 1766072 - RNA, 19 nt, Homo sapiens
  misc_RNA (1)...(19): siRNA sense strand
ucaggaaacuggaugaaga

SEQ ID NO: 1766073 - RNA, 19 nt, Homo sapiens
  misc_RNA (1)...(19): siRNA sense strand
ugacaagccugguggagaa

SEQ ID NO: 1766074 - RNA, 19 nt, Homo sapiens
  misc_RNA (1)...(19): siRNA sense strand
gcaaaggcaugagaacgaa

SEQ ID NO: 1766075 - RNA, 19 nt, Homo sapiens
  misc_RNA (1)...(19): siRNA sense strand
gaagauaaagugcgccauu

SEQ ID NO: 1766076 - RNA, 19 nt, Homo sapiens
  misc_RNA (1)...(19): siRNA sense strand
ccaaauauaagcuguugua

SEQ ID NO: 1766077 - RNA, 19 nt, Homo sapiens
  misc_RNA (1)...(19): siRNA sense strand
gacuagaaauggaacauga

SEQ ID NO: 1766078 - RNA, 19 nt, Homo sapiens
  misc_RNA (1)...(19): siRNA sense strand
gcaaaugucccggaugaaa

SEQ ID NO: 1766079 - RNA, 19 nt, Homo sapiens
  misc_RNA (1)...(19): siRNA sense strand
ccagaugacuugaaugcuu

SEQ ID NO: 1766080 - RNA, 19 nt, Homo sapiens
  misc_RNA (1)...(19): siRNA sense strand
gaacaauucagacacauca

SEQ ID NO: 1766081 - RNA, 19 nt, Homo sapiens
  misc_RNA (1)...(19): siRNA sense strand
caacaucuccucucucaau

SEQ ID NO: 1766082 - RNA, 19 nt, Homo sapiens
  misc_RNA (1)...(19): siRNA sense strand
agagagagaugcuggagaa

SEQ ID NO: 1766083 - RNA, 19 nt, Homo sapiens
  misc_RNA (1)...(19): siRNA sense strand
gaugagaaaugaauaugag

SEQ ID NO: 1766084 - RNA, 19 nt, Homo sapiens
  misc_RNA (1)...(19): siRNA sense strand
gaagagaaacugcaagaag

SEQ ID NO: 1766085 - RNA, 19 nt, Homo sapiens
  misc_RNA (1)...(19): siRNA sense strand
gcaguaugguuuacagaau

SEQ ID NO: 1766086 - RNA, 19 nt, Homo sapiens
  misc_RNA (1)...(19): siRNA sense strand
caucuaaacccaucaggua

SEQ ID NO: 1766087 - RNA, 19 nt, Homo sapiens
  misc_RNA (1)...(19): siRNA sense strand
ccugggagcugaagaauca

SEQ ID NO: 1766088 - RNA, 19 nt, Homo sapiens
  misc_RNA (1)...(19): siRNA sense strand
gagcagcuguuggaagaaa

SEQ ID NO: 1766089 - RNA, 19 nt, Homo sapiens
  misc_RNA (1)...(19): siRNA sense strand
gaaacgcacaccuuagaaa

SEQ ID NO: 1766090 - RNA, 19 nt, Homo sapiens
  misc_RNA (1)...(19): siRNA sense strand
gagaagcucaagucuuuaa

SEQ ID NO: 1766091 - RNA, 19 nt, Homo sapiens
  misc_RNA (1)...(19): siRNA sense strand
aaagaacaaucuccugcua

SEQ ID NO: 1766092 - RNA, 19 nt, Homo sapiens
  misc_RNA (1)...(19): siRNA sense strand
gaagauagcauuucuaacc

SEQ ID NO: 1766093 - RNA, 19 nt, Homo sapiens
  misc_RNA (1)...(19): siRNA sense strand
gaacacacagcucuuggaa

SEQ ID NO: 1766094 - RNA, 19 nt, Homo sapiens
  misc_RNA (1)...(19): siRNA sense strand
gcucagcccaaauauguua

SEQ ID NO: 1766095 - RNA, 19 nt, Homo sapiens
  misc_RNA (1)...(19): siRNA sense strand
gaacaggcagugaaggaaa

SEQ ID NO: 1766096 - RNA, 19 nt, Homo sapiens
  misc_RNA (1)...(19): siRNA sense strand
gcucaaggcuagacugaca

SEQ ID NO: 1766097 - RNA, 19 nt, Homo sapiens
  misc_RNA (1)...(19): siRNA sense strand
gaagacaccgugcagaaug

SEQ ID NO: 1766098 - RNA, 19 nt, Homo sapiens
  misc_RNA (1)...(19): siRNA sense strand
gcugguggcuucucaggaa

SEQ ID NO: 1766099 - RNA, 19 nt, Homo sapiens
  misc_RNA (1)...(19): siRNA sense strand
ugaaggcaaugaugcauga

SEQ ID NO: 1766100 - RNA, 19 nt, Homo sapiens
  misc_RNA (1)...(19): siRNA sense strand
uacaggagcugacuaggaa

SEQ ID NO: 1766101 - RNA, 19 nt, Homo sapiens
  misc_RNA (1)...(19): siRNA sense strand
aagauaaagugcgccauua

SEQ ID NO: 1766102 - RNA, 19 nt, Homo sapiens
  misc_RNA (1)...(19): siRNA sense strand
gaacuggaacguuguaaag

SEQ ID NO: 1766103 - RNA, 19 nt, Homo sapiens
  misc_RNA (1)...(19): siRNA sense strand
gcagugagaugcagcaaaa

SEQ ID NO: 1766104 - RNA, 19 nt, Homo sapiens
  misc_RNA (1)...(19): siRNA sense strand
ugaagaugcuugagagaau

SEQ ID NO: 1766105 - RNA, 19 nt, Homo sapiens
  misc_RNA (1)...(19): siRNA sense strand
ggaaagacuagaaauggaa

SEQ ID NO: 1766106 - RNA, 19 nt, Homo sapiens
  misc_RNA (1)...(19): siRNA sense strand
ccuaagaaauguaucugaa

SEQ ID NO: 1766107 - RNA, 19 nt, Homo sapiens
  misc_RNA (1)...(19): siRNA sense strand
gacagcagcuacuccaaga

SEQ ID NO: 1766108 - RNA, 19 nt, Homo sapiens
  misc_RNA (1)...(19): siRNA sense strand
cccaggagcugcugaaaga

SEQ ID NO: 1766109 - RNA, 19 nt, Homo sapiens
  misc_RNA (1)...(19): siRNA sense strand
ugaaggaccuccaggaaca

SEQ ID NO: 1766110 - RNA, 19 nt, Homo sapiens
  misc_RNA (1)...(19): siRNA sense strand
gcaagaaggcacaggagaa

SEQ ID NO: 1766111 - RNA, 19 nt, Homo sapiens
  misc_RNA (1)...(19): siRNA sense strand
caaugaguguagaagauuu

SEQ ID NO: 1766112 - RNA, 19 nt, Homo sapiens
  misc_RNA (1)...(19): siRNA sense strand
gaagaugugagccgagaaa

SEQ ID NO: 1766113 - RNA, 19 nt, Homo sapiens
  misc_RNA (1)...(19): siRNA sense strand
ggcaacaucuccucucuca

SEQ ID NO: 1766114 - RNA, 19 nt, Homo sapiens
  misc_RNA (1)...(19): siRNA sense strand
aagaaccucucaaauagaa

SEQ ID NO: 1766115 - RNA, 19 nt, Homo sapiens
  misc_RNA (1)...(19): siRNA sense strand
agaaagaggaguuaagaaa

SEQ ID NO: 1766116 - RNA, 19 nt, Homo sapiens
  misc_RNA (1)...(19): siRNA sense strand
gaaguauuccauaaucuug

SEQ ID NO: 1766117 - RNA, 19 nt, Homo sapiens
  misc_RNA (1)...(19): siRNA sense strand
gaacaagagaaguuuaauc

SEQ ID NO: 1766118 - RNA, 19 nt, Homo sapiens
  misc_RNA (1)...(19): siRNA sense strand
ggaaaacacuacucuccua

SEQ ID NO: 1766119 - RNA, 19 nt, Homo sapiens
  misc_RNA (1)...(19): siRNA sense strand
gaagaaccucucaaauaga

SEQ ID NO: 1766120 - RNA, 19 nt, Homo sapiens
  misc_RNA (1)...(19): siRNA sense strand
uagaagcucagcccaaaua

SEQ ID NO: 1766121 - RNA, 19 nt, Homo sapiens
  misc_RNA (1)...(19): siRNA sense strand
gaaggucagucagaugaau

SEQ ID NO: 1766122 - RNA, 19 nt, Homo sapiens
  misc_RNA (1)...(19): siRNA sense strand
caucagggcuccauaacca

SEQ ID NO: 1766123 - RNA, 19 nt, Homo sapiens
  misc_RNA (1)...(19): siRNA sense strand
gaacuucugagauaugaau

SEQ ID NO: 1766124 - RNA, 19 nt, Homo sapiens
  misc_RNA (1)...(19): siRNA sense strand
aaucgaaccugauggaaau

SEQ ID NO: 1766125 - RNA, 19 nt, Homo sapiens
  misc_RNA (1)...(19): siRNA sense strand
aaaguuagagccaggguua

SEQ ID NO: 1766126 - RNA, 19 nt, Homo sapiens
  misc_RNA (1)...(19): siRNA sense strand
gaaacacacucuugagaaa

SEQ ID NO: 1766127 - RNA, 19 nt, Homo sapiens
  misc_RNA (1)...(19): siRNA sense strand
gaaauugccugguuacaug

SEQ ID NO: 1766128 - RNA, 19 nt, Homo sapiens
  misc_RNA (1)...(19): siRNA sense strand
gaacgaaacgcacaccuua

SEQ ID NO: 1766129 - RNA, 19 nt, Homo sapiens
  misc_RNA (1)...(19): siRNA sense strand
caagagaaguuuaaucuga

SEQ ID NO: 1766130 - RNA, 19 nt, Homo sapiens
  misc_RNA (1)...(19): siRNA sense strand
ggacauauguugccucaga

SEQ ID NO: 1766131 - RNA, 19 nt, Homo sapiens
  misc_RNA (1)...(19): siRNA sense strand
gaaaauggcuacugaaauu

SEQ ID NO: 1766132 - RNA, 19 nt, Homo sapiens
  misc_RNA (1)...(19): siRNA sense strand
gaaacagaguguaauagaa

SEQ ID NO: 1766133 - RNA, 19 nt, Homo sapiens
  misc_RNA (1)...(19): siRNA sense strand
ggaagucacugaaacauuc

SEQ ID NO: 1766134 - RNA, 19 nt, Homo sapiens
  misc_RNA (1)...(19): siRNA sense strand
gcaagaaguuugugaagau

SEQ ID NO: 1766135 - RNA, 19 nt, Homo sapiens
  misc_RNA (1)...(19): siRNA sense strand
uuaaauagcugugucgaua

SEQ ID NO: 1766136 - RNA, 19 nt, Homo sapiens
  misc_RNA (1)...(19): siRNA sense strand
ggaagaagcuggucuccau

SEQ ID NO: 1766137 - RNA, 19 nt, Homo sapiens
  misc_RNA (1)...(19): siRNA sense strand
uaagugaccuggaagauga

SEQ ID NO: 1766138 - RNA, 19 nt, Homo sapiens
  misc_RNA (1)...(19): siRNA sense strand
gcagagagcucaugaacag

SEQ ID NO: 1766139 - RNA, 19 nt, Homo sapiens
  misc_RNA (1)...(19): siRNA sense strand
uagaagaaccucucaaaua

SEQ ID NO: 1766140 - RNA, 19 nt, Homo sapiens
  misc_RNA (1)...(19): siRNA sense strand
ccgagaagcucaagucuuu

SEQ ID NO: 1766141 - RNA, 19 nt, Homo sapiens
  misc_RNA (1)...(19): siRNA sense strand
gaagagagacugacacaga

SEQ ID NO: 1766142 - RNA, 19 nt, Homo sapiens
  misc_RNA (1)...(19): siRNA sense strand
gaagaacacuuucaagaac

SEQ ID NO: 1766143 - RNA, 19 nt, Homo sapiens
  misc_RNA (1)...(19): siRNA sense strand
gaugaaaucugaccuacga

SEQ ID NO: 1766144 - RNA, 19 nt, Homo sapiens
  misc_RNA (1)...(19): siRNA sense strand
ggaagaauaucgugcacaa

SEQ ID NO: 1766145 - RNA, 19 nt, Homo sapiens
  misc_RNA (1)...(19): siRNA sense strand
gaacccagaugacuugaau

SEQ ID NO: 1766146 - RNA, 19 nt, Homo sapiens
  misc_RNA (1)...(19): siRNA sense strand
gagagagugugaucaguuu

SEQ ID NO: 1766147 - RNA, 19 nt, Homo sapiens
  misc_RNA (1)...(19): siRNA sense strand
ugaaacagcugcacagaug

SEQ ID NO: 1766148 - RNA, 19 nt, Homo sapiens
  misc_RNA (1)...(19): siRNA sense strand
gacuggagcucgaagauaa

SEQ ID NO: 1766149 - RNA, 19 nt, Homo sapiens
  misc_RNA (1)...(19): siRNA sense strand
agucugagcuggaagaaua

SEQ ID NO: 1766150 - RNA, 19 nt, Homo sapiens
  misc_RNA (1)...(19): siRNA sense strand
cagaagaaguugaggcuaa

SEQ ID NO: 1766151 - RNA, 19 nt, Homo sapiens
  misc_RNA (1)...(19): siRNA sense strand
gaaccagacugcucacuag

SEQ ID NO: 1766152 - RNA, 19 nt, Homo sapiens
  misc_RNA (1)...(19): siRNA sense strand
gaacuuaaucaacgucuaa

SEQ ID NO: 1766153 - RNA, 19 nt, Homo sapiens
  misc_RNA (1)...(19): siRNA sense strand
agaagaaccucucaaauag

SEQ ID NO: 1766154 - RNA, 19 nt, Homo sapiens
  misc_RNA (1)...(19): siRNA sense strand
ggagcucucugaaguuaaa

SEQ ID NO: 1766155 - RNA, 19 nt, Homo sapiens
  misc_RNA (1)...(19): siRNA sense strand
ugacacagaugagaaauga

SEQ ID NO: 1766156 - RNA, 19 nt, Homo sapiens
  misc_RNA (1)...(19): siRNA sense strand
gaaacuggaugaagaguac

SEQ ID NO: 1766157 - RNA, 19 nt, Homo sapiens
  misc_RNA (1)...(19): siRNA sense strand
gcggagcucucugaaguua

SEQ ID NO: 1766158 - RNA, 19 nt, Homo sapiens
  misc_RNA (1)...(19): siRNA sense strand
gaaauauacuccagcucaa

SEQ ID NO: 1766159 - RNA, 19 nt, Homo sapiens
  misc_RNA (1)...(19): siRNA sense strand
uagaugaacuccagucuga

SEQ ID NO: 1766160 - RNA, 19 nt, Homo sapiens
  misc_RNA (1)...(19): siRNA sense strand
gaauguggauggagagaug

SEQ ID NO: 1766161 - RNA, 19 nt, Homo sapiens
  misc_RNA (1)...(19): siRNA sense strand
gcacagaaaucuccagacu

SEQ ID NO: 1766162 - RNA, 19 nt, Homo sapiens
  misc_RNA (1)...(19): siRNA sense strand
gaacucaccgucagaagaa

SEQ ID NO: 1766163 - RNA, 19 nt, Homo sapiens
  misc_RNA (1)...(19): siRNA sense strand
guucuaagcuacaacgaaa

SEQ ID NO: 1766164 - RNA, 19 nt, Homo sapiens
  misc_RNA (1)...(19): siRNA sense strand
gggagcagcuguuggaaga

SEQ ID NO: 1766165 - RNA, 19 nt, Homo sapiens
  misc_RNA (1)...(19): siRNA sense strand
gaagagaccaggacugaau

SEQ ID NO: 1766166 - RNA, 19 nt, Homo sapiens
  misc_RNA (1)...(19): siRNA sense strand
aggcagagcuggucauuga

SEQ ID NO: 1766167 - RNA, 19 nt, Homo sapiens
  misc_RNA (1)...(19): siRNA sense strand
ggaaaagguucagaauuua

SEQ ID NO: 1766168 - RNA, 19 nt, Homo sapiens
  misc_RNA (1)...(19): siRNA sense strand
acagaaaucuccagacuuc

SEQ ID NO: 1766169 - RNA, 19 nt, Homo sapiens
  misc_RNA (1)...(19): siRNA sense strand
gacagcagaucgagaaaga

SEQ ID NO: 1766170 - RNA, 19 nt, Homo sapiens
  misc_RNA (1)...(19): siRNA sense strand
ucaaauagaagcccaguuu

SEQ ID NO: 1766171 - RNA, 19 nt, Homo sapiens
  misc_RNA (1)...(19): siRNA sense strand
ggaaacagaguguaauaga

SEQ ID NO: 1766172 - RNA, 19 nt, Homo sapiens
  misc_RNA (1)...(19): siRNA sense strand
ucaggaaacuggaugaaga

SEQ ID NO: 1766173 - RNA, 19 nt, Homo sapiens
  misc_RNA (1)...(19): siRNA sense strand
ugacaagccugguggagaa

SEQ ID NO: 1766174 - RNA, 19 nt, Homo sapiens
  misc_RNA (1)...(19): siRNA sense strand
gcaaaggcaugagaacgaa

SEQ ID NO: 1766175 - RNA, 19 nt, Homo sapiens
  misc_RNA (1)...(19): siRNA sense strand
gaagauaaagugcgccauu

SEQ ID NO: 1766176 - RNA, 19 nt, Homo sapiens
  misc_RNA (1)...(19): siRNA sense strand
ccaaauauaagcuguugua

SEQ ID NO: 1766177 - RNA, 19 nt, Homo sapiens
  misc_RNA (1)...(19): siRNA sense strand
gacuagaaauggaacauga

SEQ ID NO: 1766178 - RNA, 19 nt, Homo sapiens
  misc_RNA (1)...(19): siRNA sense strand
gcaaaugucccggaugaaa

SEQ ID NO: 1766179 - RNA, 19 nt, Homo sapiens
  misc_RNA (1)...(19): siRNA sense strand
ccagaugacuugaaugcuu

SEQ ID NO: 1766180 - RNA, 19 nt, Homo sapiens
  misc_RNA (1)...(19): siRNA sense strand
gaacaauucagacacauca

SEQ ID NO: 1766181 - RNA, 19 nt, Homo sapiens
  misc_RNA (1)...(19): siRNA sense strand
caacaucuccucucucaau

SEQ ID NO: 1766182 - RNA, 19 nt, Homo sapiens
  misc_RNA (1)...(19): siRNA sense strand
agagagagaugcuggagaa

SEQ ID NO: 1766183 - RNA, 19 nt, Homo sapiens
  misc_RNA (1)...(19): siRNA sense strand
gaugagaaaugaauaugag

SEQ ID NO: 1766184 - RNA, 19 nt, Homo sapiens
  misc_RNA (1)...(19): siRNA sense strand
gaagagaaacugcaagaag

SEQ ID NO: 1766185 - RNA, 19 nt, Homo sapiens
  misc_RNA (1)...(19): siRNA sense strand
gcaguaugguuuacagaau

SEQ ID NO: 1766186 - RNA, 19 nt, Homo sapiens
  misc_RNA (1)...(19): siRNA sense strand
caucuaaacccaucaggua

SEQ ID NO: 1766187 - RNA, 19 nt, Homo sapiens
  misc_RNA (1)...(19): siRNA sense strand
ccugggagcugaagaauca

SEQ ID NO: 1766188 - RNA, 19 nt, Homo sapiens
  misc_RNA (1)...(19): siRNA sense strand
gagcagcuguuggaagaaa

SEQ ID NO: 1766189 - RNA, 19 nt, Homo sapiens
  misc_RNA (1)...(19): siRNA sense strand
gaaacgcacaccuuagaaa

SEQ ID NO: 1766190 - RNA, 19 nt, Homo sapiens
  misc_RNA (1)...(19): siRNA sense strand
gagaagcucaagucuuuaa

SEQ ID NO: 1766191 - RNA, 19 nt, Homo sapiens
  misc_RNA (1)...(19): siRNA sense strand
aaagaacaaucuccugcua

SEQ ID NO: 1766192 - RNA, 19 nt, Homo sapiens
  misc_RNA (1)...(19): siRNA sense strand
gaagauagcauuucuaacc

SEQ ID NO: 1766193 - RNA, 19 nt, Homo sapiens
  misc_RNA (1)...(19): siRNA sense strand
gaacacacagcucuuggaa

SEQ ID NO: 1766194 - RNA, 19 nt, Homo sapiens
  misc_RNA (1)...(19): siRNA sense strand
gcucagcccaaauauguua

SEQ ID NO: 1766195 - RNA, 19 nt, Homo sapiens
  misc_RNA (1)...(19): siRNA sense strand
gaacaggcagugaaggaaa

SEQ ID NO: 1766196 - RNA, 19 nt, Homo sapiens
  misc_RNA (1)...(19): siRNA sense strand
gcucaaggcuagacugaca

SEQ ID NO: 1766197 - RNA, 19 nt, Homo sapiens
  misc_RNA (1)...(19): siRNA sense strand
gaagacaccgugcagaaug

SEQ ID NO: 1766198 - RNA, 19 nt, Homo sapiens
  misc_RNA (1)...(19): siRNA sense strand
gcugguggcuucucaggaa

SEQ ID NO: 1766199 - RNA, 19 nt, Homo sapiens
  misc_RNA (1)...(19): siRNA sense strand
ugaaggcaaugaugcauga

SEQ ID NO: 1766200 - RNA, 19 nt, Homo sapiens
  misc_RNA (1)...(19): siRNA sense strand
uacaggagcugacuaggaa

SEQ ID NO: 1766201 - RNA, 19 nt, Homo sapiens
  misc_RNA (1)...(19): siRNA sense strand
aagauaaagugcgccauua

SEQ ID NO: 1766202 - RNA, 19 nt, Homo sapiens
  misc_RNA (1)...(19): siRNA sense strand
gaacuggaacguuguaaag

SEQ ID NO: 1766203 - RNA, 19 nt, Homo sapiens
  misc_RNA (1)...(19): siRNA sense strand
gcagugagaugcagcaaaa

SEQ ID NO: 1766204 - RNA, 19 nt, Homo sapiens
  misc_RNA (1)...(19): siRNA sense strand
ugaagaugcuugagagaau

SEQ ID NO: 1766205 - RNA, 19 nt, Homo sapiens
  misc_RNA (1)...(19): siRNA sense strand
ggaaagacuagaaauggaa

SEQ ID NO: 1766206 - RNA, 19 nt, Homo sapiens
  misc_RNA (1)...(19): siRNA sense strand
ccuaagaaauguaucugaa

SEQ ID NO: 1766207 - RNA, 19 nt, Homo sapiens
  misc_RNA (1)...(19): siRNA sense strand
gacagcagcuacuccaaga

SEQ ID NO: 1766208 - RNA, 19 nt, Homo sapiens
  misc_RNA (1)...(19): siRNA sense strand
cccaggagcugcugaaaga

SEQ ID NO: 1766209 - RNA, 19 nt, Homo sapiens
  misc_RNA (1)...(19): siRNA sense strand
ugaaggaccuccaggaaca

SEQ ID NO: 1766210 - RNA, 19 nt, Homo sapiens
  misc_RNA (1)...(19): siRNA sense strand
gcaagaaggcacaggagaa

SEQ ID NO: 1766211 - RNA, 19 nt, Homo sapiens
  misc_RNA (1)...(19): siRNA sense strand
caaugaguguagaagauuu

SEQ ID NO: 1766212 - RNA, 19 nt, Homo sapiens
  misc_RNA (1)...(19): siRNA sense strand
gaagaugugagccgagaaa

SEQ ID NO: 1766213 - RNA, 19 nt, Homo sapiens
  misc_RNA (1)...(19): siRNA sense strand
ggcaacaucuccucucuca

SEQ ID NO: 1766214 - RNA, 19 nt, Homo sapiens
  misc_RNA (1)...(19): siRNA sense strand
aagaaccucucaaauagaa

SEQ ID NO: 1766215 - RNA, 19 nt, Homo sapiens
  misc_RNA (1)...(19): siRNA sense strand
agaaagaggaguuaagaaa

SEQ ID NO: 1766216 - RNA, 19 nt, Homo sapiens
  misc_RNA (1)...(19): siRNA sense strand
gaaguauuccauaaucuug

SEQ ID NO: 1766217 - RNA, 19 nt, Homo sapiens
  misc_RNA (1)...(19): siRNA sense strand
gaacaagagaaguuuaauc

SEQ ID NO: 1766218 - RNA, 19 nt, Homo sapiens
  misc_RNA (1)...(19): siRNA sense strand
ggaaaacacuacucuccua

SEQ ID NO: 1766219 - RNA, 19 nt, Homo sapiens
  misc_RNA (1)...(19): siRNA sense strand
gaagaaccucucaaauaga

SEQ ID NO: 1766220 - RNA, 19 nt, Homo sapiens
  misc_RNA (1)...(19): siRNA sense strand
uagaagcucagcccaaaua

SEQ ID NO: 1766221 - RNA, 19 nt, Homo sapiens
  misc_RNA (1)...(19): siRNA sense strand
gaaggucagucagaugaau

SEQ ID NO: 1766222 - RNA, 19 nt, Homo sapiens
  misc_RNA (1)...(19): siRNA sense strand
caucagggcuccauaacca

SEQ ID NO: 1766223 - RNA, 19 nt, Homo sapiens
  misc_RNA (1)...(19): siRNA sense strand
gaacuucugagauaugaau

SEQ ID NO: 1766224 - RNA, 19 nt, Homo sapiens
  misc_RNA (1)...(19): siRNA sense strand
aaucgaaccugauggaaau

SEQ ID NO: 1766225 - RNA, 19 nt, Homo sapiens
  misc_RNA (1)...(19): siRNA sense strand
aaaguuagagccaggguua

SEQ ID NO: 1766226 - RNA, 19 nt, Homo sapiens
  misc_RNA (1)...(19): siRNA sense strand
gaaacacacucuugagaaa

SEQ ID NO: 1766227 - RNA, 19 nt, Homo sapiens
  misc_RNA (1)...(19): siRNA sense strand
gaaauugccugguuacaug

SEQ ID NO: 1766228 - RNA, 19 nt, Homo sapiens
  misc_RNA (1)...(19): siRNA sense strand
gaacgaaacgcacaccuua

SEQ ID NO: 1766229 - RNA, 19 nt, Homo sapiens
  misc_RNA (1)...(19): siRNA sense strand
caagagaaguuuaaucuga

SEQ ID NO: 1766230 - RNA, 19 nt, Homo sapiens
  misc_RNA (1)...(19): siRNA sense strand
ggacauauguugccucaga

SEQ ID NO: 1766231 - RNA, 19 nt, Homo sapiens
  misc_RNA (1)...(19): siRNA sense strand
gaaaauggcuacugaaauu

SEQ ID NO: 1766232 - RNA, 19 nt, Homo sapiens
  misc_RNA (1)...(19): siRNA sense strand
gaaacagaguguaauagaa

SEQ ID NO: 1766233 - RNA, 19 nt, Homo sapiens
  misc_RNA (1)...(19): siRNA sense strand
ggaagucacugaaacauuc

SEQ ID NO: 1766234 - RNA, 19 nt, Homo sapiens
  misc_RNA (1)...(19): siRNA sense strand
gcaagaaguuugugaagau

SEQ ID NO: 1766235 - RNA, 19 nt, Homo sapiens
  misc_RNA (1)...(19): siRNA sense strand
uuaaauagcugugucgaua

SEQ ID NO: 1766236 - RNA, 19 nt, Homo sapiens
  misc_RNA (1)...(19): siRNA sense strand
ggaagaagcuggucuccau

SEQ ID NO: 1766237 - RNA, 19 nt, Homo sapiens
  misc_RNA (1)...(19): siRNA sense strand
uaagugaccuggaagauga

SEQ ID NO: 1766238 - RNA, 19 nt, Homo sapiens
  misc_RNA (1)...(19): siRNA sense strand
gcagagagcucaugaacag

SEQ ID NO: 1766239 - RNA, 19 nt, Homo sapiens
  misc_RNA (1)...(19): siRNA sense strand
uagaagaaccucucaaaua

SEQ ID NO: 1766240 - RNA, 19 nt, Homo sapiens
  misc_RNA (1)...(19): siRNA sense strand
ccgagaagcucaagucuuu

SEQ ID NO: 1766241 - RNA, 19 nt, Homo sapiens
  misc_RNA (1)...(19): siRNA sense strand
gaagagagacugacacaga

SEQ ID NO: 1766242 - RNA, 19 nt, Homo sapiens
  misc_RNA (1)...(19): siRNA sense strand
gaagaacacuuucaagaac

SEQ ID NO: 1766243 - RNA, 19 nt, Homo sapiens
  misc_RNA (1)...(19): siRNA sense strand
gaugaaaucugaccuacga

SEQ ID NO: 1766244 - RNA, 19 nt, Homo sapiens
  misc_RNA (1)...(19): siRNA sense strand
ggaagaauaucgugcacaa

SEQ ID NO: 1766245 - RNA, 19 nt, Homo sapiens
  misc_RNA (1)...(19): siRNA sense strand
gaacccagaugacuugaau

SEQ ID NO: 1766246 - RNA, 19 nt, Homo sapiens
  misc_RNA (1)...(19): siRNA sense strand
gagagagugugaucaguuu

SEQ ID NO: 1766247 - RNA, 19 nt, Homo sapiens
  misc_RNA (1)...(19): siRNA sense strand
ugaaacagcugcacagaug

SEQ ID NO: 1766248 - RNA, 19 nt, Homo sapiens
  misc_RNA (1)...(19): siRNA sense strand
gacuggagcucgaagauaa

SEQ ID NO: 1766249 - RNA, 19 nt, Homo sapiens
  misc_RNA (1)...(19): siRNA sense strand
agucugagcuggaagaaua

SEQ ID NO: 1766250 - RNA, 19 nt, Homo sapiens
  misc_RNA (1)...(19): siRNA sense strand
cagaagaaguugaggcuaa

SEQ ID NO: 1766251 - RNA, 19 nt, Homo sapiens
  misc_RNA (1)...(19): siRNA sense strand
gaaccagacugcucacuag

SEQ ID NO: 1766252 - RNA, 19 nt, Homo sapiens
  misc_RNA (1)...(19): siRNA sense strand
gaacuuaaucaacgucuaa

SEQ ID NO: 1766253 - RNA, 19 nt, Homo sapiens
  misc_RNA (1)...(19): siRNA sense strand
agaagaaccucucaaauag

SEQ ID NO: 1766254 - RNA, 19 nt, Homo sapiens
  misc_RNA (1)...(19): siRNA sense strand
ggagcucucugaaguuaaa

SEQ ID NO: 1766255 - RNA, 19 nt, Homo sapiens
  misc_RNA (1)...(19): siRNA sense strand
ugacacagaugagaaauga

SEQ ID NO: 1766256 - RNA, 19 nt, Homo sapiens
  misc_RNA (1)...(19): siRNA sense strand
gaaacuggaugaagaguac

SEQ ID NO: 1766257 - RNA, 19 nt, Homo sapiens
  misc_RNA (1)...(19): siRNA sense strand
gcggagcucucugaaguua

SEQ ID NO: 1766258 - RNA, 19 nt, Homo sapiens
  misc_RNA (1)...(19): siRNA sense strand
gaaauauacuccagcucaa

SEQ ID NO: 1766259 - RNA, 19 nt, Homo sapiens
  misc_RNA (1)...(19): siRNA sense strand
uagaugaacuccagucuga

SEQ ID NO: 1766260 - RNA, 19 nt, Homo sapiens
  misc_RNA (1)...(19): siRNA sense strand
gaauguggauggagagaug

SEQ ID NO: 1766261 - RNA, 19 nt, Homo sapiens
  misc_RNA (1)...(19): siRNA sense strand
gcacagaaaucuccagacu

SEQ ID NO: 1766262 - RNA, 19 nt, Homo sapiens
  misc_RNA (1)...(19): siRNA sense strand
gaacucaccgucagaagaa

SEQ ID NO: 1766263 - RNA, 19 nt, Homo sapiens
  misc_RNA (1)...(19): siRNA sense strand
guucuaagcuacaacgaaa

SEQ ID NO: 1766264 - RNA, 19 nt, Homo sapiens
  misc_RNA (1)...(19): siRNA sense strand
gggagcagcuguuggaaga

SEQ ID NO: 1766265 - RNA, 19 nt, Homo sapiens
  misc_RNA (1)...(19): siRNA sense strand
gaagagaccaggacugaau

SEQ ID NO: 1766266 - RNA, 19 nt, Homo sapiens
  misc_RNA (1)...(19): siRNA sense strand
aggcagagcuggucauuga

SEQ ID NO: 1766267 - RNA, 19 nt, Homo sapiens
  misc_RNA (1)...(19): siRNA sense strand
ggaaaagguucagaauuua

SEQ ID NO: 1766268 - RNA, 19 nt, Homo sapiens
  misc_RNA (1)...(19): siRNA sense strand
acagaaaucuccagacuuc

SEQ ID NO: 1766269 - RNA, 19 nt, Homo sapiens
  misc_RNA (1)...(19): siRNA sense strand
gacagcagaucgagaaaga

SEQ ID NO: 1766270 - RNA, 19 nt, Homo sapiens
  misc_RNA (1)...(19): siRNA sense strand
ucaaauagaagcccaguuu

SEQ ID NO: 1766271 - RNA, 19 nt, Homo sapiens
  misc_RNA (1)...(19): siRNA sense strand
ggaaacagaguguaauaga

SEQ ID NO: 1766272 - RNA, 19 nt, Homo sapiens
  misc_RNA (1)...(19): siRNA sense strand
ucaggaaacuggaugaaga

SEQ ID NO: 1766273 - RNA, 19 nt, Homo sapiens
  misc_RNA (1)...(19): siRNA sense strand
ugacaagccugguggagaa

SEQ ID NO: 1766274 - RNA, 19 nt, Homo sapiens
  misc_RNA (1)...(19): siRNA sense strand
gcaaaggcaugagaacgaa

SEQ ID NO: 1766275 - RNA, 19 nt, Homo sapiens
  misc_RNA (1)...(19): siRNA sense strand
gaagauaaagugcgccauu

SEQ ID NO: 1766276 - RNA, 19 nt, Homo sapiens
  misc_RNA (1)...(19): siRNA sense strand
ccaaauauaagcuguugua

SEQ ID NO: 1766277 - RNA, 19 nt, Homo sapiens
  misc_RNA (1)...(19): siRNA sense strand
gacuagaaauggaacauga

SEQ ID NO: 1766278 - RNA, 19 nt, Homo sapiens
  misc_RNA (1)...(19): siRNA sense strand
gcaaaugucccggaugaaa

SEQ ID NO: 1766279 - RNA, 19 nt, Homo sapiens
  misc_RNA (1)...(19): siRNA sense strand
ccagaugacuugaaugcuu

SEQ ID NO: 1766280 - RNA, 19 nt, Homo sapiens
  misc_RNA (1)...(19): siRNA sense strand
gaacaauucagacacauca

SEQ ID NO: 1766281 - RNA, 19 nt, Homo sapiens
  misc_RNA (1)...(19): siRNA sense strand
caacaucuccucucucaau

SEQ ID NO: 1766282 - RNA, 19 nt, Homo sapiens
  misc_RNA (1)...(19): siRNA sense strand
agagagagaugcuggagaa

SEQ ID NO: 1766283 - RNA, 19 nt, Homo sapiens
  misc_RNA (1)...(19): siRNA sense strand
gaugagaaaugaauaugag

SEQ ID NO: 1766284 - RNA, 19 nt, Homo sapiens
  misc_RNA (1)...(19): siRNA sense strand
gaagagaaacugcaagaag

SEQ ID NO: 1766285 - RNA, 19 nt, Homo sapiens
  misc_RNA (1)...(19): siRNA sense strand
gcaguaugguuuacagaau

SEQ ID NO: 1766286 - RNA, 19 nt, Homo sapiens
  misc_RNA (1)...(19): siRNA sense strand
caucuaaacccaucaggua

SEQ ID NO: 1766287 - RNA, 19 nt, Homo sapiens
  misc_RNA (1)...(19): siRNA sense strand
ccugggagcugaagaauca

SEQ ID NO: 1766288 - RNA, 19 nt, Homo sapiens
  misc_RNA (1)...(19): siRNA sense strand
gagcagcuguuggaagaaa

SEQ ID NO: 1766289 - RNA, 19 nt, Homo sapiens
  misc_RNA (1)...(19): siRNA sense strand
gaaacgcacaccuuagaaa

SEQ ID NO: 1766290 - RNA, 19 nt, Homo sapiens
  misc_RNA (1)...(19): siRNA sense strand
gagaagcucaagucuuuaa

SEQ ID NO: 1766291 - RNA, 19 nt, Homo sapiens
  misc_RNA (1)...(19): siRNA sense strand
aaagaacaaucuccugcua

SEQ ID NO: 1766292 - RNA, 19 nt, Homo sapiens
  misc_RNA (1)...(19): siRNA sense strand
gaagauagcauuucuaacc

SEQ ID NO: 1766293 - RNA, 19 nt, Homo sapiens
  misc_RNA (1)...(19): siRNA sense strand
gaacacacagcucuuggaa

SEQ ID NO: 1766294 - RNA, 19 nt, Homo sapiens
  misc_RNA (1)...(19): siRNA sense strand
gcucagcccaaauauguua

SEQ ID NO: 1766295 - RNA, 19 nt, Homo sapiens
  misc_RNA (1)...(19): siRNA sense strand
gaacaggcagugaaggaaa

SEQ ID NO: 1766296 - RNA, 19 nt, Homo sapiens
  misc_RNA (1)...(19): siRNA sense strand
gcucaaggcuagacugaca

SEQ ID NO: 1766297 - RNA, 19 nt, Homo sapiens
  misc_RNA (1)...(19): siRNA sense strand
gaagacaccgugcagaaug

SEQ ID NO: 1766298 - RNA, 19 nt, Homo sapiens
  misc_RNA (1)...(19): siRNA sense strand
gcugguggcuucucaggaa

SEQ ID NO: 1766299 - RNA, 19 nt, Homo sapiens
  misc_RNA (1)...(19): siRNA sense strand
ugaaggcaaugaugcauga

SEQ ID NO: 1766300 - RNA, 19 nt, Homo sapiens
  misc_RNA (1)...(19): siRNA sense strand
uacaggagcugacuaggaa

SEQ ID NO: 1766301 - RNA, 19 nt, Homo sapiens
  misc_RNA (1)...(19): siRNA sense strand
aagauaaagugcgccauua

SEQ ID NO: 1766302 - RNA, 19 nt, Homo sapiens
  misc_RNA (1)...(19): siRNA sense strand
gaacuggaacguuguaaag

SEQ ID NO: 1766303 - RNA, 19 nt, Homo sapiens
  misc_RNA (1)...(19): siRNA sense strand
gcagugagaugcagcaaaa

SEQ ID NO: 1766304 - RNA, 19 nt, Homo sapiens
  misc_RNA (1)...(19): siRNA sense strand
ugaagaugcuugagagaau

SEQ ID NO: 1766305 - RNA, 19 nt, Homo sapiens
  misc_RNA (1)...(19): siRNA sense strand
ggaaagacuagaaauggaa

SEQ ID NO: 1766306 - RNA, 19 nt, Homo sapiens
  misc_RNA (1)...(19): siRNA sense strand
ccuaagaaauguaucugaa

SEQ ID NO: 1766307 - RNA, 19 nt, Homo sapiens
  misc_RNA (1)...(19): siRNA sense strand
gacagcagcuacuccaaga

SEQ ID NO: 1766308 - RNA, 19 nt, Homo sapiens
  misc_RNA (1)...(19): siRNA sense strand
cccaggagcugcugaaaga

SEQ ID NO: 1766309 - RNA, 19 nt, Homo sapiens
  misc_RNA (1)...(19): siRNA sense strand
ugaaggaccuccaggaaca

SEQ ID NO: 1766310 - RNA, 19 nt, Homo sapiens
  misc_RNA (1)...(19): siRNA sense strand
gcaagaaggcacaggagaa

SEQ ID NO: 1766311 - RNA, 19 nt, Homo sapiens
  misc_RNA (1)...(19): siRNA sense strand
caaugaguguagaagauuu

SEQ ID NO: 1766312 - RNA, 19 nt, Homo sapiens
  misc_RNA (1)...(19): siRNA sense strand
gaagaugugagccgagaaa

SEQ ID NO: 1766313 - RNA, 19 nt, Homo sapiens
  misc_RNA (1)...(19): siRNA sense strand
ggcaacaucuccucucuca

SEQ ID NO: 1766314 - RNA, 19 nt, Homo sapiens
  misc_RNA (1)...(19): siRNA sense strand
aagaaccucucaaauagaa

SEQ ID NO: 1766315 - RNA, 19 nt, Homo sapiens
  misc_RNA (1)...(19): siRNA sense strand
agaaagaggaguuaagaaa

SEQ ID NO: 1766316 - RNA, 19 nt, Homo sapiens
  misc_RNA (1)...(19): siRNA sense strand
gaaguauuccauaaucuug

SEQ ID NO: 1766317 - RNA, 19 nt, Homo sapiens
  misc_RNA (1)...(19): siRNA sense strand
gaacaagagaaguuuaauc

SEQ ID NO: 1766318 - RNA, 19 nt, Homo sapiens
  misc_RNA (1)...(19): siRNA sense strand
ggaaaacacuacucuccua

SEQ ID NO: 1766319 - RNA, 19 nt, Homo sapiens
  misc_RNA (1)...(19): siRNA sense strand
gaagaaccucucaaauaga

SEQ ID NO: 1766320 - RNA, 19 nt, Homo sapiens
  misc_RNA (1)...(19): siRNA sense strand
uagaagcucagcccaaaua

SEQ ID NO: 1766321 - RNA, 19 nt, Homo sapiens
  misc_RNA (1)...(19): siRNA sense strand
gaaggucagucagaugaau

SEQ ID NO: 1766322 - RNA, 19 nt, Homo sapiens
  misc_RNA (1)...(19): siRNA sense strand
caucagggcuccauaacca

SEQ ID NO: 1766323 - RNA, 19 nt, Homo sapiens
  misc_RNA (1)...(19): siRNA sense strand
gaacuucugagauaugaau

SEQ ID NO: 1766324 - RNA, 19 nt, Homo sapiens
  misc_RNA (1)...(19): siRNA sense strand
aaucgaaccugauggaaau

SEQ ID NO: 1766325 - RNA, 19 nt, Homo sapiens
  misc_RNA (1)...(19): siRNA sense strand
aaaguuagagccaggguua

SEQ ID NO: 1766326 - RNA, 19 nt, Homo sapiens
  misc_RNA (1)...(19): siRNA sense strand
gaaacacacucuugagaaa

SEQ ID NO: 1766327 - RNA, 19 nt, Homo sapiens
  misc_RNA (1)...(19): siRNA sense strand
gaaauugccugguuacaug

SEQ ID NO: 1766328 - RNA, 19 nt, Homo sapiens
  misc_RNA (1)...(19): siRNA sense strand
gaacgaaacgcacaccuua

SEQ ID NO: 1766329 - RNA, 19 nt, Homo sapiens
  misc_RNA (1)...(19): siRNA sense strand
caagagaaguuuaaucuga

SEQ ID NO: 1766330 - RNA, 19 nt, Homo sapiens
  misc_RNA (1)...(19): siRNA sense strand
ggacauauguugccucaga

SEQ ID NO: 1766331 - RNA, 19 nt, Homo sapiens
  misc_RNA (1)...(19): siRNA sense strand
gaaaauggcuacugaaauu

SEQ ID NO: 1766332 - RNA, 19 nt, Homo sapiens
  misc_RNA (1)...(19): siRNA sense strand
gaaacagaguguaauagaa

SEQ ID NO: 1766333 - RNA, 19 nt, Homo sapiens
  misc_RNA (1)...(19): siRNA sense strand
ggaagucacugaaacauuc

SEQ ID NO: 1766334 - RNA, 19 nt, Homo sapiens
  misc_RNA (1)...(19): siRNA sense strand
gcaagaaguuugugaagau

SEQ ID NO: 1766335 - RNA, 19 nt, Homo sapiens
  misc_RNA (1)...(19): siRNA sense strand
uuaaauagcugugucgaua

SEQ ID NO: 1766336 - RNA, 19 nt, Homo sapiens
  misc_RNA (1)...(19): siRNA sense strand
ggaagaagcuggucuccau

SEQ ID NO: 1766337 - RNA, 19 nt, Homo sapiens
  misc_RNA (1)...(19): siRNA sense strand
uaagugaccuggaagauga

SEQ ID NO: 1766338 - RNA, 19 nt, Homo sapiens
  misc_RNA (1)...(19): siRNA sense strand
gcagagagcucaugaacag

SEQ ID NO: 1766339 - RNA, 19 nt, Homo sapiens
  misc_RNA (1)...(19): siRNA sense strand
uagaagaaccucucaaaua

SEQ ID NO: 1766340 - RNA, 19 nt, Homo sapiens
  misc_RNA (1)...(19): siRNA sense strand
ccgagaagcucaagucuuu

SEQ ID NO: 1766341 - RNA, 19 nt, Homo sapiens
  misc_RNA (1)...(19): siRNA sense strand
gaagagagacugacacaga

SEQ ID NO: 1766342 - RNA, 19 nt, Homo sapiens
  misc_RNA (1)...(19): siRNA sense strand
gaagaacacuuucaagaac

SEQ ID NO: 1766343 - RNA, 19 nt, Homo sapiens
  misc_RNA (1)...(19): siRNA sense strand
gaugaaaucugaccuacga

SEQ ID NO: 1766344 - RNA, 19 nt, Homo sapiens
  misc_RNA (1)...(19): siRNA sense strand
ggaagaauaucgugcacaa

SEQ ID NO: 1766345 - RNA, 19 nt, Homo sapiens
  misc_RNA (1)...(19): siRNA sense strand
gaacccagaugacuugaau

SEQ ID NO: 1766346 - RNA, 19 nt, Homo sapiens
  misc_RNA (1)...(19): siRNA sense strand
gagagagugugaucaguuu

SEQ ID NO: 1766347 - RNA, 19 nt, Homo sapiens
  misc_RNA (1)...(19): siRNA sense strand
ugaaacagcugcacagaug

SEQ ID NO: 1766348 - RNA, 19 nt, Homo sapiens
  misc_RNA (1)...(19): siRNA sense strand
gacuggagcucgaagauaa

SEQ ID NO: 1766349 - RNA, 19 nt, Homo sapiens
  misc_RNA (1)...(19): siRNA sense strand
agucugagcuggaagaaua

SEQ ID NO: 1766350 - RNA, 19 nt, Homo sapiens
  misc_RNA (1)...(19): siRNA sense strand
cagaagaaguugaggcuaa

SEQ ID NO: 1766351 - RNA, 19 nt, Homo sapiens
  misc_RNA (1)...(19): siRNA sense strand
gaaccagacugcucacuag

SEQ ID NO: 1766352 - RNA, 19 nt, Homo sapiens
  misc_RNA (1)...(19): siRNA sense strand
gaacuuaaucaacgucuaa

SEQ ID NO: 1766353 - RNA, 19 nt, Homo sapiens
  misc_RNA (1)...(19): siRNA sense strand
agaagaaccucucaaauag

SEQ ID NO: 1766354 - RNA, 19 nt, Homo sapiens
  misc_RNA (1)...(19): siRNA sense strand
ggagcucucugaaguuaaa

SEQ ID NO: 1766355 - RNA, 19 nt, Homo sapiens
  misc_RNA (1)...(19): siRNA sense strand
ugacacagaugagaaauga

SEQ ID NO: 1766356 - RNA, 19 nt, Homo sapiens
  misc_RNA (1)...(19): siRNA sense strand
gaaacuggaugaagaguac

SEQ ID NO: 1766357 - RNA, 19 nt, Homo sapiens
  misc_RNA (1)...(19): siRNA sense strand
gcggagcucucugaaguua

SEQ ID NO: 1766358 - RNA, 19 nt, Homo sapiens
  misc_RNA (1)...(19): siRNA sense strand
gaaauauacuccagcucaa

SEQ ID NO: 1766359 - RNA, 19 nt, Homo sapiens
  misc_RNA (1)...(19): siRNA sense strand
uagaugaacuccagucuga

SEQ ID NO: 1766360 - RNA, 19 nt, Homo sapiens
  misc_RNA (1)...(19): siRNA sense strand
gaauguggauggagagaug

SEQ ID NO: 1766361 - RNA, 19 nt, Homo sapiens
  misc_RNA (1)...(19): siRNA sense strand
gcacagaaaucuccagacu

SEQ ID NO: 1766362 - RNA, 19 nt, Homo sapiens
  misc_RNA (1)...(19): siRNA sense strand
gaacucaccgucagaagaa

SEQ ID NO: 1766363 - RNA, 19 nt, Homo sapiens
  misc_RNA (1)...(19): siRNA sense strand
guucuaagcuacaacgaaa

SEQ ID NO: 1766364 - RNA, 19 nt, Homo sapiens
  misc_RNA (1)...(19): siRNA sense strand
gggagcagcuguuggaaga

SEQ ID NO: 1766365 - RNA, 19 nt, Homo sapiens
  misc_RNA (1)...(19): siRNA sense strand
gaagagaccaggacugaau

SEQ ID NO: 1766366 - RNA, 19 nt, Homo sapiens
  misc_RNA (1)...(19): siRNA sense strand
aggcagagcuggucauuga

SEQ ID NO: 1766367 - RNA, 19 nt, Homo sapiens
  misc_RNA (1)...(19): siRNA sense strand
ggaaaagguucagaauuua

SEQ ID NO: 1766368 - RNA, 19 nt, Homo sapiens
  misc_RNA (1)...(19): siRNA sense strand
acagaaaucuccagacuuc

SEQ ID NO: 1766369 - RNA, 19 nt, Homo sapiens
  misc_RNA (1)...(19): siRNA sense strand
gacagcagaucgagaaaga

SEQ ID NO: 1766370 - RNA, 19 nt, Homo sapiens
  misc_RNA (1)...(19): siRNA sense strand
ucaaauagaagcccaguuu

SEQ ID NO: 1766371 - RNA, 19 nt, Homo sapiens
  misc_RNA (1)...(19): siRNA sense strand
ggaaacagaguguaauaga

SEQ ID NO: 1766372 - RNA, 19 nt, Homo sapiens
  misc_RNA (1)...(19): siRNA sense strand
ucaggaaacuggaugaaga

SEQ ID NO: 1766373 - RNA, 19 nt, Homo sapiens
  misc_RNA (1)...(19): siRNA sense strand
ugacaagccugguggagaa

SEQ ID NO: 1766374 - RNA, 19 nt, Homo sapiens
  misc_RNA (1)...(19): siRNA sense strand
gcaaaggcaugagaacgaa

SEQ ID NO: 1766375 - RNA, 19 nt, Homo sapiens
  misc_RNA (1)...(19): siRNA sense strand
gaagauaaagugcgccauu

SEQ ID NO: 1766376 - RNA, 19 nt, Homo sapiens
  misc_RNA (1)...(19): siRNA sense strand
ccaaauauaagcuguugua

SEQ ID NO: 1766377 - RNA, 19 nt, Homo sapiens
  misc_RNA (1)...(19): siRNA sense strand
gacuagaaauggaacauga

SEQ ID NO: 1766378 - RNA, 19 nt, Homo sapiens
  misc_RNA (1)...(19): siRNA sense strand
gcaaaugucccggaugaaa

SEQ ID NO: 1766379 - RNA, 19 nt, Homo sapiens
  misc_RNA (1)...(19): siRNA sense strand
ccagaugacuugaaugcuu

SEQ ID NO: 1766380 - RNA, 19 nt, Homo sapiens
  misc_RNA (1)...(19): siRNA sense strand
gaacaauucagacacauca

SEQ ID NO: 1766381 - RNA, 19 nt, Homo sapiens
  misc_RNA (1)...(19): siRNA sense strand
caacaucuccucucucaau

SEQ ID NO: 1766382 - RNA, 19 nt, Homo sapiens
  misc_RNA (1)...(19): siRNA sense strand
agagagagaugcuggagaa

SEQ ID NO: 1766383 - RNA, 19 nt, Homo sapiens
  misc_RNA (1)...(19): siRNA sense strand
gaugagaaaugaauaugag

SEQ ID NO: 1766384 - RNA, 19 nt, Homo sapiens
  misc_RNA (1)...(19): siRNA sense strand
gaagagaaacugcaagaag

SEQ ID NO: 1766385 - RNA, 19 nt, Homo sapiens
  misc_RNA (1)...(19): siRNA sense strand
gcaguaugguuuacagaau

SEQ ID NO: 1766386 - RNA, 19 nt, Homo sapiens
  misc_RNA (1)...(19): siRNA sense strand
caucuaaacccaucaggua

SEQ ID NO: 1766387 - RNA, 19 nt, Homo sapiens
  misc_RNA (1)...(19): siRNA sense strand
ccugggagcugaagaauca

SEQ ID NO: 1766388 - RNA, 19 nt, Homo sapiens
  misc_RNA (1)...(19): siRNA sense strand
gagcagcuguuggaagaaa

SEQ ID NO: 1766389 - RNA, 19 nt, Homo sapiens
  misc_RNA (1)...(19): siRNA sense strand
gaaacgcacaccuuagaaa

SEQ ID NO: 1766390 - RNA, 19 nt, Homo sapiens
  misc_RNA (1)...(19): siRNA sense strand
gagaagcucaagucuuuaa

SEQ ID NO: 1766391 - RNA, 19 nt, Homo sapiens
  misc_RNA (1)...(19): siRNA sense strand
aaagaacaaucuccugcua

SEQ ID NO: 1766392 - RNA, 19 nt, Homo sapiens
  misc_RNA (1)...(19): siRNA sense strand
gaagauagcauuucuaacc

SEQ ID NO: 1766393 - RNA, 19 nt, Homo sapiens
  misc_RNA (1)...(19): siRNA sense strand
gaacacacagcucuuggaa

SEQ ID NO: 1766394 - RNA, 19 nt, Homo sapiens
  misc_RNA (1)...(19): siRNA sense strand
gcucagcccaaauauguua

SEQ ID NO: 1766395 - RNA, 19 nt, Homo sapiens
  misc_RNA (1)...(19): siRNA sense strand
gaacaggcagugaaggaaa

SEQ ID NO: 1766396 - RNA, 19 nt, Homo sapiens
  misc_RNA (1)...(19): siRNA sense strand
gcucaaggcuagacugaca

SEQ ID NO: 1766397 - RNA, 19 nt, Homo sapiens
  misc_RNA (1)...(19): siRNA sense strand
gaagacaccgugcagaaug

SEQ ID NO: 1766398 - RNA, 19 nt, Homo sapiens
  misc_RNA (1)...(19): siRNA sense strand
gcugguggcuucucaggaa

SEQ ID NO: 1766399 - RNA, 19 nt, Homo sapiens
  misc_RNA (1)...(19): siRNA sense strand
ugaaggcaaugaugcauga

SEQ ID NO: 1766400 - RNA, 19 nt, Homo sapiens
  misc_RNA (1)...(19): siRNA sense strand
uacaggagcugacuaggaa

SEQ ID NO: 1766401 - RNA, 19 nt, Homo sapiens
  misc_RNA (1)...(19): siRNA sense strand
aagauaaagugcgccauua

SEQ ID NO: 1766402 - RNA, 19 nt, Homo sapiens
  misc_RNA (1)...(19): siRNA sense strand
gaacuggaacguuguaaag

SEQ ID NO: 1766403 - RNA, 19 nt, Homo sapiens
  misc_RNA (1)...(19): siRNA sense strand
gcagugagaugcagcaaaa

SEQ ID NO: 1766404 - RNA, 19 nt, Homo sapiens
  misc_RNA (1)...(19): siRNA sense strand
ugaagaugcuugagagaau

SEQ ID NO: 1766405 - RNA, 19 nt, Homo sapiens
  misc_RNA (1)...(19): siRNA sense strand
ggaaagacuagaaauggaa

SEQ ID NO: 1766406 - RNA, 19 nt, Homo sapiens
  misc_RNA (1)...(19): siRNA sense strand
ccuaagaaauguaucugaa

SEQ ID NO: 1766407 - RNA, 19 nt, Homo sapiens
  misc_RNA (1)...(19): siRNA sense strand
gacagcagcuacuccaaga

SEQ ID NO: 1766408 - RNA, 19 nt, Homo sapiens
  misc_RNA (1)...(19): siRNA sense strand
cccaggagcugcugaaaga

SEQ ID NO: 1766409 - RNA, 19 nt, Homo sapiens
  misc_RNA (1)...(19): siRNA sense strand
ugaaggaccuccaggaaca

SEQ ID NO: 1766410 - RNA, 19 nt, Homo sapiens
  misc_RNA (1)...(19): siRNA sense strand
gcaagaaggcacaggagaa

SEQ ID NO: 1766411 - RNA, 19 nt, Homo sapiens
  misc_RNA (1)...(19): siRNA sense strand
caaugaguguagaagauuu

SEQ ID NO: 1766412 - RNA, 19 nt, Homo sapiens
  misc_RNA (1)...(19): siRNA sense strand
gaagaugugagccgagaaa

SEQ ID NO: 1766413 - RNA, 19 nt, Homo sapiens
  misc_RNA (1)...(19): siRNA sense strand
ggcaacaucuccucucuca

SEQ ID NO: 1766414 - RNA, 19 nt, Homo sapiens
  misc_RNA (1)...(19): siRNA sense strand
aagaaccucucaaauagaa

SEQ ID NO: 1766415 - RNA, 19 nt, Homo sapiens
  misc_RNA (1)...(19): siRNA sense strand
agaaagaggaguuaagaaa

SEQ ID NO: 1766416 - RNA, 19 nt, Homo sapiens
  misc_RNA (1)...(19): siRNA sense strand
gaaguauuccauaaucuug

SEQ ID NO: 1766417 - RNA, 19 nt, Homo sapiens
  misc_RNA (1)...(19): siRNA sense strand
gaacaagagaaguuuaauc

SEQ ID NO: 1766418 - RNA, 19 nt, Homo sapiens
  misc_RNA (1)...(19): siRNA sense strand
ggaaaacacuacucuccua

SEQ ID NO: 1766419 - RNA, 19 nt, Homo sapiens
  misc_RNA (1)...(19): siRNA sense strand
gaagaaccucucaaauaga

SEQ ID NO: 1766420 - RNA, 19 nt, Homo sapiens
  misc_RNA (1)...(19): siRNA sense strand
uagaagcucagcccaaaua

SEQ ID NO: 1766421 - RNA, 19 nt, Homo sapiens
  misc_RNA (1)...(19): siRNA sense strand
gaaggucagucagaugaau

SEQ ID NO: 1766422 - RNA, 19 nt, Homo sapiens
  misc_RNA (1)...(19): siRNA sense strand
caucagggcuccauaacca

SEQ ID NO: 1766423 - RNA, 19 nt, Homo sapiens
  misc_RNA (1)...(19): siRNA sense strand
gaacuucugagauaugaau

SEQ ID NO: 1766424 - RNA, 19 nt, Homo sapiens
  misc_RNA (1)...(19): siRNA sense strand
aaucgaaccugauggaaau

SEQ ID NO: 1766425 - RNA, 19 nt, Homo sapiens
  misc_RNA (1)...(19): siRNA sense strand
aaaguuagagccaggguua

SEQ ID NO: 1766426 - RNA, 19 nt, Homo sapiens
  misc_RNA (1)...(19): siRNA sense strand
gaaacacacucuugagaaa

SEQ ID NO: 1766427 - RNA, 19 nt, Homo sapiens
  misc_RNA (1)...(19): siRNA sense strand
gaaauugccugguuacaug

SEQ ID NO: 1766428 - RNA, 19 nt, Homo sapiens
  misc_RNA (1)...(19): siRNA sense strand
gaacgaaacgcacaccuua

SEQ ID NO: 1766429 - RNA, 19 nt, Homo sapiens
  misc_RNA (1)...(19): siRNA sense strand
caagagaaguuuaaucuga

SEQ ID NO: 1766430 - RNA, 19 nt, Homo sapiens
  misc_RNA (1)...(19): siRNA sense strand
ggacauauguugccucaga

SEQ ID NO: 1766431 - RNA, 19 nt, Homo sapiens
  misc_RNA (1)...(19): siRNA sense strand
gaaaauggcuacugaaauu

SEQ ID NO: 1766432 - RNA, 19 nt, Homo sapiens
  misc_RNA (1)...(19): siRNA sense strand
gaaacagaguguaauagaa

SEQ ID NO: 1766433 - RNA, 19 nt, Homo sapiens
  misc_RNA (1)...(19): siRNA sense strand
ggaagucacugaaacauuc

SEQ ID NO: 1766434 - RNA, 19 nt, Homo sapiens
  misc_RNA (1)...(19): siRNA sense strand
gcaagaaguuugugaagau

SEQ ID NO: 1766435 - RNA, 19 nt, Homo sapiens
  misc_RNA (1)...(19): siRNA sense strand
uuaaauagcugugucgaua

SEQ ID NO: 1766436 - RNA, 19 nt, Homo sapiens
  misc_RNA (1)...(19): siRNA sense strand
ggaagaagcuggucuccau

SEQ ID NO: 1766437 - RNA, 19 nt, Homo sapiens
  misc_RNA (1)...(19): siRNA sense strand
uaagugaccuggaagauga

SEQ ID NO: 1766438 - RNA, 19 nt, Homo sapiens
  misc_RNA (1)...(19): siRNA sense strand
gcagagagcucaugaacag

SEQ ID NO: 1766439 - RNA, 19 nt, Homo sapiens
  misc_RNA (1)...(19): siRNA sense strand
uagaagaaccucucaaaua

SEQ ID NO: 1766440 - RNA, 19 nt, Homo sapiens
  misc_RNA (1)...(19): siRNA sense strand
ccgagaagcucaagucuuu

SEQ ID NO: 1766441 - RNA, 19 nt, Homo sapiens
  misc_RNA (1)...(19): siRNA sense strand
gaagagagacugacacaga

SEQ ID NO: 1766442 - RNA, 19 nt, Homo sapiens
  misc_RNA (1)...(19): siRNA sense strand
gaagaacacuuucaagaac

SEQ ID NO: 1766443 - RNA, 19 nt, Homo sapiens
  misc_RNA (1)...(19): siRNA sense strand
gaugaaaucugaccuacga

SEQ ID NO: 1766444 - RNA, 19 nt, Homo sapiens
  misc_RNA (1)...(19): siRNA sense strand
ggaagaauaucgugcacaa

SEQ ID NO: 1766445 - RNA, 19 nt, Homo sapiens
  misc_RNA (1)...(19): siRNA sense strand
gaacccagaugacuugaau

SEQ ID NO: 1766446 - RNA, 19 nt, Homo sapiens
  misc_RNA (1)...(19): siRNA sense strand
gagagagugugaucaguuu

SEQ ID NO: 1766447 - RNA, 19 nt, Homo sapiens
  misc_RNA (1)...(19): siRNA sense strand
ugaaacagcugcacagaug

SEQ ID NO: 1766448 - RNA, 19 nt, Homo sapiens
  misc_RNA (1)...(19): siRNA sense strand
gacuggagcucgaagauaa

SEQ ID NO: 1766449 - RNA, 19 nt, Homo sapiens
  misc_RNA (1)...(19): siRNA sense strand
agucugagcuggaagaaua

SEQ ID NO: 1766450 - RNA, 19 nt, Homo sapiens
  misc_RNA (1)...(19): siRNA sense strand
cagaagaaguugaggcuaa

SEQ ID NO: 1766451 - RNA, 19 nt, Homo sapiens
  misc_RNA (1)...(19): siRNA sense strand
gaaccagacugcucacuag

SEQ ID NO: 1766452 - RNA, 19 nt, Homo sapiens
  misc_RNA (1)...(19): siRNA sense strand
gaacuuaaucaacgucuaa

SEQ ID NO: 1766453 - RNA, 19 nt, Homo sapiens
  misc_RNA (1)...(19): siRNA sense strand
agaagaaccucucaaauag

SEQ ID NO: 1766454 - RNA, 19 nt, Homo sapiens
  misc_RNA (1)...(19): siRNA sense strand
ggagcucucugaaguuaaa

SEQ ID NO: 1766455 - RNA, 19 nt, Homo sapiens
  misc_RNA (1)...(19): siRNA sense strand
ugacacagaugagaaauga

SEQ ID NO: 1766456 - RNA, 19 nt, Homo sapiens
  misc_RNA (1)...(19): siRNA sense strand
gaaacuggaugaagaguac

SEQ ID NO: 1766457 - RNA, 19 nt, Homo sapiens
  misc_RNA (1)...(19): siRNA sense strand
gcggagcucucugaaguua

SEQ ID NO: 1766458 - RNA, 19 nt, Homo sapiens
  misc_RNA (1)...(19): siRNA sense strand
gaaauauacuccagcucaa

SEQ ID NO: 1766459 - RNA, 19 nt, Homo sapiens
  misc_RNA (1)...(19): siRNA sense strand
uagaugaacuccagucuga

SEQ ID NO: 1766460 - RNA, 19 nt, Homo sapiens
  misc_RNA (1)...(19): siRNA sense strand
gaauguggauggagagaug

SEQ ID NO: 1766461 - RNA, 19 nt, Homo sapiens
  misc_RNA (1)...(19): siRNA sense strand
gcacagaaaucuccagacu

SEQ ID NO: 1766462 - RNA, 19 nt, Homo sapiens
  misc_RNA (1)...(19): siRNA sense strand
gaacucaccgucagaagaa

SEQ ID NO: 1766463 - RNA, 19 nt, Homo sapiens
  misc_RNA (1)...(19): siRNA sense strand
guucuaagcuacaacgaaa

SEQ ID NO: 1766464 - RNA, 19 nt, Homo sapiens
  misc_RNA (1)...(19): siRNA sense strand
gggagcagcuguuggaaga

SEQ ID NO: 1766465 - RNA, 19 nt, Homo sapiens
  misc_RNA (1)...(19): siRNA sense strand
gaagagaccaggacugaau

SEQ ID NO: 1766466 - RNA, 19 nt, Homo sapiens
  misc_RNA (1)...(19): siRNA sense strand
aggcagagcuggucauuga

SEQ ID NO: 1766467 - RNA, 19 nt, Homo sapiens
  misc_RNA (1)...(19): siRNA sense strand
ggaaaagguucagaauuua

SEQ ID NO: 1766468 - RNA, 19 nt, Homo sapiens
  misc_RNA (1)...(19): siRNA sense strand
acagaaaucuccagacuuc

SEQ ID NO: 1766469 - RNA, 19 nt, Homo sapiens
  misc_RNA (1)...(19): siRNA sense strand
gacagcagaucgagaaaga

SEQ ID NO: 1766470 - RNA, 19 nt, Homo sapiens
  misc_RNA (1)...(19): siRNA sense strand
ucaaauagaagcccaguuu

SEQ ID NO: 1766471 - RNA, 19 nt, Homo sapiens
  misc_RNA (1)...(19): siRNA sense strand
ggaaacagaguguaauaga

SEQ ID NO: 1766472 - RNA, 19 nt, Homo sapiens
  misc_RNA (1)...(19): siRNA sense strand
ucaggaaacuggaugaaga

SEQ ID NO: 1766473 - RNA, 19 nt, Homo sapiens
  misc_RNA (1)...(19): siRNA sense strand
ugacaagccugguggagaa

SEQ ID NO: 1766474 - RNA, 19 nt, Homo sapiens
  misc_RNA (1)...(19): siRNA sense strand
gcaaaggcaugagaacgaa

SEQ ID NO: 1766475 - RNA, 19 nt, Homo sapiens
  misc_RNA (1)...(19): siRNA sense strand
gaagauaaagugcgccauu

SEQ ID NO: 1766476 - RNA, 19 nt, Homo sapiens
  misc_RNA (1)...(19): siRNA sense strand
ccaaauauaagcuguugua

SEQ ID NO: 1766477 - RNA, 19 nt, Homo sapiens
  misc_RNA (1)...(19): siRNA sense strand
gacuagaaauggaacauga

SEQ ID NO: 1766478 - RNA, 19 nt, Homo sapiens
  misc_RNA (1)...(19): siRNA sense strand
gcaaaugucccggaugaaa

SEQ ID NO: 1766479 - RNA, 19 nt, Homo sapiens
  misc_RNA (1)...(19): siRNA sense strand
ccagaugacuugaaugcuu

SEQ ID NO: 1766480 - RNA, 19 nt, Homo sapiens
  misc_RNA (1)...(19): siRNA sense strand
gaacaauucagacacauca

SEQ ID NO: 1766481 - RNA, 19 nt, Homo sapiens
  misc_RNA (1)...(19): siRNA sense strand
caacaucuccucucucaau

SEQ ID NO: 1766482 - RNA, 19 nt, Homo sapiens
  misc_RNA (1)...(19): siRNA sense strand
agagagagaugcuggagaa

SEQ ID NO: 1766483 - RNA, 19 nt, Homo sapiens
  misc_RNA (1)...(19): siRNA sense strand
gaugagaaaugaauaugag

SEQ ID NO: 1766484 - RNA, 19 nt, Homo sapiens
  misc_RNA (1)...(19): siRNA sense strand
gaagagaaacugcaagaag

SEQ ID NO: 1766485 - RNA, 19 nt, Homo sapiens
  misc_RNA (1)...(19): siRNA sense strand
gcaguaugguuuacagaau

SEQ ID NO: 1766486 - RNA, 19 nt, Homo sapiens
  misc_RNA (1)...(19): siRNA sense strand
caucuaaacccaucaggua

SEQ ID NO: 1766487 - RNA, 19 nt, Homo sapiens
  misc_RNA (1)...(19): siRNA sense strand
ccugggagcugaagaauca

SEQ ID NO: 1766488 - RNA, 19 nt, Homo sapiens
  misc_RNA (1)...(19): siRNA sense strand
gagcagcuguuggaagaaa

SEQ ID NO: 1766489 - RNA, 19 nt, Homo sapiens
  misc_RNA (1)...(19): siRNA sense strand
gaaacgcacaccuuagaaa

SEQ ID NO: 1766490 - RNA, 19 nt, Homo sapiens
  misc_RNA (1)...(19): siRNA sense strand
gagaagcucaagucuuuaa

SEQ ID NO: 1766491 - RNA, 19 nt, Homo sapiens
  misc_RNA (1)...(19): siRNA sense strand
aaagaacaaucuccugcua

SEQ ID NO: 1766492 - RNA, 19 nt, Homo sapiens
  misc_RNA (1)...(19): siRNA sense strand
gaagauagcauuucuaacc

SEQ ID NO: 1766493 - RNA, 19 nt, Homo sapiens
  misc_RNA (1)...(19): siRNA sense strand
gaacacacagcucuuggaa

SEQ ID NO: 1766494 - RNA, 19 nt, Homo sapiens
  misc_RNA (1)...(19): siRNA sense strand
gcucagcccaaauauguua

SEQ ID NO: 1766495 - RNA, 19 nt, Homo sapiens
  misc_RNA (1)...(19): siRNA sense strand
gaacaggcagugaaggaaa

SEQ ID NO: 1766496 - RNA, 19 nt, Homo sapiens
  misc_RNA (1)...(19): siRNA sense strand
gcucaaggcuagacugaca

SEQ ID NO: 1766497 - RNA, 19 nt, Homo sapiens
  misc_RNA (1)...(19): siRNA sense strand
gaagacaccgugcagaaug

SEQ ID NO: 1766498 - RNA, 19 nt, Homo sapiens
  misc_RNA (1)...(19): siRNA sense strand
gcugguggcuucucaggaa

SEQ ID NO: 1766499 - RNA, 19 nt, Homo sapiens
  misc_RNA (1)...(19): siRNA sense strand
ugaaggcaaugaugcauga

SEQ ID NO: 1766500 - RNA, 19 nt, Homo sapiens
  misc_RNA (1)...(19): siRNA sense strand
uacaggagcugacuaggaa

SEQ ID NO: 1766501 - RNA, 19 nt, Homo sapiens
  misc_RNA (1)...(19): siRNA sense strand
aagauaaagugcgccauua

SEQ ID NO: 1766502 - RNA, 19 nt, Homo sapiens
  misc_RNA (1)...(19): siRNA sense strand
gaacuggaacguuguaaag

SEQ ID NO: 1766503 - RNA, 19 nt, Homo sapiens
  misc_RNA (1)...(19): siRNA sense strand
gcagugagaugcagcaaaa

SEQ ID NO: 1766504 - RNA, 19 nt, Homo sapiens
  misc_RNA (1)...(19): siRNA sense strand
ugaagaugcuugagagaau

SEQ ID NO: 1766505 - RNA, 19 nt, Homo sapiens
  misc_RNA (1)...(19): siRNA sense strand
ggaaagacuagaaauggaa

SEQ ID NO: 1766506 - RNA, 19 nt, Homo sapiens
  misc_RNA (1)...(19): siRNA sense strand
ccuaagaaauguaucugaa

SEQ ID NO: 1766507 - RNA, 19 nt, Homo sapiens
  misc_RNA (1)...(19): siRNA sense strand
gacagcagcuacuccaaga

SEQ ID NO: 1766508 - RNA, 19 nt, Homo sapiens
  misc_RNA (1)...(19): siRNA sense strand
cccaggagcugcugaaaga

SEQ ID NO: 1766509 - RNA, 19 nt, Homo sapiens
  misc_RNA (1)...(19): siRNA sense strand
ugaaggaccuccaggaaca

SEQ ID NO: 1766510 - RNA, 19 nt, Homo sapiens
  misc_RNA (1)...(19): siRNA sense strand
gcaagaaggcacaggagaa

SEQ ID NO: 1766511 - RNA, 19 nt, Homo sapiens
  misc_RNA (1)...(19): siRNA sense strand
caaugaguguagaagauuu

SEQ ID NO: 1766512 - RNA, 19 nt, Homo sapiens
  misc_RNA (1)...(19): siRNA sense strand
gaagaugugagccgagaaa

SEQ ID NO: 1766513 - RNA, 19 nt, Homo sapiens
  misc_RNA (1)...(19): siRNA sense strand
ggcaacaucuccucucuca

SEQ ID NO: 1766514 - RNA, 19 nt, Homo sapiens
  misc_RNA (1)...(19): siRNA sense strand
aagaaccucucaaauagaa

SEQ ID NO: 1766515 - RNA, 19 nt, Homo sapiens
  misc_RNA (1)...(19): siRNA sense strand
agaaagaggaguuaagaaa

SEQ ID NO: 1766516 - RNA, 19 nt, Homo sapiens
  misc_RNA (1)...(19): siRNA sense strand
gaaguauuccauaaucuug

SEQ ID NO: 1766517 - RNA, 19 nt, Homo sapiens
  misc_RNA (1)...(19): siRNA sense strand
gaacaagagaaguuuaauc

SEQ ID NO: 1766518 - RNA, 19 nt, Homo sapiens
  misc_RNA (1)...(19): siRNA sense strand
ggaaaacacuacucuccua

SEQ ID NO: 1766519 - RNA, 19 nt, Homo sapiens
  misc_RNA (1)...(19): siRNA sense strand
gaagaaccucucaaauaga

SEQ ID NO: 1766520 - RNA, 19 nt, Homo sapiens
  misc_RNA (1)...(19): siRNA sense strand
uagaagcucagcccaaaua

SEQ ID NO: 1766521 - RNA, 19 nt, Homo sapiens
  misc_RNA (1)...(19): siRNA sense strand
gaaggucagucagaugaau

SEQ ID NO: 1766522 - RNA, 19 nt, Homo sapiens
  misc_RNA (1)...(19): siRNA sense strand
caucagggcuccauaacca

SEQ ID NO: 1766523 - RNA, 19 nt, Homo sapiens
  misc_RNA (1)...(19): siRNA sense strand
gaacuucugagauaugaau

SEQ ID NO: 1766524 - RNA, 19 nt, Homo sapiens
  misc_RNA (1)...(19): siRNA sense strand
aaucgaaccugauggaaau

SEQ ID NO: 1766525 - RNA, 19 nt, Homo sapiens
  misc_RNA (1)...(19): siRNA sense strand
aaaguuagagccaggguua

SEQ ID NO: 1766526 - RNA, 19 nt, Homo sapiens
  misc_RNA (1)...(19): siRNA sense strand
gaaacacacucuugagaaa

SEQ ID NO: 1766527 - RNA, 19 nt, Homo sapiens
  misc_RNA (1)...(19): siRNA sense strand
gaaauugccugguuacaug

SEQ ID NO: 1766528 - RNA, 19 nt, Homo sapiens
  misc_RNA (1)...(19): siRNA sense strand
gaacgaaacgcacaccuua

SEQ ID NO: 1766529 - RNA, 19 nt, Homo sapiens
  misc_RNA (1)...(19): siRNA sense strand
caagagaaguuuaaucuga

SEQ ID NO: 1766530 - RNA, 19 nt, Homo sapiens
  misc_RNA (1)...(19): siRNA sense strand
ggacauauguugccucaga

SEQ ID NO: 1766531 - RNA, 19 nt, Homo sapiens
  misc_RNA (1)...(19): siRNA sense strand
gaaaauggcuacugaaauu

SEQ ID NO: 1766532 - RNA, 19 nt, Homo sapiens
  misc_RNA (1)...(19): siRNA sense strand
gaaacagaguguaauagaa

SEQ ID NO: 1766533 - RNA, 19 nt, Homo sapiens
  misc_RNA (1)...(19): siRNA sense strand
ggaagucacugaaacauuc

SEQ ID NO: 1766534 - RNA, 19 nt, Homo sapiens
  misc_RNA (1)...(19): siRNA sense strand
gcaagaaguuugugaagau

SEQ ID NO: 1766535 - RNA, 19 nt, Homo sapiens
  misc_RNA (1)...(19): siRNA sense strand
uuaaauagcugugucgaua

SEQ ID NO: 1766536 - RNA, 19 nt, Homo sapiens
  misc_RNA (1)...(19): siRNA sense strand
ggaagaagcuggucuccau

SEQ ID NO: 1766537 - RNA, 19 nt, Homo sapiens
  misc_RNA (1)...(19): siRNA sense strand
uaagugaccuggaagauga

SEQ ID NO: 1766538 - RNA, 19 nt, Homo sapiens
  misc_RNA (1)...(19): siRNA sense strand
gcagagagcucaugaacag

SEQ ID NO: 1766539 - RNA, 19 nt, Homo sapiens
  misc_RNA (1)...(19): siRNA sense strand
uagaagaaccucucaaaua

SEQ ID NO: 1766540 - RNA, 19 nt, Homo sapiens
  misc_RNA (1)...(19): siRNA sense strand
ccgagaagcucaagucuuu

SEQ ID NO: 1766541 - RNA, 19 nt, Homo sapiens
  misc_RNA (1)...(19): siRNA sense strand
gaagagagacugacacaga

SEQ ID NO: 1766542 - RNA, 19 nt, Homo sapiens
  misc_RNA (1)...(19): siRNA sense strand
gaagaacacuuucaagaac

SEQ ID NO: 1766543 - RNA, 19 nt, Homo sapiens
  misc_RNA (1)...(19): siRNA sense strand
gaugaaaucugaccuacga

SEQ ID NO: 1766544 - RNA, 19 nt, Homo sapiens
  misc_RNA (1)...(19): siRNA sense strand
ggaagaauaucgugcacaa

SEQ ID NO: 1766545 - RNA, 19 nt, Homo sapiens
  misc_RNA (1)...(19): siRNA sense strand
gaacccagaugacuugaau

SEQ ID NO: 1766546 - RNA, 19 nt, Homo sapiens
  misc_RNA (1)...(19): siRNA sense strand
gagagagugugaucaguuu

SEQ ID NO: 1766547 - RNA, 19 nt, Homo sapiens
  misc_RNA (1)...(19): siRNA sense strand
ugaaacagcugcacagaug

SEQ ID NO: 1766548 - RNA, 19 nt, Homo sapiens
  misc_RNA (1)...(19): siRNA sense strand
gacuggagcucgaagauaa

SEQ ID NO: 1766549 - RNA, 19 nt, Homo sapiens
  misc_RNA (1)...(19): siRNA sense strand
agucugagcuggaagaaua

SEQ ID NO: 1766550 - RNA, 19 nt, Homo sapiens
  misc_RNA (1)...(19): siRNA sense strand
cagaagaaguugaggcuaa

SEQ ID NO: 1766551 - RNA, 19 nt, Homo sapiens
  misc_RNA (1)...(19): siRNA sense strand
gaaccagacugcucacuag

SEQ ID NO: 1766552 - RNA, 19 nt, Homo sapiens
  misc_RNA (1)...(19): siRNA sense strand
gaacuuaaucaacgucuaa

SEQ ID NO: 1766553 - RNA, 19 nt, Homo sapiens
  misc_RNA (1)...(19): siRNA sense strand
agaagaaccucucaaauag

SEQ ID NO: 1766554 - RNA, 19 nt, Homo sapiens
  misc_RNA (1)...(19): siRNA sense strand
ggagcucucugaaguuaaa

SEQ ID NO: 1766555 - RNA, 19 nt, Homo sapiens
  misc_RNA (1)...(19): siRNA sense strand
ugacacagaugagaaauga

SEQ ID NO: 1766556 - RNA, 19 nt, Homo sapiens
  misc_RNA (1)...(19): siRNA sense strand
gaaacuggaugaagaguac

SEQ ID NO: 1766557 - RNA, 19 nt, Homo sapiens
  misc_RNA (1)...(19): siRNA sense strand
gcggagcucucugaaguua

SEQ ID NO: 1766558 - RNA, 19 nt, Homo sapiens
  misc_RNA (1)...(19): siRNA sense strand
gaaauauacuccagcucaa

SEQ ID NO: 1766559 - RNA, 19 nt, Homo sapiens
  misc_RNA (1)...(19): siRNA sense strand
uagaugaacuccagucuga

SEQ ID NO: 1766560 - RNA, 19 nt, Homo sapiens
  misc_RNA (1)...(19): siRNA sense strand
gaauguggauggagagaug

SEQ ID NO: 1766561 - RNA, 19 nt, Homo sapiens
  misc_RNA (1)...(19): siRNA sense strand
gcacagaaaucuccagacu

SEQ ID NO: 1766562 - RNA, 19 nt, Homo sapiens
  misc_RNA (1)...(19): siRNA sense strand
gaacucaccgucagaagaa

SEQ ID NO: 1766563 - RNA, 19 nt, Homo sapiens
  misc_RNA (1)...(19): siRNA sense strand
guucuaagcuacaacgaaa

SEQ ID NO: 1766564 - RNA, 19 nt, Homo sapiens
  misc_RNA (1)...(19): siRNA sense strand
gggagcagcuguuggaaga

SEQ ID NO: 1766565 - RNA, 19 nt, Homo sapiens
  misc_RNA (1)...(19): siRNA sense strand
gaagagaccaggacugaau

SEQ ID NO: 1766566 - RNA, 19 nt, Homo sapiens
  misc_RNA (1)...(19): siRNA sense strand
aggcagagcuggucauuga

SEQ ID NO: 1766567 - RNA, 19 nt, Homo sapiens
  misc_RNA (1)...(19): siRNA sense strand
ggaaaagguucagaauuua

SEQ ID NO: 1766568 - RNA, 19 nt, Homo sapiens
  misc_RNA (1)...(19): siRNA sense strand
acagaaaucuccagacuuc

SEQ ID NO: 1766569 - RNA, 19 nt, Homo sapiens
  misc_RNA (1)...(19): siRNA sense strand
gacagcagaucgagaaaga

SEQ ID NO: 1766570 - RNA, 19 nt, Homo sapiens
  misc_RNA (1)...(19): siRNA sense strand
ucaaauagaagcccaguuu

SEQ ID NO: 1766571 - RNA, 19 nt, Homo sapiens
  misc_RNA (1)...(19): siRNA sense strand
ggaaacagaguguaauaga

SEQ ID NO: 1766572 - RNA, 19 nt, Homo sapiens
  misc_RNA (1)...(19): siRNA sense strand
ucaggaaacuggaugaaga

SEQ ID NO: 1766573 - RNA, 19 nt, Homo sapiens
  misc_RNA (1)...(19): siRNA sense strand
ugacaagccugguggagaa

SEQ ID NO: 1766574 - RNA, 19 nt, Homo sapiens
  misc_RNA (1)...(19): siRNA sense strand
gcaaaggcaugagaacgaa

SEQ ID NO: 1766575 - RNA, 19 nt, Homo sapiens
  misc_RNA (1)...(19): siRNA sense strand
gaagauaaagugcgccauu

SEQ ID NO: 1766576 - RNA, 19 nt, Homo sapiens
  misc_RNA (1)...(19): siRNA sense strand
ccaaauauaagcuguugua

SEQ ID NO: 1766577 - RNA, 19 nt, Homo sapiens
  misc_RNA (1)...(19): siRNA sense strand
gacuagaaauggaacauga

SEQ ID NO: 1766578 - RNA, 19 nt, Homo sapiens
  misc_RNA (1)...(19): siRNA sense strand
gcaaaugucccggaugaaa

SEQ ID NO: 1766579 - RNA, 19 nt, Homo sapiens
  misc_RNA (1)...(19): siRNA sense strand
ccagaugacuugaaugcuu

SEQ ID NO: 1766580 - RNA, 19 nt, Homo sapiens
  misc_RNA (1)...(19): siRNA sense strand
gaacaauucagacacauca

SEQ ID NO: 1766581 - RNA, 19 nt, Homo sapiens
  misc_RNA (1)...(19): siRNA sense strand
caacaucuccucucucaau

SEQ ID NO: 1766582 - RNA, 19 nt, Homo sapiens
  misc_RNA (1)...(19): siRNA sense strand
agagagagaugcuggagaa

SEQ ID NO: 1766583 - RNA, 19 nt, Homo sapiens
  misc_RNA (1)...(19): siRNA sense strand
gaugagaaaugaauaugag

SEQ ID NO: 1766584 - RNA, 19 nt, Homo sapiens
  misc_RNA (1)...(19): siRNA sense strand
gaagagaaacugcaagaag

SEQ ID NO: 1766585 - RNA, 19 nt, Homo sapiens
  misc_RNA (1)...(19): siRNA sense strand
gcaguaugguuuacagaau

SEQ ID NO: 1766586 - RNA, 19 nt, Homo sapiens
  misc_RNA (1)...(19): siRNA sense strand
caucuaaacccaucaggua

SEQ ID NO: 1766587 - RNA, 19 nt, Homo sapiens
  misc_RNA (1)...(19): siRNA sense strand
ccugggagcugaagaauca

SEQ ID NO: 1766588 - RNA, 19 nt, Homo sapiens
  misc_RNA (1)...(19): siRNA sense strand
gagcagcuguuggaagaaa

SEQ ID NO: 1766589 - RNA, 19 nt, Homo sapiens
  misc_RNA (1)...(19): siRNA sense strand
gaaacgcacaccuuagaaa

SEQ ID NO: 1766590 - RNA, 19 nt, Homo sapiens
  misc_RNA (1)...(19): siRNA sense strand
gagaagcucaagucuuuaa

SEQ ID NO: 1766591 - RNA, 19 nt, Homo sapiens
  misc_RNA (1)...(19): siRNA sense strand
aaagaacaaucuccugcua

SEQ ID NO: 1766592 - RNA, 19 nt, Homo sapiens
  misc_RNA (1)...(19): siRNA sense strand
gaagauagcauuucuaacc

SEQ ID NO: 1766593 - RNA, 19 nt, Homo sapiens
  misc_RNA (1)...(19): siRNA sense strand
gaacacacagcucuuggaa

SEQ ID NO: 1766594 - RNA, 19 nt, Homo sapiens
  misc_RNA (1)...(19): siRNA sense strand
gcucagcccaaauauguua

SEQ ID NO: 1766595 - RNA, 19 nt, Homo sapiens
  misc_RNA (1)...(19): siRNA sense strand
gaacaggcagugaaggaaa

SEQ ID NO: 1766596 - RNA, 19 nt, Homo sapiens
  misc_RNA (1)...(19): siRNA sense strand
gcucaaggcuagacugaca

SEQ ID NO: 1766597 - RNA, 19 nt, Homo sapiens
  misc_RNA (1)...(19): siRNA sense strand
gaagacaccgugcagaaug

SEQ ID NO: 1766598 - RNA, 19 nt, Homo sapiens
  misc_RNA (1)...(19): siRNA sense strand
gcugguggcuucucaggaa

SEQ ID NO: 1766599 - RNA, 19 nt, Homo sapiens
  misc_RNA (1)...(19): siRNA sense strand
ugaaggcaaugaugcauga

SEQ ID NO: 1766600 - RNA, 19 nt, Homo sapiens
  misc_RNA (1)...(19): siRNA sense strand
uacaggagcugacuaggaa

SEQ ID NO: 1766601 - RNA, 19 nt, Homo sapiens
  misc_RNA (1)...(19): siRNA sense strand
aagauaaagugcgccauua

SEQ ID NO: 1766602 - RNA, 19 nt, Homo sapiens
  misc_RNA (1)...(19): siRNA sense strand
gaacuggaacguuguaaag

SEQ ID NO: 1766603 - RNA, 19 nt, Homo sapiens
  misc_RNA (1)...(19): siRNA sense strand
gcagugagaugcagcaaaa

SEQ ID NO: 1766604 - RNA, 19 nt, Homo sapiens
  misc_RNA (1)...(19): siRNA sense strand
ugaagaugcuugagagaau

SEQ ID NO: 1766605 - RNA, 19 nt, Homo sapiens
  misc_RNA (1)...(19): siRNA sense strand
ggaaagacuagaaauggaa

SEQ ID NO: 1766606 - RNA, 19 nt, Homo sapiens
  misc_RNA (1)...(19): siRNA sense strand
ccuaagaaauguaucugaa

SEQ ID NO: 1766607 - RNA, 19 nt, Homo sapiens
  misc_RNA (1)...(19): siRNA sense strand
gacagcagcuacuccaaga

SEQ ID NO: 1766608 - RNA, 19 nt, Homo sapiens
  misc_RNA (1)...(19): siRNA sense strand
cccaggagcugcugaaaga

SEQ ID NO: 1766609 - RNA, 19 nt, Homo sapiens
  misc_RNA (1)...(19): siRNA sense strand
ugaaggaccuccaggaaca

SEQ ID NO: 1766610 - RNA, 19 nt, Homo sapiens
  misc_RNA (1)...(19): siRNA sense strand
gcaagaaggcacaggagaa

SEQ ID NO: 1766611 - RNA, 19 nt, Homo sapiens
  misc_RNA (1)...(19): siRNA sense strand
caaugaguguagaagauuu

SEQ ID NO: 1766612 - RNA, 19 nt, Homo sapiens
  misc_RNA (1)...(19): siRNA sense strand
gaagaugugagccgagaaa

SEQ ID NO: 1766613 - RNA, 19 nt, Homo sapiens
  misc_RNA (1)...(19): siRNA sense strand
ggcaacaucuccucucuca

SEQ ID NO: 1766614 - RNA, 19 nt, Homo sapiens
  misc_RNA (1)...(19): siRNA sense strand
aagaaccucucaaauagaa

SEQ ID NO: 1766615 - RNA, 19 nt, Homo sapiens
  misc_RNA (1)...(19): siRNA sense strand
agaaagaggaguuaagaaa

SEQ ID NO: 1766616 - RNA, 19 nt, Homo sapiens
  misc_RNA (1)...(19): siRNA sense strand
gaaguauuccauaaucuug

SEQ ID NO: 1766617 - RNA, 19 nt, Homo sapiens
  misc_RNA (1)...(19): siRNA sense strand
gaacaagagaaguuuaauc

SEQ ID NO: 1766618 - RNA, 19 nt, Homo sapiens
  misc_RNA (1)...(19): siRNA sense strand
ggaaaacacuacucuccua

SEQ ID NO: 1766619 - RNA, 19 nt, Homo sapiens
  misc_RNA (1)...(19): siRNA sense strand
gaagaaccucucaaauaga

SEQ ID NO: 1766620 - RNA, 19 nt, Homo sapiens
  misc_RNA (1)...(19): siRNA sense strand
uagaagcucagcccaaaua

SEQ ID NO: 1766621 - RNA, 19 nt, Homo sapiens
  misc_RNA (1)...(19): siRNA sense strand
gaaggucagucagaugaau

SEQ ID NO: 1766622 - RNA, 19 nt, Homo sapiens
  misc_RNA (1)...(19): siRNA sense strand
caucagggcuccauaacca

SEQ ID NO: 1766623 - RNA, 19 nt, Homo sapiens
  misc_RNA (1)...(19): siRNA sense strand
gaacuucugagauaugaau

SEQ ID NO: 1766624 - RNA, 19 nt, Homo sapiens
  misc_RNA (1)...(19): siRNA sense strand
aaucgaaccugauggaaau

SEQ ID NO: 1766625 - RNA, 19 nt, Homo sapiens
  misc_RNA (1)...(19): siRNA sense strand
aaaguuagagccaggguua

SEQ ID NO: 1766626 - RNA, 19 nt, Homo sapiens
  misc_RNA (1)...(19): siRNA sense strand
gaaacacacucuugagaaa

SEQ ID NO: 1766627 - RNA, 19 nt, Homo sapiens
  misc_RNA (1)...(19): siRNA sense strand
gaaauugccugguuacaug

SEQ ID NO: 1766628 - RNA, 19 nt, Homo sapiens
  misc_RNA (1)...(19): siRNA sense strand
gaacgaaacgcacaccuua

SEQ ID NO: 1766629 - RNA, 19 nt, Homo sapiens
  misc_RNA (1)...(19): siRNA sense strand
caagagaaguuuaaucuga

SEQ ID NO: 1766630 - RNA, 19 nt, Homo sapiens
  misc_RNA (1)...(19): siRNA sense strand
ggacauauguugccucaga

SEQ ID NO: 1766631 - RNA, 19 nt, Homo sapiens
  misc_RNA (1)...(19): siRNA sense strand
gaaaauggcuacugaaauu

SEQ ID NO: 1766632 - RNA, 19 nt, Homo sapiens
  misc_RNA (1)...(19): siRNA sense strand
gaaacagaguguaauagaa

SEQ ID NO: 1766633 - RNA, 19 nt, Homo sapiens
  misc_RNA (1)...(19): siRNA sense strand
ggaagucacugaaacauuc

SEQ ID NO: 1766634 - RNA, 19 nt, Homo sapiens
  misc_RNA (1)...(19): siRNA sense strand
gcaagaaguuugugaagau

SEQ ID NO: 1766635 - RNA, 19 nt, Homo sapiens
  misc_RNA (1)...(19): siRNA sense strand
uuaaauagcugugucgaua

SEQ ID NO: 1766636 - RNA, 19 nt, Homo sapiens
  misc_RNA (1)...(19): siRNA sense strand
ggaagaagcuggucuccau

SEQ ID NO: 1766637 - RNA, 19 nt, Homo sapiens
  misc_RNA (1)...(19): siRNA sense strand
uaagugaccuggaagauga

SEQ ID NO: 1766638 - RNA, 19 nt, Homo sapiens
  misc_RNA (1)...(19): siRNA sense strand
gcagagagcucaugaacag

SEQ ID NO: 1766639 - RNA, 19 nt, Homo sapiens
  misc_RNA (1)...(19): siRNA sense strand
uagaagaaccucucaaaua

SEQ ID NO: 1766640 - RNA, 19 nt, Homo sapiens
  misc_RNA (1)...(19): siRNA sense strand
ccgagaagcucaagucuuu

SEQ ID NO: 1766641 - RNA, 19 nt, Homo sapiens
  misc_RNA (1)...(19): siRNA sense strand
gaagagagacugacacaga

SEQ ID NO: 1766642 - RNA, 19 nt, Homo sapiens
  misc_RNA (1)...(19): siRNA sense strand
gaagaacacuuucaagaac

SEQ ID NO: 1766643 - RNA, 19 nt, Homo sapiens
  misc_RNA (1)...(19): siRNA sense strand
gaugaaaucugaccuacga

SEQ ID NO: 1766644 - RNA, 19 nt, Homo sapiens
  misc_RNA (1)...(19): siRNA sense strand
ggaagaauaucgugcacaa

SEQ ID NO: 1766645 - RNA, 19 nt, Homo sapiens
  misc_RNA (1)...(19): siRNA sense strand
gaacccagaugacuugaau

SEQ ID NO: 1766646 - RNA, 19 nt, Homo sapiens
  misc_RNA (1)...(19): siRNA sense strand
gagagagugugaucaguuu

SEQ ID NO: 1766647 - RNA, 19 nt, Homo sapiens
  misc_RNA (1)...(19): siRNA sense strand
ugaaacagcugcacagaug

SEQ ID NO: 1766648 - RNA, 19 nt, Homo sapiens
  misc_RNA (1)...(19): siRNA sense strand
gacuggagcucgaagauaa

SEQ ID NO: 1766649 - RNA, 19 nt, Homo sapiens
  misc_RNA (1)...(19): siRNA sense strand
agucugagcuggaagaaua

SEQ ID NO: 1766650 - RNA, 19 nt, Homo sapiens
  misc_RNA (1)...(19): siRNA sense strand
cagaagaaguugaggcuaa

SEQ ID NO: 1766651 - RNA, 19 nt, Homo sapiens
  misc_RNA (1)...(19): siRNA sense strand
gaaccagacugcucacuag

SEQ ID NO: 1766652 - RNA, 19 nt, Homo sapiens
  misc_RNA (1)...(19): siRNA sense strand
gaacuuaaucaacgucuaa

SEQ ID NO: 1766653 - RNA, 19 nt, Homo sapiens
  misc_RNA (1)...(19): siRNA sense strand
agaagaaccucucaaauag

SEQ ID NO: 1766654 - RNA, 19 nt, Homo sapiens
  misc_RNA (1)...(19): siRNA sense strand
ggagcucucugaaguuaaa

SEQ ID NO: 1766655 - RNA, 19 nt, Homo sapiens
  misc_RNA (1)...(19): siRNA sense strand
ugacacagaugagaaauga

SEQ ID NO: 1766656 - RNA, 19 nt, Homo sapiens
  misc_RNA (1)...(19): siRNA sense strand
gaaacuggaugaagaguac

SEQ ID NO: 1766657 - RNA, 19 nt, Homo sapiens
  misc_RNA (1)...(19): siRNA sense strand
gcggagcucucugaaguua

SEQ ID NO: 1766658 - RNA, 19 nt, Homo sapiens
  misc_RNA (1)...(19): siRNA sense strand
gaaauauacuccagcucaa

SEQ ID NO: 1766659 - RNA, 19 nt, Homo sapiens
  misc_RNA (1)...(19): siRNA sense strand
uagaugaacuccagucuga

SEQ ID NO: 1766660 - RNA, 19 nt, Homo sapiens
  misc_RNA (1)...(19): siRNA sense strand
gaauguggauggagagaug

SEQ ID NO: 1766661 - RNA, 19 nt, Homo sapiens
  misc_RNA (1)...(19): siRNA sense strand
gcacagaaaucuccagacu

SEQ ID NO: 1766662 - RNA, 19 nt, Homo sapiens
  misc_RNA (1)...(19): siRNA sense strand
gaacucaccgucagaagaa

SEQ ID NO: 1766663 - RNA, 19 nt, Homo sapiens
  misc_RNA (1)...(19): siRNA sense strand
guucuaagcuacaacgaaa

SEQ ID NO: 1766664 - RNA, 19 nt, Homo sapiens
  misc_RNA (1)...(19): siRNA sense strand
gggagcagcuguuggaaga

SEQ ID NO: 1766665 - RNA, 19 nt, Homo sapiens
  misc_RNA (1)...(19): siRNA sense strand
gaagagaccaggacugaau

SEQ ID NO: 1766666 - RNA, 19 nt, Homo sapiens
  misc_RNA (1)...(19): siRNA sense strand
aggcagagcuggucauuga

SEQ ID NO: 1766667 - RNA, 19 nt, Homo sapiens
  misc_RNA (1)...(19): siRNA sense strand
ggaaaagguucagaauuua

SEQ ID NO: 1766668 - RNA, 19 nt, Homo sapiens
  misc_RNA (1)...(19): siRNA sense strand
acagaaaucuccagacuuc

SEQ ID NO: 1766669 - RNA, 19 nt, Homo sapiens
  misc_RNA (1)...(19): siRNA sense strand
gacagcagaucgagaaaga

SEQ ID NO: 1766670 - RNA, 19 nt, Homo sapiens
  misc_RNA (1)...(19): siRNA sense strand
ucaaauagaagcccaguuu

SEQ ID NO: 1766671 - RNA, 19 nt, Homo sapiens
  misc_RNA (1)...(19): siRNA sense strand
ggaaacagaguguaauaga

SEQ ID NO: 1766672 - RNA, 19 nt, Homo sapiens
  misc_RNA (1)...(19): siRNA sense strand
ucaggaaacuggaugaaga

SEQ ID NO: 1766673 - RNA, 19 nt, Homo sapiens
  misc_RNA (1)...(19): siRNA sense strand
ugacaagccugguggagaa

SEQ ID NO: 1766674 - RNA, 19 nt, Homo sapiens
  misc_RNA (1)...(19): siRNA sense strand
gcaaaggcaugagaacgaa

SEQ ID NO: 1766675 - RNA, 19 nt, Homo sapiens
  misc_RNA (1)...(19): siRNA sense strand
gaagauaaagugcgccauu

SEQ ID NO: 1766676 - RNA, 19 nt, Homo sapiens
  misc_RNA (1)...(19): siRNA sense strand
ccaaauauaagcuguugua

SEQ ID NO: 1766677 - RNA, 19 nt, Homo sapiens
  misc_RNA (1)...(19): siRNA sense strand
gacuagaaauggaacauga

SEQ ID NO: 1766678 - RNA, 19 nt, Homo sapiens
  misc_RNA (1)...(19): siRNA sense strand
gcaaaugucccggaugaaa

SEQ ID NO: 1766679 - RNA, 19 nt, Homo sapiens
  misc_RNA (1)...(19): siRNA sense strand
ccagaugacuugaaugcuu

SEQ ID NO: 1766680 - RNA, 19 nt, Homo sapiens
  misc_RNA (1)...(19): siRNA sense strand
gaacaauucagacacauca

SEQ ID NO: 1766681 - RNA, 19 nt, Homo sapiens
  misc_RNA (1)...(19): siRNA sense strand
caacaucuccucucucaau

SEQ ID NO: 1766682 - RNA, 19 nt, Homo sapiens
  misc_RNA (1)...(19): siRNA sense strand
agagagagaugcuggagaa

SEQ ID NO: 1766683 - RNA, 19 nt, Homo sapiens
  misc_RNA (1)...(19): siRNA sense strand
gaugagaaaugaauaugag

SEQ ID NO: 1766684 - RNA, 19 nt, Homo sapiens
  misc_RNA (1)...(19): siRNA sense strand
gaagagaaacugcaagaag

SEQ ID NO: 1766685 - RNA, 19 nt, Homo sapiens
  misc_RNA (1)...(19): siRNA sense strand
gcaguaugguuuacagaau

SEQ ID NO: 1766686 - RNA, 19 nt, Homo sapiens
  misc_RNA (1)...(19): siRNA sense strand
caucuaaacccaucaggua

SEQ ID NO: 1766687 - RNA, 19 nt, Homo sapiens
  misc_RNA (1)...(19): siRNA sense strand
ccugggagcugaagaauca

SEQ ID NO: 1766688 - RNA, 19 nt, Homo sapiens
  misc_RNA (1)...(19): siRNA sense strand
gagcagcuguuggaagaaa

SEQ ID NO: 1766689 - RNA, 19 nt, Homo sapiens
  misc_RNA (1)...(19): siRNA sense strand
gaaacgcacaccuuagaaa

SEQ ID NO: 1766690 - RNA, 19 nt, Homo sapiens
  misc_RNA (1)...(19): siRNA sense strand
gagaagcucaagucuuuaa

SEQ ID NO: 1766691 - RNA, 19 nt, Homo sapiens
  misc_RNA (1)...(19): siRNA sense strand
aaagaacaaucuccugcua

SEQ ID NO: 1766692 - RNA, 19 nt, Homo sapiens
  misc_RNA (1)...(19): siRNA sense strand
gaagauagcauuucuaacc

SEQ ID NO: 1766693 - RNA, 19 nt, Homo sapiens
  misc_RNA (1)...(19): siRNA sense strand
gaacacacagcucuuggaa

SEQ ID NO: 1766694 - RNA, 19 nt, Homo sapiens
  misc_RNA (1)...(19): siRNA sense strand
gcucagcccaaauauguua

SEQ ID NO: 1766695 - RNA, 19 nt, Homo sapiens
  misc_RNA (1)...(19): siRNA sense strand
gaacaggcagugaaggaaa

SEQ ID NO: 1766696 - RNA, 19 nt, Homo sapiens
  misc_RNA (1)...(19): siRNA sense strand
gcucaaggcuagacugaca

SEQ ID NO: 1766697 - RNA, 19 nt, Homo sapiens
  misc_RNA (1)...(19): siRNA sense strand
gaagacaccgugcagaaug

SEQ ID NO: 1766698 - RNA, 19 nt, Homo sapiens
  misc_RNA (1)...(19): siRNA sense strand
gcugguggcuucucaggaa

SEQ ID NO: 1766699 - RNA, 19 nt, Homo sapiens
  misc_RNA (1)...(19): siRNA sense strand
ugaaggcaaugaugcauga

SEQ ID NO: 1766700 - RNA, 19 nt, Homo sapiens
  misc_RNA (1)...(19): siRNA sense strand
uacaggagcugacuaggaa

SEQ ID NO: 1766701 - RNA, 19 nt, Homo sapiens
  misc_RNA (1)...(19): siRNA sense strand
aagauaaagugcgccauua

SEQ ID NO: 1766702 - RNA, 19 nt, Homo sapiens
  misc_RNA (1)...(19): siRNA sense strand
gaacuggaacguuguaaag

SEQ ID NO: 1766703 - RNA, 19 nt, Homo sapiens
  misc_RNA (1)...(19): siRNA sense strand
gcagugagaugcagcaaaa

SEQ ID NO: 1766704 - RNA, 19 nt, Homo sapiens
  misc_RNA (1)...(19): siRNA sense strand
ugaagaugcuugagagaau

SEQ ID NO: 1766705 - RNA, 19 nt, Homo sapiens
  misc_RNA (1)...(19): siRNA sense strand
ggaaagacuagaaauggaa

SEQ ID NO: 1766706 - RNA, 19 nt, Homo sapiens
  misc_RNA (1)...(19): siRNA sense strand
ccuaagaaauguaucugaa

SEQ ID NO: 1766707 - RNA, 19 nt, Homo sapiens
  misc_RNA (1)...(19): siRNA sense strand
gacagcagcuacuccaaga

SEQ ID NO: 1766708 - RNA, 19 nt, Homo sapiens
  misc_RNA (1)...(19): siRNA sense strand
cccaggagcugcugaaaga

SEQ ID NO: 1766709 - RNA, 19 nt, Homo sapiens
  misc_RNA (1)...(19): siRNA sense strand
ugaaggaccuccaggaaca

SEQ ID NO: 1766710 - RNA, 19 nt, Homo sapiens
  misc_RNA (1)...(19): siRNA sense strand
gcaagaaggcacaggagaa

SEQ ID NO: 1766711 - RNA, 19 nt, Homo sapiens
  misc_RNA (1)...(19): siRNA sense strand
caaugaguguagaagauuu

SEQ ID NO: 1766712 - RNA, 19 nt, Homo sapiens
  misc_RNA (1)...(19): siRNA sense strand
gaagaugugagccgagaaa

SEQ ID NO: 1766713 - RNA, 19 nt, Homo sapiens
  misc_RNA (1)...(19): siRNA sense strand
ggcaacaucuccucucuca

SEQ ID NO: 1766714 - RNA, 19 nt, Homo sapiens
  misc_RNA (1)...(19): siRNA sense strand
aagaaccucucaaauagaa

SEQ ID NO: 1766715 - RNA, 19 nt, Homo sapiens
  misc_RNA (1)...(19): siRNA sense strand
agaaagaggaguuaagaaa

SEQ ID NO: 1766716 - RNA, 19 nt, Homo sapiens
  misc_RNA (1)...(19): siRNA sense strand
gaaguauuccauaaucuug

SEQ ID NO: 1766717 - RNA, 19 nt, Homo sapiens
  misc_RNA (1)...(19): siRNA sense strand
gaacaagagaaguuuaauc

SEQ ID NO: 1766718 - RNA, 19 nt, Homo sapiens
  misc_RNA (1)...(19): siRNA sense strand
ggaaaacacuacucuccua

SEQ ID NO: 1766719 - RNA, 19 nt, Homo sapiens
  misc_RNA (1)...(19): siRNA sense strand
gaagaaccucucaaauaga

SEQ ID NO: 1766720 - RNA, 19 nt, Homo sapiens
  misc_RNA (1)...(19): siRNA sense strand
uagaagcucagcccaaaua

SEQ ID NO: 1766721 - RNA, 19 nt, Homo sapiens
  misc_RNA (1)...(19): siRNA sense strand
gaaggucagucagaugaau

SEQ ID NO: 1766722 - RNA, 19 nt, Homo sapiens
  misc_RNA (1)...(19): siRNA sense strand
caucagggcuccauaacca

SEQ ID NO: 1766723 - RNA, 19 nt, Homo sapiens
  misc_RNA (1)...(19): siRNA sense strand
gaacuucugagauaugaau

SEQ ID NO: 1766724 - RNA, 19 nt, Homo sapiens
  misc_RNA (1)...(19): siRNA sense strand
aaucgaaccugauggaaau

SEQ ID NO: 1766725 - RNA, 19 nt, Homo sapiens
  misc_RNA (1)...(19): siRNA sense strand
aaaguuagagccaggguua

SEQ ID NO: 1766726 - RNA, 19 nt, Homo sapiens
  misc_RNA (1)...(19): siRNA sense strand
gaaacacacucuugagaaa

SEQ ID NO: 1766727 - RNA, 19 nt, Homo sapiens
  misc_RNA (1)...(19): siRNA sense strand
gaaauugccugguuacaug

SEQ ID NO: 1766728 - RNA, 19 nt, Homo sapiens
  misc_RNA (1)...(19): siRNA sense strand
gaacgaaacgcacaccuua

SEQ ID NO: 1766729 - RNA, 19 nt, Homo sapiens
  misc_RNA (1)...(19): siRNA sense strand
caagagaaguuuaaucuga

SEQ ID NO: 1766730 - RNA, 19 nt, Homo sapiens
  misc_RNA (1)...(19): siRNA sense strand
ggacauauguugccucaga

SEQ ID NO: 1766731 - RNA, 19 nt, Homo sapiens
  misc_RNA (1)...(19): siRNA sense strand
gaaaauggcuacugaaauu

SEQ ID NO: 1766732 - RNA, 19 nt, Homo sapiens
  misc_RNA (1)...(19): siRNA sense strand
gaaacagaguguaauagaa

SEQ ID NO: 1766733 - RNA, 19 nt, Homo sapiens
  misc_RNA (1)...(19): siRNA sense strand
ggaagucacugaaacauuc

SEQ ID NO: 1766734 - RNA, 19 nt, Homo sapiens
  misc_RNA (1)...(19): siRNA sense strand
gcaagaaguuugugaagau

SEQ ID NO: 1766735 - RNA, 19 nt, Homo sapiens
  misc_RNA (1)...(19): siRNA sense strand
uuaaauagcugugucgaua

SEQ ID NO: 1766736 - RNA, 19 nt, Homo sapiens
  misc_RNA (1)...(19): siRNA sense strand
ggaagaagcuggucuccau

SEQ ID NO: 1766737 - RNA, 19 nt, Homo sapiens
  misc_RNA (1)...(19): siRNA sense strand
uaagugaccuggaagauga

SEQ ID NO: 1766738 - RNA, 19 nt, Homo sapiens
  misc_RNA (1)...(19): siRNA sense strand
gcagagagcucaugaacag

SEQ ID NO: 1766739 - RNA, 19 nt, Homo sapiens
  misc_RNA (1)...(19): siRNA sense strand
uagaagaaccucucaaaua

SEQ ID NO: 1766740 - RNA, 19 nt, Homo sapiens
  misc_RNA (1)...(19): siRNA sense strand
ccgagaagcucaagucuuu

SEQ ID NO: 1766741 - RNA, 19 nt, Homo sapiens
  misc_RNA (1)...(19): siRNA sense strand
gaagagagacugacacaga

SEQ ID NO: 1766742 - RNA, 19 nt, Homo sapiens
  misc_RNA (1)...(19): siRNA sense strand
gaagaacacuuucaagaac

SEQ ID NO: 1766743 - RNA, 19 nt, Homo sapiens
  misc_RNA (1)...(19): siRNA sense strand
gaugaaaucugaccuacga

SEQ ID NO: 1766744 - RNA, 19 nt, Homo sapiens
  misc_RNA (1)...(19): siRNA sense strand
ggaagaauaucgugcacaa

SEQ ID NO: 1766745 - RNA, 19 nt, Homo sapiens
  misc_RNA (1)...(19): siRNA sense strand
gaacccagaugacuugaau

SEQ ID NO: 1766746 - RNA, 19 nt, Homo sapiens
  misc_RNA (1)...(19): siRNA sense strand
gagagagugugaucaguuu

SEQ ID NO: 1766747 - RNA, 19 nt, Homo sapiens
  misc_RNA (1)...(19): siRNA sense strand
ugaaacagcugcacagaug

SEQ ID NO: 1766748 - RNA, 19 nt, Homo sapiens
  misc_RNA (1)...(19): siRNA sense strand
gacuggagcucgaagauaa

SEQ ID NO: 1766749 - RNA, 19 nt, Homo sapiens
  misc_RNA (1)...(19): siRNA sense strand
agucugagcuggaagaaua

SEQ ID NO: 1766750 - RNA, 19 nt, Homo sapiens
  misc_RNA (1)...(19): siRNA sense strand
cagaagaaguugaggcuaa

SEQ ID NO: 1766751 - RNA, 19 nt, Homo sapiens
  misc_RNA (1)...(19): siRNA sense strand
gaaccagacugcucacuag

SEQ ID NO: 1766752 - RNA, 19 nt, Homo sapiens
  misc_RNA (1)...(19): siRNA sense strand
gaacuuaaucaacgucuaa

SEQ ID NO: 1766753 - RNA, 19 nt, Homo sapiens
  misc_RNA (1)...(19): siRNA sense strand
agaagaaccucucaaauag

SEQ ID NO: 1766754 - RNA, 19 nt, Homo sapiens
  misc_RNA (1)...(19): siRNA sense strand
ggagcucucugaaguuaaa

SEQ ID NO: 1766755 - RNA, 19 nt, Homo sapiens
  misc_RNA (1)...(19): siRNA sense strand
ugacacagaugagaaauga

SEQ ID NO: 1766756 - RNA, 19 nt, Homo sapiens
  misc_RNA (1)...(19): siRNA sense strand
gaaacuggaugaagaguac

SEQ ID NO: 1766757 - RNA, 19 nt, Homo sapiens
  misc_RNA (1)...(19): siRNA sense strand
gcggagcucucugaaguua

SEQ ID NO: 1766758 - RNA, 19 nt, Homo sapiens
  misc_RNA (1)...(19): siRNA sense strand
gaaauauacuccagcucaa

SEQ ID NO: 1766759 - RNA, 19 nt, Homo sapiens
  misc_RNA (1)...(19): siRNA sense strand
uagaugaacuccagucuga

SEQ ID NO: 1766760 - RNA, 19 nt, Homo sapiens
  misc_RNA (1)...(19): siRNA sense strand
gaauguggauggagagaug

SEQ ID NO: 1766761 - RNA, 19 nt, Homo sapiens
  misc_RNA (1)...(19): siRNA sense strand
gcacagaaaucuccagacu

SEQ ID NO: 1766762 - RNA, 19 nt, Homo sapiens
  misc_RNA (1)...(19): siRNA sense strand
gaacucaccgucagaagaa

SEQ ID NO: 1766763 - RNA, 19 nt, Homo sapiens
  misc_RNA (1)...(19): siRNA sense strand
guucuaagcuacaacgaaa

SEQ ID NO: 1766764 - RNA, 19 nt, Homo sapiens
  misc_RNA (1)...(19): siRNA sense strand
gggagcagcuguuggaaga

SEQ ID NO: 1766765 - RNA, 19 nt, Homo sapiens
  misc_RNA (1)...(19): siRNA sense strand
gaagagaccaggacugaau

SEQ ID NO: 1766766 - RNA, 19 nt, Homo sapiens
  misc_RNA (1)...(19): siRNA sense strand
aggcagagcuggucauuga

SEQ ID NO: 1766767 - RNA, 19 nt, Homo sapiens
  misc_RNA (1)...(19): siRNA sense strand
ggaaaagguucagaauuua

SEQ ID NO: 1766768 - RNA, 19 nt, Homo sapiens
  misc_RNA (1)...(19): siRNA sense strand
acagaaaucuccagacuuc

SEQ ID NO: 1766769 - RNA, 19 nt, Homo sapiens
  misc_RNA (1)...(19): siRNA sense strand
gacagcagaucgagaaaga

SEQ ID NO: 1766770 - RNA, 19 nt, Homo sapiens
  misc_RNA (1)...(19): siRNA sense strand
ucaaauagaagcccaguuu

SEQ ID NO: 1766771 - RNA, 19 nt, Homo sapiens
  misc_RNA (1)...(19): siRNA sense strand
ggaaacagaguguaauaga

SEQ ID NO: 1766772 - RNA, 19 nt, Homo sapiens
  misc_RNA (1)...(19): siRNA sense strand
ucaggaaacuggaugaaga

SEQ ID NO: 1766773 - RNA, 19 nt, Homo sapiens
  misc_RNA (1)...(19): siRNA sense strand
ugacaagccugguggagaa

SEQ ID NO: 1766774 - RNA, 19 nt, Homo sapiens
  misc_RNA (1)...(19): siRNA sense strand
gcaaaggcaugagaacgaa

SEQ ID NO: 1766775 - RNA, 19 nt, Homo sapiens
  misc_RNA (1)...(19): siRNA sense strand
gaagauaaagugcgccauu

SEQ ID NO: 1766776 - RNA, 19 nt, Homo sapiens
  misc_RNA (1)...(19): siRNA sense strand
ccaaauauaagcuguugua

SEQ ID NO: 1766777 - RNA, 19 nt, Homo sapiens
  misc_RNA (1)...(19): siRNA sense strand
gacuagaaauggaacauga

SEQ ID NO: 1766778 - RNA, 19 nt, Homo sapiens
  misc_RNA (1)...(19): siRNA sense strand
gcaaaugucccggaugaaa

SEQ ID NO: 1766779 - RNA, 19 nt, Homo sapiens
  misc_RNA (1)...(19): siRNA sense strand
ccagaugacuugaaugcuu

SEQ ID NO: 1766780 - RNA, 19 nt, Homo sapiens
  misc_RNA (1)...(19): siRNA sense strand
gaacaauucagacacauca

SEQ ID NO: 1766781 - RNA, 19 nt, Homo sapiens
  misc_RNA (1)...(19): siRNA sense strand
caacaucuccucucucaau

SEQ ID NO: 1766782 - RNA, 19 nt, Homo sapiens
  misc_RNA (1)...(19): siRNA sense strand
agagagagaugcuggagaa

SEQ ID NO: 1766783 - RNA, 19 nt, Homo sapiens
  misc_RNA (1)...(19): siRNA sense strand
gaugagaaaugaauaugag

SEQ ID NO: 1766784 - RNA, 19 nt, Homo sapiens
  misc_RNA (1)...(19): siRNA sense strand
gaagagaaacugcaagaag

SEQ ID NO: 1766785 - RNA, 19 nt, Homo sapiens
  misc_RNA (1)...(19): siRNA sense strand
gcaguaugguuuacagaau

SEQ ID NO: 1766786 - RNA, 19 nt, Homo sapiens
  misc_RNA (1)...(19): siRNA sense strand
caucuaaacccaucaggua

SEQ ID NO: 1766787 - RNA, 19 nt, Homo sapiens
  misc_RNA (1)...(19): siRNA sense strand
ccugggagcugaagaauca

SEQ ID NO: 1766788 - RNA, 19 nt, Homo sapiens
  misc_RNA (1)...(19): siRNA sense strand
gagcagcuguuggaagaaa

SEQ ID NO: 1766789 - RNA, 19 nt, Homo sapiens
  misc_RNA (1)...(19): siRNA sense strand
gaaacgcacaccuuagaaa

SEQ ID NO: 1766790 - RNA, 19 nt, Homo sapiens
  misc_RNA (1)...(19): siRNA sense strand
gagaagcucaagucuuuaa

SEQ ID NO: 1766791 - RNA, 19 nt, Homo sapiens
  misc_RNA (1)...(19): siRNA sense strand
aaagaacaaucuccugcua

SEQ ID NO: 1766792 - RNA, 19 nt, Homo sapiens
  misc_RNA (1)...(19): siRNA sense strand
gaagauagcauuucuaacc

SEQ ID NO: 1766793 - RNA, 19 nt, Homo sapiens
  misc_RNA (1)...(19): siRNA sense strand
gaacacacagcucuuggaa

SEQ ID NO: 1766794 - RNA, 19 nt, Homo sapiens
  misc_RNA (1)...(19): siRNA sense strand
gcucagcccaaauauguua

SEQ ID NO: 1766795 - RNA, 19 nt, Homo sapiens
  misc_RNA (1)...(19): siRNA sense strand
gaacaggcagugaaggaaa

SEQ ID NO: 1766796 - RNA, 19 nt, Homo sapiens
  misc_RNA (1)...(19): siRNA sense strand
gcucaaggcuagacugaca

SEQ ID NO: 1766797 - RNA, 19 nt, Homo sapiens
  misc_RNA (1)...(19): siRNA sense strand
gaagacaccgugcagaaug

SEQ ID NO: 1766798 - RNA, 19 nt, Homo sapiens
  misc_RNA (1)...(19): siRNA sense strand
gcugguggcuucucaggaa

SEQ ID NO: 1766799 - RNA, 19 nt, Homo sapiens
  misc_RNA (1)...(19): siRNA sense strand
ugaaggcaaugaugcauga

SEQ ID NO: 1766800 - RNA, 19 nt, Homo sapiens
  misc_RNA (1)...(19): siRNA sense strand
uacaggagcugacuaggaa

SEQ ID NO: 1766801 - RNA, 19 nt, Homo sapiens
  misc_RNA (1)...(19): siRNA sense strand
aagauaaagugcgccauua

SEQ ID NO: 1766802 - RNA, 19 nt, Homo sapiens
  misc_RNA (1)...(19): siRNA sense strand
gaacuggaacguuguaaag

SEQ ID NO: 1766803 - RNA, 19 nt, Homo sapiens
  misc_RNA (1)...(19): siRNA sense strand
gcagugagaugcagcaaaa

SEQ ID NO: 1766804 - RNA, 19 nt, Homo sapiens
  misc_RNA (1)...(19): siRNA sense strand
ugaagaugcuugagagaau

SEQ ID NO: 1766805 - RNA, 19 nt, Homo sapiens
  misc_RNA (1)...(19): siRNA sense strand
ggaaagacuagaaauggaa

SEQ ID NO: 1766806 - RNA, 19 nt, Homo sapiens
  misc_RNA (1)...(19): siRNA sense strand
ccuaagaaauguaucugaa

SEQ ID NO: 1766807 - RNA, 19 nt, Homo sapiens
  misc_RNA (1)...(19): siRNA sense strand
gacagcagcuacuccaaga

SEQ ID NO: 1766808 - RNA, 19 nt, Homo sapiens
  misc_RNA (1)...(19): siRNA sense strand
cccaggagcugcugaaaga

SEQ ID NO: 1766809 - RNA, 19 nt, Homo sapiens
  misc_RNA (1)...(19): siRNA sense strand
ugaaggaccuccaggaaca

SEQ ID NO: 1766810 - RNA, 19 nt, Homo sapiens
  misc_RNA (1)...(19): siRNA sense strand
gcaagaaggcacaggagaa

SEQ ID NO: 1766811 - RNA, 19 nt, Homo sapiens
  misc_RNA (1)...(19): siRNA sense strand
caaugaguguagaagauuu

SEQ ID NO: 1766812 - RNA, 19 nt, Homo sapiens
  misc_RNA (1)...(19): siRNA sense strand
gaagaugugagccgagaaa

SEQ ID NO: 1766813 - RNA, 19 nt, Homo sapiens
  misc_RNA (1)...(19): siRNA sense strand
ggcaacaucuccucucuca

SEQ ID NO: 1766814 - RNA, 19 nt, Homo sapiens
  misc_RNA (1)...(19): siRNA sense strand
aagaaccucucaaauagaa

SEQ ID NO: 1766815 - RNA, 19 nt, Homo sapiens
  misc_RNA (1)...(19): siRNA sense strand
agaaagaggaguuaagaaa

SEQ ID NO: 1766816 - RNA, 19 nt, Homo sapiens
  misc_RNA (1)...(19): siRNA sense strand
gaaguauuccauaaucuug

SEQ ID NO: 1766817 - RNA, 19 nt, Homo sapiens
  misc_RNA (1)...(19): siRNA sense strand
gaacaagagaaguuuaauc

SEQ ID NO: 1766818 - RNA, 19 nt, Homo sapiens
  misc_RNA (1)...(19): siRNA sense strand
ggaaaacacuacucuccua

SEQ ID NO: 1766819 - RNA, 19 nt, Homo sapiens
  misc_RNA (1)...(19): siRNA sense strand
gaagaaccucucaaauaga

SEQ ID NO: 1766820 - RNA, 19 nt, Homo sapiens
  misc_RNA (1)...(19): siRNA sense strand
uagaagcucagcccaaaua

SEQ ID NO: 1766821 - RNA, 19 nt, Homo sapiens
  misc_RNA (1)...(19): siRNA sense strand
gaaggucagucagaugaau

SEQ ID NO: 1766822 - RNA, 19 nt, Homo sapiens
  misc_RNA (1)...(19): siRNA sense strand
caucagggcuccauaacca

SEQ ID NO: 1766823 - RNA, 19 nt, Homo sapiens
  misc_RNA (1)...(19): siRNA sense strand
gaacuucugagauaugaau

SEQ ID NO: 1766824 - RNA, 19 nt, Homo sapiens
  misc_RNA (1)...(19): siRNA sense strand
aaucgaaccugauggaaau

SEQ ID NO: 1766825 - RNA, 19 nt, Homo sapiens
  misc_RNA (1)...(19): siRNA sense strand
aaaguuagagccaggguua

SEQ ID NO: 1766826 - RNA, 19 nt, Homo sapiens
  misc_RNA (1)...(19): siRNA sense strand
gaaacacacucuugagaaa

SEQ ID NO: 1766827 - RNA, 19 nt, Homo sapiens
  misc_RNA (1)...(19): siRNA sense strand
gaaauugccugguuacaug

SEQ ID NO: 1766828 - RNA, 19 nt, Homo sapiens
  misc_RNA (1)...(19): siRNA sense strand
gaacgaaacgcacaccuua

SEQ ID NO: 1766829 - RNA, 19 nt, Homo sapiens
  misc_RNA (1)...(19): siRNA sense strand
caagagaaguuuaaucuga

SEQ ID NO: 1766830 - RNA, 19 nt, Homo sapiens
  misc_RNA (1)...(19): siRNA sense strand
ggacauauguugccucaga

SEQ ID NO: 1766831 - RNA, 19 nt, Homo sapiens
  misc_RNA (1)...(19): siRNA sense strand
gaaaauggcuacugaaauu

SEQ ID NO: 1766832 - RNA, 19 nt, Homo sapiens
  misc_RNA (1)...(19): siRNA sense strand
gaaacagaguguaauagaa

SEQ ID NO: 1766833 - RNA, 19 nt, Homo sapiens
  misc_RNA (1)...(19): siRNA sense strand
ggaagucacugaaacauuc

SEQ ID NO: 1766834 - RNA, 19 nt, Homo sapiens
  misc_RNA (1)...(19): siRNA sense strand
gcaagaaguuugugaagau

SEQ ID NO: 1766835 - RNA, 19 nt, Homo sapiens
  misc_RNA (1)...(19): siRNA sense strand
uuaaauagcugugucgaua

SEQ ID NO: 1766836 - RNA, 19 nt, Homo sapiens
  misc_RNA (1)...(19): siRNA sense strand
ggaagaagcuggucuccau

SEQ ID NO: 1766837 - RNA, 19 nt, Homo sapiens
  misc_RNA (1)...(19): siRNA sense strand
uaagugaccuggaagauga

SEQ ID NO: 1766838 - RNA, 19 nt, Homo sapiens
  misc_RNA (1)...(19): siRNA sense strand
gcagagagcucaugaacag

SEQ ID NO: 1766839 - RNA, 19 nt, Homo sapiens
  misc_RNA (1)...(19): siRNA sense strand
uagaagaaccucucaaaua

SEQ ID NO: 1766840 - RNA, 19 nt, Homo sapiens
  misc_RNA (1)...(19): siRNA sense strand
ccgagaagcucaagucuuu

SEQ ID NO: 1766841 - RNA, 19 nt, Homo sapiens
  misc_RNA (1)...(19): siRNA sense strand
gaagagagacugacacaga

SEQ ID NO: 1766842 - RNA, 19 nt, Homo sapiens
  misc_RNA (1)...(19): siRNA sense strand
gaagaacacuuucaagaac

SEQ ID NO: 1766843 - RNA, 19 nt, Homo sapiens
  misc_RNA (1)...(19): siRNA sense strand
gaugaaaucugaccuacga

SEQ ID NO: 1766844 - RNA, 19 nt, Homo sapiens
  misc_RNA (1)...(19): siRNA sense strand
ggaagaauaucgugcacaa

SEQ ID NO: 1766845 - RNA, 19 nt, Homo sapiens
  misc_RNA (1)...(19): siRNA sense strand
gaacccagaugacuugaau

SEQ ID NO: 1766846 - RNA, 19 nt, Homo sapiens
  misc_RNA (1)...(19): siRNA sense strand
gagagagugugaucaguuu

SEQ ID NO: 1766847 - RNA, 19 nt, Homo sapiens
  misc_RNA (1)...(19): siRNA sense strand
ugaaacagcugcacagaug

SEQ ID NO: 1766848 - RNA, 19 nt, Homo sapiens
  misc_RNA (1)...(19): siRNA sense strand
gacuggagcucgaagauaa

SEQ ID NO: 1766849 - RNA, 19 nt, Homo sapiens
  misc_RNA (1)...(19): siRNA sense strand
agucugagcuggaagaaua

SEQ ID NO: 1766850 - RNA, 19 nt, Homo sapiens
  misc_RNA (1)...(19): siRNA sense strand
cagaagaaguugaggcuaa

SEQ ID NO: 1766851 - RNA, 19 nt, Homo sapiens
  misc_RNA (1)...(19): siRNA sense strand
gaaccagacugcucacuag

SEQ ID NO: 1766852 - RNA, 19 nt, Homo sapiens
  misc_RNA (1)...(19): siRNA sense strand
gaacuuaaucaacgucuaa

SEQ ID NO: 1766853 - RNA, 19 nt, Homo sapiens
  misc_RNA (1)...(19): siRNA sense strand
agaagaaccucucaaauag

SEQ ID NO: 1766854 - RNA, 19 nt, Homo sapiens
  misc_RNA (1)...(19): siRNA sense strand
ggagcucucugaaguuaaa

SEQ ID NO: 1766855 - RNA, 19 nt, Homo sapiens
  misc_RNA (1)...(19): siRNA sense strand
ugacacagaugagaaauga

SEQ ID NO: 1766856 - RNA, 19 nt, Homo sapiens
  misc_RNA (1)...(19): siRNA sense strand
gaaacuggaugaagaguac

SEQ ID NO: 1766857 - RNA, 19 nt, Homo sapiens
  misc_RNA (1)...(19): siRNA sense strand
gcggagcucucugaaguua

SEQ ID NO: 1766858 - RNA, 19 nt, Homo sapiens
  misc_RNA (1)...(19): siRNA sense strand
gaaauauacuccagcucaa

SEQ ID NO: 1766859 - RNA, 19 nt, Homo sapiens
  misc_RNA (1)...(19): siRNA sense strand
uagaugaacuccagucuga

SEQ ID NO: 1766860 - RNA, 19 nt, Homo sapiens
  misc_RNA (1)...(19): siRNA sense strand
gaauguggauggagagaug

SEQ ID NO: 1766861 - RNA, 19 nt, Homo sapiens
  misc_RNA (1)...(19): siRNA sense strand
gcacagaaaucuccagacu

SEQ ID NO: 1766862 - RNA, 19 nt, Homo sapiens
  misc_RNA (1)...(19): siRNA sense strand
gaacucaccgucagaagaa

SEQ ID NO: 1766863 - RNA, 19 nt, Homo sapiens
  misc_RNA (1)...(19): siRNA sense strand
guucuaagcuacaacgaaa

SEQ ID NO: 1766864 - RNA, 19 nt, Homo sapiens
  misc_RNA (1)...(19): siRNA sense strand
gggagcagcuguuggaaga

SEQ ID NO: 1766865 - RNA, 19 nt, Homo sapiens
  misc_RNA (1)...(19): siRNA sense strand
gaagagaccaggacugaau

SEQ ID NO: 1766866 - RNA, 19 nt, Homo sapiens
  misc_RNA (1)...(19): siRNA sense strand
aggcagagcuggucauuga

SEQ ID NO: 1766867 - RNA, 19 nt, Homo sapiens
  misc_RNA (1)...(19): siRNA sense strand
ggaaaagguucagaauuua

SEQ ID NO: 1766868 - RNA, 19 nt, Homo sapiens
  misc_RNA (1)...(19): siRNA sense strand
acagaaaucuccagacuuc

SEQ ID NO: 1766869 - RNA, 19 nt, Homo sapiens
  misc_RNA (1)...(19): siRNA sense strand
gacagcagaucgagaaaga

SEQ ID NO: 1766870 - RNA, 19 nt, Homo sapiens
  misc_RNA (1)...(19): siRNA sense strand
ucaaauagaagcccaguuu

SEQ ID NO: 1766871 - RNA, 19 nt, Homo sapiens
  misc_RNA (1)...(19): siRNA sense strand
ggaaacagaguguaauaga

SEQ ID NO: 1766872 - RNA, 19 nt, Homo sapiens
  misc_RNA (1)...(19): siRNA sense strand
ucaggaaacuggaugaaga

SEQ ID NO: 1766873 - RNA, 19 nt, Homo sapiens
  misc_RNA (1)...(19): siRNA sense strand
ugacaagccugguggagaa

SEQ ID NO: 1766874 - RNA, 19 nt, Homo sapiens
  misc_RNA (1)...(19): siRNA sense strand
gcaaaggcaugagaacgaa

SEQ ID NO: 1766875 - RNA, 19 nt, Homo sapiens
  misc_RNA (1)...(19): siRNA sense strand
gaagauaaagugcgccauu

SEQ ID NO: 1766876 - RNA, 19 nt, Homo sapiens
  misc_RNA (1)...(19): siRNA sense strand
ccaaauauaagcuguugua

SEQ ID NO: 1766877 - RNA, 19 nt, Homo sapiens
  misc_RNA (1)...(19): siRNA sense strand
gacuagaaauggaacauga

SEQ ID NO: 1766878 - RNA, 19 nt, Homo sapiens
  misc_RNA (1)...(19): siRNA sense strand
gcaaaugucccggaugaaa

SEQ ID NO: 1766879 - RNA, 19 nt, Homo sapiens
  misc_RNA (1)...(19): siRNA sense strand
ccagaugacuugaaugcuu

SEQ ID NO: 1766880 - RNA, 19 nt, Homo sapiens
  misc_RNA (1)...(19): siRNA sense strand
gaacaauucagacacauca

SEQ ID NO: 1766881 - RNA, 19 nt, Homo sapiens
  misc_RNA (1)...(19): siRNA sense strand
caacaucuccucucucaau

SEQ ID NO: 1766882 - RNA, 19 nt, Homo sapiens
  misc_RNA (1)...(19): siRNA sense strand
agagagagaugcuggagaa

SEQ ID NO: 1766883 - RNA, 19 nt, Homo sapiens
  misc_RNA (1)...(19): siRNA sense strand
gaugagaaaugaauaugag

SEQ ID NO: 1766884 - RNA, 19 nt, Homo sapiens
  misc_RNA (1)...(19): siRNA sense strand
gaagagaaacugcaagaag

SEQ ID NO: 1766885 - RNA, 19 nt, Homo sapiens
  misc_RNA (1)...(19): siRNA sense strand
gcaguaugguuuacagaau

SEQ ID NO: 1766886 - RNA, 19 nt, Homo sapiens
  misc_RNA (1)...(19): siRNA sense strand
caucuaaacccaucaggua

SEQ ID NO: 1766887 - RNA, 19 nt, Homo sapiens
  misc_RNA (1)...(19): siRNA sense strand
ccugggagcugaagaauca

SEQ ID NO: 1766888 - RNA, 19 nt, Homo sapiens
  misc_RNA (1)...(19): siRNA sense strand
gagcagcuguuggaagaaa

SEQ ID NO: 1766889 - RNA, 19 nt, Homo sapiens
  misc_RNA (1)...(19): siRNA sense strand
gaaacgcacaccuuagaaa

SEQ ID NO: 1766890 - RNA, 19 nt, Homo sapiens
  misc_RNA (1)...(19): siRNA sense strand
gagaagcucaagucuuuaa

SEQ ID NO: 1766891 - RNA, 19 nt, Homo sapiens
  misc_RNA (1)...(19): siRNA sense strand
aaagaacaaucuccugcua

SEQ ID NO: 1766892 - RNA, 19 nt, Homo sapiens
  misc_RNA (1)...(19): siRNA sense strand
gaagauagcauuucuaacc

SEQ ID NO: 1766893 - RNA, 19 nt, Homo sapiens
  misc_RNA (1)...(19): siRNA sense strand
gaacacacagcucuuggaa

SEQ ID NO: 1766894 - RNA, 19 nt, Homo sapiens
  misc_RNA (1)...(19): siRNA sense strand
gcucagcccaaauauguua

SEQ ID NO: 1766895 - RNA, 19 nt, Homo sapiens
  misc_RNA (1)...(19): siRNA sense strand
gaacaggcagugaaggaaa

SEQ ID NO: 1766896 - RNA, 19 nt, Homo sapiens
  misc_RNA (1)...(19): siRNA sense strand
gcucaaggcuagacugaca

SEQ ID NO: 1766897 - RNA, 19 nt, Homo sapiens
  misc_RNA (1)...(19): siRNA sense strand
gaagacaccgugcagaaug

SEQ ID NO: 1766898 - RNA, 19 nt, Homo sapiens
  misc_RNA (1)...(19): siRNA sense strand
gcugguggcuucucaggaa

SEQ ID NO: 1766899 - RNA, 19 nt, Homo sapiens
  misc_RNA (1)...(19): siRNA sense strand
ugaaggcaaugaugcauga

SEQ ID NO: 1766900 - RNA, 19 nt, Homo sapiens
  misc_RNA (1)...(19): siRNA sense strand
uacaggagcugacuaggaa

SEQ ID NO: 1766901 - RNA, 19 nt, Homo sapiens
  misc_RNA (1)...(19): siRNA sense strand
aagauaaagugcgccauua

SEQ ID NO: 1766902 - RNA, 19 nt, Homo sapiens
  misc_RNA (1)...(19): siRNA sense strand
gaacuggaacguuguaaag

SEQ ID NO: 1766903 - RNA, 19 nt, Homo sapiens
  misc_RNA (1)...(19): siRNA sense strand
gcagugagaugcagcaaaa

SEQ ID NO: 1766904 - RNA, 19 nt, Homo sapiens
  misc_RNA (1)...(19): siRNA sense strand
ugaagaugcuugagagaau

SEQ ID NO: 1766905 - RNA, 19 nt, Homo sapiens
  misc_RNA (1)...(19): siRNA sense strand
ggaaagacuagaaauggaa

SEQ ID NO: 1766906 - RNA, 19 nt, Homo sapiens
  misc_RNA (1)...(19): siRNA sense strand
ccuaagaaauguaucugaa

SEQ ID NO: 1766907 - RNA, 19 nt, Homo sapiens
  misc_RNA (1)...(19): siRNA sense strand
gacagcagcuacuccaaga

SEQ ID NO: 1766908 - RNA, 19 nt, Homo sapiens
  misc_RNA (1)...(19): siRNA sense strand
cccaggagcugcugaaaga

SEQ ID NO: 1766909 - RNA, 19 nt, Homo sapiens
  misc_RNA (1)...(19): siRNA sense strand
ugaaggaccuccaggaaca

SEQ ID NO: 1766910 - RNA, 19 nt, Homo sapiens
  misc_RNA (1)...(19): siRNA sense strand
gcaagaaggcacaggagaa

SEQ ID NO: 1766911 - RNA, 19 nt, Homo sapiens
  misc_RNA (1)...(19): siRNA sense strand
caaugaguguagaagauuu

SEQ ID NO: 1766912 - RNA, 19 nt, Homo sapiens
  misc_RNA (1)...(19): siRNA sense strand
gaagaugugagccgagaaa

SEQ ID NO: 1766913 - RNA, 19 nt, Homo sapiens
  misc_RNA (1)...(19): siRNA sense strand
ggcaacaucuccucucuca

SEQ ID NO: 1766914 - RNA, 19 nt, Homo sapiens
  misc_RNA (1)...(19): siRNA sense strand
aagaaccucucaaauagaa

SEQ ID NO: 1766915 - RNA, 19 nt, Homo sapiens
  misc_RNA (1)...(19): siRNA sense strand
agaaagaggaguuaagaaa

SEQ ID NO: 1766916 - RNA, 19 nt, Homo sapiens
  misc_RNA (1)...(19): siRNA sense strand
gaaguauuccauaaucuug

SEQ ID NO: 1766917 - RNA, 19 nt, Homo sapiens
  misc_RNA (1)...(19): siRNA sense strand
gaacaagagaaguuuaauc

SEQ ID NO: 1766918 - RNA, 19 nt, Homo sapiens
  misc_RNA (1)...(19): siRNA sense strand
ggaaaacacuacucuccua

SEQ ID NO: 1766919 - RNA, 19 nt, Homo sapiens
  misc_RNA (1)...(19): siRNA sense strand
gaagaaccucucaaauaga

SEQ ID NO: 1766920 - RNA, 19 nt, Homo sapiens
  misc_RNA (1)...(19): siRNA sense strand
uagaagcucagcccaaaua

SEQ ID NO: 1766921 - RNA, 19 nt, Homo sapiens
  misc_RNA (1)...(19): siRNA sense strand
gaaggucagucagaugaau

SEQ ID NO: 1766922 - RNA, 19 nt, Homo sapiens
  misc_RNA (1)...(19): siRNA sense strand
caucagggcuccauaacca

SEQ ID NO: 1766923 - RNA, 19 nt, Homo sapiens
  misc_RNA (1)...(19): siRNA sense strand
gaacuucugagauaugaau

SEQ ID NO: 1766924 - RNA, 19 nt, Homo sapiens
  misc_RNA (1)...(19): siRNA sense strand
aaucgaaccugauggaaau

SEQ ID NO: 1766925 - RNA, 19 nt, Homo sapiens
  misc_RNA (1)...(19): siRNA sense strand
aaaguuagagccaggguua

SEQ ID NO: 1766926 - RNA, 19 nt, Homo sapiens
  misc_RNA (1)...(19): siRNA sense strand
gaaacacacucuugagaaa

SEQ ID NO: 1766927 - RNA, 19 nt, Homo sapiens
  misc_RNA (1)...(19): siRNA sense strand
gaaauugccugguuacaug

SEQ ID NO: 1766928 - RNA, 19 nt, Homo sapiens
  misc_RNA (1)...(19): siRNA sense strand
gaacgaaacgcacaccuua

SEQ ID NO: 1766929 - RNA, 19 nt, Homo sapiens
  misc_RNA (1)...(19): siRNA sense strand
caagagaaguuuaaucuga

SEQ ID NO: 1766930 - RNA, 19 nt, Homo sapiens
  misc_RNA (1)...(19): siRNA sense strand
ggacauauguugccucaga

SEQ ID NO: 1766931 - RNA, 19 nt, Homo sapiens
  misc_RNA (1)...(19): siRNA sense strand
gaaaauggcuacugaaauu

SEQ ID NO: 1766932 - RNA, 19 nt, Homo sapiens
  misc_RNA (1)...(19): siRNA sense strand
gaaacagaguguaauagaa

SEQ ID NO: 1766933 - RNA, 19 nt, Homo sapiens
  misc_RNA (1)...(19): siRNA sense strand
ggaagucacugaaacauuc

SEQ ID NO: 1766934 - RNA, 19 nt, Homo sapiens
  misc_RNA (1)...(19): siRNA sense strand
gcaagaaguuugugaagau

SEQ ID NO: 1766935 - RNA, 19 nt, Homo sapiens
  misc_RNA (1)...(19): siRNA sense strand
uuaaauagcugugucgaua

SEQ ID NO: 1766936 - RNA, 19 nt, Homo sapiens
  misc_RNA (1)...(19): siRNA sense strand
ggaagaagcuggucuccau

SEQ ID NO: 1766937 - RNA, 19 nt, Homo sapiens
  misc_RNA (1)...(19): siRNA sense strand
uaagugaccuggaagauga

SEQ ID NO: 1766938 - RNA, 19 nt, Homo sapiens
  misc_RNA (1)...(19): siRNA sense strand
gcagagagcucaugaacag

SEQ ID NO: 1766939 - RNA, 19 nt, Homo sapiens
  misc_RNA (1)...(19): siRNA sense strand
uagaagaaccucucaaaua

SEQ ID NO: 1766940 - RNA, 19 nt, Homo sapiens
  misc_RNA (1)...(19): siRNA sense strand
ccgagaagcucaagucuuu

SEQ ID NO: 1766941 - RNA, 19 nt, Homo sapiens
  misc_RNA (1)...(19): siRNA sense strand
gaagagagacugacacaga

SEQ ID NO: 1766942 - RNA, 19 nt, Homo sapiens
  misc_RNA (1)...(19): siRNA sense strand
gaagaacacuuucaagaac

SEQ ID NO: 1766943 - RNA, 19 nt, Homo sapiens
  misc_RNA (1)...(19): siRNA sense strand
gaugaaaucugaccuacga

SEQ ID NO: 1766944 - RNA, 19 nt, Homo sapiens
  misc_RNA (1)...(19): siRNA sense strand
ggaagaauaucgugcacaa

SEQ ID NO: 1766945 - RNA, 19 nt, Homo sapiens
  misc_RNA (1)...(19): siRNA sense strand
gaacccagaugacuugaau

SEQ ID NO: 1766946 - RNA, 19 nt, Homo sapiens
  misc_RNA (1)...(19): siRNA sense strand
gagagagugugaucaguuu

SEQ ID NO: 1766947 - RNA, 19 nt, Homo sapiens
  misc_RNA (1)...(19): siRNA sense strand
ugaaacagcugcacagaug

SEQ ID NO: 1766948 - RNA, 19 nt, Homo sapiens
  misc_RNA (1)...(19): siRNA sense strand
gacuggagcucgaagauaa

SEQ ID NO: 1766949 - RNA, 19 nt, Homo sapiens
  misc_RNA (1)...(19): siRNA sense strand
agucugagcuggaagaaua

SEQ ID NO: 1766950 - RNA, 19 nt, Homo sapiens
  misc_RNA (1)...(19): siRNA sense strand
cagaagaaguugaggcuaa

SEQ ID NO: 1766951 - RNA, 19 nt, Homo sapiens
  misc_RNA (1)...(19): siRNA sense strand
gaaccagacugcucacuag

SEQ ID NO: 1766952 - RNA, 19 nt, Homo sapiens
  misc_RNA (1)...(19): siRNA sense strand
gaacuuaaucaacgucuaa

SEQ ID NO: 1766953 - RNA, 19 nt, Homo sapiens
  misc_RNA (1)...(19): siRNA sense strand
agaagaaccucucaaauag

SEQ ID NO: 1766954 - RNA, 19 nt, Homo sapiens
  misc_RNA (1)...(19): siRNA sense strand
ggagcucucugaaguuaaa

SEQ ID NO: 1766955 - RNA, 19 nt, Homo sapiens
  misc_RNA (1)...(19): siRNA sense strand
ugacacagaugagaaauga

SEQ ID NO: 1766956 - RNA, 19 nt, Homo sapiens
  misc_RNA (1)...(19): siRNA sense strand
gaaacuggaugaagaguac

SEQ ID NO: 1766957 - RNA, 19 nt, Homo sapiens
  misc_RNA (1)...(19): siRNA sense strand
gcggagcucucugaaguua

SEQ ID NO: 1766958 - RNA, 19 nt, Homo sapiens
  misc_RNA (1)...(19): siRNA sense strand
gaaauauacuccagcucaa

SEQ ID NO: 1766959 - RNA, 19 nt, Homo sapiens
  misc_RNA (1)...(19): siRNA sense strand
uagaugaacuccagucuga

SEQ ID NO: 1766960 - RNA, 19 nt, Homo sapiens
  misc_RNA (1)...(19): siRNA sense strand
gaauguggauggagagaug

SEQ ID NO: 1766961 - RNA, 19 nt, Homo sapiens
  misc_RNA (1)...(19): siRNA sense strand
gcacagaaaucuccagacu

SEQ ID NO: 1766962 - RNA, 19 nt, Homo sapiens
  misc_RNA (1)...(19): siRNA sense strand
gaacucaccgucagaagaa

SEQ ID NO: 1766963 - RNA, 19 nt, Homo sapiens
  misc_RNA (1)...(19): siRNA sense strand
guucuaagcuacaacgaaa

SEQ ID NO: 1766964 - RNA, 19 nt, Homo sapiens
  misc_RNA (1)...(19): siRNA sense strand
gggagcagcuguuggaaga

SEQ ID NO: 1766965 - RNA, 19 nt, Homo sapiens
  misc_RNA (1)...(19): siRNA sense strand
gaagagaccaggacugaau

SEQ ID NO: 1766966 - RNA, 19 nt, Homo sapiens
  misc_RNA (1)...(19): siRNA sense strand
aggcagagcuggucauuga

SEQ ID NO: 1766967 - RNA, 19 nt, Homo sapiens
  misc_RNA (1)...(19): siRNA sense strand
ggaaaagguucagaauuua

SEQ ID NO: 1766968 - RNA, 19 nt, Homo sapiens
  misc_RNA (1)...(19): siRNA sense strand
acagaaaucuccagacuuc

SEQ ID NO: 1766969 - RNA, 19 nt, Homo sapiens
  misc_RNA (1)...(19): siRNA sense strand
gacagcagaucgagaaaga

SEQ ID NO: 1766970 - RNA, 19 nt, Homo sapiens
  misc_RNA (1)...(19): siRNA sense strand
ucaaauagaagcccaguuu

SEQ ID NO: 1766971 - RNA, 19 nt, Homo sapiens
  misc_RNA (1)...(19): siRNA sense strand
ggaaacagaguguaauaga

SEQ ID NO: 1766972 - RNA, 19 nt, Homo sapiens
  misc_RNA (1)...(19): siRNA sense strand
ucaggaaacuggaugaaga

SEQ ID NO: 1766973 - RNA, 19 nt, Homo sapiens
  misc_RNA (1)...(19): siRNA sense strand
ugacaagccugguggagaa

SEQ ID NO: 1766974 - RNA, 19 nt, Homo sapiens
  misc_RNA (1)...(19): siRNA sense strand
gcaaaggcaugagaacgaa

SEQ ID NO: 1766975 - RNA, 19 nt, Homo sapiens
  misc_RNA (1)...(19): siRNA sense strand
gaagauaaagugcgccauu

SEQ ID NO: 1766976 - RNA, 19 nt, Homo sapiens
  misc_RNA (1)...(19): siRNA sense strand
ccaaauauaagcuguugua

SEQ ID NO: 1766977 - RNA, 19 nt, Homo sapiens
  misc_RNA (1)...(19): siRNA sense strand
gacuagaaauggaacauga

SEQ ID NO: 1766978 - RNA, 19 nt, Homo sapiens
  misc_RNA (1)...(19): siRNA sense strand
gcaaaugucccggaugaaa

SEQ ID NO: 1766979 - RNA, 19 nt, Homo sapiens
  misc_RNA (1)...(19): siRNA sense strand
ccagaugacuugaaugcuu

SEQ ID NO: 1766980 - RNA, 19 nt, Homo sapiens
  misc_RNA (1)...(19): siRNA sense strand
gaacaauucagacacauca

SEQ ID NO: 1766981 - RNA, 19 nt, Homo sapiens
  misc_RNA (1)...(19): siRNA sense strand
caacaucuccucucucaau

SEQ ID NO: 1766982 - RNA, 19 nt, Homo sapiens
  misc_RNA (1)...(19): siRNA sense strand
agagagagaugcuggagaa

SEQ ID NO: 1766983 - RNA, 19 nt, Homo sapiens
  misc_RNA (1)...(19): siRNA sense strand
gaugagaaaugaauaugag

SEQ ID NO: 1766984 - RNA, 19 nt, Homo sapiens
  misc_RNA (1)...(19): siRNA sense strand
gaagagaaacugcaagaag

SEQ ID NO: 1766985 - RNA, 19 nt, Homo sapiens
  misc_RNA (1)...(19): siRNA sense strand
gcaguaugguuuacagaau

SEQ ID NO: 1766986 - RNA, 19 nt, Homo sapiens
  misc_RNA (1)...(19): siRNA sense strand
caucuaaacccaucaggua

SEQ ID NO: 1766987 - RNA, 19 nt, Homo sapiens
  misc_RNA (1)...(19): siRNA sense strand
ccugggagcugaagaauca

SEQ ID NO: 1766988 - RNA, 19 nt, Homo sapiens
  misc_RNA (1)...(19): siRNA sense strand
gagcagcuguuggaagaaa

SEQ ID NO: 1766989 - RNA, 19 nt, Homo sapiens
  misc_RNA (1)...(19): siRNA sense strand
gaaacgcacaccuuagaaa

SEQ ID NO: 1766990 - RNA, 19 nt, Homo sapiens
  misc_RNA (1)...(19): siRNA sense strand
gagaagcucaagucuuuaa

SEQ ID NO: 1766991 - RNA, 19 nt, Homo sapiens
  misc_RNA (1)...(19): siRNA sense strand
aaagaacaaucuccugcua

SEQ ID NO: 1766992 - RNA, 19 nt, Homo sapiens
  misc_RNA (1)...(19): siRNA sense strand
gaagauagcauuucuaacc

SEQ ID NO: 1766993 - RNA, 19 nt, Homo sapiens
  misc_RNA (1)...(19): siRNA sense strand
gaacacacagcucuuggaa

SEQ ID NO: 1766994 - RNA, 19 nt, Homo sapiens
  misc_RNA (1)...(19): siRNA sense strand
gcucagcccaaauauguua

SEQ ID NO: 1766995 - RNA, 19 nt, Homo sapiens
  misc_RNA (1)...(19): siRNA sense strand
gaacaggcagugaaggaaa

SEQ ID NO: 1766996 - RNA, 19 nt, Homo sapiens
  misc_RNA (1)...(19): siRNA sense strand
gcucaaggcuagacugaca

SEQ ID NO: 1766997 - RNA, 19 nt, Homo sapiens
  misc_RNA (1)...(19): siRNA sense strand
gaagacaccgugcagaaug

SEQ ID NO: 1766998 - RNA, 19 nt, Homo sapiens
  misc_RNA (1)...(19): siRNA sense strand
gcugguggcuucucaggaa

SEQ ID NO: 1766999 - RNA, 19 nt, Homo sapiens
  misc_RNA (1)...(19): siRNA sense strand
ugaaggcaaugaugcauga

SEQ ID NO: 1767000 - RNA, 19 nt, Homo sapiens
  misc_RNA (1)...(19): siRNA sense strand
uacaggagcugacuaggaa

SEQ ID NO: 1767001 - RNA, 19 nt, Homo sapiens
  misc_RNA (1)...(19): siRNA sense strand
aagauaaagugcgccauua

SEQ ID NO: 1767002 - RNA, 19 nt, Homo sapiens
  misc_RNA (1)...(19): siRNA sense strand
gaacuggaacguuguaaag

SEQ ID NO: 1767003 - RNA, 19 nt, Homo sapiens
  misc_RNA (1)...(19): siRNA sense strand
gcagugagaugcagcaaaa

SEQ ID NO: 1767004 - RNA, 19 nt, Homo sapiens
  misc_RNA (1)...(19): siRNA sense strand
ugaagaugcuugagagaau

SEQ ID NO: 1767005 - RNA, 19 nt, Homo sapiens
  misc_RNA (1)...(19): siRNA sense strand
ggaaagacuagaaauggaa

SEQ ID NO: 1767006 - RNA, 19 nt, Homo sapiens
  misc_RNA (1)...(19): siRNA sense strand
ccuaagaaauguaucugaa

SEQ ID NO: 1767007 - RNA, 19 nt, Homo sapiens
  misc_RNA (1)...(19): siRNA sense strand
gacagcagcuacuccaaga

SEQ ID NO: 1767008 - RNA, 19 nt, Homo sapiens
  misc_RNA (1)...(19): siRNA sense strand
cccaggagcugcugaaaga

SEQ ID NO: 1767009 - RNA, 19 nt, Homo sapiens
  misc_RNA (1)...(19): siRNA sense strand
ugaaggaccuccaggaaca

SEQ ID NO: 1767010 - RNA, 19 nt, Homo sapiens
  misc_RNA (1)...(19): siRNA sense strand
gcaagaaggcacaggagaa

SEQ ID NO: 1767011 - RNA, 19 nt, Homo sapiens
  misc_RNA (1)...(19): siRNA sense strand
caaugaguguagaagauuu

SEQ ID NO: 1767012 - RNA, 19 nt, Homo sapiens
  misc_RNA (1)...(19): siRNA sense strand
gaagaugugagccgagaaa

SEQ ID NO: 1767013 - RNA, 19 nt, Homo sapiens
  misc_RNA (1)...(19): siRNA sense strand
ggcaacaucuccucucuca

SEQ ID NO: 1767014 - RNA, 19 nt, Homo sapiens
  misc_RNA (1)...(19): siRNA sense strand
aagaaccucucaaauagaa

SEQ ID NO: 1767015 - RNA, 19 nt, Homo sapiens
  misc_RNA (1)...(19): siRNA sense strand
agaaagaggaguuaagaaa

SEQ ID NO: 1767016 - RNA, 19 nt, Homo sapiens
  misc_RNA (1)...(19): siRNA sense strand
gaaguauuccauaaucuug

SEQ ID NO: 1767017 - RNA, 19 nt, Homo sapiens
  misc_RNA (1)...(19): siRNA sense strand
gaacaagagaaguuuaauc

SEQ ID NO: 1767018 - RNA, 19 nt, Homo sapiens
  misc_RNA (1)...(19): siRNA sense strand
ggaaaacacuacucuccua

SEQ ID NO: 1767019 - RNA, 19 nt, Homo sapiens
  misc_RNA (1)...(19): siRNA sense strand
gaagaaccucucaaauaga

SEQ ID NO: 1767020 - RNA, 19 nt, Homo sapiens
  misc_RNA (1)...(19): siRNA sense strand
uagaagcucagcccaaaua

SEQ ID NO: 1767021 - RNA, 19 nt, Homo sapiens
  misc_RNA (1)...(19): siRNA sense strand
gaaggucagucagaugaau

SEQ ID NO: 1767022 - RNA, 19 nt, Homo sapiens
  misc_RNA (1)...(19): siRNA sense strand
caucagggcuccauaacca

SEQ ID NO: 1767023 - RNA, 19 nt, Homo sapiens
  misc_RNA (1)...(19): siRNA sense strand
gaacuucugagauaugaau

SEQ ID NO: 1767024 - RNA, 19 nt, Homo sapiens
  misc_RNA (1)...(19): siRNA sense strand
aaucgaaccugauggaaau

SEQ ID NO: 1767025 - RNA, 19 nt, Homo sapiens
  misc_RNA (1)...(19): siRNA sense strand
aaaguuagagccaggguua

SEQ ID NO: 1767026 - RNA, 19 nt, Homo sapiens
  misc_RNA (1)...(19): siRNA sense strand
gaaacacacucuugagaaa

SEQ ID NO: 1767027 - RNA, 19 nt, Homo sapiens
  misc_RNA (1)...(19): siRNA sense strand
gaaauugccugguuacaug

SEQ ID NO: 1767028 - RNA, 19 nt, Homo sapiens
  misc_RNA (1)...(19): siRNA sense strand
gaacgaaacgcacaccuua

SEQ ID NO: 1767029 - RNA, 19 nt, Homo sapiens
  misc_RNA (1)...(19): siRNA sense strand
caagagaaguuuaaucuga

SEQ ID NO: 1767030 - RNA, 19 nt, Homo sapiens
  misc_RNA (1)...(19): siRNA sense strand
ggacauauguugccucaga

SEQ ID NO: 1767031 - RNA, 19 nt, Homo sapiens
  misc_RNA (1)...(19): siRNA sense strand
gaaaauggcuacugaaauu

SEQ ID NO: 1767032 - RNA, 19 nt, Homo sapiens
  misc_RNA (1)...(19): siRNA sense strand
gaaacagaguguaauagaa

SEQ ID NO: 1767033 - RNA, 19 nt, Homo sapiens
  misc_RNA (1)...(19): siRNA sense strand
ggaagucacugaaacauuc

SEQ ID NO: 1767034 - RNA, 19 nt, Homo sapiens
  misc_RNA (1)...(19): siRNA sense strand
gcaagaaguuugugaagau

SEQ ID NO: 1767035 - RNA, 19 nt, Homo sapiens
  misc_RNA (1)...(19): siRNA sense strand
uuaaauagcugugucgaua

SEQ ID NO: 1767036 - RNA, 19 nt, Homo sapiens
  misc_RNA (1)...(19): siRNA sense strand
ggaagaagcuggucuccau

SEQ ID NO: 1767037 - RNA, 19 nt, Homo sapiens
  misc_RNA (1)...(19): siRNA sense strand
uaagugaccuggaagauga

SEQ ID NO: 1767038 - RNA, 19 nt, Homo sapiens
  misc_RNA (1)...(19): siRNA sense strand
gcagagagcucaugaacag

SEQ ID NO: 1767039 - RNA, 19 nt, Homo sapiens
  misc_RNA (1)...(19): siRNA sense strand
uagaagaaccucucaaaua

SEQ ID NO: 1767040 - RNA, 19 nt, Homo sapiens
  misc_RNA (1)...(19): siRNA sense strand
ccgagaagcucaagucuuu

SEQ ID NO: 1767041 - RNA, 19 nt, Homo sapiens
  misc_RNA (1)...(19): siRNA sense strand
gaagagagacugacacaga

SEQ ID NO: 1767042 - RNA, 19 nt, Homo sapiens
  misc_RNA (1)...(19): siRNA sense strand
gaagaacacuuucaagaac

SEQ ID NO: 1767043 - RNA, 19 nt, Homo sapiens
  misc_RNA (1)...(19): siRNA sense strand
gaugaaaucugaccuacga

SEQ ID NO: 1767044 - RNA, 19 nt, Homo sapiens
  misc_RNA (1)...(19): siRNA sense strand
ggaagaauaucgugcacaa

SEQ ID NO: 1767045 - RNA, 19 nt, Homo sapiens
  misc_RNA (1)...(19): siRNA sense strand
gaacccagaugacuugaau

SEQ ID NO: 1767046 - RNA, 19 nt, Homo sapiens
  misc_RNA (1)...(19): siRNA sense strand
gagagagugugaucaguuu

SEQ ID NO: 1767047 - RNA, 19 nt, Homo sapiens
  misc_RNA (1)...(19): siRNA sense strand
ugaaacagcugcacagaug

SEQ ID NO: 1767048 - RNA, 19 nt, Homo sapiens
  misc_RNA (1)...(19): siRNA sense strand
gacuggagcucgaagauaa

SEQ ID NO: 1767049 - RNA, 19 nt, Homo sapiens
  misc_RNA (1)...(19): siRNA sense strand
agucugagcuggaagaaua

SEQ ID NO: 1767050 - RNA, 19 nt, Homo sapiens
  misc_RNA (1)...(19): siRNA sense strand
cagaagaaguugaggcuaa

SEQ ID NO: 1767051 - RNA, 19 nt, Homo sapiens
  misc_RNA (1)...(19): siRNA sense strand
gaaccagacugcucacuag

SEQ ID NO: 1767052 - RNA, 19 nt, Homo sapiens
  misc_RNA (1)...(19): siRNA sense strand
gaacuuaaucaacgucuaa

SEQ ID NO: 1767053 - RNA, 19 nt, Homo sapiens
  misc_RNA (1)...(19): siRNA sense strand
agaagaaccucucaaauag

SEQ ID NO: 1767054 - RNA, 19 nt, Homo sapiens
  misc_RNA (1)...(19): siRNA sense strand
ggagcucucugaaguuaaa

SEQ ID NO: 1767055 - RNA, 19 nt, Homo sapiens
  misc_RNA (1)...(19): siRNA sense strand
ugacacagaugagaaauga

SEQ ID NO: 1767056 - RNA, 19 nt, Homo sapiens
  misc_RNA (1)...(19): siRNA sense strand
gaaacuggaugaagaguac

SEQ ID NO: 1767057 - RNA, 19 nt, Homo sapiens
  misc_RNA (1)...(19): siRNA sense strand
gcggagcucucugaaguua

SEQ ID NO: 1767058 - RNA, 19 nt, Homo sapiens
  misc_RNA (1)...(19): siRNA sense strand
gaaauauacuccagcucaa

SEQ ID NO: 1767059 - RNA, 19 nt, Homo sapiens
  misc_RNA (1)...(19): siRNA sense strand
uagaugaacuccagucuga

SEQ ID NO: 1767060 - RNA, 19 nt, Homo sapiens
  misc_RNA (1)...(19): siRNA sense strand
gaauguggauggagagaug

SEQ ID NO: 1767061 - RNA, 19 nt, Homo sapiens
  misc_RNA (1)...(19): siRNA sense strand
gcacagaaaucuccagacu

SEQ ID NO: 1767062 - RNA, 19 nt, Homo sapiens
  misc_RNA (1)...(19): siRNA sense strand
gaacucaccgucagaagaa

SEQ ID NO: 1767063 - RNA, 19 nt, Homo sapiens
  misc_RNA (1)...(19): siRNA sense strand
guucuaagcuacaacgaaa

SEQ ID NO: 1767064 - RNA, 19 nt, Homo sapiens
  misc_RNA (1)...(19): siRNA sense strand
gggagcagcuguuggaaga

SEQ ID NO: 1767065 - RNA, 19 nt, Homo sapiens
  misc_RNA (1)...(19): siRNA sense strand
gaagagaccaggacugaau

SEQ ID NO: 1767066 - RNA, 19 nt, Homo sapiens
  misc_RNA (1)...(19): siRNA sense strand
aggcagagcuggucauuga

SEQ ID NO: 1767067 - RNA, 19 nt, Homo sapiens
  misc_RNA (1)...(19): siRNA sense strand
ggaaaagguucagaauuua

SEQ ID NO: 1767068 - RNA, 19 nt, Homo sapiens
  misc_RNA (1)...(19): siRNA sense strand
acagaaaucuccagacuuc

SEQ ID NO: 1767069 - RNA, 19 nt, Homo sapiens
  misc_RNA (1)...(19): siRNA sense strand
gacagcagaucgagaaaga

SEQ ID NO: 1767070 - RNA, 19 nt, Homo sapiens
  misc_RNA (1)...(19): siRNA sense strand
ucaaauagaagcccaguuu

SEQ ID NO: 1767071 - RNA, 19 nt, Homo sapiens
  misc_RNA (1)...(19): siRNA sense strand
ggaaacagaguguaauaga

SEQ ID NO: 1767072 - RNA, 19 nt, Homo sapiens
  misc_RNA (1)...(19): siRNA sense strand
ucaggaaacuggaugaaga

SEQ ID NO: 1767073 - RNA, 19 nt, Homo sapiens
  misc_RNA (1)...(19): siRNA sense strand
ugacaagccugguggagaa

SEQ ID NO: 1767074 - RNA, 19 nt, Homo sapiens
  misc_RNA (1)...(19): siRNA sense strand
gcaaaggcaugagaacgaa

SEQ ID NO: 1767075 - RNA, 19 nt, Homo sapiens
  misc_RNA (1)...(19): siRNA sense strand
gaagauaaagugcgccauu

SEQ ID NO: 1767076 - RNA, 19 nt, Homo sapiens
  misc_RNA (1)...(19): siRNA sense strand
ccaaauauaagcuguugua

SEQ ID NO: 1767077 - RNA, 19 nt, Homo sapiens
  misc_RNA (1)...(19): siRNA sense strand
gacuagaaauggaacauga

SEQ ID NO: 1767078 - RNA, 19 nt, Homo sapiens
  misc_RNA (1)...(19): siRNA sense strand
gcaaaugucccggaugaaa

SEQ ID NO: 1767079 - RNA, 19 nt, Homo sapiens
  misc_RNA (1)...(19): siRNA sense strand
ccagaugacuugaaugcuu

SEQ ID NO: 1767080 - RNA, 19 nt, Homo sapiens
  misc_RNA (1)...(19): siRNA sense strand
gaacaauucagacacauca

SEQ ID NO: 1767081 - RNA, 19 nt, Homo sapiens
  misc_RNA (1)...(19): siRNA sense strand
caacaucuccucucucaau

SEQ ID NO: 1767082 - RNA, 19 nt, Homo sapiens
  misc_RNA (1)...(19): siRNA sense strand
agagagagaugcuggagaa

SEQ ID NO: 1767083 - RNA, 19 nt, Homo sapiens
  misc_RNA (1)...(19): siRNA sense strand
gaugagaaaugaauaugag

SEQ ID NO: 1767084 - RNA, 19 nt, Homo sapiens
  misc_RNA (1)...(19): siRNA sense strand
gaagagaaacugcaagaag

SEQ ID NO: 1767085 - RNA, 19 nt, Homo sapiens
  misc_RNA (1)...(19): siRNA sense strand
gcaguaugguuuacagaau

SEQ ID NO: 1767086 - RNA, 19 nt, Homo sapiens
  misc_RNA (1)...(19): siRNA sense strand
caucuaaacccaucaggua

SEQ ID NO: 1767087 - RNA, 19 nt, Homo sapiens
  misc_RNA (1)...(19): siRNA sense strand
ccugggagcugaagaauca

SEQ ID NO: 1767088 - RNA, 19 nt, Homo sapiens
  misc_RNA (1)...(19): siRNA sense strand
gagcagcuguuggaagaaa

SEQ ID NO: 1767089 - RNA, 19 nt, Homo sapiens
  misc_RNA (1)...(19): siRNA sense strand
gaaacgcacaccuuagaaa

SEQ ID NO: 1767090 - RNA, 19 nt, Homo sapiens
  misc_RNA (1)...(19): siRNA sense strand
gagaagcucaagucuuuaa

SEQ ID NO: 1767091 - RNA, 19 nt, Homo sapiens
  misc_RNA (1)...(19): siRNA sense strand
aaagaacaaucuccugcua

SEQ ID NO: 1767092 - RNA, 19 nt, Homo sapiens
  misc_RNA (1)...(19): siRNA sense strand
gaagauagcauuucuaacc

SEQ ID NO: 1767093 - RNA, 19 nt, Homo sapiens
  misc_RNA (1)...(19): siRNA sense strand
gaacacacagcucuuggaa

SEQ ID NO: 1767094 - RNA, 19 nt, Homo sapiens
  misc_RNA (1)...(19): siRNA sense strand
gcucagcccaaauauguua

SEQ ID NO: 1767095 - RNA, 19 nt, Homo sapiens
  misc_RNA (1)...(19): siRNA sense strand
gaacaggcagugaaggaaa

SEQ ID NO: 1767096 - RNA, 19 nt, Homo sapiens
  misc_RNA (1)...(19): siRNA sense strand
gcucaaggcuagacugaca

SEQ ID NO: 1767097 - RNA, 19 nt, Homo sapiens
  misc_RNA (1)...(19): siRNA sense strand
gaagacaccgugcagaaug

SEQ ID NO: 1767098 - RNA, 19 nt, Homo sapiens
  misc_RNA (1)...(19): siRNA sense strand
gcugguggcuucucaggaa

SEQ ID NO: 1767099 - RNA, 19 nt, Homo sapiens
  misc_RNA (1)...(19): siRNA sense strand
ugaaggcaaugaugcauga

SEQ ID NO: 1767100 - RNA, 19 nt, Homo sapiens
  misc_RNA (1)...(19): siRNA sense strand
uacaggagcugacuaggaa

SEQ ID NO: 1767101 - RNA, 19 nt, Homo sapiens
  misc_RNA (1)...(19): siRNA sense strand
aagauaaagugcgccauua

SEQ ID NO: 1767102 - RNA, 19 nt, Homo sapiens
  misc_RNA (1)...(19): siRNA sense strand
gaacuggaacguuguaaag

SEQ ID NO: 1767103 - RNA, 19 nt, Homo sapiens
  misc_RNA (1)...(19): siRNA sense strand
gcagugagaugcagcaaaa

SEQ ID NO: 1767104 - RNA, 19 nt, Homo sapiens
  misc_RNA (1)...(19): siRNA sense strand
ugaagaugcuugagagaau

SEQ ID NO: 1767105 - RNA, 19 nt, Homo sapiens
  misc_RNA (1)...(19): siRNA sense strand
ggaaagacuagaaauggaa

SEQ ID NO: 1767106 - RNA, 19 nt, Homo sapiens
  misc_RNA (1)...(19): siRNA sense strand
ccuaagaaauguaucugaa

SEQ ID NO: 1767107 - RNA, 19 nt, Homo sapiens
  misc_RNA (1)...(19): siRNA sense strand
gacagcagcuacuccaaga

SEQ ID NO: 1767108 - RNA, 19 nt, Homo sapiens
  misc_RNA (1)...(19): siRNA sense strand
cccaggagcugcugaaaga

SEQ ID NO: 1767109 - RNA, 19 nt, Homo sapiens
  misc_RNA (1)...(19): siRNA sense strand
ugaaggaccuccaggaaca

SEQ ID NO: 1767110 - RNA, 19 nt, Homo sapiens
  misc_RNA (1)...(19): siRNA sense strand
gcaagaaggcacaggagaa

SEQ ID NO: 1767111 - RNA, 19 nt, Homo sapiens
  misc_RNA (1)...(19): siRNA sense strand
caaugaguguagaagauuu

SEQ ID NO: 1767112 - RNA, 19 nt, Homo sapiens
  misc_RNA (1)...(19): siRNA sense strand
gaagaugugagccgagaaa

SEQ ID NO: 1767113 - RNA, 19 nt, Homo sapiens
  misc_RNA (1)...(19): siRNA sense strand
ggcaacaucuccucucuca

SEQ ID NO: 1767114 - RNA, 19 nt, Homo sapiens
  misc_RNA (1)...(19): siRNA sense strand
aagaaccucucaaauagaa

SEQ ID NO: 1767115 - RNA, 19 nt, Homo sapiens
  misc_RNA (1)...(19): siRNA sense strand
agaaagaggaguuaagaaa

SEQ ID NO: 1767116 - RNA, 19 nt, Homo sapiens
  misc_RNA (1)...(19): siRNA sense strand
gaaguauuccauaaucuug

SEQ ID NO: 1767117 - RNA, 19 nt, Homo sapiens
  misc_RNA (1)...(19): siRNA sense strand
gaacaagagaaguuuaauc

SEQ ID NO: 1767118 - RNA, 19 nt, Homo sapiens
  misc_RNA (1)...(19): siRNA sense strand
ggaaaacacuacucuccua

SEQ ID NO: 1767119 - RNA, 19 nt, Homo sapiens
  misc_RNA (1)...(19): siRNA sense strand
gaagaaccucucaaauaga

SEQ ID NO: 1767120 - RNA, 19 nt, Homo sapiens
  misc_RNA (1)...(19): siRNA sense strand
uagaagcucagcccaaaua

SEQ ID NO: 1767121 - RNA, 19 nt, Homo sapiens
  misc_RNA (1)...(19): siRNA sense strand
gaaggucagucagaugaau

SEQ ID NO: 1767122 - RNA, 19 nt, Homo sapiens
  misc_RNA (1)...(19): siRNA sense strand
caucagggcuccauaacca

SEQ ID NO: 1767123 - RNA, 19 nt, Homo sapiens
  misc_RNA (1)...(19): siRNA sense strand
gaacuucugagauaugaau

SEQ ID NO: 1767124 - RNA, 19 nt, Homo sapiens
  misc_RNA (1)...(19): siRNA sense strand
aaucgaaccugauggaaau

SEQ ID NO: 1767125 - RNA, 19 nt, Homo sapiens
  misc_RNA (1)...(19): siRNA sense strand
aaaguuagagccaggguua

SEQ ID NO: 1767126 - RNA, 19 nt, Homo sapiens
  misc_RNA (1)...(19): siRNA sense strand
gaaacacacucuugagaaa

SEQ ID NO: 1767127 - RNA, 19 nt, Homo sapiens
  misc_RNA (1)...(19): siRNA sense strand
gaaauugccugguuacaug

SEQ ID NO: 1767128 - RNA, 19 nt, Homo sapiens
  misc_RNA (1)...(19): siRNA sense strand
gaacgaaacgcacaccuua

SEQ ID NO: 1767129 - RNA, 19 nt, Homo sapiens
  misc_RNA (1)...(19): siRNA sense strand
caagagaaguuuaaucuga

SEQ ID NO: 1767130 - RNA, 19 nt, Homo sapiens
  misc_RNA (1)...(19): siRNA sense strand
ggacauauguugccucaga

SEQ ID NO: 1767131 - RNA, 19 nt, Homo sapiens
  misc_RNA (1)...(19): siRNA sense strand
gaaaauggcuacugaaauu

SEQ ID NO: 1767132 - RNA, 19 nt, Homo sapiens
  misc_RNA (1)...(19): siRNA sense strand
gaaacagaguguaauagaa

SEQ ID NO: 1767133 - RNA, 19 nt, Homo sapiens
  misc_RNA (1)...(19): siRNA sense strand
ggaagucacugaaacauuc

SEQ ID NO: 1767134 - RNA, 19 nt, Homo sapiens
  misc_RNA (1)...(19): siRNA sense strand
gcaagaaguuugugaagau

SEQ ID NO: 1767135 - RNA, 19 nt, Homo sapiens
  misc_RNA (1)...(19): siRNA sense strand
uuaaauagcugugucgaua

SEQ ID NO: 1767136 - RNA, 19 nt, Homo sapiens
  misc_RNA (1)...(19): siRNA sense strand
ggaagaagcuggucuccau

SEQ ID NO: 1767137 - RNA, 19 nt, Homo sapiens
  misc_RNA (1)...(19): siRNA sense strand
uaagugaccuggaagauga

SEQ ID NO: 1767138 - RNA, 19 nt, Homo sapiens
  misc_RNA (1)...(19): siRNA sense strand
gcagagagcucaugaacag

SEQ ID NO: 1767139 - RNA, 19 nt, Homo sapiens
  misc_RNA (1)...(19): siRNA sense strand
uagaagaaccucucaaaua

SEQ ID NO: 1767140 - RNA, 19 nt, Homo sapiens
  misc_RNA (1)...(19): siRNA sense strand
ccgagaagcucaagucuuu

SEQ ID NO: 1767141 - RNA, 19 nt, Homo sapiens
  misc_RNA (1)...(19): siRNA sense strand
gaagagagacugacacaga

SEQ ID NO: 1767142 - RNA, 19 nt, Homo sapiens
  misc_RNA (1)...(19): siRNA sense strand
gaagaacacuuucaagaac

SEQ ID NO: 1767143 - RNA, 19 nt, Homo sapiens
  misc_RNA (1)...(19): siRNA sense strand
gaugaaaucugaccuacga

SEQ ID NO: 1767144 - RNA, 19 nt, Homo sapiens
  misc_RNA (1)...(19): siRNA sense strand
ggaagaauaucgugcacaa

SEQ ID NO: 1767145 - RNA, 19 nt, Homo sapiens
  misc_RNA (1)...(19): siRNA sense strand
gaacccagaugacuugaau

SEQ ID NO: 1767146 - RNA, 19 nt, Homo sapiens
  misc_RNA (1)...(19): siRNA sense strand
gagagagugugaucaguuu

SEQ ID NO: 1767147 - RNA, 19 nt, Homo sapiens
  misc_RNA (1)...(19): siRNA sense strand
ugaaacagcugcacagaug

SEQ ID NO: 1767148 - RNA, 19 nt, Homo sapiens
  misc_RNA (1)...(19): siRNA sense strand
gacuggagcucgaagauaa

SEQ ID NO: 1767149 - RNA, 19 nt, Homo sapiens
  misc_RNA (1)...(19): siRNA sense strand
agucugagcuggaagaaua

SEQ ID NO: 1767150 - RNA, 19 nt, Homo sapiens
  misc_RNA (1)...(19): siRNA sense strand
cagaagaaguugaggcuaa

SEQ ID NO: 1767151 - RNA, 19 nt, Homo sapiens
  misc_RNA (1)...(19): siRNA sense strand
gaaccagacugcucacuag

SEQ ID NO: 1767152 - RNA, 19 nt, Homo sapiens
  misc_RNA (1)...(19): siRNA sense strand
gaacuuaaucaacgucuaa

SEQ ID NO: 1767153 - RNA, 19 nt, Homo sapiens
  misc_RNA (1)...(19): siRNA sense strand
agaagaaccucucaaauag

SEQ ID NO: 1767154 - RNA, 19 nt, Homo sapiens
  misc_RNA (1)...(19): siRNA sense strand
ggagcucucugaaguuaaa

SEQ ID NO: 1767155 - RNA, 19 nt, Homo sapiens
  misc_RNA (1)...(19): siRNA sense strand
ugacacagaugagaaauga

SEQ ID NO: 1767156 - RNA, 19 nt, Homo sapiens
  misc_RNA (1)...(19): siRNA sense strand
gaaacuggaugaagaguac

SEQ ID NO: 1767157 - RNA, 19 nt, Homo sapiens
  misc_RNA (1)...(19): siRNA sense strand
gcggagcucucugaaguua

SEQ ID NO: 1767158 - RNA, 19 nt, Homo sapiens
  misc_RNA (1)...(19): siRNA sense strand
gaaauauacuccagcucaa

SEQ ID NO: 1767159 - RNA, 19 nt, Homo sapiens
  misc_RNA (1)...(19): siRNA sense strand
uagaugaacuccagucuga

SEQ ID NO: 1767160 - RNA, 19 nt, Homo sapiens
  misc_RNA (1)...(19): siRNA sense strand
gaauguggauggagagaug

SEQ ID NO: 1767161 - RNA, 19 nt, Homo sapiens
  misc_RNA (1)...(19): siRNA sense strand
gcacagaaaucuccagacu

SEQ ID NO: 1767162 - RNA, 19 nt, Homo sapiens
  misc_RNA (1)...(19): siRNA sense strand
gaacucaccgucagaagaa

SEQ ID NO: 1767163 - RNA, 19 nt, Homo sapiens
  misc_RNA (1)...(19): siRNA sense strand
guucuaagcuacaacgaaa

SEQ ID NO: 1767164 - RNA, 19 nt, Homo sapiens
  misc_RNA (1)...(19): siRNA sense strand
gggagcagcuguuggaaga

SEQ ID NO: 1767165 - RNA, 19 nt, Homo sapiens
  misc_RNA (1)...(19): siRNA sense strand
gaagagaccaggacugaau

SEQ ID NO: 1767166 - RNA, 19 nt, Homo sapiens
  misc_RNA (1)...(19): siRNA sense strand
aggcagagcuggucauuga

SEQ ID NO: 1767167 - RNA, 19 nt, Homo sapiens
  misc_RNA (1)...(19): siRNA sense strand
ggaaaagguucagaauuua

SEQ ID NO: 1767168 - RNA, 19 nt, Homo sapiens
  misc_RNA (1)...(19): siRNA sense strand
acagaaaucuccagacuuc

SEQ ID NO: 1767169 - RNA, 19 nt, Homo sapiens
  misc_RNA (1)...(19): siRNA sense strand
gacagcagaucgagaaaga

SEQ ID NO: 1767170 - RNA, 19 nt, Homo sapiens
  misc_RNA (1)...(19): siRNA sense strand
ucaaauagaagcccaguuu

SEQ ID NO: 1767171 - RNA, 19 nt, Homo sapiens
  misc_RNA (1)...(19): siRNA sense strand
ggaaacagaguguaauaga

SEQ ID NO: 1767172 - RNA, 19 nt, Homo sapiens
  misc_RNA (1)...(19): siRNA sense strand
ucaggaaacuggaugaaga

SEQ ID NO: 1767173 - RNA, 19 nt, Homo sapiens
  misc_RNA (1)...(19): siRNA sense strand
ugacaagccugguggagaa

SEQ ID NO: 1767174 - RNA, 19 nt, Homo sapiens
  misc_RNA (1)...(19): siRNA sense strand
gcaaaggcaugagaacgaa

SEQ ID NO: 1767175 - RNA, 19 nt, Homo sapiens
  misc_RNA (1)...(19): siRNA sense strand
gaagauaaagugcgccauu

SEQ ID NO: 1767176 - RNA, 19 nt, Homo sapiens
  misc_RNA (1)...(19): siRNA sense strand
ccaaauauaagcuguugua

SEQ ID NO: 1767177 - RNA, 19 nt, Homo sapiens
  misc_RNA (1)...(19): siRNA sense strand
gacuagaaauggaacauga

SEQ ID NO: 1767178 - RNA, 19 nt, Homo sapiens
  misc_RNA (1)...(19): siRNA sense strand
gcaaaugucccggaugaaa

SEQ ID NO: 1767179 - RNA, 19 nt, Homo sapiens
  misc_RNA (1)...(19): siRNA sense strand
ccagaugacuugaaugcuu

SEQ ID NO: 1767180 - RNA, 19 nt, Homo sapiens
  misc_RNA (1)...(19): siRNA sense strand
gaacaauucagacacauca

SEQ ID NO: 1767181 - RNA, 19 nt, Homo sapiens
  misc_RNA (1)...(19): siRNA sense strand
caacaucuccucucucaau

SEQ ID NO: 1767182 - RNA, 19 nt, Homo sapiens
  misc_RNA (1)...(19): siRNA sense strand
agagagagaugcuggagaa

SEQ ID NO: 1767183 - RNA, 19 nt, Homo sapiens
  misc_RNA (1)...(19): siRNA sense strand
gaugagaaaugaauaugag

SEQ ID NO: 1767184 - RNA, 19 nt, Homo sapiens
  misc_RNA (1)...(19): siRNA sense strand
gaagagaaacugcaagaag

SEQ ID NO: 1767185 - RNA, 19 nt, Homo sapiens
  misc_RNA (1)...(19): siRNA sense strand
gcaguaugguuuacagaau

SEQ ID NO: 1767186 - RNA, 19 nt, Homo sapiens
  misc_RNA (1)...(19): siRNA sense strand
caucuaaacccaucaggua

SEQ ID NO: 1767187 - RNA, 19 nt, Homo sapiens
  misc_RNA (1)...(19): siRNA sense strand
ccugggagcugaagaauca

SEQ ID NO: 1767188 - RNA, 19 nt, Homo sapiens
  misc_RNA (1)...(19): siRNA sense strand
gagcagcuguuggaagaaa

SEQ ID NO: 1767189 - RNA, 19 nt, Homo sapiens
  misc_RNA (1)...(19): siRNA sense strand
gaaacgcacaccuuagaaa

SEQ ID NO: 1767190 - RNA, 19 nt, Homo sapiens
  misc_RNA (1)...(19): siRNA sense strand
gagaagcucaagucuuuaa

SEQ ID NO: 1767191 - RNA, 19 nt, Homo sapiens
  misc_RNA (1)...(19): siRNA sense strand
aaagaacaaucuccugcua

SEQ ID NO: 1767192 - RNA, 19 nt, Homo sapiens
  misc_RNA (1)...(19): siRNA sense strand
gaagauagcauuucuaacc

SEQ ID NO: 1767193 - RNA, 19 nt, Homo sapiens
  misc_RNA (1)...(19): siRNA sense strand
gaacacacagcucuuggaa

SEQ ID NO: 1767194 - RNA, 19 nt, Homo sapiens
  misc_RNA (1)...(19): siRNA sense strand
gcucagcccaaauauguua

SEQ ID NO: 1767195 - RNA, 19 nt, Homo sapiens
  misc_RNA (1)...(19): siRNA sense strand
gaacaggcagugaaggaaa

SEQ ID NO: 1767196 - RNA, 19 nt, Homo sapiens
  misc_RNA (1)...(19): siRNA sense strand
gcucaaggcuagacugaca

SEQ ID NO: 1767197 - RNA, 19 nt, Homo sapiens
  misc_RNA (1)...(19): siRNA sense strand
gaagacaccgugcagaaug

SEQ ID NO: 1767198 - RNA, 19 nt, Homo sapiens
  misc_RNA (1)...(19): siRNA sense strand
gcugguggcuucucaggaa

SEQ ID NO: 1767199 - RNA, 19 nt, Homo sapiens
  misc_RNA (1)...(19): siRNA sense strand
ugaaggcaaugaugcauga

SEQ ID NO: 1767200 - RNA, 19 nt, Homo sapiens
  misc_RNA (1)...(19): siRNA sense strand
uacaggagcugacuaggaa

SEQ ID NO: 1767201 - RNA, 19 nt, Homo sapiens
  misc_RNA (1)...(19): siRNA sense strand
aagauaaagugcgccauua

SEQ ID NO: 1767202 - RNA, 19 nt, Homo sapiens
  misc_RNA (1)...(19): siRNA sense strand
gaacuggaacguuguaaag

SEQ ID NO: 1767203 - RNA, 19 nt, Homo sapiens
  misc_RNA (1)...(19): siRNA sense strand
gcagugagaugcagcaaaa

SEQ ID NO: 1767204 - RNA, 19 nt, Homo sapiens
  misc_RNA (1)...(19): siRNA sense strand
ugaagaugcuugagagaau

SEQ ID NO: 1767205 - RNA, 19 nt, Homo sapiens
  misc_RNA (1)...(19): siRNA sense strand
ggaaagacuagaaauggaa

SEQ ID NO: 1767206 - RNA, 19 nt, Homo sapiens
  misc_RNA (1)...(19): siRNA sense strand
ccuaagaaauguaucugaa

SEQ ID NO: 1767207 - RNA, 19 nt, Homo sapiens
  misc_RNA (1)...(19): siRNA sense strand
gacagcagcuacuccaaga

SEQ ID NO: 1767208 - RNA, 19 nt, Homo sapiens
  misc_RNA (1)...(19): siRNA sense strand
cccaggagcugcugaaaga

SEQ ID NO: 1767209 - RNA, 19 nt, Homo sapiens
  misc_RNA (1)...(19): siRNA sense strand
ugaaggaccuccaggaaca

SEQ ID NO: 1767210 - RNA, 19 nt, Homo sapiens
  misc_RNA (1)...(19): siRNA sense strand
gcaagaaggcacaggagaa

SEQ ID NO: 1767211 - RNA, 19 nt, Homo sapiens
  misc_RNA (1)...(19): siRNA sense strand
caaugaguguagaagauuu

SEQ ID NO: 1767212 - RNA, 19 nt, Homo sapiens
  misc_RNA (1)...(19): siRNA sense strand
gaagaugugagccgagaaa

SEQ ID NO: 1767213 - RNA, 19 nt, Homo sapiens
  misc_RNA (1)...(19): siRNA sense strand
ggcaacaucuccucucuca

SEQ ID NO: 1767214 - RNA, 19 nt, Homo sapiens
  misc_RNA (1)...(19): siRNA sense strand
aagaaccucucaaauagaa

SEQ ID NO: 1767215 - RNA, 19 nt, Homo sapiens
  misc_RNA (1)...(19): siRNA sense strand
agaaagaggaguuaagaaa

SEQ ID NO: 1767216 - RNA, 19 nt, Homo sapiens
  misc_RNA (1)...(19): siRNA sense strand
gaaguauuccauaaucuug

SEQ ID NO: 1767217 - RNA, 19 nt, Homo sapiens
  misc_RNA (1)...(19): siRNA sense strand
gaacaagagaaguuuaauc

SEQ ID NO: 1767218 - RNA, 19 nt, Homo sapiens
  misc_RNA (1)...(19): siRNA sense strand
ggaaaacacuacucuccua

SEQ ID NO: 1767219 - RNA, 19 nt, Homo sapiens
  misc_RNA (1)...(19): siRNA sense strand
gaagaaccucucaaauaga

SEQ ID NO: 1767220 - RNA, 19 nt, Homo sapiens
  misc_RNA (1)...(19): siRNA sense strand
uagaagcucagcccaaaua

SEQ ID NO: 1767221 - RNA, 19 nt, Homo sapiens
  misc_RNA (1)...(19): siRNA sense strand
gaaggucagucagaugaau

SEQ ID NO: 1767222 - RNA, 19 nt, Homo sapiens
  misc_RNA (1)...(19): siRNA sense strand
caucagggcuccauaacca

SEQ ID NO: 1767223 - RNA, 19 nt, Homo sapiens
  misc_RNA (1)...(19): siRNA sense strand
gaacuucugagauaugaau

SEQ ID NO: 1767224 - RNA, 19 nt, Homo sapiens
  misc_RNA (1)...(19): siRNA sense strand
aaucgaaccugauggaaau

SEQ ID NO: 1767225 - RNA, 19 nt, Homo sapiens
  misc_RNA (1)...(19): siRNA sense strand
aaaguuagagccaggguua

SEQ ID NO: 1767226 - RNA, 19 nt, Homo sapiens
  misc_RNA (1)...(19): siRNA sense strand
gaaacacacucuugagaaa

SEQ ID NO: 1767227 - RNA, 19 nt, Homo sapiens
  misc_RNA (1)...(19): siRNA sense strand
gaaauugccugguuacaug

SEQ ID NO: 1767228 - RNA, 19 nt, Homo sapiens
  misc_RNA (1)...(19): siRNA sense strand
gaacgaaacgcacaccuua

SEQ ID NO: 1767229 - RNA, 19 nt, Homo sapiens
  misc_RNA (1)...(19): siRNA sense strand
caagagaaguuuaaucuga

SEQ ID NO: 1767230 - RNA, 19 nt, Homo sapiens
  misc_RNA (1)...(19): siRNA sense strand
ggacauauguugccucaga

SEQ ID NO: 1767231 - RNA, 19 nt, Homo sapiens
  misc_RNA (1)...(19): siRNA sense strand
gaaaauggcuacugaaauu

SEQ ID NO: 1767232 - RNA, 19 nt, Homo sapiens
  misc_RNA (1)...(19): siRNA sense strand
gaaacagaguguaauagaa

SEQ ID NO: 1767233 - RNA, 19 nt, Homo sapiens
  misc_RNA (1)...(19): siRNA sense strand
ggaagucacugaaacauuc

SEQ ID NO: 1767234 - RNA, 19 nt, Homo sapiens
  misc_RNA (1)...(19): siRNA sense strand
gcaagaaguuugugaagau

SEQ ID NO: 1767235 - RNA, 19 nt, Homo sapiens
  misc_RNA (1)...(19): siRNA sense strand
uuaaauagcugugucgaua

SEQ ID NO: 1767236 - RNA, 19 nt, Homo sapiens
  misc_RNA (1)...(19): siRNA sense strand
ggaagaagcuggucuccau

SEQ ID NO: 1767237 - RNA, 19 nt, Homo sapiens
  misc_RNA (1)...(19): siRNA sense strand
uaagugaccuggaagauga

SEQ ID NO: 1767238 - RNA, 19 nt, Homo sapiens
  misc_RNA (1)...(19): siRNA sense strand
gcagagagcucaugaacag

SEQ ID NO: 1767239 - RNA, 19 nt, Homo sapiens
  misc_RNA (1)...(19): siRNA sense strand
uagaagaaccucucaaaua

SEQ ID NO: 1767240 - RNA, 19 nt, Homo sapiens
  misc_RNA (1)...(19): siRNA sense strand
ccgagaagcucaagucuuu

SEQ ID NO: 1767241 - RNA, 19 nt, Homo sapiens
  misc_RNA (1)...(19): siRNA sense strand
gaagagagacugacacaga

SEQ ID NO: 1767242 - RNA, 19 nt, Homo sapiens
  misc_RNA (1)...(19): siRNA sense strand
gaagaacacuuucaagaac

SEQ ID NO: 1767243 - RNA, 19 nt, Homo sapiens
  misc_RNA (1)...(19): siRNA sense strand
gaugaaaucugaccuacga

SEQ ID NO: 1767244 - RNA, 19 nt, Homo sapiens
  misc_RNA (1)...(19): siRNA sense strand
ggaagaauaucgugcacaa

SEQ ID NO: 1767245 - RNA, 19 nt, Homo sapiens
  misc_RNA (1)...(19): siRNA sense strand
gaacccagaugacuugaau

SEQ ID NO: 1767246 - RNA, 19 nt, Homo sapiens
  misc_RNA (1)...(19): siRNA sense strand
gagagagugugaucaguuu

SEQ ID NO: 1767247 - RNA, 19 nt, Homo sapiens
  misc_RNA (1)...(19): siRNA sense strand
ugaaacagcugcacagaug

SEQ ID NO: 1767248 - RNA, 19 nt, Homo sapiens
  misc_RNA (1)...(19): siRNA sense strand
gacuggagcucgaagauaa

SEQ ID NO: 1767249 - RNA, 19 nt, Homo sapiens
  misc_RNA (1)...(19): siRNA sense strand
agucugagcuggaagaaua

SEQ ID NO: 1767250 - RNA, 19 nt, Homo sapiens
  misc_RNA (1)...(19): siRNA sense strand
cagaagaaguugaggcuaa

SEQ ID NO: 1767251 - RNA, 19 nt, Homo sapiens
  misc_RNA (1)...(19): siRNA sense strand
gaaccagacugcucacuag

SEQ ID NO: 1767252 - RNA, 19 nt, Homo sapiens
  misc_RNA (1)...(19): siRNA sense strand
gaacuuaaucaacgucuaa

SEQ ID NO: 1767253 - RNA, 19 nt, Homo sapiens
  misc_RNA (1)...(19): siRNA sense strand
agaagaaccucucaaauag

SEQ ID NO: 1767254 - RNA, 19 nt, Homo sapiens
  misc_RNA (1)...(19): siRNA sense strand
ggagcucucugaaguuaaa

SEQ ID NO: 1767255 - RNA, 19 nt, Homo sapiens
  misc_RNA (1)...(19): siRNA sense strand
ugacacagaugagaaauga

SEQ ID NO: 1767256 - RNA, 19 nt, Homo sapiens
  misc_RNA (1)...(19): siRNA sense strand
gaaacuggaugaagaguac

SEQ ID NO: 1767257 - RNA, 19 nt, Homo sapiens
  misc_RNA (1)...(19): siRNA sense strand
gcggagcucucugaaguua

SEQ ID NO: 1767258 - RNA, 19 nt, Homo sapiens
  misc_RNA (1)...(19): siRNA sense strand
gaaauauacuccagcucaa

SEQ ID NO: 1767259 - RNA, 19 nt, Homo sapiens
  misc_RNA (1)...(19): siRNA sense strand
uagaugaacuccagucuga

SEQ ID NO: 1767260 - RNA, 19 nt, Homo sapiens
  misc_RNA (1)...(19): siRNA sense strand
gaauguggauggagagaug

SEQ ID NO: 1767261 - RNA, 19 nt, Homo sapiens
  misc_RNA (1)...(19): siRNA sense strand
gcacagaaaucuccagacu

SEQ ID NO: 1767262 - RNA, 19 nt, Homo sapiens
  misc_RNA (1)...(19): siRNA sense strand
gaacucaccgucagaagaa

SEQ ID NO: 1767263 - RNA, 19 nt, Homo sapiens
  misc_RNA (1)...(19): siRNA sense strand
guucuaagcuacaacgaaa

SEQ ID NO: 1767264 - RNA, 19 nt, Homo sapiens
  misc_RNA (1)...(19): siRNA sense strand
gggagcagcuguuggaaga

SEQ ID NO: 1767265 - RNA, 19 nt, Homo sapiens
  misc_RNA (1)...(19): siRNA sense strand
gaagagaccaggacugaau

SEQ ID NO: 1767266 - RNA, 19 nt, Homo sapiens
  misc_RNA (1)...(19): siRNA sense strand
aggcagagcuggucauuga

SEQ ID NO: 1767267 - RNA, 19 nt, Homo sapiens
  misc_RNA (1)...(19): siRNA sense strand
ggaaaagguucagaauuua

SEQ ID NO: 1767268 - RNA, 19 nt, Homo sapiens
  misc_RNA (1)...(19): siRNA sense strand
acagaaaucuccagacuuc

SEQ ID NO: 1767269 - RNA, 19 nt, Homo sapiens
  misc_RNA (1)...(19): siRNA sense strand
gacagcagaucgagaaaga

SEQ ID NO: 1767270 - RNA, 19 nt, Homo sapiens
  misc_RNA (1)...(19): siRNA sense strand
ucaaauagaagcccaguuu

SEQ ID NO: 1767271 - RNA, 19 nt, Homo sapiens
  misc_RNA (1)...(19): siRNA sense strand
ggaaacagaguguaauaga

SEQ ID NO: 1767272 - RNA, 19 nt, Homo sapiens
  misc_RNA (1)...(19): siRNA sense strand
ucaggaaacuggaugaaga

SEQ ID NO: 1767273 - RNA, 19 nt, Homo sapiens
  misc_RNA (1)...(19): siRNA sense strand
ugacaagccugguggagaa

SEQ ID NO: 1767274 - RNA, 19 nt, Homo sapiens
  misc_RNA (1)...(19): siRNA sense strand
gcaaaggcaugagaacgaa

SEQ ID NO: 1767275 - RNA, 19 nt, Homo sapiens
  misc_RNA (1)...(19): siRNA sense strand
gaagauaaagugcgccauu

SEQ ID NO: 1767276 - RNA, 19 nt, Homo sapiens
  misc_RNA (1)...(19): siRNA sense strand
ccaaauauaagcuguugua

SEQ ID NO: 1767277 - RNA, 19 nt, Homo sapiens
  misc_RNA (1)...(19): siRNA sense strand
gacuagaaauggaacauga

SEQ ID NO: 1767278 - RNA, 19 nt, Homo sapiens
  misc_RNA (1)...(19): siRNA sense strand
gcaaaugucccggaugaaa

SEQ ID NO: 1767279 - RNA, 19 nt, Homo sapiens
  misc_RNA (1)...(19): siRNA sense strand
ccagaugacuugaaugcuu

SEQ ID NO: 1767280 - RNA, 19 nt, Homo sapiens
  misc_RNA (1)...(19): siRNA sense strand
gaacaauucagacacauca

SEQ ID NO: 1767281 - RNA, 19 nt, Homo sapiens
  misc_RNA (1)...(19): siRNA sense strand
caacaucuccucucucaau

SEQ ID NO: 1767282 - RNA, 19 nt, Homo sapiens
  misc_RNA (1)...(19): siRNA sense strand
agagagagaugcuggagaa

SEQ ID NO: 1767283 - RNA, 19 nt, Homo sapiens
  misc_RNA (1)...(19): siRNA sense strand
gaugagaaaugaauaugag

SEQ ID NO: 1767284 - RNA, 19 nt, Homo sapiens
  misc_RNA (1)...(19): siRNA sense strand
gaagagaaacugcaagaag

SEQ ID NO: 1767285 - RNA, 19 nt, Homo sapiens
  misc_RNA (1)...(19): siRNA sense strand
gcaguaugguuuacagaau

SEQ ID NO: 1767286 - RNA, 19 nt, Homo sapiens
  misc_RNA (1)...(19): siRNA sense strand
caucuaaacccaucaggua

SEQ ID NO: 1767287 - RNA, 19 nt, Homo sapiens
  misc_RNA (1)...(19): siRNA sense strand
ccugggagcugaagaauca

SEQ ID NO: 1767288 - RNA, 19 nt, Homo sapiens
  misc_RNA (1)...(19): siRNA sense strand
gagcagcuguuggaagaaa

SEQ ID NO: 1767289 - RNA, 19 nt, Homo sapiens
  misc_RNA (1)...(19): siRNA sense strand
gaaacgcacaccuuagaaa

SEQ ID NO: 1767290 - RNA, 19 nt, Homo sapiens
  misc_RNA (1)...(19): siRNA sense strand
gagaagcucaagucuuuaa

SEQ ID NO: 1767291 - RNA, 19 nt, Homo sapiens
  misc_RNA (1)...(19): siRNA sense strand
aaagaacaaucuccugcua

SEQ ID NO: 1767292 - RNA, 19 nt, Homo sapiens
  misc_RNA (1)...(19): siRNA sense strand
gaagauagcauuucuaacc

SEQ ID NO: 1767293 - RNA, 19 nt, Homo sapiens
  misc_RNA (1)...(19): siRNA sense strand
gaacacacagcucuuggaa

SEQ ID NO: 1767294 - RNA, 19 nt, Homo sapiens
  misc_RNA (1)...(19): siRNA sense strand
gcucagcccaaauauguua

SEQ ID NO: 1767295 - RNA, 19 nt, Homo sapiens
  misc_RNA (1)...(19): siRNA sense strand
gaacaggcagugaaggaaa

SEQ ID NO: 1767296 - RNA, 19 nt, Homo sapiens
  misc_RNA (1)...(19): siRNA sense strand
gcucaaggcuagacugaca

SEQ ID NO: 1767297 - RNA, 19 nt, Homo sapiens
  misc_RNA (1)...(19): siRNA sense strand
gaagacaccgugcagaaug

SEQ ID NO: 1767298 - RNA, 19 nt, Homo sapiens
  misc_RNA (1)...(19): siRNA sense strand
gcugguggcuucucaggaa

SEQ ID NO: 1767299 - RNA, 19 nt, Homo sapiens
  misc_RNA (1)...(19): siRNA sense strand
ugaaggcaaugaugcauga

SEQ ID NO: 1767300 - RNA, 19 nt, Homo sapiens
  misc_RNA (1)...(19): siRNA sense strand
uacaggagcugacuaggaa

SEQ ID NO: 1767301 - RNA, 19 nt, Homo sapiens
  misc_RNA (1)...(19): siRNA sense strand
aagauaaagugcgccauua

SEQ ID NO: 1767302 - RNA, 19 nt, Homo sapiens
  misc_RNA (1)...(19): siRNA sense strand
gaacuggaacguuguaaag

SEQ ID NO: 1767303 - RNA, 19 nt, Homo sapiens
  misc_RNA (1)...(19): siRNA sense strand
gcagugagaugcagcaaaa

SEQ ID NO: 1767304 - RNA, 19 nt, Homo sapiens
  misc_RNA (1)...(19): siRNA sense strand
ugaagaugcuugagagaau

SEQ ID NO: 1767305 - RNA, 19 nt, Homo sapiens
  misc_RNA (1)...(19): siRNA sense strand
ggaaagacuagaaauggaa

SEQ ID NO: 1767306 - RNA, 19 nt, Homo sapiens
  misc_RNA (1)...(19): siRNA sense strand
ccuaagaaauguaucugaa

SEQ ID NO: 1767307 - RNA, 19 nt, Homo sapiens
  misc_RNA (1)...(19): siRNA sense strand
gacagcagcuacuccaaga

SEQ ID NO: 1767308 - RNA, 19 nt, Homo sapiens
  misc_RNA (1)...(19): siRNA sense strand
cccaggagcugcugaaaga

SEQ ID NO: 1767309 - RNA, 19 nt, Homo sapiens
  misc_RNA (1)...(19): siRNA sense strand
ugaaggaccuccaggaaca

SEQ ID NO: 1767310 - RNA, 19 nt, Homo sapiens
  misc_RNA (1)...(19): siRNA sense strand
gcaagaaggcacaggagaa

SEQ ID NO: 1767311 - RNA, 19 nt, Homo sapiens
  misc_RNA (1)...(19): siRNA sense strand
caaugaguguagaagauuu

SEQ ID NO: 1767312 - RNA, 19 nt, Homo sapiens
  misc_RNA (1)...(19): siRNA sense strand
gaagaugugagccgagaaa

SEQ ID NO: 1767313 - RNA, 19 nt, Homo sapiens
  misc_RNA (1)...(19): siRNA sense strand
ggcaacaucuccucucuca

SEQ ID NO: 1767314 - RNA, 19 nt, Homo sapiens
  misc_RNA (1)...(19): siRNA sense strand
aagaaccucucaaauagaa

SEQ ID NO: 1767315 - RNA, 19 nt, Homo sapiens
  misc_RNA (1)...(19): siRNA sense strand
agaaagaggaguuaagaaa

SEQ ID NO: 1767316 - RNA, 19 nt, Homo sapiens
  misc_RNA (1)...(19): siRNA sense strand
gaaguauuccauaaucuug

SEQ ID NO: 1767317 - RNA, 19 nt, Homo sapiens
  misc_RNA (1)...(19): siRNA sense strand
gaacaagagaaguuuaauc

SEQ ID NO: 1767318 - RNA, 19 nt, Homo sapiens
  misc_RNA (1)...(19): siRNA sense strand
ggaaaacacuacucuccua

SEQ ID NO: 1767319 - RNA, 19 nt, Homo sapiens
  misc_RNA (1)...(19): siRNA sense strand
gaagaaccucucaaauaga

SEQ ID NO: 1767320 - RNA, 19 nt, Homo sapiens
  misc_RNA (1)...(19): siRNA sense strand
uagaagcucagcccaaaua

SEQ ID NO: 1767321 - RNA, 19 nt, Homo sapiens
  misc_RNA (1)...(19): siRNA sense strand
gaaggucagucagaugaau

SEQ ID NO: 1767322 - RNA, 19 nt, Homo sapiens
  misc_RNA (1)...(19): siRNA sense strand
caucagggcuccauaacca

SEQ ID NO: 1767323 - RNA, 19 nt, Homo sapiens
  misc_RNA (1)...(19): siRNA sense strand
gaacuucugagauaugaau

SEQ ID NO: 1767324 - RNA, 19 nt, Homo sapiens
  misc_RNA (1)...(19): siRNA sense strand
aaucgaaccugauggaaau

SEQ ID NO: 1767325 - RNA, 19 nt, Homo sapiens
  misc_RNA (1)...(19): siRNA sense strand
aaaguuagagccaggguua

SEQ ID NO: 1767326 - RNA, 19 nt, Homo sapiens
  misc_RNA (1)...(19): siRNA sense strand
gaaacacacucuugagaaa

SEQ ID NO: 1767327 - RNA, 19 nt, Homo sapiens
  misc_RNA (1)...(19): siRNA sense strand
gaaauugccugguuacaug

SEQ ID NO: 1767328 - RNA, 19 nt, Homo sapiens
  misc_RNA (1)...(19): siRNA sense strand
gaacgaaacgcacaccuua

SEQ ID NO: 1767329 - RNA, 19 nt, Homo sapiens
  misc_RNA (1)...(19): siRNA sense strand
caagagaaguuuaaucuga

SEQ ID NO: 1767330 - RNA, 19 nt, Homo sapiens
  misc_RNA (1)...(19): siRNA sense strand
ggacauauguugccucaga

SEQ ID NO: 1767331 - RNA, 19 nt, Homo sapiens
  misc_RNA (1)...(19): siRNA sense strand
gaaaauggcuacugaaauu

SEQ ID NO: 1767332 - RNA, 19 nt, Homo sapiens
  misc_RNA (1)...(19): siRNA sense strand
gaaacagaguguaauagaa

SEQ ID NO: 1767333 - RNA, 19 nt, Homo sapiens
  misc_RNA (1)...(19): siRNA sense strand
ggaagucacugaaacauuc

SEQ ID NO: 1767334 - RNA, 19 nt, Homo sapiens
  misc_RNA (1)...(19): siRNA sense strand
gcaagaaguuugugaagau

SEQ ID NO: 1767335 - RNA, 19 nt, Homo sapiens
  misc_RNA (1)...(19): siRNA sense strand
uuaaauagcugugucgaua

SEQ ID NO: 1767336 - RNA, 19 nt, Homo sapiens
  misc_RNA (1)...(19): siRNA sense strand
ggaagaagcuggucuccau

SEQ ID NO: 1767337 - RNA, 19 nt, Homo sapiens
  misc_RNA (1)...(19): siRNA sense strand
uaagugaccuggaagauga

SEQ ID NO: 1767338 - RNA, 19 nt, Homo sapiens
  misc_RNA (1)...(19): siRNA sense strand
gcagagagcucaugaacag

SEQ ID NO: 1767339 - RNA, 19 nt, Homo sapiens
  misc_RNA (1)...(19): siRNA sense strand
uagaagaaccucucaaaua

SEQ ID NO: 1767340 - RNA, 19 nt, Homo sapiens
  misc_RNA (1)...(19): siRNA sense strand
ccgagaagcucaagucuuu

SEQ ID NO: 1767341 - RNA, 19 nt, Homo sapiens
  misc_RNA (1)...(19): siRNA sense strand
gaagagagacugacacaga

SEQ ID NO: 1767342 - RNA, 19 nt, Homo sapiens
  misc_RNA (1)...(19): siRNA sense strand
gaagaacacuuucaagaac

SEQ ID NO: 1767343 - RNA, 19 nt, Homo sapiens
  misc_RNA (1)...(19): siRNA sense strand
gaugaaaucugaccuacga

SEQ ID NO: 1767344 - RNA, 19 nt, Homo sapiens
  misc_RNA (1)...(19): siRNA sense strand
ggaagaauaucgugcacaa

SEQ ID NO: 1767345 - RNA, 19 nt, Homo sapiens
  misc_RNA (1)...(19): siRNA sense strand
gaacccagaugacuugaau

SEQ ID NO: 1767346 - RNA, 19 nt, Homo sapiens
  misc_RNA (1)...(19): siRNA sense strand
gagagagugugaucaguuu

SEQ ID NO: 1767347 - RNA, 19 nt, Homo sapiens
  misc_RNA (1)...(19): siRNA sense strand
ugaaacagcugcacagaug

SEQ ID NO: 1767348 - RNA, 19 nt, Homo sapiens
  misc_RNA (1)...(19): siRNA sense strand
gacuggagcucgaagauaa

SEQ ID NO: 1767349 - RNA, 19 nt, Homo sapiens
  misc_RNA (1)...(19): siRNA sense strand
agucugagcuggaagaaua

SEQ ID NO: 1767350 - RNA, 19 nt, Homo sapiens
  misc_RNA (1)...(19): siRNA sense strand
cagaagaaguugaggcuaa

SEQ ID NO: 1767351 - RNA, 19 nt, Homo sapiens
  misc_RNA (1)...(19): siRNA sense strand
gaaccagacugcucacuag

SEQ ID NO: 1767352 - RNA, 19 nt, Homo sapiens
  misc_RNA (1)...(19): siRNA sense strand
gaacuuaaucaacgucuaa

SEQ ID NO: 1767353 - RNA, 19 nt, Homo sapiens
  misc_RNA (1)...(19): siRNA sense strand
agaagaaccucucaaauag

SEQ ID NO: 1767354 - RNA, 19 nt, Homo sapiens
  misc_RNA (1)...(19): siRNA sense strand
ggagcucucugaaguuaaa

SEQ ID NO: 1767355 - RNA, 19 nt, Homo sapiens
  misc_RNA (1)...(19): siRNA sense strand
ugacacagaugagaaauga

SEQ ID NO: 1767356 - RNA, 19 nt, Homo sapiens
  misc_RNA (1)...(19): siRNA sense strand
gaaacuggaugaagaguac

SEQ ID NO: 1767357 - RNA, 19 nt, Homo sapiens
  misc_RNA (1)...(19): siRNA sense strand
gcggagcucucugaaguua

SEQ ID NO: 1767358 - RNA, 19 nt, Homo sapiens
  misc_RNA (1)...(19): siRNA sense strand
gaaauauacuccagcucaa

SEQ ID NO: 1767359 - RNA, 19 nt, Homo sapiens
  misc_RNA (1)...(19): siRNA sense strand
uagaugaacuccagucuga

SEQ ID NO: 1767360 - RNA, 19 nt, Homo sapiens
  misc_RNA (1)...(19): siRNA sense strand
gaauguggauggagagaug

SEQ ID NO: 1767361 - RNA, 19 nt, Homo sapiens
  misc_RNA (1)...(19): siRNA sense strand
gcacagaaaucuccagacu

SEQ ID NO: 1767362 - RNA, 19 nt, Homo sapiens
  misc_RNA (1)...(19): siRNA sense strand
gaacucaccgucagaagaa

SEQ ID NO: 1767363 - RNA, 19 nt, Homo sapiens
  misc_RNA (1)...(19): siRNA sense strand
guucuaagcuacaacgaaa

SEQ ID NO: 1767364 - RNA, 19 nt, Homo sapiens
  misc_RNA (1)...(19): siRNA sense strand
gggagcagcuguuggaaga

SEQ ID NO: 1767365 - RNA, 19 nt, Homo sapiens
  misc_RNA (1)...(19): siRNA sense strand
gaagagaccaggacugaau

SEQ ID NO: 1767366 - RNA, 19 nt, Homo sapiens
  misc_RNA (1)...(19): siRNA sense strand
aggcagagcuggucauuga

SEQ ID NO: 1767367 - RNA, 19 nt, Homo sapiens
  misc_RNA (1)...(19): siRNA sense strand
ggaaaagguucagaauuua

SEQ ID NO: 1767368 - RNA, 19 nt, Homo sapiens
  misc_RNA (1)...(19): siRNA sense strand
acagaaaucuccagacuuc

SEQ ID NO: 1767369 - RNA, 19 nt, Homo sapiens
  misc_RNA (1)...(19): siRNA sense strand
gacagcagaucgagaaaga

SEQ ID NO: 1767370 - RNA, 19 nt, Homo sapiens
  misc_RNA (1)...(19): siRNA sense strand
ucaaauagaagcccaguuu

SEQ ID NO: 1767371 - RNA, 19 nt, Homo sapiens
  misc_RNA (1)...(19): siRNA sense strand
ggaaacagaguguaauaga

SEQ ID NO: 1767372 - RNA, 19 nt, Homo sapiens
  misc_RNA (1)...(19): siRNA sense strand
ucaggaaacuggaugaaga

SEQ ID NO: 1767373 - RNA, 19 nt, Homo sapiens
  misc_RNA (1)...(19): siRNA sense strand
ugacaagccugguggagaa

SEQ ID NO: 1767374 - RNA, 19 nt, Homo sapiens
  misc_RNA (1)...(19): siRNA sense strand
gcaaaggcaugagaacgaa

SEQ ID NO: 1767375 - RNA, 19 nt, Homo sapiens
  misc_RNA (1)...(19): siRNA sense strand
gaagauaaagugcgccauu

SEQ ID NO: 1767376 - RNA, 19 nt, Homo sapiens
  misc_RNA (1)...(19): siRNA sense strand
ccaaauauaagcuguugua

SEQ ID NO: 1767377 - RNA, 19 nt, Homo sapiens
  misc_RNA (1)...(19): siRNA sense strand
gacuagaaauggaacauga

SEQ ID NO: 1767378 - RNA, 19 nt, Homo sapiens
  misc_RNA (1)...(19): siRNA sense strand
gcaaaugucccggaugaaa

SEQ ID NO: 1767379 - RNA, 19 nt, Homo sapiens
  misc_RNA (1)...(19): siRNA sense strand
ccagaugacuugaaugcuu

SEQ ID NO: 1767380 - RNA, 19 nt, Homo sapiens
  misc_RNA (1)...(19): siRNA sense strand
gaacaauucagacacauca

SEQ ID NO: 1767381 - RNA, 19 nt, Homo sapiens
  misc_RNA (1)...(19): siRNA sense strand
caacaucuccucucucaau

SEQ ID NO: 1767382 - RNA, 19 nt, Homo sapiens
  misc_RNA (1)...(19): siRNA sense strand
agagagagaugcuggagaa

SEQ ID NO: 1767383 - RNA, 19 nt, Homo sapiens
  misc_RNA (1)...(19): siRNA sense strand
gaugagaaaugaauaugag

SEQ ID NO: 1767384 - RNA, 19 nt, Homo sapiens
  misc_RNA (1)...(19): siRNA sense strand
gaagagaaacugcaagaag

SEQ ID NO: 1767385 - RNA, 19 nt, Homo sapiens
  misc_RNA (1)...(19): siRNA sense strand
gcaguaugguuuacagaau

SEQ ID NO: 1767386 - RNA, 19 nt, Homo sapiens
  misc_RNA (1)...(19): siRNA sense strand
caucuaaacccaucaggua

SEQ ID NO: 1767387 - RNA, 19 nt, Homo sapiens
  misc_RNA (1)...(19): siRNA sense strand
ccugggagcugaagaauca

SEQ ID NO: 1767388 - RNA, 19 nt, Homo sapiens
  misc_RNA (1)...(19): siRNA sense strand
gagcagcuguuggaagaaa

SEQ ID NO: 1767389 - RNA, 19 nt, Homo sapiens
  misc_RNA (1)...(19): siRNA sense strand
gaaacgcacaccuuagaaa

SEQ ID NO: 1767390 - RNA, 19 nt, Homo sapiens
  misc_RNA (1)...(19): siRNA sense strand
gagaagcucaagucuuuaa

SEQ ID NO: 1767391 - RNA, 19 nt, Homo sapiens
  misc_RNA (1)...(19): siRNA sense strand
aaagaacaaucuccugcua

SEQ ID NO: 1767392 - RNA, 19 nt, Homo sapiens
  misc_RNA (1)...(19): siRNA sense strand
gaagauagcauuucuaacc

SEQ ID NO: 1767393 - RNA, 19 nt, Homo sapiens
  misc_RNA (1)...(19): siRNA sense strand
gaacacacagcucuuggaa

SEQ ID NO: 1767394 - RNA, 19 nt, Homo sapiens
  misc_RNA (1)...(19): siRNA sense strand
gcucagcccaaauauguua

SEQ ID NO: 1767395 - RNA, 19 nt, Homo sapiens
  misc_RNA (1)...(19): siRNA sense strand
gaacaggcagugaaggaaa

SEQ ID NO: 1767396 - RNA, 19 nt, Homo sapiens
  misc_RNA (1)...(19): siRNA sense strand
gcucaaggcuagacugaca

SEQ ID NO: 1767397 - RNA, 19 nt, Homo sapiens
  misc_RNA (1)...(19): siRNA sense strand
gaagacaccgugcagaaug

SEQ ID NO: 1767398 - RNA, 19 nt, Homo sapiens
  misc_RNA (1)...(19): siRNA sense strand
gcugguggcuucucaggaa

SEQ ID NO: 1767399 - RNA, 19 nt, Homo sapiens
  misc_RNA (1)...(19): siRNA sense strand
ugaaggcaaugaugcauga

SEQ ID NO: 1767400 - RNA, 19 nt, Homo sapiens
  misc_RNA (1)...(19): siRNA sense strand
uacaggagcugacuaggaa

SEQ ID NO: 1767401 - RNA, 19 nt, Homo sapiens
  misc_RNA (1)...(19): siRNA sense strand
aagauaaagugcgccauua

SEQ ID NO: 1767402 - RNA, 19 nt, Homo sapiens
  misc_RNA (1)...(19): siRNA sense strand
gaacuggaacguuguaaag

SEQ ID NO: 1767403 - RNA, 19 nt, Homo sapiens
  misc_RNA (1)...(19): siRNA sense strand
gcagugagaugcagcaaaa

SEQ ID NO: 1767404 - RNA, 19 nt, Homo sapiens
  misc_RNA (1)...(19): siRNA sense strand
ugaagaugcuugagagaau

SEQ ID NO: 1767405 - RNA, 19 nt, Homo sapiens
  misc_RNA (1)...(19): siRNA sense strand
ggaaagacuagaaauggaa

SEQ ID NO: 1767406 - RNA, 19 nt, Homo sapiens
  misc_RNA (1)...(19): siRNA sense strand
ccuaagaaauguaucugaa

SEQ ID NO: 1767407 - RNA, 19 nt, Homo sapiens
  misc_RNA (1)...(19): siRNA sense strand
gacagcagcuacuccaaga

SEQ ID NO: 1767408 - RNA, 19 nt, Homo sapiens
  misc_RNA (1)...(19): siRNA sense strand
cccaggagcugcugaaaga

SEQ ID NO: 1767409 - RNA, 19 nt, Homo sapiens
  misc_RNA (1)...(19): siRNA sense strand
ugaaggaccuccaggaaca

SEQ ID NO: 1767410 - RNA, 19 nt, Homo sapiens
  misc_RNA (1)...(19): siRNA sense strand
gcaagaaggcacaggagaa

SEQ ID NO: 1767411 - RNA, 19 nt, Homo sapiens
  misc_RNA (1)...(19): siRNA sense strand
caaugaguguagaagauuu

SEQ ID NO: 1767412 - RNA, 19 nt, Homo sapiens
  misc_RNA (1)...(19): siRNA sense strand
gaagaugugagccgagaaa

SEQ ID NO: 1767413 - RNA, 19 nt, Homo sapiens
  misc_RNA (1)...(19): siRNA sense strand
ggcaacaucuccucucuca

SEQ ID NO: 1767414 - RNA, 19 nt, Homo sapiens
  misc_RNA (1)...(19): siRNA sense strand
aagaaccucucaaauagaa

SEQ ID NO: 1767415 - RNA, 19 nt, Homo sapiens
  misc_RNA (1)...(19): siRNA sense strand
agaaagaggaguuaagaaa

SEQ ID NO: 1767416 - RNA, 19 nt, Homo sapiens
  misc_RNA (1)...(19): siRNA sense strand
gaaguauuccauaaucuug

SEQ ID NO: 1767417 - RNA, 19 nt, Homo sapiens
  misc_RNA (1)...(19): siRNA sense strand
gaacaagagaaguuuaauc

SEQ ID NO: 1767418 - RNA, 19 nt, Homo sapiens
  misc_RNA (1)...(19): siRNA sense strand
ggaaaacacuacucuccua

SEQ ID NO: 1767419 - RNA, 19 nt, Homo sapiens
  misc_RNA (1)...(19): siRNA sense strand
gaagaaccucucaaauaga

SEQ ID NO: 1767420 - RNA, 19 nt, Homo sapiens
  misc_RNA (1)...(19): siRNA sense strand
uagaagcucagcccaaaua

SEQ ID NO: 1767421 - RNA, 19 nt, Homo sapiens
  misc_RNA (1)...(19): siRNA sense strand
gaaggucagucagaugaau

SEQ ID NO: 1767422 - RNA, 19 nt, Homo sapiens
  misc_RNA (1)...(19): siRNA sense strand
caucagggcuccauaacca

SEQ ID NO: 1767423 - RNA, 19 nt, Homo sapiens
  misc_RNA (1)...(19): siRNA sense strand
gaacuucugagauaugaau

SEQ ID NO: 1767424 - RNA, 19 nt, Homo sapiens
  misc_RNA (1)...(19): siRNA sense strand
aaucgaaccugauggaaau

SEQ ID NO: 1767425 - RNA, 19 nt, Homo sapiens
  misc_RNA (1)...(19): siRNA sense strand
aaaguuagagccaggguua

SEQ ID NO: 1767426 - RNA, 19 nt, Homo sapiens
  misc_RNA (1)...(19): siRNA sense strand
ggaacucuauggucaucua

SEQ ID NO: 1767427 - RNA, 19 nt, Homo sapiens
  misc_RNA (1)...(19): siRNA sense strand
caacaucuacauccuaaau

SEQ ID NO: 1767428 - RNA, 19 nt, Homo sapiens
  misc_RNA (1)...(19): siRNA sense strand
aggagccgguugacuauua

SEQ ID NO: 1767429 - RNA, 19 nt, Homo sapiens
  misc_RNA (1)...(19): siRNA sense strand
gcgccauccugaucucuuu

SEQ ID NO: 1767430 - RNA, 19 nt, Homo sapiens
  misc_RNA (1)...(19): siRNA sense strand
caagagccgugccuacagu

SEQ ID NO: 1767431 - RNA, 19 nt, Homo sapiens
  misc_RNA (1)...(19): siRNA sense strand
gaagacggccaccaacauc

SEQ ID NO: 1767432 - RNA, 19 nt, Homo sapiens
  misc_RNA (1)...(19): siRNA sense strand
cggaggagccgguugacua

SEQ ID NO: 1767433 - RNA, 19 nt, Homo sapiens
  misc_RNA (1)...(19): siRNA sense strand
ggaggagccgguugacuau

SEQ ID NO: 1767434 - RNA, 19 nt, Homo sapiens
  misc_RNA (1)...(19): siRNA sense strand
ccugaucucuuucaucuac

SEQ ID NO: 1767435 - RNA, 19 nt, Homo sapiens
  misc_RNA (1)...(19): siRNA sense strand
cacgguggcuugcaacaug

SEQ ID NO: 1767436 - RNA, 19 nt, Homo sapiens
  misc_RNA (1)...(19): siRNA sense strand
gagcgcaagaucaccuuaa

SEQ ID NO: 1767437 - RNA, 19 nt, Homo sapiens
  misc_RNA (1)...(19): siRNA sense strand
accaacaucuacauccuaa

SEQ ID NO: 1767438 - RNA, 19 nt, Homo sapiens
  misc_RNA (1)...(19): siRNA sense strand
cauccuaaaucuggccauu

SEQ ID NO: 1767439 - RNA, 19 nt, Homo sapiens
  misc_RNA (1)...(19): siRNA sense strand
cuagucaccuccacguugu

SEQ ID NO: 1767440 - RNA, 19 nt, Homo sapiens
  misc_RNA (1)...(19): siRNA sense strand
ugagucagcugucggucau

SEQ ID NO: 1767441 - RNA, 19 nt, Homo sapiens
  misc_RNA (1)...(19): siRNA sense strand
gcuggugggcuucguguug

SEQ ID NO: 1767442 - RNA, 19 nt, Homo sapiens
  misc_RNA (1)...(19): siRNA sense strand
gcuacgugcucaucauugc

SEQ ID NO: 1767443 - RNA, 19 nt, Homo sapiens
  misc_RNA (1)...(19): siRNA sense strand
gaggagccagggcgaaaug

SEQ ID NO: 1767444 - RNA, 19 nt, Homo sapiens
  misc_RNA (1)...(19): siRNA sense strand
ggagcgcaagaucaccuua

SEQ ID NO: 1767445 - RNA, 19 nt, Homo sapiens
  misc_RNA (1)...(19): siRNA sense strand
caacuucaagcgcucuuuc

SEQ ID NO: 1767446 - RNA, 19 nt, Homo sapiens
  misc_RNA (1)...(19): siRNA sense strand
gcucagcgugcccuuccua

SEQ ID NO: 1767447 - RNA, 19 nt, Homo sapiens
  misc_RNA (1)...(19): siRNA sense strand
ggagccgguugacuauuac

SEQ ID NO: 1767448 - RNA, 19 nt, Homo sapiens
  misc_RNA (1)...(19): siRNA sense strand
ggcgaaaugcgucccagaa

SEQ ID NO: 1767449 - RNA, 19 nt, Homo sapiens
  misc_RNA (1)...(19): siRNA sense strand
gcgcaagaucaccuuaaug

SEQ ID NO: 1767450 - RNA, 19 nt, Homo sapiens
  misc_RNA (1)...(19): siRNA sense strand
acaucuacauccuaaaucu

SEQ ID NO: 1767451 - RNA, 19 nt, Homo sapiens
  misc_RNA (1)...(19): siRNA sense strand
ucaccagcaucuacugucu

SEQ ID NO: 1767452 - RNA, 19 nt, Homo sapiens
  misc_RNA (1)...(19): siRNA sense strand
uggacgcggucaacauguu

SEQ ID NO: 1767453 - RNA, 19 nt, Homo sapiens
  misc_RNA (1)...(19): siRNA sense strand
ucuauggcuuucucucaga

SEQ ID NO: 1767454 - RNA, 19 nt, Homo sapiens
  misc_RNA (1)...(19): siRNA sense strand
gcaagaucaccuuaauggu

SEQ ID NO: 1767455 - RNA, 19 nt, Homo sapiens
  misc_RNA (1)...(19): siRNA sense strand
cgcaagaucaccuuaaugg

SEQ ID NO: 1767456 - RNA, 19 nt, Homo sapiens
  misc_RNA (1)...(19): siRNA sense strand
ggacgcggucaacauguuc

SEQ ID NO: 1767457 - RNA, 19 nt, Homo sapiens
  misc_RNA (1)...(19): siRNA sense strand
ugaagacggccaccaacau

SEQ ID NO: 1767458 - RNA, 19 nt, Homo sapiens
  misc_RNA (1)...(19): siRNA sense strand
ucugcuggaugccuuucua

SEQ ID NO: 1767459 - RNA, 19 nt, Homo sapiens
  misc_RNA (1)...(19): siRNA sense strand
agacggccaccaacaucua

SEQ ID NO: 1767460 - RNA, 19 nt, Homo sapiens
  misc_RNA (1)...(19): siRNA sense strand
caccguggccaagguagua

SEQ ID NO: 1767461 - RNA, 19 nt, Homo sapiens
  misc_RNA (1)...(19): siRNA sense strand
accagcaucuacugucuga

SEQ ID NO: 1767462 - RNA, 19 nt, Homo sapiens
  misc_RNA (1)...(19): siRNA sense strand
ccaccaacaucuacauccu

SEQ ID NO: 1767463 - RNA, 19 nt, Homo sapiens
  misc_RNA (1)...(19): siRNA sense strand
guuguacacauuucucaug

SEQ ID NO: 1767464 - RNA, 19 nt, Homo sapiens
  misc_RNA (1)...(19): siRNA sense strand
gcagcgccauccugaucuc

SEQ ID NO: 1767465 - RNA, 19 nt, Homo sapiens
  misc_RNA (1)...(19): siRNA sense strand
caccaacaucuacauccua

SEQ ID NO: 1767466 - RNA, 19 nt, Homo sapiens
  misc_RNA (1)...(19): siRNA sense strand
cagcgugcccuuccuaguc

SEQ ID NO: 1767467 - RNA, 19 nt, Homo sapiens
  misc_RNA (1)...(19): siRNA sense strand
gugcuacgugcucaucauu

SEQ ID NO: 1767468 - RNA, 19 nt, Homo sapiens
  misc_RNA (1)...(19): siRNA sense strand
ccuacaguguggaagacuu

SEQ ID NO: 1767469 - RNA, 19 nt, Homo sapiens
  misc_RNA (1)...(19): siRNA sense strand
ucuccuuccuccucuccua

SEQ ID NO: 1767470 - RNA, 19 nt, Homo sapiens
  misc_RNA (1)...(19): siRNA sense strand
ugaugguggugaugguguu

SEQ ID NO: 1767471 - RNA, 19 nt, Homo sapiens
  misc_RNA (1)...(19): siRNA sense strand
gugcucaucauugcuaaga

SEQ ID NO: 1767472 - RNA, 19 nt, Homo sapiens
  misc_RNA (1)...(19): siRNA sense strand
caaacuagaagucaucauu

SEQ ID NO: 1767473 - RNA, 19 nt, Homo sapiens
  misc_RNA (1)...(19): siRNA sense strand
acaggaagcugacuaugga

SEQ ID NO: 1767474 - RNA, 19 nt, Homo sapiens
  misc_RNA (1)...(19): siRNA sense strand
gaagcugacuauggaagaa

SEQ ID NO: 1767475 - RNA, 19 nt, Homo sapiens
  misc_RNA (1)...(19): siRNA sense strand
ucucaaagauucagucaca

SEQ ID NO: 1767476 - RNA, 19 nt, Homo sapiens
  misc_RNA (1)...(19): siRNA sense strand
uggacaaacugaucaagaa

SEQ ID NO: 1767477 - RNA, 19 nt, Homo sapiens
  misc_RNA (1)...(19): siRNA sense strand
gcacuucggcugcaccauu

SEQ ID NO: 1767478 - RNA, 19 nt, Homo sapiens
  misc_RNA (1)...(19): siRNA sense strand
agacaaaccuggccuuggu

SEQ ID NO: 1767479 - RNA, 19 nt, Homo sapiens
  misc_RNA (1)...(19): siRNA sense strand
ccauuggucucaaagauuc

SEQ ID NO: 1767480 - RNA, 19 nt, Homo sapiens
  misc_RNA (1)...(19): siRNA sense strand
gcaucagcgugcucuugua

SEQ ID NO: 1767481 - RNA, 19 nt, Homo sapiens
  misc_RNA (1)...(19): siRNA sense strand
gaugggaaagccaguauug

SEQ ID NO: 1767482 - RNA, 19 nt, Homo sapiens
  misc_RNA (1)...(19): siRNA sense strand
gggaugaggaugaggauga

SEQ ID NO: 1767483 - RNA, 19 nt, Homo sapiens
  misc_RNA (1)...(19): siRNA sense strand
gaagaguccuaugaguuca

SEQ ID NO: 1767484 - RNA, 19 nt, Homo sapiens
  misc_RNA (1)...(19): siRNA sense strand
ggaugaggaugaggaugaa

SEQ ID NO: 1767485 - RNA, 19 nt, Homo sapiens
  misc_RNA (1)...(19): siRNA sense strand
ccaagaggauagcagagau

SEQ ID NO: 1767486 - RNA, 19 nt, Homo sapiens
  misc_RNA (1)...(19): siRNA sense strand
uagaagucaucauugaaga

SEQ ID NO: 1767487 - RNA, 19 nt, Homo sapiens
  misc_RNA (1)...(19): siRNA sense strand
ugaagaguccuaugaguuc

SEQ ID NO: 1767488 - RNA, 19 nt, Homo sapiens
  misc_RNA (1)...(19): siRNA sense strand
gcaacgccgucaaugucuu

SEQ ID NO: 1767489 - RNA, 19 nt, Homo sapiens
  misc_RNA (1)...(19): siRNA sense strand
ggagggaccaguucaugga

SEQ ID NO: 1767490 - RNA, 19 nt, Homo sapiens
  misc_RNA (1)...(19): siRNA sense strand
ccuaugaguucaagacuac

SEQ ID NO: 1767491 - RNA, 19 nt, Homo sapiens
  misc_RNA (1)...(19): siRNA sense strand
gcagcaacgccgucaaugu

SEQ ID NO: 1767492 - RNA, 19 nt, Homo sapiens
  misc_RNA (1)...(19): siRNA sense strand
aaacuagaagucaucauug

SEQ ID NO: 1767493 - RNA, 19 nt, Homo sapiens
  misc_RNA (1)...(19): siRNA sense strand
ggaagcugacuauggaaga

SEQ ID NO: 1767494 - RNA, 19 nt, Homo sapiens
  misc_RNA (1)...(19): siRNA sense strand
aacuagaagucaucauuga

SEQ ID NO: 1767495 - RNA, 19 nt, Homo sapiens
  misc_RNA (1)...(19): siRNA sense strand
gcugcaagcucgccacaac

SEQ ID NO: 1767496 - RNA, 19 nt, Homo sapiens
  misc_RNA (1)...(19): siRNA sense strand
agacuacgguggacaaacu

SEQ ID NO: 1767497 - RNA, 19 nt, Homo sapiens
  misc_RNA (1)...(19): siRNA sense strand
gacaaacugaucaagaaga

SEQ ID NO: 1767498 - RNA, 19 nt, Homo sapiens
  misc_RNA (1)...(19): siRNA sense strand
aaacugaucaagaagacaa

SEQ ID NO: 1767499 - RNA, 19 nt, Homo sapiens
  misc_RNA (1)...(19): siRNA sense strand
gaagucaucauugaagagu

SEQ ID NO: 1767500 - RNA, 19 nt, Homo sapiens
  misc_RNA (1)...(19): siRNA sense strand
gacaggaagcugacuaugg

SEQ ID NO: 1767501 - RNA, 19 nt, Homo sapiens
  misc_RNA (1)...(19): siRNA sense strand
ggacaaacugaucaagaag

SEQ ID NO: 1767502 - RNA, 19 nt, Homo sapiens
  misc_RNA (1)...(19): siRNA sense strand
gagaugggaaagccaguau

SEQ ID NO: 1767503 - RNA, 19 nt, Homo sapiens
  misc_RNA (1)...(19): siRNA sense strand
cagcaacgccgucaauguc

SEQ ID NO: 1767504 - RNA, 19 nt, Homo sapiens
  misc_RNA (1)...(19): siRNA sense strand
ggauagcagagaugggaaa

SEQ ID NO: 1767505 - RNA, 19 nt, Homo sapiens
  misc_RNA (1)...(19): siRNA sense strand
cauacucuuugccacacua

SEQ ID NO: 1767506 - RNA, 19 nt, Homo sapiens
  misc_RNA (1)...(19): siRNA sense strand
cuagaggccuauugcuaca

SEQ ID NO: 1767507 - RNA, 19 nt, Homo sapiens
  misc_RNA (1)...(19): siRNA sense strand
gcuccucuacauacucuuu

SEQ ID NO: 1767508 - RNA, 19 nt, Homo sapiens
  misc_RNA (1)...(19): siRNA sense strand
cacuagaggccuauugcua

SEQ ID NO: 1767509 - RNA, 19 nt, Homo sapiens
  misc_RNA (1)...(19): siRNA sense strand
cacuucggcugcaccauug

SEQ ID NO: 1767510 - RNA, 19 nt, Homo sapiens
  misc_RNA (1)...(19): siRNA sense strand
gggcagcaacgccgucaau

SEQ ID NO: 1767511 - RNA, 19 nt, Homo sapiens
  misc_RNA (1)...(19): siRNA sense strand
gccuguggcuccucuacau

SEQ ID NO: 1767512 - RNA, 19 nt, Homo sapiens
  misc_RNA (1)...(19): siRNA sense strand
caagaggauagcagagaug

SEQ ID NO: 1767513 - RNA, 19 nt, Homo sapiens
  misc_RNA (1)...(19): siRNA sense strand
aggcugcccuccugcuuug

SEQ ID NO: 1767514 - RNA, 19 nt, Homo sapiens
  misc_RNA (1)...(19): siRNA sense strand
acaaacugaucaagaagac

SEQ ID NO: 1767515 - RNA, 19 nt, Homo sapiens
  misc_RNA (1)...(19): siRNA sense strand
guggacaaacugaucaaga

SEQ ID NO: 1767516 - RNA, 19 nt, Homo sapiens
  misc_RNA (1)...(19): siRNA sense strand
gccaagaggauagcagaga

SEQ ID NO: 1767517 - RNA, 19 nt, Homo sapiens
  misc_RNA (1)...(19): siRNA sense strand
cugcugcccuccaggaugu

SEQ ID NO: 1767518 - RNA, 19 nt, Homo sapiens
  misc_RNA (1)...(19): siRNA sense strand
gaagaagaggaggccaaga

SEQ ID NO: 1767519 - RNA, 19 nt, Homo sapiens
  misc_RNA (1)...(19): siRNA sense strand
uugaagaguccuaugaguu

SEQ ID NO: 1767520 - RNA, 19 nt, Homo sapiens
  misc_RNA (1)...(19): siRNA sense strand
gaggaggccaagaggauag

SEQ ID NO: 1767521 - RNA, 19 nt, Homo sapiens
  misc_RNA (1)...(19): siRNA sense strand
agucacagcuguuguuuuc

SEQ ID NO: 1767522 - RNA, 19 nt, Homo sapiens
  misc_RNA (1)...(19): siRNA sense strand
cuagaagucaucauugaag

SEQ ID NO: 1767523 - RNA, 19 nt, Homo sapiens
  misc_RNA (1)...(19): siRNA sense strand
ccacacuagaggccuauug

SEQ ID NO: 1767524 - RNA, 19 nt, Homo sapiens
  misc_RNA (1)...(19): siRNA sense strand
gcaagcucgccacaacaug

SEQ ID NO: 1767525 - RNA, 19 nt, Homo sapiens
  misc_RNA (1)...(19): siRNA sense strand
caccaucuuugcauuuguc

SEQ ID NO: 1767526 - RNA, 19 nt, Homo sapiens
  misc_RNA (1)...(19): siRNA sense strand
ucaagacuacgguggacaa

SEQ ID NO: 1767527 - RNA, 19 nt, Homo sapiens
  misc_RNA (1)...(19): siRNA sense strand
caugcucaccgccaucauu

SEQ ID NO: 1767528 - RNA, 19 nt, Homo sapiens
  misc_RNA (1)...(19): siRNA sense strand
gcacuuccugacugucuuc

SEQ ID NO: 1767529 - RNA, 19 nt, Homo sapiens
  misc_RNA (1)...(19): siRNA sense strand
caacgccgucaaugucuuc

SEQ ID NO: 1767530 - RNA, 19 nt, Homo sapiens
  misc_RNA (1)...(19): siRNA sense strand
ccuccaggauguauaugca

SEQ ID NO: 1767531 - RNA, 19 nt, Homo sapiens
  misc_RNA (1)...(19): siRNA sense strand
ucuggaaggugcuguuugc

SEQ ID NO: 1767532 - RNA, 19 nt, Homo sapiens
  misc_RNA (1)...(19): siRNA sense strand
uccuaugaguucaagacua

SEQ ID NO: 1767533 - RNA, 19 nt, Homo sapiens
  misc_RNA (1)...(19): siRNA sense strand
cagacaggaagcugacuau

SEQ ID NO: 1767534 - RNA, 19 nt, Homo sapiens
  misc_RNA (1)...(19): siRNA sense strand
ucaccaucuuugcauuugu

SEQ ID NO: 1767535 - RNA, 19 nt, Homo sapiens
  misc_RNA (1)...(19): siRNA sense strand
agaggaggccaagaggaua

SEQ ID NO: 1767536 - RNA, 19 nt, Homo sapiens
  misc_RNA (1)...(19): siRNA sense strand
aagaggaggccaagaggau

SEQ ID NO: 1767537 - RNA, 19 nt, Homo sapiens
  misc_RNA (1)...(19): siRNA sense strand
caaacuagaagucaucauu

SEQ ID NO: 1767538 - RNA, 19 nt, Homo sapiens
  misc_RNA (1)...(19): siRNA sense strand
acaggaagcugacuaugga

SEQ ID NO: 1767539 - RNA, 19 nt, Homo sapiens
  misc_RNA (1)...(19): siRNA sense strand
gaagcugacuauggaagaa

SEQ ID NO: 1767540 - RNA, 19 nt, Homo sapiens
  misc_RNA (1)...(19): siRNA sense strand
ucucaaagauucagucaca

SEQ ID NO: 1767541 - RNA, 19 nt, Homo sapiens
  misc_RNA (1)...(19): siRNA sense strand
uggacaaacugaucaagaa

SEQ ID NO: 1767542 - RNA, 19 nt, Homo sapiens
  misc_RNA (1)...(19): siRNA sense strand
gcacuucggcugcaccauu

SEQ ID NO: 1767543 - RNA, 19 nt, Homo sapiens
  misc_RNA (1)...(19): siRNA sense strand
agacaaaccuggccuuggu

SEQ ID NO: 1767544 - RNA, 19 nt, Homo sapiens
  misc_RNA (1)...(19): siRNA sense strand
ccauuggucucaaagauuc

SEQ ID NO: 1767545 - RNA, 19 nt, Homo sapiens
  misc_RNA (1)...(19): siRNA sense strand
gcaucagcgugcucuugua

SEQ ID NO: 1767546 - RNA, 19 nt, Homo sapiens
  misc_RNA (1)...(19): siRNA sense strand
gaugggaaagccaguauug

SEQ ID NO: 1767547 - RNA, 19 nt, Homo sapiens
  misc_RNA (1)...(19): siRNA sense strand
gggaugaggaugaggauga

SEQ ID NO: 1767548 - RNA, 19 nt, Homo sapiens
  misc_RNA (1)...(19): siRNA sense strand
gaagaguccuaugaguuca

SEQ ID NO: 1767549 - RNA, 19 nt, Homo sapiens
  misc_RNA (1)...(19): siRNA sense strand
ggaugaggaugaggaugaa

SEQ ID NO: 1767550 - RNA, 19 nt, Homo sapiens
  misc_RNA (1)...(19): siRNA sense strand
ccaagaggauagcagagau

SEQ ID NO: 1767551 - RNA, 19 nt, Homo sapiens
  misc_RNA (1)...(19): siRNA sense strand
uagaagucaucauugaaga

SEQ ID NO: 1767552 - RNA, 19 nt, Homo sapiens
  misc_RNA (1)...(19): siRNA sense strand
ugaagaguccuaugaguuc

SEQ ID NO: 1767553 - RNA, 19 nt, Homo sapiens
  misc_RNA (1)...(19): siRNA sense strand
gcaacgccgucaaugucuu

SEQ ID NO: 1767554 - RNA, 19 nt, Homo sapiens
  misc_RNA (1)...(19): siRNA sense strand
ggagggaccaguucaugga

SEQ ID NO: 1767555 - RNA, 19 nt, Homo sapiens
  misc_RNA (1)...(19): siRNA sense strand
ccuaugaguucaagacuac

SEQ ID NO: 1767556 - RNA, 19 nt, Homo sapiens
  misc_RNA (1)...(19): siRNA sense strand
gcagcaacgccgucaaugu

SEQ ID NO: 1767557 - RNA, 19 nt, Homo sapiens
  misc_RNA (1)...(19): siRNA sense strand
aaacuagaagucaucauug

SEQ ID NO: 1767558 - RNA, 19 nt, Homo sapiens
  misc_RNA (1)...(19): siRNA sense strand
ggaagcugacuauggaaga

SEQ ID NO: 1767559 - RNA, 19 nt, Homo sapiens
  misc_RNA (1)...(19): siRNA sense strand
aacuagaagucaucauuga

SEQ ID NO: 1767560 - RNA, 19 nt, Homo sapiens
  misc_RNA (1)...(19): siRNA sense strand
gcugcaagcucgccacaac

SEQ ID NO: 1767561 - RNA, 19 nt, Homo sapiens
  misc_RNA (1)...(19): siRNA sense strand
agacuacgguggacaaacu

SEQ ID NO: 1767562 - RNA, 19 nt, Homo sapiens
  misc_RNA (1)...(19): siRNA sense strand
gacaaacugaucaagaaga

SEQ ID NO: 1767563 - RNA, 19 nt, Homo sapiens
  misc_RNA (1)...(19): siRNA sense strand
aaacugaucaagaagacaa

SEQ ID NO: 1767564 - RNA, 19 nt, Homo sapiens
  misc_RNA (1)...(19): siRNA sense strand
gaagucaucauugaagagu

SEQ ID NO: 1767565 - RNA, 19 nt, Homo sapiens
  misc_RNA (1)...(19): siRNA sense strand
gacaggaagcugacuaugg

SEQ ID NO: 1767566 - RNA, 19 nt, Homo sapiens
  misc_RNA (1)...(19): siRNA sense strand
ggacaaacugaucaagaag

SEQ ID NO: 1767567 - RNA, 19 nt, Homo sapiens
  misc_RNA (1)...(19): siRNA sense strand
gagaugggaaagccaguau

SEQ ID NO: 1767568 - RNA, 19 nt, Homo sapiens
  misc_RNA (1)...(19): siRNA sense strand
cagcaacgccgucaauguc

SEQ ID NO: 1767569 - RNA, 19 nt, Homo sapiens
  misc_RNA (1)...(19): siRNA sense strand
ggauagcagagaugggaaa

SEQ ID NO: 1767570 - RNA, 19 nt, Homo sapiens
  misc_RNA (1)...(19): siRNA sense strand
cauacucuuugccacacua

SEQ ID NO: 1767571 - RNA, 19 nt, Homo sapiens
  misc_RNA (1)...(19): siRNA sense strand
cuagaggccuauugcuaca

SEQ ID NO: 1767572 - RNA, 19 nt, Homo sapiens
  misc_RNA (1)...(19): siRNA sense strand
gcuccucuacauacucuuu

SEQ ID NO: 1767573 - RNA, 19 nt, Homo sapiens
  misc_RNA (1)...(19): siRNA sense strand
cacuagaggccuauugcua

SEQ ID NO: 1767574 - RNA, 19 nt, Homo sapiens
  misc_RNA (1)...(19): siRNA sense strand
cacuucggcugcaccauug

SEQ ID NO: 1767575 - RNA, 19 nt, Homo sapiens
  misc_RNA (1)...(19): siRNA sense strand
gggcagcaacgccgucaau

SEQ ID NO: 1767576 - RNA, 19 nt, Homo sapiens
  misc_RNA (1)...(19): siRNA sense strand
gccuguggcuccucuacau

SEQ ID NO: 1767577 - RNA, 19 nt, Homo sapiens
  misc_RNA (1)...(19): siRNA sense strand
caagaggauagcagagaug

SEQ ID NO: 1767578 - RNA, 19 nt, Homo sapiens
  misc_RNA (1)...(19): siRNA sense strand
aggcugcccuccugcuuug

SEQ ID NO: 1767579 - RNA, 19 nt, Homo sapiens
  misc_RNA (1)...(19): siRNA sense strand
acaaacugaucaagaagac

SEQ ID NO: 1767580 - RNA, 19 nt, Homo sapiens
  misc_RNA (1)...(19): siRNA sense strand
guggacaaacugaucaaga

SEQ ID NO: 1767581 - RNA, 19 nt, Homo sapiens
  misc_RNA (1)...(19): siRNA sense strand
gccaagaggauagcagaga

SEQ ID NO: 1767582 - RNA, 19 nt, Homo sapiens
  misc_RNA (1)...(19): siRNA sense strand
cugcugcccuccaggaugu

SEQ ID NO: 1767583 - RNA, 19 nt, Homo sapiens
  misc_RNA (1)...(19): siRNA sense strand
gaagaagaggaggccaaga

SEQ ID NO: 1767584 - RNA, 19 nt, Homo sapiens
  misc_RNA (1)...(19): siRNA sense strand
uugaagaguccuaugaguu

SEQ ID NO: 1767585 - RNA, 19 nt, Homo sapiens
  misc_RNA (1)...(19): siRNA sense strand
gaggaggccaagaggauag

SEQ ID NO: 1767586 - RNA, 19 nt, Homo sapiens
  misc_RNA (1)...(19): siRNA sense strand
agucacagcuguuguuuuc

SEQ ID NO: 1767587 - RNA, 19 nt, Homo sapiens
  misc_RNA (1)...(19): siRNA sense strand
cuagaagucaucauugaag

SEQ ID NO: 1767588 - RNA, 19 nt, Homo sapiens
  misc_RNA (1)...(19): siRNA sense strand
ccacacuagaggccuauug

SEQ ID NO: 1767589 - RNA, 19 nt, Homo sapiens
  misc_RNA (1)...(19): siRNA sense strand
gcaagcucgccacaacaug

SEQ ID NO: 1767590 - RNA, 19 nt, Homo sapiens
  misc_RNA (1)...(19): siRNA sense strand
caccaucuuugcauuuguc

SEQ ID NO: 1767591 - RNA, 19 nt, Homo sapiens
  misc_RNA (1)...(19): siRNA sense strand
ucaagacuacgguggacaa

SEQ ID NO: 1767592 - RNA, 19 nt, Homo sapiens
  misc_RNA (1)...(19): siRNA sense strand
caugcucaccgccaucauu

SEQ ID NO: 1767593 - RNA, 19 nt, Homo sapiens
  misc_RNA (1)...(19): siRNA sense strand
gcacuuccugacugucuuc

SEQ ID NO: 1767594 - RNA, 19 nt, Homo sapiens
  misc_RNA (1)...(19): siRNA sense strand
caacgccgucaaugucuuc

SEQ ID NO: 1767595 - RNA, 19 nt, Homo sapiens
  misc_RNA (1)...(19): siRNA sense strand
ccuccaggauguauaugca

SEQ ID NO: 1767596 - RNA, 19 nt, Homo sapiens
  misc_RNA (1)...(19): siRNA sense strand
ucuggaaggugcuguuugc

SEQ ID NO: 1767597 - RNA, 19 nt, Homo sapiens
  misc_RNA (1)...(19): siRNA sense strand
uccuaugaguucaagacua

SEQ ID NO: 1767598 - RNA, 19 nt, Homo sapiens
  misc_RNA (1)...(19): siRNA sense strand
cagacaggaagcugacuau

SEQ ID NO: 1767599 - RNA, 19 nt, Homo sapiens
  misc_RNA (1)...(19): siRNA sense strand
ucaccaucuuugcauuugu

SEQ ID NO: 1767600 - RNA, 19 nt, Homo sapiens
  misc_RNA (1)...(19): siRNA sense strand
agaggaggccaagaggaua

SEQ ID NO: 1767601 - RNA, 19 nt, Homo sapiens
  misc_RNA (1)...(19): siRNA sense strand
aagaggaggccaagaggau

SEQ ID NO: 1767602 - RNA, 19 nt, Homo sapiens
  misc_RNA (1)...(19): siRNA sense strand
caaacuagaagucaucauu

SEQ ID NO: 1767603 - RNA, 19 nt, Homo sapiens
  misc_RNA (1)...(19): siRNA sense strand
acaggaagcugacuaugga

SEQ ID NO: 1767604 - RNA, 19 nt, Homo sapiens
  misc_RNA (1)...(19): siRNA sense strand
gaagcugacuauggaagaa

SEQ ID NO: 1767605 - RNA, 19 nt, Homo sapiens
  misc_RNA (1)...(19): siRNA sense strand
ucucaaagauucagucaca

SEQ ID NO: 1767606 - RNA, 19 nt, Homo sapiens
  misc_RNA (1)...(19): siRNA sense strand
uggacaaacugaucaagaa

SEQ ID NO: 1767607 - RNA, 19 nt, Homo sapiens
  misc_RNA (1)...(19): siRNA sense strand
gcacuucggcugcaccauu

SEQ ID NO: 1767608 - RNA, 19 nt, Homo sapiens
  misc_RNA (1)...(19): siRNA sense strand
agacaaaccuggccuuggu

SEQ ID NO: 1767609 - RNA, 19 nt, Homo sapiens
  misc_RNA (1)...(19): siRNA sense strand
ccauuggucucaaagauuc

SEQ ID NO: 1767610 - RNA, 19 nt, Homo sapiens
  misc_RNA (1)...(19): siRNA sense strand
gcaucagcgugcucuugua

SEQ ID NO: 1767611 - RNA, 19 nt, Homo sapiens
  misc_RNA (1)...(19): siRNA sense strand
gaugggaaagccaguauug

SEQ ID NO: 1767612 - RNA, 19 nt, Homo sapiens
  misc_RNA (1)...(19): siRNA sense strand
gggaugaggaugaggauga

SEQ ID NO: 1767613 - RNA, 19 nt, Homo sapiens
  misc_RNA (1)...(19): siRNA sense strand
gaagaguccuaugaguuca

SEQ ID NO: 1767614 - RNA, 19 nt, Homo sapiens
  misc_RNA (1)...(19): siRNA sense strand
ggaugaggaugaggaugaa

SEQ ID NO: 1767615 - RNA, 19 nt, Homo sapiens
  misc_RNA (1)...(19): siRNA sense strand
ccaagaggauagcagagau

SEQ ID NO: 1767616 - RNA, 19 nt, Homo sapiens
  misc_RNA (1)...(19): siRNA sense strand
uagaagucaucauugaaga

SEQ ID NO: 1767617 - RNA, 19 nt, Homo sapiens
  misc_RNA (1)...(19): siRNA sense strand
ugaagaguccuaugaguuc

SEQ ID NO: 1767618 - RNA, 19 nt, Homo sapiens
  misc_RNA (1)...(19): siRNA sense strand
gcaacgccgucaaugucuu

SEQ ID NO: 1767619 - RNA, 19 nt, Homo sapiens
  misc_RNA (1)...(19): siRNA sense strand
ggagggaccaguucaugga

SEQ ID NO: 1767620 - RNA, 19 nt, Homo sapiens
  misc_RNA (1)...(19): siRNA sense strand
ccuaugaguucaagacuac

SEQ ID NO: 1767621 - RNA, 19 nt, Homo sapiens
  misc_RNA (1)...(19): siRNA sense strand
gcagcaacgccgucaaugu

SEQ ID NO: 1767622 - RNA, 19 nt, Homo sapiens
  misc_RNA (1)...(19): siRNA sense strand
aaacuagaagucaucauug

SEQ ID NO: 1767623 - RNA, 19 nt, Homo sapiens
  misc_RNA (1)...(19): siRNA sense strand
ggaagcugacuauggaaga

SEQ ID NO: 1767624 - RNA, 19 nt, Homo sapiens
  misc_RNA (1)...(19): siRNA sense strand
aacuagaagucaucauuga

SEQ ID NO: 1767625 - RNA, 19 nt, Homo sapiens
  misc_RNA (1)...(19): siRNA sense strand
gcugcaagcucgccacaac

SEQ ID NO: 1767626 - RNA, 19 nt, Homo sapiens
  misc_RNA (1)...(19): siRNA sense strand
agacuacgguggacaaacu

SEQ ID NO: 1767627 - RNA, 19 nt, Homo sapiens
  misc_RNA (1)...(19): siRNA sense strand
gacaaacugaucaagaaga

SEQ ID NO: 1767628 - RNA, 19 nt, Homo sapiens
  misc_RNA (1)...(19): siRNA sense strand
aaacugaucaagaagacaa

SEQ ID NO: 1767629 - RNA, 19 nt, Homo sapiens
  misc_RNA (1)...(19): siRNA sense strand
gaagucaucauugaagagu

SEQ ID NO: 1767630 - RNA, 19 nt, Homo sapiens
  misc_RNA (1)...(19): siRNA sense strand
gacaggaagcugacuaugg

SEQ ID NO: 1767631 - RNA, 19 nt, Homo sapiens
  misc_RNA (1)...(19): siRNA sense strand
ggacaaacugaucaagaag

SEQ ID NO: 1767632 - RNA, 19 nt, Homo sapiens
  misc_RNA (1)...(19): siRNA sense strand
gagaugggaaagccaguau

SEQ ID NO: 1767633 - RNA, 19 nt, Homo sapiens
  misc_RNA (1)...(19): siRNA sense strand
cagcaacgccgucaauguc

SEQ ID NO: 1767634 - RNA, 19 nt, Homo sapiens
  misc_RNA (1)...(19): siRNA sense strand
ggauagcagagaugggaaa

SEQ ID NO: 1767635 - RNA, 19 nt, Homo sapiens
  misc_RNA (1)...(19): siRNA sense strand
cauacucuuugccacacua

SEQ ID NO: 1767636 - RNA, 19 nt, Homo sapiens
  misc_RNA (1)...(19): siRNA sense strand
cuagaggccuauugcuaca

SEQ ID NO: 1767637 - RNA, 19 nt, Homo sapiens
  misc_RNA (1)...(19): siRNA sense strand
gcuccucuacauacucuuu

SEQ ID NO: 1767638 - RNA, 19 nt, Homo sapiens
  misc_RNA (1)...(19): siRNA sense strand
cacuagaggccuauugcua

SEQ ID NO: 1767639 - RNA, 19 nt, Homo sapiens
  misc_RNA (1)...(19): siRNA sense strand
cacuucggcugcaccauug

SEQ ID NO: 1767640 - RNA, 19 nt, Homo sapiens
  misc_RNA (1)...(19): siRNA sense strand
gggcagcaacgccgucaau

SEQ ID NO: 1767641 - RNA, 19 nt, Homo sapiens
  misc_RNA (1)...(19): siRNA sense strand
gccuguggcuccucuacau

SEQ ID NO: 1767642 - RNA, 19 nt, Homo sapiens
  misc_RNA (1)...(19): siRNA sense strand
caagaggauagcagagaug

SEQ ID NO: 1767643 - RNA, 19 nt, Homo sapiens
  misc_RNA (1)...(19): siRNA sense strand
aggcugcccuccugcuuug

SEQ ID NO: 1767644 - RNA, 19 nt, Homo sapiens
  misc_RNA (1)...(19): siRNA sense strand
acaaacugaucaagaagac

SEQ ID NO: 1767645 - RNA, 19 nt, Homo sapiens
  misc_RNA (1)...(19): siRNA sense strand
guggacaaacugaucaaga

SEQ ID NO: 1767646 - RNA, 19 nt, Homo sapiens
  misc_RNA (1)...(19): siRNA sense strand
gccaagaggauagcagaga

SEQ ID NO: 1767647 - RNA, 19 nt, Homo sapiens
  misc_RNA (1)...(19): siRNA sense strand
cugcugcccuccaggaugu

SEQ ID NO: 1767648 - RNA, 19 nt, Homo sapiens
  misc_RNA (1)...(19): siRNA sense strand
gaagaagaggaggccaaga

SEQ ID NO: 1767649 - RNA, 19 nt, Homo sapiens
  misc_RNA (1)...(19): siRNA sense strand
uugaagaguccuaugaguu

SEQ ID NO: 1767650 - RNA, 19 nt, Homo sapiens
  misc_RNA (1)...(19): siRNA sense strand
gaggaggccaagaggauag

SEQ ID NO: 1767651 - RNA, 19 nt, Homo sapiens
  misc_RNA (1)...(19): siRNA sense strand
agucacagcuguuguuuuc

SEQ ID NO: 1767652 - RNA, 19 nt, Homo sapiens
  misc_RNA (1)...(19): siRNA sense strand
cuagaagucaucauugaag

SEQ ID NO: 1767653 - RNA, 19 nt, Homo sapiens
  misc_RNA (1)...(19): siRNA sense strand
ccacacuagaggccuauug

SEQ ID NO: 1767654 - RNA, 19 nt, Homo sapiens
  misc_RNA (1)...(19): siRNA sense strand
gcaagcucgccacaacaug

SEQ ID NO: 1767655 - RNA, 19 nt, Homo sapiens
  misc_RNA (1)...(19): siRNA sense strand
caccaucuuugcauuuguc

SEQ ID NO: 1767656 - RNA, 19 nt, Homo sapiens
  misc_RNA (1)...(19): siRNA sense strand
ucaagacuacgguggacaa

SEQ ID NO: 1767657 - RNA, 19 nt, Homo sapiens
  misc_RNA (1)...(19): siRNA sense strand
caugcucaccgccaucauu

SEQ ID NO: 1767658 - RNA, 19 nt, Homo sapiens
  misc_RNA (1)...(19): siRNA sense strand
gcacuuccugacugucuuc

SEQ ID NO: 1767659 - RNA, 19 nt, Homo sapiens
  misc_RNA (1)...(19): siRNA sense strand
caacgccgucaaugucuuc

SEQ ID NO: 1767660 - RNA, 19 nt, Homo sapiens
  misc_RNA (1)...(19): siRNA sense strand
ccuccaggauguauaugca

SEQ ID NO: 1767661 - RNA, 19 nt, Homo sapiens
  misc_RNA (1)...(19): siRNA sense strand
ucuggaaggugcuguuugc

SEQ ID NO: 1767662 - RNA, 19 nt, Homo sapiens
  misc_RNA (1)...(19): siRNA sense strand
uccuaugaguucaagacua

SEQ ID NO: 1767663 - RNA, 19 nt, Homo sapiens
  misc_RNA (1)...(19): siRNA sense strand
cagacaggaagcugacuau

SEQ ID NO: 1767664 - RNA, 19 nt, Homo sapiens
  misc_RNA (1)...(19): siRNA sense strand
ucaccaucuuugcauuugu

SEQ ID NO: 1767665 - RNA, 19 nt, Homo sapiens
  misc_RNA (1)...(19): siRNA sense strand
agaggaggccaagaggaua

SEQ ID NO: 1767666 - RNA, 19 nt, Homo sapiens
  misc_RNA (1)...(19): siRNA sense strand
aagaggaggccaagaggau

SEQ ID NO: 1767667 - RNA, 19 nt, Homo sapiens
  misc_RNA (1)...(19): siRNA sense strand
acaggaagcugacuaugga

SEQ ID NO: 1767668 - RNA, 19 nt, Homo sapiens
  misc_RNA (1)...(19): siRNA sense strand
gaagcugacuauggaagaa

SEQ ID NO: 1767669 - RNA, 19 nt, Homo sapiens
  misc_RNA (1)...(19): siRNA sense strand
gaugggaaagccaguauug

SEQ ID NO: 1767670 - RNA, 19 nt, Homo sapiens
  misc_RNA (1)...(19): siRNA sense strand
ccaagaggauagcagagau

SEQ ID NO: 1767671 - RNA, 19 nt, Homo sapiens
  misc_RNA (1)...(19): siRNA sense strand
ggaagcugacuauggaaga

SEQ ID NO: 1767672 - RNA, 19 nt, Homo sapiens
  misc_RNA (1)...(19): siRNA sense strand
gacaggaagcugacuaugg

SEQ ID NO: 1767673 - RNA, 19 nt, Homo sapiens
  misc_RNA (1)...(19): siRNA sense strand
gagaugggaaagccaguau

SEQ ID NO: 1767674 - RNA, 19 nt, Homo sapiens
  misc_RNA (1)...(19): siRNA sense strand
ggauagcagagaugggaaa

SEQ ID NO: 1767675 - RNA, 19 nt, Homo sapiens
  misc_RNA (1)...(19): siRNA sense strand
caagaggauagcagagaug

SEQ ID NO: 1767676 - RNA, 19 nt, Homo sapiens
  misc_RNA (1)...(19): siRNA sense strand
gaagaagaggaggccaaga

SEQ ID NO: 1767677 - RNA, 19 nt, Homo sapiens
  misc_RNA (1)...(19): siRNA sense strand
gccaagaggauagcagaga

SEQ ID NO: 1767678 - RNA, 19 nt, Homo sapiens
  misc_RNA (1)...(19): siRNA sense strand
gaggaggccaagaggauag

SEQ ID NO: 1767679 - RNA, 19 nt, Homo sapiens
  misc_RNA (1)...(19): siRNA sense strand
agaggaggccaagaggaua

SEQ ID NO: 1767680 - RNA, 19 nt, Homo sapiens
  misc_RNA (1)...(19): siRNA sense strand
cagacaggaagcugacuau

SEQ ID NO: 1767681 - RNA, 19 nt, Homo sapiens
  misc_RNA (1)...(19): siRNA sense strand
aagaggaggccaagaggau

SEQ ID NO: 1767682 - RNA, 19 nt, Homo sapiens
  misc_RNA (1)...(19): siRNA sense strand
caaacuagaagucaucauu

SEQ ID NO: 1767683 - RNA, 19 nt, Homo sapiens
  misc_RNA (1)...(19): siRNA sense strand
ucucaaagauucagucaca

SEQ ID NO: 1767684 - RNA, 19 nt, Homo sapiens
  misc_RNA (1)...(19): siRNA sense strand
uggacaaacugaucaagaa

SEQ ID NO: 1767685 - RNA, 19 nt, Homo sapiens
  misc_RNA (1)...(19): siRNA sense strand
gcacuucggcugcaccauu

SEQ ID NO: 1767686 - RNA, 19 nt, Homo sapiens
  misc_RNA (1)...(19): siRNA sense strand
agacaaaccuggccuuggu

SEQ ID NO: 1767687 - RNA, 19 nt, Homo sapiens
  misc_RNA (1)...(19): siRNA sense strand
ccauuggucucaaagauuc

SEQ ID NO: 1767688 - RNA, 19 nt, Homo sapiens
  misc_RNA (1)...(19): siRNA sense strand
gcaucagcgugcucuugua

SEQ ID NO: 1767689 - RNA, 19 nt, Homo sapiens
  misc_RNA (1)...(19): siRNA sense strand
gaugggaaagccaguauug

SEQ ID NO: 1767690 - RNA, 19 nt, Homo sapiens
  misc_RNA (1)...(19): siRNA sense strand
gggaugaggaugaggauga

SEQ ID NO: 1767691 - RNA, 19 nt, Homo sapiens
  misc_RNA (1)...(19): siRNA sense strand
gaagaguccuaugaguuca

SEQ ID NO: 1767692 - RNA, 19 nt, Homo sapiens
  misc_RNA (1)...(19): siRNA sense strand
ggaugaggaugaggaugaa

SEQ ID NO: 1767693 - RNA, 19 nt, Homo sapiens
  misc_RNA (1)...(19): siRNA sense strand
uagaagucaucauugaaga

SEQ ID NO: 1767694 - RNA, 19 nt, Homo sapiens
  misc_RNA (1)...(19): siRNA sense strand
ccaagaggauagcagagau

SEQ ID NO: 1767695 - RNA, 19 nt, Homo sapiens
  misc_RNA (1)...(19): siRNA sense strand
ugaagaguccuaugaguuc

SEQ ID NO: 1767696 - RNA, 19 nt, Homo sapiens
  misc_RNA (1)...(19): siRNA sense strand
gcaacgccgucaaugucuu

SEQ ID NO: 1767697 - RNA, 19 nt, Homo sapiens
  misc_RNA (1)...(19): siRNA sense strand
ggagggaccaguucaugga

SEQ ID NO: 1767698 - RNA, 19 nt, Homo sapiens
  misc_RNA (1)...(19): siRNA sense strand
ccuaugaguucaagacuac

SEQ ID NO: 1767699 - RNA, 19 nt, Homo sapiens
  misc_RNA (1)...(19): siRNA sense strand
gcagcaacgccgucaaugu

SEQ ID NO: 1767700 - RNA, 19 nt, Homo sapiens
  misc_RNA (1)...(19): siRNA sense strand
aaacuagaagucaucauug

SEQ ID NO: 1767701 - RNA, 19 nt, Homo sapiens
  misc_RNA (1)...(19): siRNA sense strand
aacuagaagucaucauuga

SEQ ID NO: 1767702 - RNA, 19 nt, Homo sapiens
  misc_RNA (1)...(19): siRNA sense strand
gcugcaagcucgccacaac

SEQ ID NO: 1767703 - RNA, 19 nt, Homo sapiens
  misc_RNA (1)...(19): siRNA sense strand
agacuacgguggacaaacu

SEQ ID NO: 1767704 - RNA, 19 nt, Homo sapiens
  misc_RNA (1)...(19): siRNA sense strand
gacaaacugaucaagaaga

SEQ ID NO: 1767705 - RNA, 19 nt, Homo sapiens
  misc_RNA (1)...(19): siRNA sense strand
aaacugaucaagaagacaa

SEQ ID NO: 1767706 - RNA, 19 nt, Homo sapiens
  misc_RNA (1)...(19): siRNA sense strand
gaagucaucauugaagagu

SEQ ID NO: 1767707 - RNA, 19 nt, Homo sapiens
  misc_RNA (1)...(19): siRNA sense strand
ggacaaacugaucaagaag

SEQ ID NO: 1767708 - RNA, 19 nt, Homo sapiens
  misc_RNA (1)...(19): siRNA sense strand
gagaugggaaagccaguau

SEQ ID NO: 1767709 - RNA, 19 nt, Homo sapiens
  misc_RNA (1)...(19): siRNA sense strand
cagcaacgccgucaauguc

SEQ ID NO: 1767710 - RNA, 19 nt, Homo sapiens
  misc_RNA (1)...(19): siRNA sense strand
ggauagcagagaugggaaa

SEQ ID NO: 1767711 - RNA, 19 nt, Homo sapiens
  misc_RNA (1)...(19): siRNA sense strand
cauacucuuugccacacua

SEQ ID NO: 1767712 - RNA, 19 nt, Homo sapiens
  misc_RNA (1)...(19): siRNA sense strand
cuagaggccuauugcuaca

SEQ ID NO: 1767713 - RNA, 19 nt, Homo sapiens
  misc_RNA (1)...(19): siRNA sense strand
gcuccucuacauacucuuu

SEQ ID NO: 1767714 - RNA, 19 nt, Homo sapiens
  misc_RNA (1)...(19): siRNA sense strand
cacuagaggccuauugcua

SEQ ID NO: 1767715 - RNA, 19 nt, Homo sapiens
  misc_RNA (1)...(19): siRNA sense strand
cacuucggcugcaccauug

SEQ ID NO: 1767716 - RNA, 19 nt, Homo sapiens
  misc_RNA (1)...(19): siRNA sense strand
gggcagcaacgccgucaau

SEQ ID NO: 1767717 - RNA, 19 nt, Homo sapiens
  misc_RNA (1)...(19): siRNA sense strand
gccuguggcuccucuacau

SEQ ID NO: 1767718 - RNA, 19 nt, Homo sapiens
  misc_RNA (1)...(19): siRNA sense strand
guggacaaacugaucaaga

SEQ ID NO: 1767719 - RNA, 19 nt, Homo sapiens
  misc_RNA (1)...(19): siRNA sense strand
caagaggauagcagagaug

SEQ ID NO: 1767720 - RNA, 19 nt, Homo sapiens
  misc_RNA (1)...(19): siRNA sense strand
aggcugcccuccugcuuug

SEQ ID NO: 1767721 - RNA, 19 nt, Homo sapiens
  misc_RNA (1)...(19): siRNA sense strand
acaaacugaucaagaagac

SEQ ID NO: 1767722 - RNA, 19 nt, Homo sapiens
  misc_RNA (1)...(19): siRNA sense strand
gccaagaggauagcagaga

SEQ ID NO: 1767723 - RNA, 19 nt, Homo sapiens
  misc_RNA (1)...(19): siRNA sense strand
gaagaagaggaggccaaga

SEQ ID NO: 1767724 - RNA, 19 nt, Homo sapiens
  misc_RNA (1)...(19): siRNA sense strand
cugcugcccuccaggaugu

SEQ ID NO: 1767725 - RNA, 19 nt, Homo sapiens
  misc_RNA (1)...(19): siRNA sense strand
uugaagaguccuaugaguu

SEQ ID NO: 1767726 - RNA, 19 nt, Homo sapiens
  misc_RNA (1)...(19): siRNA sense strand
agucacagcuguuguuuuc

SEQ ID NO: 1767727 - RNA, 19 nt, Homo sapiens
  misc_RNA (1)...(19): siRNA sense strand
gaggaggccaagaggauag

SEQ ID NO: 1767728 - RNA, 19 nt, Homo sapiens
  misc_RNA (1)...(19): siRNA sense strand
ucaagacuacgguggacaa

SEQ ID NO: 1767729 - RNA, 19 nt, Homo sapiens
  misc_RNA (1)...(19): siRNA sense strand
ccacacuagaggccuauug

SEQ ID NO: 1767730 - RNA, 19 nt, Homo sapiens
  misc_RNA (1)...(19): siRNA sense strand
gcaagcucgccacaacaug

SEQ ID NO: 1767731 - RNA, 19 nt, Homo sapiens
  misc_RNA (1)...(19): siRNA sense strand
caccaucuuugcauuuguc

SEQ ID NO: 1767732 - RNA, 19 nt, Homo sapiens
  misc_RNA (1)...(19): siRNA sense strand
cuagaagucaucauugaag

SEQ ID NO: 1767733 - RNA, 19 nt, Homo sapiens
  misc_RNA (1)...(19): siRNA sense strand
caugcucaccgccaucauu

SEQ ID NO: 1767734 - RNA, 19 nt, Homo sapiens
  misc_RNA (1)...(19): siRNA sense strand
gcacuuccugacugucuuc

SEQ ID NO: 1767735 - RNA, 19 nt, Homo sapiens
  misc_RNA (1)...(19): siRNA sense strand
caacgccgucaaugucuuc

SEQ ID NO: 1767736 - RNA, 19 nt, Homo sapiens
  misc_RNA (1)...(19): siRNA sense strand
ccuccaggauguauaugca

SEQ ID NO: 1767737 - RNA, 19 nt, Homo sapiens
  misc_RNA (1)...(19): siRNA sense strand
ucuggaaggugcuguuugc

SEQ ID NO: 1767738 - RNA, 19 nt, Homo sapiens
  misc_RNA (1)...(19): siRNA sense strand
uccuaugaguucaagacua

SEQ ID NO: 1767739 - RNA, 19 nt, Homo sapiens
  misc_RNA (1)...(19): siRNA sense strand
agaggaggccaagaggaua

SEQ ID NO: 1767740 - RNA, 19 nt, Homo sapiens
  misc_RNA (1)...(19): siRNA sense strand
ucaccaucuuugcauuugu

SEQ ID NO: 1767741 - RNA, 19 nt, Homo sapiens
  misc_RNA (1)...(19): siRNA sense strand
aagaggaggccaagaggau

SEQ ID NO: 1767742 - RNA, 19 nt, Homo sapiens
  misc_RNA (1)...(19): siRNA sense strand
caaacuagaagucaucauu

SEQ ID NO: 1767743 - RNA, 19 nt, Homo sapiens
  misc_RNA (1)...(19): siRNA sense strand
acaggaagcugacuaugga

SEQ ID NO: 1767744 - RNA, 19 nt, Homo sapiens
  misc_RNA (1)...(19): siRNA sense strand
gaagcugacuauggaagaa

SEQ ID NO: 1767745 - RNA, 19 nt, Homo sapiens
  misc_RNA (1)...(19): siRNA sense strand
ucucaaagauucagucaca

SEQ ID NO: 1767746 - RNA, 19 nt, Homo sapiens
  misc_RNA (1)...(19): siRNA sense strand
uggacaaacugaucaagaa

SEQ ID NO: 1767747 - RNA, 19 nt, Homo sapiens
  misc_RNA (1)...(19): siRNA sense strand
gcacuucggcugcaccauu

SEQ ID NO: 1767748 - RNA, 19 nt, Homo sapiens
  misc_RNA (1)...(19): siRNA sense strand
agacaaaccuggccuuggu

SEQ ID NO: 1767749 - RNA, 19 nt, Homo sapiens
  misc_RNA (1)...(19): siRNA sense strand
ccauuggucucaaagauuc

SEQ ID NO: 1767750 - RNA, 19 nt, Homo sapiens
  misc_RNA (1)...(19): siRNA sense strand
gcaucagcgugcucuugua

SEQ ID NO: 1767751 - RNA, 19 nt, Homo sapiens
  misc_RNA (1)...(19): siRNA sense strand
gaugggaaagccaguauug

SEQ ID NO: 1767752 - RNA, 19 nt, Homo sapiens
  misc_RNA (1)...(19): siRNA sense strand
gggaugaggaugaggauga

SEQ ID NO: 1767753 - RNA, 19 nt, Homo sapiens
  misc_RNA (1)...(19): siRNA sense strand
gaagaguccuaugaguuca

SEQ ID NO: 1767754 - RNA, 19 nt, Homo sapiens
  misc_RNA (1)...(19): siRNA sense strand
ggaugaggaugaggaugaa

SEQ ID NO: 1767755 - RNA, 19 nt, Homo sapiens
  misc_RNA (1)...(19): siRNA sense strand
ccaagaggauagcagagau

SEQ ID NO: 1767756 - RNA, 19 nt, Homo sapiens
  misc_RNA (1)...(19): siRNA sense strand
uagaagucaucauugaaga

SEQ ID NO: 1767757 - RNA, 19 nt, Homo sapiens
  misc_RNA (1)...(19): siRNA sense strand
ugaagaguccuaugaguuc

SEQ ID NO: 1767758 - RNA, 19 nt, Homo sapiens
  misc_RNA (1)...(19): siRNA sense strand
gcaacgccgucaaugucuu

SEQ ID NO: 1767759 - RNA, 19 nt, Homo sapiens
  misc_RNA (1)...(19): siRNA sense strand
ggagggaccaguucaugga

SEQ ID NO: 1767760 - RNA, 19 nt, Homo sapiens
  misc_RNA (1)...(19): siRNA sense strand
ccuaugaguucaagacuac

SEQ ID NO: 1767761 - RNA, 19 nt, Homo sapiens
  misc_RNA (1)...(19): siRNA sense strand
gcagcaacgccgucaaugu

SEQ ID NO: 1767762 - RNA, 19 nt, Homo sapiens
  misc_RNA (1)...(19): siRNA sense strand
aaacuagaagucaucauug

SEQ ID NO: 1767763 - RNA, 19 nt, Homo sapiens
  misc_RNA (1)...(19): siRNA sense strand
ggaagcugacuauggaaga

SEQ ID NO: 1767764 - RNA, 19 nt, Homo sapiens
  misc_RNA (1)...(19): siRNA sense strand
aacuagaagucaucauuga

SEQ ID NO: 1767765 - RNA, 19 nt, Homo sapiens
  misc_RNA (1)...(19): siRNA sense strand
gcugcaagcucgccacaac

SEQ ID NO: 1767766 - RNA, 19 nt, Homo sapiens
  misc_RNA (1)...(19): siRNA sense strand
agacuacgguggacaaacu

SEQ ID NO: 1767767 - RNA, 19 nt, Homo sapiens
  misc_RNA (1)...(19): siRNA sense strand
gacaaacugaucaagaaga

SEQ ID NO: 1767768 - RNA, 19 nt, Homo sapiens
  misc_RNA (1)...(19): siRNA sense strand
aaacugaucaagaagacaa

SEQ ID NO: 1767769 - RNA, 19 nt, Homo sapiens
  misc_RNA (1)...(19): siRNA sense strand
gaagucaucauugaagagu

SEQ ID NO: 1767770 - RNA, 19 nt, Homo sapiens
  misc_RNA (1)...(19): siRNA sense strand
gacaggaagcugacuaugg

SEQ ID NO: 1767771 - RNA, 19 nt, Homo sapiens
  misc_RNA (1)...(19): siRNA sense strand
ggacaaacugaucaagaag

SEQ ID NO: 1767772 - RNA, 19 nt, Homo sapiens
  misc_RNA (1)...(19): siRNA sense strand
gagaugggaaagccaguau

SEQ ID NO: 1767773 - RNA, 19 nt, Homo sapiens
  misc_RNA (1)...(19): siRNA sense strand
cagcaacgccgucaauguc

SEQ ID NO: 1767774 - RNA, 19 nt, Homo sapiens
  misc_RNA (1)...(19): siRNA sense strand
ggauagcagagaugggaaa

SEQ ID NO: 1767775 - RNA, 19 nt, Homo sapiens
  misc_RNA (1)...(19): siRNA sense strand
cauacucuuugccacacua

SEQ ID NO: 1767776 - RNA, 19 nt, Homo sapiens
  misc_RNA (1)...(19): siRNA sense strand
cuagaggccuauugcuaca

SEQ ID NO: 1767777 - RNA, 19 nt, Homo sapiens
  misc_RNA (1)...(19): siRNA sense strand
gcuccucuacauacucuuu

SEQ ID NO: 1767778 - RNA, 19 nt, Homo sapiens
  misc_RNA (1)...(19): siRNA sense strand
cacuagaggccuauugcua

SEQ ID NO: 1767779 - RNA, 19 nt, Homo sapiens
  misc_RNA (1)...(19): siRNA sense strand
cacuucggcugcaccauug

SEQ ID NO: 1767780 - RNA, 19 nt, Homo sapiens
  misc_RNA (1)...(19): siRNA sense strand
gggcagcaacgccgucaau

SEQ ID NO: 1767781 - RNA, 19 nt, Homo sapiens
  misc_RNA (1)...(19): siRNA sense strand
gccuguggcuccucuacau

SEQ ID NO: 1767782 - RNA, 19 nt, Homo sapiens
  misc_RNA (1)...(19): siRNA sense strand
caagaggauagcagagaug

SEQ ID NO: 1767783 - RNA, 19 nt, Homo sapiens
  misc_RNA (1)...(19): siRNA sense strand
aggcugcccuccugcuuug

SEQ ID NO: 1767784 - RNA, 19 nt, Homo sapiens
  misc_RNA (1)...(19): siRNA sense strand
acaaacugaucaagaagac

SEQ ID NO: 1767785 - RNA, 19 nt, Homo sapiens
  misc_RNA (1)...(19): siRNA sense strand
guggacaaacugaucaaga

SEQ ID NO: 1767786 - RNA, 19 nt, Homo sapiens
  misc_RNA (1)...(19): siRNA sense strand
gccaagaggauagcagaga

SEQ ID NO: 1767787 - RNA, 19 nt, Homo sapiens
  misc_RNA (1)...(19): siRNA sense strand
cugcugcccuccaggaugu

SEQ ID NO: 1767788 - RNA, 19 nt, Homo sapiens
  misc_RNA (1)...(19): siRNA sense strand
gaagaagaggaggccaaga

SEQ ID NO: 1767789 - RNA, 19 nt, Homo sapiens
  misc_RNA (1)...(19): siRNA sense strand
uugaagaguccuaugaguu

SEQ ID NO: 1767790 - RNA, 19 nt, Homo sapiens
  misc_RNA (1)...(19): siRNA sense strand
gaggaggccaagaggauag

SEQ ID NO: 1767791 - RNA, 19 nt, Homo sapiens
  misc_RNA (1)...(19): siRNA sense strand
agucacagcuguuguuuuc

SEQ ID NO: 1767792 - RNA, 19 nt, Homo sapiens
  misc_RNA (1)...(19): siRNA sense strand
cuagaagucaucauugaag

SEQ ID NO: 1767793 - RNA, 19 nt, Homo sapiens
  misc_RNA (1)...(19): siRNA sense strand
ccacacuagaggccuauug

SEQ ID NO: 1767794 - RNA, 19 nt, Homo sapiens
  misc_RNA (1)...(19): siRNA sense strand
gcaagcucgccacaacaug

SEQ ID NO: 1767795 - RNA, 19 nt, Homo sapiens
  misc_RNA (1)...(19): siRNA sense strand
caccaucuuugcauuuguc

SEQ ID NO: 1767796 - RNA, 19 nt, Homo sapiens
  misc_RNA (1)...(19): siRNA sense strand
ucaagacuacgguggacaa

SEQ ID NO: 1767797 - RNA, 19 nt, Homo sapiens
  misc_RNA (1)...(19): siRNA sense strand
caugcucaccgccaucauu

SEQ ID NO: 1767798 - RNA, 19 nt, Homo sapiens
  misc_RNA (1)...(19): siRNA sense strand
gcacuuccugacugucuuc

SEQ ID NO: 1767799 - RNA, 19 nt, Homo sapiens
  misc_RNA (1)...(19): siRNA sense strand
caacgccgucaaugucuuc

SEQ ID NO: 1767800 - RNA, 19 nt, Homo sapiens
  misc_RNA (1)...(19): siRNA sense strand
ccuccaggauguauaugca

SEQ ID NO: 1767801 - RNA, 19 nt, Homo sapiens
  misc_RNA (1)...(19): siRNA sense strand
ucuggaaggugcuguuugc

SEQ ID NO: 1767802 - RNA, 19 nt, Homo sapiens
  misc_RNA (1)...(19): siRNA sense strand
uccuaugaguucaagacua

SEQ ID NO: 1767803 - RNA, 19 nt, Homo sapiens
  misc_RNA (1)...(19): siRNA sense strand
cagacaggaagcugacuau

SEQ ID NO: 1767804 - RNA, 19 nt, Homo sapiens
  misc_RNA (1)...(19): siRNA sense strand
ucaccaucuuugcauuugu

SEQ ID NO: 1767805 - RNA, 19 nt, Homo sapiens
  misc_RNA (1)...(19): siRNA sense strand
agaggaggccaagaggaua

SEQ ID NO: 1767806 - RNA, 19 nt, Homo sapiens
  misc_RNA (1)...(19): siRNA sense strand
aagaggaggccaagaggau

SEQ ID NO: 1767807 - RNA, 19 nt, Homo sapiens
  misc_RNA (1)...(19): siRNA sense strand
gaacaagagcuauacaaua

SEQ ID NO: 1767808 - RNA, 19 nt, Homo sapiens
  misc_RNA (1)...(19): siRNA sense strand
gcaaagccauucauucuuc

SEQ ID NO: 1767809 - RNA, 19 nt, Homo sapiens
  misc_RNA (1)...(19): siRNA sense strand
ccagaaaucacaacaaaua

SEQ ID NO: 1767810 - RNA, 19 nt, Homo sapiens
  misc_RNA (1)...(19): siRNA sense strand
caacaucucccauaccaaa

SEQ ID NO: 1767811 - RNA, 19 nt, Homo sapiens
  misc_RNA (1)...(19): siRNA sense strand
uggacgagaugcacuguua

SEQ ID NO: 1767812 - RNA, 19 nt, Homo sapiens
  misc_RNA (1)...(19): siRNA sense strand
gguguugcuugucuuguua

SEQ ID NO: 1767813 - RNA, 19 nt, Homo sapiens
  misc_RNA (1)...(19): siRNA sense strand
gagcaaagccauucauucu

SEQ ID NO: 1767814 - RNA, 19 nt, Homo sapiens
  misc_RNA (1)...(19): siRNA sense strand
agaugaagaugaugaagaa

SEQ ID NO: 1767815 - RNA, 19 nt, Homo sapiens
  misc_RNA (1)...(19): siRNA sense strand
caagaaaugugugacuaug

SEQ ID NO: 1767816 - RNA, 19 nt, Homo sapiens
  misc_RNA (1)...(19): siRNA sense strand
ggaacuguauguggucaaa

SEQ ID NO: 1767817 - RNA, 19 nt, Homo sapiens
  misc_RNA (1)...(19): siRNA sense strand
uaauggaagugaugcagaa

SEQ ID NO: 1767818 - RNA, 19 nt, Homo sapiens
  misc_RNA (1)...(19): siRNA sense strand
ggaacaagagcuauacaau

SEQ ID NO: 1767819 - RNA, 19 nt, Homo sapiens
  misc_RNA (1)...(19): siRNA sense strand
ggcaagaaaugugugacua

SEQ ID NO: 1767820 - RNA, 19 nt, Homo sapiens
  misc_RNA (1)...(19): siRNA sense strand
gacaggguauccaacuaaa

SEQ ID NO: 1767821 - RNA, 19 nt, Homo sapiens
  misc_RNA (1)...(19): siRNA sense strand
gcaagaaaugugugacuau

SEQ ID NO: 1767822 - RNA, 19 nt, Homo sapiens
  misc_RNA (1)...(19): siRNA sense strand
uaaggacaauccacagaga

SEQ ID NO: 1767823 - RNA, 19 nt, Homo sapiens
  misc_RNA (1)...(19): siRNA sense strand
agaugaagaugaagaugaa

SEQ ID NO: 1767824 - RNA, 19 nt, Homo sapiens
  misc_RNA (1)...(19): siRNA sense strand
caacuuaaagacagagaaa

SEQ ID NO: 1767825 - RNA, 19 nt, Homo sapiens
  misc_RNA (1)...(19): siRNA sense strand
cagcagaucggaacuguau

SEQ ID NO: 1767826 - RNA, 19 nt, Homo sapiens
  misc_RNA (1)...(19): siRNA sense strand
ugaagaugaugaagaagau

SEQ ID NO: 1767827 - RNA, 19 nt, Homo sapiens
  misc_RNA (1)...(19): siRNA sense strand
gcagauauaggaacaccaa

SEQ ID NO: 1767828 - RNA, 19 nt, Homo sapiens
  misc_RNA (1)...(19): siRNA sense strand
caagagcuauacaauaacu

SEQ ID NO: 1767829 - RNA, 19 nt, Homo sapiens
  misc_RNA (1)...(19): siRNA sense strand
cgacaggguauccaacuaa

SEQ ID NO: 1767830 - RNA, 19 nt, Homo sapiens
  misc_RNA (1)...(19): siRNA sense strand
gauccagaauugaagaauc

SEQ ID NO: 1767831 - RNA, 19 nt, Homo sapiens
  misc_RNA (1)...(19): siRNA sense strand
caaggcagauauaggaaca

SEQ ID NO: 1767832 - RNA, 19 nt, Homo sapiens
  misc_RNA (1)...(19): siRNA sense strand
acgagucccucuucacuuu

SEQ ID NO: 1767833 - RNA, 19 nt, Homo sapiens
  misc_RNA (1)...(19): siRNA sense strand
gaacgagucccucuucacu

SEQ ID NO: 1767834 - RNA, 19 nt, Homo sapiens
  misc_RNA (1)...(19): siRNA sense strand
uagagagggugcucagcua

SEQ ID NO: 1767835 - RNA, 19 nt, Homo sapiens
  misc_RNA (1)...(19): siRNA sense strand
cgacaaaggaaaucugaga

SEQ ID NO: 1767836 - RNA, 19 nt, Homo sapiens
  misc_RNA (1)...(19): siRNA sense strand
gcagugguguugcuugucu

SEQ ID NO: 1767837 - RNA, 19 nt, Homo sapiens
  misc_RNA (1)...(19): siRNA sense strand
gcacccacuucaggaauug

SEQ ID NO: 1767838 - RNA, 19 nt, Homo sapiens
  misc_RNA (1)...(19): siRNA sense strand
gagaacgagucccucuuca

SEQ ID NO: 1767839 - RNA, 19 nt, Homo sapiens
  misc_RNA (1)...(19): siRNA sense strand
cgauauguguggaaucuca

SEQ ID NO: 1767840 - RNA, 19 nt, Homo sapiens
  misc_RNA (1)...(19): siRNA sense strand
cauuaaggaugggaaacua

SEQ ID NO: 1767841 - RNA, 19 nt, Homo sapiens
  misc_RNA (1)...(19): siRNA sense strand
ggagaacgagucccucuuc

SEQ ID NO: 1767842 - RNA, 19 nt, Homo sapiens
  misc_RNA (1)...(19): siRNA sense strand
caaaggaaaucugagaaaa

SEQ ID NO: 1767843 - RNA, 19 nt, Homo sapiens
  misc_RNA (1)...(19): siRNA sense strand
ggaauugugggugcauuaa

SEQ ID NO: 1767844 - RNA, 19 nt, Homo sapiens
  misc_RNA (1)...(19): siRNA sense strand
uggcuacaguugauauaaa

SEQ ID NO: 1767845 - RNA, 19 nt, Homo sapiens
  misc_RNA (1)...(19): siRNA sense strand
gcagaucggaacuguaugu

SEQ ID NO: 1767846 - RNA, 19 nt, Homo sapiens
  misc_RNA (1)...(19): siRNA sense strand
ggagcaaagccauucauuc

SEQ ID NO: 1767847 - RNA, 19 nt, Homo sapiens
  misc_RNA (1)...(19): siRNA sense strand
ggauccaaauacaggcuuu

SEQ ID NO: 1767848 - RNA, 19 nt, Homo sapiens
  misc_RNA (1)...(19): siRNA sense strand
caaagccauucauucuuca

SEQ ID NO: 1767849 - RNA, 19 nt, Homo sapiens
  misc_RNA (1)...(19): siRNA sense strand
agaaaugugugacuauguc

SEQ ID NO: 1767850 - RNA, 19 nt, Homo sapiens
  misc_RNA (1)...(19): siRNA sense strand
aauacaggcuuugaucuga

SEQ ID NO: 1767851 - RNA, 19 nt, Homo sapiens
  misc_RNA (1)...(19): siRNA sense strand
gaagugcagugguguugcu

SEQ ID NO: 1767852 - RNA, 19 nt, Homo sapiens
  misc_RNA (1)...(19): siRNA sense strand
agaugaagaugaagaugau

SEQ ID NO: 1767853 - RNA, 19 nt, Homo sapiens
  misc_RNA (1)...(19): siRNA sense strand
cagaugaagaugaagauga

SEQ ID NO: 1767854 - RNA, 19 nt, Homo sapiens
  misc_RNA (1)...(19): siRNA sense strand
gaccaucagguuccaacua

SEQ ID NO: 1767855 - RNA, 19 nt, Homo sapiens
  misc_RNA (1)...(19): siRNA sense strand
ucaacaacaucucccauac

SEQ ID NO: 1767856 - RNA, 19 nt, Homo sapiens
  misc_RNA (1)...(19): siRNA sense strand
ucacuuuccucggcaagaa

SEQ ID NO: 1767857 - RNA, 19 nt, Homo sapiens
  misc_RNA (1)...(19): siRNA sense strand
acaaaggaaaucugagaaa

SEQ ID NO: 1767858 - RNA, 19 nt, Homo sapiens
  misc_RNA (1)...(19): siRNA sense strand
gagagggugcucagcuaaa

SEQ ID NO: 1767859 - RNA, 19 nt, Homo sapiens
  misc_RNA (1)...(19): siRNA sense strand
ucucagaggcacaacuuaa

SEQ ID NO: 1767860 - RNA, 19 nt, Homo sapiens
  misc_RNA (1)...(19): siRNA sense strand
cccaaaugguccuaaucua

SEQ ID NO: 1767861 - RNA, 19 nt, Homo sapiens
  misc_RNA (1)...(19): siRNA sense strand
uugcuugucuuguuaagga

SEQ ID NO: 1767862 - RNA, 19 nt, Homo sapiens
  misc_RNA (1)...(19): siRNA sense strand
auccagaaaucacaacaaa

SEQ ID NO: 1767863 - RNA, 19 nt, Homo sapiens
  misc_RNA (1)...(19): siRNA sense strand
ccaaaugguccuaaucuac

SEQ ID NO: 1767864 - RNA, 19 nt, Homo sapiens
  misc_RNA (1)...(19): siRNA sense strand
gucaaguugcucuuaauuu

SEQ ID NO: 1767865 - RNA, 19 nt, Homo sapiens
  misc_RNA (1)...(19): siRNA sense strand
ugaagaagauuuugaggau

SEQ ID NO: 1767866 - RNA, 19 nt, Homo sapiens
  misc_RNA (1)...(19): siRNA sense strand
gccauucauucuucagaug

SEQ ID NO: 1767867 - RNA, 19 nt, Homo sapiens
  misc_RNA (1)...(19): siRNA sense strand
uaaagacagagaaacauca

SEQ ID NO: 1767868 - RNA, 19 nt, Homo sapiens
  misc_RNA (1)...(19): siRNA sense strand
gauauaggaacaccaagca

SEQ ID NO: 1767869 - RNA, 19 nt, Homo sapiens
  misc_RNA (1)...(19): siRNA sense strand
gucaacaacaucucccaua

SEQ ID NO: 1767870 - RNA, 19 nt, Homo sapiens
  misc_RNA (1)...(19): siRNA sense strand
gacaaaggaaaucugagaa

SEQ ID NO: 1767871 - RNA, 19 nt, Homo sapiens
  misc_RNA (1)...(19): siRNA sense strand
gggaacaagagcuauacaa

SEQ ID NO: 1767872 - RNA, 19 nt, Homo sapiens
  misc_RNA (1)...(19): siRNA sense strand
aauugugggugcauuaaug

SEQ ID NO: 1767873 - RNA, 19 nt, Homo sapiens
  misc_RNA (1)...(19): siRNA sense strand
ccaaugaagaagaagcaaa

SEQ ID NO: 1767874 - RNA, 19 nt, Homo sapiens
  misc_RNA (1)...(19): siRNA sense strand
gaggauauuuucauaccuu

SEQ ID NO: 1767875 - RNA, 19 nt, Homo sapiens
  misc_RNA (1)...(19): siRNA sense strand
gaagaugaugaagaagauu

SEQ ID NO: 1767876 - RNA, 19 nt, Homo sapiens
  misc_RNA (1)...(19): siRNA sense strand
gaagaugaagaugaagaug

SEQ ID NO: 1767877 - RNA, 19 nt, Homo sapiens
  misc_RNA (1)...(19): siRNA sense strand
gugcagugguguugcuugu

SEQ ID NO: 1767878 - RNA, 19 nt, Homo sapiens
  misc_RNA (1)...(19): siRNA sense strand
ccuagaggauauuuucaua

SEQ ID NO: 1767879 - RNA, 19 nt, Homo sapiens
  misc_RNA (1)...(19): siRNA sense strand
caagcaauuuccagcacau

SEQ ID NO: 1767880 - RNA, 19 nt, Homo sapiens
  misc_RNA (1)...(19): siRNA sense strand
guccacaagucaacaacau

SEQ ID NO: 1767881 - RNA, 19 nt, Homo sapiens
  misc_RNA (1)...(19): siRNA sense strand
acaauccacagagaucuua

SEQ ID NO: 1767882 - RNA, 19 nt, Homo sapiens
  misc_RNA (1)...(19): siRNA sense strand
aagaugaagaugaagauga

SEQ ID NO: 1767883 - RNA, 19 nt, Homo sapiens
  misc_RNA (1)...(19): siRNA sense strand
gaauugugggugcauuaau

SEQ ID NO: 1767884 - RNA, 19 nt, Homo sapiens
  misc_RNA (1)...(19): siRNA sense strand
gacgagaugcacuguuaga

SEQ ID NO: 1767885 - RNA, 19 nt, Homo sapiens
  misc_RNA (1)...(19): siRNA sense strand
uaggaacaccaagcaauuu

SEQ ID NO: 1767886 - RNA, 19 nt, Homo sapiens
  misc_RNA (1)...(19): siRNA sense strand
gauuaaccaaggcagauau

SEQ ID NO: 1767887 - RNA, 19 nt, Homo sapiens
  misc_RNA (1)...(19): siRNA sense strand
gagauuaaccaaggcagau

SEQ ID NO: 1767888 - RNA, 19 nt, Homo sapiens
  misc_RNA (1)...(19): siRNA sense strand
cuucagcaguggugcaguu

SEQ ID NO: 1767889 - RNA, 19 nt, Homo sapiens
  misc_RNA (1)...(19): siRNA sense strand
gagcuauacaauaacuuug

SEQ ID NO: 1767890 - RNA, 19 nt, Homo sapiens
  misc_RNA (1)...(19): siRNA sense strand
gaaaaggagcaaagccauu

SEQ ID NO: 1767891 - RNA, 19 nt, Homo sapiens
  misc_RNA (1)...(19): siRNA sense strand
gaauaauuuggauccagaa

SEQ ID NO: 1767892 - RNA, 19 nt, Homo sapiens
  misc_RNA (1)...(19): siRNA sense strand
auacaggcuuugaucugaa

SEQ ID NO: 1767893 - RNA, 19 nt, Homo sapiens
  misc_RNA (1)...(19): siRNA sense strand
gaacaccaagcaauuucca

SEQ ID NO: 1767894 - RNA, 19 nt, Homo sapiens
  misc_RNA (1)...(19): siRNA sense strand
aacaacaucucccauacca

SEQ ID NO: 1767895 - RNA, 19 nt, Homo sapiens
  misc_RNA (1)...(19): siRNA sense strand
ggaaacuauugugggaaca

SEQ ID NO: 1767896 - RNA, 19 nt, Homo sapiens
  misc_RNA (1)...(19): siRNA sense strand
aagaagauuuugaggauga

SEQ ID NO: 1767897 - RNA, 19 nt, Homo sapiens
  misc_RNA (1)...(19): siRNA sense strand
cagaggcacaacuuaaaga

SEQ ID NO: 1767898 - RNA, 19 nt, Homo sapiens
  misc_RNA (1)...(19): siRNA sense strand
uuaaggaugggaaacuauu

SEQ ID NO: 1767899 - RNA, 19 nt, Homo sapiens
  misc_RNA (1)...(19): siRNA sense strand
ccacaagucaacaacaucu

SEQ ID NO: 1767900 - RNA, 19 nt, Homo sapiens
  misc_RNA (1)...(19): siRNA sense strand
gaugaugagugggaagacu

SEQ ID NO: 1767901 - RNA, 19 nt, Homo sapiens
  misc_RNA (1)...(19): siRNA sense strand
aacuguauguggucaaaga

SEQ ID NO: 1767902 - RNA, 19 nt, Homo sapiens
  misc_RNA (1)...(19): siRNA sense strand
ggcacaacuuaaagacaga

SEQ ID NO: 1767903 - RNA, 19 nt, Homo sapiens
  misc_RNA (1)...(19): siRNA sense strand
uauaggaacaccaagcaau

SEQ ID NO: 1767904 - RNA, 19 nt, Homo sapiens
  misc_RNA (1)...(19): siRNA sense strand
uaaggaugggaaacuauug

SEQ ID NO: 1767905 - RNA, 19 nt, Homo sapiens
  misc_RNA (1)...(19): siRNA sense strand
gugcauuaauggaagugau

SEQ ID NO: 1767906 - RNA, 19 nt, Homo sapiens
  misc_RNA (1)...(19): siRNA sense strand
ugaagaugaagaugaugaa

SEQ ID NO: 1767907 - RNA, 19 nt, Homo sapiens
  misc_RNA (1)...(19): siRNA sense strand
gcaauggaaugguuaguug

SEQ ID NO: 1767908 - RNA, 19 nt, Homo sapiens
  misc_RNA (1)...(19): siRNA sense strand
aaacacagaugcagucauu

SEQ ID NO: 1767909 - RNA, 19 nt, Homo sapiens
  misc_RNA (1)...(19): siRNA sense strand
ccucagagauggcaaauuc

SEQ ID NO: 1767910 - RNA, 19 nt, Homo sapiens
  misc_RNA (1)...(19): siRNA sense strand
gagaaguuguuacuacuau

SEQ ID NO: 1767911 - RNA, 19 nt, Homo sapiens
  misc_RNA (1)...(19): siRNA sense strand
acacagaugcagucauuua

SEQ ID NO: 1767912 - RNA, 19 nt, Homo sapiens
  misc_RNA (1)...(19): siRNA sense strand
caaauaaacaggacaugga

SEQ ID NO: 1767913 - RNA, 19 nt, Homo sapiens
  misc_RNA (1)...(19): siRNA sense strand
cagaugcagucauuuaugu

SEQ ID NO: 1767914 - RNA, 19 nt, Homo sapiens
  misc_RNA (1)...(19): siRNA sense strand
agaguuaguugccauguug

SEQ ID NO: 1767915 - RNA, 19 nt, Homo sapiens
  misc_RNA (1)...(19): siRNA sense strand
ggagaaguuguuacuacua

SEQ ID NO: 1767916 - RNA, 19 nt, Homo sapiens
  misc_RNA (1)...(19): siRNA sense strand
gaaaauggcagauauucaa

SEQ ID NO: 1767917 - RNA, 19 nt, Homo sapiens
  misc_RNA (1)...(19): siRNA sense strand
agacaaguaucaggccaua

SEQ ID NO: 1767918 - RNA, 19 nt, Homo sapiens
  misc_RNA (1)...(19): siRNA sense strand
ggagauguuacuauucaaa

SEQ ID NO: 1767919 - RNA, 19 nt, Homo sapiens
  misc_RNA (1)...(19): siRNA sense strand
uagagacggugacguacaa

SEQ ID NO: 1767920 - RNA, 19 nt, Homo sapiens
  misc_RNA (1)...(19): siRNA sense strand
uuagugguguuugcaaaua

SEQ ID NO: 1767921 - RNA, 19 nt, Homo sapiens
  misc_RNA (1)...(19): siRNA sense strand
ggcaaauucacuuggguua

SEQ ID NO: 1767922 - RNA, 19 nt, Homo sapiens
  misc_RNA (1)...(19): siRNA sense strand
gccaugacuuccucagaga

SEQ ID NO: 1767923 - RNA, 19 nt, Homo sapiens
  misc_RNA (1)...(19): siRNA sense strand
caagugggagaaguuguua

SEQ ID NO: 1767924 - RNA, 19 nt, Homo sapiens
  misc_RNA (1)...(19): siRNA sense strand
cuggagauguuacuauuca

SEQ ID NO: 1767925 - RNA, 19 nt, Homo sapiens
  misc_RNA (1)...(19): siRNA sense strand
gggagaaguuguuacuacu

SEQ ID NO: 1767926 - RNA, 19 nt, Homo sapiens
  misc_RNA (1)...(19): siRNA sense strand
ggaggacagacaaguauca

SEQ ID NO: 1767927 - RNA, 19 nt, Homo sapiens
  misc_RNA (1)...(19): siRNA sense strand
gaaguuguuacuacuauac

SEQ ID NO: 1767928 - RNA, 19 nt, Homo sapiens
  misc_RNA (1)...(19): siRNA sense strand
gaacucgggaaaugagaau

SEQ ID NO: 1767929 - RNA, 19 nt, Homo sapiens
  misc_RNA (1)...(19): siRNA sense strand
uacuggagauguuacuauu

SEQ ID NO: 1767930 - RNA, 19 nt, Homo sapiens
  misc_RNA (1)...(19): siRNA sense strand
ggaaugguuaguugaaaca

SEQ ID NO: 1767931 - RNA, 19 nt, Homo sapiens
  misc_RNA (1)...(19): siRNA sense strand
uagugguguuugcaaauaa

SEQ ID NO: 1767932 - RNA, 19 nt, Homo sapiens
  misc_RNA (1)...(19): siRNA sense strand
ggaggaagaagagcugaga

SEQ ID NO: 1767933 - RNA, 19 nt, Homo sapiens
  misc_RNA (1)...(19): siRNA sense strand
ugcagucauuuauguagua

SEQ ID NO: 1767934 - RNA, 19 nt, Homo sapiens
  misc_RNA (1)...(19): siRNA sense strand
uaccuaccauuggauuuaa

SEQ ID NO: 1767935 - RNA, 19 nt, Homo sapiens
  misc_RNA (1)...(19): siRNA sense strand
gaccgaaaauggcagauau

SEQ ID NO: 1767936 - RNA, 19 nt, Homo sapiens
  misc_RNA (1)...(19): siRNA sense strand
guuuggaacucgggaaaug

SEQ ID NO: 1767937 - RNA, 19 nt, Homo sapiens
  misc_RNA (1)...(19): siRNA sense strand
ggauuuaggaggacagaca

SEQ ID NO: 1767938 - RNA, 19 nt, Homo sapiens
  misc_RNA (1)...(19): siRNA sense strand
cagaguuaguugccauguu

SEQ ID NO: 1767939 - RNA, 19 nt, Homo sapiens
  misc_RNA (1)...(19): siRNA sense strand
ggccauacuggagauguua

SEQ ID NO: 1767940 - RNA, 19 nt, Homo sapiens
  misc_RNA (1)...(19): siRNA sense strand
ggaacucgggaaaugagaa

SEQ ID NO: 1767941 - RNA, 19 nt, Homo sapiens
  misc_RNA (1)...(19): siRNA sense strand
ugggagaaguuguuacuac

SEQ ID NO: 1767942 - RNA, 19 nt, Homo sapiens
  misc_RNA (1)...(19): siRNA sense strand
gaacaggccaugacuuccu

SEQ ID NO: 1767943 - RNA, 19 nt, Homo sapiens
  misc_RNA (1)...(19): siRNA sense strand
aaauaaacaggacauggaa

SEQ ID NO: 1767944 - RNA, 19 nt, Homo sapiens
  misc_RNA (1)...(19): siRNA sense strand
auaccuaccauuggauuua

SEQ ID NO: 1767945 - RNA, 19 nt, Homo sapiens
  misc_RNA (1)...(19): siRNA sense strand
gagauggcaaauucacuug

SEQ ID NO: 1767946 - RNA, 19 nt, Homo sapiens
  misc_RNA (1)...(19): siRNA sense strand
gcagucauuuauguaguag

SEQ ID NO: 1767947 - RNA, 19 nt, Homo sapiens
  misc_RNA (1)...(19): siRNA sense strand
caaauucacuuggguuacc

SEQ ID NO: 1767948 - RNA, 19 nt, Homo sapiens
  misc_RNA (1)...(19): siRNA sense strand
uggguuaccugccuugaag

SEQ ID NO: 1767949 - RNA, 19 nt, Homo sapiens
  misc_RNA (1)...(19): siRNA sense strand
aaccuuaaauuccaagucu

SEQ ID NO: 1767950 - RNA, 19 nt, Homo sapiens
  misc_RNA (1)...(19): siRNA sense strand
uacuauaccuaccauugga

SEQ ID NO: 1767951 - RNA, 19 nt, Homo sapiens
  misc_RNA (1)...(19): siRNA sense strand
gauuacaagugggagaagu

SEQ ID NO: 1767952 - RNA, 19 nt, Homo sapiens
  misc_RNA (1)...(19): siRNA sense strand
uuaggaggacagacaagua

SEQ ID NO: 1767953 - RNA, 19 nt, Homo sapiens
  misc_RNA (1)...(19): siRNA sense strand
ccaagucugggauuuagga

SEQ ID NO: 1767954 - RNA, 19 nt, Homo sapiens
  misc_RNA (1)...(19): siRNA sense strand
gaugcagucauuuauguag

SEQ ID NO: 1767955 - RNA, 19 nt, Homo sapiens
  misc_RNA (1)...(19): siRNA sense strand
gaagaagagcugagaaaag

SEQ ID NO: 1767956 - RNA, 19 nt, Homo sapiens
  misc_RNA (1)...(19): siRNA sense strand
ggaagaagagcugagaaaa

SEQ ID NO: 1767957 - RNA, 19 nt, Homo sapiens
  misc_RNA (1)...(19): siRNA sense strand
uaggaggacagacaaguau

SEQ ID NO: 1767958 - RNA, 19 nt, Homo sapiens
  misc_RNA (1)...(19): siRNA sense strand
gauuagauggagcaggaaa

SEQ ID NO: 1767959 - RNA, 19 nt, Homo sapiens
  misc_RNA (1)...(19): siRNA sense strand
ggcaauggaaugguuaguu

SEQ ID NO: 1767960 - RNA, 19 nt, Homo sapiens
  misc_RNA (1)...(19): siRNA sense strand
caauggaaugguuaguuga

SEQ ID NO: 1767961 - RNA, 19 nt, Homo sapiens
  misc_RNA (1)...(19): siRNA sense strand
cgagaccgaauuggcauuu

SEQ ID NO: 1767962 - RNA, 19 nt, Homo sapiens
  misc_RNA (1)...(19): siRNA sense strand
ugaggcaauggaaugguua

SEQ ID NO: 1767963 - RNA, 19 nt, Homo sapiens
  misc_RNA (1)...(19): siRNA sense strand
uggaacaggccaugacuuc

SEQ ID NO: 1767964 - RNA, 19 nt, Homo sapiens
  misc_RNA (1)...(19): siRNA sense strand
gagaccgaauuggcauuuc

SEQ ID NO: 1767965 - RNA, 19 nt, Homo sapiens
  misc_RNA (1)...(19): siRNA sense strand
gaggaagaagagcugagaa

SEQ ID NO: 1767966 - RNA, 19 nt, Homo sapiens
  misc_RNA (1)...(19): siRNA sense strand
guagagacggugacguaca

SEQ ID NO: 1767967 - RNA, 19 nt, Homo sapiens
  misc_RNA (1)...(19): siRNA sense strand
aggaagaagagcugagaaa

SEQ ID NO: 1767968 - RNA, 19 nt, Homo sapiens
  misc_RNA (1)...(19): siRNA sense strand
cacagaugcagucauuuau

SEQ ID NO: 1767969 - RNA, 19 nt, Homo sapiens
  misc_RNA (1)...(19): siRNA sense strand
agagauggcaaauucacuu

SEQ ID NO: 1767970 - RNA, 19 nt, Homo sapiens
  misc_RNA (1)...(19): siRNA sense strand
agugguguuugcaaauaaa

SEQ ID NO: 1767971 - RNA, 19 nt, Homo sapiens
  misc_RNA (1)...(19): siRNA sense strand
gagauguuacuauucaaac

SEQ ID NO: 1767972 - RNA, 19 nt, Homo sapiens
  misc_RNA (1)...(19): siRNA sense strand
gauuuaggaggacagacaa

SEQ ID NO: 1767973 - RNA, 19 nt, Homo sapiens
  misc_RNA (1)...(19): siRNA sense strand
acagaugcagucauuuaug

SEQ ID NO: 1767974 - RNA, 19 nt, Homo sapiens
  misc_RNA (1)...(19): siRNA sense strand
uuacuacuauaccuaccau

SEQ ID NO: 1767975 - RNA, 19 nt, Homo sapiens
  misc_RNA (1)...(19): siRNA sense strand
gcaaauucacuuggguuac

SEQ ID NO: 1767976 - RNA, 19 nt, Homo sapiens
  misc_RNA (1)...(19): siRNA sense strand
guuguuacuacuauaccua

SEQ ID NO: 1767977 - RNA, 19 nt, Homo sapiens
  misc_RNA (1)...(19): siRNA sense strand
caagaaagauucaagaaga

SEQ ID NO: 1767978 - RNA, 19 nt, Homo sapiens
  misc_RNA (1)...(19): siRNA sense strand
acacugacaucuccaauua

SEQ ID NO: 1767979 - RNA, 19 nt, Homo sapiens
  misc_RNA (1)...(19): siRNA sense strand
ggaaacucgucucuuaaua

SEQ ID NO: 1767980 - RNA, 19 nt, Homo sapiens
  misc_RNA (1)...(19): siRNA sense strand
guaauucgguuccauugua

SEQ ID NO: 1767981 - RNA, 19 nt, Homo sapiens
  misc_RNA (1)...(19): siRNA sense strand
gcaaacaauuguacuguga

SEQ ID NO: 1767982 - RNA, 19 nt, Homo sapiens
  misc_RNA (1)...(19): siRNA sense strand
acaggaaacucgucucuua

SEQ ID NO: 1767983 - RNA, 19 nt, Homo sapiens
  misc_RNA (1)...(19): siRNA sense strand
gacacagacuucaauauaa

SEQ ID NO: 1767984 - RNA, 19 nt, Homo sapiens
  misc_RNA (1)...(19): siRNA sense strand
gaauggaaaugagacguua

SEQ ID NO: 1767985 - RNA, 19 nt, Homo sapiens
  misc_RNA (1)...(19): siRNA sense strand
gcaguuacauauucuggua

SEQ ID NO: 1767986 - RNA, 19 nt, Homo sapiens
  misc_RNA (1)...(19): siRNA sense strand
guaauaagcugcagucaac

SEQ ID NO: 1767987 - RNA, 19 nt, Homo sapiens
  misc_RNA (1)...(19): siRNA sense strand
gaaaugagacguuaugaag

SEQ ID NO: 1767988 - RNA, 19 nt, Homo sapiens
  misc_RNA (1)...(19): siRNA sense strand
gaaguaaagccuaguauuc

SEQ ID NO: 1767989 - RNA, 19 nt, Homo sapiens
  misc_RNA (1)...(19): siRNA sense strand
ccacagcaguuacauauuc

SEQ ID NO: 1767990 - RNA, 19 nt, Homo sapiens
  misc_RNA (1)...(19): siRNA sense strand
ggaagcaaaugcagaagga

SEQ ID NO: 1767991 - RNA, 19 nt, Homo sapiens
  misc_RNA (1)...(19): siRNA sense strand
gaacaaagagggagaugau

SEQ ID NO: 1767992 - RNA, 19 nt, Homo sapiens
  misc_RNA (1)...(19): siRNA sense strand
gcaacugacuaugguuaua

SEQ ID NO: 1767993 - RNA, 19 nt, Homo sapiens
  misc_RNA (1)...(19): siRNA sense strand
gugaauacgucaucaguug

SEQ ID NO: 1767994 - RNA, 19 nt, Homo sapiens
  misc_RNA (1)...(19): siRNA sense strand
caccacagauucacuauug

SEQ ID NO: 1767995 - RNA, 19 nt, Homo sapiens
  misc_RNA (1)...(19): siRNA sense strand
gcagauuccugaaguaaag

SEQ ID NO: 1767996 - RNA, 19 nt, Homo sapiens
  misc_RNA (1)...(19): siRNA sense strand
aaaagaagcugcauugaaa

SEQ ID NO: 1767997 - RNA, 19 nt, Homo sapiens
  misc_RNA (1)...(19): siRNA sense strand
agagggagaugauaagaaa

SEQ ID NO: 1767998 - RNA, 19 nt, Homo sapiens
  misc_RNA (1)...(19): siRNA sense strand
agacacagacuucaauaua

SEQ ID NO: 1767999 - RNA, 19 nt, Homo sapiens
  misc_RNA (1)...(19): siRNA sense strand
ucagaaagugguuaaguua

SEQ ID NO: 1768000 - RNA, 19 nt, Homo sapiens
  misc_RNA (1)...(19): siRNA sense strand
caaaugagccaacguuuua

SEQ ID NO: 1768001 - RNA, 19 nt, Homo sapiens
  misc_RNA (1)...(19): siRNA sense strand
gaagagguacgaaaugaug

SEQ ID NO: 1768002 - RNA, 19 nt, Homo sapiens
  misc_RNA (1)...(19): siRNA sense strand
gaccacagacuuauaaaga

SEQ ID NO: 1768003 - RNA, 19 nt, Homo sapiens
  misc_RNA (1)...(19): siRNA sense strand
agagaaaccuucaaagaca

SEQ ID NO: 1768004 - RNA, 19 nt, Homo sapiens
  misc_RNA (1)...(19): siRNA sense strand
ucgguuccauuguaaauua

SEQ ID NO: 1768005 - RNA, 19 nt, Homo sapiens
  misc_RNA (1)...(19): siRNA sense strand
ggaggagaauggaggaaga

SEQ ID NO: 1768006 - RNA, 19 nt, Homo sapiens
  misc_RNA (1)...(19): siRNA sense strand
cuucagggauuauucuuaa

SEQ ID NO: 1768007 - RNA, 19 nt, Homo sapiens
  misc_RNA (1)...(19): siRNA sense strand
ugauggaguugauggauuu

SEQ ID NO: 1768008 - RNA, 19 nt, Homo sapiens
  misc_RNA (1)...(19): siRNA sense strand
gaaacucgucucuuaauag

SEQ ID NO: 1768009 - RNA, 19 nt, Homo sapiens
  misc_RNA (1)...(19): siRNA sense strand
gagugcagcuuuaaugauc

SEQ ID NO: 1768010 - RNA, 19 nt, Homo sapiens
  misc_RNA (1)...(19): siRNA sense strand
gcagucaacaggaaauaaa

SEQ ID NO: 1768011 - RNA, 19 nt, Homo sapiens
  misc_RNA (1)...(19): siRNA sense strand
gaagaggagcguuggagaa

SEQ ID NO: 1768012 - RNA, 19 nt, Homo sapiens
  misc_RNA (1)...(19): siRNA sense strand
uagcacaucuaacacuaaa

SEQ ID NO: 1768013 - RNA, 19 nt, Homo sapiens
  misc_RNA (1)...(19): siRNA sense strand
ggaaaugagacguuaugaa

SEQ ID NO: 1768014 - RNA, 19 nt, Homo sapiens
  misc_RNA (1)...(19): siRNA sense strand
uuaaugaucccaaugcuaa

SEQ ID NO: 1768015 - RNA, 19 nt, Homo sapiens
  misc_RNA (1)...(19): siRNA sense strand
gguacgaaaugaugaagga

SEQ ID NO: 1768016 - RNA, 19 nt, Homo sapiens
  misc_RNA (1)...(19): siRNA sense strand
aaaggaaccgaauguguua

SEQ ID NO: 1768017 - RNA, 19 nt, Homo sapiens
  misc_RNA (1)...(19): siRNA sense strand
uaucagcagugccuacaaa

SEQ ID NO: 1768018 - RNA, 19 nt, Homo sapiens
  misc_RNA (1)...(19): siRNA sense strand
ccagcaaacucgacaagug

SEQ ID NO: 1768019 - RNA, 19 nt, Homo sapiens
  misc_RNA (1)...(19): siRNA sense strand
gaacaugagaagaacaaga

SEQ ID NO: 1768020 - RNA, 19 nt, Homo sapiens
  misc_RNA (1)...(19): siRNA sense strand
cagcagugccuacaaauau

SEQ ID NO: 1768021 - RNA, 19 nt, Homo sapiens
  misc_RNA (1)...(19): siRNA sense strand
gggauuauucuuaaaggua

SEQ ID NO: 1768022 - RNA, 19 nt, Homo sapiens
  misc_RNA (1)...(19): siRNA sense strand
ggucugcaguccuguguga

SEQ ID NO: 1768023 - RNA, 19 nt, Homo sapiens
  misc_RNA (1)...(19): siRNA sense strand
uaagaaagagggagguaaa

SEQ ID NO: 1768024 - RNA, 19 nt, Homo sapiens
  misc_RNA (1)...(19): siRNA sense strand
gcagccagcuucgggugua

SEQ ID NO: 1768025 - RNA, 19 nt, Homo sapiens
  misc_RNA (1)...(19): siRNA sense strand
gauguaaccucggguaugg

SEQ ID NO: 1768026 - RNA, 19 nt, Homo sapiens
  misc_RNA (1)...(19): siRNA sense strand
gagaauggaggaagaacaa

SEQ ID NO: 1768027 - RNA, 19 nt, Homo sapiens
  misc_RNA (1)...(19): siRNA sense strand
ccacuacuuucuccaucua

SEQ ID NO: 1768028 - RNA, 19 nt, Homo sapiens
  misc_RNA (1)...(19): siRNA sense strand
gcuauggaguuacuaguag

SEQ ID NO: 1768029 - RNA, 19 nt, Homo sapiens
  misc_RNA (1)...(19): siRNA sense strand
aagcugggcuauggaguua

SEQ ID NO: 1768030 - RNA, 19 nt, Homo sapiens
  misc_RNA (1)...(19): siRNA sense strand
uauaagcccugagaaguau

SEQ ID NO: 1768031 - RNA, 19 nt, Homo sapiens
  misc_RNA (1)...(19): siRNA sense strand
ucagagaaaccuucaaaga

SEQ ID NO: 1768032 - RNA, 19 nt, Homo sapiens
  misc_RNA (1)...(19): siRNA sense strand
acaaagagggagaugauaa

SEQ ID NO: 1768033 - RNA, 19 nt, Homo sapiens
  misc_RNA (1)...(19): siRNA sense strand
cugcaucucuugcugcuuu

SEQ ID NO: 1768034 - RNA, 19 nt, Homo sapiens
  misc_RNA (1)...(19): siRNA sense strand
gcacaucuaacacuaaagu

SEQ ID NO: 1768035 - RNA, 19 nt, Homo sapiens
  misc_RNA (1)...(19): siRNA sense strand
uagaaggacagaaacauaa

SEQ ID NO: 1768036 - RNA, 19 nt, Homo sapiens
  misc_RNA (1)...(19): siRNA sense strand
ggacagggaccaccuuuac

SEQ ID NO: 1768037 - RNA, 19 nt, Homo sapiens
  misc_RNA (1)...(19): siRNA sense strand
gcucagagaaaccuucaaa

SEQ ID NO: 1768038 - RNA, 19 nt, Homo sapiens
  misc_RNA (1)...(19): siRNA sense strand
caaaacaugccaccauuua

SEQ ID NO: 1768039 - RNA, 19 nt, Homo sapiens
  misc_RNA (1)...(19): siRNA sense strand
gaggagcguuggagaaugg

SEQ ID NO: 1768040 - RNA, 19 nt, Homo sapiens
  misc_RNA (1)...(19): siRNA sense strand
uaauucgguuccauuguaa

SEQ ID NO: 1768041 - RNA, 19 nt, Homo sapiens
  misc_RNA (1)...(19): siRNA sense strand
gaaauaaagcagaagacau

SEQ ID NO: 1768042 - RNA, 19 nt, Homo sapiens
  misc_RNA (1)...(19): siRNA sense strand
guugcaacgucuucaauga

SEQ ID NO: 1768043 - RNA, 19 nt, Homo sapiens
  misc_RNA (1)...(19): siRNA sense strand
gacauguacuggaggagaa

SEQ ID NO: 1768044 - RNA, 19 nt, Homo sapiens
  misc_RNA (1)...(19): siRNA sense strand
uggaagagguacgaaauga

SEQ ID NO: 1768045 - RNA, 19 nt, Homo sapiens
  misc_RNA (1)...(19): siRNA sense strand
ugaagggucuuacgacuac

SEQ ID NO: 1768046 - RNA, 19 nt, Homo sapiens
  misc_RNA (1)...(19): siRNA sense strand
aagaagagauagugaugga

SEQ ID NO: 1768047 - RNA, 19 nt, Homo sapiens
  misc_RNA (1)...(19): siRNA sense strand
gaacaugagggaaggagau

SEQ ID NO: 1768048 - RNA, 19 nt, Homo sapiens
  misc_RNA (1)...(19): siRNA sense strand
acugacaucuccaauuauu

SEQ ID NO: 1768049 - RNA, 19 nt, Homo sapiens
  misc_RNA (1)...(19): siRNA sense strand
gaaagauucaagaagagaa

SEQ ID NO: 1768050 - RNA, 19 nt, Homo sapiens
  misc_RNA (1)...(19): siRNA sense strand
cauauucugguacgucuua

SEQ ID NO: 1768051 - RNA, 19 nt, Homo sapiens
  misc_RNA (1)...(19): siRNA sense strand
ggaguuacuaguagagaaa

SEQ ID NO: 1768052 - RNA, 19 nt, Homo sapiens
  misc_RNA (1)...(19): siRNA sense strand
gagaaaccuucaaagacau

SEQ ID NO: 1768053 - RNA, 19 nt, Homo sapiens
  misc_RNA (1)...(19): siRNA sense strand
gcaagaaagauucaagaag

SEQ ID NO: 1768054 - RNA, 19 nt, Homo sapiens
  misc_RNA (1)...(19): siRNA sense strand
agaaagugguuaaguuaca

SEQ ID NO: 1768055 - RNA, 19 nt, Homo sapiens
  misc_RNA (1)...(19): siRNA sense strand
caacaggaaacgaagaaga

SEQ ID NO: 1768056 - RNA, 19 nt, Homo sapiens
  misc_RNA (1)...(19): siRNA sense strand
gagaagaacaagaacaaag

SEQ ID NO: 1768057 - RNA, 19 nt, Homo sapiens
  misc_RNA (1)...(19): siRNA sense strand
gagcaagaaagauucaaga

SEQ ID NO: 1768058 - RNA, 19 nt, Homo sapiens
  misc_RNA (1)...(19): siRNA sense strand
cagcaacugacuaugguua

SEQ ID NO: 1768059 - RNA, 19 nt, Homo sapiens
  misc_RNA (1)...(19): siRNA sense strand
uuacugaacgugcuuuaaa

SEQ ID NO: 1768060 - RNA, 19 nt, Homo sapiens
  misc_RNA (1)...(19): siRNA sense strand
gaugaccguuauguaauga

SEQ ID NO: 1768061 - RNA, 19 nt, Homo sapiens
  misc_RNA (1)...(19): siRNA sense strand
cauaugcccuguaguuucu

SEQ ID NO: 1768062 - RNA, 19 nt, Homo sapiens
  misc_RNA (1)...(19): siRNA sense strand
guacgucuuauucagguua

SEQ ID NO: 1768063 - RNA, 19 nt, Homo sapiens
  misc_RNA (1)...(19): siRNA sense strand
cuaccaggauucauacuca

SEQ ID NO: 1768064 - RNA, 19 nt, Homo sapiens
  misc_RNA (1)...(19): siRNA sense strand
ccagauacacaaaguucua

SEQ ID NO: 1768065 - RNA, 19 nt, Homo sapiens
  misc_RNA (1)...(19): siRNA sense strand
agaaaugucaaccuuguuu

SEQ ID NO: 1768066 - RNA, 19 nt, Homo sapiens
  misc_RNA (1)...(19): siRNA sense strand
ggaagaacaacaucauugg

SEQ ID NO: 1768067 - RNA, 19 nt, Homo sapiens
  misc_RNA (1)...(19): siRNA sense strand
ggaaauaaagcagaagaca

SEQ ID NO: 1768068 - RNA, 19 nt, Homo sapiens
  misc_RNA (1)...(19): siRNA sense strand
aauagcacaucuaacacua

SEQ ID NO: 1768069 - RNA, 19 nt, Homo sapiens
  misc_RNA (1)...(19): siRNA sense strand
gcauugaaagccucacaaa

SEQ ID NO: 1768070 - RNA, 19 nt, Homo sapiens
  misc_RNA (1)...(19): siRNA sense strand
gugcuggaccacagacuua

SEQ ID NO: 1768071 - RNA, 19 nt, Homo sapiens
  misc_RNA (1)...(19): siRNA sense strand
gugauggaguugauggauu

SEQ ID NO: 1768072 - RNA, 19 nt, Homo sapiens
  misc_RNA (1)...(19): siRNA sense strand
agauagaaaugucaaccuu

SEQ ID NO: 1768073 - RNA, 19 nt, Homo sapiens
  misc_RNA (1)...(19): siRNA sense strand
agagggagguaaagacaga

SEQ ID NO: 1768074 - RNA, 19 nt, Homo sapiens
  misc_RNA (1)...(19): siRNA sense strand
guagaaguaaagccuagua

SEQ ID NO: 1768075 - RNA, 19 nt, Homo sapiens
  misc_RNA (1)...(19): siRNA sense strand
gaggaagaacaacaucauu

SEQ ID NO: 1768076 - RNA, 19 nt, Homo sapiens
  misc_RNA (1)...(19): siRNA sense strand
cugcaguccugugugauua

SEQ ID NO: 1768077 - RNA, 19 nt, Homo sapiens
  misc_RNA (1)...(19): siRNA sense strand
gaacggaaguggagaguaa

SEQ ID NO: 1768078 - RNA, 19 nt, Homo sapiens
  misc_RNA (1)...(19): siRNA sense strand
ucagaaagcuggaagauaa

SEQ ID NO: 1768079 - RNA, 19 nt, Homo sapiens
  misc_RNA (1)...(19): siRNA sense strand
gaaggcugcuacacuaaua

SEQ ID NO: 1768080 - RNA, 19 nt, Homo sapiens
  misc_RNA (1)...(19): siRNA sense strand
caauuugcaugacuacuua

SEQ ID NO: 1768081 - RNA, 19 nt, Homo sapiens
  misc_RNA (1)...(19): siRNA sense strand
gaaagaagcaaauggagaa

SEQ ID NO: 1768082 - RNA, 19 nt, Homo sapiens
  misc_RNA (1)...(19): siRNA sense strand
ggaaacagaacuugucgua

SEQ ID NO: 1768083 - RNA, 19 nt, Homo sapiens
  misc_RNA (1)...(19): siRNA sense strand
aaacagaacuugucguagu

SEQ ID NO: 1768084 - RNA, 19 nt, Homo sapiens
  misc_RNA (1)...(19): siRNA sense strand
gcuagaaguuucaugauuc

SEQ ID NO: 1768085 - RNA, 19 nt, Homo sapiens
  misc_RNA (1)...(19): siRNA sense strand
gaguggagcuggagagaga

SEQ ID NO: 1768086 - RNA, 19 nt, Homo sapiens
  misc_RNA (1)...(19): siRNA sense strand
gcacaaagccacagagaag

SEQ ID NO: 1768087 - RNA, 19 nt, Homo sapiens
  misc_RNA (1)...(19): siRNA sense strand
ggagagagggcuagaaguu

SEQ ID NO: 1768088 - RNA, 19 nt, Homo sapiens
  misc_RNA (1)...(19): siRNA sense strand
acagauugcuuccuuuauu

SEQ ID NO: 1768089 - RNA, 19 nt, Homo sapiens
  misc_RNA (1)...(19): siRNA sense strand
cagauugcuuccuuuauuu

SEQ ID NO: 1768090 - RNA, 19 nt, Homo sapiens
  misc_RNA (1)...(19): siRNA sense strand
cagaagacauucaagacuu

SEQ ID NO: 1768091 - RNA, 19 nt, Homo sapiens
  misc_RNA (1)...(19): siRNA sense strand
caaaauccauuaccaagaa

SEQ ID NO: 1768092 - RNA, 19 nt, Homo sapiens
  misc_RNA (1)...(19): siRNA sense strand
aaggaaggcugcuacacua

SEQ ID NO: 1768093 - RNA, 19 nt, Homo sapiens
  misc_RNA (1)...(19): siRNA sense strand
gaagcaaacacaagcaaug

SEQ ID NO: 1768094 - RNA, 19 nt, Homo sapiens
  misc_RNA (1)...(19): siRNA sense strand
agaagcaaauggagaagaa

SEQ ID NO: 1768095 - RNA, 19 nt, Homo sapiens
  misc_RNA (1)...(19): siRNA sense strand
ggcuagaaguuucaugauu

SEQ ID NO: 1768096 - RNA, 19 nt, Homo sapiens
  misc_RNA (1)...(19): siRNA sense strand
uaagagaggaguaugaaga

SEQ ID NO: 1768097 - RNA, 19 nt, Homo sapiens
  misc_RNA (1)...(19): siRNA sense strand
acacagaggugcccaaugc

SEQ ID NO: 1768098 - RNA, 19 nt, Homo sapiens
  misc_RNA (1)...(19): siRNA sense strand
gaggagauccagaagcaaa

SEQ ID NO: 1768099 - RNA, 19 nt, Homo sapiens
  misc_RNA (1)...(19): siRNA sense strand
gaaggaaacagaacuuguc

SEQ ID NO: 1768100 - RNA, 19 nt, Homo sapiens
  misc_RNA (1)...(19): siRNA sense strand
gcaaauggagaagaaacua

SEQ ID NO: 1768101 - RNA, 19 nt, Homo sapiens
  misc_RNA (1)...(19): siRNA sense strand
gaauuguguuaguggguaa

SEQ ID NO: 1768102 - RNA, 19 nt, Homo sapiens
  misc_RNA (1)...(19): siRNA sense strand
gauaagagaggaguaugaa

SEQ ID NO: 1768103 - RNA, 19 nt, Homo sapiens
  misc_RNA (1)...(19): siRNA sense strand
ggagauuauucgcugcauu

SEQ ID NO: 1768104 - RNA, 19 nt, Homo sapiens
  misc_RNA (1)...(19): siRNA sense strand
agaagaaacuagcagaaca

SEQ ID NO: 1768105 - RNA, 19 nt, Homo sapiens
  misc_RNA (1)...(19): siRNA sense strand
gaugggauacuugaauuaa

SEQ ID NO: 1768106 - RNA, 19 nt, Homo sapiens
  misc_RNA (1)...(19): siRNA sense strand
ggaugggauacuugaauua

SEQ ID NO: 1768107 - RNA, 19 nt, Homo sapiens
  misc_RNA (1)...(19): siRNA sense strand
ggcaagagcccagaaauuc

SEQ ID NO: 1768108 - RNA, 19 nt, Homo sapiens
  misc_RNA (1)...(19): siRNA sense strand
gagaagauccugaaaaugu

SEQ ID NO: 1768109 - RNA, 19 nt, Homo sapiens
  misc_RNA (1)...(19): siRNA sense strand
gaacaggaggcucacuaug

SEQ ID NO: 1768110 - RNA, 19 nt, Homo sapiens
  misc_RNA (1)...(19): siRNA sense strand
ggauaagagaggaguauga

SEQ ID NO: 1768111 - RNA, 19 nt, Homo sapiens
  misc_RNA (1)...(19): siRNA sense strand
cuaauaggauguaccaaag

SEQ ID NO: 1768112 - RNA, 19 nt, Homo sapiens
  misc_RNA (1)...(19): siRNA sense strand
gagagagggcuagaaguuu

SEQ ID NO: 1768113 - RNA, 19 nt, Homo sapiens
  misc_RNA (1)...(19): siRNA sense strand
ccacagagaagauccugaa

SEQ ID NO: 1768114 - RNA, 19 nt, Homo sapiens
  misc_RNA (1)...(19): siRNA sense strand
gcaaacacaagcaaugcaa

SEQ ID NO: 1768115 - RNA, 19 nt, Homo sapiens
  misc_RNA (1)...(19): siRNA sense strand
caugacagcguuacagauu

SEQ ID NO: 1768116 - RNA, 19 nt, Homo sapiens
  misc_RNA (1)...(19): siRNA sense strand
gaaaagagaaagaagcaaa

SEQ ID NO: 1768117 - RNA, 19 nt, Homo sapiens
  misc_RNA (1)...(19): siRNA sense strand
agaggaguaugaagagaaa

SEQ ID NO: 1768118 - RNA, 19 nt, Homo sapiens
  misc_RNA (1)...(19): siRNA sense strand
gaaggcaagagcccagaaa

SEQ ID NO: 1768119 - RNA, 19 nt, Homo sapiens
  misc_RNA (1)...(19): siRNA sense strand
guaaggaugggauacuuga

SEQ ID NO: 1768120 - RNA, 19 nt, Homo sapiens
  misc_RNA (1)...(19): siRNA sense strand
ggagaagaaacuagcagaa

SEQ ID NO: 1768121 - RNA, 19 nt, Homo sapiens
  misc_RNA (1)...(19): siRNA sense strand
gagaggaguaugaagagaa

SEQ ID NO: 1768122 - RNA, 19 nt, Homo sapiens
  misc_RNA (1)...(19): siRNA sense strand
ccggaaagaugacuuaggu

SEQ ID NO: 1768123 - RNA, 19 nt, Homo sapiens
  misc_RNA (1)...(19): siRNA sense strand
gagauuauucgcugcauuc

SEQ ID NO: 1768124 - RNA, 19 nt, Homo sapiens
  misc_RNA (1)...(19): siRNA sense strand
uuacagauugcuuccuuua

SEQ ID NO: 1768125 - RNA, 19 nt, Homo sapiens
  misc_RNA (1)...(19): siRNA sense strand
aaagaugacuuaggugaca

SEQ ID NO: 1768126 - RNA, 19 nt, Homo sapiens
  misc_RNA (1)...(19): siRNA sense strand
agagagggcuagaaguuuc

SEQ ID NO: 1768127 - RNA, 19 nt, Homo sapiens
  misc_RNA (1)...(19): siRNA sense strand
ggaaggaaacagaacuugu

SEQ ID NO: 1768128 - RNA, 19 nt, Homo sapiens
  misc_RNA (1)...(19): siRNA sense strand
agaaagcgcggauaagaga

SEQ ID NO: 1768129 - RNA, 19 nt, Homo sapiens
  misc_RNA (1)...(19): siRNA sense strand
acaccaauuugcaugacua

SEQ ID NO: 1768130 - RNA, 19 nt, Homo sapiens
  misc_RNA (1)...(19): siRNA sense strand
gaggcucacuaugcuguaa

SEQ ID NO: 1768131 - RNA, 19 nt, Homo sapiens
  misc_RNA (1)...(19): siRNA sense strand
gcucauggaaggaaacaga

SEQ ID NO: 1768132 - RNA, 19 nt, Homo sapiens
  misc_RNA (1)...(19): siRNA sense strand
ggagaguaaggaugggaua

SEQ ID NO: 1768133 - RNA, 19 nt, Homo sapiens
  misc_RNA (1)...(19): siRNA sense strand
cagagaagauccugaaaau

SEQ ID NO: 1768134 - RNA, 19 nt, Homo sapiens
  misc_RNA (1)...(19): siRNA sense strand
gaaacguccaaggagauua

SEQ ID NO: 1768135 - RNA, 19 nt, Homo sapiens
  misc_RNA (1)...(19): siRNA sense strand
ccaauuugcaugacuacuu

SEQ ID NO: 1768136 - RNA, 19 nt, Homo sapiens
  misc_RNA (1)...(19): siRNA sense strand
ggaaggcugcuacacuaau

SEQ ID NO: 1768137 - RNA, 19 nt, Homo sapiens
  misc_RNA (1)...(19): siRNA sense strand
uaagggaagcuccagaaga

SEQ ID NO: 1768138 - RNA, 19 nt, Homo sapiens
  misc_RNA (1)...(19): siRNA sense strand
auuauucgcugcauucuuc

SEQ ID NO: 1768139 - RNA, 19 nt, Homo sapiens
  misc_RNA (1)...(19): siRNA sense strand
ugggauacuugaauuaauc

SEQ ID NO: 1768140 - RNA, 19 nt, Homo sapiens
  misc_RNA (1)...(19): siRNA sense strand
cagcauccuuggccggaaa

SEQ ID NO: 1768141 - RNA, 19 nt, Homo sapiens
  misc_RNA (1)...(19): siRNA sense strand
agagagaaagcgcggauaa

SEQ ID NO: 1768142 - RNA, 19 nt, Homo sapiens
  misc_RNA (1)...(19): siRNA sense strand
gagcacaaagccacagaga

SEQ ID NO: 1768143 - RNA, 19 nt, Homo sapiens
  misc_RNA (1)...(19): siRNA sense strand
agagaaagcgcggauaaga

SEQ ID NO: 1768144 - RNA, 19 nt, Homo sapiens
  misc_RNA (1)...(19): siRNA sense strand
ggaagcuccagaagacauu

SEQ ID NO: 1768145 - RNA, 19 nt, Homo sapiens
  misc_RNA (1)...(19): siRNA sense strand
gaagaaacuagcagaacag

SEQ ID NO: 1768146 - RNA, 19 nt, Homo sapiens
  misc_RNA (1)...(19): siRNA sense strand
aaacacaagcaaugcaaga

SEQ ID NO: 1768147 - RNA, 19 nt, Homo sapiens
  misc_RNA (1)...(19): siRNA sense strand
gagaaagcgcggauaagag

SEQ ID NO: 1768148 - RNA, 19 nt, Homo sapiens
  misc_RNA (1)...(19): siRNA sense strand
gauaaaguggagcaggaaa

SEQ ID NO: 1768149 - RNA, 19 nt, Homo sapiens
  misc_RNA (1)...(19): siRNA sense strand
guuacagauugcuuccuuu

SEQ ID NO: 1768150 - RNA, 19 nt, Homo sapiens
  misc_RNA (1)...(19): siRNA sense strand
aggaugggauacuugaauu

SEQ ID NO: 1768151 - RNA, 19 nt, Homo sapiens
  misc_RNA (1)...(19): siRNA sense strand
cagaacaggaggcucacua

SEQ ID NO: 1768152 - RNA, 19 nt, Homo sapiens
  misc_RNA (1)...(19): siRNA sense strand
aagggaagcuccagaagac

SEQ ID NO: 1768153 - RNA, 19 nt, Homo sapiens
  misc_RNA (1)...(19): siRNA sense strand
ugaccgcuacugugcguua

SEQ ID NO: 1768154 - RNA, 19 nt, Homo sapiens
  misc_RNA (1)...(19): siRNA sense strand
caaggaaggcugcuacacu

SEQ ID NO: 1768155 - RNA, 19 nt, Homo sapiens
  misc_RNA (1)...(19): siRNA sense strand
gagaaacgcagcagcucau

SEQ ID NO: 1768156 - RNA, 19 nt, Homo sapiens
  misc_RNA (1)...(19): siRNA sense strand
gaagcaaauggagaagaaa

SEQ ID NO: 1768157 - RNA, 19 nt, Homo sapiens
  misc_RNA (1)...(19): siRNA sense strand
agagaaagaagcaaaugga

SEQ ID NO: 1768158 - RNA, 19 nt, Homo sapiens
  misc_RNA (1)...(19): siRNA sense strand
aaacgcagcagcucaugga

SEQ ID NO: 1768159 - RNA, 19 nt, Homo sapiens
  misc_RNA (1)...(19): siRNA sense strand
acuaauaggauguaccaaa

SEQ ID NO: 1768160 - RNA, 19 nt, Homo sapiens
  misc_RNA (1)...(19): siRNA sense strand
aggaggagauccagaagca

SEQ ID NO: 1768161 - RNA, 19 nt, Homo sapiens
  misc_RNA (1)...(19): siRNA sense strand
cguuacagauugcuuccuu

SEQ ID NO: 1768162 - RNA, 19 nt, Homo sapiens
  misc_RNA (1)...(19): siRNA sense strand
ggaaguggagaguaaggau

SEQ ID NO: 1768163 - RNA, 19 nt, Homo sapiens
  misc_RNA (1)...(19): siRNA sense strand
gagaagaaacuagcagaac

SEQ ID NO: 1768164 - RNA, 19 nt, Homo sapiens
  misc_RNA (1)...(19): siRNA sense strand
ucuguucgcggaagauuaa

SEQ ID NO: 1768165 - RNA, 19 nt, Homo sapiens
  misc_RNA (1)...(19): siRNA sense strand
aaacguccaaggagauuau

SEQ ID NO: 1768166 - RNA, 19 nt, Homo sapiens
  misc_RNA (1)...(19): siRNA sense strand
gaccgcuacugugcguuaa

SEQ ID NO: 1768167 - RNA, 19 nt, Homo sapiens
  misc_RNA (1)...(19): siRNA sense strand
ugacagcguuacagauugc

SEQ ID NO: 1768168 - RNA, 19 nt, Homo sapiens
  misc_RNA (1)...(19): siRNA sense strand
gaaagcuggaagauaaagu

SEQ ID NO: 1768169 - RNA, 19 nt, Homo sapiens
  misc_RNA (1)...(19): siRNA sense strand
cagaaagcuggaagauaaa

SEQ ID NO: 1768170 - RNA, 19 nt, Homo sapiens
  misc_RNA (1)...(19): siRNA sense strand
ggaaggcaagagcccagaa

SEQ ID NO: 1768171 - RNA, 19 nt, Homo sapiens
  misc_RNA (1)...(19): siRNA sense strand
caaauggagaagaaacuag

SEQ ID NO: 1768172 - RNA, 19 nt, Homo sapiens
  misc_RNA (1)...(19): siRNA sense strand
ggagcuggagagagagaaa

SEQ ID NO: 1768173 - RNA, 19 nt, Homo sapiens
  misc_RNA (1)...(19): siRNA sense strand
cacaagcaaugcaagaacu

SEQ ID NO: 1768174 - RNA, 19 nt, Homo sapiens
  misc_RNA (1)...(19): siRNA sense strand
gcuacugugcguuaaacaa

SEQ ID NO: 1768175 - RNA, 19 nt, Homo sapiens
  misc_RNA (1)...(19): siRNA sense strand
gcacaccaggggccaguua

SEQ ID NO: 1768176 - RNA, 19 nt, Homo sapiens
  misc_RNA (1)...(19): siRNA sense strand
gagagagaaagcgcggaua

SEQ ID NO: 1768177 - RNA, 19 nt, Homo sapiens
  misc_RNA (1)...(19): siRNA sense strand
ucacugaccugagcgagaa

SEQ ID NO: 1768178 - RNA, 19 nt, Homo sapiens
  misc_RNA (1)...(19): siRNA sense strand
gcaaggaccaaaugucaau

SEQ ID NO: 1768179 - RNA, 19 nt, Homo sapiens
  misc_RNA (1)...(19): siRNA sense strand
gaggaacaaccaacuaguu

SEQ ID NO: 1768180 - RNA, 19 nt, Homo sapiens
  misc_RNA (1)...(19): siRNA sense strand
gacaagcgcuucgccuuca

SEQ ID NO: 1768181 - RNA, 19 nt, Homo sapiens
  misc_RNA (1)...(19): siRNA sense strand
gaugcaagccuucagaauc

SEQ ID NO: 1768182 - RNA, 19 nt, Homo sapiens
  misc_RNA (1)...(19): siRNA sense strand
gaacagaaagcaggacaag

SEQ ID NO: 1768183 - RNA, 19 nt, Homo sapiens
  misc_RNA (1)...(19): siRNA sense strand
gaccugagcgagaacagaa

SEQ ID NO: 1768184 - RNA, 19 nt, Homo sapiens
  misc_RNA (1)...(19): siRNA sense strand
caagaugcaagccuucaga

SEQ ID NO: 1768185 - RNA, 19 nt, Homo sapiens
  misc_RNA (1)...(19): siRNA sense strand
uagaugugguacccauuga

SEQ ID NO: 1768186 - RNA, 19 nt, Homo sapiens
  misc_RNA (1)...(19): siRNA sense strand
gggagaaaauccagcaaga

SEQ ID NO: 1768187 - RNA, 19 nt, Homo sapiens
  misc_RNA (1)...(19): siRNA sense strand
ggaggcaguuaacaucacu

SEQ ID NO: 1768188 - RNA, 19 nt, Homo sapiens
  misc_RNA (1)...(19): siRNA sense strand
gagaaaauccagcaagaug

SEQ ID NO: 1768189 - RNA, 19 nt, Homo sapiens
  misc_RNA (1)...(19): siRNA sense strand
ugucaagucuggugaugag

SEQ ID NO: 1768190 - RNA, 19 nt, Homo sapiens
  misc_RNA (1)...(19): siRNA sense strand
augcaagccuucagaaucu

SEQ ID NO: 1768191 - RNA, 19 nt, Homo sapiens
  misc_RNA (1)...(19): siRNA sense strand
agaugugccuguccugugu

SEQ ID NO: 1768192 - RNA, 19 nt, Homo sapiens
  misc_RNA (1)...(19): siRNA sense strand
gcuggaggcaguuaacauc

SEQ ID NO: 1768193 - RNA, 19 nt, Homo sapiens
  misc_RNA (1)...(19): siRNA sense strand
ggucaccaaauucuacuuc

SEQ ID NO: 1768194 - RNA, 19 nt, Homo sapiens
  misc_RNA (1)...(19): siRNA sense strand
gauagaugugguacccauu

SEQ ID NO: 1768195 - RNA, 19 nt, Homo sapiens
  misc_RNA (1)...(19): siRNA sense strand
ucaccaaauucuacuucca

SEQ ID NO: 1768196 - RNA, 19 nt, Homo sapiens
  misc_RNA (1)...(19): siRNA sense strand
gaaucugggauguuaacca

SEQ ID NO: 1768197 - RNA, 19 nt, Homo sapiens
  misc_RNA (1)...(19): siRNA sense strand
uugcaaggaccaaauguca

SEQ ID NO: 1768198 - RNA, 19 nt, Homo sapiens
  misc_RNA (1)...(19): siRNA sense strand
ccuucuaucugaggaacaa

SEQ ID NO: 1768199 - RNA, 19 nt, Homo sapiens
  misc_RNA (1)...(19): siRNA sense strand
ucacugaccugagcgagaa

SEQ ID NO: 1768200 - RNA, 19 nt, Homo sapiens
  misc_RNA (1)...(19): siRNA sense strand
gcaaggaccaaaugucaau

SEQ ID NO: 1768201 - RNA, 19 nt, Homo sapiens
  misc_RNA (1)...(19): siRNA sense strand
gaggaacaaccaacuaguu

SEQ ID NO: 1768202 - RNA, 19 nt, Homo sapiens
  misc_RNA (1)...(19): siRNA sense strand
gacaagcgcuucgccuuca

SEQ ID NO: 1768203 - RNA, 19 nt, Homo sapiens
  misc_RNA (1)...(19): siRNA sense strand
gaugcaagccuucagaauc

SEQ ID NO: 1768204 - RNA, 19 nt, Homo sapiens
  misc_RNA (1)...(19): siRNA sense strand
gaacagaaagcaggacaag

SEQ ID NO: 1768205 - RNA, 19 nt, Homo sapiens
  misc_RNA (1)...(19): siRNA sense strand
gaccugagcgagaacagaa

SEQ ID NO: 1768206 - RNA, 19 nt, Homo sapiens
  misc_RNA (1)...(19): siRNA sense strand
caagaugcaagccuucaga

SEQ ID NO: 1768207 - RNA, 19 nt, Homo sapiens
  misc_RNA (1)...(19): siRNA sense strand
uagaugugguacccauuga

SEQ ID NO: 1768208 - RNA, 19 nt, Homo sapiens
  misc_RNA (1)...(19): siRNA sense strand
gggagaaaauccagcaaga

SEQ ID NO: 1768209 - RNA, 19 nt, Homo sapiens
  misc_RNA (1)...(19): siRNA sense strand
ggaggcaguuaacaucacu

SEQ ID NO: 1768210 - RNA, 19 nt, Homo sapiens
  misc_RNA (1)...(19): siRNA sense strand
gagaaaauccagcaagaug

SEQ ID NO: 1768211 - RNA, 19 nt, Homo sapiens
  misc_RNA (1)...(19): siRNA sense strand
ugucaagucuggugaugag

SEQ ID NO: 1768212 - RNA, 19 nt, Homo sapiens
  misc_RNA (1)...(19): siRNA sense strand
augcaagccuucagaaucu

SEQ ID NO: 1768213 - RNA, 19 nt, Homo sapiens
  misc_RNA (1)...(19): siRNA sense strand
agaugugccuguccugugu

SEQ ID NO: 1768214 - RNA, 19 nt, Homo sapiens
  misc_RNA (1)...(19): siRNA sense strand
gcuggaggcaguuaacauc

SEQ ID NO: 1768215 - RNA, 19 nt, Homo sapiens
  misc_RNA (1)...(19): siRNA sense strand
ggucaccaaauucuacuuc

SEQ ID NO: 1768216 - RNA, 19 nt, Homo sapiens
  misc_RNA (1)...(19): siRNA sense strand
gauagaugugguacccauu

SEQ ID NO: 1768217 - RNA, 19 nt, Homo sapiens
  misc_RNA (1)...(19): siRNA sense strand
ucaccaaauucuacuucca

SEQ ID NO: 1768218 - RNA, 19 nt, Homo sapiens
  misc_RNA (1)...(19): siRNA sense strand
gaaucugggauguuaacca

SEQ ID NO: 1768219 - RNA, 19 nt, Homo sapiens
  misc_RNA (1)...(19): siRNA sense strand
uugcaaggaccaaauguca

SEQ ID NO: 1768220 - RNA, 19 nt, Homo sapiens
  misc_RNA (1)...(19): siRNA sense strand
ccuucuaucugaggaacaa

SEQ ID NO: 1768221 - RNA, 19 nt, Homo sapiens
  misc_RNA (1)...(19): siRNA sense strand
ucacugaccugagcgagaa

SEQ ID NO: 1768222 - RNA, 19 nt, Homo sapiens
  misc_RNA (1)...(19): siRNA sense strand
gcaaggaccaaaugucaau

SEQ ID NO: 1768223 - RNA, 19 nt, Homo sapiens
  misc_RNA (1)...(19): siRNA sense strand
gaggaacaaccaacuaguu

SEQ ID NO: 1768224 - RNA, 19 nt, Homo sapiens
  misc_RNA (1)...(19): siRNA sense strand
gacaagcgcuucgccuuca

SEQ ID NO: 1768225 - RNA, 19 nt, Homo sapiens
  misc_RNA (1)...(19): siRNA sense strand
gaugcaagccuucagaauc

SEQ ID NO: 1768226 - RNA, 19 nt, Homo sapiens
  misc_RNA (1)...(19): siRNA sense strand
gaacagaaagcaggacaag

SEQ ID NO: 1768227 - RNA, 19 nt, Homo sapiens
  misc_RNA (1)...(19): siRNA sense strand
gaccugagcgagaacagaa

SEQ ID NO: 1768228 - RNA, 19 nt, Homo sapiens
  misc_RNA (1)...(19): siRNA sense strand
caagaugcaagccuucaga

SEQ ID NO: 1768229 - RNA, 19 nt, Homo sapiens
  misc_RNA (1)...(19): siRNA sense strand
uagaugugguacccauuga

SEQ ID NO: 1768230 - RNA, 19 nt, Homo sapiens
  misc_RNA (1)...(19): siRNA sense strand
gggagaaaauccagcaaga

SEQ ID NO: 1768231 - RNA, 19 nt, Homo sapiens
  misc_RNA (1)...(19): siRNA sense strand
ggaggcaguuaacaucacu

SEQ ID NO: 1768232 - RNA, 19 nt, Homo sapiens
  misc_RNA (1)...(19): siRNA sense strand
gagaaaauccagcaagaug

SEQ ID NO: 1768233 - RNA, 19 nt, Homo sapiens
  misc_RNA (1)...(19): siRNA sense strand
ugucaagucuggugaugag

SEQ ID NO: 1768234 - RNA, 19 nt, Homo sapiens
  misc_RNA (1)...(19): siRNA sense strand
augcaagccuucagaaucu

SEQ ID NO: 1768235 - RNA, 19 nt, Homo sapiens
  misc_RNA (1)...(19): siRNA sense strand
agaugugccuguccugugu

SEQ ID NO: 1768236 - RNA, 19 nt, Homo sapiens
  misc_RNA (1)...(19): siRNA sense strand
gcuggaggcaguuaacauc

SEQ ID NO: 1768237 - RNA, 19 nt, Homo sapiens
  misc_RNA (1)...(19): siRNA sense strand
ggucaccaaauucuacuuc

SEQ ID NO: 1768238 - RNA, 19 nt, Homo sapiens
  misc_RNA (1)...(19): siRNA sense strand
gauagaugugguacccauu

SEQ ID NO: 1768239 - RNA, 19 nt, Homo sapiens
  misc_RNA (1)...(19): siRNA sense strand
ucaccaaauucuacuucca

SEQ ID NO: 1768240 - RNA, 19 nt, Homo sapiens
  misc_RNA (1)...(19): siRNA sense strand
gaaucugggauguuaacca

SEQ ID NO: 1768241 - RNA, 19 nt, Homo sapiens
  misc_RNA (1)...(19): siRNA sense strand
uugcaaggaccaaauguca

SEQ ID NO: 1768242 - RNA, 19 nt, Homo sapiens
  misc_RNA (1)...(19): siRNA sense strand
ccuucuaucugaggaacaa

SEQ ID NO: 1768243 - RNA, 19 nt, Homo sapiens
  misc_RNA (1)...(19): siRNA sense strand
ucacugaccugagcgagaa

SEQ ID NO: 1768244 - RNA, 19 nt, Homo sapiens
  misc_RNA (1)...(19): siRNA sense strand
gcaaggaccaaaugucaau

SEQ ID NO: 1768245 - RNA, 19 nt, Homo sapiens
  misc_RNA (1)...(19): siRNA sense strand
gaggaacaaccaacuaguu

SEQ ID NO: 1768246 - RNA, 19 nt, Homo sapiens
  misc_RNA (1)...(19): siRNA sense strand
gacaagcgcuucgccuuca

SEQ ID NO: 1768247 - RNA, 19 nt, Homo sapiens
  misc_RNA (1)...(19): siRNA sense strand
gaacagaaagcaggacaag

SEQ ID NO: 1768248 - RNA, 19 nt, Homo sapiens
  misc_RNA (1)...(19): siRNA sense strand
gaccugagcgagaacagaa

SEQ ID NO: 1768249 - RNA, 19 nt, Homo sapiens
  misc_RNA (1)...(19): siRNA sense strand
uagaugugguacccauuga

SEQ ID NO: 1768250 - RNA, 19 nt, Homo sapiens
  misc_RNA (1)...(19): siRNA sense strand
ggaggcaguuaacaucacu

SEQ ID NO: 1768251 - RNA, 19 nt, Homo sapiens
  misc_RNA (1)...(19): siRNA sense strand
ugucaagucuggugaugag

SEQ ID NO: 1768252 - RNA, 19 nt, Homo sapiens
  misc_RNA (1)...(19): siRNA sense strand
agaugugccuguccugugu

SEQ ID NO: 1768253 - RNA, 19 nt, Homo sapiens
  misc_RNA (1)...(19): siRNA sense strand
gcuggaggcaguuaacauc

SEQ ID NO: 1768254 - RNA, 19 nt, Homo sapiens
  misc_RNA (1)...(19): siRNA sense strand
ggucaccaaauucuacuuc

SEQ ID NO: 1768255 - RNA, 19 nt, Homo sapiens
  misc_RNA (1)...(19): siRNA sense strand
gauagaugugguacccauu

SEQ ID NO: 1768256 - RNA, 19 nt, Homo sapiens
  misc_RNA (1)...(19): siRNA sense strand
ucaccaaauucuacuucca

SEQ ID NO: 1768257 - RNA, 19 nt, Homo sapiens
  misc_RNA (1)...(19): siRNA sense strand
uugcaaggaccaaauguca

SEQ ID NO: 1768258 - RNA, 19 nt, Homo sapiens
  misc_RNA (1)...(19): siRNA sense strand
ccuucuaucugaggaacaa

SEQ ID NO: 1768259 - RNA, 19 nt, Homo sapiens
  misc_RNA (1)...(19): siRNA sense strand
gaaucugggauguuaacca

SEQ ID NO: 1768260 - RNA, 19 nt, Homo sapiens
  misc_RNA (1)...(19): siRNA sense strand
gcacuuaccuugcuuccaa

SEQ ID NO: 1768261 - RNA, 19 nt, Homo sapiens
  misc_RNA (1)...(19): siRNA sense strand
gcacauggauucaguaugg

SEQ ID NO: 1768262 - RNA, 19 nt, Homo sapiens
  misc_RNA (1)...(19): siRNA sense strand
guagaaacauggcauauag

SEQ ID NO: 1768263 - RNA, 19 nt, Homo sapiens
  misc_RNA (1)...(19): siRNA sense strand
gcaagcacaugcagaagaa

SEQ ID NO: 1768264 - RNA, 19 nt, Homo sapiens
  misc_RNA (1)...(19): siRNA sense strand
gaacaaagaggaauuagca

SEQ ID NO: 1768265 - RNA, 19 nt, Homo sapiens
  misc_RNA (1)...(19): siRNA sense strand
gaaauaucaucaccuagga

SEQ ID NO: 1768266 - RNA, 19 nt, Homo sapiens
  misc_RNA (1)...(19): siRNA sense strand
caaauauucucaugagguu

SEQ ID NO: 1768267 - RNA, 19 nt, Homo sapiens
  misc_RNA (1)...(19): siRNA sense strand
gaguagagaucgguucuuu

SEQ ID NO: 1768268 - RNA, 19 nt, Homo sapiens
  misc_RNA (1)...(19): siRNA sense strand
gaucaugacucagaggaaa

SEQ ID NO: 1768269 - RNA, 19 nt, Homo sapiens
  misc_RNA (1)...(19): siRNA sense strand
gcccagagcuccuucuuca

SEQ ID NO: 1768270 - RNA, 19 nt, Homo sapiens
  misc_RNA (1)...(19): siRNA sense strand
gaaaggugcuggccaucau

SEQ ID NO: 1768271 - RNA, 19 nt, Homo sapiens
  misc_RNA (1)...(19): siRNA sense strand
guaggaaguuauacaauca

SEQ ID NO: 1768272 - RNA, 19 nt, Homo sapiens
  misc_RNA (1)...(19): siRNA sense strand
agagaaauaucaucaccua

SEQ ID NO: 1768273 - RNA, 19 nt, Homo sapiens
  misc_RNA (1)...(19): siRNA sense strand
ggcagaugcuuauugguaa

SEQ ID NO: 1768274 - RNA, 19 nt, Homo sapiens
  misc_RNA (1)...(19): siRNA sense strand
gauauaacuucuaccagau

SEQ ID NO: 1768275 - RNA, 19 nt, Homo sapiens
  misc_RNA (1)...(19): siRNA sense strand
ccacagauauaacuucuac

SEQ ID NO: 1768276 - RNA, 19 nt, Homo sapiens
  misc_RNA (1)...(19): siRNA sense strand
gaguagcacuuguuaacga

SEQ ID NO: 1768277 - RNA, 19 nt, Homo sapiens
  misc_RNA (1)...(19): siRNA sense strand
gcagaugcuuauugguaaa

SEQ ID NO: 1768278 - RNA, 19 nt, Homo sapiens
  misc_RNA (1)...(19): siRNA sense strand
gaggugugcugcuucauca

SEQ ID NO: 1768279 - RNA, 19 nt, Homo sapiens
  misc_RNA (1)...(19): siRNA sense strand
ggaaauuugucuugaccau

SEQ ID NO: 1768280 - RNA, 19 nt, Homo sapiens
  misc_RNA (1)...(19): siRNA sense strand
guagagaucgguucuuuca

SEQ ID NO: 1768281 - RNA, 19 nt, Homo sapiens
  misc_RNA (1)...(19): siRNA sense strand
caucagaagaccaacauuu

SEQ ID NO: 1768282 - RNA, 19 nt, Homo sapiens
  misc_RNA (1)...(19): siRNA sense strand
aaacauagcuuccaaaacu

SEQ ID NO: 1768283 - RNA, 19 nt, Homo sapiens
  misc_RNA (1)...(19): siRNA sense strand
uagcagcggucacagagaa

SEQ ID NO: 1768284 - RNA, 19 nt, Homo sapiens
  misc_RNA (1)...(19): siRNA sense strand
gagaaaggcuacuguaacc

SEQ ID NO: 1768285 - RNA, 19 nt, Homo sapiens
  misc_RNA (1)...(19): siRNA sense strand
ucucuggacugaacaaaga

SEQ ID NO: 1768286 - RNA, 19 nt, Homo sapiens
  misc_RNA (1)...(19): siRNA sense strand
ggacggacuuugagcacau

SEQ ID NO: 1768287 - RNA, 19 nt, Homo sapiens
  misc_RNA (1)...(19): siRNA sense strand
ggaguggccacagauauaa

SEQ ID NO: 1768288 - RNA, 19 nt, Homo sapiens
  misc_RNA (1)...(19): siRNA sense strand
ucucuuggcucucugcaaa

SEQ ID NO: 1768289 - RNA, 19 nt, Homo sapiens
  misc_RNA (1)...(19): siRNA sense strand
gaaauccaggcagcacuua

SEQ ID NO: 1768290 - RNA, 19 nt, Homo sapiens
  misc_RNA (1)...(19): siRNA sense strand
ucuaccagauccuuaaauu

SEQ ID NO: 1768291 - RNA, 19 nt, Homo sapiens
  misc_RNA (1)...(19): siRNA sense strand
agacaaacauagcuuccaa

SEQ ID NO: 1768292 - RNA, 19 nt, Homo sapiens
  misc_RNA (1)...(19): siRNA sense strand
gcagugcuccuccuccaaa

SEQ ID NO: 1768293 - RNA, 19 nt, Homo sapiens
  misc_RNA (1)...(19): siRNA sense strand
cagaggaaauuugucuuga

SEQ ID NO: 1768294 - RNA, 19 nt, Homo sapiens
  misc_RNA (1)...(19): siRNA sense strand
guucaagacuccacaucug

SEQ ID NO: 1768295 - RNA, 19 nt, Homo sapiens
  misc_RNA (1)...(19): siRNA sense strand
cuaccagauccuuaaauua

SEQ ID NO: 1768296 - RNA, 19 nt, Homo sapiens
  misc_RNA (1)...(19): siRNA sense strand
ucacagagaaauaucauca

SEQ ID NO: 1768297 - RNA, 19 nt, Homo sapiens
  misc_RNA (1)...(19): siRNA sense strand
ccagauccuuaaauuacaa

SEQ ID NO: 1768298 - RNA, 19 nt, Homo sapiens
  misc_RNA (1)...(19): siRNA sense strand
gcauauagggcuagaagca

SEQ ID NO: 1768299 - RNA, 19 nt, Homo sapiens
  misc_RNA (1)...(19): siRNA sense strand
gaauccaccucuguucugu

SEQ ID NO: 1768300 - RNA, 19 nt, Homo sapiens
  misc_RNA (1)...(19): siRNA sense strand
aaugguagcugcagcaaag

SEQ ID NO: 1768301 - RNA, 19 nt, Homo sapiens
  misc_RNA (1)...(19): siRNA sense strand
acaaguaccacaucuucua

SEQ ID NO: 1768302 - RNA, 19 nt, Homo sapiens
  misc_RNA (1)...(19): siRNA sense strand
uaucugaugucacaaguac

SEQ ID NO: 1768303 - RNA, 19 nt, Homo sapiens
  misc_RNA (1)...(19): siRNA sense strand
gaccaaggcgccaggagaa

SEQ ID NO: 1768304 - RNA, 19 nt, Homo sapiens
  misc_RNA (1)...(19): siRNA sense strand
cuucauaccuggagucucu

SEQ ID NO: 1768305 - RNA, 19 nt, Homo sapiens
  misc_RNA (1)...(19): siRNA sense strand
ccaccucuguucuguagga

SEQ ID NO: 1768306 - RNA, 19 nt, Homo sapiens
  misc_RNA (1)...(19): siRNA sense strand
uggcagaugcuuauuggua

SEQ ID NO: 1768307 - RNA, 19 nt, Homo sapiens
  misc_RNA (1)...(19): siRNA sense strand
ggaccugcuucccgagaug

SEQ ID NO: 1768308 - RNA, 19 nt, Homo sapiens
  misc_RNA (1)...(19): siRNA sense strand
ucaccaagccagccaauuc

SEQ ID NO: 1768309 - RNA, 19 nt, Homo sapiens
  misc_RNA (1)...(19): siRNA sense strand
gaucucacccgcaaguuca

SEQ ID NO: 1768310 - RNA, 19 nt, Homo sapiens
  misc_RNA (1)...(19): siRNA sense strand
cgagcggaauuuaugcaaa

SEQ ID NO: 1768311 - RNA, 19 nt, Homo sapiens
  misc_RNA (1)...(19): siRNA sense strand
ggaaauccaggcagcacuu

SEQ ID NO: 1768312 - RNA, 19 nt, Homo sapiens
  misc_RNA (1)...(19): siRNA sense strand
guccaaggcuacugaucuu

SEQ ID NO: 1768313 - RNA, 19 nt, Homo sapiens
  misc_RNA (1)...(19): siRNA sense strand
ucagggcagccaagaauuu

SEQ ID NO: 1768314 - RNA, 19 nt, Homo sapiens
  misc_RNA (1)...(19): siRNA sense strand
cgacgccucuccacuccuu

SEQ ID NO: 1768315 - RNA, 19 nt, Homo sapiens
  misc_RNA (1)...(19): siRNA sense strand
gguggcagaugcuuauugg

SEQ ID NO: 1768316 - RNA, 19 nt, Homo sapiens
  misc_RNA (1)...(19): siRNA sense strand
aaauuugucuugaccaucu

SEQ ID NO: 1768317 - RNA, 19 nt, Homo sapiens
  misc_RNA (1)...(19): siRNA sense strand
gguggaugaucaugacuca

SEQ ID NO: 1768318 - RNA, 19 nt, Homo sapiens
  misc_RNA (1)...(19): siRNA sense strand
ucacaaguaccacaucuuc

SEQ ID NO: 1768319 - RNA, 19 nt, Homo sapiens
  misc_RNA (1)...(19): siRNA sense strand
gaucaucaauggcaaaagu

SEQ ID NO: 1768320 - RNA, 19 nt, Homo sapiens
  misc_RNA (1)...(19): siRNA sense strand
gagggucggcagcagauuu

SEQ ID NO: 1768321 - RNA, 19 nt, Homo sapiens
  misc_RNA (1)...(19): siRNA sense strand
agagaaagacaaacggaaa

SEQ ID NO: 1768322 - RNA, 19 nt, Homo sapiens
  misc_RNA (1)...(19): siRNA sense strand
gauggaguggccacagaua

SEQ ID NO: 1768323 - RNA, 19 nt, Homo sapiens
  misc_RNA (1)...(19): siRNA sense strand
uuaccuugcuuccaauuca

SEQ ID NO: 1768324 - RNA, 19 nt, Homo sapiens
  misc_RNA (1)...(19): siRNA sense strand
cguagaaacauggcauaua

SEQ ID NO: 1768325 - RNA, 19 nt, Homo sapiens
  misc_RNA (1)...(19): siRNA sense strand
gcacaccuaguccagauca

SEQ ID NO: 1768326 - RNA, 19 nt, Homo sapiens
  misc_RNA (1)...(19): siRNA sense strand
gaugauucagacaaacaua

SEQ ID NO: 1768327 - RNA, 19 nt, Homo sapiens
  misc_RNA (1)...(19): siRNA sense strand
uggagucucucuaucaauc

SEQ ID NO: 1768328 - RNA, 19 nt, Homo sapiens
  misc_RNA (1)...(19): siRNA sense strand
cacgaacucucuggacuga

SEQ ID NO: 1768329 - RNA, 19 nt, Homo sapiens
  misc_RNA (1)...(19): siRNA sense strand
gguaaugaguugugauucc

SEQ ID NO: 1768330 - RNA, 19 nt, Homo sapiens
  misc_RNA (1)...(19): siRNA sense strand
aaaccuggacggacuuuga

SEQ ID NO: 1768331 - RNA, 19 nt, Homo sapiens
  misc_RNA (1)...(19): siRNA sense strand
uggaguggccacagauaua

SEQ ID NO: 1768332 - RNA, 19 nt, Homo sapiens
  misc_RNA (1)...(19): siRNA sense strand
ccagagcuccuucuucaca

SEQ ID NO: 1768333 - RNA, 19 nt, Homo sapiens
  misc_RNA (1)...(19): siRNA sense strand
aaugaguugugauuccuuu

SEQ ID NO: 1768334 - RNA, 19 nt, Homo sapiens
  misc_RNA (1)...(19): siRNA sense strand
cgaacucucuggacugaac

SEQ ID NO: 1768335 - RNA, 19 nt, Homo sapiens
  misc_RNA (1)...(19): siRNA sense strand
uaccagauccuuaaauuac

SEQ ID NO: 1768336 - RNA, 19 nt, Homo sapiens
  misc_RNA (1)...(19): siRNA sense strand
ggaauccaccucuguucug

SEQ ID NO: 1768337 - RNA, 19 nt, Homo sapiens
  misc_RNA (1)...(19): siRNA sense strand
cgagggaacugucguuuuc

SEQ ID NO: 1768338 - RNA, 19 nt, Homo sapiens
  misc_RNA (1)...(19): siRNA sense strand
aagggaugauucagacaaa

SEQ ID NO: 1768339 - RNA, 19 nt, Homo sapiens
  misc_RNA (1)...(19): siRNA sense strand
caagggaugauucagacaa

SEQ ID NO: 1768340 - RNA, 19 nt, Homo sapiens
  misc_RNA (1)...(19): siRNA sense strand
auucaaacgucgacucuuc

SEQ ID NO: 1768341 - RNA, 19 nt, Homo sapiens
  misc_RNA (1)...(19): siRNA sense strand
cuucuaggguggaugauca

SEQ ID NO: 1768342 - RNA, 19 nt, Homo sapiens
  misc_RNA (1)...(19): siRNA sense strand
gcucuucucuuggcucucu

SEQ ID NO: 1768343 - RNA, 19 nt, Homo sapiens
  misc_RNA (1)...(19): siRNA sense strand
caggagaaagacuguguuu

SEQ ID NO: 1768344 - RNA, 19 nt, Homo sapiens
  misc_RNA (1)...(19): siRNA sense strand
ucacauccuggacgaauga

SEQ ID NO: 1768345 - RNA, 19 nt, Homo sapiens
  misc_RNA (1)...(19): siRNA sense strand
gcuagaagcaagaguagag

SEQ ID NO: 1768346 - RNA, 19 nt, Homo sapiens
  misc_RNA (1)...(19): siRNA sense strand
caggcuugcuuuccucaga

SEQ ID NO: 1768347 - RNA, 19 nt, Homo sapiens
  misc_RNA (1)...(19): siRNA sense strand
ccuggagucucucuaucaa

SEQ ID NO: 1768348 - RNA, 19 nt, Homo sapiens
  misc_RNA (1)...(19): siRNA sense strand
aaacgucgacucuucauac

SEQ ID NO: 1768349 - RNA, 19 nt, Homo sapiens
  misc_RNA (1)...(19): siRNA sense strand
caaacgucgacucuucaua

SEQ ID NO: 1768350 - RNA, 19 nt, Homo sapiens
  misc_RNA (1)...(19): siRNA sense strand
gagaagagaaagacaaacg

SEQ ID NO: 1768351 - RNA, 19 nt, Homo sapiens
  misc_RNA (1)...(19): siRNA sense strand
gauuugguauuggaagaau

SEQ ID NO: 1768352 - RNA, 19 nt, Homo sapiens
  misc_RNA (1)...(19): siRNA sense strand
ccagagacccugcgauaac

SEQ ID NO: 1768353 - RNA, 19 nt, Homo sapiens
  misc_RNA (1)...(19): siRNA sense strand
ggucugccgucgcaaguac

SEQ ID NO: 1768354 - RNA, 19 nt, Homo sapiens
  misc_RNA (1)...(19): siRNA sense strand
ucagaggaaauuugucuug

SEQ ID NO: 1768355 - RNA, 19 nt, Homo sapiens
  misc_RNA (1)...(19): siRNA sense strand
agaugaugcugacccaaga

SEQ ID NO: 1768356 - RNA, 19 nt, Homo sapiens
  misc_RNA (1)...(19): siRNA sense strand
ugccagagacccugcgaua

SEQ ID NO: 1768357 - RNA, 19 nt, Homo sapiens
  misc_RNA (1)...(19): siRNA sense strand
ggccacagauauaacuucu

SEQ ID NO: 1768358 - RNA, 19 nt, Homo sapiens
  misc_RNA (1)...(19): siRNA sense strand
cagaagaccaacauuugug

SEQ ID NO: 1768359 - RNA, 19 nt, Homo sapiens
  misc_RNA (1)...(19): siRNA sense strand
gguaugugcagcagaugaa

SEQ ID NO: 1768360 - RNA, 19 nt, Homo sapiens
  misc_RNA (1)...(19): siRNA sense strand
gcacuuaccuugcuuccaa

SEQ ID NO: 1768361 - RNA, 19 nt, Homo sapiens
  misc_RNA (1)...(19): siRNA sense strand
gcacauggauucaguaugg

SEQ ID NO: 1768362 - RNA, 19 nt, Homo sapiens
  misc_RNA (1)...(19): siRNA sense strand
guagaaacauggcauauag

SEQ ID NO: 1768363 - RNA, 19 nt, Homo sapiens
  misc_RNA (1)...(19): siRNA sense strand
gcaagcacaugcagaagaa

SEQ ID NO: 1768364 - RNA, 19 nt, Homo sapiens
  misc_RNA (1)...(19): siRNA sense strand
gaacaaagaggaauuagca

SEQ ID NO: 1768365 - RNA, 19 nt, Homo sapiens
  misc_RNA (1)...(19): siRNA sense strand
gaaauaucaucaccuagga

SEQ ID NO: 1768366 - RNA, 19 nt, Homo sapiens
  misc_RNA (1)...(19): siRNA sense strand
caaauauucucaugagguu

SEQ ID NO: 1768367 - RNA, 19 nt, Homo sapiens
  misc_RNA (1)...(19): siRNA sense strand
gaguagagaucgguucuuu

SEQ ID NO: 1768368 - RNA, 19 nt, Homo sapiens
  misc_RNA (1)...(19): siRNA sense strand
gaucaugacucagaggaaa

SEQ ID NO: 1768369 - RNA, 19 nt, Homo sapiens
  misc_RNA (1)...(19): siRNA sense strand
gcccagagcuccuucuuca

SEQ ID NO: 1768370 - RNA, 19 nt, Homo sapiens
  misc_RNA (1)...(19): siRNA sense strand
gaaaggugcuggccaucau

SEQ ID NO: 1768371 - RNA, 19 nt, Homo sapiens
  misc_RNA (1)...(19): siRNA sense strand
guaggaaguuauacaauca

SEQ ID NO: 1768372 - RNA, 19 nt, Homo sapiens
  misc_RNA (1)...(19): siRNA sense strand
agagaaauaucaucaccua

SEQ ID NO: 1768373 - RNA, 19 nt, Homo sapiens
  misc_RNA (1)...(19): siRNA sense strand
ggcagaugcuuauugguaa

SEQ ID NO: 1768374 - RNA, 19 nt, Homo sapiens
  misc_RNA (1)...(19): siRNA sense strand
gauauaacuucuaccagau

SEQ ID NO: 1768375 - RNA, 19 nt, Homo sapiens
  misc_RNA (1)...(19): siRNA sense strand
ccacagauauaacuucuac

SEQ ID NO: 1768376 - RNA, 19 nt, Homo sapiens
  misc_RNA (1)...(19): siRNA sense strand
gaguagcacuuguuaacga

SEQ ID NO: 1768377 - RNA, 19 nt, Homo sapiens
  misc_RNA (1)...(19): siRNA sense strand
gcagaugcuuauugguaaa

SEQ ID NO: 1768378 - RNA, 19 nt, Homo sapiens
  misc_RNA (1)...(19): siRNA sense strand
gaggugugcugcuucauca

SEQ ID NO: 1768379 - RNA, 19 nt, Homo sapiens
  misc_RNA (1)...(19): siRNA sense strand
ggaaauuugucuugaccau

SEQ ID NO: 1768380 - RNA, 19 nt, Homo sapiens
  misc_RNA (1)...(19): siRNA sense strand
guagagaucgguucuuuca

SEQ ID NO: 1768381 - RNA, 19 nt, Homo sapiens
  misc_RNA (1)...(19): siRNA sense strand
caucagaagaccaacauuu

SEQ ID NO: 1768382 - RNA, 19 nt, Homo sapiens
  misc_RNA (1)...(19): siRNA sense strand
aaacauagcuuccaaaacu

SEQ ID NO: 1768383 - RNA, 19 nt, Homo sapiens
  misc_RNA (1)...(19): siRNA sense strand
uagcagcggucacagagaa

SEQ ID NO: 1768384 - RNA, 19 nt, Homo sapiens
  misc_RNA (1)...(19): siRNA sense strand
gagaaaggcuacuguaacc

SEQ ID NO: 1768385 - RNA, 19 nt, Homo sapiens
  misc_RNA (1)...(19): siRNA sense strand
ucucuggacugaacaaaga

SEQ ID NO: 1768386 - RNA, 19 nt, Homo sapiens
  misc_RNA (1)...(19): siRNA sense strand
ggacggacuuugagcacau

SEQ ID NO: 1768387 - RNA, 19 nt, Homo sapiens
  misc_RNA (1)...(19): siRNA sense strand
ggaguggccacagauauaa

SEQ ID NO: 1768388 - RNA, 19 nt, Homo sapiens
  misc_RNA (1)...(19): siRNA sense strand
ucucuuggcucucugcaaa

SEQ ID NO: 1768389 - RNA, 19 nt, Homo sapiens
  misc_RNA (1)...(19): siRNA sense strand
gaaauccaggcagcacuua

SEQ ID NO: 1768390 - RNA, 19 nt, Homo sapiens
  misc_RNA (1)...(19): siRNA sense strand
ucuaccagauccuuaaauu

SEQ ID NO: 1768391 - RNA, 19 nt, Homo sapiens
  misc_RNA (1)...(19): siRNA sense strand
agacaaacauagcuuccaa

SEQ ID NO: 1768392 - RNA, 19 nt, Homo sapiens
  misc_RNA (1)...(19): siRNA sense strand
gcagugcuccuccuccaaa

SEQ ID NO: 1768393 - RNA, 19 nt, Homo sapiens
  misc_RNA (1)...(19): siRNA sense strand
cagaggaaauuugucuuga

SEQ ID NO: 1768394 - RNA, 19 nt, Homo sapiens
  misc_RNA (1)...(19): siRNA sense strand
guucaagacuccacaucug

SEQ ID NO: 1768395 - RNA, 19 nt, Homo sapiens
  misc_RNA (1)...(19): siRNA sense strand
cuaccagauccuuaaauua

SEQ ID NO: 1768396 - RNA, 19 nt, Homo sapiens
  misc_RNA (1)...(19): siRNA sense strand
ucacagagaaauaucauca

SEQ ID NO: 1768397 - RNA, 19 nt, Homo sapiens
  misc_RNA (1)...(19): siRNA sense strand
ccagauccuuaaauuacaa

SEQ ID NO: 1768398 - RNA, 19 nt, Homo sapiens
  misc_RNA (1)...(19): siRNA sense strand
gcauauagggcuagaagca

SEQ ID NO: 1768399 - RNA, 19 nt, Homo sapiens
  misc_RNA (1)...(19): siRNA sense strand
gaauccaccucuguucugu

SEQ ID NO: 1768400 - RNA, 19 nt, Homo sapiens
  misc_RNA (1)...(19): siRNA sense strand
aaugguagcugcagcaaag

SEQ ID NO: 1768401 - RNA, 19 nt, Homo sapiens
  misc_RNA (1)...(19): siRNA sense strand
acaaguaccacaucuucua

SEQ ID NO: 1768402 - RNA, 19 nt, Homo sapiens
  misc_RNA (1)...(19): siRNA sense strand
uaucugaugucacaaguac

SEQ ID NO: 1768403 - RNA, 19 nt, Homo sapiens
  misc_RNA (1)...(19): siRNA sense strand
gaccaaggcgccaggagaa

SEQ ID NO: 1768404 - RNA, 19 nt, Homo sapiens
  misc_RNA (1)...(19): siRNA sense strand
cuucauaccuggagucucu

SEQ ID NO: 1768405 - RNA, 19 nt, Homo sapiens
  misc_RNA (1)...(19): siRNA sense strand
ccaccucuguucuguagga

SEQ ID NO: 1768406 - RNA, 19 nt, Homo sapiens
  misc_RNA (1)...(19): siRNA sense strand
uggcagaugcuuauuggua

SEQ ID NO: 1768407 - RNA, 19 nt, Homo sapiens
  misc_RNA (1)...(19): siRNA sense strand
ggaccugcuucccgagaug

SEQ ID NO: 1768408 - RNA, 19 nt, Homo sapiens
  misc_RNA (1)...(19): siRNA sense strand
ucaccaagccagccaauuc

SEQ ID NO: 1768409 - RNA, 19 nt, Homo sapiens
  misc_RNA (1)...(19): siRNA sense strand
gaucucacccgcaaguuca

SEQ ID NO: 1768410 - RNA, 19 nt, Homo sapiens
  misc_RNA (1)...(19): siRNA sense strand
cgagcggaauuuaugcaaa

SEQ ID NO: 1768411 - RNA, 19 nt, Homo sapiens
  misc_RNA (1)...(19): siRNA sense strand
ggaaauccaggcagcacuu

SEQ ID NO: 1768412 - RNA, 19 nt, Homo sapiens
  misc_RNA (1)...(19): siRNA sense strand
guccaaggcuacugaucuu

SEQ ID NO: 1768413 - RNA, 19 nt, Homo sapiens
  misc_RNA (1)...(19): siRNA sense strand
ucagggcagccaagaauuu

SEQ ID NO: 1768414 - RNA, 19 nt, Homo sapiens
  misc_RNA (1)...(19): siRNA sense strand
cgacgccucuccacuccuu

SEQ ID NO: 1768415 - RNA, 19 nt, Homo sapiens
  misc_RNA (1)...(19): siRNA sense strand
gguggcagaugcuuauugg

SEQ ID NO: 1768416 - RNA, 19 nt, Homo sapiens
  misc_RNA (1)...(19): siRNA sense strand
aaauuugucuugaccaucu

SEQ ID NO: 1768417 - RNA, 19 nt, Homo sapiens
  misc_RNA (1)...(19): siRNA sense strand
gguggaugaucaugacuca

SEQ ID NO: 1768418 - RNA, 19 nt, Homo sapiens
  misc_RNA (1)...(19): siRNA sense strand
ucacaaguaccacaucuuc

SEQ ID NO: 1768419 - RNA, 19 nt, Homo sapiens
  misc_RNA (1)...(19): siRNA sense strand
gaucaucaauggcaaaagu

SEQ ID NO: 1768420 - RNA, 19 nt, Homo sapiens
  misc_RNA (1)...(19): siRNA sense strand
gagggucggcagcagauuu

SEQ ID NO: 1768421 - RNA, 19 nt, Homo sapiens
  misc_RNA (1)...(19): siRNA sense strand
agagaaagacaaacggaaa

SEQ ID NO: 1768422 - RNA, 19 nt, Homo sapiens
  misc_RNA (1)...(19): siRNA sense strand
gauggaguggccacagaua

SEQ ID NO: 1768423 - RNA, 19 nt, Homo sapiens
  misc_RNA (1)...(19): siRNA sense strand
uuaccuugcuuccaauuca

SEQ ID NO: 1768424 - RNA, 19 nt, Homo sapiens
  misc_RNA (1)...(19): siRNA sense strand
cguagaaacauggcauaua

SEQ ID NO: 1768425 - RNA, 19 nt, Homo sapiens
  misc_RNA (1)...(19): siRNA sense strand
gcacaccuaguccagauca

SEQ ID NO: 1768426 - RNA, 19 nt, Homo sapiens
  misc_RNA (1)...(19): siRNA sense strand
gaugauucagacaaacaua

SEQ ID NO: 1768427 - RNA, 19 nt, Homo sapiens
  misc_RNA (1)...(19): siRNA sense strand
uggagucucucuaucaauc

SEQ ID NO: 1768428 - RNA, 19 nt, Homo sapiens
  misc_RNA (1)...(19): siRNA sense strand
cacgaacucucuggacuga

SEQ ID NO: 1768429 - RNA, 19 nt, Homo sapiens
  misc_RNA (1)...(19): siRNA sense strand
gguaaugaguugugauucc

SEQ ID NO: 1768430 - RNA, 19 nt, Homo sapiens
  misc_RNA (1)...(19): siRNA sense strand
aaaccuggacggacuuuga

SEQ ID NO: 1768431 - RNA, 19 nt, Homo sapiens
  misc_RNA (1)...(19): siRNA sense strand
uggaguggccacagauaua

SEQ ID NO: 1768432 - RNA, 19 nt, Homo sapiens
  misc_RNA (1)...(19): siRNA sense strand
ccagagcuccuucuucaca

SEQ ID NO: 1768433 - RNA, 19 nt, Homo sapiens
  misc_RNA (1)...(19): siRNA sense strand
aaugaguugugauuccuuu

SEQ ID NO: 1768434 - RNA, 19 nt, Homo sapiens
  misc_RNA (1)...(19): siRNA sense strand
cgaacucucuggacugaac

SEQ ID NO: 1768435 - RNA, 19 nt, Homo sapiens
  misc_RNA (1)...(19): siRNA sense strand
uaccagauccuuaaauuac

SEQ ID NO: 1768436 - RNA, 19 nt, Homo sapiens
  misc_RNA (1)...(19): siRNA sense strand
ggaauccaccucuguucug

SEQ ID NO: 1768437 - RNA, 19 nt, Homo sapiens
  misc_RNA (1)...(19): siRNA sense strand
cgagggaacugucguuuuc

SEQ ID NO: 1768438 - RNA, 19 nt, Homo sapiens
  misc_RNA (1)...(19): siRNA sense strand
aagggaugauucagacaaa

SEQ ID NO: 1768439 - RNA, 19 nt, Homo sapiens
  misc_RNA (1)...(19): siRNA sense strand
caagggaugauucagacaa

SEQ ID NO: 1768440 - RNA, 19 nt, Homo sapiens
  misc_RNA (1)...(19): siRNA sense strand
auucaaacgucgacucuuc

SEQ ID NO: 1768441 - RNA, 19 nt, Homo sapiens
  misc_RNA (1)...(19): siRNA sense strand
cuucuaggguggaugauca

SEQ ID NO: 1768442 - RNA, 19 nt, Homo sapiens
  misc_RNA (1)...(19): siRNA sense strand
gcucuucucuuggcucucu

SEQ ID NO: 1768443 - RNA, 19 nt, Homo sapiens
  misc_RNA (1)...(19): siRNA sense strand
caggagaaagacuguguuu

SEQ ID NO: 1768444 - RNA, 19 nt, Homo sapiens
  misc_RNA (1)...(19): siRNA sense strand
ucacauccuggacgaauga

SEQ ID NO: 1768445 - RNA, 19 nt, Homo sapiens
  misc_RNA (1)...(19): siRNA sense strand
gcuagaagcaagaguagag

SEQ ID NO: 1768446 - RNA, 19 nt, Homo sapiens
  misc_RNA (1)...(19): siRNA sense strand
caggcuugcuuuccucaga

SEQ ID NO: 1768447 - RNA, 19 nt, Homo sapiens
  misc_RNA (1)...(19): siRNA sense strand
ccuggagucucucuaucaa

SEQ ID NO: 1768448 - RNA, 19 nt, Homo sapiens
  misc_RNA (1)...(19): siRNA sense strand
aaacgucgacucuucauac

SEQ ID NO: 1768449 - RNA, 19 nt, Homo sapiens
  misc_RNA (1)...(19): siRNA sense strand
caaacgucgacucuucaua

SEQ ID NO: 1768450 - RNA, 19 nt, Homo sapiens
  misc_RNA (1)...(19): siRNA sense strand
gagaagagaaagacaaacg

SEQ ID NO: 1768451 - RNA, 19 nt, Homo sapiens
  misc_RNA (1)...(19): siRNA sense strand
gauuugguauuggaagaau

SEQ ID NO: 1768452 - RNA, 19 nt, Homo sapiens
  misc_RNA (1)...(19): siRNA sense strand
ccagagacccugcgauaac

SEQ ID NO: 1768453 - RNA, 19 nt, Homo sapiens
  misc_RNA (1)...(19): siRNA sense strand
ggucugccgucgcaaguac

SEQ ID NO: 1768454 - RNA, 19 nt, Homo sapiens
  misc_RNA (1)...(19): siRNA sense strand
ucagaggaaauuugucuug

SEQ ID NO: 1768455 - RNA, 19 nt, Homo sapiens
  misc_RNA (1)...(19): siRNA sense strand
agaugaugcugacccaaga

SEQ ID NO: 1768456 - RNA, 19 nt, Homo sapiens
  misc_RNA (1)...(19): siRNA sense strand
ugccagagacccugcgaua

SEQ ID NO: 1768457 - RNA, 19 nt, Homo sapiens
  misc_RNA (1)...(19): siRNA sense strand
ggccacagauauaacuucu

SEQ ID NO: 1768458 - RNA, 19 nt, Homo sapiens
  misc_RNA (1)...(19): siRNA sense strand
cagaagaccaacauuugug

SEQ ID NO: 1768459 - RNA, 19 nt, Homo sapiens
  misc_RNA (1)...(19): siRNA sense strand
gguaugugcagcagaugaa

SEQ ID NO: 1768460 - RNA, 19 nt, Homo sapiens
  misc_RNA (1)...(19): siRNA sense strand
gaaaugggcuuuaguagaa

SEQ ID NO: 1768461 - RNA, 19 nt, Homo sapiens
  misc_RNA (1)...(19): siRNA sense strand
gaaagaacauguaaagugu

SEQ ID NO: 1768462 - RNA, 19 nt, Homo sapiens
  misc_RNA (1)...(19): siRNA sense strand
caagagaacugauugauac

SEQ ID NO: 1768463 - RNA, 19 nt, Homo sapiens
  misc_RNA (1)...(19): siRNA sense strand
ucaaugaucuuguguuaga

SEQ ID NO: 1768464 - RNA, 19 nt, Homo sapiens
  misc_RNA (1)...(19): siRNA sense strand
uaacagugaugaugucaaa

SEQ ID NO: 1768465 - RNA, 19 nt, Homo sapiens
  misc_RNA (1)...(19): siRNA sense strand
gcaagagaacugauugaua

SEQ ID NO: 1768466 - RNA, 19 nt, Homo sapiens
  misc_RNA (1)...(19): siRNA sense strand
gaagaaagaacauguaaag

SEQ ID NO: 1768467 - RNA, 19 nt, Homo sapiens
  misc_RNA (1)...(19): siRNA sense strand
gaaaguguccuauuuguag

SEQ ID NO: 1768468 - RNA, 19 nt, Homo sapiens
  misc_RNA (1)...(19): siRNA sense strand
gaaaaugccagauuacuua

SEQ ID NO: 1768469 - RNA, 19 nt, Homo sapiens
  misc_RNA (1)...(19): siRNA sense strand
gaugaauacuccugugauu

SEQ ID NO: 1768470 - RNA, 19 nt, Homo sapiens
  misc_RNA (1)...(19): siRNA sense strand
uaacgaaaaugccagauua

SEQ ID NO: 1768471 - RNA, 19 nt, Homo sapiens
  misc_RNA (1)...(19): siRNA sense strand
caagauacacaguuucuaa

SEQ ID NO: 1768472 - RNA, 19 nt, Homo sapiens
  misc_RNA (1)...(19): siRNA sense strand
cagaacaccugagacauuu

SEQ ID NO: 1768473 - RNA, 19 nt, Homo sapiens
  misc_RNA (1)...(19): siRNA sense strand
ggacucagguguugggaau

SEQ ID NO: 1768474 - RNA, 19 nt, Homo sapiens
  misc_RNA (1)...(19): siRNA sense strand
caacacguuugaacugaaa

SEQ ID NO: 1768475 - RNA, 19 nt, Homo sapiens
  misc_RNA (1)...(19): siRNA sense strand
ggaaaugggcuuuaguaga

SEQ ID NO: 1768476 - RNA, 19 nt, Homo sapiens
  misc_RNA (1)...(19): siRNA sense strand
gagaagaccauucagaaga

SEQ ID NO: 1768477 - RNA, 19 nt, Homo sapiens
  misc_RNA (1)...(19): siRNA sense strand
cauaggaccuggagacaga

SEQ ID NO: 1768478 - RNA, 19 nt, Homo sapiens
  misc_RNA (1)...(19): siRNA sense strand
gaacugauugauacgauuu

SEQ ID NO: 1768479 - RNA, 19 nt, Homo sapiens
  misc_RNA (1)...(19): siRNA sense strand
ggagagaauuauagacuag

SEQ ID NO: 1768480 - RNA, 19 nt, Homo sapiens
  misc_RNA (1)...(19): siRNA sense strand
gaaggauaaugcuauguca

SEQ ID NO: 1768481 - RNA, 19 nt, Homo sapiens
  misc_RNA (1)...(19): siRNA sense strand
ugaauacuccugugauuaa

SEQ ID NO: 1768482 - RNA, 19 nt, Homo sapiens
  misc_RNA (1)...(19): siRNA sense strand
agucaaugaucuuguguua

SEQ ID NO: 1768483 - RNA, 19 nt, Homo sapiens
  misc_RNA (1)...(19): siRNA sense strand
gaacugaaauacgacuugu

SEQ ID NO: 1768484 - RNA, 19 nt, Homo sapiens
  misc_RNA (1)...(19): siRNA sense strand
gaacauguaaaguguguau

SEQ ID NO: 1768485 - RNA, 19 nt, Homo sapiens
  misc_RNA (1)...(19): siRNA sense strand
gauuaaugcugccguggaa

SEQ ID NO: 1768486 - RNA, 19 nt, Homo sapiens
  misc_RNA (1)...(19): siRNA sense strand
gaacuguaccgaaugucua

SEQ ID NO: 1768487 - RNA, 19 nt, Homo sapiens
  misc_RNA (1)...(19): siRNA sense strand
caaugcagaagaugaaaua

SEQ ID NO: 1768488 - RNA, 19 nt, Homo sapiens
  misc_RNA (1)...(19): siRNA sense strand
gaaauacgacuugucaugu

SEQ ID NO: 1768489 - RNA, 19 nt, Homo sapiens
  misc_RNA (1)...(19): siRNA sense strand
agacauggccauugacuuu

SEQ ID NO: 1768490 - RNA, 19 nt, Homo sapiens
  misc_RNA (1)...(19): siRNA sense strand
guuaacaacuuggaagcua

SEQ ID NO: 1768491 - RNA, 19 nt, Homo sapiens
  misc_RNA (1)...(19): siRNA sense strand
ucaagacacuucaagauac

SEQ ID NO: 1768492 - RNA, 19 nt, Homo sapiens
  misc_RNA (1)...(19): siRNA sense strand
agauugugcuccuucuuua

SEQ ID NO: 1768493 - RNA, 19 nt, Homo sapiens
  misc_RNA (1)...(19): siRNA sense strand
acaaagaaguguccauagu

SEQ ID NO: 1768494 - RNA, 19 nt, Homo sapiens
  misc_RNA (1)...(19): siRNA sense strand
gcaacuggagagaauuaua

SEQ ID NO: 1768495 - RNA, 19 nt, Homo sapiens
  misc_RNA (1)...(19): siRNA sense strand
uaagaaaguguccuauuug

SEQ ID NO: 1768496 - RNA, 19 nt, Homo sapiens
  misc_RNA (1)...(19): siRNA sense strand
caagaagaaagaacaugua

SEQ ID NO: 1768497 - RNA, 19 nt, Homo sapiens
  misc_RNA (1)...(19): siRNA sense strand
cugaagcuguguuauauga

SEQ ID NO: 1768498 - RNA, 19 nt, Homo sapiens
  misc_RNA (1)...(19): siRNA sense strand
gaaaagcgccaacacguuu

SEQ ID NO: 1768499 - RNA, 19 nt, Homo sapiens
  misc_RNA (1)...(19): siRNA sense strand
cuaacugccggaauuauua

SEQ ID NO: 1768500 - RNA, 19 nt, Homo sapiens
  misc_RNA (1)...(19): siRNA sense strand
caacauuugacuuguguaa

SEQ ID NO: 1768501 - RNA, 19 nt, Homo sapiens
  misc_RNA (1)...(19): siRNA sense strand
gauacacaguuucuaaucu

SEQ ID NO: 1768502 - RNA, 19 nt, Homo sapiens
  misc_RNA (1)...(19): siRNA sense strand
aaagaaguguccauagugu

SEQ ID NO: 1768503 - RNA, 19 nt, Homo sapiens
  misc_RNA (1)...(19): siRNA sense strand
acacagacgucuuuacaag

SEQ ID NO: 1768504 - RNA, 19 nt, Homo sapiens
  misc_RNA (1)...(19): siRNA sense strand
aaugcagagucaucaauua

SEQ ID NO: 1768505 - RNA, 19 nt, Homo sapiens
  misc_RNA (1)...(19): siRNA sense strand
agaaagaacauguaaagug

SEQ ID NO: 1768506 - RNA, 19 nt, Homo sapiens
  misc_RNA (1)...(19): siRNA sense strand
ggauaaugcuaugucagaa

SEQ ID NO: 1768507 - RNA, 19 nt, Homo sapiens
  misc_RNA (1)...(19): siRNA sense strand
cuaguaguaugcaaagauu

SEQ ID NO: 1768508 - RNA, 19 nt, Homo sapiens
  misc_RNA (1)...(19): siRNA sense strand
gagaacugauugauacgau

SEQ ID NO: 1768509 - RNA, 19 nt, Homo sapiens
  misc_RNA (1)...(19): siRNA sense strand
caugugaacuguaccgaau

SEQ ID NO: 1768510 - RNA, 19 nt, Homo sapiens
  misc_RNA (1)...(19): siRNA sense strand
caagacacuucaagauaca

SEQ ID NO: 1768511 - RNA, 19 nt, Homo sapiens
  misc_RNA (1)...(19): siRNA sense strand
gugaugaugucaaaugcuu

SEQ ID NO: 1768512 - RNA, 19 nt, Homo sapiens
  misc_RNA (1)...(19): siRNA sense strand
gaaguguccauaguguuua

SEQ ID NO: 1768513 - RNA, 19 nt, Homo sapiens
  misc_RNA (1)...(19): siRNA sense strand
cacagaagauguuucagau

SEQ ID NO: 1768514 - RNA, 19 nt, Homo sapiens
  misc_RNA (1)...(19): siRNA sense strand
ucuacuaacugccggaauu

SEQ ID NO: 1768515 - RNA, 19 nt, Homo sapiens
  misc_RNA (1)...(19): siRNA sense strand
gaacagcugcuauccacau

SEQ ID NO: 1768516 - RNA, 19 nt, Homo sapiens
  misc_RNA (1)...(19): siRNA sense strand
ggaagaggagagagaaaga

SEQ ID NO: 1768517 - RNA, 19 nt, Homo sapiens
  misc_RNA (1)...(19): siRNA sense strand
caaagaaguguccauagug

SEQ ID NO: 1768518 - RNA, 19 nt, Homo sapiens
  misc_RNA (1)...(19): siRNA sense strand
ccacagaagauguuucaga

SEQ ID NO: 1768519 - RNA, 19 nt, Homo sapiens
  misc_RNA (1)...(19): siRNA sense strand
gaaccgaaggauaaugcua

SEQ ID NO: 1768520 - RNA, 19 nt, Homo sapiens
  misc_RNA (1)...(19): siRNA sense strand
uaaaguguguauggacaaa

SEQ ID NO: 1768521 - RNA, 19 nt, Homo sapiens
  misc_RNA (1)...(19): siRNA sense strand
aaacagacaguucagagaa

SEQ ID NO: 1768522 - RNA, 19 nt, Homo sapiens
  misc_RNA (1)...(19): siRNA sense strand
gaagaccauucagaagaug

SEQ ID NO: 1768523 - RNA, 19 nt, Homo sapiens
  misc_RNA (1)...(19): siRNA sense strand
caucaaauccuguaaacuc

SEQ ID NO: 1768524 - RNA, 19 nt, Homo sapiens
  misc_RNA (1)...(19): siRNA sense strand
gaauacuccugugauuaau

SEQ ID NO: 1768525 - RNA, 19 nt, Homo sapiens
  misc_RNA (1)...(19): siRNA sense strand
gugaguacuugauaagaau

SEQ ID NO: 1768526 - RNA, 19 nt, Homo sapiens
  misc_RNA (1)...(19): siRNA sense strand
uuucagacauggccauuga

SEQ ID NO: 1768527 - RNA, 19 nt, Homo sapiens
  misc_RNA (1)...(19): siRNA sense strand
gcagauucguucagagucu

SEQ ID NO: 1768528 - RNA, 19 nt, Homo sapiens
  misc_RNA (1)...(19): siRNA sense strand
agaaagagcaacugaggaa

SEQ ID NO: 1768529 - RNA, 19 nt, Homo sapiens
  misc_RNA (1)...(19): siRNA sense strand
caaauuccacacacucauu

SEQ ID NO: 1768530 - RNA, 19 nt, Homo sapiens
  misc_RNA (1)...(19): siRNA sense strand
gaugcuggauaacuggaaa

SEQ ID NO: 1768531 - RNA, 19 nt, Homo sapiens
  misc_RNA (1)...(19): siRNA sense strand
aagaaaguguccuauuugu

SEQ ID NO: 1768532 - RNA, 19 nt, Homo sapiens
  misc_RNA (1)...(19): siRNA sense strand
gagacuacaagaagaaaga

SEQ ID NO: 1768533 - RNA, 19 nt, Homo sapiens
  misc_RNA (1)...(19): siRNA sense strand
gaacaauugcggagacuac

SEQ ID NO: 1768534 - RNA, 19 nt, Homo sapiens
  misc_RNA (1)...(19): siRNA sense strand
uagcaacuggagagaauua

SEQ ID NO: 1768535 - RNA, 19 nt, Homo sapiens
  misc_RNA (1)...(19): siRNA sense strand
guucauccgucaaguucaa

SEQ ID NO: 1768536 - RNA, 19 nt, Homo sapiens
  misc_RNA (1)...(19): siRNA sense strand
ugugaguacuugauaagaa

SEQ ID NO: 1768537 - RNA, 19 nt, Homo sapiens
  misc_RNA (1)...(19): siRNA sense strand
caacagaucuggcaaaagc

SEQ ID NO: 1768538 - RNA, 19 nt, Homo sapiens
  misc_RNA (1)...(19): siRNA sense strand
gagaaguuccuaccacugu

SEQ ID NO: 1768539 - RNA, 19 nt, Homo sapiens
  misc_RNA (1)...(19): siRNA sense strand
gauauuuccguggcucuua

SEQ ID NO: 1768540 - RNA, 19 nt, Homo sapiens
  misc_RNA (1)...(19): siRNA sense strand
ggucaaaugcuucuguugu

SEQ ID NO: 1768541 - RNA, 19 nt, Homo sapiens
  misc_RNA (1)...(19): siRNA sense strand
caacuggagagaauuauag

SEQ ID NO: 1768542 - RNA, 19 nt, Homo sapiens
  misc_RNA (1)...(19): siRNA sense strand
ccuagcaacuggagagaau

SEQ ID NO: 1768543 - RNA, 19 nt, Homo sapiens
  misc_RNA (1)...(19): siRNA sense strand
guggaaaugggcuuuagua

SEQ ID NO: 1768544 - RNA, 19 nt, Homo sapiens
  misc_RNA (1)...(19): siRNA sense strand
agaagaccauucagaagau

SEQ ID NO: 1768545 - RNA, 19 nt, Homo sapiens
  misc_RNA (1)...(19): siRNA sense strand
ugaaauacgacuugucaug

SEQ ID NO: 1768546 - RNA, 19 nt, Homo sapiens
  misc_RNA (1)...(19): siRNA sense strand
gccaacacguuugaacuga

SEQ ID NO: 1768547 - RNA, 19 nt, Homo sapiens
  misc_RNA (1)...(19): siRNA sense strand
ccuguaaacuccagagcaa

SEQ ID NO: 1768548 - RNA, 19 nt, Homo sapiens
  misc_RNA (1)...(19): siRNA sense strand
uggagagaauuauagacua

SEQ ID NO: 1768549 - RNA, 19 nt, Homo sapiens
  misc_RNA (1)...(19): siRNA sense strand
agaaguguccauaguguuu

SEQ ID NO: 1768550 - RNA, 19 nt, Homo sapiens
  misc_RNA (1)...(19): siRNA sense strand
uaccgaaugucuacguauu

SEQ ID NO: 1768551 - RNA, 19 nt, Homo sapiens
  misc_RNA (1)...(19): siRNA sense strand
gucaaaugcuucuguugug

SEQ ID NO: 1768552 - RNA, 19 nt, Homo sapiens
  misc_RNA (1)...(19): siRNA sense strand
gcagagucaucaauuaucc

SEQ ID NO: 1768553 - RNA, 19 nt, Homo sapiens
  misc_RNA (1)...(19): siRNA sense strand
guucguacauuucuuucau

SEQ ID NO: 1768554 - RNA, 19 nt, Homo sapiens
  misc_RNA (1)...(19): siRNA sense strand
ccaacacguuugaacugaa

SEQ ID NO: 1768555 - RNA, 19 nt, Homo sapiens
  misc_RNA (1)...(19): siRNA sense strand
ggagaagaccauucagaag

SEQ ID NO: 1768556 - RNA, 19 nt, Homo sapiens
  misc_RNA (1)...(19): siRNA sense strand
uaacuggcccucuaguguu

SEQ ID NO: 1768557 - RNA, 19 nt, Homo sapiens
  misc_RNA (1)...(19): siRNA sense strand
uaacugccggaauuauuaa

SEQ ID NO: 1768558 - RNA, 19 nt, Homo sapiens
  misc_RNA (1)...(19): siRNA sense strand
guagaagccugguaaaaca

SEQ ID NO: 1768559 - RNA, 19 nt, Homo sapiens
  misc_RNA (1)...(19): siRNA sense strand
gaaagagcaacugaggaaa

SEQ ID NO: 1768560 - RNA, 19 nt, Homo sapiens
  misc_RNA (1)...(19): siRNA sense strand
gaaaugggcuuuaguagaa

SEQ ID NO: 1768561 - RNA, 19 nt, Homo sapiens
  misc_RNA (1)...(19): siRNA sense strand
gaaagaacauguaaagugu

SEQ ID NO: 1768562 - RNA, 19 nt, Homo sapiens
  misc_RNA (1)...(19): siRNA sense strand
caagagaacugauugauac

SEQ ID NO: 1768563 - RNA, 19 nt, Homo sapiens
  misc_RNA (1)...(19): siRNA sense strand
ucaaugaucuuguguuaga

SEQ ID NO: 1768564 - RNA, 19 nt, Homo sapiens
  misc_RNA (1)...(19): siRNA sense strand
uaacagugaugaugucaaa

SEQ ID NO: 1768565 - RNA, 19 nt, Homo sapiens
  misc_RNA (1)...(19): siRNA sense strand
gcaagagaacugauugaua

SEQ ID NO: 1768566 - RNA, 19 nt, Homo sapiens
  misc_RNA (1)...(19): siRNA sense strand
gaagaaagaacauguaaag

SEQ ID NO: 1768567 - RNA, 19 nt, Homo sapiens
  misc_RNA (1)...(19): siRNA sense strand
gaaaguguccuauuuguag

SEQ ID NO: 1768568 - RNA, 19 nt, Homo sapiens
  misc_RNA (1)...(19): siRNA sense strand
gaaaaugccagauuacuua

SEQ ID NO: 1768569 - RNA, 19 nt, Homo sapiens
  misc_RNA (1)...(19): siRNA sense strand
gaugaauacuccugugauu

SEQ ID NO: 1768570 - RNA, 19 nt, Homo sapiens
  misc_RNA (1)...(19): siRNA sense strand
uaacgaaaaugccagauua

SEQ ID NO: 1768571 - RNA, 19 nt, Homo sapiens
  misc_RNA (1)...(19): siRNA sense strand
caagauacacaguuucuaa

SEQ ID NO: 1768572 - RNA, 19 nt, Homo sapiens
  misc_RNA (1)...(19): siRNA sense strand
cagaacaccugagacauuu

SEQ ID NO: 1768573 - RNA, 19 nt, Homo sapiens
  misc_RNA (1)...(19): siRNA sense strand
ggacucagguguugggaau

SEQ ID NO: 1768574 - RNA, 19 nt, Homo sapiens
  misc_RNA (1)...(19): siRNA sense strand
caacacguuugaacugaaa

SEQ ID NO: 1768575 - RNA, 19 nt, Homo sapiens
  misc_RNA (1)...(19): siRNA sense strand
ggaaaugggcuuuaguaga

SEQ ID NO: 1768576 - RNA, 19 nt, Homo sapiens
  misc_RNA (1)...(19): siRNA sense strand
gagaagaccauucagaaga

SEQ ID NO: 1768577 - RNA, 19 nt, Homo sapiens
  misc_RNA (1)...(19): siRNA sense strand
cauaggaccuggagacaga

SEQ ID NO: 1768578 - RNA, 19 nt, Homo sapiens
  misc_RNA (1)...(19): siRNA sense strand
gaacugauugauacgauuu

SEQ ID NO: 1768579 - RNA, 19 nt, Homo sapiens
  misc_RNA (1)...(19): siRNA sense strand
ggagagaauuauagacuag

SEQ ID NO: 1768580 - RNA, 19 nt, Homo sapiens
  misc_RNA (1)...(19): siRNA sense strand
gaaggauaaugcuauguca

SEQ ID NO: 1768581 - RNA, 19 nt, Homo sapiens
  misc_RNA (1)...(19): siRNA sense strand
ugaauacuccugugauuaa

SEQ ID NO: 1768582 - RNA, 19 nt, Homo sapiens
  misc_RNA (1)...(19): siRNA sense strand
agucaaugaucuuguguua

SEQ ID NO: 1768583 - RNA, 19 nt, Homo sapiens
  misc_RNA (1)...(19): siRNA sense strand
gaacugaaauacgacuugu

SEQ ID NO: 1768584 - RNA, 19 nt, Homo sapiens
  misc_RNA (1)...(19): siRNA sense strand
gaacauguaaaguguguau

SEQ ID NO: 1768585 - RNA, 19 nt, Homo sapiens
  misc_RNA (1)...(19): siRNA sense strand
gauuaaugcugccguggaa

SEQ ID NO: 1768586 - RNA, 19 nt, Homo sapiens
  misc_RNA (1)...(19): siRNA sense strand
gaacuguaccgaaugucua

SEQ ID NO: 1768587 - RNA, 19 nt, Homo sapiens
  misc_RNA (1)...(19): siRNA sense strand
caaugcagaagaugaaaua

SEQ ID NO: 1768588 - RNA, 19 nt, Homo sapiens
  misc_RNA (1)...(19): siRNA sense strand
gaaauacgacuugucaugu

SEQ ID NO: 1768589 - RNA, 19 nt, Homo sapiens
  misc_RNA (1)...(19): siRNA sense strand
agacauggccauugacuuu

SEQ ID NO: 1768590 - RNA, 19 nt, Homo sapiens
  misc_RNA (1)...(19): siRNA sense strand
guuaacaacuuggaagcua

SEQ ID NO: 1768591 - RNA, 19 nt, Homo sapiens
  misc_RNA (1)...(19): siRNA sense strand
ucaagacacuucaagauac

SEQ ID NO: 1768592 - RNA, 19 nt, Homo sapiens
  misc_RNA (1)...(19): siRNA sense strand
agauugugcuccuucuuua

SEQ ID NO: 1768593 - RNA, 19 nt, Homo sapiens
  misc_RNA (1)...(19): siRNA sense strand
acaaagaaguguccauagu

SEQ ID NO: 1768594 - RNA, 19 nt, Homo sapiens
  misc_RNA (1)...(19): siRNA sense strand
gcaacuggagagaauuaua

SEQ ID NO: 1768595 - RNA, 19 nt, Homo sapiens
  misc_RNA (1)...(19): siRNA sense strand
uaagaaaguguccuauuug

SEQ ID NO: 1768596 - RNA, 19 nt, Homo sapiens
  misc_RNA (1)...(19): siRNA sense strand
caagaagaaagaacaugua

SEQ ID NO: 1768597 - RNA, 19 nt, Homo sapiens
  misc_RNA (1)...(19): siRNA sense strand
cugaagcuguguuauauga

SEQ ID NO: 1768598 - RNA, 19 nt, Homo sapiens
  misc_RNA (1)...(19): siRNA sense strand
gaaaagcgccaacacguuu

SEQ ID NO: 1768599 - RNA, 19 nt, Homo sapiens
  misc_RNA (1)...(19): siRNA sense strand
cuaacugccggaauuauua

SEQ ID NO: 1768600 - RNA, 19 nt, Homo sapiens
  misc_RNA (1)...(19): siRNA sense strand
caacauuugacuuguguaa

SEQ ID NO: 1768601 - RNA, 19 nt, Homo sapiens
  misc_RNA (1)...(19): siRNA sense strand
gauacacaguuucuaaucu

SEQ ID NO: 1768602 - RNA, 19 nt, Homo sapiens
  misc_RNA (1)...(19): siRNA sense strand
aaagaaguguccauagugu

SEQ ID NO: 1768603 - RNA, 19 nt, Homo sapiens
  misc_RNA (1)...(19): siRNA sense strand
acacagacgucuuuacaag

SEQ ID NO: 1768604 - RNA, 19 nt, Homo sapiens
  misc_RNA (1)...(19): siRNA sense strand
aaugcagagucaucaauua

SEQ ID NO: 1768605 - RNA, 19 nt, Homo sapiens
  misc_RNA (1)...(19): siRNA sense strand
agaaagaacauguaaagug

SEQ ID NO: 1768606 - RNA, 19 nt, Homo sapiens
  misc_RNA (1)...(19): siRNA sense strand
ggauaaugcuaugucagaa

SEQ ID NO: 1768607 - RNA, 19 nt, Homo sapiens
  misc_RNA (1)...(19): siRNA sense strand
cuaguaguaugcaaagauu

SEQ ID NO: 1768608 - RNA, 19 nt, Homo sapiens
  misc_RNA (1)...(19): siRNA sense strand
gagaacugauugauacgau

SEQ ID NO: 1768609 - RNA, 19 nt, Homo sapiens
  misc_RNA (1)...(19): siRNA sense strand
caugugaacuguaccgaau

SEQ ID NO: 1768610 - RNA, 19 nt, Homo sapiens
  misc_RNA (1)...(19): siRNA sense strand
caagacacuucaagauaca

SEQ ID NO: 1768611 - RNA, 19 nt, Homo sapiens
  misc_RNA (1)...(19): siRNA sense strand
gugaugaugucaaaugcuu

SEQ ID NO: 1768612 - RNA, 19 nt, Homo sapiens
  misc_RNA (1)...(19): siRNA sense strand
gaaguguccauaguguuua

SEQ ID NO: 1768613 - RNA, 19 nt, Homo sapiens
  misc_RNA (1)...(19): siRNA sense strand
cacagaagauguuucagau

SEQ ID NO: 1768614 - RNA, 19 nt, Homo sapiens
  misc_RNA (1)...(19): siRNA sense strand
ucuacuaacugccggaauu

SEQ ID NO: 1768615 - RNA, 19 nt, Homo sapiens
  misc_RNA (1)...(19): siRNA sense strand
gaacagcugcuauccacau

SEQ ID NO: 1768616 - RNA, 19 nt, Homo sapiens
  misc_RNA (1)...(19): siRNA sense strand
ggaagaggagagagaaaga

SEQ ID NO: 1768617 - RNA, 19 nt, Homo sapiens
  misc_RNA (1)...(19): siRNA sense strand
caaagaaguguccauagug

SEQ ID NO: 1768618 - RNA, 19 nt, Homo sapiens
  misc_RNA (1)...(19): siRNA sense strand
ccacagaagauguuucaga

SEQ ID NO: 1768619 - RNA, 19 nt, Homo sapiens
  misc_RNA (1)...(19): siRNA sense strand
gaaccgaaggauaaugcua

SEQ ID NO: 1768620 - RNA, 19 nt, Homo sapiens
  misc_RNA (1)...(19): siRNA sense strand
uaaaguguguauggacaaa

SEQ ID NO: 1768621 - RNA, 19 nt, Homo sapiens
  misc_RNA (1)...(19): siRNA sense strand
aaacagacaguucagagaa

SEQ ID NO: 1768622 - RNA, 19 nt, Homo sapiens
  misc_RNA (1)...(19): siRNA sense strand
gaagaccauucagaagaug

SEQ ID NO: 1768623 - RNA, 19 nt, Homo sapiens
  misc_RNA (1)...(19): siRNA sense strand
caucaaauccuguaaacuc

SEQ ID NO: 1768624 - RNA, 19 nt, Homo sapiens
  misc_RNA (1)...(19): siRNA sense strand
gaauacuccugugauuaau

SEQ ID NO: 1768625 - RNA, 19 nt, Homo sapiens
  misc_RNA (1)...(19): siRNA sense strand
gugaguacuugauaagaau

SEQ ID NO: 1768626 - RNA, 19 nt, Homo sapiens
  misc_RNA (1)...(19): siRNA sense strand
uuucagacauggccauuga

SEQ ID NO: 1768627 - RNA, 19 nt, Homo sapiens
  misc_RNA (1)...(19): siRNA sense strand
gcagauucguucagagucu

SEQ ID NO: 1768628 - RNA, 19 nt, Homo sapiens
  misc_RNA (1)...(19): siRNA sense strand
agaaagagcaacugaggaa

SEQ ID NO: 1768629 - RNA, 19 nt, Homo sapiens
  misc_RNA (1)...(19): siRNA sense strand
caaauuccacacacucauu

SEQ ID NO: 1768630 - RNA, 19 nt, Homo sapiens
  misc_RNA (1)...(19): siRNA sense strand
gaugcuggauaacuggaaa

SEQ ID NO: 1768631 - RNA, 19 nt, Homo sapiens
  misc_RNA (1)...(19): siRNA sense strand
aagaaaguguccuauuugu

SEQ ID NO: 1768632 - RNA, 19 nt, Homo sapiens
  misc_RNA (1)...(19): siRNA sense strand
gagacuacaagaagaaaga

SEQ ID NO: 1768633 - RNA, 19 nt, Homo sapiens
  misc_RNA (1)...(19): siRNA sense strand
gaacaauugcggagacuac

SEQ ID NO: 1768634 - RNA, 19 nt, Homo sapiens
  misc_RNA (1)...(19): siRNA sense strand
uagcaacuggagagaauua

SEQ ID NO: 1768635 - RNA, 19 nt, Homo sapiens
  misc_RNA (1)...(19): siRNA sense strand
guucauccgucaaguucaa

SEQ ID NO: 1768636 - RNA, 19 nt, Homo sapiens
  misc_RNA (1)...(19): siRNA sense strand
ugugaguacuugauaagaa

SEQ ID NO: 1768637 - RNA, 19 nt, Homo sapiens
  misc_RNA (1)...(19): siRNA sense strand
caacagaucuggcaaaagc

SEQ ID NO: 1768638 - RNA, 19 nt, Homo sapiens
  misc_RNA (1)...(19): siRNA sense strand
gagaaguuccuaccacugu

SEQ ID NO: 1768639 - RNA, 19 nt, Homo sapiens
  misc_RNA (1)...(19): siRNA sense strand
gauauuuccguggcucuua

SEQ ID NO: 1768640 - RNA, 19 nt, Homo sapiens
  misc_RNA (1)...(19): siRNA sense strand
ggucaaaugcuucuguugu

SEQ ID NO: 1768641 - RNA, 19 nt, Homo sapiens
  misc_RNA (1)...(19): siRNA sense strand
caacuggagagaauuauag

SEQ ID NO: 1768642 - RNA, 19 nt, Homo sapiens
  misc_RNA (1)...(19): siRNA sense strand
ccuagcaacuggagagaau

SEQ ID NO: 1768643 - RNA, 19 nt, Homo sapiens
  misc_RNA (1)...(19): siRNA sense strand
guggaaaugggcuuuagua

SEQ ID NO: 1768644 - RNA, 19 nt, Homo sapiens
  misc_RNA (1)...(19): siRNA sense strand
agaagaccauucagaagau

SEQ ID NO: 1768645 - RNA, 19 nt, Homo sapiens
  misc_RNA (1)...(19): siRNA sense strand
ugaaauacgacuugucaug

SEQ ID NO: 1768646 - RNA, 19 nt, Homo sapiens
  misc_RNA (1)...(19): siRNA sense strand
gccaacacguuugaacuga

SEQ ID NO: 1768647 - RNA, 19 nt, Homo sapiens
  misc_RNA (1)...(19): siRNA sense strand
ccuguaaacuccagagcaa

SEQ ID NO: 1768648 - RNA, 19 nt, Homo sapiens
  misc_RNA (1)...(19): siRNA sense strand
uggagagaauuauagacua

SEQ ID NO: 1768649 - RNA, 19 nt, Homo sapiens
  misc_RNA (1)...(19): siRNA sense strand
agaaguguccauaguguuu

SEQ ID NO: 1768650 - RNA, 19 nt, Homo sapiens
  misc_RNA (1)...(19): siRNA sense strand
uaccgaaugucuacguauu

SEQ ID NO: 1768651 - RNA, 19 nt, Homo sapiens
  misc_RNA (1)...(19): siRNA sense strand
gucaaaugcuucuguugug

SEQ ID NO: 1768652 - RNA, 19 nt, Homo sapiens
  misc_RNA (1)...(19): siRNA sense strand
gcagagucaucaauuaucc

SEQ ID NO: 1768653 - RNA, 19 nt, Homo sapiens
  misc_RNA (1)...(19): siRNA sense strand
guucguacauuucuuucau

SEQ ID NO: 1768654 - RNA, 19 nt, Homo sapiens
  misc_RNA (1)...(19): siRNA sense strand
ccaacacguuugaacugaa

SEQ ID NO: 1768655 - RNA, 19 nt, Homo sapiens
  misc_RNA (1)...(19): siRNA sense strand
ggagaagaccauucagaag

SEQ ID NO: 1768656 - RNA, 19 nt, Homo sapiens
  misc_RNA (1)...(19): siRNA sense strand
uaacuggcccucuaguguu

SEQ ID NO: 1768657 - RNA, 19 nt, Homo sapiens
  misc_RNA (1)...(19): siRNA sense strand
uaacugccggaauuauuaa

SEQ ID NO: 1768658 - RNA, 19 nt, Homo sapiens
  misc_RNA (1)...(19): siRNA sense strand
guagaagccugguaaaaca

SEQ ID NO: 1768659 - RNA, 19 nt, Homo sapiens
  misc_RNA (1)...(19): siRNA sense strand
gaaagagcaacugaggaaa

SEQ ID NO: 1768660 - RNA, 19 nt, Homo sapiens
  misc_RNA (1)...(19): siRNA sense strand
gaaaugggcuuuaguagaa

SEQ ID NO: 1768661 - RNA, 19 nt, Homo sapiens
  misc_RNA (1)...(19): siRNA sense strand
gaaagaacauguaaagugu

SEQ ID NO: 1768662 - RNA, 19 nt, Homo sapiens
  misc_RNA (1)...(19): siRNA sense strand
caagagaacugauugauac

SEQ ID NO: 1768663 - RNA, 19 nt, Homo sapiens
  misc_RNA (1)...(19): siRNA sense strand
ucaaugaucuuguguuaga

SEQ ID NO: 1768664 - RNA, 19 nt, Homo sapiens
  misc_RNA (1)...(19): siRNA sense strand
uaacagugaugaugucaaa

SEQ ID NO: 1768665 - RNA, 19 nt, Homo sapiens
  misc_RNA (1)...(19): siRNA sense strand
gcaagagaacugauugaua

SEQ ID NO: 1768666 - RNA, 19 nt, Homo sapiens
  misc_RNA (1)...(19): siRNA sense strand
gaagaaagaacauguaaag

SEQ ID NO: 1768667 - RNA, 19 nt, Homo sapiens
  misc_RNA (1)...(19): siRNA sense strand
gaaaguguccuauuuguag

SEQ ID NO: 1768668 - RNA, 19 nt, Homo sapiens
  misc_RNA (1)...(19): siRNA sense strand
gaaaaugccagauuacuua

SEQ ID NO: 1768669 - RNA, 19 nt, Homo sapiens
  misc_RNA (1)...(19): siRNA sense strand
gaugaauacuccugugauu

SEQ ID NO: 1768670 - RNA, 19 nt, Homo sapiens
  misc_RNA (1)...(19): siRNA sense strand
uaacgaaaaugccagauua

SEQ ID NO: 1768671 - RNA, 19 nt, Homo sapiens
  misc_RNA (1)...(19): siRNA sense strand
caagauacacaguuucuaa

SEQ ID NO: 1768672 - RNA, 19 nt, Homo sapiens
  misc_RNA (1)...(19): siRNA sense strand
cagaacaccugagacauuu

SEQ ID NO: 1768673 - RNA, 19 nt, Homo sapiens
  misc_RNA (1)...(19): siRNA sense strand
ggacucagguguugggaau

SEQ ID NO: 1768674 - RNA, 19 nt, Homo sapiens
  misc_RNA (1)...(19): siRNA sense strand
caacacguuugaacugaaa

SEQ ID NO: 1768675 - RNA, 19 nt, Homo sapiens
  misc_RNA (1)...(19): siRNA sense strand
ggaaaugggcuuuaguaga

SEQ ID NO: 1768676 - RNA, 19 nt, Homo sapiens
  misc_RNA (1)...(19): siRNA sense strand
gagaagaccauucagaaga

SEQ ID NO: 1768677 - RNA, 19 nt, Homo sapiens
  misc_RNA (1)...(19): siRNA sense strand
cauaggaccuggagacaga

SEQ ID NO: 1768678 - RNA, 19 nt, Homo sapiens
  misc_RNA (1)...(19): siRNA sense strand
gaacugauugauacgauuu

SEQ ID NO: 1768679 - RNA, 19 nt, Homo sapiens
  misc_RNA (1)...(19): siRNA sense strand
ggagagaauuauagacuag

SEQ ID NO: 1768680 - RNA, 19 nt, Homo sapiens
  misc_RNA (1)...(19): siRNA sense strand
gaaggauaaugcuauguca

SEQ ID NO: 1768681 - RNA, 19 nt, Homo sapiens
  misc_RNA (1)...(19): siRNA sense strand
ugaauacuccugugauuaa

SEQ ID NO: 1768682 - RNA, 19 nt, Homo sapiens
  misc_RNA (1)...(19): siRNA sense strand
agucaaugaucuuguguua

SEQ ID NO: 1768683 - RNA, 19 nt, Homo sapiens
  misc_RNA (1)...(19): siRNA sense strand
gaacugaaauacgacuugu

SEQ ID NO: 1768684 - RNA, 19 nt, Homo sapiens
  misc_RNA (1)...(19): siRNA sense strand
gaacauguaaaguguguau

SEQ ID NO: 1768685 - RNA, 19 nt, Homo sapiens
  misc_RNA (1)...(19): siRNA sense strand
gauuaaugcugccguggaa

SEQ ID NO: 1768686 - RNA, 19 nt, Homo sapiens
  misc_RNA (1)...(19): siRNA sense strand
gaacuguaccgaaugucua

SEQ ID NO: 1768687 - RNA, 19 nt, Homo sapiens
  misc_RNA (1)...(19): siRNA sense strand
caaugcagaagaugaaaua

SEQ ID NO: 1768688 - RNA, 19 nt, Homo sapiens
  misc_RNA (1)...(19): siRNA sense strand
gaaauacgacuugucaugu

SEQ ID NO: 1768689 - RNA, 19 nt, Homo sapiens
  misc_RNA (1)...(19): siRNA sense strand
agacauggccauugacuuu

SEQ ID NO: 1768690 - RNA, 19 nt, Homo sapiens
  misc_RNA (1)...(19): siRNA sense strand
guuaacaacuuggaagcua

SEQ ID NO: 1768691 - RNA, 19 nt, Homo sapiens
  misc_RNA (1)...(19): siRNA sense strand
ucaagacacuucaagauac

SEQ ID NO: 1768692 - RNA, 19 nt, Homo sapiens
  misc_RNA (1)...(19): siRNA sense strand
agauugugcuccuucuuua

SEQ ID NO: 1768693 - RNA, 19 nt, Homo sapiens
  misc_RNA (1)...(19): siRNA sense strand
acaaagaaguguccauagu

SEQ ID NO: 1768694 - RNA, 19 nt, Homo sapiens
  misc_RNA (1)...(19): siRNA sense strand
gcaacuggagagaauuaua

SEQ ID NO: 1768695 - RNA, 19 nt, Homo sapiens
  misc_RNA (1)...(19): siRNA sense strand
uaagaaaguguccuauuug

SEQ ID NO: 1768696 - RNA, 19 nt, Homo sapiens
  misc_RNA (1)...(19): siRNA sense strand
caagaagaaagaacaugua

SEQ ID NO: 1768697 - RNA, 19 nt, Homo sapiens
  misc_RNA (1)...(19): siRNA sense strand
cugaagcuguguuauauga

SEQ ID NO: 1768698 - RNA, 19 nt, Homo sapiens
  misc_RNA (1)...(19): siRNA sense strand
gaaaagcgccaacacguuu

SEQ ID NO: 1768699 - RNA, 19 nt, Homo sapiens
  misc_RNA (1)...(19): siRNA sense strand
cuaacugccggaauuauua

SEQ ID NO: 1768700 - RNA, 19 nt, Homo sapiens
  misc_RNA (1)...(19): siRNA sense strand
caacauuugacuuguguaa

SEQ ID NO: 1768701 - RNA, 19 nt, Homo sapiens
  misc_RNA (1)...(19): siRNA sense strand
gauacacaguuucuaaucu

SEQ ID NO: 1768702 - RNA, 19 nt, Homo sapiens
  misc_RNA (1)...(19): siRNA sense strand
aaagaaguguccauagugu

SEQ ID NO: 1768703 - RNA, 19 nt, Homo sapiens
  misc_RNA (1)...(19): siRNA sense strand
acacagacgucuuuacaag

SEQ ID NO: 1768704 - RNA, 19 nt, Homo sapiens
  misc_RNA (1)...(19): siRNA sense strand
aaugcagagucaucaauua

SEQ ID NO: 1768705 - RNA, 19 nt, Homo sapiens
  misc_RNA (1)...(19): siRNA sense strand
agaaagaacauguaaagug

SEQ ID NO: 1768706 - RNA, 19 nt, Homo sapiens
  misc_RNA (1)...(19): siRNA sense strand
ggauaaugcuaugucagaa

SEQ ID NO: 1768707 - RNA, 19 nt, Homo sapiens
  misc_RNA (1)...(19): siRNA sense strand
cuaguaguaugcaaagauu

SEQ ID NO: 1768708 - RNA, 19 nt, Homo sapiens
  misc_RNA (1)...(19): siRNA sense strand
gagaacugauugauacgau

SEQ ID NO: 1768709 - RNA, 19 nt, Homo sapiens
  misc_RNA (1)...(19): siRNA sense strand
caugugaacuguaccgaau

SEQ ID NO: 1768710 - RNA, 19 nt, Homo sapiens
  misc_RNA (1)...(19): siRNA sense strand
caagacacuucaagauaca

SEQ ID NO: 1768711 - RNA, 19 nt, Homo sapiens
  misc_RNA (1)...(19): siRNA sense strand
gugaugaugucaaaugcuu

SEQ ID NO: 1768712 - RNA, 19 nt, Homo sapiens
  misc_RNA (1)...(19): siRNA sense strand
gaaguguccauaguguuua

SEQ ID NO: 1768713 - RNA, 19 nt, Homo sapiens
  misc_RNA (1)...(19): siRNA sense strand
cacagaagauguuucagau

SEQ ID NO: 1768714 - RNA, 19 nt, Homo sapiens
  misc_RNA (1)...(19): siRNA sense strand
ucuacuaacugccggaauu

SEQ ID NO: 1768715 - RNA, 19 nt, Homo sapiens
  misc_RNA (1)...(19): siRNA sense strand
gaacagcugcuauccacau

SEQ ID NO: 1768716 - RNA, 19 nt, Homo sapiens
  misc_RNA (1)...(19): siRNA sense strand
ggaagaggagagagaaaga

SEQ ID NO: 1768717 - RNA, 19 nt, Homo sapiens
  misc_RNA (1)...(19): siRNA sense strand
caaagaaguguccauagug

SEQ ID NO: 1768718 - RNA, 19 nt, Homo sapiens
  misc_RNA (1)...(19): siRNA sense strand
ccacagaagauguuucaga

SEQ ID NO: 1768719 - RNA, 19 nt, Homo sapiens
  misc_RNA (1)...(19): siRNA sense strand
gaaccgaaggauaaugcua

SEQ ID NO: 1768720 - RNA, 19 nt, Homo sapiens
  misc_RNA (1)...(19): siRNA sense strand
uaaaguguguauggacaaa

SEQ ID NO: 1768721 - RNA, 19 nt, Homo sapiens
  misc_RNA (1)...(19): siRNA sense strand
aaacagacaguucagagaa

SEQ ID NO: 1768722 - RNA, 19 nt, Homo sapiens
  misc_RNA (1)...(19): siRNA sense strand
gaagaccauucagaagaug

SEQ ID NO: 1768723 - RNA, 19 nt, Homo sapiens
  misc_RNA (1)...(19): siRNA sense strand
caucaaauccuguaaacuc

SEQ ID NO: 1768724 - RNA, 19 nt, Homo sapiens
  misc_RNA (1)...(19): siRNA sense strand
gaauacuccugugauuaau

SEQ ID NO: 1768725 - RNA, 19 nt, Homo sapiens
  misc_RNA (1)...(19): siRNA sense strand
gugaguacuugauaagaau

SEQ ID NO: 1768726 - RNA, 19 nt, Homo sapiens
  misc_RNA (1)...(19): siRNA sense strand
uuucagacauggccauuga

SEQ ID NO: 1768727 - RNA, 19 nt, Homo sapiens
  misc_RNA (1)...(19): siRNA sense strand
gcagauucguucagagucu

SEQ ID NO: 1768728 - RNA, 19 nt, Homo sapiens
  misc_RNA (1)...(19): siRNA sense strand
agaaagagcaacugaggaa

SEQ ID NO: 1768729 - RNA, 19 nt, Homo sapiens
  misc_RNA (1)...(19): siRNA sense strand
caaauuccacacacucauu

SEQ ID NO: 1768730 - RNA, 19 nt, Homo sapiens
  misc_RNA (1)...(19): siRNA sense strand
gaugcuggauaacuggaaa

SEQ ID NO: 1768731 - RNA, 19 nt, Homo sapiens
  misc_RNA (1)...(19): siRNA sense strand
aagaaaguguccuauuugu

SEQ ID NO: 1768732 - RNA, 19 nt, Homo sapiens
  misc_RNA (1)...(19): siRNA sense strand
gagacuacaagaagaaaga

SEQ ID NO: 1768733 - RNA, 19 nt, Homo sapiens
  misc_RNA (1)...(19): siRNA sense strand
gaacaauugcggagacuac

SEQ ID NO: 1768734 - RNA, 19 nt, Homo sapiens
  misc_RNA (1)...(19): siRNA sense strand
uagcaacuggagagaauua

SEQ ID NO: 1768735 - RNA, 19 nt, Homo sapiens
  misc_RNA (1)...(19): siRNA sense strand
guucauccgucaaguucaa

SEQ ID NO: 1768736 - RNA, 19 nt, Homo sapiens
  misc_RNA (1)...(19): siRNA sense strand
ugugaguacuugauaagaa

SEQ ID NO: 1768737 - RNA, 19 nt, Homo sapiens
  misc_RNA (1)...(19): siRNA sense strand
caacagaucuggcaaaagc

SEQ ID NO: 1768738 - RNA, 19 nt, Homo sapiens
  misc_RNA (1)...(19): siRNA sense strand
gagaaguuccuaccacugu

SEQ ID NO: 1768739 - RNA, 19 nt, Homo sapiens
  misc_RNA (1)...(19): siRNA sense strand
gauauuuccguggcucuua

SEQ ID NO: 1768740 - RNA, 19 nt, Homo sapiens
  misc_RNA (1)...(19): siRNA sense strand
ggucaaaugcuucuguugu

SEQ ID NO: 1768741 - RNA, 19 nt, Homo sapiens
  misc_RNA (1)...(19): siRNA sense strand
caacuggagagaauuauag

SEQ ID NO: 1768742 - RNA, 19 nt, Homo sapiens
  misc_RNA (1)...(19): siRNA sense strand
ccuagcaacuggagagaau

SEQ ID NO: 1768743 - RNA, 19 nt, Homo sapiens
  misc_RNA (1)...(19): siRNA sense strand
guggaaaugggcuuuagua

SEQ ID NO: 1768744 - RNA, 19 nt, Homo sapiens
  misc_RNA (1)...(19): siRNA sense strand
agaagaccauucagaagau

SEQ ID NO: 1768745 - RNA, 19 nt, Homo sapiens
  misc_RNA (1)...(19): siRNA sense strand
ugaaauacgacuugucaug

SEQ ID NO: 1768746 - RNA, 19 nt, Homo sapiens
  misc_RNA (1)...(19): siRNA sense strand
gccaacacguuugaacuga

SEQ ID NO: 1768747 - RNA, 19 nt, Homo sapiens
  misc_RNA (1)...(19): siRNA sense strand
ccuguaaacuccagagcaa

SEQ ID NO: 1768748 - RNA, 19 nt, Homo sapiens
  misc_RNA (1)...(19): siRNA sense strand
uggagagaauuauagacua

SEQ ID NO: 1768749 - RNA, 19 nt, Homo sapiens
  misc_RNA (1)...(19): siRNA sense strand
agaaguguccauaguguuu

SEQ ID NO: 1768750 - RNA, 19 nt, Homo sapiens
  misc_RNA (1)...(19): siRNA sense strand
uaccgaaugucuacguauu

SEQ ID NO: 1768751 - RNA, 19 nt, Homo sapiens
  misc_RNA (1)...(19): siRNA sense strand
gucaaaugcuucuguugug

SEQ ID NO: 1768752 - RNA, 19 nt, Homo sapiens
  misc_RNA (1)...(19): siRNA sense strand
gcagagucaucaauuaucc

SEQ ID NO: 1768753 - RNA, 19 nt, Homo sapiens
  misc_RNA (1)...(19): siRNA sense strand
guucguacauuucuuucau

SEQ ID NO: 1768754 - RNA, 19 nt, Homo sapiens
  misc_RNA (1)...(19): siRNA sense strand
ccaacacguuugaacugaa

SEQ ID NO: 1768755 - RNA, 19 nt, Homo sapiens
  misc_RNA (1)...(19): siRNA sense strand
ggagaagaccauucagaag

SEQ ID NO: 1768756 - RNA, 19 nt, Homo sapiens
  misc_RNA (1)...(19): siRNA sense strand
uaacuggcccucuaguguu

SEQ ID NO: 1768757 - RNA, 19 nt, Homo sapiens
  misc_RNA (1)...(19): siRNA sense strand
uaacugccggaauuauuaa

SEQ ID NO: 1768758 - RNA, 19 nt, Homo sapiens
  misc_RNA (1)...(19): siRNA sense strand
guagaagccugguaaaaca

SEQ ID NO: 1768759 - RNA, 19 nt, Homo sapiens
  misc_RNA (1)...(19): siRNA sense strand
gaaagagcaacugaggaaa

SEQ ID NO: 1768760 - RNA, 19 nt, Homo sapiens
  misc_RNA (1)...(19): siRNA sense strand
gaaaugggcuuuaguagaa

SEQ ID NO: 1768761 - RNA, 19 nt, Homo sapiens
  misc_RNA (1)...(19): siRNA sense strand
gaaagaacauguaaagugu

SEQ ID NO: 1768762 - RNA, 19 nt, Homo sapiens
  misc_RNA (1)...(19): siRNA sense strand
caagagaacugauugauac

SEQ ID NO: 1768763 - RNA, 19 nt, Homo sapiens
  misc_RNA (1)...(19): siRNA sense strand
ucaaugaucuuguguuaga

SEQ ID NO: 1768764 - RNA, 19 nt, Homo sapiens
  misc_RNA (1)...(19): siRNA sense strand
uaacagugaugaugucaaa

SEQ ID NO: 1768765 - RNA, 19 nt, Homo sapiens
  misc_RNA (1)...(19): siRNA sense strand
gcaagagaacugauugaua

SEQ ID NO: 1768766 - RNA, 19 nt, Homo sapiens
  misc_RNA (1)...(19): siRNA sense strand
gaagaaagaacauguaaag

SEQ ID NO: 1768767 - RNA, 19 nt, Homo sapiens
  misc_RNA (1)...(19): siRNA sense strand
gaaaguguccuauuuguag

SEQ ID NO: 1768768 - RNA, 19 nt, Homo sapiens
  misc_RNA (1)...(19): siRNA sense strand
gaaaaugccagauuacuua

SEQ ID NO: 1768769 - RNA, 19 nt, Homo sapiens
  misc_RNA (1)...(19): siRNA sense strand
gaugaauacuccugugauu

SEQ ID NO: 1768770 - RNA, 19 nt, Homo sapiens
  misc_RNA (1)...(19): siRNA sense strand
uaacgaaaaugccagauua

SEQ ID NO: 1768771 - RNA, 19 nt, Homo sapiens
  misc_RNA (1)...(19): siRNA sense strand
caagauacacaguuucuaa

SEQ ID NO: 1768772 - RNA, 19 nt, Homo sapiens
  misc_RNA (1)...(19): siRNA sense strand
cagaacaccugagacauuu

SEQ ID NO: 1768773 - RNA, 19 nt, Homo sapiens
  misc_RNA (1)...(19): siRNA sense strand
ggacucagguguugggaau

SEQ ID NO: 1768774 - RNA, 19 nt, Homo sapiens
  misc_RNA (1)...(19): siRNA sense strand
caacacguuugaacugaaa

SEQ ID NO: 1768775 - RNA, 19 nt, Homo sapiens
  misc_RNA (1)...(19): siRNA sense strand
ggaaaugggcuuuaguaga

SEQ ID NO: 1768776 - RNA, 19 nt, Homo sapiens
  misc_RNA (1)...(19): siRNA sense strand
gagaagaccauucagaaga

SEQ ID NO: 1768777 - RNA, 19 nt, Homo sapiens
  misc_RNA (1)...(19): siRNA sense strand
cauaggaccuggagacaga

SEQ ID NO: 1768778 - RNA, 19 nt, Homo sapiens
  misc_RNA (1)...(19): siRNA sense strand
gaacugauugauacgauuu

SEQ ID NO: 1768779 - RNA, 19 nt, Homo sapiens
  misc_RNA (1)...(19): siRNA sense strand
ggagagaauuauagacuag

SEQ ID NO: 1768780 - RNA, 19 nt, Homo sapiens
  misc_RNA (1)...(19): siRNA sense strand
gaaggauaaugcuauguca

SEQ ID NO: 1768781 - RNA, 19 nt, Homo sapiens
  misc_RNA (1)...(19): siRNA sense strand
ugaauacuccugugauuaa

SEQ ID NO: 1768782 - RNA, 19 nt, Homo sapiens
  misc_RNA (1)...(19): siRNA sense strand
agucaaugaucuuguguua

SEQ ID NO: 1768783 - RNA, 19 nt, Homo sapiens
  misc_RNA (1)...(19): siRNA sense strand
gaacugaaauacgacuugu

SEQ ID NO: 1768784 - RNA, 19 nt, Homo sapiens
  misc_RNA (1)...(19): siRNA sense strand
gaacauguaaaguguguau

SEQ ID NO: 1768785 - RNA, 19 nt, Homo sapiens
  misc_RNA (1)...(19): siRNA sense strand
gauuaaugcugccguggaa

SEQ ID NO: 1768786 - RNA, 19 nt, Homo sapiens
  misc_RNA (1)...(19): siRNA sense strand
gaacuguaccgaaugucua

SEQ ID NO: 1768787 - RNA, 19 nt, Homo sapiens
  misc_RNA (1)...(19): siRNA sense strand
caaugcagaagaugaaaua

SEQ ID NO: 1768788 - RNA, 19 nt, Homo sapiens
  misc_RNA (1)...(19): siRNA sense strand
gaaauacgacuugucaugu

SEQ ID NO: 1768789 - RNA, 19 nt, Homo sapiens
  misc_RNA (1)...(19): siRNA sense strand
agacauggccauugacuuu

SEQ ID NO: 1768790 - RNA, 19 nt, Homo sapiens
  misc_RNA (1)...(19): siRNA sense strand
guuaacaacuuggaagcua

SEQ ID NO: 1768791 - RNA, 19 nt, Homo sapiens
  misc_RNA (1)...(19): siRNA sense strand
ucaagacacuucaagauac

SEQ ID NO: 1768792 - RNA, 19 nt, Homo sapiens
  misc_RNA (1)...(19): siRNA sense strand
agauugugcuccuucuuua

SEQ ID NO: 1768793 - RNA, 19 nt, Homo sapiens
  misc_RNA (1)...(19): siRNA sense strand
acaaagaaguguccauagu

SEQ ID NO: 1768794 - RNA, 19 nt, Homo sapiens
  misc_RNA (1)...(19): siRNA sense strand
gcaacuggagagaauuaua

SEQ ID NO: 1768795 - RNA, 19 nt, Homo sapiens
  misc_RNA (1)...(19): siRNA sense strand
uaagaaaguguccuauuug

SEQ ID NO: 1768796 - RNA, 19 nt, Homo sapiens
  misc_RNA (1)...(19): siRNA sense strand
caagaagaaagaacaugua

SEQ ID NO: 1768797 - RNA, 19 nt, Homo sapiens
  misc_RNA (1)...(19): siRNA sense strand
cugaagcuguguuauauga

SEQ ID NO: 1768798 - RNA, 19 nt, Homo sapiens
  misc_RNA (1)...(19): siRNA sense strand
gaaaagcgccaacacguuu

SEQ ID NO: 1768799 - RNA, 19 nt, Homo sapiens
  misc_RNA (1)...(19): siRNA sense strand
cuaacugccggaauuauua

SEQ ID NO: 1768800 - RNA, 19 nt, Homo sapiens
  misc_RNA (1)...(19): siRNA sense strand
caacauuugacuuguguaa

SEQ ID NO: 1768801 - RNA, 19 nt, Homo sapiens
  misc_RNA (1)...(19): siRNA sense strand
gauacacaguuucuaaucu

SEQ ID NO: 1768802 - RNA, 19 nt, Homo sapiens
  misc_RNA (1)...(19): siRNA sense strand
aaagaaguguccauagugu

SEQ ID NO: 1768803 - RNA, 19 nt, Homo sapiens
  misc_RNA (1)...(19): siRNA sense strand
acacagacgucuuuacaag

SEQ ID NO: 1768804 - RNA, 19 nt, Homo sapiens
  misc_RNA (1)...(19): siRNA sense strand
aaugcagagucaucaauua

SEQ ID NO: 1768805 - RNA, 19 nt, Homo sapiens
  misc_RNA (1)...(19): siRNA sense strand
agaaagaacauguaaagug

SEQ ID NO: 1768806 - RNA, 19 nt, Homo sapiens
  misc_RNA (1)...(19): siRNA sense strand
ggauaaugcuaugucagaa

SEQ ID NO: 1768807 - RNA, 19 nt, Homo sapiens
  misc_RNA (1)...(19): siRNA sense strand
cuaguaguaugcaaagauu

SEQ ID NO: 1768808 - RNA, 19 nt, Homo sapiens
  misc_RNA (1)...(19): siRNA sense strand
gagaacugauugauacgau

SEQ ID NO: 1768809 - RNA, 19 nt, Homo sapiens
  misc_RNA (1)...(19): siRNA sense strand
caugugaacuguaccgaau

SEQ ID NO: 1768810 - RNA, 19 nt, Homo sapiens
  misc_RNA (1)...(19): siRNA sense strand
caagacacuucaagauaca

SEQ ID NO: 1768811 - RNA, 19 nt, Homo sapiens
  misc_RNA (1)...(19): siRNA sense strand
gugaugaugucaaaugcuu

SEQ ID NO: 1768812 - RNA, 19 nt, Homo sapiens
  misc_RNA (1)...(19): siRNA sense strand
gaaguguccauaguguuua

SEQ ID NO: 1768813 - RNA, 19 nt, Homo sapiens
  misc_RNA (1)...(19): siRNA sense strand
cacagaagauguuucagau

SEQ ID NO: 1768814 - RNA, 19 nt, Homo sapiens
  misc_RNA (1)...(19): siRNA sense strand
ucuacuaacugccggaauu

SEQ ID NO: 1768815 - RNA, 19 nt, Homo sapiens
  misc_RNA (1)...(19): siRNA sense strand
gaacagcugcuauccacau

SEQ ID NO: 1768816 - RNA, 19 nt, Homo sapiens
  misc_RNA (1)...(19): siRNA sense strand
ggaagaggagagagaaaga

SEQ ID NO: 1768817 - RNA, 19 nt, Homo sapiens
  misc_RNA (1)...(19): siRNA sense strand
caaagaaguguccauagug

SEQ ID NO: 1768818 - RNA, 19 nt, Homo sapiens
  misc_RNA (1)...(19): siRNA sense strand
ccacagaagauguuucaga

SEQ ID NO: 1768819 - RNA, 19 nt, Homo sapiens
  misc_RNA (1)...(19): siRNA sense strand
gaaccgaaggauaaugcua

SEQ ID NO: 1768820 - RNA, 19 nt, Homo sapiens
  misc_RNA (1)...(19): siRNA sense strand
uaaaguguguauggacaaa

SEQ ID NO: 1768821 - RNA, 19 nt, Homo sapiens
  misc_RNA (1)...(19): siRNA sense strand
aaacagacaguucagagaa

SEQ ID NO: 1768822 - RNA, 19 nt, Homo sapiens
  misc_RNA (1)...(19): siRNA sense strand
gaagaccauucagaagaug

SEQ ID NO: 1768823 - RNA, 19 nt, Homo sapiens
  misc_RNA (1)...(19): siRNA sense strand
caucaaauccuguaaacuc

SEQ ID NO: 1768824 - RNA, 19 nt, Homo sapiens
  misc_RNA (1)...(19): siRNA sense strand
gaauacuccugugauuaau

SEQ ID NO: 1768825 - RNA, 19 nt, Homo sapiens
  misc_RNA (1)...(19): siRNA sense strand
gugaguacuugauaagaau

SEQ ID NO: 1768826 - RNA, 19 nt, Homo sapiens
  misc_RNA (1)...(19): siRNA sense strand
uuucagacauggccauuga

SEQ ID NO: 1768827 - RNA, 19 nt, Homo sapiens
  misc_RNA (1)...(19): siRNA sense strand
gcagauucguucagagucu

SEQ ID NO: 1768828 - RNA, 19 nt, Homo sapiens
  misc_RNA (1)...(19): siRNA sense strand
agaaagagcaacugaggaa

SEQ ID NO: 1768829 - RNA, 19 nt, Homo sapiens
  misc_RNA (1)...(19): siRNA sense strand
caaauuccacacacucauu

SEQ ID NO: 1768830 - RNA, 19 nt, Homo sapiens
  misc_RNA (1)...(19): siRNA sense strand
gaugcuggauaacuggaaa

SEQ ID NO: 1768831 - RNA, 19 nt, Homo sapiens
  misc_RNA (1)...(19): siRNA sense strand
aagaaaguguccuauuugu

SEQ ID NO: 1768832 - RNA, 19 nt, Homo sapiens
  misc_RNA (1)...(19): siRNA sense strand
gagacuacaagaagaaaga

SEQ ID NO: 1768833 - RNA, 19 nt, Homo sapiens
  misc_RNA (1)...(19): siRNA sense strand
gaacaauugcggagacuac

SEQ ID NO: 1768834 - RNA, 19 nt, Homo sapiens
  misc_RNA (1)...(19): siRNA sense strand
uagcaacuggagagaauua

SEQ ID NO: 1768835 - RNA, 19 nt, Homo sapiens
  misc_RNA (1)...(19): siRNA sense strand
guucauccgucaaguucaa

SEQ ID NO: 1768836 - RNA, 19 nt, Homo sapiens
  misc_RNA (1)...(19): siRNA sense strand
ugugaguacuugauaagaa

SEQ ID NO: 1768837 - RNA, 19 nt, Homo sapiens
  misc_RNA (1)...(19): siRNA sense strand
caacagaucuggcaaaagc

SEQ ID NO: 1768838 - RNA, 19 nt, Homo sapiens
  misc_RNA (1)...(19): siRNA sense strand
gagaaguuccuaccacugu

SEQ ID NO: 1768839 - RNA, 19 nt, Homo sapiens
  misc_RNA (1)...(19): siRNA sense strand
gauauuuccguggcucuua

SEQ ID NO: 1768840 - RNA, 19 nt, Homo sapiens
  misc_RNA (1)...(19): siRNA sense strand
ggucaaaugcuucuguugu

SEQ ID NO: 1768841 - RNA, 19 nt, Homo sapiens
  misc_RNA (1)...(19): siRNA sense strand
caacuggagagaauuauag

SEQ ID NO: 1768842 - RNA, 19 nt, Homo sapiens
  misc_RNA (1)...(19): siRNA sense strand
ccuagcaacuggagagaau

SEQ ID NO: 1768843 - RNA, 19 nt, Homo sapiens
  misc_RNA (1)...(19): siRNA sense strand
guggaaaugggcuuuagua

SEQ ID NO: 1768844 - RNA, 19 nt, Homo sapiens
  misc_RNA (1)...(19): siRNA sense strand
agaagaccauucagaagau

SEQ ID NO: 1768845 - RNA, 19 nt, Homo sapiens
  misc_RNA (1)...(19): siRNA sense strand
ugaaauacgacuugucaug

SEQ ID NO: 1768846 - RNA, 19 nt, Homo sapiens
  misc_RNA (1)...(19): siRNA sense strand
gccaacacguuugaacuga

SEQ ID NO: 1768847 - RNA, 19 nt, Homo sapiens
  misc_RNA (1)...(19): siRNA sense strand
ccuguaaacuccagagcaa

SEQ ID NO: 1768848 - RNA, 19 nt, Homo sapiens
  misc_RNA (1)...(19): siRNA sense strand
uggagagaauuauagacua

SEQ ID NO: 1768849 - RNA, 19 nt, Homo sapiens
  misc_RNA (1)...(19): siRNA sense strand
agaaguguccauaguguuu

SEQ ID NO: 1768850 - RNA, 19 nt, Homo sapiens
  misc_RNA (1)...(19): siRNA sense strand
uaccgaaugucuacguauu

SEQ ID NO: 1768851 - RNA, 19 nt, Homo sapiens
  misc_RNA (1)...(19): siRNA sense strand
gucaaaugcuucuguugug

SEQ ID NO: 1768852 - RNA, 19 nt, Homo sapiens
  misc_RNA (1)...(19): siRNA sense strand
gcagagucaucaauuaucc

SEQ ID NO: 1768853 - RNA, 19 nt, Homo sapiens
  misc_RNA (1)...(19): siRNA sense strand
guucguacauuucuuucau

SEQ ID NO: 1768854 - RNA, 19 nt, Homo sapiens
  misc_RNA (1)...(19): siRNA sense strand
ccaacacguuugaacugaa

SEQ ID NO: 1768855 - RNA, 19 nt, Homo sapiens
  misc_RNA (1)...(19): siRNA sense strand
ggagaagaccauucagaag

SEQ ID NO: 1768856 - RNA, 19 nt, Homo sapiens
  misc_RNA (1)...(19): siRNA sense strand
uaacuggcccucuaguguu

SEQ ID NO: 1768857 - RNA, 19 nt, Homo sapiens
  misc_RNA (1)...(19): siRNA sense strand
uaacugccggaauuauuaa

SEQ ID NO: 1768858 - RNA, 19 nt, Homo sapiens
  misc_RNA (1)...(19): siRNA sense strand
guagaagccugguaaaaca

SEQ ID NO: 1768859 - RNA, 19 nt, Homo sapiens
  misc_RNA (1)...(19): siRNA sense strand
gaaagagcaacugaggaaa

SEQ ID NO: 1768860 - RNA, 19 nt, Homo sapiens
  misc_RNA (1)...(19): siRNA sense strand
gcagagaucccuucuauga

SEQ ID NO: 1768861 - RNA, 19 nt, Homo sapiens
  misc_RNA (1)...(19): siRNA sense strand
gaaagaaauucaacaugga

SEQ ID NO: 1768862 - RNA, 19 nt, Homo sapiens
  misc_RNA (1)...(19): siRNA sense strand
ggaauucaguuucuaauag

SEQ ID NO: 1768863 - RNA, 19 nt, Homo sapiens
  misc_RNA (1)...(19): siRNA sense strand
ggagaaggccuaaauaaga

SEQ ID NO: 1768864 - RNA, 19 nt, Homo sapiens
  misc_RNA (1)...(19): siRNA sense strand
gaagauugaucgcaugaug

SEQ ID NO: 1768865 - RNA, 19 nt, Homo sapiens
  misc_RNA (1)...(19): siRNA sense strand
cagcagagaucccuucuau

SEQ ID NO: 1768866 - RNA, 19 nt, Homo sapiens
  misc_RNA (1)...(19): siRNA sense strand
gaagaccucucauuagaag

SEQ ID NO: 1768867 - RNA, 19 nt, Homo sapiens
  misc_RNA (1)...(19): siRNA sense strand
ggaaucaucccguuggaaa

SEQ ID NO: 1768868 - RNA, 19 nt, Homo sapiens
  misc_RNA (1)...(19): siRNA sense strand
uugagaggcugaaauauga

SEQ ID NO: 1768869 - RNA, 19 nt, Homo sapiens
  misc_RNA (1)...(19): siRNA sense strand
cugaagaccucucauuaga

SEQ ID NO: 1768870 - RNA, 19 nt, Homo sapiens
  misc_RNA (1)...(19): siRNA sense strand
cagaagacgucgcccaguu

SEQ ID NO: 1768871 - RNA, 19 nt, Homo sapiens
  misc_RNA (1)...(19): siRNA sense strand
gaacgagccauuuaagauc

SEQ ID NO: 1768872 - RNA, 19 nt, Homo sapiens
  misc_RNA (1)...(19): siRNA sense strand
gcugaaauaugaaauugca

SEQ ID NO: 1768873 - RNA, 19 nt, Homo sapiens
  misc_RNA (1)...(19): siRNA sense strand
uaaaggagaaggccuaaau

SEQ ID NO: 1768874 - RNA, 19 nt, Homo sapiens
  misc_RNA (1)...(19): siRNA sense strand
gaauuuguaugagagcauu

SEQ ID NO: 1768875 - RNA, 19 nt, Homo sapiens
  misc_RNA (1)...(19): siRNA sense strand
gagaaggccuaaauaagac

SEQ ID NO: 1768876 - RNA, 19 nt, Homo sapiens
  misc_RNA (1)...(19): siRNA sense strand
ggaacuuauugaugacauu

SEQ ID NO: 1768877 - RNA, 19 nt, Homo sapiens
  misc_RNA (1)...(19): siRNA sense strand
gggaauucaguuucuaaua

SEQ ID NO: 1768878 - RNA, 19 nt, Homo sapiens
  misc_RNA (1)...(19): siRNA sense strand
gaaaaugaccugcuacaga

SEQ ID NO: 1768879 - RNA, 19 nt, Homo sapiens
  misc_RNA (1)...(19): siRNA sense strand
gugaaagggaugaauuuaa

SEQ ID NO: 1768880 - RNA, 19 nt, Homo sapiens
  misc_RNA (1)...(19): siRNA sense strand
uaaauaagaccgucauugg

SEQ ID NO: 1768881 - RNA, 19 nt, Homo sapiens
  misc_RNA (1)...(19): siRNA sense strand
cugaggagcugcugaggaa

SEQ ID NO: 1768882 - RNA, 19 nt, Homo sapiens
  misc_RNA (1)...(19): siRNA sense strand
gauggaggcuuucgcuucu

SEQ ID NO: 1768883 - RNA, 19 nt, Homo sapiens
  misc_RNA (1)...(19): siRNA sense strand
uaacugccucuauuacuuu

SEQ ID NO: 1768884 - RNA, 19 nt, Homo sapiens
  misc_RNA (1)...(19): siRNA sense strand
ggugaaagggaugaauuua

SEQ ID NO: 1768885 - RNA, 19 nt, Homo sapiens
  misc_RNA (1)...(19): siRNA sense strand
gccugaagaccucucauua

SEQ ID NO: 1768886 - RNA, 19 nt, Homo sapiens
  misc_RNA (1)...(19): siRNA sense strand
agagaucccuucuaugaca

SEQ ID NO: 1768887 - RNA, 19 nt, Homo sapiens
  misc_RNA (1)...(19): siRNA sense strand
uugcagaggugaugacaga

SEQ ID NO: 1768888 - RNA, 19 nt, Homo sapiens
  misc_RNA (1)...(19): siRNA sense strand
gcauuaagaacgagccauu

SEQ ID NO: 1768889 - RNA, 19 nt, Homo sapiens
  misc_RNA (1)...(19): siRNA sense strand
gggaggcgcagaagauuga

SEQ ID NO: 1768890 - RNA, 19 nt, Homo sapiens
  misc_RNA (1)...(19): siRNA sense strand
gaaggaggaguggaugaaa

SEQ ID NO: 1768891 - RNA, 19 nt, Homo sapiens
  misc_RNA (1)...(19): siRNA sense strand
acauugagaggcugaaaua

SEQ ID NO: 1768892 - RNA, 19 nt, Homo sapiens
  misc_RNA (1)...(19): siRNA sense strand
aaaggagaaggccuaaaua

SEQ ID NO: 1768893 - RNA, 19 nt, Homo sapiens
  misc_RNA (1)...(19): siRNA sense strand
gaacuuauugaugacauug

SEQ ID NO: 1768894 - RNA, 19 nt, Homo sapiens
  misc_RNA (1)...(19): siRNA sense strand
ccgauaacugccucuauua

SEQ ID NO: 1768895 - RNA, 19 nt, Homo sapiens
  misc_RNA (1)...(19): siRNA sense strand
gaggagcugcugaggaauu

SEQ ID NO: 1768896 - RNA, 19 nt, Homo sapiens
  misc_RNA (1)...(19): siRNA sense strand
ggaagaaagaaauucaaca

SEQ ID NO: 1768897 - RNA, 19 nt, Homo sapiens
  misc_RNA (1)...(19): siRNA sense strand
ucgcccaguuccuuuauaa

SEQ ID NO: 1768898 - RNA, 19 nt, Homo sapiens
  misc_RNA (1)...(19): siRNA sense strand
ucagaggaacaaacagaua

SEQ ID NO: 1768899 - RNA, 19 nt, Homo sapiens
  misc_RNA (1)...(19): siRNA sense strand
aaagggaauucaguuucua

SEQ ID NO: 1768900 - RNA, 19 nt, Homo sapiens
  misc_RNA (1)...(19): siRNA sense strand
aaggagaaggccuaaauaa

SEQ ID NO: 1768901 - RNA, 19 nt, Homo sapiens
  misc_RNA (1)...(19): siRNA sense strand
gcagaggugaugacagaga

SEQ ID NO: 1768902 - RNA, 19 nt, Homo sapiens
  misc_RNA (1)...(19): siRNA sense strand
auaacugccucuauuacuu

SEQ ID NO: 1768903 - RNA, 19 nt, Homo sapiens
  misc_RNA (1)...(19): siRNA sense strand
gcaaaacgacucagaggaa

SEQ ID NO: 1768904 - RNA, 19 nt, Homo sapiens
  misc_RNA (1)...(19): siRNA sense strand
gcaacgaggaaacgaagga

SEQ ID NO: 1768905 - RNA, 19 nt, Homo sapiens
  misc_RNA (1)...(19): siRNA sense strand
gggugaaagggaugaauuu

SEQ ID NO: 1768906 - RNA, 19 nt, Homo sapiens
  misc_RNA (1)...(19): siRNA sense strand
uguaugagagcauuaagaa

SEQ ID NO: 1768907 - RNA, 19 nt, Homo sapiens
  misc_RNA (1)...(19): siRNA sense strand
gaaauugcagaggugauga

SEQ ID NO: 1768908 - RNA, 19 nt, Homo sapiens
  misc_RNA (1)...(19): siRNA sense strand
auuaagaacgagccauuua

SEQ ID NO: 1768909 - RNA, 19 nt, Homo sapiens
  misc_RNA (1)...(19): siRNA sense strand
accgauaacugccucuauu

SEQ ID NO: 1768910 - RNA, 19 nt, Homo sapiens
  misc_RNA (1)...(19): siRNA sense strand
gguucauccugaccgauaa

SEQ ID NO: 1768911 - RNA, 19 nt, Homo sapiens
  misc_RNA (1)...(19): siRNA sense strand
gagaaggaggaguggauga

SEQ ID NO: 1768912 - RNA, 19 nt, Homo sapiens
  misc_RNA (1)...(19): siRNA sense strand
cgacucagaggaacaaaca

SEQ ID NO: 1768913 - RNA, 19 nt, Homo sapiens
  misc_RNA (1)...(19): siRNA sense strand
acaaagggcaggucaucaa

SEQ ID NO: 1768914 - RNA, 19 nt, Homo sapiens
  misc_RNA (1)...(19): siRNA sense strand
gagaggcugaaauaugaaa

SEQ ID NO: 1768915 - RNA, 19 nt, Homo sapiens
  misc_RNA (1)...(19): siRNA sense strand
agaacgagccauuuaagau

SEQ ID NO: 1768916 - RNA, 19 nt, Homo sapiens
  misc_RNA (1)...(19): siRNA sense strand
gaggcugaaauaugaaauu

SEQ ID NO: 1768917 - RNA, 19 nt, Homo sapiens
  misc_RNA (1)...(19): siRNA sense strand
cugaggaauuuguaugaga

SEQ ID NO: 1768918 - RNA, 19 nt, Homo sapiens
  misc_RNA (1)...(19): siRNA sense strand
cuaaauaagaccgucauug

SEQ ID NO: 1768919 - RNA, 19 nt, Homo sapiens
  misc_RNA (1)...(19): siRNA sense strand
gauaacugccucuauuacu

SEQ ID NO: 1768920 - RNA, 19 nt, Homo sapiens
  misc_RNA (1)...(19): siRNA sense strand
uaagaacgagccauuuaag

SEQ ID NO: 1768921 - RNA, 19 nt, Homo sapiens
  misc_RNA (1)...(19): siRNA sense strand
ugaagaccucucauuagaa

SEQ ID NO: 1768922 - RNA, 19 nt, Homo sapiens
  misc_RNA (1)...(19): siRNA sense strand
uugcugaucucaaccuugu

SEQ ID NO: 1768923 - RNA, 19 nt, Homo sapiens
  misc_RNA (1)...(19): siRNA sense strand
gggacuaccugggugaaag

SEQ ID NO: 1768924 - RNA, 19 nt, Homo sapiens
  misc_RNA (1)...(19): siRNA sense strand
aggcugaaauaugaaauug

SEQ ID NO: 1768925 - RNA, 19 nt, Homo sapiens
  misc_RNA (1)...(19): siRNA sense strand
cagaggugaugacagagau

SEQ ID NO: 1768926 - RNA, 19 nt, Homo sapiens
  misc_RNA (1)...(19): siRNA sense strand
cgugcuacgugcugucauu

SEQ ID NO: 1768927 - RNA, 19 nt, Homo sapiens
  misc_RNA (1)...(19): siRNA sense strand
gaugacagagaucgacaau

SEQ ID NO: 1768928 - RNA, 19 nt, Homo sapiens
  misc_RNA (1)...(19): siRNA sense strand
aaggaggaguggaugaaau

SEQ ID NO: 1768929 - RNA, 19 nt, Homo sapiens
  misc_RNA (1)...(19): siRNA sense strand
acagauagccaugggaaga

SEQ ID NO: 1768930 - RNA, 19 nt, Homo sapiens
  misc_RNA (1)...(19): siRNA sense strand
ucccuucuaugacauguug

SEQ ID NO: 1768931 - RNA, 19 nt, Homo sapiens
  misc_RNA (1)...(19): siRNA sense strand
cuacaaucccagccacaaa

SEQ ID NO: 1768932 - RNA, 19 nt, Homo sapiens
  misc_RNA (1)...(19): siRNA sense strand
cagaagauugaucgcauga

SEQ ID NO: 1768933 - RNA, 19 nt, Homo sapiens
  misc_RNA (1)...(19): siRNA sense strand
ccacaaagggcaggucauc

SEQ ID NO: 1768934 - RNA, 19 nt, Homo sapiens
  misc_RNA (1)...(19): siRNA sense strand
cagaggaacaaacagauag

SEQ ID NO: 1768935 - RNA, 19 nt, Homo sapiens
  misc_RNA (1)...(19): siRNA sense strand
gagcugcugaggaauuugu

SEQ ID NO: 1768936 - RNA, 19 nt, Homo sapiens
  misc_RNA (1)...(19): siRNA sense strand
agauagccaugggaagaaa

SEQ ID NO: 1768937 - RNA, 19 nt, Homo sapiens
  misc_RNA (1)...(19): siRNA sense strand
aggagcugcugaggaauuu

SEQ ID NO: 1768938 - RNA, 19 nt, Homo sapiens
  misc_RNA (1)...(19): siRNA sense strand
gagaucccuucuaugacau

SEQ ID NO: 1768939 - RNA, 19 nt, Homo sapiens
  misc_RNA (1)...(19): siRNA sense strand
ugaaauugcagaggugaug

SEQ ID NO: 1768940 - RNA, 19 nt, Homo sapiens
  misc_RNA (1)...(19): siRNA sense strand
gugguggcgugccugaaga

SEQ ID NO: 1768941 - RNA, 19 nt, Homo sapiens
  misc_RNA (1)...(19): siRNA sense strand
gccaguaucagcagagauc

SEQ ID NO: 1768942 - RNA, 19 nt, Homo sapiens
  misc_RNA (1)...(19): siRNA sense strand
ccugaagaccucucauuag

SEQ ID NO: 1768943 - RNA, 19 nt, Homo sapiens
  misc_RNA (1)...(19): siRNA sense strand
aauagaaaaugaccugcua

SEQ ID NO: 1768944 - RNA, 19 nt, Homo sapiens
  misc_RNA (1)...(19): siRNA sense strand
guucuucaagccuuuguug

SEQ ID NO: 1768945 - RNA, 19 nt, Homo sapiens
  misc_RNA (1)...(19): siRNA sense strand
aagaacgagccauuuaaga

SEQ ID NO: 1768946 - RNA, 19 nt, Homo sapiens
  misc_RNA (1)...(19): siRNA sense strand
gcugaggaauuuguaugag

SEQ ID NO: 1768947 - RNA, 19 nt, Homo sapiens
  misc_RNA (1)...(19): siRNA sense strand
caaagggcaggucaucaag

SEQ ID NO: 1768948 - RNA, 19 nt, Homo sapiens
  misc_RNA (1)...(19): siRNA sense strand
aaacgacucagaggaacaa

SEQ ID NO: 1768949 - RNA, 19 nt, Homo sapiens
  misc_RNA (1)...(19): siRNA sense strand
acgaggaaacgaaggauug

SEQ ID NO: 1768950 - RNA, 19 nt, Homo sapiens
  misc_RNA (1)...(19): siRNA sense strand
gccaugggaagaaagaaau

SEQ ID NO: 1768951 - RNA, 19 nt, Homo sapiens
  misc_RNA (1)...(19): siRNA sense strand
gaauacacaacagauaagg

SEQ ID NO: 1768952 - RNA, 19 nt, Homo sapiens
  misc_RNA (1)...(19): siRNA sense strand
cugccucuauuacuuugaa

SEQ ID NO: 1768953 - RNA, 19 nt, Homo sapiens
  misc_RNA (1)...(19): siRNA sense strand
gaccgauaacugccucuau

SEQ ID NO: 1768954 - RNA, 19 nt, Homo sapiens
  misc_RNA (1)...(19): siRNA sense strand
gggaagaaagaaauucaac

SEQ ID NO: 1768955 - RNA, 19 nt, Homo sapiens
  misc_RNA (1)...(19): siRNA sense strand
acaccagccuccacaacca

SEQ ID NO: 1768956 - RNA, 19 nt, Homo sapiens
  misc_RNA (1)...(19): siRNA sense strand
gucauucgccaucaucaug

SEQ ID NO: 1768957 - RNA, 19 nt, Homo sapiens
  misc_RNA (1)...(19): siRNA sense strand
uccaugaguuugcugaucu

SEQ ID NO: 1768958 - RNA, 19 nt, Homo sapiens
  misc_RNA (1)...(19): siRNA sense strand
cagauagccaugggaagaa

SEQ ID NO: 1768959 - RNA, 19 nt, Homo sapiens
  misc_RNA (1)...(19): siRNA sense strand
cauuaagaacgagccauuu

SEQ ID NO: 1768960 - RNA, 19 nt, Homo sapiens
  misc_RNA (1)...(19): siRNA sense strand
uaucagggcuuuaauggaa

SEQ ID NO: 1768961 - RNA, 19 nt, Homo sapiens
  misc_RNA (1)...(19): siRNA sense strand
uggaauggaucgugauuau

SEQ ID NO: 1768962 - RNA, 19 nt, Homo sapiens
  misc_RNA (1)...(19): siRNA sense strand
gaauggaucgugauuaugg

SEQ ID NO: 1768963 - RNA, 19 nt, Homo sapiens
  misc_RNA (1)...(19): siRNA sense strand
gaauacuuaucagggcuuu

SEQ ID NO: 1768964 - RNA, 19 nt, Homo sapiens
  misc_RNA (1)...(19): siRNA sense strand
ggacuucgaggacgauuac

SEQ ID NO: 1768965 - RNA, 19 nt, Homo sapiens
  misc_RNA (1)...(19): siRNA sense strand
gggcuuuaauggaauggau

SEQ ID NO: 1768966 - RNA, 19 nt, Homo sapiens
  misc_RNA (1)...(19): siRNA sense strand
auacuuaucagggcuuuaa

SEQ ID NO: 1768967 - RNA, 19 nt, Homo sapiens
  misc_RNA (1)...(19): siRNA sense strand
ggaauggaucgugauuaug

SEQ ID NO: 1768968 - RNA, 19 nt, Homo sapiens
  misc_RNA (1)...(19): siRNA sense strand
gauuauggcccuggaucuu

SEQ ID NO: 1768969 - RNA, 19 nt, Homo sapiens
  misc_RNA (1)...(19): siRNA sense strand
uuauggcccuggaucuuau

SEQ ID NO: 1768970 - RNA, 19 nt, Homo sapiens
  misc_RNA (1)...(19): siRNA sense strand
ucagggcuuuaauggaaug

SEQ ID NO: 1768971 - RNA, 19 nt, Homo sapiens
  misc_RNA (1)...(19): siRNA sense strand
ccgccugcaggaauacuua

SEQ ID NO: 1768972 - RNA, 19 nt, Homo sapiens
  misc_RNA (1)...(19): siRNA sense strand
cacuccgccugcaggaaua

SEQ ID NO: 1768973 - RNA, 19 nt, Homo sapiens
  misc_RNA (1)...(19): siRNA sense strand
uaucagggcuuuaauggaa

SEQ ID NO: 1768974 - RNA, 19 nt, Homo sapiens
  misc_RNA (1)...(19): siRNA sense strand
uggaauggaucgugauuau

SEQ ID NO: 1768975 - RNA, 19 nt, Homo sapiens
  misc_RNA (1)...(19): siRNA sense strand
gaauggaucgugauuaugg

SEQ ID NO: 1768976 - RNA, 19 nt, Homo sapiens
  misc_RNA (1)...(19): siRNA sense strand
gaauacuuaucagggcuuu

SEQ ID NO: 1768977 - RNA, 19 nt, Homo sapiens
  misc_RNA (1)...(19): siRNA sense strand
ggacuucgaggacgauuac

SEQ ID NO: 1768978 - RNA, 19 nt, Homo sapiens
  misc_RNA (1)...(19): siRNA sense strand
gggcuuuaauggaauggau

SEQ ID NO: 1768979 - RNA, 19 nt, Homo sapiens
  misc_RNA (1)...(19): siRNA sense strand
auacuuaucagggcuuuaa

SEQ ID NO: 1768980 - RNA, 19 nt, Homo sapiens
  misc_RNA (1)...(19): siRNA sense strand
ggaauggaucgugauuaug

SEQ ID NO: 1768981 - RNA, 19 nt, Homo sapiens
  misc_RNA (1)...(19): siRNA sense strand
gauuauggcccuggaucuu

SEQ ID NO: 1768982 - RNA, 19 nt, Homo sapiens
  misc_RNA (1)...(19): siRNA sense strand
uuauggcccuggaucuuau

SEQ ID NO: 1768983 - RNA, 19 nt, Homo sapiens
  misc_RNA (1)...(19): siRNA sense strand
ucagggcuuuaauggaaug

SEQ ID NO: 1768984 - RNA, 19 nt, Homo sapiens
  misc_RNA (1)...(19): siRNA sense strand
ccgccugcaggaauacuua

SEQ ID NO: 1768985 - RNA, 19 nt, Homo sapiens
  misc_RNA (1)...(19): siRNA sense strand
cacuccgccugcaggaaua

SEQ ID NO: 1768986 - RNA, 19 nt, Homo sapiens
  misc_RNA (1)...(19): siRNA sense strand
uaucagggcuuuaauggaa

SEQ ID NO: 1768987 - RNA, 19 nt, Homo sapiens
  misc_RNA (1)...(19): siRNA sense strand
uggaauggaucgugauuau

SEQ ID NO: 1768988 - RNA, 19 nt, Homo sapiens
  misc_RNA (1)...(19): siRNA sense strand
gaauggaucgugauuaugg

SEQ ID NO: 1768989 - RNA, 19 nt, Homo sapiens
  misc_RNA (1)...(19): siRNA sense strand
gaauacuuaucagggcuuu

SEQ ID NO: 1768990 - RNA, 19 nt, Homo sapiens
  misc_RNA (1)...(19): siRNA sense strand
ggacuucgaggacgauuac

SEQ ID NO: 1768991 - RNA, 19 nt, Homo sapiens
  misc_RNA (1)...(19): siRNA sense strand
gggcuuuaauggaauggau

SEQ ID NO: 1768992 - RNA, 19 nt, Homo sapiens
  misc_RNA (1)...(19): siRNA sense strand
auacuuaucagggcuuuaa

SEQ ID NO: 1768993 - RNA, 19 nt, Homo sapiens
  misc_RNA (1)...(19): siRNA sense strand
ggaauggaucgugauuaug

SEQ ID NO: 1768994 - RNA, 19 nt, Homo sapiens
  misc_RNA (1)...(19): siRNA sense strand
gauuauggcccuggaucuu

SEQ ID NO: 1768995 - RNA, 19 nt, Homo sapiens
  misc_RNA (1)...(19): siRNA sense strand
uuauggcccuggaucuuau

SEQ ID NO: 1768996 - RNA, 19 nt, Homo sapiens
  misc_RNA (1)...(19): siRNA sense strand
ucagggcuuuaauggaaug

SEQ ID NO: 1768997 - RNA, 19 nt, Homo sapiens
  misc_RNA (1)...(19): siRNA sense strand
ccgccugcaggaauacuua

SEQ ID NO: 1768998 - RNA, 19 nt, Homo sapiens
  misc_RNA (1)...(19): siRNA sense strand
cacuccgccugcaggaaua

SEQ ID NO: 1768999 - RNA, 19 nt, Homo sapiens
  misc_RNA (1)...(19): siRNA sense strand
uaucagggcuuuaauggaa

SEQ ID NO: 1769000 - RNA, 19 nt, Homo sapiens
  misc_RNA (1)...(19): siRNA sense strand
uggaauggaucgugauuau

SEQ ID NO: 1769001 - RNA, 19 nt, Homo sapiens
  misc_RNA (1)...(19): siRNA sense strand
gaauggaucgugauuaugg

SEQ ID NO: 1769002 - RNA, 19 nt, Homo sapiens
  misc_RNA (1)...(19): siRNA sense strand
gaauacuuaucagggcuuu

SEQ ID NO: 1769003 - RNA, 19 nt, Homo sapiens
  misc_RNA (1)...(19): siRNA sense strand
ggacuucgaggacgauuac

SEQ ID NO: 1769004 - RNA, 19 nt, Homo sapiens
  misc_RNA (1)...(19): siRNA sense strand
gggcuuuaauggaauggau

SEQ ID NO: 1769005 - RNA, 19 nt, Homo sapiens
  misc_RNA (1)...(19): siRNA sense strand
auacuuaucagggcuuuaa

SEQ ID NO: 1769006 - RNA, 19 nt, Homo sapiens
  misc_RNA (1)...(19): siRNA sense strand
ggaauggaucgugauuaug

SEQ ID NO: 1769007 - RNA, 19 nt, Homo sapiens
  misc_RNA (1)...(19): siRNA sense strand
gauuauggcccuggaucuu

SEQ ID NO: 1769008 - RNA, 19 nt, Homo sapiens
  misc_RNA (1)...(19): siRNA sense strand
uuauggcccuggaucuuau

SEQ ID NO: 1769009 - RNA, 19 nt, Homo sapiens
  misc_RNA (1)...(19): siRNA sense strand
ucagggcuuuaauggaaug

SEQ ID NO: 1769010 - RNA, 19 nt, Homo sapiens
  misc_RNA (1)...(19): siRNA sense strand
ccgccugcaggaauacuua

SEQ ID NO: 1769011 - RNA, 19 nt, Homo sapiens
  misc_RNA (1)...(19): siRNA sense strand
cacuccgccugcaggaaua

SEQ ID NO: 1769012 - RNA, 19 nt, Homo sapiens
  misc_RNA (1)...(19): siRNA sense strand
ccaaagaaucggcaaauga

SEQ ID NO: 1769013 - RNA, 19 nt, Homo sapiens
  misc_RNA (1)...(19): siRNA sense strand
gcaugucccugugggugaa

SEQ ID NO: 1769014 - RNA, 19 nt, Homo sapiens
  misc_RNA (1)...(19): siRNA sense strand
aagauguucucccucaaga

SEQ ID NO: 1769015 - RNA, 19 nt, Homo sapiens
  misc_RNA (1)...(19): siRNA sense strand
aacaaucgcugcccucucu

SEQ ID NO: 1769016 - RNA, 19 nt, Homo sapiens
  misc_RNA (1)...(19): siRNA sense strand
guaaucauuccuuccacaa

SEQ ID NO: 1769017 - RNA, 19 nt, Homo sapiens
  misc_RNA (1)...(19): siRNA sense strand
ucuuagaugucaagcugaa

SEQ ID NO: 1769018 - RNA, 19 nt, Homo sapiens
  misc_RNA (1)...(19): siRNA sense strand
aaacaaacaagaggacugu

SEQ ID NO: 1769019 - RNA, 19 nt, Homo sapiens
  misc_RNA (1)...(19): siRNA sense strand
aaucauuccuuccacaacu

SEQ ID NO: 1769020 - RNA, 19 nt, Homo sapiens
  misc_RNA (1)...(19): siRNA sense strand
caagauguucucccucaag

SEQ ID NO: 1769021 - RNA, 19 nt, Homo sapiens
  misc_RNA (1)...(19): siRNA sense strand
uuccacaacugcugcaugu

SEQ ID NO: 1769022 - RNA, 19 nt, Homo sapiens
  misc_RNA (1)...(19): siRNA sense strand
cguggaagacggagaggaa

SEQ ID NO: 1769023 - RNA, 19 nt, Homo sapiens
  misc_RNA (1)...(19): siRNA sense strand
uccaaagaaucggcaaaug

SEQ ID NO: 1769024 - RNA, 19 nt, Homo sapiens
  misc_RNA (1)...(19): siRNA sense strand
acaaacaagaggacugugu

SEQ ID NO: 1769025 - RNA, 19 nt, Homo sapiens
  misc_RNA (1)...(19): siRNA sense strand
acaagauguucucccucaa

SEQ ID NO: 1769026 - RNA, 19 nt, Homo sapiens
  misc_RNA (1)...(19): siRNA sense strand
aagauguucucccucaaga

SEQ ID NO: 1769027 - RNA, 19 nt, Homo sapiens
  misc_RNA (1)...(19): siRNA sense strand
caagauguucucccucaag

SEQ ID NO: 1769028 - RNA, 19 nt, Homo sapiens
  misc_RNA (1)...(19): siRNA sense strand
cguggaagacggagaggaa

SEQ ID NO: 1769029 - RNA, 19 nt, Homo sapiens
  misc_RNA (1)...(19): siRNA sense strand
acaagauguucucccucaa

SEQ ID NO: 1769030 - RNA, 19 nt, Homo sapiens
  misc_RNA (1)...(19): siRNA sense strand
aagauguucucccucaaga

SEQ ID NO: 1769031 - RNA, 19 nt, Homo sapiens
  misc_RNA (1)...(19): siRNA sense strand
guaaucauuccuuccacaa

SEQ ID NO: 1769032 - RNA, 19 nt, Homo sapiens
  misc_RNA (1)...(19): siRNA sense strand
ucuuagaugucaagcugaa

SEQ ID NO: 1769033 - RNA, 19 nt, Homo sapiens
  misc_RNA (1)...(19): siRNA sense strand
aaacaaacaagaggacugu

SEQ ID NO: 1769034 - RNA, 19 nt, Homo sapiens
  misc_RNA (1)...(19): siRNA sense strand
aaucauuccuuccacaacu

SEQ ID NO: 1769035 - RNA, 19 nt, Homo sapiens
  misc_RNA (1)...(19): siRNA sense strand
caagauguucucccucaag

SEQ ID NO: 1769036 - RNA, 19 nt, Homo sapiens
  misc_RNA (1)...(19): siRNA sense strand
uuccacaacugcugcaugu

SEQ ID NO: 1769037 - RNA, 19 nt, Homo sapiens
  misc_RNA (1)...(19): siRNA sense strand
cguggaagacggagaggaa

SEQ ID NO: 1769038 - RNA, 19 nt, Homo sapiens
  misc_RNA (1)...(19): siRNA sense strand
acaaacaagaggacugugu

SEQ ID NO: 1769039 - RNA, 19 nt, Homo sapiens
  misc_RNA (1)...(19): siRNA sense strand
acaagauguucucccucaa

SEQ ID NO: 1769040 - RNA, 19 nt, Homo sapiens
  misc_RNA (1)...(19): siRNA sense strand
gcagaagaaugggauauuu

SEQ ID NO: 1769041 - RNA, 19 nt, Homo sapiens
  misc_RNA (1)...(19): siRNA sense strand
ugaaagugcuuaugcuuaa

SEQ ID NO: 1769042 - RNA, 19 nt, Homo sapiens
  misc_RNA (1)...(19): siRNA sense strand
gaacucaacugaaaucacu

SEQ ID NO: 1769043 - RNA, 19 nt, Homo sapiens
  misc_RNA (1)...(19): siRNA sense strand
ggagauaucacacaaauuc

SEQ ID NO: 1769044 - RNA, 19 nt, Homo sapiens
  misc_RNA (1)...(19): siRNA sense strand
gaaagacugcuacuaaaga

SEQ ID NO: 1769045 - RNA, 19 nt, Homo sapiens
  misc_RNA (1)...(19): siRNA sense strand
uuacggaacucaacugaaa

SEQ ID NO: 1769046 - RNA, 19 nt, Homo sapiens
  misc_RNA (1)...(19): siRNA sense strand
ggagugaggcccacaguaa

SEQ ID NO: 1769047 - RNA, 19 nt, Homo sapiens
  misc_RNA (1)...(19): siRNA sense strand
agaaguggcugauccuaaa

SEQ ID NO: 1769048 - RNA, 19 nt, Homo sapiens
  misc_RNA (1)...(19): siRNA sense strand
uauggaaccuugcauuauu

SEQ ID NO: 1769049 - RNA, 19 nt, Homo sapiens
  misc_RNA (1)...(19): siRNA sense strand
gguuggcuaucuuuacuua

SEQ ID NO: 1769050 - RNA, 19 nt, Homo sapiens
  misc_RNA (1)...(19): siRNA sense strand
ugaagaugaugaggauuua

SEQ ID NO: 1769051 - RNA, 19 nt, Homo sapiens
  misc_RNA (1)...(19): siRNA sense strand
ggaaggaaggauacacaua

SEQ ID NO: 1769052 - RNA, 19 nt, Homo sapiens
  misc_RNA (1)...(19): siRNA sense strand
ucaaggcuaugacaauaaa

SEQ ID NO: 1769053 - RNA, 19 nt, Homo sapiens
  misc_RNA (1)...(19): siRNA sense strand
gauaacaacuccuaaucgu

SEQ ID NO: 1769054 - RNA, 19 nt, Homo sapiens
  misc_RNA (1)...(19): siRNA sense strand
gagguuggucuucuuguua

SEQ ID NO: 1769055 - RNA, 19 nt, Homo sapiens
  misc_RNA (1)...(19): siRNA sense strand
uaaggcagaugaugaagau

SEQ ID NO: 1769056 - RNA, 19 nt, Homo sapiens
  misc_RNA (1)...(19): siRNA sense strand
uaaacuucguccagauaua

SEQ ID NO: 1769057 - RNA, 19 nt, Homo sapiens
  misc_RNA (1)...(19): siRNA sense strand
gacaauuaaugcagaaugu

SEQ ID NO: 1769058 - RNA, 19 nt, Homo sapiens
  misc_RNA (1)...(19): siRNA sense strand
ugaaggagauaucacacaa

SEQ ID NO: 1769059 - RNA, 19 nt, Homo sapiens
  misc_RNA (1)...(19): siRNA sense strand
ucacuacaguucugacuau

SEQ ID NO: 1769060 - RNA, 19 nt, Homo sapiens
  misc_RNA (1)...(19): siRNA sense strand
ugacaguuguucuuucuug

SEQ ID NO: 1769061 - RNA, 19 nt, Homo sapiens
  misc_RNA (1)...(19): siRNA sense strand
gaugcucacuggauaacaa

SEQ ID NO: 1769062 - RNA, 19 nt, Homo sapiens
  misc_RNA (1)...(19): siRNA sense strand
gccaggaagucuuuaccua

SEQ ID NO: 1769063 - RNA, 19 nt, Homo sapiens
  misc_RNA (1)...(19): siRNA sense strand
ccuaaauacuggagauuau

SEQ ID NO: 1769064 - RNA, 19 nt, Homo sapiens
  misc_RNA (1)...(19): siRNA sense strand
gaauauggaaccuugcauu

SEQ ID NO: 1769065 - RNA, 19 nt, Homo sapiens
  misc_RNA (1)...(19): siRNA sense strand
acaguaauaugguuggaaa

SEQ ID NO: 1769066 - RNA, 19 nt, Homo sapiens
  misc_RNA (1)...(19): siRNA sense strand
gaaggaaggauacacauac

SEQ ID NO: 1769067 - RNA, 19 nt, Homo sapiens
  misc_RNA (1)...(19): siRNA sense strand
gauccacucugauuccaau

SEQ ID NO: 1769068 - RNA, 19 nt, Homo sapiens
  misc_RNA (1)...(19): siRNA sense strand
cgauggaucucuuuguuuc

SEQ ID NO: 1769069 - RNA, 19 nt, Homo sapiens
  misc_RNA (1)...(19): siRNA sense strand
agaaugggauauuucacua

SEQ ID NO: 1769070 - RNA, 19 nt, Homo sapiens
  misc_RNA (1)...(19): siRNA sense strand
cuucaaggcuaugacaaua

SEQ ID NO: 1769071 - RNA, 19 nt, Homo sapiens
  misc_RNA (1)...(19): siRNA sense strand
gggaaacuguguugauaag

SEQ ID NO: 1769072 - RNA, 19 nt, Homo sapiens
  misc_RNA (1)...(19): siRNA sense strand
aaggaaagacugcuacuaa

SEQ ID NO: 1769073 - RNA, 19 nt, Homo sapiens
  misc_RNA (1)...(19): siRNA sense strand
ugacaacccugaguacaau

SEQ ID NO: 1769074 - RNA, 19 nt, Homo sapiens
  misc_RNA (1)...(19): siRNA sense strand
aaacagcauuggaccaguu

SEQ ID NO: 1769075 - RNA, 19 nt, Homo sapiens
  misc_RNA (1)...(19): siRNA sense strand
gaacaaaaccugggucuug

SEQ ID NO: 1769076 - RNA, 19 nt, Homo sapiens
  misc_RNA (1)...(19): siRNA sense strand
ggaaagacugcuacuaaag

SEQ ID NO: 1769077 - RNA, 19 nt, Homo sapiens
  misc_RNA (1)...(19): siRNA sense strand
ccaguugauccaauuaaua

SEQ ID NO: 1769078 - RNA, 19 nt, Homo sapiens
  misc_RNA (1)...(19): siRNA sense strand
caauaaacuucguccagau

SEQ ID NO: 1769079 - RNA, 19 nt, Homo sapiens
  misc_RNA (1)...(19): siRNA sense strand
gagauuauaucaguuugca

SEQ ID NO: 1769080 - RNA, 19 nt, Homo sapiens
  misc_RNA (1)...(19): siRNA sense strand
gugcuuaugcuuaacagua

SEQ ID NO: 1769081 - RNA, 19 nt, Homo sapiens
  misc_RNA (1)...(19): siRNA sense strand
aggaaagacugcuacuaaa

SEQ ID NO: 1769082 - RNA, 19 nt, Homo sapiens
  misc_RNA (1)...(19): siRNA sense strand
ccaggaagucuuuaccuaa

SEQ ID NO: 1769083 - RNA, 19 nt, Homo sapiens
  misc_RNA (1)...(19): siRNA sense strand
gauaucacacaaauucuga

SEQ ID NO: 1769084 - RNA, 19 nt, Homo sapiens
  misc_RNA (1)...(19): siRNA sense strand
gauuauggguaucaguguu

SEQ ID NO: 1769085 - RNA, 19 nt, Homo sapiens
  misc_RNA (1)...(19): siRNA sense strand
aaggagauaucacacaaau

SEQ ID NO: 1769086 - RNA, 19 nt, Homo sapiens
  misc_RNA (1)...(19): siRNA sense strand
gauggacgaguucuguaua

SEQ ID NO: 1769087 - RNA, 19 nt, Homo sapiens
  misc_RNA (1)...(19): siRNA sense strand
ggaccaguugauccaauua

SEQ ID NO: 1769088 - RNA, 19 nt, Homo sapiens
  misc_RNA (1)...(19): siRNA sense strand
gaaggagauaucacacaaa

SEQ ID NO: 1769089 - RNA, 19 nt, Homo sapiens
  misc_RNA (1)...(19): siRNA sense strand
aauauggaaccuugcauua

SEQ ID NO: 1769090 - RNA, 19 nt, Homo sapiens
  misc_RNA (1)...(19): siRNA sense strand
gaccugagcagaagaaugg

SEQ ID NO: 1769091 - RNA, 19 nt, Homo sapiens
  misc_RNA (1)...(19): siRNA sense strand
gauccuaaauacuggagau

SEQ ID NO: 1769092 - RNA, 19 nt, Homo sapiens
  misc_RNA (1)...(19): siRNA sense strand
aauguuaucuucagcuuca

SEQ ID NO: 1769093 - RNA, 19 nt, Homo sapiens
  misc_RNA (1)...(19): siRNA sense strand
ugaugaagaugaugaggau

SEQ ID NO: 1769094 - RNA, 19 nt, Homo sapiens
  misc_RNA (1)...(19): siRNA sense strand
gcaaagauugugccagcuu

SEQ ID NO: 1769095 - RNA, 19 nt, Homo sapiens
  misc_RNA (1)...(19): siRNA sense strand
agaagaugauuauggguau

SEQ ID NO: 1769096 - RNA, 19 nt, Homo sapiens
  misc_RNA (1)...(19): siRNA sense strand
ccacucugauuccaaugaa

SEQ ID NO: 1769097 - RNA, 19 nt, Homo sapiens
  misc_RNA (1)...(19): siRNA sense strand
ggauuuaacggugaacaaa

SEQ ID NO: 1769098 - RNA, 19 nt, Homo sapiens
  misc_RNA (1)...(19): siRNA sense strand
gggauuauguuaucaugac

SEQ ID NO: 1769099 - RNA, 19 nt, Homo sapiens
  misc_RNA (1)...(19): siRNA sense strand
ugaguacaauugccaggaa

SEQ ID NO: 1769100 - RNA, 19 nt, Homo sapiens
  misc_RNA (1)...(19): siRNA sense strand
gaccuacauuccaugcauu

SEQ ID NO: 1769101 - RNA, 19 nt, Homo sapiens
  misc_RNA (1)...(19): siRNA sense strand
ugacugcgauggaucucuu

SEQ ID NO: 1769102 - RNA, 19 nt, Homo sapiens
  misc_RNA (1)...(19): siRNA sense strand
uacauuccaugcauucuga

SEQ ID NO: 1769103 - RNA, 19 nt, Homo sapiens
  misc_RNA (1)...(19): siRNA sense strand
caggaagucuuuaccuaag

SEQ ID NO: 1769104 - RNA, 19 nt, Homo sapiens
  misc_RNA (1)...(19): siRNA sense strand
uugggaaacuguguugaua

SEQ ID NO: 1769105 - RNA, 19 nt, Homo sapiens
  misc_RNA (1)...(19): siRNA sense strand
gaacaucguuggguaucac

SEQ ID NO: 1769106 - RNA, 19 nt, Homo sapiens
  misc_RNA (1)...(19): siRNA sense strand
ggauauuucacuauucaga

SEQ ID NO: 1769107 - RNA, 19 nt, Homo sapiens
  misc_RNA (1)...(19): siRNA sense strand
gcuuaacaguaauaugguu

SEQ ID NO: 1769108 - RNA, 19 nt, Homo sapiens
  misc_RNA (1)...(19): siRNA sense strand
gaagaugaugaggauuuaa

SEQ ID NO: 1769109 - RNA, 19 nt, Homo sapiens
  misc_RNA (1)...(19): siRNA sense strand
gcgauggaucucuuuguuu

SEQ ID NO: 1769110 - RNA, 19 nt, Homo sapiens
  misc_RNA (1)...(19): siRNA sense strand
ugagguuggucuucuuguu

SEQ ID NO: 1769111 - RNA, 19 nt, Homo sapiens
  misc_RNA (1)...(19): siRNA sense strand
aauaaacuucguccagaua

SEQ ID NO: 1769112 - RNA, 19 nt, Homo sapiens
  misc_RNA (1)...(19): siRNA sense strand
gaagacugcagaacaggau

SEQ ID NO: 1769113 - RNA, 19 nt, Homo sapiens
  misc_RNA (1)...(19): siRNA sense strand
uugcagccuugauggaaua

SEQ ID NO: 1769114 - RNA, 19 nt, Homo sapiens
  misc_RNA (1)...(19): siRNA sense strand
ugggauauuucacuauuca

SEQ ID NO: 1769115 - RNA, 19 nt, Homo sapiens
  misc_RNA (1)...(19): siRNA sense strand
guuugcauuuguaggguua

SEQ ID NO: 1769116 - RNA, 19 nt, Homo sapiens
  misc_RNA (1)...(19): siRNA sense strand
aaucgucugcuucgaauuu

SEQ ID NO: 1769117 - RNA, 19 nt, Homo sapiens
  misc_RNA (1)...(19): siRNA sense strand
cuaaucgucugcuucgaau

SEQ ID NO: 1769118 - RNA, 19 nt, Homo sapiens
  misc_RNA (1)...(19): siRNA sense strand
gaccaguugauccaauuaa

SEQ ID NO: 1769119 - RNA, 19 nt, Homo sapiens
  misc_RNA (1)...(19): siRNA sense strand
gaagaugauuauggguauc

SEQ ID NO: 1769120 - RNA, 19 nt, Homo sapiens
  misc_RNA (1)...(19): siRNA sense strand
ucuguauacucuaagauug

SEQ ID NO: 1769121 - RNA, 19 nt, Homo sapiens
  misc_RNA (1)...(19): siRNA sense strand
ugauaaggcagaugaugaa

SEQ ID NO: 1769122 - RNA, 19 nt, Homo sapiens
  misc_RNA (1)...(19): siRNA sense strand
uagaaguggcugauccuaa

SEQ ID NO: 1769123 - RNA, 19 nt, Homo sapiens
  misc_RNA (1)...(19): siRNA sense strand
acacauacgcauugccaaa

SEQ ID NO: 1769124 - RNA, 19 nt, Homo sapiens
  misc_RNA (1)...(19): siRNA sense strand
caagaacaucguuggguau

SEQ ID NO: 1769125 - RNA, 19 nt, Homo sapiens
  misc_RNA (1)...(19): siRNA sense strand
gaaugggauauuucacuau

SEQ ID NO: 1769126 - RNA, 19 nt, Homo sapiens
  misc_RNA (1)...(19): siRNA sense strand
ucaauaguaccaugaaagu

SEQ ID NO: 1769127 - RNA, 19 nt, Homo sapiens
  misc_RNA (1)...(19): siRNA sense strand
cuaaagacagaaagcuaaa

SEQ ID NO: 1769128 - RNA, 19 nt, Homo sapiens
  misc_RNA (1)...(19): siRNA sense strand
caauugccaggaagucuuu

SEQ ID NO: 1769129 - RNA, 19 nt, Homo sapiens
  misc_RNA (1)...(19): siRNA sense strand
gaaagugcuuaugcuuaac

SEQ ID NO: 1769130 - RNA, 19 nt, Homo sapiens
  misc_RNA (1)...(19): siRNA sense strand
cuucgaauuuggaaugaug

SEQ ID NO: 1769131 - RNA, 19 nt, Homo sapiens
  misc_RNA (1)...(19): siRNA sense strand
ugcuuaugcuuaacaguaa

SEQ ID NO: 1769132 - RNA, 19 nt, Homo sapiens
  misc_RNA (1)...(19): siRNA sense strand
agaauguuaucuucagcuu

SEQ ID NO: 1769133 - RNA, 19 nt, Homo sapiens
  misc_RNA (1)...(19): siRNA sense strand
cuucuucuguugcuuugaa

SEQ ID NO: 1769134 - RNA, 19 nt, Homo sapiens
  misc_RNA (1)...(19): siRNA sense strand
acuaaagacagaaagcuaa

SEQ ID NO: 1769135 - RNA, 19 nt, Homo sapiens
  misc_RNA (1)...(19): siRNA sense strand
auggaaccuugcauuauuu

SEQ ID NO: 1769136 - RNA, 19 nt, Homo sapiens
  misc_RNA (1)...(19): siRNA sense strand
ggaucucuuuguuucuguu

SEQ ID NO: 1769137 - RNA, 19 nt, Homo sapiens
  misc_RNA (1)...(19): siRNA sense strand
agaagaaugggauauuuca

SEQ ID NO: 1769138 - RNA, 19 nt, Homo sapiens
  misc_RNA (1)...(19): siRNA sense strand
cagaagaaugggauauuuc

SEQ ID NO: 1769139 - RNA, 19 nt, Homo sapiens
  misc_RNA (1)...(19): siRNA sense strand
gagcagaagaaugggauau

SEQ ID NO: 1769140 - RNA, 19 nt, Homo sapiens
  misc_RNA (1)...(19): siRNA sense strand
gcggccagcugcuuccaaa

SEQ ID NO: 1769141 - RNA, 19 nt, Homo sapiens
  misc_RNA (1)...(19): siRNA sense strand
gaaccugaacgaccugaug

SEQ ID NO: 1769142 - RNA, 19 nt, Homo sapiens
  misc_RNA (1)...(19): siRNA sense strand
gaucgaugguguucucaac

SEQ ID NO: 1769143 - RNA, 19 nt, Homo sapiens
  misc_RNA (1)...(19): siRNA sense strand
ccgaggcccugacuucuuc

SEQ ID NO: 1769144 - RNA, 19 nt, Homo sapiens
  misc_RNA (1)...(19): siRNA sense strand
caugcccgcuucgugauga

SEQ ID NO: 1769145 - RNA, 19 nt, Homo sapiens
  misc_RNA (1)...(19): siRNA sense strand
gaaucaaggcaggcacuuc

SEQ ID NO: 1769146 - RNA, 19 nt, Homo sapiens
  misc_RNA (1)...(19): siRNA sense strand
gggcgucucucccguuuuc

SEQ ID NO: 1769147 - RNA, 19 nt, Homo sapiens
  misc_RNA (1)...(19): siRNA sense strand
uaucagggcuuuaauggaa

SEQ ID NO: 1769148 - RNA, 19 nt, Homo sapiens
  misc_RNA (1)...(19): siRNA sense strand
uggaauggaucgugauuau

SEQ ID NO: 1769149 - RNA, 19 nt, Homo sapiens
  misc_RNA (1)...(19): siRNA sense strand
gaauggaucgugauuaugg

SEQ ID NO: 1769150 - RNA, 19 nt, Homo sapiens
  misc_RNA (1)...(19): siRNA sense strand
gaauacuuaucagggcuuu

SEQ ID NO: 1769151 - RNA, 19 nt, Homo sapiens
  misc_RNA (1)...(19): siRNA sense strand
ggacuucgaggacgauuac

SEQ ID NO: 1769152 - RNA, 19 nt, Homo sapiens
  misc_RNA (1)...(19): siRNA sense strand
gggcuuuaauggaauggau

SEQ ID NO: 1769153 - RNA, 19 nt, Homo sapiens
  misc_RNA (1)...(19): siRNA sense strand
auacuuaucagggcuuuaa

SEQ ID NO: 1769154 - RNA, 19 nt, Homo sapiens
  misc_RNA (1)...(19): siRNA sense strand
ggaauggaucgugauuaug

SEQ ID NO: 1769155 - RNA, 19 nt, Homo sapiens
  misc_RNA (1)...(19): siRNA sense strand
gauuauggcccuggaucuu

SEQ ID NO: 1769156 - RNA, 19 nt, Homo sapiens
  misc_RNA (1)...(19): siRNA sense strand
uuauggcccuggaucuuau

SEQ ID NO: 1769157 - RNA, 19 nt, Homo sapiens
  misc_RNA (1)...(19): siRNA sense strand
ucagggcuuuaauggaaug

SEQ ID NO: 1769158 - RNA, 19 nt, Homo sapiens
  misc_RNA (1)...(19): siRNA sense strand
ccgccugcaggaauacuua

SEQ ID NO: 1769159 - RNA, 19 nt, Homo sapiens
  misc_RNA (1)...(19): siRNA sense strand
cacuccgccugcaggaaua

SEQ ID NO: 1769160 - RNA, 19 nt, Homo sapiens
  misc_RNA (1)...(19): siRNA sense strand
uaucagggcuuuaauggaa

SEQ ID NO: 1769161 - RNA, 19 nt, Homo sapiens
  misc_RNA (1)...(19): siRNA sense strand
uggaauggaucgugauuau

SEQ ID NO: 1769162 - RNA, 19 nt, Homo sapiens
  misc_RNA (1)...(19): siRNA sense strand
gaauggaucgugauuaugg

SEQ ID NO: 1769163 - RNA, 19 nt, Homo sapiens
  misc_RNA (1)...(19): siRNA sense strand
gaauacuuaucagggcuuu

SEQ ID NO: 1769164 - RNA, 19 nt, Homo sapiens
  misc_RNA (1)...(19): siRNA sense strand
ggacuucgaggacgauuac

SEQ ID NO: 1769165 - RNA, 19 nt, Homo sapiens
  misc_RNA (1)...(19): siRNA sense strand
gggcuuuaauggaauggau

SEQ ID NO: 1769166 - RNA, 19 nt, Homo sapiens
  misc_RNA (1)...(19): siRNA sense strand
auacuuaucagggcuuuaa

SEQ ID NO: 1769167 - RNA, 19 nt, Homo sapiens
  misc_RNA (1)...(19): siRNA sense strand
ggaauggaucgugauuaug

SEQ ID NO: 1769168 - RNA, 19 nt, Homo sapiens
  misc_RNA (1)...(19): siRNA sense strand
gauuauggcccuggaucuu

SEQ ID NO: 1769169 - RNA, 19 nt, Homo sapiens
  misc_RNA (1)...(19): siRNA sense strand
uuauggcccuggaucuuau

SEQ ID NO: 1769170 - RNA, 19 nt, Homo sapiens
  misc_RNA (1)...(19): siRNA sense strand
ucagggcuuuaauggaaug

SEQ ID NO: 1769171 - RNA, 19 nt, Homo sapiens
  misc_RNA (1)...(19): siRNA sense strand
ccgccugcaggaauacuua

SEQ ID NO: 1769172 - RNA, 19 nt, Homo sapiens
  misc_RNA (1)...(19): siRNA sense strand
cacuccgccugcaggaaua

SEQ ID NO: 1769173 - RNA, 19 nt, Homo sapiens
  misc_RNA (1)...(19): siRNA sense strand
ggacuacgcugcaauuaga

SEQ ID NO: 1769174 - RNA, 19 nt, Homo sapiens
  misc_RNA (1)...(19): siRNA sense strand
gcagacagcuaucggaaga

SEQ ID NO: 1769175 - RNA, 19 nt, Homo sapiens
  misc_RNA (1)...(19): siRNA sense strand
gcugagcaguggaauguua

SEQ ID NO: 1769176 - RNA, 19 nt, Homo sapiens
  misc_RNA (1)...(19): siRNA sense strand
ggaagaagguagugcuaga

SEQ ID NO: 1769177 - RNA, 19 nt, Homo sapiens
  misc_RNA (1)...(19): siRNA sense strand
gaaauucgagcgagaaaga

SEQ ID NO: 1769178 - RNA, 19 nt, Homo sapiens
  misc_RNA (1)...(19): siRNA sense strand
ggaaacaucugcuaaaaca

SEQ ID NO: 1769179 - RNA, 19 nt, Homo sapiens
  misc_RNA (1)...(19): siRNA sense strand
gagcuaauguugacaaggu

SEQ ID NO: 1769180 - RNA, 19 nt, Homo sapiens
  misc_RNA (1)...(19): siRNA sense strand
gagcagauuuuaagaguaa

SEQ ID NO: 1769181 - RNA, 19 nt, Homo sapiens
  misc_RNA (1)...(19): siRNA sense strand
ucagaauucuuuggcuuua

SEQ ID NO: 1769182 - RNA, 19 nt, Homo sapiens
  misc_RNA (1)...(19): siRNA sense strand
uuacagaaauggaauccuu

SEQ ID NO: 1769183 - RNA, 19 nt, Homo sapiens
  misc_RNA (1)...(19): siRNA sense strand
gcaguggaauguuaacuac

SEQ ID NO: 1769184 - RNA, 19 nt, Homo sapiens
  misc_RNA (1)...(19): siRNA sense strand
ccaagggucagaauucuuu

SEQ ID NO: 1769185 - RNA, 19 nt, Homo sapiens
  misc_RNA (1)...(19): siRNA sense strand
gaggaaguccagaucgaua

SEQ ID NO: 1769186 - RNA, 19 nt, Homo sapiens
  misc_RNA (1)...(19): siRNA sense strand
gauggaagacagcaaagaa

SEQ ID NO: 1769187 - RNA, 19 nt, Homo sapiens
  misc_RNA (1)...(19): siRNA sense strand
gccaagagaaucagagaaa

SEQ ID NO: 1769188 - RNA, 19 nt, Homo sapiens
  misc_RNA (1)...(19): siRNA sense strand
gagcugagcaguggaaugu

SEQ ID NO: 1769189 - RNA, 19 nt, Homo sapiens
  misc_RNA (1)...(19): siRNA sense strand
caagagaaucagagaaaga

SEQ ID NO: 1769190 - RNA, 19 nt, Homo sapiens
  misc_RNA (1)...(19): siRNA sense strand
ggaggacuacgcugcaauu

SEQ ID NO: 1769191 - RNA, 19 nt, Homo sapiens
  misc_RNA (1)...(19): siRNA sense strand
gaagauaaaagacagguuu

SEQ ID NO: 1769192 - RNA, 19 nt, Homo sapiens
  misc_RNA (1)...(19): siRNA sense strand
gggaggaaguccagaucga

SEQ ID NO: 1769193 - RNA, 19 nt, Homo sapiens
  misc_RNA (1)...(19): siRNA sense strand
ggacuaugagccuaccaaa

SEQ ID NO: 1769194 - RNA, 19 nt, Homo sapiens
  misc_RNA (1)...(19): siRNA sense strand
gagaaauucgagcgagaaa

SEQ ID NO: 1769195 - RNA, 19 nt, Homo sapiens
  misc_RNA (1)...(19): siRNA sense strand
gcaaagaaaagaauggaaa

SEQ ID NO: 1769196 - RNA, 19 nt, Homo sapiens
  misc_RNA (1)...(19): siRNA sense strand
uaccaaagcagacagcuau

SEQ ID NO: 1769197 - RNA, 19 nt, Homo sapiens
  misc_RNA (1)...(19): siRNA sense strand
aaagauggaagacagcaaa

SEQ ID NO: 1769198 - RNA, 19 nt, Homo sapiens
  misc_RNA (1)...(19): siRNA sense strand
gaggacuacgcugcaauua

SEQ ID NO: 1769199 - RNA, 19 nt, Homo sapiens
  misc_RNA (1)...(19): siRNA sense strand
ggaauccuuugcagcuaca

SEQ ID NO: 1769200 - RNA, 19 nt, Homo sapiens
  misc_RNA (1)...(19): siRNA sense strand
uuaacuacguggaaacauc

SEQ ID NO: 1769201 - RNA, 19 nt, Homo sapiens
  misc_RNA (1)...(19): siRNA sense strand
gaauguuaacuacguggaa

SEQ ID NO: 1769202 - RNA, 19 nt, Homo sapiens
  misc_RNA (1)...(19): siRNA sense strand
gaagaagguagugcuagau

SEQ ID NO: 1769203 - RNA, 19 nt, Homo sapiens
  misc_RNA (1)...(19): siRNA sense strand
gaaagauggaagacagcaa

SEQ ID NO: 1769204 - RNA, 19 nt, Homo sapiens
  misc_RNA (1)...(19): siRNA sense strand
ccaagagaaucagagaaag

SEQ ID NO: 1769205 - RNA, 19 nt, Homo sapiens
  misc_RNA (1)...(19): siRNA sense strand
ucuacugguugguaacaaa

SEQ ID NO: 1769206 - RNA, 19 nt, Homo sapiens
  misc_RNA (1)...(19): siRNA sense strand
agaauucuuuggcuuuaca

SEQ ID NO: 1769207 - RNA, 19 nt, Homo sapiens
  misc_RNA (1)...(19): siRNA sense strand
gagcgagaaagauggaaga

SEQ ID NO: 1769208 - RNA, 19 nt, Homo sapiens
  misc_RNA (1)...(19): siRNA sense strand
cagcugggcaggaggacua

SEQ ID NO: 1769209 - RNA, 19 nt, Homo sapiens
  misc_RNA (1)...(19): siRNA sense strand
gcaauuagagacaacuacu

SEQ ID NO: 1769210 - RNA, 19 nt, Homo sapiens
  misc_RNA (1)...(19): siRNA sense strand
aauguuaacuacguggaaa

SEQ ID NO: 1769211 - RNA, 19 nt, Homo sapiens
  misc_RNA (1)...(19): siRNA sense strand
ggagcagauuuuaagagua

SEQ ID NO: 1769212 - RNA, 19 nt, Homo sapiens
  misc_RNA (1)...(19): siRNA sense strand
cauuucuacugguugguaa

SEQ ID NO: 1769213 - RNA, 19 nt, Homo sapiens
  misc_RNA (1)...(19): siRNA sense strand
gcccaagggucagaauucu

SEQ ID NO: 1769214 - RNA, 19 nt, Homo sapiens
  misc_RNA (1)...(19): siRNA sense strand
gaagacagcaaagaaaaga

SEQ ID NO: 1769215 - RNA, 19 nt, Homo sapiens
  misc_RNA (1)...(19): siRNA sense strand
cauguacgaugaguuugug

SEQ ID NO: 1769216 - RNA, 19 nt, Homo sapiens
  misc_RNA (1)...(19): siRNA sense strand
agacagcuaucggaagaag

SEQ ID NO: 1769217 - RNA, 19 nt, Homo sapiens
  misc_RNA (1)...(19): siRNA sense strand
gcucugacucuacaguuca

SEQ ID NO: 1769218 - RNA, 19 nt, Homo sapiens
  misc_RNA (1)...(19): siRNA sense strand
guggaaacaucugcuaaaa

SEQ ID NO: 1769219 - RNA, 19 nt, Homo sapiens
  misc_RNA (1)...(19): siRNA sense strand
gucagaauucuuuggcuuu

SEQ ID NO: 1769220 - RNA, 19 nt, Homo sapiens
  misc_RNA (1)...(19): siRNA sense strand
ggaggaaguccagaucgau

SEQ ID NO: 1769221 - RNA, 19 nt, Homo sapiens
  misc_RNA (1)...(19): siRNA sense strand
ggaaguccagaucgauauc

SEQ ID NO: 1769222 - RNA, 19 nt, Homo sapiens
  misc_RNA (1)...(19): siRNA sense strand
cguggaaacaucugcuaaa

SEQ ID NO: 1769223 - RNA, 19 nt, Homo sapiens
  misc_RNA (1)...(19): siRNA sense strand
caauuagagacaacuacuu

SEQ ID NO: 1769224 - RNA, 19 nt, Homo sapiens
  misc_RNA (1)...(19): siRNA sense strand
gggagcagauuuuaagagu

SEQ ID NO: 1769225 - RNA, 19 nt, Homo sapiens
  misc_RNA (1)...(19): siRNA sense strand
uaacuacguggaaacaucu

SEQ ID NO: 1769226 - RNA, 19 nt, Homo sapiens
  misc_RNA (1)...(19): siRNA sense strand
agaaauggaauccuuugca

SEQ ID NO: 1769227 - RNA, 19 nt, Homo sapiens
  misc_RNA (1)...(19): siRNA sense strand
ggaaaaguuuagccaagag

SEQ ID NO: 1769228 - RNA, 19 nt, Homo sapiens
  misc_RNA (1)...(19): siRNA sense strand
aauuagagacaacuacuuc

SEQ ID NO: 1769229 - RNA, 19 nt, Homo sapiens
  misc_RNA (1)...(19): siRNA sense strand
acagaaauggaauccuuug

SEQ ID NO: 1769230 - RNA, 19 nt, Homo sapiens
  misc_RNA (1)...(19): siRNA sense strand
caggaggacuacgcugcaa

SEQ ID NO: 1769231 - RNA, 19 nt, Homo sapiens
  misc_RNA (1)...(19): siRNA sense strand
cuaugagccuaccaaagca

SEQ ID NO: 1769232 - RNA, 19 nt, Homo sapiens
  misc_RNA (1)...(19): siRNA sense strand
cuaccaaagcagacagcua

SEQ ID NO: 1769233 - RNA, 19 nt, Homo sapiens
  misc_RNA (1)...(19): siRNA sense strand
gcucaaagcuaaucucuug

SEQ ID NO: 1769234 - RNA, 19 nt, Homo sapiens
  misc_RNA (1)...(19): siRNA sense strand
ggagaagauuccuuuauuu

SEQ ID NO: 1769235 - RNA, 19 nt, Homo sapiens
  misc_RNA (1)...(19): siRNA sense strand
aagaacagauccucaauua

SEQ ID NO: 1769236 - RNA, 19 nt, Homo sapiens
  misc_RNA (1)...(19): siRNA sense strand
gaacagauccucaauuagu

SEQ ID NO: 1769237 - RNA, 19 nt, Homo sapiens
  misc_RNA (1)...(19): siRNA sense strand
gguauuggcuuguguuauu

SEQ ID NO: 1769238 - RNA, 19 nt, Homo sapiens
  misc_RNA (1)...(19): siRNA sense strand
ucaaugauguggagagaua

SEQ ID NO: 1769239 - RNA, 19 nt, Homo sapiens
  misc_RNA (1)...(19): siRNA sense strand
ggucauggauccaauaaug

SEQ ID NO: 1769240 - RNA, 19 nt, Homo sapiens
  misc_RNA (1)...(19): siRNA sense strand
caacagcaccagcaaauaa

SEQ ID NO: 1769241 - RNA, 19 nt, Homo sapiens
  misc_RNA (1)...(19): siRNA sense strand
gaugauaauucuccucuga

SEQ ID NO: 1769242 - RNA, 19 nt, Homo sapiens
  misc_RNA (1)...(19): siRNA sense strand
ccagugaucuaaauauuga

SEQ ID NO: 1769243 - RNA, 19 nt, Homo sapiens
  misc_RNA (1)...(19): siRNA sense strand
ggcaaugcauacuuaaaua

SEQ ID NO: 1769244 - RNA, 19 nt, Homo sapiens
  misc_RNA (1)...(19): siRNA sense strand
ggacauggcggaucaguau

SEQ ID NO: 1769245 - RNA, 19 nt, Homo sapiens
  misc_RNA (1)...(19): siRNA sense strand
uaauggcaaugcauacuua

SEQ ID NO: 1769246 - RNA, 19 nt, Homo sapiens
  misc_RNA (1)...(19): siRNA sense strand
gaaauuaccaccuucacuu

SEQ ID NO: 1769247 - RNA, 19 nt, Homo sapiens
  misc_RNA (1)...(19): siRNA sense strand
ggaauggcuucuuuaucua

SEQ ID NO: 1769248 - RNA, 19 nt, Homo sapiens
  misc_RNA (1)...(19): siRNA sense strand
gaacagauugucaagcaaa

SEQ ID NO: 1769249 - RNA, 19 nt, Homo sapiens
  misc_RNA (1)...(19): siRNA sense strand
ggagaacucugugauguca

SEQ ID NO: 1769250 - RNA, 19 nt, Homo sapiens
  misc_RNA (1)...(19): siRNA sense strand
ggagagauaugauccacau

SEQ ID NO: 1769251 - RNA, 19 nt, Homo sapiens
  misc_RNA (1)...(19): siRNA sense strand
guaagagccuuugcagaaa

SEQ ID NO: 1769252 - RNA, 19 nt, Homo sapiens
  misc_RNA (1)...(19): siRNA sense strand
gacaauacuugcuucaaug

SEQ ID NO: 1769253 - RNA, 19 nt, Homo sapiens
  misc_RNA (1)...(19): siRNA sense strand
guagagauuuacuggauga

SEQ ID NO: 1769254 - RNA, 19 nt, Homo sapiens
  misc_RNA (1)...(19): siRNA sense strand
uggagaagauuccuuuauu

SEQ ID NO: 1769255 - RNA, 19 nt, Homo sapiens
  misc_RNA (1)...(19): siRNA sense strand
gaaagucacaaucgaauag

SEQ ID NO: 1769256 - RNA, 19 nt, Homo sapiens
  misc_RNA (1)...(19): siRNA sense strand
ugacaauacuugcuucaau

SEQ ID NO: 1769257 - RNA, 19 nt, Homo sapiens
  misc_RNA (1)...(19): siRNA sense strand
gugaauacaugaaguuaca

SEQ ID NO: 1769258 - RNA, 19 nt, Homo sapiens
  misc_RNA (1)...(19): siRNA sense strand
uggaauggcuucuuuaucu

SEQ ID NO: 1769259 - RNA, 19 nt, Homo sapiens
  misc_RNA (1)...(19): siRNA sense strand
ggcuagagcuuguugugaa

SEQ ID NO: 1769260 - RNA, 19 nt, Homo sapiens
  misc_RNA (1)...(19): siRNA sense strand
gauaaguggauagaaguua

SEQ ID NO: 1769261 - RNA, 19 nt, Homo sapiens
  misc_RNA (1)...(19): siRNA sense strand
caagcuaggaaucacauua

SEQ ID NO: 1769262 - RNA, 19 nt, Homo sapiens
  misc_RNA (1)...(19): siRNA sense strand
aagguuggcucaaagcuaa

SEQ ID NO: 1769263 - RNA, 19 nt, Homo sapiens
  misc_RNA (1)...(19): siRNA sense strand
gaagcaacaagugggauua

SEQ ID NO: 1769264 - RNA, 19 nt, Homo sapiens
  misc_RNA (1)...(19): siRNA sense strand
gagcaguaccugacuuuga

SEQ ID NO: 1769265 - RNA, 19 nt, Homo sapiens
  misc_RNA (1)...(19): siRNA sense strand
gcagaaagucacaaucgaa

SEQ ID NO: 1769266 - RNA, 19 nt, Homo sapiens
  misc_RNA (1)...(19): siRNA sense strand
cagauucuaugaguaguaa

SEQ ID NO: 1769267 - RNA, 19 nt, Homo sapiens
  misc_RNA (1)...(19): siRNA sense strand
ggaguuagcaagcuucaug

SEQ ID NO: 1769268 - RNA, 19 nt, Homo sapiens
  misc_RNA (1)...(19): siRNA sense strand
caaaugaagcuuggaaaga

SEQ ID NO: 1769269 - RNA, 19 nt, Homo sapiens
  misc_RNA (1)...(19): siRNA sense strand
aaaugaagcuuggaaagau

SEQ ID NO: 1769270 - RNA, 19 nt, Homo sapiens
  misc_RNA (1)...(19): siRNA sense strand
uaaaguguaugcaguaggu

SEQ ID NO: 1769271 - RNA, 19 nt, Homo sapiens
  misc_RNA (1)...(19): siRNA sense strand
gcaauuggaggguuagaug

SEQ ID NO: 1769272 - RNA, 19 nt, Homo sapiens
  misc_RNA (1)...(19): siRNA sense strand
aagcuaaucucuugucaca

SEQ ID NO: 1769273 - RNA, 19 nt, Homo sapiens
  misc_RNA (1)...(19): siRNA sense strand
gaauagacuuaauggacau

SEQ ID NO: 1769274 - RNA, 19 nt, Homo sapiens
  misc_RNA (1)...(19): siRNA sense strand
ugaaacacuugcacagguu

SEQ ID NO: 1769275 - RNA, 19 nt, Homo sapiens
  misc_RNA (1)...(19): siRNA sense strand
gcgaagagcaggcaaugga

SEQ ID NO: 1769276 - RNA, 19 nt, Homo sapiens
  misc_RNA (1)...(19): siRNA sense strand
gcagagcaguaccugacuu

SEQ ID NO: 1769277 - RNA, 19 nt, Homo sapiens
  misc_RNA (1)...(19): siRNA sense strand
gagccauguuucuuucuga

SEQ ID NO: 1769278 - RNA, 19 nt, Homo sapiens
  misc_RNA (1)...(19): siRNA sense strand
gcaacaagugggauuaugu

SEQ ID NO: 1769279 - RNA, 19 nt, Homo sapiens
  misc_RNA (1)...(19): siRNA sense strand
ggaguacaguggcaccaau

SEQ ID NO: 1769280 - RNA, 19 nt, Homo sapiens
  misc_RNA (1)...(19): siRNA sense strand
acaaagaggcgaggaauug

SEQ ID NO: 1769281 - RNA, 19 nt, Homo sapiens
  misc_RNA (1)...(19): siRNA sense strand
uugauccucucacuaauaa

SEQ ID NO: 1769282 - RNA, 19 nt, Homo sapiens
  misc_RNA (1)...(19): siRNA sense strand
guggauagaaguuaaagaa

SEQ ID NO: 1769283 - RNA, 19 nt, Homo sapiens
  misc_RNA (1)...(19): siRNA sense strand
gcuguguguuccuguuuaa

SEQ ID NO: 1769284 - RNA, 19 nt, Homo sapiens
  misc_RNA (1)...(19): siRNA sense strand
gcaauagaagacuugguaa

SEQ ID NO: 1769285 - RNA, 19 nt, Homo sapiens
  misc_RNA (1)...(19): siRNA sense strand
gaacauuuagggaguaugg

SEQ ID NO: 1769286 - RNA, 19 nt, Homo sapiens
  misc_RNA (1)...(19): siRNA sense strand
aagaacagauugucaagca

SEQ ID NO: 1769287 - RNA, 19 nt, Homo sapiens
  misc_RNA (1)...(19): siRNA sense strand
uaauggacauggcggauca

SEQ ID NO: 1769288 - RNA, 19 nt, Homo sapiens
  misc_RNA (1)...(19): siRNA sense strand
aguaagagccuuugcagaa

SEQ ID NO: 1769289 - RNA, 19 nt, Homo sapiens
  misc_RNA (1)...(19): siRNA sense strand
gguaaaguuugucuauucu

SEQ ID NO: 1769290 - RNA, 19 nt, Homo sapiens
  misc_RNA (1)...(19): siRNA sense strand
caaagcuaaucucuuguca

SEQ ID NO: 1769291 - RNA, 19 nt, Homo sapiens
  misc_RNA (1)...(19): siRNA sense strand
agaaaugggucagcgaaga

SEQ ID NO: 1769292 - RNA, 19 nt, Homo sapiens
  misc_RNA (1)...(19): siRNA sense strand
ugguaaaguuugucuauuc

SEQ ID NO: 1769293 - RNA, 19 nt, Homo sapiens
  misc_RNA (1)...(19): siRNA sense strand
uagccaaauucgagaugua

SEQ ID NO: 1769294 - RNA, 19 nt, Homo sapiens
  misc_RNA (1)...(19): siRNA sense strand
aggcaucaaugaacacaaa

SEQ ID NO: 1769295 - RNA, 19 nt, Homo sapiens
  misc_RNA (1)...(19): siRNA sense strand
guaaacaagcuaggaauca

SEQ ID NO: 1769296 - RNA, 19 nt, Homo sapiens
  misc_RNA (1)...(19): siRNA sense strand
cuaggaaucacauuacaaa

SEQ ID NO: 1769297 - RNA, 19 nt, Homo sapiens
  misc_RNA (1)...(19): siRNA sense strand
gcaaaugaagcuuggaaag

SEQ ID NO: 1769298 - RNA, 19 nt, Homo sapiens
  misc_RNA (1)...(19): siRNA sense strand
gaauugccuuggcuuccuu

SEQ ID NO: 1769299 - RNA, 19 nt, Homo sapiens
  misc_RNA (1)...(19): siRNA sense strand
gauccucucacuaauaaau

SEQ ID NO: 1769300 - RNA, 19 nt, Homo sapiens
  misc_RNA (1)...(19): siRNA sense strand
ggagugugaagacuuugua

SEQ ID NO: 1769301 - RNA, 19 nt, Homo sapiens
  misc_RNA (1)...(19): siRNA sense strand
caauagaagacuugguaaa

SEQ ID NO: 1769302 - RNA, 19 nt, Homo sapiens
  misc_RNA (1)...(19): siRNA sense strand
caacaacagcaccagcaaa

SEQ ID NO: 1769303 - RNA, 19 nt, Homo sapiens
  misc_RNA (1)...(19): siRNA sense strand
gauggaauggcuucuuuau

SEQ ID NO: 1769304 - RNA, 19 nt, Homo sapiens
  misc_RNA (1)...(19): siRNA sense strand
uguccagccucucuuauau

SEQ ID NO: 1769305 - RNA, 19 nt, Homo sapiens
  misc_RNA (1)...(19): siRNA sense strand
ccaagcaaacgcugauuga

SEQ ID NO: 1769306 - RNA, 19 nt, Homo sapiens
  misc_RNA (1)...(19): siRNA sense strand
caauguccagccucucuua

SEQ ID NO: 1769307 - RNA, 19 nt, Homo sapiens
  misc_RNA (1)...(19): siRNA sense strand
uaaucucuguggaagguaa

SEQ ID NO: 1769308 - RNA, 19 nt, Homo sapiens
  misc_RNA (1)...(19): siRNA sense strand
gcuagagcuuguugugaau

SEQ ID NO: 1769309 - RNA, 19 nt, Homo sapiens
  misc_RNA (1)...(19): siRNA sense strand
caaacgcugauugagauua

SEQ ID NO: 1769310 - RNA, 19 nt, Homo sapiens
  misc_RNA (1)...(19): siRNA sense strand
guaguaaacaagcuaggaa

SEQ ID NO: 1769311 - RNA, 19 nt, Homo sapiens
  misc_RNA (1)...(19): siRNA sense strand
gcaguugguggucauaaug

SEQ ID NO: 1769312 - RNA, 19 nt, Homo sapiens
  misc_RNA (1)...(19): siRNA sense strand
caauggaguuagcaagcuu

SEQ ID NO: 1769313 - RNA, 19 nt, Homo sapiens
  misc_RNA (1)...(19): siRNA sense strand
ggaguauggagauguuuga

SEQ ID NO: 1769314 - RNA, 19 nt, Homo sapiens
  misc_RNA (1)...(19): siRNA sense strand
gaaaagcaggucuauaaug

SEQ ID NO: 1769315 - RNA, 19 nt, Homo sapiens
  misc_RNA (1)...(19): siRNA sense strand
gaacugguggcuagagcuu

SEQ ID NO: 1769316 - RNA, 19 nt, Homo sapiens
  misc_RNA (1)...(19): siRNA sense strand
ugauggugaugcaauagaa

SEQ ID NO: 1769317 - RNA, 19 nt, Homo sapiens
  misc_RNA (1)...(19): siRNA sense strand
auaaugugguugacuguau

SEQ ID NO: 1769318 - RNA, 19 nt, Homo sapiens
  misc_RNA (1)...(19): siRNA sense strand
cuguuuaacuagccaaauu

SEQ ID NO: 1769319 - RNA, 19 nt, Homo sapiens
  misc_RNA (1)...(19): siRNA sense strand
caacaagugggauuaugug

SEQ ID NO: 1769320 - RNA, 19 nt, Homo sapiens
  misc_RNA (1)...(19): siRNA sense strand
uguggaagguaaaguguau

SEQ ID NO: 1769321 - RNA, 19 nt, Homo sapiens
  misc_RNA (1)...(19): siRNA sense strand
aaacgcugauugagauuag

SEQ ID NO: 1769322 - RNA, 19 nt, Homo sapiens
  misc_RNA (1)...(19): siRNA sense strand
gauccaauaaugugguuga

SEQ ID NO: 1769323 - RNA, 19 nt, Homo sapiens
  misc_RNA (1)...(19): siRNA sense strand
gggaaucgcaacagugaug

SEQ ID NO: 1769324 - RNA, 19 nt, Homo sapiens
  misc_RNA (1)...(19): siRNA sense strand
aauacuugcuucaaugaug

SEQ ID NO: 1769325 - RNA, 19 nt, Homo sapiens
  misc_RNA (1)...(19): siRNA sense strand
ggaugaagcaagaaauuac

SEQ ID NO: 1769326 - RNA, 19 nt, Homo sapiens
  misc_RNA (1)...(19): siRNA sense strand
ucacaaucgaauagacuua

SEQ ID NO: 1769327 - RNA, 19 nt, Homo sapiens
  misc_RNA (1)...(19): siRNA sense strand
gauggagaagauuccuuua

SEQ ID NO: 1769328 - RNA, 19 nt, Homo sapiens
  misc_RNA (1)...(19): siRNA sense strand
aaugaagcuuggaaagauu

SEQ ID NO: 1769329 - RNA, 19 nt, Homo sapiens
  misc_RNA (1)...(19): siRNA sense strand
guguguuccuguuuaacua

SEQ ID NO: 1769330 - RNA, 19 nt, Homo sapiens
  misc_RNA (1)...(19): siRNA sense strand
gcaaugcauacuuaaauac

SEQ ID NO: 1769331 - RNA, 19 nt, Homo sapiens
  misc_RNA (1)...(19): siRNA sense strand
agcaguaccugacuuugaa

SEQ ID NO: 1769332 - RNA, 19 nt, Homo sapiens
  misc_RNA (1)...(19): siRNA sense strand
caccuucacuugaguagca

SEQ ID NO: 1769333 - RNA, 19 nt, Homo sapiens
  misc_RNA (1)...(19): siRNA sense strand
ccucaagcauugcgaguuu

SEQ ID NO: 1769334 - RNA, 19 nt, Homo sapiens
  misc_RNA (1)...(19): siRNA sense strand
gcacugcccagaucacuga

SEQ ID NO: 1769335 - RNA, 19 nt, Homo sapiens
  misc_RNA (1)...(19): siRNA sense strand
gccgcaagcucgacauuga

SEQ ID NO: 1769336 - RNA, 19 nt, Homo sapiens
  misc_RNA (1)...(19): siRNA sense strand
gagccgagggcaacaggua

SEQ ID NO: 1769337 - RNA, 19 nt, Homo sapiens
  misc_RNA (1)...(19): siRNA sense strand
aggcuaaugugaccaagga

SEQ ID NO: 1769338 - RNA, 19 nt, Homo sapiens
  misc_RNA (1)...(19): siRNA sense strand
gguacuacgaggccaacua

SEQ ID NO: 1769339 - RNA, 19 nt, Homo sapiens
  misc_RNA (1)...(19): siRNA sense strand
guacuacgaggccaacuac

SEQ ID NO: 1769340 - RNA, 19 nt, Homo sapiens
  misc_RNA (1)...(19): siRNA sense strand
gcaucaagcacagaaucaa

SEQ ID NO: 1769341 - RNA, 19 nt, Homo sapiens
  misc_RNA (1)...(19): siRNA sense strand
caagcucgacauugacuuc

SEQ ID NO: 1769342 - RNA, 19 nt, Homo sapiens
  misc_RNA (1)...(19): siRNA sense strand
ccagaagccagacaacaag

SEQ ID NO: 1769343 - RNA, 19 nt, Homo sapiens
  misc_RNA (1)...(19): siRNA sense strand
gucaccggcugcaucaaug

SEQ ID NO: 1769344 - RNA, 19 nt, Homo sapiens
  misc_RNA (1)...(19): siRNA sense strand
ugaccaaggaggcauuugu

SEQ ID NO: 1769345 - RNA, 19 nt, Homo sapiens
  misc_RNA (1)...(19): siRNA sense strand
gggcaucaagcacagaauc

SEQ ID NO: 1769346 - RNA, 19 nt, Homo sapiens
  misc_RNA (1)...(19): siRNA sense strand
gaccaaggaggcauuuguc

SEQ ID NO: 1769347 - RNA, 19 nt, Homo sapiens
  misc_RNA (1)...(19): siRNA sense strand
uccagaagccagacaacaa

SEQ ID NO: 1769348 - RNA, 19 nt, Homo sapiens
  misc_RNA (1)...(19): siRNA sense strand
gagaaaggauggagaauga

SEQ ID NO: 1769349 - RNA, 19 nt, Homo sapiens
  misc_RNA (1)...(19): siRNA sense strand
ggagaaacuuagugaauaa

SEQ ID NO: 1769350 - RNA, 19 nt, Homo sapiens
  misc_RNA (1)...(19): siRNA sense strand
gaagauaggcaaugaaauu

SEQ ID NO: 1769351 - RNA, 19 nt, Homo sapiens
  misc_RNA (1)...(19): siRNA sense strand
caaggaaguuguaccaaua

SEQ ID NO: 1769352 - RNA, 19 nt, Homo sapiens
  misc_RNA (1)...(19): siRNA sense strand
ggaaaagaaugccaaaaua

SEQ ID NO: 1769353 - RNA, 19 nt, Homo sapiens
  misc_RNA (1)...(19): siRNA sense strand
ggacaaugguuacuccaaa

SEQ ID NO: 1769354 - RNA, 19 nt, Homo sapiens
  misc_RNA (1)...(19): siRNA sense strand
ggaggaaagugcugagaaa

SEQ ID NO: 1769355 - RNA, 19 nt, Homo sapiens
  misc_RNA (1)...(19): siRNA sense strand
gcaaaugcuugaccagauu

SEQ ID NO: 1769356 - RNA, 19 nt, Homo sapiens
  misc_RNA (1)...(19): siRNA sense strand
gaacagaccauuuacaaca

SEQ ID NO: 1769357 - RNA, 19 nt, Homo sapiens
  misc_RNA (1)...(19): siRNA sense strand
gcacaaacuacuacauaua

SEQ ID NO: 1769358 - RNA, 19 nt, Homo sapiens
  misc_RNA (1)...(19): siRNA sense strand
gcuagaagacuuuaccuua

SEQ ID NO: 1769359 - RNA, 19 nt, Homo sapiens
  misc_RNA (1)...(19): siRNA sense strand
ggcagaagauccugaauga

SEQ ID NO: 1769360 - RNA, 19 nt, Homo sapiens
  misc_RNA (1)...(19): siRNA sense strand
gaaaggauggagaaugaua

SEQ ID NO: 1769361 - RNA, 19 nt, Homo sapiens
  misc_RNA (1)...(19): siRNA sense strand
caacgaagaugcacaaacu

SEQ ID NO: 1769362 - RNA, 19 nt, Homo sapiens
  misc_RNA (1)...(19): siRNA sense strand
uaacaacgguaacauugaa

SEQ ID NO: 1769363 - RNA, 19 nt, Homo sapiens
  misc_RNA (1)...(19): siRNA sense strand
cuagaagacuuuaccuuaa

SEQ ID NO: 1769364 - RNA, 19 nt, Homo sapiens
  misc_RNA (1)...(19): siRNA sense strand
gaaaucacacuuggauaua

SEQ ID NO: 1769365 - RNA, 19 nt, Homo sapiens
  misc_RNA (1)...(19): siRNA sense strand
gauggagaaugauaugaaa

SEQ ID NO: 1769366 - RNA, 19 nt, Homo sapiens
  misc_RNA (1)...(19): siRNA sense strand
ugagaaacaugauauagga

SEQ ID NO: 1769367 - RNA, 19 nt, Homo sapiens
  misc_RNA (1)...(19): siRNA sense strand
gaaggugauugaaagaaau

SEQ ID NO: 1769368 - RNA, 19 nt, Homo sapiens
  misc_RNA (1)...(19): siRNA sense strand
ggcaggaguucuucaauga

SEQ ID NO: 1769369 - RNA, 19 nt, Homo sapiens
  misc_RNA (1)...(19): siRNA sense strand
gaagaugcacaaacuacua

SEQ ID NO: 1769370 - RNA, 19 nt, Homo sapiens
  misc_RNA (1)...(19): siRNA sense strand
agaaggaacagaccauuua

SEQ ID NO: 1769371 - RNA, 19 nt, Homo sapiens
  misc_RNA (1)...(19): siRNA sense strand
gaaacaugauauaggaguu

SEQ ID NO: 1769372 - RNA, 19 nt, Homo sapiens
  misc_RNA (1)...(19): siRNA sense strand
ggaaagugcugagaaacau

SEQ ID NO: 1769373 - RNA, 19 nt, Homo sapiens
  misc_RNA (1)...(19): siRNA sense strand
uggagaaacuuagugaaua

SEQ ID NO: 1769374 - RNA, 19 nt, Homo sapiens
  misc_RNA (1)...(19): siRNA sense strand
cgauugaacugacaaggaa

SEQ ID NO: 1769375 - RNA, 19 nt, Homo sapiens
  misc_RNA (1)...(19): siRNA sense strand
gaugugaaauuaacaaagg

SEQ ID NO: 1769376 - RNA, 19 nt, Homo sapiens
  misc_RNA (1)...(19): siRNA sense strand
uaacaugauucaacaaugg

SEQ ID NO: 1769377 - RNA, 19 nt, Homo sapiens
  misc_RNA (1)...(19): siRNA sense strand
ugaaggugauugaaagaaa

SEQ ID NO: 1769378 - RNA, 19 nt, Homo sapiens
  misc_RNA (1)...(19): siRNA sense strand
cagaagauccugaaugaga

SEQ ID NO: 1769379 - RNA, 19 nt, Homo sapiens
  misc_RNA (1)...(19): siRNA sense strand
gacaguacauggaggaaau

SEQ ID NO: 1769380 - RNA, 19 nt, Homo sapiens
  misc_RNA (1)...(19): siRNA sense strand
gcagaugauugauuucuac

SEQ ID NO: 1769381 - RNA, 19 nt, Homo sapiens
  misc_RNA (1)...(19): siRNA sense strand
agagagggcugguguggaa

SEQ ID NO: 1769382 - RNA, 19 nt, Homo sapiens
  misc_RNA (1)...(19): siRNA sense strand
ggagcuagaugcgauugaa

SEQ ID NO: 1769383 - RNA, 19 nt, Homo sapiens
  misc_RNA (1)...(19): siRNA sense strand
acaaagacuugguaacuca

SEQ ID NO: 1769384 - RNA, 19 nt, Homo sapiens
  misc_RNA (1)...(19): siRNA sense strand
gauuaguucucuugacuuc

SEQ ID NO: 1769385 - RNA, 19 nt, Homo sapiens
  misc_RNA (1)...(19): siRNA sense strand
cauauuggcuagaagacuu

SEQ ID NO: 1769386 - RNA, 19 nt, Homo sapiens
  misc_RNA (1)...(19): siRNA sense strand
gaaauuaacaacgguaaca

SEQ ID NO: 1769387 - RNA, 19 nt, Homo sapiens
  misc_RNA (1)...(19): siRNA sense strand
ccaaaauucuuccaaguuu

SEQ ID NO: 1769388 - RNA, 19 nt, Homo sapiens
  misc_RNA (1)...(19): siRNA sense strand
ugaaugaugugauggauac

SEQ ID NO: 1769389 - RNA, 19 nt, Homo sapiens
  misc_RNA (1)...(19): siRNA sense strand
aggaugggcuuaucaaaug

SEQ ID NO: 1769390 - RNA, 19 nt, Homo sapiens
  misc_RNA (1)...(19): siRNA sense strand
ccacaaggauuuggcacaa

SEQ ID NO: 1769391 - RNA, 19 nt, Homo sapiens
  misc_RNA (1)...(19): siRNA sense strand
gaacugaccagggaacugu

SEQ ID NO: 1769392 - RNA, 19 nt, Homo sapiens
  misc_RNA (1)...(19): siRNA sense strand
gauaggcaaugaaauuaac

SEQ ID NO: 1769393 - RNA, 19 nt, Homo sapiens
  misc_RNA (1)...(19): siRNA sense strand
ugaaaucacacuuggauau

SEQ ID NO: 1769394 - RNA, 19 nt, Homo sapiens
  misc_RNA (1)...(19): siRNA sense strand
gggauguucuacugucaaa

SEQ ID NO: 1769395 - RNA, 19 nt, Homo sapiens
  misc_RNA (1)...(19): siRNA sense strand
cacuaagcauuucaucaua

SEQ ID NO: 1769396 - RNA, 19 nt, Homo sapiens
  misc_RNA (1)...(19): siRNA sense strand
gagcucagccacauaugaa

SEQ ID NO: 1769397 - RNA, 19 nt, Homo sapiens
  misc_RNA (1)...(19): siRNA sense strand
uugcagaaguugacacaaa

SEQ ID NO: 1769398 - RNA, 19 nt, Homo sapiens
  misc_RNA (1)...(19): siRNA sense strand
ccacauggaugaguuacau

SEQ ID NO: 1769399 - RNA, 19 nt, Homo sapiens
  misc_RNA (1)...(19): siRNA sense strand
ggauggagaaugauaugaa

SEQ ID NO: 1769400 - RNA, 19 nt, Homo sapiens
  misc_RNA (1)...(19): siRNA sense strand
gaagaaggaacagaccauu

SEQ ID NO: 1769401 - RNA, 19 nt, Homo sapiens
  misc_RNA (1)...(19): siRNA sense strand
caacuuuacugaccaagac

SEQ ID NO: 1769402 - RNA, 19 nt, Homo sapiens
  misc_RNA (1)...(19): siRNA sense strand
augguaaacuugcugauuu

SEQ ID NO: 1769403 - RNA, 19 nt, Homo sapiens
  misc_RNA (1)...(19): siRNA sense strand
gcaccacauggaugaguua

SEQ ID NO: 1769404 - RNA, 19 nt, Homo sapiens
  misc_RNA (1)...(19): siRNA sense strand
agaagauccugaaugagaa

SEQ ID NO: 1769405 - RNA, 19 nt, Homo sapiens
  misc_RNA (1)...(19): siRNA sense strand
gaacaaauggaagagucua

SEQ ID NO: 1769406 - RNA, 19 nt, Homo sapiens
  misc_RNA (1)...(19): siRNA sense strand
cugaagaccuugcacuguu

SEQ ID NO: 1769407 - RNA, 19 nt, Homo sapiens
  misc_RNA (1)...(19): siRNA sense strand
caaacaaggacacugaaga

SEQ ID NO: 1769408 - RNA, 19 nt, Homo sapiens
  misc_RNA (1)...(19): siRNA sense strand
gaauauacaggaccaacga

SEQ ID NO: 1769409 - RNA, 19 nt, Homo sapiens
  misc_RNA (1)...(19): siRNA sense strand
ggcagaugauugauuucua

SEQ ID NO: 1769410 - RNA, 19 nt, Homo sapiens
  misc_RNA (1)...(19): siRNA sense strand
uaaacaagagguagaacaa

SEQ ID NO: 1769411 - RNA, 19 nt, Homo sapiens
  misc_RNA (1)...(19): siRNA sense strand
gcaauggcucugaguaaau

SEQ ID NO: 1769412 - RNA, 19 nt, Homo sapiens
  misc_RNA (1)...(19): siRNA sense strand
aaaccuuacugguauuguu

SEQ ID NO: 1769413 - RNA, 19 nt, Homo sapiens
  misc_RNA (1)...(19): siRNA sense strand
uguuaaaccuuacugguau

SEQ ID NO: 1769414 - RNA, 19 nt, Homo sapiens
  misc_RNA (1)...(19): siRNA sense strand
guacauggaggaaauuauc

SEQ ID NO: 1769415 - RNA, 19 nt, Homo sapiens
  misc_RNA (1)...(19): siRNA sense strand
ugaagaccuugcacuguug

SEQ ID NO: 1769416 - RNA, 19 nt, Homo sapiens
  misc_RNA (1)...(19): siRNA sense strand
caacaucuacagagaagga

SEQ ID NO: 1769417 - RNA, 19 nt, Homo sapiens
  misc_RNA (1)...(19): siRNA sense strand
cuacugaagaccuuuauga

SEQ ID NO: 1769418 - RNA, 19 nt, Homo sapiens
  misc_RNA (1)...(19): siRNA sense strand
guaaauccacuaacucaca

SEQ ID NO: 1769419 - RNA, 19 nt, Homo sapiens
  misc_RNA (1)...(19): siRNA sense strand
gaaguggcccagcugaaug

SEQ ID NO: 1769420 - RNA, 19 nt, Homo sapiens
  misc_RNA (1)...(19): siRNA sense strand
cuccaagcguauauauuua

SEQ ID NO: 1769421 - RNA, 19 nt, Homo sapiens
  misc_RNA (1)...(19): siRNA sense strand
ugaagaauggcaggaaaua

SEQ ID NO: 1769422 - RNA, 19 nt, Homo sapiens
  misc_RNA (1)...(19): siRNA sense strand
acgauacucucaagauuau

SEQ ID NO: 1769423 - RNA, 19 nt, Homo sapiens
  misc_RNA (1)...(19): siRNA sense strand
gaagauccugaaugagaaa

SEQ ID NO: 1769424 - RNA, 19 nt, Homo sapiens
  misc_RNA (1)...(19): siRNA sense strand
cagcaauggcucugaguaa

SEQ ID NO: 1769425 - RNA, 19 nt, Homo sapiens
  misc_RNA (1)...(19): siRNA sense strand
acuccaagcguauauauuu

SEQ ID NO: 1769426 - RNA, 19 nt, Homo sapiens
  misc_RNA (1)...(19): siRNA sense strand
auacgauacucucaagauu

SEQ ID NO: 1769427 - RNA, 19 nt, Homo sapiens
  misc_RNA (1)...(19): siRNA sense strand
ggagcucagccacauauga

SEQ ID NO: 1769428 - RNA, 19 nt, Homo sapiens
  misc_RNA (1)...(19): siRNA sense strand
caauggcucugaguaaauc

SEQ ID NO: 1769429 - RNA, 19 nt, Homo sapiens
  misc_RNA (1)...(19): siRNA sense strand
ugaaaugaaaucacacuug

SEQ ID NO: 1769430 - RNA, 19 nt, Homo sapiens
  misc_RNA (1)...(19): siRNA sense strand
ugacuucuguucuuucaag

SEQ ID NO: 1769431 - RNA, 19 nt, Homo sapiens
  misc_RNA (1)...(19): siRNA sense strand
aacaagagguagaacaaau

SEQ ID NO: 1769432 - RNA, 19 nt, Homo sapiens
  misc_RNA (1)...(19): siRNA sense strand
ggaauaaauacacuaagca

SEQ ID NO: 1769433 - RNA, 19 nt, Homo sapiens
  misc_RNA (1)...(19): siRNA sense strand
ccagauugcucggcagaug

SEQ ID NO: 1769434 - RNA, 19 nt, Homo sapiens
  misc_RNA (1)...(19): siRNA sense strand
uacgauacucucaagauua

SEQ ID NO: 1769435 - RNA, 19 nt, Homo sapiens
  misc_RNA (1)...(19): siRNA sense strand
gaccauuuacaacaugaua

SEQ ID NO: 1769436 - RNA, 19 nt, Homo sapiens
  misc_RNA (1)...(19): siRNA sense strand
ucaaauggcaggaguucuu

SEQ ID NO: 1769437 - RNA, 19 nt, Homo sapiens
  misc_RNA (1)...(19): siRNA sense strand
cauaugaauuggcccugaa

SEQ ID NO: 1769438 - RNA, 19 nt, Homo sapiens
  misc_RNA (1)...(19): siRNA sense strand
gaaaagaaugccaaaauag

SEQ ID NO: 1769439 - RNA, 19 nt, Homo sapiens
  misc_RNA (1)...(19): siRNA sense strand
aaccuggaguuuccugaua

SEQ ID NO: 1769440 - RNA, 19 nt, Homo sapiens
  misc_RNA (1)...(19): siRNA sense strand
uaucaaacaaggacacuga

SEQ ID NO: 1769441 - RNA, 19 nt, Homo sapiens
  misc_RNA (1)...(19): siRNA sense strand
gaagacuuuaccuuaauga

SEQ ID NO: 1769442 - RNA, 19 nt, Homo sapiens
  misc_RNA (1)...(19): siRNA sense strand
agagagagguaugugcaaa

SEQ ID NO: 1769443 - RNA, 19 nt, Homo sapiens
  misc_RNA (1)...(19): siRNA sense strand
uauaggaguugcgcgauug

SEQ ID NO: 1769444 - RNA, 19 nt, Homo sapiens
  misc_RNA (1)...(19): siRNA sense strand
gaugguaaacuugcugauu

SEQ ID NO: 1769445 - RNA, 19 nt, Homo sapiens
  misc_RNA (1)...(19): siRNA sense strand
cuuccaaguuugauuaguu

SEQ ID NO: 1769446 - RNA, 19 nt, Homo sapiens
  misc_RNA (1)...(19): siRNA sense strand
gacauuuuauccccuaaua

SEQ ID NO: 1769447 - RNA, 19 nt, Homo sapiens
  misc_RNA (1)...(19): siRNA sense strand
guaccaauacuccagcuau

SEQ ID NO: 1769448 - RNA, 19 nt, Homo sapiens
  misc_RNA (1)...(19): siRNA sense strand
gagaaaggauggagaauga

SEQ ID NO: 1769449 - RNA, 19 nt, Homo sapiens
  misc_RNA (1)...(19): siRNA sense strand
ggagaaacuuagugaauaa

SEQ ID NO: 1769450 - RNA, 19 nt, Homo sapiens
  misc_RNA (1)...(19): siRNA sense strand
gaagauaggcaaugaaauu

SEQ ID NO: 1769451 - RNA, 19 nt, Homo sapiens
  misc_RNA (1)...(19): siRNA sense strand
caaggaaguuguaccaaua

SEQ ID NO: 1769452 - RNA, 19 nt, Homo sapiens
  misc_RNA (1)...(19): siRNA sense strand
ggaaaagaaugccaaaaua

SEQ ID NO: 1769453 - RNA, 19 nt, Homo sapiens
  misc_RNA (1)...(19): siRNA sense strand
ggacaaugguuacuccaaa

SEQ ID NO: 1769454 - RNA, 19 nt, Homo sapiens
  misc_RNA (1)...(19): siRNA sense strand
ggaggaaagugcugagaaa

SEQ ID NO: 1769455 - RNA, 19 nt, Homo sapiens
  misc_RNA (1)...(19): siRNA sense strand
gcaaaugcuugaccagauu

SEQ ID NO: 1769456 - RNA, 19 nt, Homo sapiens
  misc_RNA (1)...(19): siRNA sense strand
gaacagaccauuuacaaca

SEQ ID NO: 1769457 - RNA, 19 nt, Homo sapiens
  misc_RNA (1)...(19): siRNA sense strand
gcacaaacuacuacauaua

SEQ ID NO: 1769458 - RNA, 19 nt, Homo sapiens
  misc_RNA (1)...(19): siRNA sense strand
gaaaggagucuaaagaaga

SEQ ID NO: 1769459 - RNA, 19 nt, Homo sapiens
  misc_RNA (1)...(19): siRNA sense strand
gcuagaagacuuuaccuua

SEQ ID NO: 1769460 - RNA, 19 nt, Homo sapiens
  misc_RNA (1)...(19): siRNA sense strand
ggcagaagauccugaauga

SEQ ID NO: 1769461 - RNA, 19 nt, Homo sapiens
  misc_RNA (1)...(19): siRNA sense strand
gaaaggauggagaaugaua

SEQ ID NO: 1769462 - RNA, 19 nt, Homo sapiens
  misc_RNA (1)...(19): siRNA sense strand
caacgaagaugcacaaacu

SEQ ID NO: 1769463 - RNA, 19 nt, Homo sapiens
  misc_RNA (1)...(19): siRNA sense strand
gaagucaggucagcagaaa

SEQ ID NO: 1769464 - RNA, 19 nt, Homo sapiens
  misc_RNA (1)...(19): siRNA sense strand
uaacaacgguaacauugaa

SEQ ID NO: 1769465 - RNA, 19 nt, Homo sapiens
  misc_RNA (1)...(19): siRNA sense strand
cuagaagacuuuaccuuaa

SEQ ID NO: 1769466 - RNA, 19 nt, Homo sapiens
  misc_RNA (1)...(19): siRNA sense strand
gaaaucacacuuggauaua

SEQ ID NO: 1769467 - RNA, 19 nt, Homo sapiens
  misc_RNA (1)...(19): siRNA sense strand
gauggagaaugauaugaaa

SEQ ID NO: 1769468 - RNA, 19 nt, Homo sapiens
  misc_RNA (1)...(19): siRNA sense strand
ugagaaacaugauauagga

SEQ ID NO: 1769469 - RNA, 19 nt, Homo sapiens
  misc_RNA (1)...(19): siRNA sense strand
caagaaaggagucuaaaga

SEQ ID NO: 1769470 - RNA, 19 nt, Homo sapiens
  misc_RNA (1)...(19): siRNA sense strand
gaaggugauugaaagaaau

SEQ ID NO: 1769471 - RNA, 19 nt, Homo sapiens
  misc_RNA (1)...(19): siRNA sense strand
ggcaggaguucuucaauga

SEQ ID NO: 1769472 - RNA, 19 nt, Homo sapiens
  misc_RNA (1)...(19): siRNA sense strand
gaagaugcacaaacuacua

SEQ ID NO: 1769473 - RNA, 19 nt, Homo sapiens
  misc_RNA (1)...(19): siRNA sense strand
agaaggaacagaccauuua

SEQ ID NO: 1769474 - RNA, 19 nt, Homo sapiens
  misc_RNA (1)...(19): siRNA sense strand
gaaacaugauauaggaguu

SEQ ID NO: 1769475 - RNA, 19 nt, Homo sapiens
  misc_RNA (1)...(19): siRNA sense strand
ggaaagugcugagaaacau

SEQ ID NO: 1769476 - RNA, 19 nt, Homo sapiens
  misc_RNA (1)...(19): siRNA sense strand
uggagaaacuuagugaaua

SEQ ID NO: 1769477 - RNA, 19 nt, Homo sapiens
  misc_RNA (1)...(19): siRNA sense strand
cgauugaacugacaaggaa

SEQ ID NO: 1769478 - RNA, 19 nt, Homo sapiens
  misc_RNA (1)...(19): siRNA sense strand
gaugugaaauuaacaaagg

SEQ ID NO: 1769479 - RNA, 19 nt, Homo sapiens
  misc_RNA (1)...(19): siRNA sense strand
uaacaugauucaacaaugg

SEQ ID NO: 1769480 - RNA, 19 nt, Homo sapiens
  misc_RNA (1)...(19): siRNA sense strand
ugaaggugauugaaagaaa

SEQ ID NO: 1769481 - RNA, 19 nt, Homo sapiens
  misc_RNA (1)...(19): siRNA sense strand
cagaagauccugaaugaga

SEQ ID NO: 1769482 - RNA, 19 nt, Homo sapiens
  misc_RNA (1)...(19): siRNA sense strand
gaggagaaguuugaagaug

SEQ ID NO: 1769483 - RNA, 19 nt, Homo sapiens
  misc_RNA (1)...(19): siRNA sense strand
gacaguacauggaggaaau

SEQ ID NO: 1769484 - RNA, 19 nt, Homo sapiens
  misc_RNA (1)...(19): siRNA sense strand
gcagaugauugauuucuac

SEQ ID NO: 1769485 - RNA, 19 nt, Homo sapiens
  misc_RNA (1)...(19): siRNA sense strand
ggagcuagaugcgauugaa

SEQ ID NO: 1769486 - RNA, 19 nt, Homo sapiens
  misc_RNA (1)...(19): siRNA sense strand
agagagggcugguguggaa

SEQ ID NO: 1769487 - RNA, 19 nt, Homo sapiens
  misc_RNA (1)...(19): siRNA sense strand
acaaagacuugguaacuca

SEQ ID NO: 1769488 - RNA, 19 nt, Homo sapiens
  misc_RNA (1)...(19): siRNA sense strand
gauuaguucucuugacuuc

SEQ ID NO: 1769489 - RNA, 19 nt, Homo sapiens
  misc_RNA (1)...(19): siRNA sense strand
cauauuggcuagaagacuu

SEQ ID NO: 1769490 - RNA, 19 nt, Homo sapiens
  misc_RNA (1)...(19): siRNA sense strand
ugaaugaugugauggauac

SEQ ID NO: 1769491 - RNA, 19 nt, Homo sapiens
  misc_RNA (1)...(19): siRNA sense strand
gaaauuaacaacgguaaca

SEQ ID NO: 1769492 - RNA, 19 nt, Homo sapiens
  misc_RNA (1)...(19): siRNA sense strand
ccaaaauucuuccaaguuu

SEQ ID NO: 1769493 - RNA, 19 nt, Homo sapiens
  misc_RNA (1)...(19): siRNA sense strand
aggaugggcuuaucaaaug

SEQ ID NO: 1769494 - RNA, 19 nt, Homo sapiens
  misc_RNA (1)...(19): siRNA sense strand
ccacaaggauuuggcacaa

SEQ ID NO: 1769495 - RNA, 19 nt, Homo sapiens
  misc_RNA (1)...(19): siRNA sense strand
gcagaaaauuccucaaaau

SEQ ID NO: 1769496 - RNA, 19 nt, Homo sapiens
  misc_RNA (1)...(19): siRNA sense strand
gaacugaccagggaacugu

SEQ ID NO: 1769497 - RNA, 19 nt, Homo sapiens
  misc_RNA (1)...(19): siRNA sense strand
gaaguuugaagaugcauau

SEQ ID NO: 1769498 - RNA, 19 nt, Homo sapiens
  misc_RNA (1)...(19): siRNA sense strand
gauaggcaaugaaauuaac

SEQ ID NO: 1769499 - RNA, 19 nt, Homo sapiens
  misc_RNA (1)...(19): siRNA sense strand
ugaaaucacacuuggauau

SEQ ID NO: 1769500 - RNA, 19 nt, Homo sapiens
  misc_RNA (1)...(19): siRNA sense strand
gggauguucuacugucaaa

SEQ ID NO: 1769501 - RNA, 19 nt, Homo sapiens
  misc_RNA (1)...(19): siRNA sense strand
cacuaagcauuucaucaua

SEQ ID NO: 1769502 - RNA, 19 nt, Homo sapiens
  misc_RNA (1)...(19): siRNA sense strand
gagcucagccacauaugaa

SEQ ID NO: 1769503 - RNA, 19 nt, Homo sapiens
  misc_RNA (1)...(19): siRNA sense strand
uugcagaaguugacacaaa

SEQ ID NO: 1769504 - RNA, 19 nt, Homo sapiens
  misc_RNA (1)...(19): siRNA sense strand
ccacauggaugaguuacau

SEQ ID NO: 1769505 - RNA, 19 nt, Homo sapiens
  misc_RNA (1)...(19): siRNA sense strand
ggauggagaaugauaugaa

SEQ ID NO: 1769506 - RNA, 19 nt, Homo sapiens
  misc_RNA (1)...(19): siRNA sense strand
agaagaagaacaacaagaa

SEQ ID NO: 1769507 - RNA, 19 nt, Homo sapiens
  misc_RNA (1)...(19): siRNA sense strand
ggagaaguuugaagaugca

SEQ ID NO: 1769508 - RNA, 19 nt, Homo sapiens
  misc_RNA (1)...(19): siRNA sense strand
ggcagaugauugauuucua

SEQ ID NO: 1769509 - RNA, 19 nt, Homo sapiens
  misc_RNA (1)...(19): siRNA sense strand
caacuuuacugaccaagac

SEQ ID NO: 1769510 - RNA, 19 nt, Homo sapiens
  misc_RNA (1)...(19): siRNA sense strand
augguaaacuugcugauuu

SEQ ID NO: 1769511 - RNA, 19 nt, Homo sapiens
  misc_RNA (1)...(19): siRNA sense strand
gcaccacauggaugaguua

SEQ ID NO: 1769512 - RNA, 19 nt, Homo sapiens
  misc_RNA (1)...(19): siRNA sense strand
gaauauacaggaccaacga

SEQ ID NO: 1769513 - RNA, 19 nt, Homo sapiens
  misc_RNA (1)...(19): siRNA sense strand
agaagauccugaaugagaa

SEQ ID NO: 1769514 - RNA, 19 nt, Homo sapiens
  misc_RNA (1)...(19): siRNA sense strand
gaacaaauggaagagucua

SEQ ID NO: 1769515 - RNA, 19 nt, Homo sapiens
  misc_RNA (1)...(19): siRNA sense strand
gaagaaggaacagaccauu

SEQ ID NO: 1769516 - RNA, 19 nt, Homo sapiens
  misc_RNA (1)...(19): siRNA sense strand
cugaagaccuugcacuguu

SEQ ID NO: 1769517 - RNA, 19 nt, Homo sapiens
  misc_RNA (1)...(19): siRNA sense strand
caaacaaggacacugaaga

SEQ ID NO: 1769518 - RNA, 19 nt, Homo sapiens
  misc_RNA (1)...(19): siRNA sense strand
uaaacaagagguagaacaa

SEQ ID NO: 1769519 - RNA, 19 nt, Homo sapiens
  misc_RNA (1)...(19): siRNA sense strand
gcaauggcucugaguaaau

SEQ ID NO: 1769520 - RNA, 19 nt, Homo sapiens
  misc_RNA (1)...(19): siRNA sense strand
aaaccuuacugguauuguu

SEQ ID NO: 1769521 - RNA, 19 nt, Homo sapiens
  misc_RNA (1)...(19): siRNA sense strand
uguuaaaccuuacugguau

SEQ ID NO: 1769522 - RNA, 19 nt, Homo sapiens
  misc_RNA (1)...(19): siRNA sense strand
guacauggaggaaauuauc

SEQ ID NO: 1769523 - RNA, 19 nt, Homo sapiens
  misc_RNA (1)...(19): siRNA sense strand
ugaagaccuugcacuguug

SEQ ID NO: 1769524 - RNA, 19 nt, Homo sapiens
  misc_RNA (1)...(19): siRNA sense strand
agaaaggagucuaaagaag

SEQ ID NO: 1769525 - RNA, 19 nt, Homo sapiens
  misc_RNA (1)...(19): siRNA sense strand
gaacauaugcaggagaagu

SEQ ID NO: 1769526 - RNA, 19 nt, Homo sapiens
  misc_RNA (1)...(19): siRNA sense strand
caacaucuacagagaagga

SEQ ID NO: 1769527 - RNA, 19 nt, Homo sapiens
  misc_RNA (1)...(19): siRNA sense strand
cuacugaagaccuuuauga

SEQ ID NO: 1769528 - RNA, 19 nt, Homo sapiens
  misc_RNA (1)...(19): siRNA sense strand
guaaauccacuaacucaca

SEQ ID NO: 1769529 - RNA, 19 nt, Homo sapiens
  misc_RNA (1)...(19): siRNA sense strand
gaaguggcccagcugaaug

SEQ ID NO: 1769530 - RNA, 19 nt, Homo sapiens
  misc_RNA (1)...(19): siRNA sense strand
cuccaagcguauauauuua

SEQ ID NO: 1769531 - RNA, 19 nt, Homo sapiens
  misc_RNA (1)...(19): siRNA sense strand
ugaagaauggcaggaaaua

SEQ ID NO: 1769532 - RNA, 19 nt, Homo sapiens
  misc_RNA (1)...(19): siRNA sense strand
acgauacucucaagauuau

SEQ ID NO: 1769533 - RNA, 19 nt, Homo sapiens
  misc_RNA (1)...(19): siRNA sense strand
gaagauccugaaugagaaa

SEQ ID NO: 1769534 - RNA, 19 nt, Homo sapiens
  misc_RNA (1)...(19): siRNA sense strand
gaagaagaacaacaagaag

SEQ ID NO: 1769535 - RNA, 19 nt, Homo sapiens
  misc_RNA (1)...(19): siRNA sense strand
caucaagaaaggagucuaa

SEQ ID NO: 1769536 - RNA, 19 nt, Homo sapiens
  misc_RNA (1)...(19): siRNA sense strand
gaauuagucaugacaucaa

SEQ ID NO: 1769537 - RNA, 19 nt, Homo sapiens
  misc_RNA (1)...(19): siRNA sense strand
agaaguuacuggagguuga

SEQ ID NO: 1769538 - RNA, 19 nt, Homo sapiens
  misc_RNA (1)...(19): siRNA sense strand
cagcaauggcucugaguaa

SEQ ID NO: 1769539 - RNA, 19 nt, Homo sapiens
  misc_RNA (1)...(19): siRNA sense strand
acuccaagcguauauauuu

SEQ ID NO: 1769540 - RNA, 19 nt, Homo sapiens
  misc_RNA (1)...(19): siRNA sense strand
auacgauacucucaagauu

SEQ ID NO: 1769541 - RNA, 19 nt, Homo sapiens
  misc_RNA (1)...(19): siRNA sense strand
aacaagagguagaacaaau

SEQ ID NO: 1769542 - RNA, 19 nt, Homo sapiens
  misc_RNA (1)...(19): siRNA sense strand
caagaugaaagagaaguaa

SEQ ID NO: 1769543 - RNA, 19 nt, Homo sapiens
  misc_RNA (1)...(19): siRNA sense strand
cuagaggaauuagucauga

SEQ ID NO: 1769544 - RNA, 19 nt, Homo sapiens
  misc_RNA (1)...(19): siRNA sense strand
ugaagaugcauaugagaaa

SEQ ID NO: 1769545 - RNA, 19 nt, Homo sapiens
  misc_RNA (1)...(19): siRNA sense strand
caauggcucugaguaaauc

SEQ ID NO: 1769546 - RNA, 19 nt, Homo sapiens
  misc_RNA (1)...(19): siRNA sense strand
ugaaaugaaaucacacuug

SEQ ID NO: 1769547 - RNA, 19 nt, Homo sapiens
  misc_RNA (1)...(19): siRNA sense strand
ugacuucuguucuuucaag

SEQ ID NO: 1769548 - RNA, 19 nt, Homo sapiens
  misc_RNA (1)...(19): siRNA sense strand
caaagaugcugcagauaaa

SEQ ID NO: 1769549 - RNA, 19 nt, Homo sapiens
  misc_RNA (1)...(19): siRNA sense strand
ucacgcaccucaacaauga

SEQ ID NO: 1769550 - RNA, 19 nt, Homo sapiens
  misc_RNA (1)...(19): siRNA sense strand
gcucaaagaugcugcagau

SEQ ID NO: 1769551 - RNA, 19 nt, Homo sapiens
  misc_RNA (1)...(19): siRNA sense strand
ucaaagaugcugcagauaa

SEQ ID NO: 1769552 - RNA, 19 nt, Homo sapiens
  misc_RNA (1)...(19): siRNA sense strand
gcgccaaccuguccacauu

SEQ ID NO: 1769553 - RNA, 19 nt, Homo sapiens
  misc_RNA (1)...(19): siRNA sense strand
gcaagaacgccaaggacaa

SEQ ID NO: 1769554 - RNA, 19 nt, Homo sapiens
  misc_RNA (1)...(19): siRNA sense strand
gaagaagaacuccaagaag

SEQ ID NO: 1769555 - RNA, 19 nt, Homo sapiens
  misc_RNA (1)...(19): siRNA sense strand
ggaaggccacgcuguuuga

SEQ ID NO: 1769556 - RNA, 19 nt, Homo sapiens
  misc_RNA (1)...(19): siRNA sense strand
agaagaagaacuccaagaa

SEQ ID NO: 1769557 - RNA, 19 nt, Homo sapiens
  misc_RNA (1)...(19): siRNA sense strand
acaaugagaaccugaagaa

SEQ ID NO: 1769558 - RNA, 19 nt, Homo sapiens
  misc_RNA (1)...(19): siRNA sense strand
ccaagaagaagaacuccaa

SEQ ID NO: 1769559 - RNA, 19 nt, Homo sapiens
  misc_RNA (1)...(19): siRNA sense strand
ccaacguggucuuccucua

SEQ ID NO: 1769560 - RNA, 19 nt, Homo sapiens
  misc_RNA (1)...(19): siRNA sense strand
caacaucacgcaccucaac

SEQ ID NO: 1769561 - RNA, 19 nt, Homo sapiens
  misc_RNA (1)...(19): siRNA sense strand
gcagcuaccagaacaacau

SEQ ID NO: 1769562 - RNA, 19 nt, Homo sapiens
  misc_RNA (1)...(19): siRNA sense strand
caagaagcggcuccuccua

SEQ ID NO: 1769563 - RNA, 19 nt, Homo sapiens
  misc_RNA (1)...(19): siRNA sense strand
gaccguugccucucuguca

SEQ ID NO: 1769564 - RNA, 19 nt, Homo sapiens
  misc_RNA (1)...(19): siRNA sense strand
ucuccgaccugaagaacga

SEQ ID NO: 1769565 - RNA, 19 nt, Homo sapiens
  misc_RNA (1)...(19): siRNA sense strand
uaaaugccgacccacacua

SEQ ID NO: 1769566 - RNA, 19 nt, Homo sapiens
  misc_RNA (1)...(19): siRNA sense strand
ccaaggacaagaaccugaa

SEQ ID NO: 1769567 - RNA, 19 nt, Homo sapiens
  misc_RNA (1)...(19): siRNA sense strand
caacguggucuuccucuac

SEQ ID NO: 1769568 - RNA, 19 nt, Homo sapiens
  misc_RNA (1)...(19): siRNA sense strand
gugcugccuuggaagagaa

SEQ ID NO: 1769569 - RNA, 19 nt, Homo sapiens
  misc_RNA (1)...(19): siRNA sense strand
augagaaccugaagaaguc

SEQ ID NO: 1769570 - RNA, 19 nt, Homo sapiens
  misc_RNA (1)...(19): siRNA sense strand
aaugagaaccugaagaagu

SEQ ID NO: 1769571 - RNA, 19 nt, Homo sapiens
  misc_RNA (1)...(19): siRNA sense strand
gaagcgccacuccaucauc

SEQ ID NO: 1769572 - RNA, 19 nt, Homo sapiens
  misc_RNA (1)...(19): siRNA sense strand
caagaacgccaaggacaag

SEQ ID NO: 1769573 - RNA, 19 nt, Homo sapiens
  misc_RNA (1)...(19): siRNA sense strand
ccucaugagcucaaagaug

SEQ ID NO: 1769574 - RNA, 19 nt, Homo sapiens
  misc_RNA (1)...(19): siRNA sense strand
gccuguaccucuccuacuc

SEQ ID NO: 1769575 - RNA, 19 nt, Homo sapiens
  misc_RNA (1)...(19): siRNA sense strand
aacagcagcuaccagaaca

SEQ ID NO: 1769576 - RNA, 19 nt, Homo sapiens
  misc_RNA (1)...(19): siRNA sense strand
caacaaugagaaccugaag

SEQ ID NO: 1769577 - RNA, 19 nt, Homo sapiens
  misc_RNA (1)...(19): siRNA sense strand
ucuccgugcugccuuggaa

SEQ ID NO: 1769578 - RNA, 19 nt, Homo sapiens
  misc_RNA (1)...(19): siRNA sense strand
cuacaugggcaacgagauc

SEQ ID NO: 1769579 - RNA, 19 nt, Homo sapiens
  misc_RNA (1)...(19): siRNA sense strand
gaacgccaaggacaagaac

SEQ ID NO: 1769580 - RNA, 19 nt, Homo sapiens
  misc_RNA (1)...(19): siRNA sense strand
caucacgcaccucaacaau

SEQ ID NO: 1769581 - RNA, 19 nt, Homo sapiens
  misc_RNA (1)...(19): siRNA sense strand
ucaacaaugagaaccugaa

SEQ ID NO: 1769582 - RNA, 19 nt, Homo sapiens
  misc_RNA (1)...(19): siRNA sense strand
aagaagaagaacuccaaga

SEQ ID NO: 1769583 - RNA, 19 nt, Homo sapiens
  misc_RNA (1)...(19): siRNA sense strand
gcaggaccagggcuucauc

SEQ ID NO: 1769584 - RNA, 19 nt, Homo sapiens
  misc_RNA (1)...(19): siRNA sense strand
cggaaggccacgcuguuug

SEQ ID NO: 1769585 - RNA, 19 nt, Homo sapiens
  misc_RNA (1)...(19): siRNA sense strand
ccaaagaaucggcaaauga

SEQ ID NO: 1769586 - RNA, 19 nt, Homo sapiens
  misc_RNA (1)...(19): siRNA sense strand
gcaugucccugugggugaa

SEQ ID NO: 1769587 - RNA, 19 nt, Homo sapiens
  misc_RNA (1)...(19): siRNA sense strand
aagauguucucccucaaga

SEQ ID NO: 1769588 - RNA, 19 nt, Homo sapiens
  misc_RNA (1)...(19): siRNA sense strand
aacaaucgcugcccucucu

SEQ ID NO: 1769589 - RNA, 19 nt, Homo sapiens
  misc_RNA (1)...(19): siRNA sense strand
guaaucauuccuuccacaa

SEQ ID NO: 1769590 - RNA, 19 nt, Homo sapiens
  misc_RNA (1)...(19): siRNA sense strand
ucuuagaugucaagcugaa

SEQ ID NO: 1769591 - RNA, 19 nt, Homo sapiens
  misc_RNA (1)...(19): siRNA sense strand
aaacaaacaagaggacugu

SEQ ID NO: 1769592 - RNA, 19 nt, Homo sapiens
  misc_RNA (1)...(19): siRNA sense strand
aaucauuccuuccacaacu

SEQ ID NO: 1769593 - RNA, 19 nt, Homo sapiens
  misc_RNA (1)...(19): siRNA sense strand
caagauguucucccucaag

SEQ ID NO: 1769594 - RNA, 19 nt, Homo sapiens
  misc_RNA (1)...(19): siRNA sense strand
uuccacaacugcugcaugu

SEQ ID NO: 1769595 - RNA, 19 nt, Homo sapiens
  misc_RNA (1)...(19): siRNA sense strand
cguggaagacggagaggaa

SEQ ID NO: 1769596 - RNA, 19 nt, Homo sapiens
  misc_RNA (1)...(19): siRNA sense strand
uccaaagaaucggcaaaug

SEQ ID NO: 1769597 - RNA, 19 nt, Homo sapiens
  misc_RNA (1)...(19): siRNA sense strand
acaaacaagaggacugugu

SEQ ID NO: 1769598 - RNA, 19 nt, Homo sapiens
  misc_RNA (1)...(19): siRNA sense strand
acaagauguucucccucaa

SEQ ID NO: 1769599 - RNA, 19 nt, Homo sapiens
  misc_RNA (1)...(19): siRNA sense strand
aagauguucucccucaaga

SEQ ID NO: 1769600 - RNA, 19 nt, Homo sapiens
  misc_RNA (1)...(19): siRNA sense strand
caagauguucucccucaag

SEQ ID NO: 1769601 - RNA, 19 nt, Homo sapiens
  misc_RNA (1)...(19): siRNA sense strand
cguggaagacggagaggaa

SEQ ID NO: 1769602 - RNA, 19 nt, Homo sapiens
  misc_RNA (1)...(19): siRNA sense strand
acaagauguucucccucaa

SEQ ID NO: 1769603 - RNA, 19 nt, Homo sapiens
  misc_RNA (1)...(19): siRNA sense strand
aagauguucucccucaaga

SEQ ID NO: 1769604 - RNA, 19 nt, Homo sapiens
  misc_RNA (1)...(19): siRNA sense strand
guaaucauuccuuccacaa

SEQ ID NO: 1769605 - RNA, 19 nt, Homo sapiens
  misc_RNA (1)...(19): siRNA sense strand
ucuuagaugucaagcugaa

SEQ ID NO: 1769606 - RNA, 19 nt, Homo sapiens
  misc_RNA (1)...(19): siRNA sense strand
aaacaaacaagaggacugu

SEQ ID NO: 1769607 - RNA, 19 nt, Homo sapiens
  misc_RNA (1)...(19): siRNA sense strand
aaucauuccuuccacaacu

SEQ ID NO: 1769608 - RNA, 19 nt, Homo sapiens
  misc_RNA (1)...(19): siRNA sense strand
caagauguucucccucaag

SEQ ID NO: 1769609 - RNA, 19 nt, Homo sapiens
  misc_RNA (1)...(19): siRNA sense strand
uuccacaacugcugcaugu

SEQ ID NO: 1769610 - RNA, 19 nt, Homo sapiens
  misc_RNA (1)...(19): siRNA sense strand
cguggaagacggagaggaa

SEQ ID NO: 1769611 - RNA, 19 nt, Homo sapiens
  misc_RNA (1)...(19): siRNA sense strand
acaaacaagaggacugugu

SEQ ID NO: 1769612 - RNA, 19 nt, Homo sapiens
  misc_RNA (1)...(19): siRNA sense strand
acaagauguucucccucaa

SEQ ID NO: 1769613 - RNA, 19 nt, Homo sapiens
  misc_RNA (1)...(19): siRNA sense strand
ggccacgacucccuguuua

SEQ ID NO: 1769614 - RNA, 19 nt, Homo sapiens
  misc_RNA (1)...(19): siRNA sense strand
gggaugagcucgauuuagg

SEQ ID NO: 1769615 - RNA, 19 nt, Homo sapiens
  misc_RNA (1)...(19): siRNA sense strand
agaccaagaugcagaagaa

SEQ ID NO: 1769616 - RNA, 19 nt, Homo sapiens
  misc_RNA (1)...(19): siRNA sense strand
ggaggacacagagcuauaa

SEQ ID NO: 1769617 - RNA, 19 nt, Homo sapiens
  misc_RNA (1)...(19): siRNA sense strand
uggguaagcugaaggacaa

SEQ ID NO: 1769618 - RNA, 19 nt, Homo sapiens
  misc_RNA (1)...(19): siRNA sense strand
gcaagaccaagaugcagaa

SEQ ID NO: 1769619 - RNA, 19 nt, Homo sapiens
  misc_RNA (1)...(19): siRNA sense strand
ucaaggaggccacccgaaa

SEQ ID NO: 1769620 - RNA, 19 nt, Homo sapiens
  misc_RNA (1)...(19): siRNA sense strand
gcagcgacgugauguucgu

SEQ ID NO: 1769621 - RNA, 19 nt, Homo sapiens
  misc_RNA (1)...(19): siRNA sense strand
ugaagggccacauggaaug

SEQ ID NO: 1769622 - RNA, 19 nt, Homo sapiens
  misc_RNA (1)...(19): siRNA sense strand
ucucugggcugccuaccau

SEQ ID NO: 1769623 - RNA, 19 nt, Homo sapiens
  misc_RNA (1)...(19): siRNA sense strand
caaggaggccacccgaaag

SEQ ID NO: 1769624 - RNA, 19 nt, Homo sapiens
  misc_RNA (1)...(19): siRNA sense strand
gggcagcgacgugauguuc

SEQ ID NO: 1769625 - RNA, 19 nt, Homo sapiens
  misc_RNA (1)...(19): siRNA sense strand
caacaucuggugccuagac

SEQ ID NO: 1769626 - RNA, 19 nt, Homo sapiens
  misc_RNA (1)...(19): siRNA sense strand
ggaggucagcaccgacuca

SEQ ID NO: 1769627 - RNA, 19 nt, Homo sapiens
  misc_RNA (1)...(19): siRNA sense strand
gcaucuggcagcuuccaau

SEQ ID NO: 1769628 - RNA, 19 nt, Homo sapiens
  misc_RNA (1)...(19): siRNA sense strand
uggaggacacagagcuaua

SEQ ID NO: 1769629 - RNA, 19 nt, Homo sapiens
  misc_RNA (1)...(19): siRNA sense strand
cgaccucgaggcuuugaug

SEQ ID NO: 1769630 - RNA, 19 nt, Homo sapiens
  misc_RNA (1)...(19): siRNA sense strand
ccugggaugagcucgauuu

SEQ ID NO: 1769631 - RNA, 19 nt, Homo sapiens
  misc_RNA (1)...(19): siRNA sense strand
ccagggcaccuacgccaau

SEQ ID NO: 1769632 - RNA, 19 nt, Homo sapiens
  misc_RNA (1)...(19): siRNA sense strand
cuagcccgcuggagaccuu

SEQ ID NO: 1769633 - RNA, 19 nt, Homo sapiens
  misc_RNA (1)...(19): siRNA sense strand
uggccucucugcacaugga

SEQ ID NO: 1769634 - RNA, 19 nt, Homo sapiens
  misc_RNA (1)...(19): siRNA sense strand
gcaaagaugcuguaaagaa

SEQ ID NO: 1769635 - RNA, 19 nt, Homo sapiens
  misc_RNA (1)...(19): siRNA sense strand
gaucauuacugaagauuug

SEQ ID NO: 1769636 - RNA, 19 nt, Homo sapiens
  misc_RNA (1)...(19): siRNA sense strand
gaagaaguuugagaagaaa

SEQ ID NO: 1769637 - RNA, 19 nt, Homo sapiens
  misc_RNA (1)...(19): siRNA sense strand
uaacaccagucccgguuua

SEQ ID NO: 1769638 - RNA, 19 nt, Homo sapiens
  misc_RNA (1)...(19): siRNA sense strand
agaagaaguuugagaagaa

SEQ ID NO: 1769639 - RNA, 19 nt, Homo sapiens
  misc_RNA (1)...(19): siRNA sense strand
gagagagcauugagacuga

SEQ ID NO: 1769640 - RNA, 19 nt, Homo sapiens
  misc_RNA (1)...(19): siRNA sense strand
caaagaugcuguaaagaag

SEQ ID NO: 1769641 - RNA, 19 nt, Homo sapiens
  misc_RNA (1)...(19): siRNA sense strand
ggaagaucauuacugaaga

SEQ ID NO: 1769642 - RNA, 19 nt, Homo sapiens
  misc_RNA (1)...(19): siRNA sense strand
gaagaucauuacugaagau

SEQ ID NO: 1769643 - RNA, 19 nt, Homo sapiens
  misc_RNA (1)...(19): siRNA sense strand
guaugaagacgcuuugaua

SEQ ID NO: 1769644 - RNA, 19 nt, Homo sapiens
  misc_RNA (1)...(19): siRNA sense strand
gaagucgggucuccugaug

SEQ ID NO: 1769645 - RNA, 19 nt, Homo sapiens
  misc_RNA (1)...(19): siRNA sense strand
caacagaaccucccaacau

SEQ ID NO: 1769646 - RNA, 19 nt, Homo sapiens
  misc_RNA (1)...(19): siRNA sense strand
gaagacgcuuugauagaug

SEQ ID NO: 1769647 - RNA, 19 nt, Homo sapiens
  misc_RNA (1)...(19): siRNA sense strand
caagauaaguacgugguuu

SEQ ID NO: 1769648 - RNA, 19 nt, Homo sapiens
  misc_RNA (1)...(19): siRNA sense strand
gaagauuuggugcaagaua

SEQ ID NO: 1769649 - RNA, 19 nt, Homo sapiens
  misc_RNA (1)...(19): siRNA sense strand
gaagaugaggaaaguguaa

SEQ ID NO: 1769650 - RNA, 19 nt, Homo sapiens
  misc_RNA (1)...(19): siRNA sense strand
gagaagaaagaguccauuu

SEQ ID NO: 1769651 - RNA, 19 nt, Homo sapiens
  misc_RNA (1)...(19): siRNA sense strand
gauccugcauucaaucuau

SEQ ID NO: 1769652 - RNA, 19 nt, Homo sapiens
  misc_RNA (1)...(19): siRNA sense strand
ucacagaaagccaucauuu

SEQ ID NO: 1769653 - RNA, 19 nt, Homo sapiens
  misc_RNA (1)...(19): siRNA sense strand
cagaagaaguuugagaaga

SEQ ID NO: 1769654 - RNA, 19 nt, Homo sapiens
  misc_RNA (1)...(19): siRNA sense strand
ugaagacgcuuugauagau

SEQ ID NO: 1769655 - RNA, 19 nt, Homo sapiens
  misc_RNA (1)...(19): siRNA sense strand
gcaguuguuucauauucaa

SEQ ID NO: 1769656 - RNA, 19 nt, Homo sapiens
  misc_RNA (1)...(19): siRNA sense strand
gcugaaaccaccaagauga

SEQ ID NO: 1769657 - RNA, 19 nt, Homo sapiens
  misc_RNA (1)...(19): siRNA sense strand
gaagaaagaguccauuuug

SEQ ID NO: 1769658 - RNA, 19 nt, Homo sapiens
  misc_RNA (1)...(19): siRNA sense strand
aagauuuggugcaagauaa

SEQ ID NO: 1769659 - RNA, 19 nt, Homo sapiens
  misc_RNA (1)...(19): siRNA sense strand
aacagaaccucccaacauu

SEQ ID NO: 1769660 - RNA, 19 nt, Homo sapiens
  misc_RNA (1)...(19): siRNA sense strand
gcgcuugucugggugauug

SEQ ID NO: 1769661 - RNA, 19 nt, Homo sapiens
  misc_RNA (1)...(19): siRNA sense strand
ugucguaggucuucugaug

SEQ ID NO: 1769662 - RNA, 19 nt, Homo sapiens
  misc_RNA (1)...(19): siRNA sense strand
cugaugcaguuguuucaua

SEQ ID NO: 1769663 - RNA, 19 nt, Homo sapiens
  misc_RNA (1)...(19): siRNA sense strand
ccucagauccucaacagaa

SEQ ID NO: 1769664 - RNA, 19 nt, Homo sapiens
  misc_RNA (1)...(19): siRNA sense strand
ggaauucugaguggugaua

SEQ ID NO: 1769665 - RNA, 19 nt, Homo sapiens
  misc_RNA (1)...(19): siRNA sense strand
guaagcgccucacagaaag

SEQ ID NO: 1769666 - RNA, 19 nt, Homo sapiens
  misc_RNA (1)...(19): siRNA sense strand
gaugggauccugcauucaa

SEQ ID NO: 1769667 - RNA, 19 nt, Homo sapiens
  misc_RNA (1)...(19): siRNA sense strand
ggcguugaauugaaagaaa

SEQ ID NO: 1769668 - RNA, 19 nt, Homo sapiens
  misc_RNA (1)...(19): siRNA sense strand
uguaagcgccucacagaaa

SEQ ID NO: 1769669 - RNA, 19 nt, Homo sapiens
  misc_RNA (1)...(19): siRNA sense strand
ccacgagccuaugcugaaa

SEQ ID NO: 1769670 - RNA, 19 nt, Homo sapiens
  misc_RNA (1)...(19): siRNA sense strand
gcauugagacugagagcuu

SEQ ID NO: 1769671 - RNA, 19 nt, Homo sapiens
  misc_RNA (1)...(19): siRNA sense strand
cauugagacugagagcuua

SEQ ID NO: 1769672 - RNA, 19 nt, Homo sapiens
  misc_RNA (1)...(19): siRNA sense strand
ccaagcacuucccaugaug

SEQ ID NO: 1769673 - RNA, 19 nt, Homo sapiens
  misc_RNA (1)...(19): siRNA sense strand
ugaugcaguuguuucauau

SEQ ID NO: 1769674 - RNA, 19 nt, Homo sapiens
  misc_RNA (1)...(19): siRNA sense strand
caacggccaagaugagaaa

SEQ ID NO: 1769675 - RNA, 19 nt, Homo sapiens
  misc_RNA (1)...(19): siRNA sense strand
caacggccaagaugagaaa

SEQ ID NO: 1769676 - RNA, 19 nt, Homo sapiens
  misc_RNA (1)...(19): siRNA sense strand
cgcaauuccugcagaagaa

SEQ ID NO: 1769677 - RNA, 19 nt, Homo sapiens
  misc_RNA (1)...(19): siRNA sense strand
auaaugcgcugccgaaguc

SEQ ID NO: 1769678 - RNA, 19 nt, Homo sapiens
  misc_RNA (1)...(19): siRNA sense strand
cagaaccucccaacauuug

SEQ ID NO: 1769679 - RNA, 19 nt, Homo sapiens
  misc_RNA (1)...(19): siRNA sense strand
cagacaugcugaagugugu

SEQ ID NO: 1769680 - RNA, 19 nt, Homo sapiens
  misc_RNA (1)...(19): siRNA sense strand
gauccuccaugcuaugagu

SEQ ID NO: 1769681 - RNA, 19 nt, Homo sapiens
  misc_RNA (1)...(19): siRNA sense strand
acagugauccuccaugcua

SEQ ID NO: 1769682 - RNA, 19 nt, Homo sapiens
  misc_RNA (1)...(19): siRNA sense strand
aagauaaguacgugguuua

SEQ ID NO: 1769683 - RNA, 19 nt, Homo sapiens
  misc_RNA (1)...(19): siRNA sense strand
gaugcucggaagaucauua

SEQ ID NO: 1769684 - RNA, 19 nt, Homo sapiens
  misc_RNA (1)...(19): siRNA sense strand
gcguugaauugaaagaaau

SEQ ID NO: 1769685 - RNA, 19 nt, Homo sapiens
  misc_RNA (1)...(19): siRNA sense strand
aggcagacaugcugaagug

SEQ ID NO: 1769686 - RNA, 19 nt, Homo sapiens
  misc_RNA (1)...(19): siRNA sense strand
cugaagauuuggugcaaga

SEQ ID NO: 1769687 - RNA, 19 nt, Homo sapiens
  misc_RNA (1)...(19): siRNA sense strand
gcaacugugccacugaaga

SEQ ID NO: 1769688 - RNA, 19 nt, Homo sapiens
  misc_RNA (1)...(19): siRNA sense strand
aagaugcuguaaagaagaa

SEQ ID NO: 1769689 - RNA, 19 nt, Homo sapiens
  misc_RNA (1)...(19): siRNA sense strand
cucggaagaucauuacuga

SEQ ID NO: 1769690 - RNA, 19 nt, Homo sapiens
  misc_RNA (1)...(19): siRNA sense strand
gcgcaauuccugcagaaga

SEQ ID NO: 1769691 - RNA, 19 nt, Homo sapiens
  misc_RNA (1)...(19): siRNA sense strand
ugaugucgcuccugguugu

SEQ ID NO: 1769692 - RNA, 19 nt, Homo sapiens
  misc_RNA (1)...(19): siRNA sense strand
acccacaucuguaugaaga

SEQ ID NO: 1769693 - RNA, 19 nt, Homo sapiens
  misc_RNA (1)...(19): siRNA sense strand
gcagaagaaguuugagaag

SEQ ID NO: 1769694 - RNA, 19 nt, Homo sapiens
  misc_RNA (1)...(19): siRNA sense strand
gauaaugcgcugccgaagu

SEQ ID NO: 1769695 - RNA, 19 nt, Homo sapiens
  misc_RNA (1)...(19): siRNA sense strand
gggugaagaugaggaaagu

SEQ ID NO: 1769696 - RNA, 19 nt, Homo sapiens
  misc_RNA (1)...(19): siRNA sense strand
aagaggaggucugggaguu

SEQ ID NO: 1769697 - RNA, 19 nt, Homo sapiens
  misc_RNA (1)...(19): siRNA sense strand
gauagaugagguagagaga

SEQ ID NO: 1769698 - RNA, 19 nt, Homo sapiens
  misc_RNA (1)...(19): siRNA sense strand
gcaagauaaguacgugguu

SEQ ID NO: 1769699 - RNA, 19 nt, Homo sapiens
  misc_RNA (1)...(19): siRNA sense strand
guuuauacccacaucugua

SEQ ID NO: 1769700 - RNA, 19 nt, Homo sapiens
  misc_RNA (1)...(19): siRNA sense strand
ugaaguguguccgcagaga

SEQ ID NO: 1769701 - RNA, 19 nt, Homo sapiens
  misc_RNA (1)...(19): siRNA sense strand
gugaagaugaggaaagugu

SEQ ID NO: 1769702 - RNA, 19 nt, Homo sapiens
  misc_RNA (1)...(19): siRNA sense strand
cggaagaucauuacugaag

SEQ ID NO: 1769703 - RNA, 19 nt, Homo sapiens
  misc_RNA (1)...(19): siRNA sense strand
acagaaccucccaacauuu

SEQ ID NO: 1769704 - RNA, 19 nt, Homo sapiens
  misc_RNA (1)...(19): siRNA sense strand
ggccuuuggcguugaauug

SEQ ID NO: 1769705 - RNA, 19 nt, Homo sapiens
  misc_RNA (1)...(19): siRNA sense strand
ccuacacccuugucagcaa

SEQ ID NO: 1769706 - RNA, 19 nt, Homo sapiens
  misc_RNA (1)...(19): siRNA sense strand
ugagguagagagagcauug

SEQ ID NO: 1769707 - RNA, 19 nt, Homo sapiens
  misc_RNA (1)...(19): siRNA sense strand
ccaggccacugcagagaag

SEQ ID NO: 1769708 - RNA, 19 nt, Homo sapiens
  misc_RNA (1)...(19): siRNA sense strand
caacugugccacugaagag

SEQ ID NO: 1769709 - RNA, 19 nt, Homo sapiens
  misc_RNA (1)...(19): siRNA sense strand
uccaagcacuucccaugau

SEQ ID NO: 1769710 - RNA, 19 nt, Homo sapiens
  misc_RNA (1)...(19): siRNA sense strand
ugaagaugaggaaagugua

SEQ ID NO: 1769711 - RNA, 19 nt, Homo sapiens
  misc_RNA (1)...(19): siRNA sense strand
ggaguuccugggucuguug

SEQ ID NO: 1769712 - RNA, 19 nt, Homo sapiens
  misc_RNA (1)...(19): siRNA sense strand
aagacgcuuugauagauga

SEQ ID NO: 1769713 - RNA, 19 nt, Homo sapiens
  misc_RNA (1)...(19): siRNA sense strand
gaugagaguccugcguguu

SEQ ID NO: 1769714 - RNA, 19 nt, Homo sapiens
  misc_RNA (1)...(19): siRNA sense strand
gcucggaagaucauuacug

SEQ ID NO: 1769715 - RNA, 19 nt, Homo sapiens
  misc_RNA (1)...(19): siRNA sense strand
aagaaagaguccauuuuga

SEQ ID NO: 1769716 - RNA, 19 nt, Homo sapiens
  misc_RNA (1)...(19): siRNA sense strand
acaccagucccgguuuaua

SEQ ID NO: 1769717 - RNA, 19 nt, Homo sapiens
  misc_RNA (1)...(19): siRNA sense strand
guaacaccagucccgguuu

SEQ ID NO: 1769718 - RNA, 19 nt, Homo sapiens
  misc_RNA (1)...(19): siRNA sense strand
guaagcuccguaccuguga

SEQ ID NO: 1769719 - RNA, 19 nt, Homo sapiens
  misc_RNA (1)...(19): siRNA sense strand
gcuccguaccugugagaaa

SEQ ID NO: 1769720 - RNA, 19 nt, Homo sapiens
  misc_RNA (1)...(19): siRNA sense strand
gaauucugaguggugauaa

SEQ ID NO: 1769721 - RNA, 19 nt, Homo sapiens
  misc_RNA (1)...(19): siRNA sense strand
gaaagaguccauuuugaag

SEQ ID NO: 1769722 - RNA, 19 nt, Homo sapiens
  misc_RNA (1)...(19): siRNA sense strand
guccaagcacuucccauga

SEQ ID NO: 1769723 - RNA, 19 nt, Homo sapiens
  misc_RNA (1)...(19): siRNA sense strand
gguagagagagcauugaga

SEQ ID NO: 1769724 - RNA, 19 nt, Homo sapiens
  misc_RNA (1)...(19): siRNA sense strand
uaugaagacgcuuugauag

SEQ ID NO: 1769725 - RNA, 19 nt, Homo sapiens
  misc_RNA (1)...(19): siRNA sense strand
gcuccugguugugaucuuc

SEQ ID NO: 1769726 - RNA, 19 nt, Homo sapiens
  misc_RNA (1)...(19): siRNA sense strand
agaagaaggcgugcacguu

SEQ ID NO: 1769727 - RNA, 19 nt, Homo sapiens
  misc_RNA (1)...(19): siRNA sense strand
augcaguuguuucauauuc

SEQ ID NO: 1769728 - RNA, 19 nt, Homo sapiens
  misc_RNA (1)...(19): siRNA sense strand
gggaguuccugggucuguu

SEQ ID NO: 1769729 - RNA, 19 nt, Homo sapiens
  misc_RNA (1)...(19): siRNA sense strand
gcagagaagcaggaagagu

SEQ ID NO: 1769730 - RNA, 19 nt, Homo sapiens
  misc_RNA (1)...(19): siRNA sense strand
aaagaugcuguaaagaaga

SEQ ID NO: 1769731 - RNA, 19 nt, Homo sapiens
  misc_RNA (1)...(19): siRNA sense strand
gaaggcagacaugcugaag

SEQ ID NO: 1769732 - RNA, 19 nt, Homo sapiens
  misc_RNA (1)...(19): siRNA sense strand
gcagguguuucaggcucaa

SEQ ID NO: 1769733 - RNA, 19 nt, Homo sapiens
  misc_RNA (1)...(19): siRNA sense strand
cagugauccuccaugcuau

SEQ ID NO: 1769734 - RNA, 19 nt, Homo sapiens
  misc_RNA (1)...(19): siRNA sense strand
agaagagucucaugauuau

SEQ ID NO: 1769735 - RNA, 19 nt, Homo sapiens
  misc_RNA (1)...(19): siRNA sense strand
ccgaaugucucauccaaau

SEQ ID NO: 1769736 - RNA, 19 nt, Homo sapiens
  misc_RNA (1)...(19): siRNA sense strand
ccaaauccuucucucugaa

SEQ ID NO: 1769737 - RNA, 19 nt, Homo sapiens
  misc_RNA (1)...(19): siRNA sense strand
gcugcaagauggcaagaga

SEQ ID NO: 1769738 - RNA, 19 nt, Homo sapiens
  misc_RNA (1)...(19): siRNA sense strand
cagcugcucucugacauga

SEQ ID NO: 1769739 - RNA, 19 nt, Homo sapiens
  misc_RNA (1)...(19): siRNA sense strand
caagauggcaagagacuuc

SEQ ID NO: 1769740 - RNA, 19 nt, Homo sapiens
  misc_RNA (1)...(19): siRNA sense strand
ccagagaaguccaaaaguu

SEQ ID NO: 1769741 - RNA, 19 nt, Homo sapiens
  misc_RNA (1)...(19): siRNA sense strand
gcccgaaugucucauccaa

SEQ ID NO: 1769742 - RNA, 19 nt, Homo sapiens
  misc_RNA (1)...(19): siRNA sense strand
gaacaggcagagauugauc

SEQ ID NO: 1769743 - RNA, 19 nt, Homo sapiens
  misc_RNA (1)...(19): siRNA sense strand
cuacaacgaccacuacaug

SEQ ID NO: 1769744 - RNA, 19 nt, Homo sapiens
  misc_RNA (1)...(19): siRNA sense strand
gcgaagggacccagugaga

SEQ ID NO: 1769745 - RNA, 19 nt, Homo sapiens
  misc_RNA (1)...(19): siRNA sense strand
gacaugaagcugcaagaug

SEQ ID NO: 1769746 - RNA, 19 nt, Homo sapiens
  misc_RNA (1)...(19): siRNA sense strand
cacaauuacuuugggcuuu

SEQ ID NO: 1769747 - RNA, 19 nt, Homo sapiens
  misc_RNA (1)...(19): siRNA sense strand
guccugugcucgucucuug

SEQ ID NO: 1769748 - RNA, 19 nt, Homo sapiens
  misc_RNA (1)...(19): siRNA sense strand
gaagggacccagugagaac

SEQ ID NO: 1769749 - RNA, 19 nt, Homo sapiens
  misc_RNA (1)...(19): siRNA sense strand
uccaaauccuucucucuga

SEQ ID NO: 1769750 - RNA, 19 nt, Homo sapiens
  misc_RNA (1)...(19): siRNA sense strand
acaacgaccacuacaugua

SEQ ID NO: 1769751 - RNA, 19 nt, Homo sapiens
  misc_RNA (1)...(19): siRNA sense strand
cacagaaggucccgugaag

SEQ ID NO: 1769752 - RNA, 19 nt, Homo sapiens
  misc_RNA (1)...(19): siRNA sense strand
gagcuuuuguucacaguuu

SEQ ID NO: 1769753 - RNA, 19 nt, Homo sapiens
  misc_RNA (1)...(19): siRNA sense strand
gauguccucucugucaugu

SEQ ID NO: 1769754 - RNA, 19 nt, Homo sapiens
  misc_RNA (1)...(19): siRNA sense strand
acaauuacuuugggcuuug

SEQ ID NO: 1769755 - RNA, 19 nt, Homo sapiens
  misc_RNA (1)...(19): siRNA sense strand
ugaaggcacuacagaacca

SEQ ID NO: 1769756 - RNA, 19 nt, Homo sapiens
  misc_RNA (1)...(19): siRNA sense strand
caacgaccacuacauguac

SEQ ID NO: 1769757 - RNA, 19 nt, Homo sapiens
  misc_RNA (1)...(19): siRNA sense strand
ugaguguggucauuugcaa

SEQ ID NO: 1769758 - RNA, 19 nt, Homo sapiens
  misc_RNA (1)...(19): siRNA sense strand
ccacagaaggucccgugaa

SEQ ID NO: 1769759 - RNA, 19 nt, Homo sapiens
  misc_RNA (1)...(19): siRNA sense strand
gggcagcacaauuacuuug

SEQ ID NO: 1769760 - RNA, 19 nt, Homo sapiens
  misc_RNA (1)...(19): siRNA sense strand
gcugcucucugacaugaag

SEQ ID NO: 1769761 - RNA, 19 nt, Homo sapiens
  misc_RNA (1)...(19): siRNA sense strand
aaacagcccgaaugucuca

SEQ ID NO: 1769762 - RNA, 19 nt, Homo sapiens
  misc_RNA (1)...(19): siRNA sense strand
ggagaucagugggcauucg

SEQ ID NO: 1769763 - RNA, 19 nt, Homo sapiens
  misc_RNA (1)...(19): siRNA sense strand
ggcuuuggguggauguuga

SEQ ID NO: 1769764 - RNA, 19 nt, Homo sapiens
  misc_RNA (1)...(19): siRNA sense strand
gaucgaggacuggguguuc

SEQ ID NO: 1769765 - RNA, 19 nt, Homo sapiens
  misc_RNA (1)...(19): siRNA sense strand
ugaggaacaggcagagauu

SEQ ID NO: 1769766 - RNA, 19 nt, Homo sapiens
  misc_RNA (1)...(19): siRNA sense strand
cgaagggacccagugagaa

SEQ ID NO: 1769767 - RNA, 19 nt, Homo sapiens
  misc_RNA (1)...(19): siRNA sense strand
ggguuugccucuugcucuu

SEQ ID NO: 1769768 - RNA, 19 nt, Homo sapiens
  misc_RNA (1)...(19): siRNA sense strand
gcauguguucgguggguuu

SEQ ID NO: 1769769 - RNA, 19 nt, Homo sapiens
  misc_RNA (1)...(19): siRNA sense strand
ggaacaggcagagauugau

SEQ ID NO: 1769770 - RNA, 19 nt, Homo sapiens
  misc_RNA (1)...(19): siRNA sense strand
gaaugucucauccaaaucc

SEQ ID NO: 1769771 - RNA, 19 nt, Homo sapiens
  misc_RNA (1)...(19): siRNA sense strand
cgaggaccaugacaagcau

SEQ ID NO: 1769772 - RNA, 19 nt, Homo sapiens
  misc_RNA (1)...(19): siRNA sense strand
ccacagacaggagcugaga

SEQ ID NO: 1769773 - RNA, 19 nt, Homo sapiens
  misc_RNA (1)...(19): siRNA sense strand
ggauguugauuuugggaaa

SEQ ID NO: 1769774 - RNA, 19 nt, Homo sapiens
  misc_RNA (1)...(19): siRNA sense strand
caggagcaguucacagcau

SEQ ID NO: 1769775 - RNA, 19 nt, Homo sapiens
  misc_RNA (1)...(19): siRNA sense strand
gugcucgucucuugaucug

SEQ ID NO: 1769776 - RNA, 19 nt, Homo sapiens
  misc_RNA (1)...(19): siRNA sense strand
cagagaaguccaaaaguuu

SEQ ID NO: 1769777 - RNA, 19 nt, Homo sapiens
  misc_RNA (1)...(19): siRNA sense strand
gaugcuuccuguucuccau

SEQ ID NO: 1769778 - RNA, 19 nt, Homo sapiens
  misc_RNA (1)...(19): siRNA sense strand
gaaggccagagaaguccaa

SEQ ID NO: 1769779 - RNA, 19 nt, Homo sapiens
  misc_RNA (1)...(19): siRNA sense strand
gaccacuacauguacuuga

SEQ ID NO: 1769780 - RNA, 19 nt, Homo sapiens
  misc_RNA (1)...(19): siRNA sense strand
ucgguggguuugccucuug

SEQ ID NO: 1769781 - RNA, 19 nt, Homo sapiens
  misc_RNA (1)...(19): siRNA sense strand
gaggaacaggcagagauug

SEQ ID NO: 1769782 - RNA, 19 nt, Homo sapiens
  misc_RNA (1)...(19): siRNA sense strand
ggauguccucucugucaug

SEQ ID NO: 1769783 - RNA, 19 nt, Homo sapiens
  misc_RNA (1)...(19): siRNA sense strand
uguccucucugucauguac

SEQ ID NO: 1769784 - RNA, 19 nt, Homo sapiens
  misc_RNA (1)...(19): siRNA sense strand
agagaaguccaaaaguuua

SEQ ID NO: 1769785 - RNA, 19 nt, Homo sapiens
  misc_RNA (1)...(19): siRNA sense strand
accacuacauguacuugaa

SEQ ID NO: 1769786 - RNA, 19 nt, Homo sapiens
  misc_RNA (1)...(19): siRNA sense strand
ucccaccuguugaaaggaa

SEQ ID NO: 1769787 - RNA, 19 nt, Homo sapiens
  misc_RNA (1)...(19): siRNA sense strand
aggaacaggcagagauuga

SEQ ID NO: 1769788 - RNA, 19 nt, Homo sapiens
  misc_RNA (1)...(19): siRNA sense strand
gaagagucucaugauuaug

SEQ ID NO: 1769789 - RNA, 19 nt, Homo sapiens
  misc_RNA (1)...(19): siRNA sense strand
gaacgugaaugaucucuuc

SEQ ID NO: 1769790 - RNA, 19 nt, Homo sapiens
  misc_RNA (1)...(19): siRNA sense strand
ggagcgauaucacagcuua

SEQ ID NO: 1769791 - RNA, 19 nt, Homo sapiens
  misc_RNA (1)...(19): siRNA sense strand
gcuaagaaguugccaaaga

SEQ ID NO: 1769792 - RNA, 19 nt, Homo sapiens
  misc_RNA (1)...(19): siRNA sense strand
ggcaauagcuaagaaguug

SEQ ID NO: 1769793 - RNA, 19 nt, Homo sapiens
  misc_RNA (1)...(19): siRNA sense strand
acacaacagugaaguuuga

SEQ ID NO: 1769794 - RNA, 19 nt, Homo sapiens
  misc_RNA (1)...(19): siRNA sense strand
ucaaagggcaguuccauga

SEQ ID NO: 1769795 - RNA, 19 nt, Homo sapiens
  misc_RNA (1)...(19): siRNA sense strand
acaaacguaugguggagua

SEQ ID NO: 1769796 - RNA, 19 nt, Homo sapiens
  misc_RNA (1)...(19): siRNA sense strand
gaaagucaagccugguauu

SEQ ID NO: 1769797 - RNA, 19 nt, Homo sapiens
  misc_RNA (1)...(19): siRNA sense strand
aagcugcaaucgugguuua

SEQ ID NO: 1769798 - RNA, 19 nt, Homo sapiens
  misc_RNA (1)...(19): siRNA sense strand
aagcugaccuggccaacaa

SEQ ID NO: 1769799 - RNA, 19 nt, Homo sapiens
  misc_RNA (1)...(19): siRNA sense strand
agacagcuaugaacgugaa

SEQ ID NO: 1769800 - RNA, 19 nt, Homo sapiens
  misc_RNA (1)...(19): siRNA sense strand
cuaagaaguugccaaagag

SEQ ID NO: 1769801 - RNA, 19 nt, Homo sapiens
  misc_RNA (1)...(19): siRNA sense strand
aaagucaagccugguauua

SEQ ID NO: 1769802 - RNA, 19 nt, Homo sapiens
  misc_RNA (1)...(19): siRNA sense strand
gaacagucccagcagaaca

SEQ ID NO: 1769803 - RNA, 19 nt, Homo sapiens
  misc_RNA (1)...(19): siRNA sense strand
ugacacaacagugaaguuu

SEQ ID NO: 1769804 - RNA, 19 nt, Homo sapiens
  misc_RNA (1)...(19): siRNA sense strand
gcagaugacaacagcuuau

SEQ ID NO: 1769805 - RNA, 19 nt, Homo sapiens
  misc_RNA (1)...(19): siRNA sense strand
gcuaugaacgugaaugauc

SEQ ID NO: 1769806 - RNA, 19 nt, Homo sapiens
  misc_RNA (1)...(19): siRNA sense strand
gggaaagucaagccuggua

SEQ ID NO: 1769807 - RNA, 19 nt, Homo sapiens
  misc_RNA (1)...(19): siRNA sense strand
gagaaucugcagugggaaa

SEQ ID NO: 1769808 - RNA, 19 nt, Homo sapiens
  misc_RNA (1)...(19): siRNA sense strand
agacaugggugaaggaacu

SEQ ID NO: 1769809 - RNA, 19 nt, Homo sapiens
  misc_RNA (1)...(19): siRNA sense strand
cagcugggcaggagcgaua

SEQ ID NO: 1769810 - RNA, 19 nt, Homo sapiens
  misc_RNA (1)...(19): siRNA sense strand
gaagaggcccaggcauaug

SEQ ID NO: 1769811 - RNA, 19 nt, Homo sapiens
  misc_RNA (1)...(19): siRNA sense strand
gcacagcuaggcccaaugg

SEQ ID NO: 1769812 - RNA, 19 nt, Homo sapiens
  misc_RNA (1)...(19): siRNA sense strand
cuagaugacacaacaguga

SEQ ID NO: 1769813 - RNA, 19 nt, Homo sapiens
  misc_RNA (1)...(19): siRNA sense strand
gagcaaagacaugggugaa

SEQ ID NO: 1769814 - RNA, 19 nt, Homo sapiens
  misc_RNA (1)...(19): siRNA sense strand
caacagugaaguuugagau

SEQ ID NO: 1769815 - RNA, 19 nt, Homo sapiens
  misc_RNA (1)...(19): siRNA sense strand
uagcuaagaaguugccaaa

SEQ ID NO: 1769816 - RNA, 19 nt, Homo sapiens
  misc_RNA (1)...(19): siRNA sense strand
aagggcaguuccaugagua

SEQ ID NO: 1769817 - RNA, 19 nt, Homo sapiens
  misc_RNA (1)...(19): siRNA sense strand
ugaagaggcccaggcauau

SEQ ID NO: 1769818 - RNA, 19 nt, Homo sapiens
  misc_RNA (1)...(19): siRNA sense strand
ggaaagucaagccugguau

SEQ ID NO: 1769819 - RNA, 19 nt, Homo sapiens
  misc_RNA (1)...(19): siRNA sense strand
ccaguccguuugucuagau

SEQ ID NO: 1769820 - RNA, 19 nt, Homo sapiens
  misc_RNA (1)...(19): siRNA sense strand
ggccaguccuagcaucguu

SEQ ID NO: 1769821 - RNA, 19 nt, Homo sapiens
  misc_RNA (1)...(19): siRNA sense strand
aaagggcaguuccaugagu

SEQ ID NO: 1769822 - RNA, 19 nt, Homo sapiens
  misc_RNA (1)...(19): siRNA sense strand
agaaguugccaaagaguga

SEQ ID NO: 1769823 - RNA, 19 nt, Homo sapiens
  misc_RNA (1)...(19): siRNA sense strand
uuacuaaucaggaaaccuu

SEQ ID NO: 1769824 - RNA, 19 nt, Homo sapiens
  misc_RNA (1)...(19): siRNA sense strand
caagccugguauuacguuu

SEQ ID NO: 1769825 - RNA, 19 nt, Homo sapiens
  misc_RNA (1)...(19): siRNA sense strand
gaccuggccaacaaacgua

SEQ ID NO: 1769826 - RNA, 19 nt, Homo sapiens
  misc_RNA (1)...(19): siRNA sense strand
cagcuaugaacgugaauga

SEQ ID NO: 1769827 - RNA, 19 nt, Homo sapiens
  misc_RNA (1)...(19): siRNA sense strand
cuaugaacgugaaugaucu

SEQ ID NO: 1769828 - RNA, 19 nt, Homo sapiens
  misc_RNA (1)...(19): siRNA sense strand
cgacaggccaguccuagca

SEQ ID NO: 1769829 - RNA, 19 nt, Homo sapiens
  misc_RNA (1)...(19): siRNA sense strand
augaagaggcccaggcaua

SEQ ID NO: 1769830 - RNA, 19 nt, Homo sapiens
  misc_RNA (1)...(19): siRNA sense strand
caaagacaugggugaagga

SEQ ID NO: 1769831 - RNA, 19 nt, Homo sapiens
  misc_RNA (1)...(19): siRNA sense strand
aacguaugguggaguauga

SEQ ID NO: 1769832 - RNA, 19 nt, Homo sapiens
  misc_RNA (1)...(19): siRNA sense strand
gggcaggagcgauaucaca

SEQ ID NO: 1769833 - RNA, 19 nt, Homo sapiens
  misc_RNA (1)...(19): siRNA sense strand
gcagaacaagagccagugu

SEQ ID NO: 1769834 - RNA, 19 nt, Homo sapiens
  misc_RNA (1)...(19): siRNA sense strand
gacacaacagugaaguuug

SEQ ID NO: 1769835 - RNA, 19 nt, Homo sapiens
  misc_RNA (1)...(19): siRNA sense strand
gaaguugccaaagagugaa

SEQ ID NO: 1769836 - RNA, 19 nt, Homo sapiens
  misc_RNA (1)...(19): siRNA sense strand
cagugaaguuugagaucug

SEQ ID NO: 1769837 - RNA, 19 nt, Homo sapiens
  misc_RNA (1)...(19): siRNA sense strand
acagugaaguuugagaucu

SEQ ID NO: 1769838 - RNA, 19 nt, Homo sapiens
  misc_RNA (1)...(19): siRNA sense strand
cagaugacaacagcuuauu

SEQ ID NO: 1769839 - RNA, 19 nt, Homo sapiens
  misc_RNA (1)...(19): siRNA sense strand
aagcacagcuaggcccaau

SEQ ID NO: 1769840 - RNA, 19 nt, Homo sapiens
  misc_RNA (1)...(19): siRNA sense strand
gccaguccuagcaucguua

SEQ ID NO: 1769841 - RNA, 19 nt, Homo sapiens
  misc_RNA (1)...(19): siRNA sense strand
ccaggcauaugcagaugac

SEQ ID NO: 1769842 - RNA, 19 nt, Homo sapiens
  misc_RNA (1)...(19): siRNA sense strand
gcccaggcauaugcagaug

SEQ ID NO: 1769843 - RNA, 19 nt, Homo sapiens
  misc_RNA (1)...(19): siRNA sense strand
uagaugacacaacagugaa

SEQ ID NO: 1769844 - RNA, 19 nt, Homo sapiens
  misc_RNA (1)...(19): siRNA sense strand
uggcaauagcuaagaaguu

SEQ ID NO: 1769845 - RNA, 19 nt, Homo sapiens
  misc_RNA (1)...(19): siRNA sense strand
gaucucuuccuggcaauag

SEQ ID NO: 1769846 - RNA, 19 nt, Homo sapiens
  misc_RNA (1)...(19): siRNA sense strand
ccaagacagcuaugaacgu

SEQ ID NO: 1769847 - RNA, 19 nt, Homo sapiens
  misc_RNA (1)...(19): siRNA sense strand
gaagugaaguuguacaaga

SEQ ID NO: 1769848 - RNA, 19 nt, Homo sapiens
  misc_RNA (1)...(19): siRNA sense strand
ggaacaagccggagcugua

SEQ ID NO: 1769849 - RNA, 19 nt, Homo sapiens
  misc_RNA (1)...(19): siRNA sense strand
gcucagaaaucagcucuau

SEQ ID NO: 1769850 - RNA, 19 nt, Homo sapiens
  misc_RNA (1)...(19): siRNA sense strand
ucagaaaucagcucuauug

SEQ ID NO: 1769851 - RNA, 19 nt, Homo sapiens
  misc_RNA (1)...(19): siRNA sense strand
ggagaaggccuacaucaag

SEQ ID NO: 1769852 - RNA, 19 nt, Homo sapiens
  misc_RNA (1)...(19): siRNA sense strand
gaacaagccggagcuguau

SEQ ID NO: 1769853 - RNA, 19 nt, Homo sapiens
  misc_RNA (1)...(19): siRNA sense strand
ggagaaguacgacaacaug

SEQ ID NO: 1769854 - RNA, 19 nt, Homo sapiens
  misc_RNA (1)...(19): siRNA sense strand
aaucagcucuauugacgaa

SEQ ID NO: 1769855 - RNA, 19 nt, Homo sapiens
  misc_RNA (1)...(19): siRNA sense strand
guccagggcucagaaauca

SEQ ID NO: 1769856 - RNA, 19 nt, Homo sapiens
  misc_RNA (1)...(19): siRNA sense strand
gcaugucggcgucagauga

SEQ ID NO: 1769857 - RNA, 19 nt, Homo sapiens
  misc_RNA (1)...(19): siRNA sense strand
ucagcucuauugacgaauu

SEQ ID NO: 1769858 - RNA, 19 nt, Homo sapiens
  misc_RNA (1)...(19): siRNA sense strand
aagugaaguuguacaagaa

SEQ ID NO: 1769859 - RNA, 19 nt, Homo sapiens
  misc_RNA (1)...(19): siRNA sense strand
augaggaagugaaguugua

SEQ ID NO: 1769860 - RNA, 19 nt, Homo sapiens
  misc_RNA (1)...(19): siRNA sense strand
gacguggucucgcucuuca

SEQ ID NO: 1769861 - RNA, 19 nt, Homo sapiens
  misc_RNA (1)...(19): siRNA sense strand
gacgaauucugccgcaagu

SEQ ID NO: 1769862 - RNA, 19 nt, Homo sapiens
  misc_RNA (1)...(19): siRNA sense strand
ggagcuguaugaggaagug

SEQ ID NO: 1769863 - RNA, 19 nt, Homo sapiens
  misc_RNA (1)...(19): siRNA sense strand
ccauggagcggaucaagga

SEQ ID NO: 1769864 - RNA, 19 nt, Homo sapiens
  misc_RNA (1)...(19): siRNA sense strand
cgaauucugccgcaaguuc

SEQ ID NO: 1769865 - RNA, 19 nt, Homo sapiens
  misc_RNA (1)...(19): siRNA sense strand
ccaccucccacccgacuuu

SEQ ID NO: 1769866 - RNA, 19 nt, Homo sapiens
  misc_RNA (1)...(19): siRNA sense strand
gcuccugguccaauacaaa

SEQ ID NO: 1769867 - RNA, 19 nt, Homo sapiens
  misc_RNA (1)...(19): siRNA sense strand
gcagguccagggcucagaa

SEQ ID NO: 1769868 - RNA, 19 nt, Homo sapiens
  misc_RNA (1)...(19): siRNA sense strand
cagaaaucagcucuauuga

SEQ ID NO: 1769869 - RNA, 19 nt, Homo sapiens
  misc_RNA (1)...(19): siRNA sense strand
gguccagggcucagaaauc

SEQ ID NO: 1769870 - RNA, 19 nt, Homo sapiens
  misc_RNA (1)...(19): siRNA sense strand
acaagccggagcuguauga

SEQ ID NO: 1769871 - RNA, 19 nt, Homo sapiens
  misc_RNA (1)...(19): siRNA sense strand
caaugcaagcccuggagaa

SEQ ID NO: 1769872 - RNA, 19 nt, Homo sapiens
  misc_RNA (1)...(19): siRNA sense strand
gggagaaguacgacaacau

SEQ ID NO: 1769873 - RNA, 19 nt, Homo sapiens
  misc_RNA (1)...(19): siRNA sense strand
ucaucacggucauggacaa

SEQ ID NO: 1769874 - RNA, 19 nt, Homo sapiens
  misc_RNA (1)...(19): siRNA sense strand
uguaugaggaagugaaguu

SEQ ID NO: 1769875 - RNA, 19 nt, Homo sapiens
  misc_RNA (1)...(19): siRNA sense strand
cagcucuauugacgaauuc

SEQ ID NO: 1769876 - RNA, 19 nt, Homo sapiens
  misc_RNA (1)...(19): siRNA sense strand
uggagaaggccuacaucaa

SEQ ID NO: 1769877 - RNA, 19 nt, Homo sapiens
  misc_RNA (1)...(19): siRNA sense strand
ggaagugaaguuguacaag

SEQ ID NO: 1769878 - RNA, 19 nt, Homo sapiens
  misc_RNA (1)...(19): siRNA sense strand
gggagagggagaaguacga

SEQ ID NO: 1769879 - RNA, 19 nt, Homo sapiens
  misc_RNA (1)...(19): siRNA sense strand
cgacaagggcaaccucaac

SEQ ID NO: 1769880 - RNA, 19 nt, Homo sapiens
  misc_RNA (1)...(19): siRNA sense strand
cccgggagagggagaagua

SEQ ID NO: 1769881 - RNA, 19 nt, Homo sapiens
  misc_RNA (1)...(19): siRNA sense strand
agagggagaaguacgacaa

SEQ ID NO: 1769882 - RNA, 19 nt, Homo sapiens
  misc_RNA (1)...(19): siRNA sense strand
gaagugaaguuguacaaga

SEQ ID NO: 1769883 - RNA, 19 nt, Homo sapiens
  misc_RNA (1)...(19): siRNA sense strand
ggaacaagccggagcugua

SEQ ID NO: 1769884 - RNA, 19 nt, Homo sapiens
  misc_RNA (1)...(19): siRNA sense strand
gcucagaaaucagcucuau

SEQ ID NO: 1769885 - RNA, 19 nt, Homo sapiens
  misc_RNA (1)...(19): siRNA sense strand
ucagaaaucagcucuauug

SEQ ID NO: 1769886 - RNA, 19 nt, Homo sapiens
  misc_RNA (1)...(19): siRNA sense strand
ggagaaggccuacaucaag

SEQ ID NO: 1769887 - RNA, 19 nt, Homo sapiens
  misc_RNA (1)...(19): siRNA sense strand
gaacaagccggagcuguau

SEQ ID NO: 1769888 - RNA, 19 nt, Homo sapiens
  misc_RNA (1)...(19): siRNA sense strand
ggagaaguacgacaacaug

SEQ ID NO: 1769889 - RNA, 19 nt, Homo sapiens
  misc_RNA (1)...(19): siRNA sense strand
aaucagcucuauugacgaa

SEQ ID NO: 1769890 - RNA, 19 nt, Homo sapiens
  misc_RNA (1)...(19): siRNA sense strand
guccagggcucagaaauca

SEQ ID NO: 1769891 - RNA, 19 nt, Homo sapiens
  misc_RNA (1)...(19): siRNA sense strand
gcaugucggcgucagauga

SEQ ID NO: 1769892 - RNA, 19 nt, Homo sapiens
  misc_RNA (1)...(19): siRNA sense strand
ucagcucuauugacgaauu

SEQ ID NO: 1769893 - RNA, 19 nt, Homo sapiens
  misc_RNA (1)...(19): siRNA sense strand
aagugaaguuguacaagaa

SEQ ID NO: 1769894 - RNA, 19 nt, Homo sapiens
  misc_RNA (1)...(19): siRNA sense strand
augaggaagugaaguugua

SEQ ID NO: 1769895 - RNA, 19 nt, Homo sapiens
  misc_RNA (1)...(19): siRNA sense strand
gacguggucucgcucuuca

SEQ ID NO: 1769896 - RNA, 19 nt, Homo sapiens
  misc_RNA (1)...(19): siRNA sense strand
gacgaauucugccgcaagu

SEQ ID NO: 1769897 - RNA, 19 nt, Homo sapiens
  misc_RNA (1)...(19): siRNA sense strand
ggagcuguaugaggaagug

SEQ ID NO: 1769898 - RNA, 19 nt, Homo sapiens
  misc_RNA (1)...(19): siRNA sense strand
ccauggagcggaucaagga

SEQ ID NO: 1769899 - RNA, 19 nt, Homo sapiens
  misc_RNA (1)...(19): siRNA sense strand
cgaauucugccgcaaguuc

SEQ ID NO: 1769900 - RNA, 19 nt, Homo sapiens
  misc_RNA (1)...(19): siRNA sense strand
ccaccucccacccgacuuu

SEQ ID NO: 1769901 - RNA, 19 nt, Homo sapiens
  misc_RNA (1)...(19): siRNA sense strand
gcuccugguccaauacaaa

SEQ ID NO: 1769902 - RNA, 19 nt, Homo sapiens
  misc_RNA (1)...(19): siRNA sense strand
gcagguccagggcucagaa

SEQ ID NO: 1769903 - RNA, 19 nt, Homo sapiens
  misc_RNA (1)...(19): siRNA sense strand
cagaaaucagcucuauuga

SEQ ID NO: 1769904 - RNA, 19 nt, Homo sapiens
  misc_RNA (1)...(19): siRNA sense strand
gguccagggcucagaaauc

SEQ ID NO: 1769905 - RNA, 19 nt, Homo sapiens
  misc_RNA (1)...(19): siRNA sense strand
acaagccggagcuguauga

SEQ ID NO: 1769906 - RNA, 19 nt, Homo sapiens
  misc_RNA (1)...(19): siRNA sense strand
caaugcaagcccuggagaa

SEQ ID NO: 1769907 - RNA, 19 nt, Homo sapiens
  misc_RNA (1)...(19): siRNA sense strand
gggagaaguacgacaacau

SEQ ID NO: 1769908 - RNA, 19 nt, Homo sapiens
  misc_RNA (1)...(19): siRNA sense strand
ucaucacggucauggacaa

SEQ ID NO: 1769909 - RNA, 19 nt, Homo sapiens
  misc_RNA (1)...(19): siRNA sense strand
uguaugaggaagugaaguu

SEQ ID NO: 1769910 - RNA, 19 nt, Homo sapiens
  misc_RNA (1)...(19): siRNA sense strand
cagcucuauugacgaauuc

SEQ ID NO: 1769911 - RNA, 19 nt, Homo sapiens
  misc_RNA (1)...(19): siRNA sense strand
uggagaaggccuacaucaa

SEQ ID NO: 1769912 - RNA, 19 nt, Homo sapiens
  misc_RNA (1)...(19): siRNA sense strand
ggaagugaaguuguacaag

SEQ ID NO: 1769913 - RNA, 19 nt, Homo sapiens
  misc_RNA (1)...(19): siRNA sense strand
gggagagggagaaguacga

SEQ ID NO: 1769914 - RNA, 19 nt, Homo sapiens
  misc_RNA (1)...(19): siRNA sense strand
cgacaagggcaaccucaac

SEQ ID NO: 1769915 - RNA, 19 nt, Homo sapiens
  misc_RNA (1)...(19): siRNA sense strand
cccgggagagggagaagua

SEQ ID NO: 1769916 - RNA, 19 nt, Homo sapiens
  misc_RNA (1)...(19): siRNA sense strand
agagggagaaguacgacaa

SEQ ID NO: 1769917 - RNA, 19 nt, Homo sapiens
  misc_RNA (1)...(19): siRNA sense strand
gaccugcgcuucuuccuau

SEQ ID NO: 1769918 - RNA, 19 nt, Homo sapiens
  misc_RNA (1)...(19): siRNA sense strand
gcacaugcccaaccaguuc

SEQ ID NO: 1769919 - RNA, 19 nt, Homo sapiens
  misc_RNA (1)...(19): siRNA sense strand
gcauugugguggccugcua

SEQ ID NO: 1769920 - RNA, 19 nt, Homo sapiens
  misc_RNA (1)...(19): siRNA sense strand
gaaaucacggugcccaugu

SEQ ID NO: 1769921 - RNA, 19 nt, Homo sapiens
  misc_RNA (1)...(19): siRNA sense strand
gcuacaaccugacgcacau

SEQ ID NO: 1769922 - RNA, 19 nt, Homo sapiens
  misc_RNA (1)...(19): siRNA sense strand
ggaccugcgcuucuuccua

SEQ ID NO: 1769923 - RNA, 19 nt, Homo sapiens
  misc_RNA (1)...(19): siRNA sense strand
ccaucugucugcccgacua

SEQ ID NO: 1769924 - RNA, 19 nt, Homo sapiens
  misc_RNA (1)...(19): siRNA sense strand
gcacaaccacauccacuac

SEQ ID NO: 1769925 - RNA, 19 nt, Homo sapiens
  misc_RNA (1)...(19): siRNA sense strand
gcaccaagacggacaagcu

SEQ ID NO: 1769926 - RNA, 19 nt, Homo sapiens
  misc_RNA (1)...(19): siRNA sense strand
cacacccgcucuacaacaa

SEQ ID NO: 1769927 - RNA, 19 nt, Homo sapiens
  misc_RNA (1)...(19): siRNA sense strand
guucgccaccuucuggaua

SEQ ID NO: 1769928 - RNA, 19 nt, Homo sapiens
  misc_RNA (1)...(19): siRNA sense strand
ugacgcacaugcccaacca

SEQ ID NO: 1769929 - RNA, 19 nt, Homo sapiens
  misc_RNA (1)...(19): siRNA sense strand
acaaccacauccacuacga

SEQ ID NO: 1769930 - RNA, 19 nt, Homo sapiens
  misc_RNA (1)...(19): siRNA sense strand
gggugcucaugcucaagua

SEQ ID NO: 1769931 - RNA, 19 nt, Homo sapiens
  misc_RNA (1)...(19): siRNA sense strand
ccaccuuccucaucgacau

SEQ ID NO: 1769932 - RNA, 19 nt, Homo sapiens
  misc_RNA (1)...(19): siRNA sense strand
gcaaccagaaccugaacuc

SEQ ID NO: 1769933 - RNA, 19 nt, Homo sapiens
  misc_RNA (1)...(19): siRNA sense strand
ggucggugcugugcuucau

SEQ ID NO: 1769934 - RNA, 19 nt, Homo sapiens
  misc_RNA (1)...(19): siRNA sense strand
agacggacaagcuggagaa

SEQ ID NO: 1769935 - RNA, 19 nt, Homo sapiens
  misc_RNA (1)...(19): siRNA sense strand
gggcuacgcgcaguacuuc

SEQ ID NO: 1769936 - RNA, 19 nt, Homo sapiens
  misc_RNA (1)...(19): siRNA sense strand
aaaucacggugcccaugug

SEQ ID NO: 1769937 - RNA, 19 nt, Homo sapiens
  misc_RNA (1)...(19): siRNA sense strand
agucacacccgcucuacaa

SEQ ID NO: 1769938 - RNA, 19 nt, Homo sapiens
  misc_RNA (1)...(19): siRNA sense strand
ggaaagaaaucguguguuu

SEQ ID NO: 1769939 - RNA, 19 nt, Homo sapiens
  misc_RNA (1)...(19): siRNA sense strand
gaaggaagaggauuuauug

SEQ ID NO: 1769940 - RNA, 19 nt, Homo sapiens
  misc_RNA (1)...(19): siRNA sense strand
gcaaugggcuggcuugucu

SEQ ID NO: 1769941 - RNA, 19 nt, Homo sapiens
  misc_RNA (1)...(19): siRNA sense strand
ucacaauucucauguauuc

SEQ ID NO: 1769942 - RNA, 19 nt, Homo sapiens
  misc_RNA (1)...(19): siRNA sense strand
gcaauguuccagauuauuu

SEQ ID NO: 1769943 - RNA, 19 nt, Homo sapiens
  misc_RNA (1)...(19): siRNA sense strand
gcgaaugucaccauauaua

SEQ ID NO: 1769944 - RNA, 19 nt, Homo sapiens
  misc_RNA (1)...(19): siRNA sense strand
gaauuugcauggcuugaga

SEQ ID NO: 1769945 - RNA, 19 nt, Homo sapiens
  misc_RNA (1)...(19): siRNA sense strand
gaaaauggagccaauuaua

SEQ ID NO: 1769946 - RNA, 19 nt, Homo sapiens
  misc_RNA (1)...(19): siRNA sense strand
aagaauagcugacgugaag

SEQ ID NO: 1769947 - RNA, 19 nt, Homo sapiens
  misc_RNA (1)...(19): siRNA sense strand
uaaaggaaguggaaauugg

SEQ ID NO: 1769948 - RNA, 19 nt, Homo sapiens
  misc_RNA (1)...(19): siRNA sense strand
aaucaaaguuucagcaaug

SEQ ID NO: 1769949 - RNA, 19 nt, Homo sapiens
  misc_RNA (1)...(19): siRNA sense strand
gagcaaggcuuuucucugu

SEQ ID NO: 1769950 - RNA, 19 nt, Homo sapiens
  misc_RNA (1)...(19): siRNA sense strand
gaaccaagaauucaacaag

SEQ ID NO: 1769951 - RNA, 19 nt, Homo sapiens
  misc_RNA (1)...(19): siRNA sense strand
cgaaugucaccauauauaa

SEQ ID NO: 1769952 - RNA, 19 nt, Homo sapiens
  misc_RNA (1)...(19): siRNA sense strand
guacagggcgcacaaguca

SEQ ID NO: 1769953 - RNA, 19 nt, Homo sapiens
  misc_RNA (1)...(19): siRNA sense strand
ggauugguauuacucacaa

SEQ ID NO: 1769954 - RNA, 19 nt, Homo sapiens
  misc_RNA (1)...(19): siRNA sense strand
gaaagaaaucguguguuug

SEQ ID NO: 1769955 - RNA, 19 nt, Homo sapiens
  misc_RNA (1)...(19): siRNA sense strand
gaaaaugaggcuuuaauug

SEQ ID NO: 1769956 - RNA, 19 nt, Homo sapiens
  misc_RNA (1)...(19): siRNA sense strand
cagcaccucuugagugguu

SEQ ID NO: 1769957 - RNA, 19 nt, Homo sapiens
  misc_RNA (1)...(19): siRNA sense strand
ccauugaccucuacaacug

SEQ ID NO: 1769958 - RNA, 19 nt, Homo sapiens
  misc_RNA (1)...(19): siRNA sense strand
gaucuuagcaauucucaca

SEQ ID NO: 1769959 - RNA, 19 nt, Homo sapiens
  misc_RNA (1)...(19): siRNA sense strand
ugaaauaaaggaaguggaa

SEQ ID NO: 1769960 - RNA, 19 nt, Homo sapiens
  misc_RNA (1)...(19): siRNA sense strand
uagcugacgugaaggaaga

SEQ ID NO: 1769961 - RNA, 19 nt, Homo sapiens
  misc_RNA (1)...(19): siRNA sense strand
ugucagaagucccacauuc

SEQ ID NO: 1769962 - RNA, 19 nt, Homo sapiens
  misc_RNA (1)...(19): siRNA sense strand
agaagucccacauucaaua

SEQ ID NO: 1769963 - RNA, 19 nt, Homo sapiens
  misc_RNA (1)...(19): siRNA sense strand
gcaaggcuuuucucuguuu

SEQ ID NO: 1769964 - RNA, 19 nt, Homo sapiens
  misc_RNA (1)...(19): siRNA sense strand
uaacuugcucugcuuguuu

SEQ ID NO: 1769965 - RNA, 19 nt, Homo sapiens
  misc_RNA (1)...(19): siRNA sense strand
gaaauaaaggaaguggaaa

SEQ ID NO: 1769966 - RNA, 19 nt, Homo sapiens
  misc_RNA (1)...(19): siRNA sense strand
uugauaaugugaugacuga

SEQ ID NO: 1769967 - RNA, 19 nt, Homo sapiens
  misc_RNA (1)...(19): siRNA sense strand
augcgaaugucaccauaua

SEQ ID NO: 1769968 - RNA, 19 nt, Homo sapiens
  misc_RNA (1)...(19): siRNA sense strand
cagcagcaaaguuuaguaa

SEQ ID NO: 1769969 - RNA, 19 nt, Homo sapiens
  misc_RNA (1)...(19): siRNA sense strand
ggagccaauuauaguguga

SEQ ID NO: 1769970 - RNA, 19 nt, Homo sapiens
  misc_RNA (1)...(19): siRNA sense strand
ugaaggaagaggauuuauu

SEQ ID NO: 1769971 - RNA, 19 nt, Homo sapiens
  misc_RNA (1)...(19): siRNA sense strand
gagaaggcacaccguaaga

SEQ ID NO: 1769972 - RNA, 19 nt, Homo sapiens
  misc_RNA (1)...(19): siRNA sense strand
guuacaccguggauuggua

SEQ ID NO: 1769973 - RNA, 19 nt, Homo sapiens
  misc_RNA (1)...(19): siRNA sense strand
uugagugguuuaagaauug

SEQ ID NO: 1769974 - RNA, 19 nt, Homo sapiens
  misc_RNA (1)...(19): siRNA sense strand
gaauagcugacgugaagga

SEQ ID NO: 1769975 - RNA, 19 nt, Homo sapiens
  misc_RNA (1)...(19): siRNA sense strand
ucucacaauucucauguau

SEQ ID NO: 1769976 - RNA, 19 nt, Homo sapiens
  misc_RNA (1)...(19): siRNA sense strand
gguauuacucacaaacaaa

SEQ ID NO: 1769977 - RNA, 19 nt, Homo sapiens
  misc_RNA (1)...(19): siRNA sense strand
aaccaagaauucaacaaga

SEQ ID NO: 1769978 - RNA, 19 nt, Homo sapiens
  misc_RNA (1)...(19): siRNA sense strand
ggaaaaugaggcuuuaauu

SEQ ID NO: 1769979 - RNA, 19 nt, Homo sapiens
  misc_RNA (1)...(19): siRNA sense strand
auugcaauguuccagauua

SEQ ID NO: 1769980 - RNA, 19 nt, Homo sapiens
  misc_RNA (1)...(19): siRNA sense strand
cuugagugguuuaagaauu

SEQ ID NO: 1769981 - RNA, 19 nt, Homo sapiens
  misc_RNA (1)...(19): siRNA sense strand
gaagucccacauucaauag

SEQ ID NO: 1769982 - RNA, 19 nt, Homo sapiens
  misc_RNA (1)...(19): siRNA sense strand
ucagaagucccacauucaa

SEQ ID NO: 1769983 - RNA, 19 nt, Homo sapiens
  misc_RNA (1)...(19): siRNA sense strand
ggacuggauaugcgaaugu

SEQ ID NO: 1769984 - RNA, 19 nt, Homo sapiens
  misc_RNA (1)...(19): siRNA sense strand
cuaguuacaccguggauug

SEQ ID NO: 1769985 - RNA, 19 nt, Homo sapiens
  misc_RNA (1)...(19): siRNA sense strand
aaagaaaucguguguuugc

SEQ ID NO: 1769986 - RNA, 19 nt, Homo sapiens
  misc_RNA (1)...(19): siRNA sense strand
gccguccuguggcagcuua

SEQ ID NO: 1769987 - RNA, 19 nt, Homo sapiens
  misc_RNA (1)...(19): siRNA sense strand
gaaaaggcacucaguucuu

SEQ ID NO: 1769988 - RNA, 19 nt, Homo sapiens
  misc_RNA (1)...(19): siRNA sense strand
ggcuuuaauuguaagaugu

SEQ ID NO: 1769989 - RNA, 19 nt, Homo sapiens
  misc_RNA (1)...(19): siRNA sense strand
aaauggagccaauuauagu

SEQ ID NO: 1769990 - RNA, 19 nt, Homo sapiens
  misc_RNA (1)...(19): siRNA sense strand
cuucaaggaucaagguaca

SEQ ID NO: 1769991 - RNA, 19 nt, Homo sapiens
  misc_RNA (1)...(19): siRNA sense strand
gcaccucuugagugguuua

SEQ ID NO: 1769992 - RNA, 19 nt, Homo sapiens
  misc_RNA (1)...(19): siRNA sense strand
caauguuccagauuauuug

SEQ ID NO: 1769993 - RNA, 19 nt, Homo sapiens
  misc_RNA (1)...(19): siRNA sense strand
cuaacuugcucugcuuguu

SEQ ID NO: 1769994 - RNA, 19 nt, Homo sapiens
  misc_RNA (1)...(19): siRNA sense strand
aggcacaccguaagacuaa

SEQ ID NO: 1769995 - RNA, 19 nt, Homo sapiens
  misc_RNA (1)...(19): siRNA sense strand
cgugaaggaagaggauuua

SEQ ID NO: 1769996 - RNA, 19 nt, Homo sapiens
  misc_RNA (1)...(19): siRNA sense strand
ccacagcagcaaaguuuag

SEQ ID NO: 1769997 - RNA, 19 nt, Homo sapiens
  misc_RNA (1)...(19): siRNA sense strand
gcugauucugguauuuaua

SEQ ID NO: 1769998 - RNA, 19 nt, Homo sapiens
  misc_RNA (1)...(19): siRNA sense strand
gaaggcacaccguaagacu

SEQ ID NO: 1769999 - RNA, 19 nt, Homo sapiens
  misc_RNA (1)...(19): siRNA sense strand
acagggcgcacaagucauu

SEQ ID NO: 1770000 - RNA, 19 nt, Homo sapiens
  misc_RNA (1)...(19): siRNA sense strand
caacuggacagcaccucuu

SEQ ID NO: 1770001 - RNA, 19 nt, Homo sapiens
  misc_RNA (1)...(19): siRNA sense strand
cauggggccuggaaaauga

SEQ ID NO: 1770002 - RNA, 19 nt, Homo sapiens
  misc_RNA (1)...(19): siRNA sense strand
ugguauuacucacaaacaa

SEQ ID NO: 1770003 - RNA, 19 nt, Homo sapiens
  misc_RNA (1)...(19): siRNA sense strand
guccuaccauugaccucua

SEQ ID NO: 1770004 - RNA, 19 nt, Homo sapiens
  misc_RNA (1)...(19): siRNA sense strand
gauugguauuacucacaaa

SEQ ID NO: 1770005 - RNA, 19 nt, Homo sapiens
  misc_RNA (1)...(19): siRNA sense strand
aaaaggcacucaguucuug

SEQ ID NO: 1770006 - RNA, 19 nt, Homo sapiens
  misc_RNA (1)...(19): siRNA sense strand
uuuauuguccuaccauuga

SEQ ID NO: 1770007 - RNA, 19 nt, Homo sapiens
  misc_RNA (1)...(19): siRNA sense strand
gauaugcgaaugucaccau

SEQ ID NO: 1770008 - RNA, 19 nt, Homo sapiens
  misc_RNA (1)...(19): siRNA sense strand
caggaaagaaaucgugugu

SEQ ID NO: 1770009 - RNA, 19 nt, Homo sapiens
  misc_RNA (1)...(19): siRNA sense strand
gcacaccguaagacuaagu

SEQ ID NO: 1770010 - RNA, 19 nt, Homo sapiens
  misc_RNA (1)...(19): siRNA sense strand
caagguacagggcgcacaa

SEQ ID NO: 1770011 - RNA, 19 nt, Homo sapiens
  misc_RNA (1)...(19): siRNA sense strand
uugcaauguuccagauuau

SEQ ID NO: 1770012 - RNA, 19 nt, Homo sapiens
  misc_RNA (1)...(19): siRNA sense strand
acaaaaguauucccacuca

SEQ ID NO: 1770013 - RNA, 19 nt, Homo sapiens
  misc_RNA (1)...(19): siRNA sense strand
uaagaauagcugacgugaa

SEQ ID NO: 1770014 - RNA, 19 nt, Homo sapiens
  misc_RNA (1)...(19): siRNA sense strand
ucuuagcaauucucacaau

SEQ ID NO: 1770015 - RNA, 19 nt, Homo sapiens
  misc_RNA (1)...(19): siRNA sense strand
aaaggaaguggaaauugga

SEQ ID NO: 1770016 - RNA, 19 nt, Homo sapiens
  misc_RNA (1)...(19): siRNA sense strand
uuccacagcagcaaaguuu

SEQ ID NO: 1770017 - RNA, 19 nt, Homo sapiens
  misc_RNA (1)...(19): siRNA sense strand
guugcugauucugguauuu

SEQ ID NO: 1770018 - RNA, 19 nt, Homo sapiens
  misc_RNA (1)...(19): siRNA sense strand
ggaaguggaaauuggaaaa

SEQ ID NO: 1770019 - RNA, 19 nt, Homo sapiens
  misc_RNA (1)...(19): siRNA sense strand
gcagcuuaauggaacaaaa

SEQ ID NO: 1770020 - RNA, 19 nt, Homo sapiens
  misc_RNA (1)...(19): siRNA sense strand
gacaugguuuuaagaauag

SEQ ID NO: 1770021 - RNA, 19 nt, Homo sapiens
  misc_RNA (1)...(19): siRNA sense strand
cagaagucccacauucaau

SEQ ID NO: 1770022 - RNA, 19 nt, Homo sapiens
  misc_RNA (1)...(19): siRNA sense strand
aggcuuuaauuguaagaug

SEQ ID NO: 1770023 - RNA, 19 nt, Homo sapiens
  misc_RNA (1)...(19): siRNA sense strand
caacaagaggaagggcaaa

SEQ ID NO: 1770024 - RNA, 19 nt, Homo sapiens
  misc_RNA (1)...(19): siRNA sense strand
ggaaaaggcacucaguucu

SEQ ID NO: 1770025 - RNA, 19 nt, Homo sapiens
  misc_RNA (1)...(19): siRNA sense strand
caaugaaaauggagccaau

SEQ ID NO: 1770026 - RNA, 19 nt, Homo sapiens
  misc_RNA (1)...(19): siRNA sense strand
gucagaagucccacauuca

SEQ ID NO: 1770027 - RNA, 19 nt, Homo sapiens
  misc_RNA (1)...(19): siRNA sense strand
ugagaaggcacaccguaag

SEQ ID NO: 1770028 - RNA, 19 nt, Homo sapiens
  misc_RNA (1)...(19): siRNA sense strand
aggauuuauugcugcagua

SEQ ID NO: 1770029 - RNA, 19 nt, Homo sapiens
  misc_RNA (1)...(19): siRNA sense strand
gaggaagggcaaaaucaaa

SEQ ID NO: 1770030 - RNA, 19 nt, Homo sapiens
  misc_RNA (1)...(19): siRNA sense strand
auaaaggaaguggaaauug

SEQ ID NO: 1770031 - RNA, 19 nt, Homo sapiens
  misc_RNA (1)...(19): siRNA sense strand
agaauugucaggcucuuca

SEQ ID NO: 1770032 - RNA, 19 nt, Homo sapiens
  misc_RNA (1)...(19): siRNA sense strand
gacaaggaaaaccuaguua

SEQ ID NO: 1770033 - RNA, 19 nt, Homo sapiens
  misc_RNA (1)...(19): siRNA sense strand
acaccguggauugguauua

SEQ ID NO: 1770034 - RNA, 19 nt, Homo sapiens
  misc_RNA (1)...(19): siRNA sense strand
uguuccagauuauuugaug

SEQ ID NO: 1770035 - RNA, 19 nt, Homo sapiens
  misc_RNA (1)...(19): siRNA sense strand
agauugcaauguuccagau

SEQ ID NO: 1770036 - RNA, 19 nt, Homo sapiens
  misc_RNA (1)...(19): siRNA sense strand
accaagaauucaacaagag

SEQ ID NO: 1770037 - RNA, 19 nt, Homo sapiens
  misc_RNA (1)...(19): siRNA sense strand
caccguggauugguauuac

SEQ ID NO: 1770038 - RNA, 19 nt, Homo sapiens
  misc_RNA (1)...(19): siRNA sense strand
ggaaagaaaucguguguuu

SEQ ID NO: 1770039 - RNA, 19 nt, Homo sapiens
  misc_RNA (1)...(19): siRNA sense strand
gaaggaagaggauuuauug

SEQ ID NO: 1770040 - RNA, 19 nt, Homo sapiens
  misc_RNA (1)...(19): siRNA sense strand
gcaaugggcuggcuugucu

SEQ ID NO: 1770041 - RNA, 19 nt, Homo sapiens
  misc_RNA (1)...(19): siRNA sense strand
ucacaauucucauguauuc

SEQ ID NO: 1770042 - RNA, 19 nt, Homo sapiens
  misc_RNA (1)...(19): siRNA sense strand
gcaauguuccagauuauuu

SEQ ID NO: 1770043 - RNA, 19 nt, Homo sapiens
  misc_RNA (1)...(19): siRNA sense strand
gcgaaugucaccauauaua

SEQ ID NO: 1770044 - RNA, 19 nt, Homo sapiens
  misc_RNA (1)...(19): siRNA sense strand
gaauuugcauggcuugaga

SEQ ID NO: 1770045 - RNA, 19 nt, Homo sapiens
  misc_RNA (1)...(19): siRNA sense strand
gaaaauggagccaauuaua

SEQ ID NO: 1770046 - RNA, 19 nt, Homo sapiens
  misc_RNA (1)...(19): siRNA sense strand
aagaauagcugacgugaag

SEQ ID NO: 1770047 - RNA, 19 nt, Homo sapiens
  misc_RNA (1)...(19): siRNA sense strand
uaaaggaaguggaaauugg

SEQ ID NO: 1770048 - RNA, 19 nt, Homo sapiens
  misc_RNA (1)...(19): siRNA sense strand
aaucaaaguuucagcaaug

SEQ ID NO: 1770049 - RNA, 19 nt, Homo sapiens
  misc_RNA (1)...(19): siRNA sense strand
gagcaaggcuuuucucugu

SEQ ID NO: 1770050 - RNA, 19 nt, Homo sapiens
  misc_RNA (1)...(19): siRNA sense strand
gaaccaagaauucaacaag

SEQ ID NO: 1770051 - RNA, 19 nt, Homo sapiens
  misc_RNA (1)...(19): siRNA sense strand
cgaaugucaccauauauaa

SEQ ID NO: 1770052 - RNA, 19 nt, Homo sapiens
  misc_RNA (1)...(19): siRNA sense strand
guacagggcgcacaaguca

SEQ ID NO: 1770053 - RNA, 19 nt, Homo sapiens
  misc_RNA (1)...(19): siRNA sense strand
ggauugguauuacucacaa

SEQ ID NO: 1770054 - RNA, 19 nt, Homo sapiens
  misc_RNA (1)...(19): siRNA sense strand
gaaagaaaucguguguuug

SEQ ID NO: 1770055 - RNA, 19 nt, Homo sapiens
  misc_RNA (1)...(19): siRNA sense strand
gaaaaugaggcuuuaauug

SEQ ID NO: 1770056 - RNA, 19 nt, Homo sapiens
  misc_RNA (1)...(19): siRNA sense strand
cagcaccucuugagugguu

SEQ ID NO: 1770057 - RNA, 19 nt, Homo sapiens
  misc_RNA (1)...(19): siRNA sense strand
ccauugaccucuacaacug

SEQ ID NO: 1770058 - RNA, 19 nt, Homo sapiens
  misc_RNA (1)...(19): siRNA sense strand
gaucuuagcaauucucaca

SEQ ID NO: 1770059 - RNA, 19 nt, Homo sapiens
  misc_RNA (1)...(19): siRNA sense strand
ugaaauaaaggaaguggaa

SEQ ID NO: 1770060 - RNA, 19 nt, Homo sapiens
  misc_RNA (1)...(19): siRNA sense strand
uagcugacgugaaggaaga

SEQ ID NO: 1770061 - RNA, 19 nt, Homo sapiens
  misc_RNA (1)...(19): siRNA sense strand
ugucagaagucccacauuc

SEQ ID NO: 1770062 - RNA, 19 nt, Homo sapiens
  misc_RNA (1)...(19): siRNA sense strand
agaagucccacauucaaua

SEQ ID NO: 1770063 - RNA, 19 nt, Homo sapiens
  misc_RNA (1)...(19): siRNA sense strand
gcaaggcuuuucucuguuu

SEQ ID NO: 1770064 - RNA, 19 nt, Homo sapiens
  misc_RNA (1)...(19): siRNA sense strand
uaacuugcucugcuuguuu

SEQ ID NO: 1770065 - RNA, 19 nt, Homo sapiens
  misc_RNA (1)...(19): siRNA sense strand
gaaauaaaggaaguggaaa

SEQ ID NO: 1770066 - RNA, 19 nt, Homo sapiens
  misc_RNA (1)...(19): siRNA sense strand
uugauaaugugaugacuga

SEQ ID NO: 1770067 - RNA, 19 nt, Homo sapiens
  misc_RNA (1)...(19): siRNA sense strand
augcgaaugucaccauaua

SEQ ID NO: 1770068 - RNA, 19 nt, Homo sapiens
  misc_RNA (1)...(19): siRNA sense strand
cagcagcaaaguuuaguaa

SEQ ID NO: 1770069 - RNA, 19 nt, Homo sapiens
  misc_RNA (1)...(19): siRNA sense strand
ggagccaauuauaguguga

SEQ ID NO: 1770070 - RNA, 19 nt, Homo sapiens
  misc_RNA (1)...(19): siRNA sense strand
ugaaggaagaggauuuauu

SEQ ID NO: 1770071 - RNA, 19 nt, Homo sapiens
  misc_RNA (1)...(19): siRNA sense strand
gagaaggcacaccguaaga

SEQ ID NO: 1770072 - RNA, 19 nt, Homo sapiens
  misc_RNA (1)...(19): siRNA sense strand
guuacaccguggauuggua

SEQ ID NO: 1770073 - RNA, 19 nt, Homo sapiens
  misc_RNA (1)...(19): siRNA sense strand
uugagugguuuaagaauug

SEQ ID NO: 1770074 - RNA, 19 nt, Homo sapiens
  misc_RNA (1)...(19): siRNA sense strand
gaauagcugacgugaagga

SEQ ID NO: 1770075 - RNA, 19 nt, Homo sapiens
  misc_RNA (1)...(19): siRNA sense strand
ucucacaauucucauguau

SEQ ID NO: 1770076 - RNA, 19 nt, Homo sapiens
  misc_RNA (1)...(19): siRNA sense strand
gguauuacucacaaacaaa

SEQ ID NO: 1770077 - RNA, 19 nt, Homo sapiens
  misc_RNA (1)...(19): siRNA sense strand
aaccaagaauucaacaaga

SEQ ID NO: 1770078 - RNA, 19 nt, Homo sapiens
  misc_RNA (1)...(19): siRNA sense strand
ggaaaaugaggcuuuaauu

SEQ ID NO: 1770079 - RNA, 19 nt, Homo sapiens
  misc_RNA (1)...(19): siRNA sense strand
auugcaauguuccagauua

SEQ ID NO: 1770080 - RNA, 19 nt, Homo sapiens
  misc_RNA (1)...(19): siRNA sense strand
cuugagugguuuaagaauu

SEQ ID NO: 1770081 - RNA, 19 nt, Homo sapiens
  misc_RNA (1)...(19): siRNA sense strand
gaagucccacauucaauag

SEQ ID NO: 1770082 - RNA, 19 nt, Homo sapiens
  misc_RNA (1)...(19): siRNA sense strand
ucagaagucccacauucaa

SEQ ID NO: 1770083 - RNA, 19 nt, Homo sapiens
  misc_RNA (1)...(19): siRNA sense strand
ggacuggauaugcgaaugu

SEQ ID NO: 1770084 - RNA, 19 nt, Homo sapiens
  misc_RNA (1)...(19): siRNA sense strand
cuaguuacaccguggauug

SEQ ID NO: 1770085 - RNA, 19 nt, Homo sapiens
  misc_RNA (1)...(19): siRNA sense strand
aaagaaaucguguguuugc

SEQ ID NO: 1770086 - RNA, 19 nt, Homo sapiens
  misc_RNA (1)...(19): siRNA sense strand
gccguccuguggcagcuua

SEQ ID NO: 1770087 - RNA, 19 nt, Homo sapiens
  misc_RNA (1)...(19): siRNA sense strand
gaaaaggcacucaguucuu

SEQ ID NO: 1770088 - RNA, 19 nt, Homo sapiens
  misc_RNA (1)...(19): siRNA sense strand
ggcuuuaauuguaagaugu

SEQ ID NO: 1770089 - RNA, 19 nt, Homo sapiens
  misc_RNA (1)...(19): siRNA sense strand
aaauggagccaauuauagu

SEQ ID NO: 1770090 - RNA, 19 nt, Homo sapiens
  misc_RNA (1)...(19): siRNA sense strand
cuucaaggaucaagguaca

SEQ ID NO: 1770091 - RNA, 19 nt, Homo sapiens
  misc_RNA (1)...(19): siRNA sense strand
gcaccucuugagugguuua

SEQ ID NO: 1770092 - RNA, 19 nt, Homo sapiens
  misc_RNA (1)...(19): siRNA sense strand
caauguuccagauuauuug

SEQ ID NO: 1770093 - RNA, 19 nt, Homo sapiens
  misc_RNA (1)...(19): siRNA sense strand
cuaacuugcucugcuuguu

SEQ ID NO: 1770094 - RNA, 19 nt, Homo sapiens
  misc_RNA (1)...(19): siRNA sense strand
aggcacaccguaagacuaa

SEQ ID NO: 1770095 - RNA, 19 nt, Homo sapiens
  misc_RNA (1)...(19): siRNA sense strand
cgugaaggaagaggauuua

SEQ ID NO: 1770096 - RNA, 19 nt, Homo sapiens
  misc_RNA (1)...(19): siRNA sense strand
ccacagcagcaaaguuuag

SEQ ID NO: 1770097 - RNA, 19 nt, Homo sapiens
  misc_RNA (1)...(19): siRNA sense strand
gcugauucugguauuuaua

SEQ ID NO: 1770098 - RNA, 19 nt, Homo sapiens
  misc_RNA (1)...(19): siRNA sense strand
gaaggcacaccguaagacu

SEQ ID NO: 1770099 - RNA, 19 nt, Homo sapiens
  misc_RNA (1)...(19): siRNA sense strand
acagggcgcacaagucauu

SEQ ID NO: 1770100 - RNA, 19 nt, Homo sapiens
  misc_RNA (1)...(19): siRNA sense strand
caacuggacagcaccucuu

SEQ ID NO: 1770101 - RNA, 19 nt, Homo sapiens
  misc_RNA (1)...(19): siRNA sense strand
cauggggccuggaaaauga

SEQ ID NO: 1770102 - RNA, 19 nt, Homo sapiens
  misc_RNA (1)...(19): siRNA sense strand
ugguauuacucacaaacaa

SEQ ID NO: 1770103 - RNA, 19 nt, Homo sapiens
  misc_RNA (1)...(19): siRNA sense strand
guccuaccauugaccucua

SEQ ID NO: 1770104 - RNA, 19 nt, Homo sapiens
  misc_RNA (1)...(19): siRNA sense strand
gauugguauuacucacaaa

SEQ ID NO: 1770105 - RNA, 19 nt, Homo sapiens
  misc_RNA (1)...(19): siRNA sense strand
aaaaggcacucaguucuug

SEQ ID NO: 1770106 - RNA, 19 nt, Homo sapiens
  misc_RNA (1)...(19): siRNA sense strand
uuuauuguccuaccauuga

SEQ ID NO: 1770107 - RNA, 19 nt, Homo sapiens
  misc_RNA (1)...(19): siRNA sense strand
gauaugcgaaugucaccau

SEQ ID NO: 1770108 - RNA, 19 nt, Homo sapiens
  misc_RNA (1)...(19): siRNA sense strand
caggaaagaaaucgugugu

SEQ ID NO: 1770109 - RNA, 19 nt, Homo sapiens
  misc_RNA (1)...(19): siRNA sense strand
gcacaccguaagacuaagu

SEQ ID NO: 1770110 - RNA, 19 nt, Homo sapiens
  misc_RNA (1)...(19): siRNA sense strand
caagguacagggcgcacaa

SEQ ID NO: 1770111 - RNA, 19 nt, Homo sapiens
  misc_RNA (1)...(19): siRNA sense strand
uugcaauguuccagauuau

SEQ ID NO: 1770112 - RNA, 19 nt, Homo sapiens
  misc_RNA (1)...(19): siRNA sense strand
acaaaaguauucccacuca

SEQ ID NO: 1770113 - RNA, 19 nt, Homo sapiens
  misc_RNA (1)...(19): siRNA sense strand
uaagaauagcugacgugaa

SEQ ID NO: 1770114 - RNA, 19 nt, Homo sapiens
  misc_RNA (1)...(19): siRNA sense strand
ucuuagcaauucucacaau

SEQ ID NO: 1770115 - RNA, 19 nt, Homo sapiens
  misc_RNA (1)...(19): siRNA sense strand
aaaggaaguggaaauugga

SEQ ID NO: 1770116 - RNA, 19 nt, Homo sapiens
  misc_RNA (1)...(19): siRNA sense strand
uuccacagcagcaaaguuu

SEQ ID NO: 1770117 - RNA, 19 nt, Homo sapiens
  misc_RNA (1)...(19): siRNA sense strand
guugcugauucugguauuu

SEQ ID NO: 1770118 - RNA, 19 nt, Homo sapiens
  misc_RNA (1)...(19): siRNA sense strand
ggaaguggaaauuggaaaa

SEQ ID NO: 1770119 - RNA, 19 nt, Homo sapiens
  misc_RNA (1)...(19): siRNA sense strand
gcagcuuaauggaacaaaa

SEQ ID NO: 1770120 - RNA, 19 nt, Homo sapiens
  misc_RNA (1)...(19): siRNA sense strand
gacaugguuuuaagaauag

SEQ ID NO: 1770121 - RNA, 19 nt, Homo sapiens
  misc_RNA (1)...(19): siRNA sense strand
cagaagucccacauucaau

SEQ ID NO: 1770122 - RNA, 19 nt, Homo sapiens
  misc_RNA (1)...(19): siRNA sense strand
aggcuuuaauuguaagaug

SEQ ID NO: 1770123 - RNA, 19 nt, Homo sapiens
  misc_RNA (1)...(19): siRNA sense strand
caacaagaggaagggcaaa

SEQ ID NO: 1770124 - RNA, 19 nt, Homo sapiens
  misc_RNA (1)...(19): siRNA sense strand
ggaaaaggcacucaguucu

SEQ ID NO: 1770125 - RNA, 19 nt, Homo sapiens
  misc_RNA (1)...(19): siRNA sense strand
caaugaaaauggagccaau

SEQ ID NO: 1770126 - RNA, 19 nt, Homo sapiens
  misc_RNA (1)...(19): siRNA sense strand
gucagaagucccacauuca

SEQ ID NO: 1770127 - RNA, 19 nt, Homo sapiens
  misc_RNA (1)...(19): siRNA sense strand
ugagaaggcacaccguaag

SEQ ID NO: 1770128 - RNA, 19 nt, Homo sapiens
  misc_RNA (1)...(19): siRNA sense strand
aggauuuauugcugcagua

SEQ ID NO: 1770129 - RNA, 19 nt, Homo sapiens
  misc_RNA (1)...(19): siRNA sense strand
gaggaagggcaaaaucaaa

SEQ ID NO: 1770130 - RNA, 19 nt, Homo sapiens
  misc_RNA (1)...(19): siRNA sense strand
auaaaggaaguggaaauug

SEQ ID NO: 1770131 - RNA, 19 nt, Homo sapiens
  misc_RNA (1)...(19): siRNA sense strand
agaauugucaggcucuuca

SEQ ID NO: 1770132 - RNA, 19 nt, Homo sapiens
  misc_RNA (1)...(19): siRNA sense strand
gacaaggaaaaccuaguua

SEQ ID NO: 1770133 - RNA, 19 nt, Homo sapiens
  misc_RNA (1)...(19): siRNA sense strand
acaccguggauugguauua

SEQ ID NO: 1770134 - RNA, 19 nt, Homo sapiens
  misc_RNA (1)...(19): siRNA sense strand
uguuccagauuauuugaug

SEQ ID NO: 1770135 - RNA, 19 nt, Homo sapiens
  misc_RNA (1)...(19): siRNA sense strand
agauugcaauguuccagau

SEQ ID NO: 1770136 - RNA, 19 nt, Homo sapiens
  misc_RNA (1)...(19): siRNA sense strand
accaagaauucaacaagag

SEQ ID NO: 1770137 - RNA, 19 nt, Homo sapiens
  misc_RNA (1)...(19): siRNA sense strand
caccguggauugguauuac

SEQ ID NO: 1770138 - RNA, 19 nt, Homo sapiens
  misc_RNA (1)...(19): siRNA sense strand
ggaaagaaaucguguguuu

SEQ ID NO: 1770139 - RNA, 19 nt, Homo sapiens
  misc_RNA (1)...(19): siRNA sense strand
ucacaauucucauguauuc

SEQ ID NO: 1770140 - RNA, 19 nt, Homo sapiens
  misc_RNA (1)...(19): siRNA sense strand
gcaauguuccagauuauuu

SEQ ID NO: 1770141 - RNA, 19 nt, Homo sapiens
  misc_RNA (1)...(19): siRNA sense strand
gcgaaugucaccauauaua

SEQ ID NO: 1770142 - RNA, 19 nt, Homo sapiens
  misc_RNA (1)...(19): siRNA sense strand
gaaaauggagccaauuaua

SEQ ID NO: 1770143 - RNA, 19 nt, Homo sapiens
  misc_RNA (1)...(19): siRNA sense strand
cgaaugucaccauauauaa

SEQ ID NO: 1770144 - RNA, 19 nt, Homo sapiens
  misc_RNA (1)...(19): siRNA sense strand
guacagggcgcacaaguca

SEQ ID NO: 1770145 - RNA, 19 nt, Homo sapiens
  misc_RNA (1)...(19): siRNA sense strand
ggauugguauuacucacaa

SEQ ID NO: 1770146 - RNA, 19 nt, Homo sapiens
  misc_RNA (1)...(19): siRNA sense strand
gaaagaaaucguguguuug

SEQ ID NO: 1770147 - RNA, 19 nt, Homo sapiens
  misc_RNA (1)...(19): siRNA sense strand
gaaaaugaggcuuuaauug

SEQ ID NO: 1770148 - RNA, 19 nt, Homo sapiens
  misc_RNA (1)...(19): siRNA sense strand
cagcaccucuugagugguu

SEQ ID NO: 1770149 - RNA, 19 nt, Homo sapiens
  misc_RNA (1)...(19): siRNA sense strand
ccauugaccucuacaacug

SEQ ID NO: 1770150 - RNA, 19 nt, Homo sapiens
  misc_RNA (1)...(19): siRNA sense strand
gaucuuagcaauucucaca

SEQ ID NO: 1770151 - RNA, 19 nt, Homo sapiens
  misc_RNA (1)...(19): siRNA sense strand
ugucagaagucccacauuc

SEQ ID NO: 1770152 - RNA, 19 nt, Homo sapiens
  misc_RNA (1)...(19): siRNA sense strand
agaagucccacauucaaua

SEQ ID NO: 1770153 - RNA, 19 nt, Homo sapiens
  misc_RNA (1)...(19): siRNA sense strand
uugauaaugugaugacuga

SEQ ID NO: 1770154 - RNA, 19 nt, Homo sapiens
  misc_RNA (1)...(19): siRNA sense strand
cagcagcaaaguuuaguaa

SEQ ID NO: 1770155 - RNA, 19 nt, Homo sapiens
  misc_RNA (1)...(19): siRNA sense strand
augcgaaugucaccauaua

SEQ ID NO: 1770156 - RNA, 19 nt, Homo sapiens
  misc_RNA (1)...(19): siRNA sense strand
ggagccaauuauaguguga

SEQ ID NO: 1770157 - RNA, 19 nt, Homo sapiens
  misc_RNA (1)...(19): siRNA sense strand
guuacaccguggauuggua

SEQ ID NO: 1770158 - RNA, 19 nt, Homo sapiens
  misc_RNA (1)...(19): siRNA sense strand
ucucacaauucucauguau

SEQ ID NO: 1770159 - RNA, 19 nt, Homo sapiens
  misc_RNA (1)...(19): siRNA sense strand
uugagugguuuaagaauug

SEQ ID NO: 1770160 - RNA, 19 nt, Homo sapiens
  misc_RNA (1)...(19): siRNA sense strand
gguauuacucacaaacaaa

SEQ ID NO: 1770161 - RNA, 19 nt, Homo sapiens
  misc_RNA (1)...(19): siRNA sense strand
ggaaaaugaggcuuuaauu

SEQ ID NO: 1770162 - RNA, 19 nt, Homo sapiens
  misc_RNA (1)...(19): siRNA sense strand
auugcaauguuccagauua

SEQ ID NO: 1770163 - RNA, 19 nt, Homo sapiens
  misc_RNA (1)...(19): siRNA sense strand
cuugagugguuuaagaauu

SEQ ID NO: 1770164 - RNA, 19 nt, Homo sapiens
  misc_RNA (1)...(19): siRNA sense strand
gaagucccacauucaauag

SEQ ID NO: 1770165 - RNA, 19 nt, Homo sapiens
  misc_RNA (1)...(19): siRNA sense strand
ucagaagucccacauucaa

SEQ ID NO: 1770166 - RNA, 19 nt, Homo sapiens
  misc_RNA (1)...(19): siRNA sense strand
ggacuggauaugcgaaugu

SEQ ID NO: 1770167 - RNA, 19 nt, Homo sapiens
  misc_RNA (1)...(19): siRNA sense strand
cuaguuacaccguggauug

SEQ ID NO: 1770168 - RNA, 19 nt, Homo sapiens
  misc_RNA (1)...(19): siRNA sense strand
aaagaaaucguguguuugc

SEQ ID NO: 1770169 - RNA, 19 nt, Homo sapiens
  misc_RNA (1)...(19): siRNA sense strand
ggcuuuaauuguaagaugu

SEQ ID NO: 1770170 - RNA, 19 nt, Homo sapiens
  misc_RNA (1)...(19): siRNA sense strand
aaauggagccaauuauagu

SEQ ID NO: 1770171 - RNA, 19 nt, Homo sapiens
  misc_RNA (1)...(19): siRNA sense strand
cuucaaggaucaagguaca

SEQ ID NO: 1770172 - RNA, 19 nt, Homo sapiens
  misc_RNA (1)...(19): siRNA sense strand
gcaccucuugagugguuua

SEQ ID NO: 1770173 - RNA, 19 nt, Homo sapiens
  misc_RNA (1)...(19): siRNA sense strand
caauguuccagauuauuug

SEQ ID NO: 1770174 - RNA, 19 nt, Homo sapiens
  misc_RNA (1)...(19): siRNA sense strand
ccacagcagcaaaguuuag

SEQ ID NO: 1770175 - RNA, 19 nt, Homo sapiens
  misc_RNA (1)...(19): siRNA sense strand
gcugauucugguauuuaua

SEQ ID NO: 1770176 - RNA, 19 nt, Homo sapiens
  misc_RNA (1)...(19): siRNA sense strand
acagggcgcacaagucauu

SEQ ID NO: 1770177 - RNA, 19 nt, Homo sapiens
  misc_RNA (1)...(19): siRNA sense strand
caacuggacagcaccucuu

SEQ ID NO: 1770178 - RNA, 19 nt, Homo sapiens
  misc_RNA (1)...(19): siRNA sense strand
cauggggccuggaaaauga

SEQ ID NO: 1770179 - RNA, 19 nt, Homo sapiens
  misc_RNA (1)...(19): siRNA sense strand
ugguauuacucacaaacaa

SEQ ID NO: 1770180 - RNA, 19 nt, Homo sapiens
  misc_RNA (1)...(19): siRNA sense strand
guccuaccauugaccucua

SEQ ID NO: 1770181 - RNA, 19 nt, Homo sapiens
  misc_RNA (1)...(19): siRNA sense strand
gauugguauuacucacaaa

SEQ ID NO: 1770182 - RNA, 19 nt, Homo sapiens
  misc_RNA (1)...(19): siRNA sense strand
uuuauuguccuaccauuga

SEQ ID NO: 1770183 - RNA, 19 nt, Homo sapiens
  misc_RNA (1)...(19): siRNA sense strand
gauaugcgaaugucaccau

SEQ ID NO: 1770184 - RNA, 19 nt, Homo sapiens
  misc_RNA (1)...(19): siRNA sense strand
caggaaagaaaucgugugu

SEQ ID NO: 1770185 - RNA, 19 nt, Homo sapiens
  misc_RNA (1)...(19): siRNA sense strand
caagguacagggcgcacaa

SEQ ID NO: 1770186 - RNA, 19 nt, Homo sapiens
  misc_RNA (1)...(19): siRNA sense strand
uugcaauguuccagauuau

SEQ ID NO: 1770187 - RNA, 19 nt, Homo sapiens
  misc_RNA (1)...(19): siRNA sense strand
acaaaaguauucccacuca

SEQ ID NO: 1770188 - RNA, 19 nt, Homo sapiens
  misc_RNA (1)...(19): siRNA sense strand
ucuuagcaauucucacaau

SEQ ID NO: 1770189 - RNA, 19 nt, Homo sapiens
  misc_RNA (1)...(19): siRNA sense strand
uuccacagcagcaaaguuu

SEQ ID NO: 1770190 - RNA, 19 nt, Homo sapiens
  misc_RNA (1)...(19): siRNA sense strand
guugcugauucugguauuu

SEQ ID NO: 1770191 - RNA, 19 nt, Homo sapiens
  misc_RNA (1)...(19): siRNA sense strand
cagaagucccacauucaau

SEQ ID NO: 1770192 - RNA, 19 nt, Homo sapiens
  misc_RNA (1)...(19): siRNA sense strand
aggcuuuaauuguaagaug

SEQ ID NO: 1770193 - RNA, 19 nt, Homo sapiens
  misc_RNA (1)...(19): siRNA sense strand
caaugaaaauggagccaau

SEQ ID NO: 1770194 - RNA, 19 nt, Homo sapiens
  misc_RNA (1)...(19): siRNA sense strand
acaccguggauugguauua

SEQ ID NO: 1770195 - RNA, 19 nt, Homo sapiens
  misc_RNA (1)...(19): siRNA sense strand
agaauugucaggcucuuca

SEQ ID NO: 1770196 - RNA, 19 nt, Homo sapiens
  misc_RNA (1)...(19): siRNA sense strand
uguuccagauuauuugaug

SEQ ID NO: 1770197 - RNA, 19 nt, Homo sapiens
  misc_RNA (1)...(19): siRNA sense strand
agauugcaauguuccagau

SEQ ID NO: 1770198 - RNA, 19 nt, Homo sapiens
  misc_RNA (1)...(19): siRNA sense strand
gucagaagucccacauuca

SEQ ID NO: 1770199 - RNA, 19 nt, Homo sapiens
  misc_RNA (1)...(19): siRNA sense strand
gacaaggaaaaccuaguua

SEQ ID NO: 1770200 - RNA, 19 nt, Homo sapiens
  misc_RNA (1)...(19): siRNA sense strand
caccguggauugguauuac

SEQ ID NO: 1770201 - RNA, 19 nt, Homo sapiens
  misc_RNA (1)...(19): siRNA sense strand
ccagguccuucacggucaa

SEQ ID NO: 1770202 - RNA, 19 nt, Homo sapiens
  misc_RNA (1)...(19): siRNA sense strand
uugcugauucugguauuua

SEQ ID NO: 1770203 - RNA, 19 nt, Homo sapiens
  misc_RNA (1)...(19): siRNA sense strand
caaacuagaagucaucauu

SEQ ID NO: 1770204 - RNA, 19 nt, Homo sapiens
  misc_RNA (1)...(19): siRNA sense strand
acaggaagcugacuaugga

SEQ ID NO: 1770205 - RNA, 19 nt, Homo sapiens
  misc_RNA (1)...(19): siRNA sense strand
gaagcugacuauggaagaa

SEQ ID NO: 1770206 - RNA, 19 nt, Homo sapiens
  misc_RNA (1)...(19): siRNA sense strand
ucucaaagauucagucaca

SEQ ID NO: 1770207 - RNA, 19 nt, Homo sapiens
  misc_RNA (1)...(19): siRNA sense strand
uggacaaacugaucaagaa

SEQ ID NO: 1770208 - RNA, 19 nt, Homo sapiens
  misc_RNA (1)...(19): siRNA sense strand
gcacuucggcugcaccauu

SEQ ID NO: 1770209 - RNA, 19 nt, Homo sapiens
  misc_RNA (1)...(19): siRNA sense strand
agacaaaccuggccuuggu

SEQ ID NO: 1770210 - RNA, 19 nt, Homo sapiens
  misc_RNA (1)...(19): siRNA sense strand
ccauuggucucaaagauuc

SEQ ID NO: 1770211 - RNA, 19 nt, Homo sapiens
  misc_RNA (1)...(19): siRNA sense strand
gcaucagcgugcucuugua

SEQ ID NO: 1770212 - RNA, 19 nt, Homo sapiens
  misc_RNA (1)...(19): siRNA sense strand
gaugggaaagccaguauug

SEQ ID NO: 1770213 - RNA, 19 nt, Homo sapiens
  misc_RNA (1)...(19): siRNA sense strand
gggaugaggaugaggauga

SEQ ID NO: 1770214 - RNA, 19 nt, Homo sapiens
  misc_RNA (1)...(19): siRNA sense strand
gaagaguccuaugaguuca

SEQ ID NO: 1770215 - RNA, 19 nt, Homo sapiens
  misc_RNA (1)...(19): siRNA sense strand
ggaugaggaugaggaugaa

SEQ ID NO: 1770216 - RNA, 19 nt, Homo sapiens
  misc_RNA (1)...(19): siRNA sense strand
ccaagaggauagcagagau

SEQ ID NO: 1770217 - RNA, 19 nt, Homo sapiens
  misc_RNA (1)...(19): siRNA sense strand
uagaagucaucauugaaga

SEQ ID NO: 1770218 - RNA, 19 nt, Homo sapiens
  misc_RNA (1)...(19): siRNA sense strand
ugaagaguccuaugaguuc

SEQ ID NO: 1770219 - RNA, 19 nt, Homo sapiens
  misc_RNA (1)...(19): siRNA sense strand
gcaacgccgucaaugucuu

SEQ ID NO: 1770220 - RNA, 19 nt, Homo sapiens
  misc_RNA (1)...(19): siRNA sense strand
ggagggaccaguucaugga

SEQ ID NO: 1770221 - RNA, 19 nt, Homo sapiens
  misc_RNA (1)...(19): siRNA sense strand
ccuaugaguucaagacuac

SEQ ID NO: 1770222 - RNA, 19 nt, Homo sapiens
  misc_RNA (1)...(19): siRNA sense strand
gcagcaacgccgucaaugu

SEQ ID NO: 1770223 - RNA, 19 nt, Homo sapiens
  misc_RNA (1)...(19): siRNA sense strand
aaacuagaagucaucauug

SEQ ID NO: 1770224 - RNA, 19 nt, Homo sapiens
  misc_RNA (1)...(19): siRNA sense strand
ggaagcugacuauggaaga

SEQ ID NO: 1770225 - RNA, 19 nt, Homo sapiens
  misc_RNA (1)...(19): siRNA sense strand
aacuagaagucaucauuga

SEQ ID NO: 1770226 - RNA, 19 nt, Homo sapiens
  misc_RNA (1)...(19): siRNA sense strand
gcugcaagcucgccacaac

SEQ ID NO: 1770227 - RNA, 19 nt, Homo sapiens
  misc_RNA (1)...(19): siRNA sense strand
agacuacgguggacaaacu

SEQ ID NO: 1770228 - RNA, 19 nt, Homo sapiens
  misc_RNA (1)...(19): siRNA sense strand
gacaaacugaucaagaaga

SEQ ID NO: 1770229 - RNA, 19 nt, Homo sapiens
  misc_RNA (1)...(19): siRNA sense strand
aaacugaucaagaagacaa

SEQ ID NO: 1770230 - RNA, 19 nt, Homo sapiens
  misc_RNA (1)...(19): siRNA sense strand
gaagucaucauugaagagu

SEQ ID NO: 1770231 - RNA, 19 nt, Homo sapiens
  misc_RNA (1)...(19): siRNA sense strand
gacaggaagcugacuaugg

SEQ ID NO: 1770232 - RNA, 19 nt, Homo sapiens
  misc_RNA (1)...(19): siRNA sense strand
ggacaaacugaucaagaag

SEQ ID NO: 1770233 - RNA, 19 nt, Homo sapiens
  misc_RNA (1)...(19): siRNA sense strand
gagaugggaaagccaguau

SEQ ID NO: 1770234 - RNA, 19 nt, Homo sapiens
  misc_RNA (1)...(19): siRNA sense strand
cagcaacgccgucaauguc

SEQ ID NO: 1770235 - RNA, 19 nt, Homo sapiens
  misc_RNA (1)...(19): siRNA sense strand
ggauagcagagaugggaaa

SEQ ID NO: 1770236 - RNA, 19 nt, Homo sapiens
  misc_RNA (1)...(19): siRNA sense strand
cauacucuuugccacacua

SEQ ID NO: 1770237 - RNA, 19 nt, Homo sapiens
  misc_RNA (1)...(19): siRNA sense strand
cuagaggccuauugcuaca

SEQ ID NO: 1770238 - RNA, 19 nt, Homo sapiens
  misc_RNA (1)...(19): siRNA sense strand
gcuccucuacauacucuuu

SEQ ID NO: 1770239 - RNA, 19 nt, Homo sapiens
  misc_RNA (1)...(19): siRNA sense strand
cacuagaggccuauugcua

SEQ ID NO: 1770240 - RNA, 19 nt, Homo sapiens
  misc_RNA (1)...(19): siRNA sense strand
cacuucggcugcaccauug

SEQ ID NO: 1770241 - RNA, 19 nt, Homo sapiens
  misc_RNA (1)...(19): siRNA sense strand
gggcagcaacgccgucaau

SEQ ID NO: 1770242 - RNA, 19 nt, Homo sapiens
  misc_RNA (1)...(19): siRNA sense strand
gccuguggcuccucuacau

SEQ ID NO: 1770243 - RNA, 19 nt, Homo sapiens
  misc_RNA (1)...(19): siRNA sense strand
caagaggauagcagagaug

SEQ ID NO: 1770244 - RNA, 19 nt, Homo sapiens
  misc_RNA (1)...(19): siRNA sense strand
aggcugcccuccugcuuug

SEQ ID NO: 1770245 - RNA, 19 nt, Homo sapiens
  misc_RNA (1)...(19): siRNA sense strand
acaaacugaucaagaagac

SEQ ID NO: 1770246 - RNA, 19 nt, Homo sapiens
  misc_RNA (1)...(19): siRNA sense strand
guggacaaacugaucaaga

SEQ ID NO: 1770247 - RNA, 19 nt, Homo sapiens
  misc_RNA (1)...(19): siRNA sense strand
gccaagaggauagcagaga

SEQ ID NO: 1770248 - RNA, 19 nt, Homo sapiens
  misc_RNA (1)...(19): siRNA sense strand
cugcugcccuccaggaugu

SEQ ID NO: 1770249 - RNA, 19 nt, Homo sapiens
  misc_RNA (1)...(19): siRNA sense strand
gaagaagaggaggccaaga

SEQ ID NO: 1770250 - RNA, 19 nt, Homo sapiens
  misc_RNA (1)...(19): siRNA sense strand
uugaagaguccuaugaguu

SEQ ID NO: 1770251 - RNA, 19 nt, Homo sapiens
  misc_RNA (1)...(19): siRNA sense strand
gaggaggccaagaggauag

SEQ ID NO: 1770252 - RNA, 19 nt, Homo sapiens
  misc_RNA (1)...(19): siRNA sense strand
agucacagcuguuguuuuc

SEQ ID NO: 1770253 - RNA, 19 nt, Homo sapiens
  misc_RNA (1)...(19): siRNA sense strand
cuagaagucaucauugaag

SEQ ID NO: 1770254 - RNA, 19 nt, Homo sapiens
  misc_RNA (1)...(19): siRNA sense strand
ccacacuagaggccuauug

SEQ ID NO: 1770255 - RNA, 19 nt, Homo sapiens
  misc_RNA (1)...(19): siRNA sense strand
gcaagcucgccacaacaug

SEQ ID NO: 1770256 - RNA, 19 nt, Homo sapiens
  misc_RNA (1)...(19): siRNA sense strand
caccaucuuugcauuuguc

SEQ ID NO: 1770257 - RNA, 19 nt, Homo sapiens
  misc_RNA (1)...(19): siRNA sense strand
ucaagacuacgguggacaa

SEQ ID NO: 1770258 - RNA, 19 nt, Homo sapiens
  misc_RNA (1)...(19): siRNA sense strand
caugcucaccgccaucauu

SEQ ID NO: 1770259 - RNA, 19 nt, Homo sapiens
  misc_RNA (1)...(19): siRNA sense strand
gcacuuccugacugucuuc

SEQ ID NO: 1770260 - RNA, 19 nt, Homo sapiens
  misc_RNA (1)...(19): siRNA sense strand
caacgccgucaaugucuuc

SEQ ID NO: 1770261 - RNA, 19 nt, Homo sapiens
  misc_RNA (1)...(19): siRNA sense strand
ccuccaggauguauaugca

SEQ ID NO: 1770262 - RNA, 19 nt, Homo sapiens
  misc_RNA (1)...(19): siRNA sense strand
ucuggaaggugcuguuugc

SEQ ID NO: 1770263 - RNA, 19 nt, Homo sapiens
  misc_RNA (1)...(19): siRNA sense strand
uccuaugaguucaagacua

SEQ ID NO: 1770264 - RNA, 19 nt, Homo sapiens
  misc_RNA (1)...(19): siRNA sense strand
cagacaggaagcugacuau

SEQ ID NO: 1770265 - RNA, 19 nt, Homo sapiens
  misc_RNA (1)...(19): siRNA sense strand
ucaccaucuuugcauuugu

SEQ ID NO: 1770266 - RNA, 19 nt, Homo sapiens
  misc_RNA (1)...(19): siRNA sense strand
agaggaggccaagaggaua

SEQ ID NO: 1770267 - RNA, 19 nt, Homo sapiens
  misc_RNA (1)...(19): siRNA sense strand
aagaggaggccaagaggau

SEQ ID NO: 1770268 - RNA, 19 nt, Homo sapiens
  misc_RNA (1)...(19): siRNA sense strand
caaacuagaagucaucauu

SEQ ID NO: 1770269 - RNA, 19 nt, Homo sapiens
  misc_RNA (1)...(19): siRNA sense strand
acaggaagcugacuaugga

SEQ ID NO: 1770270 - RNA, 19 nt, Homo sapiens
  misc_RNA (1)...(19): siRNA sense strand
gaagcugacuauggaagaa

SEQ ID NO: 1770271 - RNA, 19 nt, Homo sapiens
  misc_RNA (1)...(19): siRNA sense strand
ucucaaagauucagucaca

SEQ ID NO: 1770272 - RNA, 19 nt, Homo sapiens
  misc_RNA (1)...(19): siRNA sense strand
uggacaaacugaucaagaa

SEQ ID NO: 1770273 - RNA, 19 nt, Homo sapiens
  misc_RNA (1)...(19): siRNA sense strand
gcacuucggcugcaccauu

SEQ ID NO: 1770274 - RNA, 19 nt, Homo sapiens
  misc_RNA (1)...(19): siRNA sense strand
agacaaaccuggccuuggu

SEQ ID NO: 1770275 - RNA, 19 nt, Homo sapiens
  misc_RNA (1)...(19): siRNA sense strand
ccauuggucucaaagauuc

SEQ ID NO: 1770276 - RNA, 19 nt, Homo sapiens
  misc_RNA (1)...(19): siRNA sense strand
gcaucagcgugcucuugua

SEQ ID NO: 1770277 - RNA, 19 nt, Homo sapiens
  misc_RNA (1)...(19): siRNA sense strand
gaugggaaagccaguauug

SEQ ID NO: 1770278 - RNA, 19 nt, Homo sapiens
  misc_RNA (1)...(19): siRNA sense strand
gggaugaggaugaggauga

SEQ ID NO: 1770279 - RNA, 19 nt, Homo sapiens
  misc_RNA (1)...(19): siRNA sense strand
gaagaguccuaugaguuca

SEQ ID NO: 1770280 - RNA, 19 nt, Homo sapiens
  misc_RNA (1)...(19): siRNA sense strand
ggaugaggaugaggaugaa

SEQ ID NO: 1770281 - RNA, 19 nt, Homo sapiens
  misc_RNA (1)...(19): siRNA sense strand
ccaagaggauagcagagau

SEQ ID NO: 1770282 - RNA, 19 nt, Homo sapiens
  misc_RNA (1)...(19): siRNA sense strand
uagaagucaucauugaaga

SEQ ID NO: 1770283 - RNA, 19 nt, Homo sapiens
  misc_RNA (1)...(19): siRNA sense strand
ugaagaguccuaugaguuc

SEQ ID NO: 1770284 - RNA, 19 nt, Homo sapiens
  misc_RNA (1)...(19): siRNA sense strand
gcaacgccgucaaugucuu

SEQ ID NO: 1770285 - RNA, 19 nt, Homo sapiens
  misc_RNA (1)...(19): siRNA sense strand
ggagggaccaguucaugga

SEQ ID NO: 1770286 - RNA, 19 nt, Homo sapiens
  misc_RNA (1)...(19): siRNA sense strand
ccuaugaguucaagacuac

SEQ ID NO: 1770287 - RNA, 19 nt, Homo sapiens
  misc_RNA (1)...(19): siRNA sense strand
gcagcaacgccgucaaugu

SEQ ID NO: 1770288 - RNA, 19 nt, Homo sapiens
  misc_RNA (1)...(19): siRNA sense strand
aaacuagaagucaucauug

SEQ ID NO: 1770289 - RNA, 19 nt, Homo sapiens
  misc_RNA (1)...(19): siRNA sense strand
ggaagcugacuauggaaga

SEQ ID NO: 1770290 - RNA, 19 nt, Homo sapiens
  misc_RNA (1)...(19): siRNA sense strand
aacuagaagucaucauuga

SEQ ID NO: 1770291 - RNA, 19 nt, Homo sapiens
  misc_RNA (1)...(19): siRNA sense strand
gcugcaagcucgccacaac

SEQ ID NO: 1770292 - RNA, 19 nt, Homo sapiens
  misc_RNA (1)...(19): siRNA sense strand
agacuacgguggacaaacu

SEQ ID NO: 1770293 - RNA, 19 nt, Homo sapiens
  misc_RNA (1)...(19): siRNA sense strand
gacaaacugaucaagaaga

SEQ ID NO: 1770294 - RNA, 19 nt, Homo sapiens
  misc_RNA (1)...(19): siRNA sense strand
aaacugaucaagaagacaa

SEQ ID NO: 1770295 - RNA, 19 nt, Homo sapiens
  misc_RNA (1)...(19): siRNA sense strand
gaagucaucauugaagagu

SEQ ID NO: 1770296 - RNA, 19 nt, Homo sapiens
  misc_RNA (1)...(19): siRNA sense strand
gacaggaagcugacuaugg

SEQ ID NO: 1770297 - RNA, 19 nt, Homo sapiens
  misc_RNA (1)...(19): siRNA sense strand
ggacaaacugaucaagaag

SEQ ID NO: 1770298 - RNA, 19 nt, Homo sapiens
  misc_RNA (1)...(19): siRNA sense strand
gagaugggaaagccaguau

SEQ ID NO: 1770299 - RNA, 19 nt, Homo sapiens
  misc_RNA (1)...(19): siRNA sense strand
cagcaacgccgucaauguc

SEQ ID NO: 1770300 - RNA, 19 nt, Homo sapiens
  misc_RNA (1)...(19): siRNA sense strand
ggauagcagagaugggaaa

SEQ ID NO: 1770301 - RNA, 19 nt, Homo sapiens
  misc_RNA (1)...(19): siRNA sense strand
cauacucuuugccacacua

SEQ ID NO: 1770302 - RNA, 19 nt, Homo sapiens
  misc_RNA (1)...(19): siRNA sense strand
cuagaggccuauugcuaca

SEQ ID NO: 1770303 - RNA, 19 nt, Homo sapiens
  misc_RNA (1)...(19): siRNA sense strand
gcuccucuacauacucuuu

SEQ ID NO: 1770304 - RNA, 19 nt, Homo sapiens
  misc_RNA (1)...(19): siRNA sense strand
cacuagaggccuauugcua

SEQ ID NO: 1770305 - RNA, 19 nt, Homo sapiens
  misc_RNA (1)...(19): siRNA sense strand
cacuucggcugcaccauug

SEQ ID NO: 1770306 - RNA, 19 nt, Homo sapiens
  misc_RNA (1)...(19): siRNA sense strand
gggcagcaacgccgucaau

SEQ ID NO: 1770307 - RNA, 19 nt, Homo sapiens
  misc_RNA (1)...(19): siRNA sense strand
gccuguggcuccucuacau

SEQ ID NO: 1770308 - RNA, 19 nt, Homo sapiens
  misc_RNA (1)...(19): siRNA sense strand
caagaggauagcagagaug

SEQ ID NO: 1770309 - RNA, 19 nt, Homo sapiens
  misc_RNA (1)...(19): siRNA sense strand
aggcugcccuccugcuuug

SEQ ID NO: 1770310 - RNA, 19 nt, Homo sapiens
  misc_RNA (1)...(19): siRNA sense strand
acaaacugaucaagaagac

SEQ ID NO: 1770311 - RNA, 19 nt, Homo sapiens
  misc_RNA (1)...(19): siRNA sense strand
guggacaaacugaucaaga

SEQ ID NO: 1770312 - RNA, 19 nt, Homo sapiens
  misc_RNA (1)...(19): siRNA sense strand
gccaagaggauagcagaga

SEQ ID NO: 1770313 - RNA, 19 nt, Homo sapiens
  misc_RNA (1)...(19): siRNA sense strand
cugcugcccuccaggaugu

SEQ ID NO: 1770314 - RNA, 19 nt, Homo sapiens
  misc_RNA (1)...(19): siRNA sense strand
gaagaagaggaggccaaga

SEQ ID NO: 1770315 - RNA, 19 nt, Homo sapiens
  misc_RNA (1)...(19): siRNA sense strand
uugaagaguccuaugaguu

SEQ ID NO: 1770316 - RNA, 19 nt, Homo sapiens
  misc_RNA (1)...(19): siRNA sense strand
gaggaggccaagaggauag

SEQ ID NO: 1770317 - RNA, 19 nt, Homo sapiens
  misc_RNA (1)...(19): siRNA sense strand
agucacagcuguuguuuuc

SEQ ID NO: 1770318 - RNA, 19 nt, Homo sapiens
  misc_RNA (1)...(19): siRNA sense strand
cuagaagucaucauugaag

SEQ ID NO: 1770319 - RNA, 19 nt, Homo sapiens
  misc_RNA (1)...(19): siRNA sense strand
ccacacuagaggccuauug

SEQ ID NO: 1770320 - RNA, 19 nt, Homo sapiens
  misc_RNA (1)...(19): siRNA sense strand
gcaagcucgccacaacaug

SEQ ID NO: 1770321 - RNA, 19 nt, Homo sapiens
  misc_RNA (1)...(19): siRNA sense strand
caccaucuuugcauuuguc

SEQ ID NO: 1770322 - RNA, 19 nt, Homo sapiens
  misc_RNA (1)...(19): siRNA sense strand
ucaagacuacgguggacaa

SEQ ID NO: 1770323 - RNA, 19 nt, Homo sapiens
  misc_RNA (1)...(19): siRNA sense strand
caugcucaccgccaucauu

SEQ ID NO: 1770324 - RNA, 19 nt, Homo sapiens
  misc_RNA (1)...(19): siRNA sense strand
gcacuuccugacugucuuc

SEQ ID NO: 1770325 - RNA, 19 nt, Homo sapiens
  misc_RNA (1)...(19): siRNA sense strand
caacgccgucaaugucuuc

SEQ ID NO: 1770326 - RNA, 19 nt, Homo sapiens
  misc_RNA (1)...(19): siRNA sense strand
ccuccaggauguauaugca

SEQ ID NO: 1770327 - RNA, 19 nt, Homo sapiens
  misc_RNA (1)...(19): siRNA sense strand
ucuggaaggugcuguuugc

SEQ ID NO: 1770328 - RNA, 19 nt, Homo sapiens
  misc_RNA (1)...(19): siRNA sense strand
uccuaugaguucaagacua

SEQ ID NO: 1770329 - RNA, 19 nt, Homo sapiens
  misc_RNA (1)...(19): siRNA sense strand
cagacaggaagcugacuau

SEQ ID NO: 1770330 - RNA, 19 nt, Homo sapiens
  misc_RNA (1)...(19): siRNA sense strand
ucaccaucuuugcauuugu

SEQ ID NO: 1770331 - RNA, 19 nt, Homo sapiens
  misc_RNA (1)...(19): siRNA sense strand
agaggaggccaagaggaua

SEQ ID NO: 1770332 - RNA, 19 nt, Homo sapiens
  misc_RNA (1)...(19): siRNA sense strand
aagaggaggccaagaggau

SEQ ID NO: 1770333 - RNA, 19 nt, Homo sapiens
  misc_RNA (1)...(19): siRNA sense strand
caaacuagaagucaucauu

SEQ ID NO: 1770334 - RNA, 19 nt, Homo sapiens
  misc_RNA (1)...(19): siRNA sense strand
acaggaagcugacuaugga

SEQ ID NO: 1770335 - RNA, 19 nt, Homo sapiens
  misc_RNA (1)...(19): siRNA sense strand
gaagcugacuauggaagaa

SEQ ID NO: 1770336 - RNA, 19 nt, Homo sapiens
  misc_RNA (1)...(19): siRNA sense strand
ucucaaagauucagucaca

SEQ ID NO: 1770337 - RNA, 19 nt, Homo sapiens
  misc_RNA (1)...(19): siRNA sense strand
uggacaaacugaucaagaa

SEQ ID NO: 1770338 - RNA, 19 nt, Homo sapiens
  misc_RNA (1)...(19): siRNA sense strand
gcacuucggcugcaccauu

SEQ ID NO: 1770339 - RNA, 19 nt, Homo sapiens
  misc_RNA (1)...(19): siRNA sense strand
agacaaaccuggccuuggu

SEQ ID NO: 1770340 - RNA, 19 nt, Homo sapiens
  misc_RNA (1)...(19): siRNA sense strand
ccauuggucucaaagauuc

SEQ ID NO: 1770341 - RNA, 19 nt, Homo sapiens
  misc_RNA (1)...(19): siRNA sense strand
gcaucagcgugcucuugua

SEQ ID NO: 1770342 - RNA, 19 nt, Homo sapiens
  misc_RNA (1)...(19): siRNA sense strand
gaugggaaagccaguauug

SEQ ID NO: 1770343 - RNA, 19 nt, Homo sapiens
  misc_RNA (1)...(19): siRNA sense strand
gggaugaggaugaggauga

SEQ ID NO: 1770344 - RNA, 19 nt, Homo sapiens
  misc_RNA (1)...(19): siRNA sense strand
gaagaguccuaugaguuca

SEQ ID NO: 1770345 - RNA, 19 nt, Homo sapiens
  misc_RNA (1)...(19): siRNA sense strand
ggaugaggaugaggaugaa

SEQ ID NO: 1770346 - RNA, 19 nt, Homo sapiens
  misc_RNA (1)...(19): siRNA sense strand
ccaagaggauagcagagau

SEQ ID NO: 1770347 - RNA, 19 nt, Homo sapiens
  misc_RNA (1)...(19): siRNA sense strand
uagaagucaucauugaaga

SEQ ID NO: 1770348 - RNA, 19 nt, Homo sapiens
  misc_RNA (1)...(19): siRNA sense strand
ugaagaguccuaugaguuc

SEQ ID NO: 1770349 - RNA, 19 nt, Homo sapiens
  misc_RNA (1)...(19): siRNA sense strand
gcaacgccgucaaugucuu

SEQ ID NO: 1770350 - RNA, 19 nt, Homo sapiens
  misc_RNA (1)...(19): siRNA sense strand
ggagggaccaguucaugga

SEQ ID NO: 1770351 - RNA, 19 nt, Homo sapiens
  misc_RNA (1)...(19): siRNA sense strand
ccuaugaguucaagacuac

SEQ ID NO: 1770352 - RNA, 19 nt, Homo sapiens
  misc_RNA (1)...(19): siRNA sense strand
gcagcaacgccgucaaugu

SEQ ID NO: 1770353 - RNA, 19 nt, Homo sapiens
  misc_RNA (1)...(19): siRNA sense strand
aaacuagaagucaucauug

SEQ ID NO: 1770354 - RNA, 19 nt, Homo sapiens
  misc_RNA (1)...(19): siRNA sense strand
ggaagcugacuauggaaga

SEQ ID NO: 1770355 - RNA, 19 nt, Homo sapiens
  misc_RNA (1)...(19): siRNA sense strand
aacuagaagucaucauuga

SEQ ID NO: 1770356 - RNA, 19 nt, Homo sapiens
  misc_RNA (1)...(19): siRNA sense strand
gcugcaagcucgccacaac

SEQ ID NO: 1770357 - RNA, 19 nt, Homo sapiens
  misc_RNA (1)...(19): siRNA sense strand
agacuacgguggacaaacu

SEQ ID NO: 1770358 - RNA, 19 nt, Homo sapiens
  misc_RNA (1)...(19): siRNA sense strand
gacaaacugaucaagaaga

SEQ ID NO: 1770359 - RNA, 19 nt, Homo sapiens
  misc_RNA (1)...(19): siRNA sense strand
aaacugaucaagaagacaa

SEQ ID NO: 1770360 - RNA, 19 nt, Homo sapiens
  misc_RNA (1)...(19): siRNA sense strand
gaagucaucauugaagagu

SEQ ID NO: 1770361 - RNA, 19 nt, Homo sapiens
  misc_RNA (1)...(19): siRNA sense strand
gacaggaagcugacuaugg

SEQ ID NO: 1770362 - RNA, 19 nt, Homo sapiens
  misc_RNA (1)...(19): siRNA sense strand
ggacaaacugaucaagaag

SEQ ID NO: 1770363 - RNA, 19 nt, Homo sapiens
  misc_RNA (1)...(19): siRNA sense strand
gagaugggaaagccaguau

SEQ ID NO: 1770364 - RNA, 19 nt, Homo sapiens
  misc_RNA (1)...(19): siRNA sense strand
cagcaacgccgucaauguc

SEQ ID NO: 1770365 - RNA, 19 nt, Homo sapiens
  misc_RNA (1)...(19): siRNA sense strand
ggauagcagagaugggaaa

SEQ ID NO: 1770366 - RNA, 19 nt, Homo sapiens
  misc_RNA (1)...(19): siRNA sense strand
cauacucuuugccacacua

SEQ ID NO: 1770367 - RNA, 19 nt, Homo sapiens
  misc_RNA (1)...(19): siRNA sense strand
cuagaggccuauugcuaca

SEQ ID NO: 1770368 - RNA, 19 nt, Homo sapiens
  misc_RNA (1)...(19): siRNA sense strand
gcuccucuacauacucuuu

SEQ ID NO: 1770369 - RNA, 19 nt, Homo sapiens
  misc_RNA (1)...(19): siRNA sense strand
cacuagaggccuauugcua

SEQ ID NO: 1770370 - RNA, 19 nt, Homo sapiens
  misc_RNA (1)...(19): siRNA sense strand
cacuucggcugcaccauug

SEQ ID NO: 1770371 - RNA, 19 nt, Homo sapiens
  misc_RNA (1)...(19): siRNA sense strand
gggcagcaacgccgucaau

SEQ ID NO: 1770372 - RNA, 19 nt, Homo sapiens
  misc_RNA (1)...(19): siRNA sense strand
gccuguggcuccucuacau

SEQ ID NO: 1770373 - RNA, 19 nt, Homo sapiens
  misc_RNA (1)...(19): siRNA sense strand
caagaggauagcagagaug

SEQ ID NO: 1770374 - RNA, 19 nt, Homo sapiens
  misc_RNA (1)...(19): siRNA sense strand
aggcugcccuccugcuuug

SEQ ID NO: 1770375 - RNA, 19 nt, Homo sapiens
  misc_RNA (1)...(19): siRNA sense strand
acaaacugaucaagaagac

SEQ ID NO: 1770376 - RNA, 19 nt, Homo sapiens
  misc_RNA (1)...(19): siRNA sense strand
guggacaaacugaucaaga

SEQ ID NO: 1770377 - RNA, 19 nt, Homo sapiens
  misc_RNA (1)...(19): siRNA sense strand
gccaagaggauagcagaga

SEQ ID NO: 1770378 - RNA, 19 nt, Homo sapiens
  misc_RNA (1)...(19): siRNA sense strand
cugcugcccuccaggaugu

SEQ ID NO: 1770379 - RNA, 19 nt, Homo sapiens
  misc_RNA (1)...(19): siRNA sense strand
gaagaagaggaggccaaga

SEQ ID NO: 1770380 - RNA, 19 nt, Homo sapiens
  misc_RNA (1)...(19): siRNA sense strand
uugaagaguccuaugaguu

SEQ ID NO: 1770381 - RNA, 19 nt, Homo sapiens
  misc_RNA (1)...(19): siRNA sense strand
gaggaggccaagaggauag

SEQ ID NO: 1770382 - RNA, 19 nt, Homo sapiens
  misc_RNA (1)...(19): siRNA sense strand
agucacagcuguuguuuuc

SEQ ID NO: 1770383 - RNA, 19 nt, Homo sapiens
  misc_RNA (1)...(19): siRNA sense strand
cuagaagucaucauugaag

SEQ ID NO: 1770384 - RNA, 19 nt, Homo sapiens
  misc_RNA (1)...(19): siRNA sense strand
ccacacuagaggccuauug

SEQ ID NO: 1770385 - RNA, 19 nt, Homo sapiens
  misc_RNA (1)...(19): siRNA sense strand
gcaagcucgccacaacaug

SEQ ID NO: 1770386 - RNA, 19 nt, Homo sapiens
  misc_RNA (1)...(19): siRNA sense strand
caccaucuuugcauuuguc

SEQ ID NO: 1770387 - RNA, 19 nt, Homo sapiens
  misc_RNA (1)...(19): siRNA sense strand
ucaagacuacgguggacaa

SEQ ID NO: 1770388 - RNA, 19 nt, Homo sapiens
  misc_RNA (1)...(19): siRNA sense strand
caugcucaccgccaucauu

SEQ ID NO: 1770389 - RNA, 19 nt, Homo sapiens
  misc_RNA (1)...(19): siRNA sense strand
gcacuuccugacugucuuc

SEQ ID NO: 1770390 - RNA, 19 nt, Homo sapiens
  misc_RNA (1)...(19): siRNA sense strand
caacgccgucaaugucuuc

SEQ ID NO: 1770391 - RNA, 19 nt, Homo sapiens
  misc_RNA (1)...(19): siRNA sense strand
ccuccaggauguauaugca

SEQ ID NO: 1770392 - RNA, 19 nt, Homo sapiens
  misc_RNA (1)...(19): siRNA sense strand
ucuggaaggugcuguuugc

SEQ ID NO: 1770393 - RNA, 19 nt, Homo sapiens
  misc_RNA (1)...(19): siRNA sense strand
uccuaugaguucaagacua

SEQ ID NO: 1770394 - RNA, 19 nt, Homo sapiens
  misc_RNA (1)...(19): siRNA sense strand
cagacaggaagcugacuau

SEQ ID NO: 1770395 - RNA, 19 nt, Homo sapiens
  misc_RNA (1)...(19): siRNA sense strand
ucaccaucuuugcauuugu

SEQ ID NO: 1770396 - RNA, 19 nt, Homo sapiens
  misc_RNA (1)...(19): siRNA sense strand
agaggaggccaagaggaua

SEQ ID NO: 1770397 - RNA, 19 nt, Homo sapiens
  misc_RNA (1)...(19): siRNA sense strand
aagaggaggccaagaggau

SEQ ID NO: 1770398 - RNA, 19 nt, Homo sapiens
  misc_RNA (1)...(19): siRNA sense strand
acaggaagcugacuaugga

SEQ ID NO: 1770399 - RNA, 19 nt, Homo sapiens
  misc_RNA (1)...(19): siRNA sense strand
gaagcugacuauggaagaa

SEQ ID NO: 1770400 - RNA, 19 nt, Homo sapiens
  misc_RNA (1)...(19): siRNA sense strand
gaugggaaagccaguauug

SEQ ID NO: 1770401 - RNA, 19 nt, Homo sapiens
  misc_RNA (1)...(19): siRNA sense strand
ccaagaggauagcagagau

SEQ ID NO: 1770402 - RNA, 19 nt, Homo sapiens
  misc_RNA (1)...(19): siRNA sense strand
ggaagcugacuauggaaga

SEQ ID NO: 1770403 - RNA, 19 nt, Homo sapiens
  misc_RNA (1)...(19): siRNA sense strand
gacaggaagcugacuaugg

SEQ ID NO: 1770404 - RNA, 19 nt, Homo sapiens
  misc_RNA (1)...(19): siRNA sense strand
gagaugggaaagccaguau

SEQ ID NO: 1770405 - RNA, 19 nt, Homo sapiens
  misc_RNA (1)...(19): siRNA sense strand
ggauagcagagaugggaaa

SEQ ID NO: 1770406 - RNA, 19 nt, Homo sapiens
  misc_RNA (1)...(19): siRNA sense strand
caagaggauagcagagaug

SEQ ID NO: 1770407 - RNA, 19 nt, Homo sapiens
  misc_RNA (1)...(19): siRNA sense strand
gaagaagaggaggccaaga

SEQ ID NO: 1770408 - RNA, 19 nt, Homo sapiens
  misc_RNA (1)...(19): siRNA sense strand
gccaagaggauagcagaga

SEQ ID NO: 1770409 - RNA, 19 nt, Homo sapiens
  misc_RNA (1)...(19): siRNA sense strand
gaggaggccaagaggauag

SEQ ID NO: 1770410 - RNA, 19 nt, Homo sapiens
  misc_RNA (1)...(19): siRNA sense strand
agaggaggccaagaggaua

SEQ ID NO: 1770411 - RNA, 19 nt, Homo sapiens
  misc_RNA (1)...(19): siRNA sense strand
cagacaggaagcugacuau

SEQ ID NO: 1770412 - RNA, 19 nt, Homo sapiens
  misc_RNA (1)...(19): siRNA sense strand
aagaggaggccaagaggau

SEQ ID NO: 1770413 - RNA, 19 nt, Homo sapiens
  misc_RNA (1)...(19): siRNA sense strand
caaacuagaagucaucauu

SEQ ID NO: 1770414 - RNA, 19 nt, Homo sapiens
  misc_RNA (1)...(19): siRNA sense strand
ucucaaagauucagucaca

SEQ ID NO: 1770415 - RNA, 19 nt, Homo sapiens
  misc_RNA (1)...(19): siRNA sense strand
uggacaaacugaucaagaa

SEQ ID NO: 1770416 - RNA, 19 nt, Homo sapiens
  misc_RNA (1)...(19): siRNA sense strand
gcacuucggcugcaccauu

SEQ ID NO: 1770417 - RNA, 19 nt, Homo sapiens
  misc_RNA (1)...(19): siRNA sense strand
agacaaaccuggccuuggu

SEQ ID NO: 1770418 - RNA, 19 nt, Homo sapiens
  misc_RNA (1)...(19): siRNA sense strand
ccauuggucucaaagauuc

SEQ ID NO: 1770419 - RNA, 19 nt, Homo sapiens
  misc_RNA (1)...(19): siRNA sense strand
gcaucagcgugcucuugua

SEQ ID NO: 1770420 - RNA, 19 nt, Homo sapiens
  misc_RNA (1)...(19): siRNA sense strand
gaugggaaagccaguauug

SEQ ID NO: 1770421 - RNA, 19 nt, Homo sapiens
  misc_RNA (1)...(19): siRNA sense strand
gggaugaggaugaggauga

SEQ ID NO: 1770422 - RNA, 19 nt, Homo sapiens
  misc_RNA (1)...(19): siRNA sense strand
gaagaguccuaugaguuca

SEQ ID NO: 1770423 - RNA, 19 nt, Homo sapiens
  misc_RNA (1)...(19): siRNA sense strand
ggaugaggaugaggaugaa

SEQ ID NO: 1770424 - RNA, 19 nt, Homo sapiens
  misc_RNA (1)...(19): siRNA sense strand
uagaagucaucauugaaga

SEQ ID NO: 1770425 - RNA, 19 nt, Homo sapiens
  misc_RNA (1)...(19): siRNA sense strand
ccaagaggauagcagagau

SEQ ID NO: 1770426 - RNA, 19 nt, Homo sapiens
  misc_RNA (1)...(19): siRNA sense strand
ugaagaguccuaugaguuc

SEQ ID NO: 1770427 - RNA, 19 nt, Homo sapiens
  misc_RNA (1)...(19): siRNA sense strand
gcaacgccgucaaugucuu

SEQ ID NO: 1770428 - RNA, 19 nt, Homo sapiens
  misc_RNA (1)...(19): siRNA sense strand
ggagggaccaguucaugga

SEQ ID NO: 1770429 - RNA, 19 nt, Homo sapiens
  misc_RNA (1)...(19): siRNA sense strand
ccuaugaguucaagacuac

SEQ ID NO: 1770430 - RNA, 19 nt, Homo sapiens
  misc_RNA (1)...(19): siRNA sense strand
gcagcaacgccgucaaugu

SEQ ID NO: 1770431 - RNA, 19 nt, Homo sapiens
  misc_RNA (1)...(19): siRNA sense strand
aaacuagaagucaucauug

SEQ ID NO: 1770432 - RNA, 19 nt, Homo sapiens
  misc_RNA (1)...(19): siRNA sense strand
aacuagaagucaucauuga

SEQ ID NO: 1770433 - RNA, 19 nt, Homo sapiens
  misc_RNA (1)...(19): siRNA sense strand
gcugcaagcucgccacaac

SEQ ID NO: 1770434 - RNA, 19 nt, Homo sapiens
  misc_RNA (1)...(19): siRNA sense strand
agacuacgguggacaaacu

SEQ ID NO: 1770435 - RNA, 19 nt, Homo sapiens
  misc_RNA (1)...(19): siRNA sense strand
gacaaacugaucaagaaga

SEQ ID NO: 1770436 - RNA, 19 nt, Homo sapiens
  misc_RNA (1)...(19): siRNA sense strand
aaacugaucaagaagacaa

SEQ ID NO: 1770437 - RNA, 19 nt, Homo sapiens
  misc_RNA (1)...(19): siRNA sense strand
gaagucaucauugaagagu

SEQ ID NO: 1770438 - RNA, 19 nt, Homo sapiens
  misc_RNA (1)...(19): siRNA sense strand
ggacaaacugaucaagaag

SEQ ID NO: 1770439 - RNA, 19 nt, Homo sapiens
  misc_RNA (1)...(19): siRNA sense strand
gagaugggaaagccaguau

SEQ ID NO: 1770440 - RNA, 19 nt, Homo sapiens
  misc_RNA (1)...(19): siRNA sense strand
cagcaacgccgucaauguc

SEQ ID NO: 1770441 - RNA, 19 nt, Homo sapiens
  misc_RNA (1)...(19): siRNA sense strand
ggauagcagagaugggaaa

SEQ ID NO: 1770442 - RNA, 19 nt, Homo sapiens
  misc_RNA (1)...(19): siRNA sense strand
cauacucuuugccacacua

SEQ ID NO: 1770443 - RNA, 19 nt, Homo sapiens
  misc_RNA (1)...(19): siRNA sense strand
cuagaggccuauugcuaca

SEQ ID NO: 1770444 - RNA, 19 nt, Homo sapiens
  misc_RNA (1)...(19): siRNA sense strand
gcuccucuacauacucuuu

SEQ ID NO: 1770445 - RNA, 19 nt, Homo sapiens
  misc_RNA (1)...(19): siRNA sense strand
cacuagaggccuauugcua

SEQ ID NO: 1770446 - RNA, 19 nt, Homo sapiens
  misc_RNA (1)...(19): siRNA sense strand
cacuucggcugcaccauug

SEQ ID NO: 1770447 - RNA, 19 nt, Homo sapiens
  misc_RNA (1)...(19): siRNA sense strand
gggcagcaacgccgucaau

SEQ ID NO: 1770448 - RNA, 19 nt, Homo sapiens
  misc_RNA (1)...(19): siRNA sense strand
gccuguggcuccucuacau

SEQ ID NO: 1770449 - RNA, 19 nt, Homo sapiens
  misc_RNA (1)...(19): siRNA sense strand
guggacaaacugaucaaga

SEQ ID NO: 1770450 - RNA, 19 nt, Homo sapiens
  misc_RNA (1)...(19): siRNA sense strand
caagaggauagcagagaug

SEQ ID NO: 1770451 - RNA, 19 nt, Homo sapiens
  misc_RNA (1)...(19): siRNA sense strand
aggcugcccuccugcuuug

SEQ ID NO: 1770452 - RNA, 19 nt, Homo sapiens
  misc_RNA (1)...(19): siRNA sense strand
acaaacugaucaagaagac

SEQ ID NO: 1770453 - RNA, 19 nt, Homo sapiens
  misc_RNA (1)...(19): siRNA sense strand
gccaagaggauagcagaga

SEQ ID NO: 1770454 - RNA, 19 nt, Homo sapiens
  misc_RNA (1)...(19): siRNA sense strand
gaagaagaggaggccaaga

SEQ ID NO: 1770455 - RNA, 19 nt, Homo sapiens
  misc_RNA (1)...(19): siRNA sense strand
cugcugcccuccaggaugu

SEQ ID NO: 1770456 - RNA, 19 nt, Homo sapiens
  misc_RNA (1)...(19): siRNA sense strand
uugaagaguccuaugaguu

SEQ ID NO: 1770457 - RNA, 19 nt, Homo sapiens
  misc_RNA (1)...(19): siRNA sense strand
agucacagcuguuguuuuc

SEQ ID NO: 1770458 - RNA, 19 nt, Homo sapiens
  misc_RNA (1)...(19): siRNA sense strand
gaggaggccaagaggauag

SEQ ID NO: 1770459 - RNA, 19 nt, Homo sapiens
  misc_RNA (1)...(19): siRNA sense strand
ucaagacuacgguggacaa

SEQ ID NO: 1770460 - RNA, 19 nt, Homo sapiens
  misc_RNA (1)...(19): siRNA sense strand
ccacacuagaggccuauug

SEQ ID NO: 1770461 - RNA, 19 nt, Homo sapiens
  misc_RNA (1)...(19): siRNA sense strand
gcaagcucgccacaacaug

SEQ ID NO: 1770462 - RNA, 19 nt, Homo sapiens
  misc_RNA (1)...(19): siRNA sense strand
caccaucuuugcauuuguc

SEQ ID NO: 1770463 - RNA, 19 nt, Homo sapiens
  misc_RNA (1)...(19): siRNA sense strand
cuagaagucaucauugaag

SEQ ID NO: 1770464 - RNA, 19 nt, Homo sapiens
  misc_RNA (1)...(19): siRNA sense strand
caugcucaccgccaucauu

SEQ ID NO: 1770465 - RNA, 19 nt, Homo sapiens
  misc_RNA (1)...(19): siRNA sense strand
gcacuuccugacugucuuc

SEQ ID NO: 1770466 - RNA, 19 nt, Homo sapiens
  misc_RNA (1)...(19): siRNA sense strand
caacgccgucaaugucuuc

SEQ ID NO: 1770467 - RNA, 19 nt, Homo sapiens
  misc_RNA (1)...(19): siRNA sense strand
ccuccaggauguauaugca

SEQ ID NO: 1770468 - RNA, 19 nt, Homo sapiens
  misc_RNA (1)...(19): siRNA sense strand
ucuggaaggugcuguuugc

SEQ ID NO: 1770469 - RNA, 19 nt, Homo sapiens
  misc_RNA (1)...(19): siRNA sense strand
uccuaugaguucaagacua

SEQ ID NO: 1770470 - RNA, 19 nt, Homo sapiens
  misc_RNA (1)...(19): siRNA sense strand
agaggaggccaagaggaua

SEQ ID NO: 1770471 - RNA, 19 nt, Homo sapiens
  misc_RNA (1)...(19): siRNA sense strand
ucaccaucuuugcauuugu

SEQ ID NO: 1770472 - RNA, 19 nt, Homo sapiens
  misc_RNA (1)...(19): siRNA sense strand
aagaggaggccaagaggau

SEQ ID NO: 1770473 - RNA, 19 nt, Homo sapiens
  misc_RNA (1)...(19): siRNA sense strand
caaacuagaagucaucauu

SEQ ID NO: 1770474 - RNA, 19 nt, Homo sapiens
  misc_RNA (1)...(19): siRNA sense strand
acaggaagcugacuaugga

SEQ ID NO: 1770475 - RNA, 19 nt, Homo sapiens
  misc_RNA (1)...(19): siRNA sense strand
gaagcugacuauggaagaa

SEQ ID NO: 1770476 - RNA, 19 nt, Homo sapiens
  misc_RNA (1)...(19): siRNA sense strand
ucucaaagauucagucaca

SEQ ID NO: 1770477 - RNA, 19 nt, Homo sapiens
  misc_RNA (1)...(19): siRNA sense strand
uggacaaacugaucaagaa

SEQ ID NO: 1770478 - RNA, 19 nt, Homo sapiens
  misc_RNA (1)...(19): siRNA sense strand
gcacuucggcugcaccauu

SEQ ID NO: 1770479 - RNA, 19 nt, Homo sapiens
  misc_RNA (1)...(19): siRNA sense strand
agacaaaccuggccuuggu

SEQ ID NO: 1770480 - RNA, 19 nt, Homo sapiens
  misc_RNA (1)...(19): siRNA sense strand
ccauuggucucaaagauuc

SEQ ID NO: 1770481 - RNA, 19 nt, Homo sapiens
  misc_RNA (1)...(19): siRNA sense strand
gcaucagcgugcucuugua

SEQ ID NO: 1770482 - RNA, 19 nt, Homo sapiens
  misc_RNA (1)...(19): siRNA sense strand
gaugggaaagccaguauug

SEQ ID NO: 1770483 - RNA, 19 nt, Homo sapiens
  misc_RNA (1)...(19): siRNA sense strand
gggaugaggaugaggauga

SEQ ID NO: 1770484 - RNA, 19 nt, Homo sapiens
  misc_RNA (1)...(19): siRNA sense strand
gaagaguccuaugaguuca

SEQ ID NO: 1770485 - RNA, 19 nt, Homo sapiens
  misc_RNA (1)...(19): siRNA sense strand
ggaugaggaugaggaugaa

SEQ ID NO: 1770486 - RNA, 19 nt, Homo sapiens
  misc_RNA (1)...(19): siRNA sense strand
ccaagaggauagcagagau

SEQ ID NO: 1770487 - RNA, 19 nt, Homo sapiens
  misc_RNA (1)...(19): siRNA sense strand
uagaagucaucauugaaga

SEQ ID NO: 1770488 - RNA, 19 nt, Homo sapiens
  misc_RNA (1)...(19): siRNA sense strand
ugaagaguccuaugaguuc

SEQ ID NO: 1770489 - RNA, 19 nt, Homo sapiens
  misc_RNA (1)...(19): siRNA sense strand
gcaacgccgucaaugucuu

SEQ ID NO: 1770490 - RNA, 19 nt, Homo sapiens
  misc_RNA (1)...(19): siRNA sense strand
ggagggaccaguucaugga

SEQ ID NO: 1770491 - RNA, 19 nt, Homo sapiens
  misc_RNA (1)...(19): siRNA sense strand
ccuaugaguucaagacuac

SEQ ID NO: 1770492 - RNA, 19 nt, Homo sapiens
  misc_RNA (1)...(19): siRNA sense strand
gcagcaacgccgucaaugu

SEQ ID NO: 1770493 - RNA, 19 nt, Homo sapiens
  misc_RNA (1)...(19): siRNA sense strand
aaacuagaagucaucauug

SEQ ID NO: 1770494 - RNA, 19 nt, Homo sapiens
  misc_RNA (1)...(19): siRNA sense strand
ggaagcugacuauggaaga

SEQ ID NO: 1770495 - RNA, 19 nt, Homo sapiens
  misc_RNA (1)...(19): siRNA sense strand
aacuagaagucaucauuga

SEQ ID NO: 1770496 - RNA, 19 nt, Homo sapiens
  misc_RNA (1)...(19): siRNA sense strand
gcugcaagcucgccacaac

SEQ ID NO: 1770497 - RNA, 19 nt, Homo sapiens
  misc_RNA (1)...(19): siRNA sense strand
agacuacgguggacaaacu

SEQ ID NO: 1770498 - RNA, 19 nt, Homo sapiens
  misc_RNA (1)...(19): siRNA sense strand
gacaaacugaucaagaaga

SEQ ID NO: 1770499 - RNA, 19 nt, Homo sapiens
  misc_RNA (1)...(19): siRNA sense strand
aaacugaucaagaagacaa

SEQ ID NO: 1770500 - RNA, 19 nt, Homo sapiens
  misc_RNA (1)...(19): siRNA sense strand
gaagucaucauugaagagu

SEQ ID NO: 1770501 - RNA, 19 nt, Homo sapiens
  misc_RNA (1)...(19): siRNA sense strand
gacaggaagcugacuaugg

SEQ ID NO: 1770502 - RNA, 19 nt, Homo sapiens
  misc_RNA (1)...(19): siRNA sense strand
ggacaaacugaucaagaag

SEQ ID NO: 1770503 - RNA, 19 nt, Homo sapiens
  misc_RNA (1)...(19): siRNA sense strand
gagaugggaaagccaguau

SEQ ID NO: 1770504 - RNA, 19 nt, Homo sapiens
  misc_RNA (1)...(19): siRNA sense strand
cagcaacgccgucaauguc

SEQ ID NO: 1770505 - RNA, 19 nt, Homo sapiens
  misc_RNA (1)...(19): siRNA sense strand
ggauagcagagaugggaaa

SEQ ID NO: 1770506 - RNA, 19 nt, Homo sapiens
  misc_RNA (1)...(19): siRNA sense strand
cauacucuuugccacacua

SEQ ID NO: 1770507 - RNA, 19 nt, Homo sapiens
  misc_RNA (1)...(19): siRNA sense strand
cuagaggccuauugcuaca

SEQ ID NO: 1770508 - RNA, 19 nt, Homo sapiens
  misc_RNA (1)...(19): siRNA sense strand
gcuccucuacauacucuuu

SEQ ID NO: 1770509 - RNA, 19 nt, Homo sapiens
  misc_RNA (1)...(19): siRNA sense strand
cacuagaggccuauugcua

SEQ ID NO: 1770510 - RNA, 19 nt, Homo sapiens
  misc_RNA (1)...(19): siRNA sense strand
cacuucggcugcaccauug

SEQ ID NO: 1770511 - RNA, 19 nt, Homo sapiens
  misc_RNA (1)...(19): siRNA sense strand
gggcagcaacgccgucaau

SEQ ID NO: 1770512 - RNA, 19 nt, Homo sapiens
  misc_RNA (1)...(19): siRNA sense strand
gccuguggcuccucuacau

SEQ ID NO: 1770513 - RNA, 19 nt, Homo sapiens
  misc_RNA (1)...(19): siRNA sense strand
caagaggauagcagagaug

SEQ ID NO: 1770514 - RNA, 19 nt, Homo sapiens
  misc_RNA (1)...(19): siRNA sense strand
aggcugcccuccugcuuug

SEQ ID NO: 1770515 - RNA, 19 nt, Homo sapiens
  misc_RNA (1)...(19): siRNA sense strand
acaaacugaucaagaagac

SEQ ID NO: 1770516 - RNA, 19 nt, Homo sapiens
  misc_RNA (1)...(19): siRNA sense strand
guggacaaacugaucaaga

SEQ ID NO: 1770517 - RNA, 19 nt, Homo sapiens
  misc_RNA (1)...(19): siRNA sense strand
gccaagaggauagcagaga

SEQ ID NO: 1770518 - RNA, 19 nt, Homo sapiens
  misc_RNA (1)...(19): siRNA sense strand
cugcugcccuccaggaugu

SEQ ID NO: 1770519 - RNA, 19 nt, Homo sapiens
  misc_RNA (1)...(19): siRNA sense strand
gaagaagaggaggccaaga

SEQ ID NO: 1770520 - RNA, 19 nt, Homo sapiens
  misc_RNA (1)...(19): siRNA sense strand
uugaagaguccuaugaguu

SEQ ID NO: 1770521 - RNA, 19 nt, Homo sapiens
  misc_RNA (1)...(19): siRNA sense strand
gaggaggccaagaggauag

SEQ ID NO: 1770522 - RNA, 19 nt, Homo sapiens
  misc_RNA (1)...(19): siRNA sense strand
agucacagcuguuguuuuc

SEQ ID NO: 1770523 - RNA, 19 nt, Homo sapiens
  misc_RNA (1)...(19): siRNA sense strand
cuagaagucaucauugaag

SEQ ID NO: 1770524 - RNA, 19 nt, Homo sapiens
  misc_RNA (1)...(19): siRNA sense strand
ccacacuagaggccuauug

SEQ ID NO: 1770525 - RNA, 19 nt, Homo sapiens
  misc_RNA (1)...(19): siRNA sense strand
gcaagcucgccacaacaug

SEQ ID NO: 1770526 - RNA, 19 nt, Homo sapiens
  misc_RNA (1)...(19): siRNA sense strand
caccaucuuugcauuuguc

SEQ ID NO: 1770527 - RNA, 19 nt, Homo sapiens
  misc_RNA (1)...(19): siRNA sense strand
ucaagacuacgguggacaa

SEQ ID NO: 1770528 - RNA, 19 nt, Homo sapiens
  misc_RNA (1)...(19): siRNA sense strand
caugcucaccgccaucauu

SEQ ID NO: 1770529 - RNA, 19 nt, Homo sapiens
  misc_RNA (1)...(19): siRNA sense strand
gcacuuccugacugucuuc

SEQ ID NO: 1770530 - RNA, 19 nt, Homo sapiens
  misc_RNA (1)...(19): siRNA sense strand
caacgccgucaaugucuuc

SEQ ID NO: 1770531 - RNA, 19 nt, Homo sapiens
  misc_RNA (1)...(19): siRNA sense strand
ccuccaggauguauaugca

SEQ ID NO: 1770532 - RNA, 19 nt, Homo sapiens
  misc_RNA (1)...(19): siRNA sense strand
ucuggaaggugcuguuugc

SEQ ID NO: 1770533 - RNA, 19 nt, Homo sapiens
  misc_RNA (1)...(19): siRNA sense strand
uccuaugaguucaagacua

SEQ ID NO: 1770534 - RNA, 19 nt, Homo sapiens
  misc_RNA (1)...(19): siRNA sense strand
cagacaggaagcugacuau

SEQ ID NO: 1770535 - RNA, 19 nt, Homo sapiens
  misc_RNA (1)...(19): siRNA sense strand
ucaccaucuuugcauuugu

SEQ ID NO: 1770536 - RNA, 19 nt, Homo sapiens
  misc_RNA (1)...(19): siRNA sense strand
agaggaggccaagaggaua

SEQ ID NO: 1770537 - RNA, 19 nt, Homo sapiens
  misc_RNA (1)...(19): siRNA sense strand
aagaggaggccaagaggau

SEQ ID NO: 1770538 - RNA, 19 nt, Homo sapiens
  misc_RNA (1)...(19): siRNA sense strand
aaacggaacucaaccauua

SEQ ID NO: 1770539 - RNA, 19 nt, Homo sapiens
  misc_RNA (1)...(19): siRNA sense strand
gagguuagcuuuagaagaa

SEQ ID NO: 1770540 - RNA, 19 nt, Homo sapiens
  misc_RNA (1)...(19): siRNA sense strand
ggcuagagcuugauaauaa

SEQ ID NO: 1770541 - RNA, 19 nt, Homo sapiens
  misc_RNA (1)...(19): siRNA sense strand
gagaaauacuggaaaguga

SEQ ID NO: 1770542 - RNA, 19 nt, Homo sapiens
  misc_RNA (1)...(19): siRNA sense strand
gcacagacgagauacauaa

SEQ ID NO: 1770543 - RNA, 19 nt, Homo sapiens
  misc_RNA (1)...(19): siRNA sense strand
gagaagcaguauaccauuu

SEQ ID NO: 1770544 - RNA, 19 nt, Homo sapiens
  misc_RNA (1)...(19): siRNA sense strand
acagauggcuuagaaauug

SEQ ID NO: 1770545 - RNA, 19 nt, Homo sapiens
  misc_RNA (1)...(19): siRNA sense strand
gcaagaaacaacagauuga

SEQ ID NO: 1770546 - RNA, 19 nt, Homo sapiens
  misc_RNA (1)...(19): siRNA sense strand
gaacaaacccauggaacuu

SEQ ID NO: 1770547 - RNA, 19 nt, Homo sapiens
  misc_RNA (1)...(19): siRNA sense strand
caaaccagaugaaccuuga

SEQ ID NO: 1770548 - RNA, 19 nt, Homo sapiens
  misc_RNA (1)...(19): siRNA sense strand
aauaacagauggcuuagaa

SEQ ID NO: 1770549 - RNA, 19 nt, Homo sapiens
  misc_RNA (1)...(19): siRNA sense strand
ggauggugcuagugaaauu

SEQ ID NO: 1770550 - RNA, 19 nt, Homo sapiens
  misc_RNA (1)...(19): siRNA sense strand
ggcaauaacagauggcuua

SEQ ID NO: 1770551 - RNA, 19 nt, Homo sapiens
  misc_RNA (1)...(19): siRNA sense strand
acaaacccauggaacuuua

SEQ ID NO: 1770552 - RNA, 19 nt, Homo sapiens
  misc_RNA (1)...(19): siRNA sense strand
cgagauacauaaagacuuc

SEQ ID NO: 1770553 - RNA, 19 nt, Homo sapiens
  misc_RNA (1)...(19): siRNA sense strand
gaagcaguauaccauuuau

SEQ ID NO: 1770554 - RNA, 19 nt, Homo sapiens
  misc_RNA (1)...(19): siRNA sense strand
gaacucaaccauuaagcaa

SEQ ID NO: 1770555 - RNA, 19 nt, Homo sapiens
  misc_RNA (1)...(19): siRNA sense strand
cagacgagauacauaaaga

SEQ ID NO: 1770556 - RNA, 19 nt, Homo sapiens
  misc_RNA (1)...(19): siRNA sense strand
gaagcaggcccuaguaaca

SEQ ID NO: 1770557 - RNA, 19 nt, Homo sapiens
  misc_RNA (1)...(19): siRNA sense strand
gaagcaaaggugaaucaaa

SEQ ID NO: 1770558 - RNA, 19 nt, Homo sapiens
  misc_RNA (1)...(19): siRNA sense strand
ggcaauugauccaguaaug

SEQ ID NO: 1770559 - RNA, 19 nt, Homo sapiens
  misc_RNA (1)...(19): siRNA sense strand
aguaaugcauccacacaua

SEQ ID NO: 1770560 - RNA, 19 nt, Homo sapiens
  misc_RNA (1)...(19): siRNA sense strand
guaucuggcugugagguua

SEQ ID NO: 1770561 - RNA, 19 nt, Homo sapiens
  misc_RNA (1)...(19): siRNA sense strand
uaauaacaaugcagcaaug

SEQ ID NO: 1770562 - RNA, 19 nt, Homo sapiens
  misc_RNA (1)...(19): siRNA sense strand
ucaacaagcacaauaauca

SEQ ID NO: 1770563 - RNA, 19 nt, Homo sapiens
  misc_RNA (1)...(19): siRNA sense strand
uaacagauggcuuagaaau

SEQ ID NO: 1770564 - RNA, 19 nt, Homo sapiens
  misc_RNA (1)...(19): siRNA sense strand
cuacaaaggagcacaaaug

SEQ ID NO: 1770565 - RNA, 19 nt, Homo sapiens
  misc_RNA (1)...(19): siRNA sense strand
ggaauuggucagugagaaa

SEQ ID NO: 1770566 - RNA, 19 nt, Homo sapiens
  misc_RNA (1)...(19): siRNA sense strand
ggaucaacaagcacaauaa

SEQ ID NO: 1770567 - RNA, 19 nt, Homo sapiens
  misc_RNA (1)...(19): siRNA sense strand
guuuggauauguugaagaa

SEQ ID NO: 1770568 - RNA, 19 nt, Homo sapiens
  misc_RNA (1)...(19): siRNA sense strand
acauaaagacuucugguaa

SEQ ID NO: 1770569 - RNA, 19 nt, Homo sapiens
  misc_RNA (1)...(19): siRNA sense strand
acaaaggaguguuuacauc

SEQ ID NO: 1770570 - RNA, 19 nt, Homo sapiens
  misc_RNA (1)...(19): siRNA sense strand
gcacucaucagcaaaauuu

SEQ ID NO: 1770571 - RNA, 19 nt, Homo sapiens
  misc_RNA (1)...(19): siRNA sense strand
aagcaaaggugaaucaaac

SEQ ID NO: 1770572 - RNA, 19 nt, Homo sapiens
  misc_RNA (1)...(19): siRNA sense strand
ccuuagaaguggcaacaaa

SEQ ID NO: 1770573 - RNA, 19 nt, Homo sapiens
  misc_RNA (1)...(19): siRNA sense strand
gcacaauaaucagcaagca

SEQ ID NO: 1770574 - RNA, 19 nt, Homo sapiens
  misc_RNA (1)...(19): siRNA sense strand
cauaaagacuucugguaac

SEQ ID NO: 1770575 - RNA, 19 nt, Homo sapiens
  misc_RNA (1)...(19): siRNA sense strand
agaagcaguauaccauuua

SEQ ID NO: 1770576 - RNA, 19 nt, Homo sapiens
  misc_RNA (1)...(19): siRNA sense strand
agaacaccaugacuacaaa

SEQ ID NO: 1770577 - RNA, 19 nt, Homo sapiens
  misc_RNA (1)...(19): siRNA sense strand
gcugugagguuagcuuuag

SEQ ID NO: 1770578 - RNA, 19 nt, Homo sapiens
  misc_RNA (1)...(19): siRNA sense strand
gggcuagagcuugauaaua

SEQ ID NO: 1770579 - RNA, 19 nt, Homo sapiens
  misc_RNA (1)...(19): siRNA sense strand
gcacucagucacagcauug

SEQ ID NO: 1770580 - RNA, 19 nt, Homo sapiens
  misc_RNA (1)...(19): siRNA sense strand
gaucaacaagcacaauaau

SEQ ID NO: 1770581 - RNA, 19 nt, Homo sapiens
  misc_RNA (1)...(19): siRNA sense strand
gaaguggcaacaaagaaug

SEQ ID NO: 1770582 - RNA, 19 nt, Homo sapiens
  misc_RNA (1)...(19): siRNA sense strand
caucacagcccuuagaagu

SEQ ID NO: 1770583 - RNA, 19 nt, Homo sapiens
  misc_RNA (1)...(19): siRNA sense strand
gaagauaauggugacaguu

SEQ ID NO: 1770584 - RNA, 19 nt, Homo sapiens
  misc_RNA (1)...(19): siRNA sense strand
gaagauacaggccaugaac

SEQ ID NO: 1770585 - RNA, 19 nt, Homo sapiens
  misc_RNA (1)...(19): siRNA sense strand
gaacuuuauuacgcaccua

SEQ ID NO: 1770586 - RNA, 19 nt, Homo sapiens
  misc_RNA (1)...(19): siRNA sense strand
gguuucaccucgaagucua

SEQ ID NO: 1770587 - RNA, 19 nt, Homo sapiens
  misc_RNA (1)...(19): siRNA sense strand
uaaugugcccaauuuguuu

SEQ ID NO: 1770588 - RNA, 19 nt, Homo sapiens
  misc_RNA (1)...(19): siRNA sense strand
ucaucaagagagaguauua

SEQ ID NO: 1770589 - RNA, 19 nt, Homo sapiens
  misc_RNA (1)...(19): siRNA sense strand
ggcaagaaacaacagauug

SEQ ID NO: 1770590 - RNA, 19 nt, Homo sapiens
  misc_RNA (1)...(19): siRNA sense strand
gaggaaggacugaagauac

SEQ ID NO: 1770591 - RNA, 19 nt, Homo sapiens
  misc_RNA (1)...(19): siRNA sense strand
gauaauaacaaugcagcaa

SEQ ID NO: 1770592 - RNA, 19 nt, Homo sapiens
  misc_RNA (1)...(19): siRNA sense strand
caagaaacaacagauugaa

SEQ ID NO: 1770593 - RNA, 19 nt, Homo sapiens
  misc_RNA (1)...(19): siRNA sense strand
ugacuacaaaggaguguuu

SEQ ID NO: 1770594 - RNA, 19 nt, Homo sapiens
  misc_RNA (1)...(19): siRNA sense strand
guaguggagcagaagauaa

SEQ ID NO: 1770595 - RNA, 19 nt, Homo sapiens
  misc_RNA (1)...(19): siRNA sense strand
gcagacaaacggaacucaa

SEQ ID NO: 1770596 - RNA, 19 nt, Homo sapiens
  misc_RNA (1)...(19): siRNA sense strand
uacaaaggagcacaaauga

SEQ ID NO: 1770597 - RNA, 19 nt, Homo sapiens
  misc_RNA (1)...(19): siRNA sense strand
ugaggaaggacugaagaua

SEQ ID NO: 1770598 - RNA, 19 nt, Homo sapiens
  misc_RNA (1)...(19): siRNA sense strand
caaacggaacucaaccauu

SEQ ID NO: 1770599 - RNA, 19 nt, Homo sapiens
  misc_RNA (1)...(19): siRNA sense strand
cgccacuguugaucacuua

SEQ ID NO: 1770600 - RNA, 19 nt, Homo sapiens
  misc_RNA (1)...(19): siRNA sense strand
gguaguggagcagaagaua

SEQ ID NO: 1770601 - RNA, 19 nt, Homo sapiens
  misc_RNA (1)...(19): siRNA sense strand
aggaaggacugaagauaca

SEQ ID NO: 1770602 - RNA, 19 nt, Homo sapiens
  misc_RNA (1)...(19): siRNA sense strand
caucaucacagcccuuaga

SEQ ID NO: 1770603 - RNA, 19 nt, Homo sapiens
  misc_RNA (1)...(19): siRNA sense strand
ggaacucaaccauuaagca

SEQ ID NO: 1770604 - RNA, 19 nt, Homo sapiens
  misc_RNA (1)...(19): siRNA sense strand
caagcacaauaaucagcaa

SEQ ID NO: 1770605 - RNA, 19 nt, Homo sapiens
  misc_RNA (1)...(19): siRNA sense strand
gcaguaaugcauccacaca

SEQ ID NO: 1770606 - RNA, 19 nt, Homo sapiens
  misc_RNA (1)...(19): siRNA sense strand
ucuacacagugaauuaaug

SEQ ID NO: 1770607 - RNA, 19 nt, Homo sapiens
  misc_RNA (1)...(19): siRNA sense strand
gaagaacaccaugacuaca

SEQ ID NO: 1770608 - RNA, 19 nt, Homo sapiens
  misc_RNA (1)...(19): siRNA sense strand
ccagugagaagcaguauac

SEQ ID NO: 1770609 - RNA, 19 nt, Homo sapiens
  misc_RNA (1)...(19): siRNA sense strand
acagugcacagacgagaua

SEQ ID NO: 1770610 - RNA, 19 nt, Homo sapiens
  misc_RNA (1)...(19): siRNA sense strand
uuaaugugcccaauuuguu

SEQ ID NO: 1770611 - RNA, 19 nt, Homo sapiens
  misc_RNA (1)...(19): siRNA sense strand
ucacagcauugaggaagga

SEQ ID NO: 1770612 - RNA, 19 nt, Homo sapiens
  misc_RNA (1)...(19): siRNA sense strand
caagucgugaugaguauga

SEQ ID NO: 1770613 - RNA, 19 nt, Homo sapiens
  misc_RNA (1)...(19): siRNA sense strand
aauggcaauugauccagua

SEQ ID NO: 1770614 - RNA, 19 nt, Homo sapiens
  misc_RNA (1)...(19): siRNA sense strand
uaauggauggugcuaguga

SEQ ID NO: 1770615 - RNA, 19 nt, Homo sapiens
  misc_RNA (1)...(19): siRNA sense strand
ugaagaacaccaugacuac

SEQ ID NO: 1770616 - RNA, 19 nt, Homo sapiens
  misc_RNA (1)...(19): siRNA sense strand
guaaugcauccacacauag

SEQ ID NO: 1770617 - RNA, 19 nt, Homo sapiens
  misc_RNA (1)...(19): siRNA sense strand
ugagaaauacuggaaagug

SEQ ID NO: 1770618 - RNA, 19 nt, Homo sapiens
  misc_RNA (1)...(19): siRNA sense strand
gaauuggucagugagaaau

SEQ ID NO: 1770619 - RNA, 19 nt, Homo sapiens
  misc_RNA (1)...(19): siRNA sense strand
gcuagagcuugauaauaac

SEQ ID NO: 1770620 - RNA, 19 nt, Homo sapiens
  misc_RNA (1)...(19): siRNA sense strand
ugaagcucaucaagagaga

SEQ ID NO: 1770621 - RNA, 19 nt, Homo sapiens
  misc_RNA (1)...(19): siRNA sense strand
gaaauacuggaaagugaac

SEQ ID NO: 1770622 - RNA, 19 nt, Homo sapiens
  misc_RNA (1)...(19): siRNA sense strand
ccagaugaaccuugauaca

SEQ ID NO: 1770623 - RNA, 19 nt, Homo sapiens
  misc_RNA (1)...(19): siRNA sense strand
uacauaaagacuucuggua

SEQ ID NO: 1770624 - RNA, 19 nt, Homo sapiens
  misc_RNA (1)...(19): siRNA sense strand
uugaagaacaccaugacua

SEQ ID NO: 1770625 - RNA, 19 nt, Homo sapiens
  misc_RNA (1)...(19): siRNA sense strand
ggaagcaggcccuaguaac

SEQ ID NO: 1770626 - RNA, 19 nt, Homo sapiens
  misc_RNA (1)...(19): siRNA sense strand
gcucaucaagagagaguau

SEQ ID NO: 1770627 - RNA, 19 nt, Homo sapiens
  misc_RNA (1)...(19): siRNA sense strand
gaagucuacacagugaauu

SEQ ID NO: 1770628 - RNA, 19 nt, Homo sapiens
  misc_RNA (1)...(19): siRNA sense strand
gugagaagcaguauaccau

SEQ ID NO: 1770629 - RNA, 19 nt, Homo sapiens
  misc_RNA (1)...(19): siRNA sense strand
guaacgccacuguugauca

SEQ ID NO: 1770630 - RNA, 19 nt, Homo sapiens
  misc_RNA (1)...(19): siRNA sense strand
aagaacaccaugacuacaa

SEQ ID NO: 1770631 - RNA, 19 nt, Homo sapiens
  misc_RNA (1)...(19): siRNA sense strand
caggaagcaggcccuagua

SEQ ID NO: 1770632 - RNA, 19 nt, Homo sapiens
  misc_RNA (1)...(19): siRNA sense strand
uagccaggaucaacaagca

SEQ ID NO: 1770633 - RNA, 19 nt, Homo sapiens
  misc_RNA (1)...(19): siRNA sense strand
cagauggcuuagaaauugu

SEQ ID NO: 1770634 - RNA, 19 nt, Homo sapiens
  misc_RNA (1)...(19): siRNA sense strand
gcaaaggugaaucaaacca

SEQ ID NO: 1770635 - RNA, 19 nt, Homo sapiens
  misc_RNA (1)...(19): siRNA sense strand
gcaauugauccaguaaugg

SEQ ID NO: 1770636 - RNA, 19 nt, Homo sapiens
  misc_RNA (1)...(19): siRNA sense strand
gauacaggccaugaacaga

SEQ ID NO: 1770637 - RNA, 19 nt, Homo sapiens
  misc_RNA (1)...(19): siRNA sense strand
agaaauacuggaaagugaa

SEQ ID NO: 1770638 - RNA, 19 nt, Homo sapiens
  misc_RNA (1)...(19): siRNA sense strand
gaaauuguuugacagcaua

SEQ ID NO: 1770639 - RNA, 19 nt, Homo sapiens
  misc_RNA (1)...(19): siRNA sense strand
cagaauagcucaaccaaau

SEQ ID NO: 1770640 - RNA, 19 nt, Homo sapiens
  misc_RNA (1)...(19): siRNA sense strand
gaagaggaguguaaacaau

SEQ ID NO: 1770641 - RNA, 19 nt, Homo sapiens
  misc_RNA (1)...(19): siRNA sense strand
gaauagcucaaccaaauua

SEQ ID NO: 1770642 - RNA, 19 nt, Homo sapiens
  misc_RNA (1)...(19): siRNA sense strand
caaauuacaucccgacuca

SEQ ID NO: 1770643 - RNA, 19 nt, Homo sapiens
  misc_RNA (1)...(19): siRNA sense strand
gaaagauagugguguacaa

SEQ ID NO: 1770644 - RNA, 19 nt, Homo sapiens
  misc_RNA (1)...(19): siRNA sense strand
gagaguaccagcuuaauga

SEQ ID NO: 1770645 - RNA, 19 nt, Homo sapiens
  misc_RNA (1)...(19): siRNA sense strand
cggaagaaguggauucauu

SEQ ID NO: 1770646 - RNA, 19 nt, Homo sapiens
  misc_RNA (1)...(19): siRNA sense strand
ggaagaaguggauucauug

SEQ ID NO: 1770647 - RNA, 19 nt, Homo sapiens
  misc_RNA (1)...(19): siRNA sense strand
ccacagauacuaagaaugu

SEQ ID NO: 1770648 - RNA, 19 nt, Homo sapiens
  misc_RNA (1)...(19): siRNA sense strand
ucucagaacuagagugaaa

SEQ ID NO: 1770649 - RNA, 19 nt, Homo sapiens
  misc_RNA (1)...(19): siRNA sense strand
ggaaauauacacccacuuc

SEQ ID NO: 1770650 - RNA, 19 nt, Homo sapiens
  misc_RNA (1)...(19): siRNA sense strand
agaggcagcugcauauauu

SEQ ID NO: 1770651 - RNA, 19 nt, Homo sapiens
  misc_RNA (1)...(19): siRNA sense strand
gcaguggucuacaguaaca

SEQ ID NO: 1770652 - RNA, 19 nt, Homo sapiens
  misc_RNA (1)...(19): siRNA sense strand
gaaaggacacaaaggaaau

SEQ ID NO: 1770653 - RNA, 19 nt, Homo sapiens
  misc_RNA (1)...(19): siRNA sense strand
caacagaucccgagaguac

SEQ ID NO: 1770654 - RNA, 19 nt, Homo sapiens
  misc_RNA (1)...(19): siRNA sense strand
gcgaucaucuucuguguag

SEQ ID NO: 1770655 - RNA, 19 nt, Homo sapiens
  misc_RNA (1)...(19): siRNA sense strand
gaucugagcggaagaagug

SEQ ID NO: 1770656 - RNA, 19 nt, Homo sapiens
  misc_RNA (1)...(19): siRNA sense strand
gaucaaacacauaugaaga

SEQ ID NO: 1770657 - RNA, 19 nt, Homo sapiens
  misc_RNA (1)...(19): siRNA sense strand
auaaagagauuguggaaag

SEQ ID NO: 1770658 - RNA, 19 nt, Homo sapiens
  misc_RNA (1)...(19): siRNA sense strand
acagauacauccauuauac

SEQ ID NO: 1770659 - RNA, 19 nt, Homo sapiens
  misc_RNA (1)...(19): siRNA sense strand
gguucuagcugaagaugaa

SEQ ID NO: 1770660 - RNA, 19 nt, Homo sapiens
  misc_RNA (1)...(19): siRNA sense strand
guggaaagauaguggugua

SEQ ID NO: 1770661 - RNA, 19 nt, Homo sapiens
  misc_RNA (1)...(19): siRNA sense strand
cuaagaaugugcaguuugu

SEQ ID NO: 1770662 - RNA, 19 nt, Homo sapiens
  misc_RNA (1)...(19): siRNA sense strand
aagcaguggucuacaguaa

SEQ ID NO: 1770663 - RNA, 19 nt, Homo sapiens
  misc_RNA (1)...(19): siRNA sense strand
gauagacuuuggugacuca

SEQ ID NO: 1770664 - RNA, 19 nt, Homo sapiens
  misc_RNA (1)...(19): siRNA sense strand
ggacacaaaggaaauauac

SEQ ID NO: 1770665 - RNA, 19 nt, Homo sapiens
  misc_RNA (1)...(19): siRNA sense strand
gaagaggcagcugcauaua

SEQ ID NO: 1770666 - RNA, 19 nt, Homo sapiens
  misc_RNA (1)...(19): siRNA sense strand
aacaagugguuuacagaua

SEQ ID NO: 1770667 - RNA, 19 nt, Homo sapiens
  misc_RNA (1)...(19): siRNA sense strand
cugcauauauucaauguca

SEQ ID NO: 1770668 - RNA, 19 nt, Homo sapiens
  misc_RNA (1)...(19): siRNA sense strand
guacaauugugaagcagau

SEQ ID NO: 1770669 - RNA, 19 nt, Homo sapiens
  misc_RNA (1)...(19): siRNA sense strand
ugaaugacuuggacagaau

SEQ ID NO: 1770670 - RNA, 19 nt, Homo sapiens
  misc_RNA (1)...(19): siRNA sense strand
agaaguggauucauugcuu

SEQ ID NO: 1770671 - RNA, 19 nt, Homo sapiens
  misc_RNA (1)...(19): siRNA sense strand
uaaagagauuguggaaaga

SEQ ID NO: 1770672 - RNA, 19 nt, Homo sapiens
  misc_RNA (1)...(19): siRNA sense strand
cagcauauguaacaacaag

SEQ ID NO: 1770673 - RNA, 19 nt, Homo sapiens
  misc_RNA (1)...(19): siRNA sense strand
gaaagcaugaaauuguuug

SEQ ID NO: 1770674 - RNA, 19 nt, Homo sapiens
  misc_RNA (1)...(19): siRNA sense strand
cagcauacuauuugaauga

SEQ ID NO: 1770675 - RNA, 19 nt, Homo sapiens
  misc_RNA (1)...(19): siRNA sense strand
guaacaccauccagucaau

SEQ ID NO: 1770676 - RNA, 19 nt, Homo sapiens
  misc_RNA (1)...(19): siRNA sense strand
aaagaaaggacacaaagga

SEQ ID NO: 1770677 - RNA, 19 nt, Homo sapiens
  misc_RNA (1)...(19): siRNA sense strand
gcucggugcuggugaaucu

SEQ ID NO: 1770678 - RNA, 19 nt, Homo sapiens
  misc_RNA (1)...(19): siRNA sense strand
gacagcauauguaacaaca

SEQ ID NO: 1770679 - RNA, 19 nt, Homo sapiens
  misc_RNA (1)...(19): siRNA sense strand
gcagcauacuauuugaaug

SEQ ID NO: 1770680 - RNA, 19 nt, Homo sapiens
  misc_RNA (1)...(19): siRNA sense strand
gaaauauacacccacuuca

SEQ ID NO: 1770681 - RNA, 19 nt, Homo sapiens
  misc_RNA (1)...(19): siRNA sense strand
gaaugacuuggacagaaua

SEQ ID NO: 1770682 - RNA, 19 nt, Homo sapiens
  misc_RNA (1)...(19): siRNA sense strand
aagagauuguggaaagaua

SEQ ID NO: 1770683 - RNA, 19 nt, Homo sapiens
  misc_RNA (1)...(19): siRNA sense strand
gaauaugcaggaucaaaca

SEQ ID NO: 1770684 - RNA, 19 nt, Homo sapiens
  misc_RNA (1)...(19): siRNA sense strand
gaacuagagugaaaacuac

SEQ ID NO: 1770685 - RNA, 19 nt, Homo sapiens
  misc_RNA (1)...(19): siRNA sense strand
gcagcugcauauauucaau

SEQ ID NO: 1770686 - RNA, 19 nt, Homo sapiens
  misc_RNA (1)...(19): siRNA sense strand
gaagcugguuauucagaag

SEQ ID NO: 1770687 - RNA, 19 nt, Homo sapiens
  misc_RNA (1)...(19): siRNA sense strand
ugaagaggcagcugcauau

SEQ ID NO: 1770688 - RNA, 19 nt, Homo sapiens
  misc_RNA (1)...(19): siRNA sense strand
aaaguacaauugugaagca

SEQ ID NO: 1770689 - RNA, 19 nt, Homo sapiens
  misc_RNA (1)...(19): siRNA sense strand
gaagaaaugaaccgaaugc

SEQ ID NO: 1770690 - RNA, 19 nt, Homo sapiens
  misc_RNA (1)...(19): siRNA sense strand
gcugaagaaggcuuuauga

SEQ ID NO: 1770691 - RNA, 19 nt, Homo sapiens
  misc_RNA (1)...(19): siRNA sense strand
aagaggaguguaaacaaua

SEQ ID NO: 1770692 - RNA, 19 nt, Homo sapiens
  misc_RNA (1)...(19): siRNA sense strand
cuacaggaauuguugaaac

SEQ ID NO: 1770693 - RNA, 19 nt, Homo sapiens
  misc_RNA (1)...(19): siRNA sense strand
aguaccagcuuaaugauuc

SEQ ID NO: 1770694 - RNA, 19 nt, Homo sapiens
  misc_RNA (1)...(19): siRNA sense strand
agaaaggacacaaaggaaa

SEQ ID NO: 1770695 - RNA, 19 nt, Homo sapiens
  misc_RNA (1)...(19): siRNA sense strand
caacaagugguuuacagau

SEQ ID NO: 1770696 - RNA, 19 nt, Homo sapiens
  misc_RNA (1)...(19): siRNA sense strand
ugacggcgaucaucuucug

SEQ ID NO: 1770697 - RNA, 19 nt, Homo sapiens
  misc_RNA (1)...(19): siRNA sense strand
ggaguuauaaagagauugu

SEQ ID NO: 1770698 - RNA, 19 nt, Homo sapiens
  misc_RNA (1)...(19): siRNA sense strand
guuuacagauacauccauu

SEQ ID NO: 1770699 - RNA, 19 nt, Homo sapiens
  misc_RNA (1)...(19): siRNA sense strand
uuaaugauucugcagcaua

SEQ ID NO: 1770700 - RNA, 19 nt, Homo sapiens
  misc_RNA (1)...(19): siRNA sense strand
gcauauguaacaacaagug

SEQ ID NO: 1770701 - RNA, 19 nt, Homo sapiens
  misc_RNA (1)...(19): siRNA sense strand
acaagugguuuacagauac

SEQ ID NO: 1770702 - RNA, 19 nt, Homo sapiens
  misc_RNA (1)...(19): siRNA sense strand
uguaacaacaagugguuua

SEQ ID NO: 1770703 - RNA, 19 nt, Homo sapiens
  misc_RNA (1)...(19): siRNA sense strand
caggaucaaacacauauga

SEQ ID NO: 1770704 - RNA, 19 nt, Homo sapiens
  misc_RNA (1)...(19): siRNA sense strand
gguugaagauagacuuugg

SEQ ID NO: 1770705 - RNA, 19 nt, Homo sapiens
  misc_RNA (1)...(19): siRNA sense strand
ugaaauuguuugacagcau

SEQ ID NO: 1770706 - RNA, 19 nt, Homo sapiens
  misc_RNA (1)...(19): siRNA sense strand
cgaccugguucuagcugaa

SEQ ID NO: 1770707 - RNA, 19 nt, Homo sapiens
  misc_RNA (1)...(19): siRNA sense strand
ggacagaauagcucaacca

SEQ ID NO: 1770708 - RNA, 19 nt, Homo sapiens
  misc_RNA (1)...(19): siRNA sense strand
ugaagaaggcuuuaugacu

SEQ ID NO: 1770709 - RNA, 19 nt, Homo sapiens
  misc_RNA (1)...(19): siRNA sense strand
gaucaucuucuguguagca

SEQ ID NO: 1770710 - RNA, 19 nt, Homo sapiens
  misc_RNA (1)...(19): siRNA sense strand
ggaaagauagugguguaca

SEQ ID NO: 1770711 - RNA, 19 nt, Homo sapiens
  misc_RNA (1)...(19): siRNA sense strand
gagguugaagauagacuuu

SEQ ID NO: 1770712 - RNA, 19 nt, Homo sapiens
  misc_RNA (1)...(19): siRNA sense strand
gaguaccagcuuaaugauu

SEQ ID NO: 1770713 - RNA, 19 nt, Homo sapiens
  misc_RNA (1)...(19): siRNA sense strand
aagaaugugcaguuuguuu

SEQ ID NO: 1770714 - RNA, 19 nt, Homo sapiens
  misc_RNA (1)...(19): siRNA sense strand
aaaggacacaaaggaaaua

SEQ ID NO: 1770715 - RNA, 19 nt, Homo sapiens
  misc_RNA (1)...(19): siRNA sense strand
cagaauaugcaggaucaaa

SEQ ID NO: 1770716 - RNA, 19 nt, Homo sapiens
  misc_RNA (1)...(19): siRNA sense strand
caagugguuuacagauaca

SEQ ID NO: 1770717 - RNA, 19 nt, Homo sapiens
  misc_RNA (1)...(19): siRNA sense strand
acaaagcaguggucuacag

SEQ ID NO: 1770718 - RNA, 19 nt, Homo sapiens
  misc_RNA (1)...(19): siRNA sense strand
guggauucauugcuucgaa

SEQ ID NO: 1770719 - RNA, 19 nt, Homo sapiens
  misc_RNA (1)...(19): siRNA sense strand
uaaugauucugcagcauac

SEQ ID NO: 1770720 - RNA, 19 nt, Homo sapiens
  misc_RNA (1)...(19): siRNA sense strand
cuuuaugacugcagaacuu

SEQ ID NO: 1770721 - RNA, 19 nt, Homo sapiens
  misc_RNA (1)...(19): siRNA sense strand
uccagaauaugcaggauca

SEQ ID NO: 1770722 - RNA, 19 nt, Homo sapiens
  misc_RNA (1)...(19): siRNA sense strand
gaauuguugaaacccauuu

SEQ ID NO: 1770723 - RNA, 19 nt, Homo sapiens
  misc_RNA (1)...(19): siRNA sense strand
caucccgacucaacaagau

SEQ ID NO: 1770724 - RNA, 19 nt, Homo sapiens
  misc_RNA (1)...(19): siRNA sense strand
cgagaguaccagcuuaaug

SEQ ID NO: 1770725 - RNA, 19 nt, Homo sapiens
  misc_RNA (1)...(19): siRNA sense strand
auacuaagaaugugcaguu

SEQ ID NO: 1770726 - RNA, 19 nt, Homo sapiens
  misc_RNA (1)...(19): siRNA sense strand
cagaagaggaguguaaaca

SEQ ID NO: 1770727 - RNA, 19 nt, Homo sapiens
  misc_RNA (1)...(19): siRNA sense strand
gcauauauucaaugucagu

SEQ ID NO: 1770728 - RNA, 19 nt, Homo sapiens
  misc_RNA (1)...(19): siRNA sense strand
ggaucaaacacauaugaag

SEQ ID NO: 1770729 - RNA, 19 nt, Homo sapiens
  misc_RNA (1)...(19): siRNA sense strand
uugaaugacuuggacagaa

SEQ ID NO: 1770730 - RNA, 19 nt, Homo sapiens
  misc_RNA (1)...(19): siRNA sense strand
gaugcacgccaacucuuug

SEQ ID NO: 1770731 - RNA, 19 nt, Homo sapiens
  misc_RNA (1)...(19): siRNA sense strand
aacaccauccagucaauua

SEQ ID NO: 1770732 - RNA, 19 nt, Homo sapiens
  misc_RNA (1)...(19): siRNA sense strand
agaagaggaguguaaacaa

SEQ ID NO: 1770733 - RNA, 19 nt, Homo sapiens
  misc_RNA (1)...(19): siRNA sense strand
aaaugaaccgaaugcauga

SEQ ID NO: 1770734 - RNA, 19 nt, Homo sapiens
  misc_RNA (1)...(19): siRNA sense strand
augaagaaaugaaccgaau

SEQ ID NO: 1770735 - RNA, 19 nt, Homo sapiens
  misc_RNA (1)...(19): siRNA sense strand
ggaauuguugaaacccauu

SEQ ID NO: 1770736 - RNA, 19 nt, Homo sapiens
  misc_RNA (1)...(19): siRNA sense strand
gacagaauagcucaaccaa

SEQ ID NO: 1770737 - RNA, 19 nt, Homo sapiens
  misc_RNA (1)...(19): siRNA sense strand
gugaagcagaugaaaauua

SEQ ID NO: 1770738 - RNA, 19 nt, Homo sapiens
  misc_RNA (1)...(19): siRNA sense strand
gaaaucagcucuacaguuc

SEQ ID NO: 1770739 - RNA, 19 nt, Homo sapiens
  misc_RNA (1)...(19): siRNA sense strand
gaaauucaguuugcagauu

SEQ ID NO: 1770740 - RNA, 19 nt, Homo sapiens
  misc_RNA (1)...(19): siRNA sense strand
uaaugaagcugccaaguau

SEQ ID NO: 1770741 - RNA, 19 nt, Homo sapiens
  misc_RNA (1)...(19): siRNA sense strand
ggaagaagucccuauagaa

SEQ ID NO: 1770742 - RNA, 19 nt, Homo sapiens
  misc_RNA (1)...(19): siRNA sense strand
gaaccuagaggcuccuaua

SEQ ID NO: 1770743 - RNA, 19 nt, Homo sapiens
  misc_RNA (1)...(19): siRNA sense strand
gcacucagguucaugugau

SEQ ID NO: 1770744 - RNA, 19 nt, Homo sapiens
  misc_RNA (1)...(19): siRNA sense strand
ccuagaggcuccuauauca

SEQ ID NO: 1770745 - RNA, 19 nt, Homo sapiens
  misc_RNA (1)...(19): siRNA sense strand
ggaaaucagcucuacaguu

SEQ ID NO: 1770746 - RNA, 19 nt, Homo sapiens
  misc_RNA (1)...(19): siRNA sense strand
gcuccuauaucaagaguau

SEQ ID NO: 1770747 - RNA, 19 nt, Homo sapiens
  misc_RNA (1)...(19): siRNA sense strand
ggaggaauguuucuugaac

SEQ ID NO: 1770748 - RNA, 19 nt, Homo sapiens
  misc_RNA (1)...(19): siRNA sense strand
gaagaagucccuauagaac

SEQ ID NO: 1770749 - RNA, 19 nt, Homo sapiens
  misc_RNA (1)...(19): siRNA sense strand
cggaagaagucccuauaga

SEQ ID NO: 1770750 - RNA, 19 nt, Homo sapiens
  misc_RNA (1)...(19): siRNA sense strand
ucacgaggcucccuugaca

SEQ ID NO: 1770751 - RNA, 19 nt, Homo sapiens
  misc_RNA (1)...(19): siRNA sense strand
gaucugaggacuauaauac

SEQ ID NO: 1770752 - RNA, 19 nt, Homo sapiens
  misc_RNA (1)...(19): siRNA sense strand
uauaauaccuugggaugug

SEQ ID NO: 1770753 - RNA, 19 nt, Homo sapiens
  misc_RNA (1)...(19): siRNA sense strand
uuaaugaagcugccaagua

SEQ ID NO: 1770754 - RNA, 19 nt, Homo sapiens
  misc_RNA (1)...(19): siRNA sense strand
aaauggaaguguuaugaug

SEQ ID NO: 1770755 - RNA, 19 nt, Homo sapiens
  misc_RNA (1)...(19): siRNA sense strand
ccagacaaauggaaguguu

SEQ ID NO: 1770756 - RNA, 19 nt, Homo sapiens
  misc_RNA (1)...(19): siRNA sense strand
ggaagggagugauguuacu

SEQ ID NO: 1770757 - RNA, 19 nt, Homo sapiens
  misc_RNA (1)...(19): siRNA sense strand
caggaggaauguuucuuga

SEQ ID NO: 1770758 - RNA, 19 nt, Homo sapiens
  misc_RNA (1)...(19): siRNA sense strand
uaucaagaguaugugguua

SEQ ID NO: 1770759 - RNA, 19 nt, Homo sapiens
  misc_RNA (1)...(19): siRNA sense strand
ugucaugcauagaggauaa

SEQ ID NO: 1770760 - RNA, 19 nt, Homo sapiens
  misc_RNA (1)...(19): siRNA sense strand
ggcggcagguggcucauuu

SEQ ID NO: 1770761 - RNA, 19 nt, Homo sapiens
  misc_RNA (1)...(19): siRNA sense strand
gcauuugaucagauuguua

SEQ ID NO: 1770762 - RNA, 19 nt, Homo sapiens
  misc_RNA (1)...(19): siRNA sense strand
ucauugaucugaggacuau

SEQ ID NO: 1770763 - RNA, 19 nt, Homo sapiens
  misc_RNA (1)...(19): siRNA sense strand
gucuuuagaugcacuguug

SEQ ID NO: 1770764 - RNA, 19 nt, Homo sapiens
  misc_RNA (1)...(19): siRNA sense strand
ggaauuguuggauuuggaa

SEQ ID NO: 1770765 - RNA, 19 nt, Homo sapiens
  misc_RNA (1)...(19): siRNA sense strand
gaucagauuguuaaugaag

SEQ ID NO: 1770766 - RNA, 19 nt, Homo sapiens
  misc_RNA (1)...(19): siRNA sense strand
gguggagucuuuagaugca

SEQ ID NO: 1770767 - RNA, 19 nt, Homo sapiens
  misc_RNA (1)...(19): siRNA sense strand
acaaauggaaguguuauga

SEQ ID NO: 1770768 - RNA, 19 nt, Homo sapiens
  misc_RNA (1)...(19): siRNA sense strand
cuacugccauugcggaaau

SEQ ID NO: 1770769 - RNA, 19 nt, Homo sapiens
  misc_RNA (1)...(19): siRNA sense strand
gaaucaaggugguuauacc

SEQ ID NO: 1770770 - RNA, 19 nt, Homo sapiens
  misc_RNA (1)...(19): siRNA sense strand
cagacaaauggaaguguua

SEQ ID NO: 1770771 - RNA, 19 nt, Homo sapiens
  misc_RNA (1)...(19): siRNA sense strand
ucaagaguaugugguuaug

SEQ ID NO: 1770772 - RNA, 19 nt, Homo sapiens
  misc_RNA (1)...(19): siRNA sense strand
caggaagggagugauguua

SEQ ID NO: 1770773 - RNA, 19 nt, Homo sapiens
  misc_RNA (1)...(19): siRNA sense strand
guuaugaugcccuucgaaa

SEQ ID NO: 1770774 - RNA, 19 nt, Homo sapiens
  misc_RNA (1)...(19): siRNA sense strand
ggaaauucaguuugcagau

SEQ ID NO: 1770775 - RNA, 19 nt, Homo sapiens
  misc_RNA (1)...(19): siRNA sense strand
cacuggagcuacugccauu

SEQ ID NO: 1770776 - RNA, 19 nt, Homo sapiens
  misc_RNA (1)...(19): siRNA sense strand
caaauggaaguguuaugau

SEQ ID NO: 1770777 - RNA, 19 nt, Homo sapiens
  misc_RNA (1)...(19): siRNA sense strand
uggagugucuugugaaguc

SEQ ID NO: 1770778 - RNA, 19 nt, Homo sapiens
  misc_RNA (1)...(19): siRNA sense strand
ccaggaaucaaggugguua

SEQ ID NO: 1770779 - RNA, 19 nt, Homo sapiens
  misc_RNA (1)...(19): siRNA sense strand
uauagaaccauacaacauc

SEQ ID NO: 1770780 - RNA, 19 nt, Homo sapiens
  misc_RNA (1)...(19): siRNA sense strand
ggauaacucauuggccaaa

SEQ ID NO: 1770781 - RNA, 19 nt, Homo sapiens
  misc_RNA (1)...(19): siRNA sense strand
gucccaggccgaagucaua

SEQ ID NO: 1770782 - RNA, 19 nt, Homo sapiens
  misc_RNA (1)...(19): siRNA sense strand
gcagguggcucauuuuacu

SEQ ID NO: 1770783 - RNA, 19 nt, Homo sapiens
  misc_RNA (1)...(19): siRNA sense strand
cuacaucccagacaaaugg

SEQ ID NO: 1770784 - RNA, 19 nt, Homo sapiens
  misc_RNA (1)...(19): siRNA sense strand
gacacaccauuuccucaca

SEQ ID NO: 1770785 - RNA, 19 nt, Homo sapiens
  misc_RNA (1)...(19): siRNA sense strand
agaagucccuauagaacca

SEQ ID NO: 1770786 - RNA, 19 nt, Homo sapiens
  misc_RNA (1)...(19): siRNA sense strand
ucaggaggaauguuucuug

SEQ ID NO: 1770787 - RNA, 19 nt, Homo sapiens
  misc_RNA (1)...(19): siRNA sense strand
caucggaaaucagcucuac

SEQ ID NO: 1770788 - RNA, 19 nt, Homo sapiens
  misc_RNA (1)...(19): siRNA sense strand
ugccuuugguggagucuuu

SEQ ID NO: 1770789 - RNA, 19 nt, Homo sapiens
  misc_RNA (1)...(19): siRNA sense strand
aaacagggcgacugcuaau

SEQ ID NO: 1770790 - RNA, 19 nt, Homo sapiens
  misc_RNA (1)...(19): siRNA sense strand
ugccuuggauaacucauug

SEQ ID NO: 1770791 - RNA, 19 nt, Homo sapiens
  misc_RNA (1)...(19): siRNA sense strand
ggaaucaaggugguuauac

SEQ ID NO: 1770792 - RNA, 19 nt, Homo sapiens
  misc_RNA (1)...(19): siRNA sense strand
guacgggcaaacucagaaa

SEQ ID NO: 1770793 - RNA, 19 nt, Homo sapiens
  misc_RNA (1)...(19): siRNA sense strand
caaggaauuguuggauuug

SEQ ID NO: 1770794 - RNA, 19 nt, Homo sapiens
  misc_RNA (1)...(19): siRNA sense strand
gguuaugacacaccauuuc

SEQ ID NO: 1770795 - RNA, 19 nt, Homo sapiens
  misc_RNA (1)...(19): siRNA sense strand
ggagugucuugugaaguca

SEQ ID NO: 1770796 - RNA, 19 nt, Homo sapiens
  misc_RNA (1)...(19): siRNA sense strand
ggaauguuucuugaaccua

SEQ ID NO: 1770797 - RNA, 19 nt, Homo sapiens
  misc_RNA (1)...(19): siRNA sense strand
acagggcgacugcuaauca

SEQ ID NO: 1770798 - RNA, 19 nt, Homo sapiens
  misc_RNA (1)...(19): siRNA sense strand
auaacucauuggccaaaga

SEQ ID NO: 1770799 - RNA, 19 nt, Homo sapiens
  misc_RNA (1)...(19): siRNA sense strand
cacaccauuuccucacauu

SEQ ID NO: 1770800 - RNA, 19 nt, Homo sapiens
  misc_RNA (1)...(19): siRNA sense strand
acuguuggcuugcgagaca

SEQ ID NO: 1770801 - RNA, 19 nt, Homo sapiens
  misc_RNA (1)...(19): siRNA sense strand
ccauacaacaucccacugu

SEQ ID NO: 1770802 - RNA, 19 nt, Homo sapiens
  misc_RNA (1)...(19): siRNA sense strand
gcggaagaagucccuauag

SEQ ID NO: 1770803 - RNA, 19 nt, Homo sapiens
  misc_RNA (1)...(19): siRNA sense strand
gauaacucauuggccaaag

SEQ ID NO: 1770804 - RNA, 19 nt, Homo sapiens
  misc_RNA (1)...(19): siRNA sense strand
gcccauugcccaggaauca

SEQ ID NO: 1770805 - RNA, 19 nt, Homo sapiens
  misc_RNA (1)...(19): siRNA sense strand
cauucuacaucccagacaa

SEQ ID NO: 1770806 - RNA, 19 nt, Homo sapiens
  misc_RNA (1)...(19): siRNA sense strand
aagaguaugugguuaugac

SEQ ID NO: 1770807 - RNA, 19 nt, Homo sapiens
  misc_RNA (1)...(19): siRNA sense strand
caguucaggaggaauguuu

SEQ ID NO: 1770808 - RNA, 19 nt, Homo sapiens
  misc_RNA (1)...(19): siRNA sense strand
caaaacagggcgacugcua

SEQ ID NO: 1770809 - RNA, 19 nt, Homo sapiens
  misc_RNA (1)...(19): siRNA sense strand
guaagucugugaucaaaac

SEQ ID NO: 1770810 - RNA, 19 nt, Homo sapiens
  misc_RNA (1)...(19): siRNA sense strand
cuauagaaccauacaacau

SEQ ID NO: 1770811 - RNA, 19 nt, Homo sapiens
  misc_RNA (1)...(19): siRNA sense strand
cuacaguucaggaggaaug

SEQ ID NO: 1770812 - RNA, 19 nt, Homo sapiens
  misc_RNA (1)...(19): siRNA sense strand
uagaggcuccuauaucaag

SEQ ID NO: 1770813 - RNA, 19 nt, Homo sapiens
  misc_RNA (1)...(19): siRNA sense strand
gggcagcagcggaagaagu

SEQ ID NO: 1770814 - RNA, 19 nt, Homo sapiens
  misc_RNA (1)...(19): siRNA sense strand
gacaaauggaaguguuaug

SEQ ID NO: 1770815 - RNA, 19 nt, Homo sapiens
  misc_RNA (1)...(19): siRNA sense strand
uuguaagucugugaucaaa

SEQ ID NO: 1770816 - RNA, 19 nt, Homo sapiens
  misc_RNA (1)...(19): siRNA sense strand
cuugugaagucauugaucu

SEQ ID NO: 1770817 - RNA, 19 nt, Homo sapiens
  misc_RNA (1)...(19): siRNA sense strand
uaacucauuggccaaagau

SEQ ID NO: 1770818 - RNA, 19 nt, Homo sapiens
  misc_RNA (1)...(19): siRNA sense strand
ggccgaagucauacaggaa

SEQ ID NO: 1770819 - RNA, 19 nt, Homo sapiens
  misc_RNA (1)...(19): siRNA sense strand
caagaguaugugguuauga

SEQ ID NO: 1770820 - RNA, 19 nt, Homo sapiens
  misc_RNA (1)...(19): siRNA sense strand
aaucagcucuacaguucag

SEQ ID NO: 1770821 - RNA, 19 nt, Homo sapiens
  misc_RNA (1)...(19): siRNA sense strand
aggaauuguuggauuugga

SEQ ID NO: 1770822 - RNA, 19 nt, Homo sapiens
  misc_RNA (1)...(19): siRNA sense strand
ggacuucuuuugucaugca

SEQ ID NO: 1770823 - RNA, 19 nt, Homo sapiens
  misc_RNA (1)...(19): siRNA sense strand
gggcaaacucagaaaauga

SEQ ID NO: 1770824 - RNA, 19 nt, Homo sapiens
  misc_RNA (1)...(19): siRNA sense strand
ggcagcagcggaagaaguc

SEQ ID NO: 1770825 - RNA, 19 nt, Homo sapiens
  misc_RNA (1)...(19): siRNA sense strand
gaaaucagcucuacaguuc

SEQ ID NO: 1770826 - RNA, 19 nt, Homo sapiens
  misc_RNA (1)...(19): siRNA sense strand
gaaauucaguuugcagauu

SEQ ID NO: 1770827 - RNA, 19 nt, Homo sapiens
  misc_RNA (1)...(19): siRNA sense strand
uaaugaagcugccaaguau

SEQ ID NO: 1770828 - RNA, 19 nt, Homo sapiens
  misc_RNA (1)...(19): siRNA sense strand
ggaagaagucccuauagaa

SEQ ID NO: 1770829 - RNA, 19 nt, Homo sapiens
  misc_RNA (1)...(19): siRNA sense strand
gaaccuagaggcuccuaua

SEQ ID NO: 1770830 - RNA, 19 nt, Homo sapiens
  misc_RNA (1)...(19): siRNA sense strand
gcacucagguucaugugau

SEQ ID NO: 1770831 - RNA, 19 nt, Homo sapiens
  misc_RNA (1)...(19): siRNA sense strand
ccuagaggcuccuauauca

SEQ ID NO: 1770832 - RNA, 19 nt, Homo sapiens
  misc_RNA (1)...(19): siRNA sense strand
ggaaaucagcucuacaguu

SEQ ID NO: 1770833 - RNA, 19 nt, Homo sapiens
  misc_RNA (1)...(19): siRNA sense strand
gcuccuauaucaagaguau

SEQ ID NO: 1770834 - RNA, 19 nt, Homo sapiens
  misc_RNA (1)...(19): siRNA sense strand
ggaggaauguuucuugaac

SEQ ID NO: 1770835 - RNA, 19 nt, Homo sapiens
  misc_RNA (1)...(19): siRNA sense strand
gaagaagucccuauagaac

SEQ ID NO: 1770836 - RNA, 19 nt, Homo sapiens
  misc_RNA (1)...(19): siRNA sense strand
cggaagaagucccuauaga

SEQ ID NO: 1770837 - RNA, 19 nt, Homo sapiens
  misc_RNA (1)...(19): siRNA sense strand
ucacgaggcucccuugaca

SEQ ID NO: 1770838 - RNA, 19 nt, Homo sapiens
  misc_RNA (1)...(19): siRNA sense strand
gaucugaggacuauaauac

SEQ ID NO: 1770839 - RNA, 19 nt, Homo sapiens
  misc_RNA (1)...(19): siRNA sense strand
uauaauaccuugggaugug

SEQ ID NO: 1770840 - RNA, 19 nt, Homo sapiens
  misc_RNA (1)...(19): siRNA sense strand
uuaaugaagcugccaagua

SEQ ID NO: 1770841 - RNA, 19 nt, Homo sapiens
  misc_RNA (1)...(19): siRNA sense strand
aaauggaaguguuaugaug

SEQ ID NO: 1770842 - RNA, 19 nt, Homo sapiens
  misc_RNA (1)...(19): siRNA sense strand
ccagacaaauggaaguguu

SEQ ID NO: 1770843 - RNA, 19 nt, Homo sapiens
  misc_RNA (1)...(19): siRNA sense strand
ggaagggagugauguuacu

SEQ ID NO: 1770844 - RNA, 19 nt, Homo sapiens
  misc_RNA (1)...(19): siRNA sense strand
caggaggaauguuucuuga

SEQ ID NO: 1770845 - RNA, 19 nt, Homo sapiens
  misc_RNA (1)...(19): siRNA sense strand
uaucaagaguaugugguua

SEQ ID NO: 1770846 - RNA, 19 nt, Homo sapiens
  misc_RNA (1)...(19): siRNA sense strand
ugucaugcauagaggauaa

SEQ ID NO: 1770847 - RNA, 19 nt, Homo sapiens
  misc_RNA (1)...(19): siRNA sense strand
ggcggcagguggcucauuu

SEQ ID NO: 1770848 - RNA, 19 nt, Homo sapiens
  misc_RNA (1)...(19): siRNA sense strand
gcauuugaucagauuguua

SEQ ID NO: 1770849 - RNA, 19 nt, Homo sapiens
  misc_RNA (1)...(19): siRNA sense strand
ucauugaucugaggacuau

SEQ ID NO: 1770850 - RNA, 19 nt, Homo sapiens
  misc_RNA (1)...(19): siRNA sense strand
gucuuuagaugcacuguug

SEQ ID NO: 1770851 - RNA, 19 nt, Homo sapiens
  misc_RNA (1)...(19): siRNA sense strand
ggaauuguuggauuuggaa

SEQ ID NO: 1770852 - RNA, 19 nt, Homo sapiens
  misc_RNA (1)...(19): siRNA sense strand
gaucagauuguuaaugaag

SEQ ID NO: 1770853 - RNA, 19 nt, Homo sapiens
  misc_RNA (1)...(19): siRNA sense strand
gguggagucuuuagaugca

SEQ ID NO: 1770854 - RNA, 19 nt, Homo sapiens
  misc_RNA (1)...(19): siRNA sense strand
acaaauggaaguguuauga

SEQ ID NO: 1770855 - RNA, 19 nt, Homo sapiens
  misc_RNA (1)...(19): siRNA sense strand
cuacugccauugcggaaau

SEQ ID NO: 1770856 - RNA, 19 nt, Homo sapiens
  misc_RNA (1)...(19): siRNA sense strand
gaaucaaggugguuauacc

SEQ ID NO: 1770857 - RNA, 19 nt, Homo sapiens
  misc_RNA (1)...(19): siRNA sense strand
cagacaaauggaaguguua

SEQ ID NO: 1770858 - RNA, 19 nt, Homo sapiens
  misc_RNA (1)...(19): siRNA sense strand
ucaagaguaugugguuaug

SEQ ID NO: 1770859 - RNA, 19 nt, Homo sapiens
  misc_RNA (1)...(19): siRNA sense strand
caggaagggagugauguua

SEQ ID NO: 1770860 - RNA, 19 nt, Homo sapiens
  misc_RNA (1)...(19): siRNA sense strand
guuaugaugcccuucgaaa

SEQ ID NO: 1770861 - RNA, 19 nt, Homo sapiens
  misc_RNA (1)...(19): siRNA sense strand
ggaaauucaguuugcagau

SEQ ID NO: 1770862 - RNA, 19 nt, Homo sapiens
  misc_RNA (1)...(19): siRNA sense strand
cacuggagcuacugccauu

SEQ ID NO: 1770863 - RNA, 19 nt, Homo sapiens
  misc_RNA (1)...(19): siRNA sense strand
caaauggaaguguuaugau

SEQ ID NO: 1770864 - RNA, 19 nt, Homo sapiens
  misc_RNA (1)...(19): siRNA sense strand
uggagugucuugugaaguc

SEQ ID NO: 1770865 - RNA, 19 nt, Homo sapiens
  misc_RNA (1)...(19): siRNA sense strand
ccaggaaucaaggugguua

SEQ ID NO: 1770866 - RNA, 19 nt, Homo sapiens
  misc_RNA (1)...(19): siRNA sense strand
uauagaaccauacaacauc

SEQ ID NO: 1770867 - RNA, 19 nt, Homo sapiens
  misc_RNA (1)...(19): siRNA sense strand
ggauaacucauuggccaaa

SEQ ID NO: 1770868 - RNA, 19 nt, Homo sapiens
  misc_RNA (1)...(19): siRNA sense strand
gucccaggccgaagucaua

SEQ ID NO: 1770869 - RNA, 19 nt, Homo sapiens
  misc_RNA (1)...(19): siRNA sense strand
gcagguggcucauuuuacu

SEQ ID NO: 1770870 - RNA, 19 nt, Homo sapiens
  misc_RNA (1)...(19): siRNA sense strand
cuacaucccagacaaaugg

SEQ ID NO: 1770871 - RNA, 19 nt, Homo sapiens
  misc_RNA (1)...(19): siRNA sense strand
gacacaccauuuccucaca

SEQ ID NO: 1770872 - RNA, 19 nt, Homo sapiens
  misc_RNA (1)...(19): siRNA sense strand
agaagucccuauagaacca

SEQ ID NO: 1770873 - RNA, 19 nt, Homo sapiens
  misc_RNA (1)...(19): siRNA sense strand
ucaggaggaauguuucuug

SEQ ID NO: 1770874 - RNA, 19 nt, Homo sapiens
  misc_RNA (1)...(19): siRNA sense strand
caucggaaaucagcucuac

SEQ ID NO: 1770875 - RNA, 19 nt, Homo sapiens
  misc_RNA (1)...(19): siRNA sense strand
ugccuuugguggagucuuu

SEQ ID NO: 1770876 - RNA, 19 nt, Homo sapiens
  misc_RNA (1)...(19): siRNA sense strand
aaacagggcgacugcuaau

SEQ ID NO: 1770877 - RNA, 19 nt, Homo sapiens
  misc_RNA (1)...(19): siRNA sense strand
ugccuuggauaacucauug

SEQ ID NO: 1770878 - RNA, 19 nt, Homo sapiens
  misc_RNA (1)...(19): siRNA sense strand
ggaaucaaggugguuauac

SEQ ID NO: 1770879 - RNA, 19 nt, Homo sapiens
  misc_RNA (1)...(19): siRNA sense strand
guacgggcaaacucagaaa

SEQ ID NO: 1770880 - RNA, 19 nt, Homo sapiens
  misc_RNA (1)...(19): siRNA sense strand
caaggaauuguuggauuug

SEQ ID NO: 1770881 - RNA, 19 nt, Homo sapiens
  misc_RNA (1)...(19): siRNA sense strand
gguuaugacacaccauuuc

SEQ ID NO: 1770882 - RNA, 19 nt, Homo sapiens
  misc_RNA (1)...(19): siRNA sense strand
ggagugucuugugaaguca

SEQ ID NO: 1770883 - RNA, 19 nt, Homo sapiens
  misc_RNA (1)...(19): siRNA sense strand
ggaauguuucuugaaccua

SEQ ID NO: 1770884 - RNA, 19 nt, Homo sapiens
  misc_RNA (1)...(19): siRNA sense strand
acagggcgacugcuaauca

SEQ ID NO: 1770885 - RNA, 19 nt, Homo sapiens
  misc_RNA (1)...(19): siRNA sense strand
auaacucauuggccaaaga

SEQ ID NO: 1770886 - RNA, 19 nt, Homo sapiens
  misc_RNA (1)...(19): siRNA sense strand
cacaccauuuccucacauu

SEQ ID NO: 1770887 - RNA, 19 nt, Homo sapiens
  misc_RNA (1)...(19): siRNA sense strand
acuguuggcuugcgagaca

SEQ ID NO: 1770888 - RNA, 19 nt, Homo sapiens
  misc_RNA (1)...(19): siRNA sense strand
ccauacaacaucccacugu

SEQ ID NO: 1770889 - RNA, 19 nt, Homo sapiens
  misc_RNA (1)...(19): siRNA sense strand
gcggaagaagucccuauag

SEQ ID NO: 1770890 - RNA, 19 nt, Homo sapiens
  misc_RNA (1)...(19): siRNA sense strand
gauaacucauuggccaaag

SEQ ID NO: 1770891 - RNA, 19 nt, Homo sapiens
  misc_RNA (1)...(19): siRNA sense strand
gcccauugcccaggaauca

SEQ ID NO: 1770892 - RNA, 19 nt, Homo sapiens
  misc_RNA (1)...(19): siRNA sense strand
cauucuacaucccagacaa

SEQ ID NO: 1770893 - RNA, 19 nt, Homo sapiens
  misc_RNA (1)...(19): siRNA sense strand
aagaguaugugguuaugac

SEQ ID NO: 1770894 - RNA, 19 nt, Homo sapiens
  misc_RNA (1)...(19): siRNA sense strand
caguucaggaggaauguuu

SEQ ID NO: 1770895 - RNA, 19 nt, Homo sapiens
  misc_RNA (1)...(19): siRNA sense strand
caaaacagggcgacugcua

SEQ ID NO: 1770896 - RNA, 19 nt, Homo sapiens
  misc_RNA (1)...(19): siRNA sense strand
guaagucugugaucaaaac

SEQ ID NO: 1770897 - RNA, 19 nt, Homo sapiens
  misc_RNA (1)...(19): siRNA sense strand
cuauagaaccauacaacau

SEQ ID NO: 1770898 - RNA, 19 nt, Homo sapiens
  misc_RNA (1)...(19): siRNA sense strand
cuacaguucaggaggaaug

SEQ ID NO: 1770899 - RNA, 19 nt, Homo sapiens
  misc_RNA (1)...(19): siRNA sense strand
uagaggcuccuauaucaag

SEQ ID NO: 1770900 - RNA, 19 nt, Homo sapiens
  misc_RNA (1)...(19): siRNA sense strand
gggcagcagcggaagaagu

SEQ ID NO: 1770901 - RNA, 19 nt, Homo sapiens
  misc_RNA (1)...(19): siRNA sense strand
gacaaauggaaguguuaug

SEQ ID NO: 1770902 - RNA, 19 nt, Homo sapiens
  misc_RNA (1)...(19): siRNA sense strand
uuguaagucugugaucaaa

SEQ ID NO: 1770903 - RNA, 19 nt, Homo sapiens
  misc_RNA (1)...(19): siRNA sense strand
cuugugaagucauugaucu

SEQ ID NO: 1770904 - RNA, 19 nt, Homo sapiens
  misc_RNA (1)...(19): siRNA sense strand
uaacucauuggccaaagau

SEQ ID NO: 1770905 - RNA, 19 nt, Homo sapiens
  misc_RNA (1)...(19): siRNA sense strand
ggccgaagucauacaggaa

SEQ ID NO: 1770906 - RNA, 19 nt, Homo sapiens
  misc_RNA (1)...(19): siRNA sense strand
caagaguaugugguuauga

SEQ ID NO: 1770907 - RNA, 19 nt, Homo sapiens
  misc_RNA (1)...(19): siRNA sense strand
aaucagcucuacaguucag

SEQ ID NO: 1770908 - RNA, 19 nt, Homo sapiens
  misc_RNA (1)...(19): siRNA sense strand
aggaauuguuggauuugga

SEQ ID NO: 1770909 - RNA, 19 nt, Homo sapiens
  misc_RNA (1)...(19): siRNA sense strand
ggacuucuuuugucaugca

SEQ ID NO: 1770910 - RNA, 19 nt, Homo sapiens
  misc_RNA (1)...(19): siRNA sense strand
gggcaaacucagaaaauga

SEQ ID NO: 1770911 - RNA, 19 nt, Homo sapiens
  misc_RNA (1)...(19): siRNA sense strand
ggcagcagcggaagaaguc

SEQ ID NO: 1770912 - RNA, 19 nt, Homo sapiens
  misc_RNA (1)...(19): siRNA sense strand
ccacucagaugcaauauua

SEQ ID NO: 1770913 - RNA, 19 nt, Homo sapiens
  misc_RNA (1)...(19): siRNA sense strand
gcaaugaccuauauguuga

SEQ ID NO: 1770914 - RNA, 19 nt, Homo sapiens
  misc_RNA (1)...(19): siRNA sense strand
ugaagaagcugagaaagua

SEQ ID NO: 1770915 - RNA, 19 nt, Homo sapiens
  misc_RNA (1)...(19): siRNA sense strand
ggagaagaauauagagaua

SEQ ID NO: 1770916 - RNA, 19 nt, Homo sapiens
  misc_RNA (1)...(19): siRNA sense strand
gaaacuaguucucuaaugg

SEQ ID NO: 1770917 - RNA, 19 nt, Homo sapiens
  misc_RNA (1)...(19): siRNA sense strand
caaauguacuuccuaaaga

SEQ ID NO: 1770918 - RNA, 19 nt, Homo sapiens
  misc_RNA (1)...(19): siRNA sense strand
agaaauacaugcagaagaa

SEQ ID NO: 1770919 - RNA, 19 nt, Homo sapiens
  misc_RNA (1)...(19): siRNA sense strand
ucacuuggaucagaauuua

SEQ ID NO: 1770920 - RNA, 19 nt, Homo sapiens
  misc_RNA (1)...(19): siRNA sense strand
ggaagaaccauccuauaaa

SEQ ID NO: 1770921 - RNA, 19 nt, Homo sapiens
  misc_RNA (1)...(19): siRNA sense strand
gaaaguaacucagagaaac

SEQ ID NO: 1770922 - RNA, 19 nt, Homo sapiens
  misc_RNA (1)...(19): siRNA sense strand
gaagaaccauccuauaaac

SEQ ID NO: 1770923 - RNA, 19 nt, Homo sapiens
  misc_RNA (1)...(19): siRNA sense strand
gaagauaaaggcauaaugu

SEQ ID NO: 1770924 - RNA, 19 nt, Homo sapiens
  misc_RNA (1)...(19): siRNA sense strand
gcagaagaaucaacaauac

SEQ ID NO: 1770925 - RNA, 19 nt, Homo sapiens
  misc_RNA (1)...(19): siRNA sense strand
aagaagaccuggagaagaa

SEQ ID NO: 1770926 - RNA, 19 nt, Homo sapiens
  misc_RNA (1)...(19): siRNA sense strand
gggaaagauugacuaguuu

SEQ ID NO: 1770927 - RNA, 19 nt, Homo sapiens
  misc_RNA (1)...(19): siRNA sense strand
caaauuucaucaggacuua

SEQ ID NO: 1770928 - RNA, 19 nt, Homo sapiens
  misc_RNA (1)...(19): siRNA sense strand
cuauggaacuuguaucuuu

SEQ ID NO: 1770929 - RNA, 19 nt, Homo sapiens
  misc_RNA (1)...(19): siRNA sense strand
ggaggaggaagaagaaaua

SEQ ID NO: 1770930 - RNA, 19 nt, Homo sapiens
  misc_RNA (1)...(19): siRNA sense strand
cgggaaagauugacuaguu

SEQ ID NO: 1770931 - RNA, 19 nt, Homo sapiens
  misc_RNA (1)...(19): siRNA sense strand
caaccaaagaagucuauua

SEQ ID NO: 1770932 - RNA, 19 nt, Homo sapiens
  misc_RNA (1)...(19): siRNA sense strand
gaacuuguaucuuuaucag

SEQ ID NO: 1770933 - RNA, 19 nt, Homo sapiens
  misc_RNA (1)...(19): siRNA sense strand
ucacagauuugcaaguuau

SEQ ID NO: 1770934 - RNA, 19 nt, Homo sapiens
  misc_RNA (1)...(19): siRNA sense strand
ugacuaguuucacagauuu

SEQ ID NO: 1770935 - RNA, 19 nt, Homo sapiens
  misc_RNA (1)...(19): siRNA sense strand
ugaagagccugaagauguu

SEQ ID NO: 1770936 - RNA, 19 nt, Homo sapiens
  misc_RNA (1)...(19): siRNA sense strand
gcaaauguacuuccuaaag

SEQ ID NO: 1770937 - RNA, 19 nt, Homo sapiens
  misc_RNA (1)...(19): siRNA sense strand
ccaaagaagucuauuagcu

SEQ ID NO: 1770938 - RNA, 19 nt, Homo sapiens
  misc_RNA (1)...(19): siRNA sense strand
aauaaagaaucccauggua

SEQ ID NO: 1770939 - RNA, 19 nt, Homo sapiens
  misc_RNA (1)...(19): siRNA sense strand
cagaauggcuguguccaaa

SEQ ID NO: 1770940 - RNA, 19 nt, Homo sapiens
  misc_RNA (1)...(19): siRNA sense strand
caacacagguauuugacau

SEQ ID NO: 1770941 - RNA, 19 nt, Homo sapiens
  misc_RNA (1)...(19): siRNA sense strand
gaaggaggaggaagaagaa

SEQ ID NO: 1770942 - RNA, 19 nt, Homo sapiens
  misc_RNA (1)...(19): siRNA sense strand
gaagaccacucagaugcaa

SEQ ID NO: 1770943 - RNA, 19 nt, Homo sapiens
  misc_RNA (1)...(19): siRNA sense strand
acacagguauuugacauaa

SEQ ID NO: 1770944 - RNA, 19 nt, Homo sapiens
  misc_RNA (1)...(19): siRNA sense strand
ugacauaaauggaacugau

SEQ ID NO: 1770945 - RNA, 19 nt, Homo sapiens
  misc_RNA (1)...(19): siRNA sense strand
cagcagaacuucggguuga

SEQ ID NO: 1770946 - RNA, 19 nt, Homo sapiens
  misc_RNA (1)...(19): siRNA sense strand
gagauaauacucacagaga

SEQ ID NO: 1770947 - RNA, 19 nt, Homo sapiens
  misc_RNA (1)...(19): siRNA sense strand
gcaguacaguuucuaaguc

SEQ ID NO: 1770948 - RNA, 19 nt, Homo sapiens
  misc_RNA (1)...(19): siRNA sense strand
aagcaaauguacuuccuaa

SEQ ID NO: 1770949 - RNA, 19 nt, Homo sapiens
  misc_RNA (1)...(19): siRNA sense strand
caaagaagucuauuagcuu

SEQ ID NO: 1770950 - RNA, 19 nt, Homo sapiens
  misc_RNA (1)...(19): siRNA sense strand
uaugggcacuuuggauuua

SEQ ID NO: 1770951 - RNA, 19 nt, Homo sapiens
  misc_RNA (1)...(19): siRNA sense strand
gaaaggaugaugcagacuu

SEQ ID NO: 1770952 - RNA, 19 nt, Homo sapiens
  misc_RNA (1)...(19): siRNA sense strand
uggaagaaccauccuauaa

SEQ ID NO: 1770953 - RNA, 19 nt, Homo sapiens
  misc_RNA (1)...(19): siRNA sense strand
ccuauagccuuuaucagaa

SEQ ID NO: 1770954 - RNA, 19 nt, Homo sapiens
  misc_RNA (1)...(19): siRNA sense strand
gaaacagauuaggcaauga

SEQ ID NO: 1770955 - RNA, 19 nt, Homo sapiens
  misc_RNA (1)...(19): siRNA sense strand
gaaguccuuuguagaaaca

SEQ ID NO: 1770956 - RNA, 19 nt, Homo sapiens
  misc_RNA (1)...(19): siRNA sense strand
caagaauuaugaaguccuu

SEQ ID NO: 1770957 - RNA, 19 nt, Homo sapiens
  misc_RNA (1)...(19): siRNA sense strand
ccagggagcacuacagaaa

SEQ ID NO: 1770958 - RNA, 19 nt, Homo sapiens
  misc_RNA (1)...(19): siRNA sense strand
aauggaagauaaaggcaua

SEQ ID NO: 1770959 - RNA, 19 nt, Homo sapiens
  misc_RNA (1)...(19): siRNA sense strand
ccaaaucccaauauaaaga

SEQ ID NO: 1770960 - RNA, 19 nt, Homo sapiens
  misc_RNA (1)...(19): siRNA sense strand
gcuugcugcuggucaauaa

SEQ ID NO: 1770961 - RNA, 19 nt, Homo sapiens
  misc_RNA (1)...(19): siRNA sense strand
ggcaaugaccuauauguug

SEQ ID NO: 1770962 - RNA, 19 nt, Homo sapiens
  misc_RNA (1)...(19): siRNA sense strand
gaagaagcugagaaaguaa

SEQ ID NO: 1770963 - RNA, 19 nt, Homo sapiens
  misc_RNA (1)...(19): siRNA sense strand
gaagcaguacaguuucuaa

SEQ ID NO: 1770964 - RNA, 19 nt, Homo sapiens
  misc_RNA (1)...(19): siRNA sense strand
agaaacagauuaggcaaug

SEQ ID NO: 1770965 - RNA, 19 nt, Homo sapiens
  misc_RNA (1)...(19): siRNA sense strand
gaagaccuggagaagaaua

SEQ ID NO: 1770966 - RNA, 19 nt, Homo sapiens
  misc_RNA (1)...(19): siRNA sense strand
gcaaaucaaagcagaaugg

SEQ ID NO: 1770967 - RNA, 19 nt, Homo sapiens
  misc_RNA (1)...(19): siRNA sense strand
gaacaaugccacacaacca

SEQ ID NO: 1770968 - RNA, 19 nt, Homo sapiens
  misc_RNA (1)...(19): siRNA sense strand
caacaauacccgccaacuu

SEQ ID NO: 1770969 - RNA, 19 nt, Homo sapiens
  misc_RNA (1)...(19): siRNA sense strand
gaugcagacuuucaaugga

SEQ ID NO: 1770970 - RNA, 19 nt, Homo sapiens
  misc_RNA (1)...(19): siRNA sense strand
uuaggaagcaguacaguuu

SEQ ID NO: 1770971 - RNA, 19 nt, Homo sapiens
  misc_RNA (1)...(19): siRNA sense strand
caauaaauccuaguacguu

SEQ ID NO: 1770972 - RNA, 19 nt, Homo sapiens
  misc_RNA (1)...(19): siRNA sense strand
ugaaacuaguucucuaaug

SEQ ID NO: 1770973 - RNA, 19 nt, Homo sapiens
  misc_RNA (1)...(19): siRNA sense strand
gacagaaacacugagauuu

SEQ ID NO: 1770974 - RNA, 19 nt, Homo sapiens
  misc_RNA (1)...(19): siRNA sense strand
ggaggaagaagaaauacau

SEQ ID NO: 1770975 - RNA, 19 nt, Homo sapiens
  misc_RNA (1)...(19): siRNA sense strand
aaagacaacacagguauuu

SEQ ID NO: 1770976 - RNA, 19 nt, Homo sapiens
  misc_RNA (1)...(19): siRNA sense strand
gcccaaacuugcagcuuau

SEQ ID NO: 1770977 - RNA, 19 nt, Homo sapiens
  misc_RNA (1)...(19): siRNA sense strand
gagaaaguaacucagagaa

SEQ ID NO: 1770978 - RNA, 19 nt, Homo sapiens
  misc_RNA (1)...(19): siRNA sense strand
agacaacacagguauuuga

SEQ ID NO: 1770979 - RNA, 19 nt, Homo sapiens
  misc_RNA (1)...(19): siRNA sense strand
caauggagcaccaaagaau

SEQ ID NO: 1770980 - RNA, 19 nt, Homo sapiens
  misc_RNA (1)...(19): siRNA sense strand
uaugaaguccuuuguagaa

SEQ ID NO: 1770981 - RNA, 19 nt, Homo sapiens
  misc_RNA (1)...(19): siRNA sense strand
gugaaucaauagcagaaga

SEQ ID NO: 1770982 - RNA, 19 nt, Homo sapiens
  misc_RNA (1)...(19): siRNA sense strand
cauggucucuguagaaucu

SEQ ID NO: 1770983 - RNA, 19 nt, Homo sapiens
  misc_RNA (1)...(19): siRNA sense strand
caaacaagaauaagaagca

SEQ ID NO: 1770984 - RNA, 19 nt, Homo sapiens
  misc_RNA (1)...(19): siRNA sense strand
gggauuuguaugauucuua

SEQ ID NO: 1770985 - RNA, 19 nt, Homo sapiens
  misc_RNA (1)...(19): siRNA sense strand
gaacuucggguugaacaau

SEQ ID NO: 1770986 - RNA, 19 nt, Homo sapiens
  misc_RNA (1)...(19): siRNA sense strand
gauauacuggugcaaauca

SEQ ID NO: 1770987 - RNA, 19 nt, Homo sapiens
  misc_RNA (1)...(19): siRNA sense strand
gcuaugggcacuuuggauu

SEQ ID NO: 1770988 - RNA, 19 nt, Homo sapiens
  misc_RNA (1)...(19): siRNA sense strand
ggauuuguaugauucuuac

SEQ ID NO: 1770989 - RNA, 19 nt, Homo sapiens
  misc_RNA (1)...(19): siRNA sense strand
ugaccuauauguugaaagg

SEQ ID NO: 1770990 - RNA, 19 nt, Homo sapiens
  misc_RNA (1)...(19): siRNA sense strand
uaacucagagaaacaagaa

SEQ ID NO: 1770991 - RNA, 19 nt, Homo sapiens
  misc_RNA (1)...(19): siRNA sense strand
ccuauaaacgggaaagauu

SEQ ID NO: 1770992 - RNA, 19 nt, Homo sapiens
  misc_RNA (1)...(19): siRNA sense strand
caugguaacccaaacaaga

SEQ ID NO: 1770993 - RNA, 19 nt, Homo sapiens
  misc_RNA (1)...(19): siRNA sense strand
gagcagccuugccuggaau

SEQ ID NO: 1770994 - RNA, 19 nt, Homo sapiens
  misc_RNA (1)...(19): siRNA sense strand
agcccaaacuugcagcuua

SEQ ID NO: 1770995 - RNA, 19 nt, Homo sapiens
  misc_RNA (1)...(19): siRNA sense strand
gagcaccaaagaauaaaga

SEQ ID NO: 1770996 - RNA, 19 nt, Homo sapiens
  misc_RNA (1)...(19): siRNA sense strand
agacagaaacacugagauu

SEQ ID NO: 1770997 - RNA, 19 nt, Homo sapiens
  misc_RNA (1)...(19): siRNA sense strand
aaauggaacugauguuacu

SEQ ID NO: 1770998 - RNA, 19 nt, Homo sapiens
  misc_RNA (1)...(19): siRNA sense strand
uuaucuggcuguugacaaa

SEQ ID NO: 1770999 - RNA, 19 nt, Homo sapiens
  misc_RNA (1)...(19): siRNA sense strand
ggaagaagaaauacaugca

SEQ ID NO: 1771000 - RNA, 19 nt, Homo sapiens
  misc_RNA (1)...(19): siRNA sense strand
cugaagagccugaagaugu

SEQ ID NO: 1771001 - RNA, 19 nt, Homo sapiens
  misc_RNA (1)...(19): siRNA sense strand
ggaagauaaaggcauaaug

SEQ ID NO: 1771002 - RNA, 19 nt, Homo sapiens
  misc_RNA (1)...(19): siRNA sense strand
aaaagaaccugaaccugaa

SEQ ID NO: 1771003 - RNA, 19 nt, Homo sapiens
  misc_RNA (1)...(19): siRNA sense strand
uggaacgacuuuggucuuu

SEQ ID NO: 1771004 - RNA, 19 nt, Homo sapiens
  misc_RNA (1)...(19): siRNA sense strand
gaagaaauacaugcagaag

SEQ ID NO: 1771005 - RNA, 19 nt, Homo sapiens
  misc_RNA (1)...(19): siRNA sense strand
caguacaguuucuaaguca

SEQ ID NO: 1771006 - RNA, 19 nt, Homo sapiens
  misc_RNA (1)...(19): siRNA sense strand
guaacccaaacaagaauaa

SEQ ID NO: 1771007 - RNA, 19 nt, Homo sapiens
  misc_RNA (1)...(19): siRNA sense strand
uaaagaaucccaugguaac

SEQ ID NO: 1771008 - RNA, 19 nt, Homo sapiens
  misc_RNA (1)...(19): siRNA sense strand
caccaaagaauaaagaugu

SEQ ID NO: 1771009 - RNA, 19 nt, Homo sapiens
  misc_RNA (1)...(19): siRNA sense strand
gcagaauggcuguguccaa

SEQ ID NO: 1771010 - RNA, 19 nt, Homo sapiens
  misc_RNA (1)...(19): siRNA sense strand
aacaauacccgccaacuug

SEQ ID NO: 1771011 - RNA, 19 nt, Homo sapiens
  misc_RNA (1)...(19): siRNA sense strand
gaggaagaccacucagaug

SEQ ID NO: 1771012 - RNA, 19 nt, Homo sapiens
  misc_RNA (1)...(19): siRNA sense strand
gaagugaaguuguacaaga

SEQ ID NO: 1771013 - RNA, 19 nt, Homo sapiens
  misc_RNA (1)...(19): siRNA sense strand
ggaacaagccggagcugua

SEQ ID NO: 1771014 - RNA, 19 nt, Homo sapiens
  misc_RNA (1)...(19): siRNA sense strand
gcucagaaaucagcucuau

SEQ ID NO: 1771015 - RNA, 19 nt, Homo sapiens
  misc_RNA (1)...(19): siRNA sense strand
ucagaaaucagcucuauug

SEQ ID NO: 1771016 - RNA, 19 nt, Homo sapiens
  misc_RNA (1)...(19): siRNA sense strand
ggagaaggccuacaucaag

SEQ ID NO: 1771017 - RNA, 19 nt, Homo sapiens
  misc_RNA (1)...(19): siRNA sense strand
gaacaagccggagcuguau

SEQ ID NO: 1771018 - RNA, 19 nt, Homo sapiens
  misc_RNA (1)...(19): siRNA sense strand
ggagaaguacgacaacaug

SEQ ID NO: 1771019 - RNA, 19 nt, Homo sapiens
  misc_RNA (1)...(19): siRNA sense strand
aaucagcucuauugacgaa

SEQ ID NO: 1771020 - RNA, 19 nt, Homo sapiens
  misc_RNA (1)...(19): siRNA sense strand
guccagggcucagaaauca

SEQ ID NO: 1771021 - RNA, 19 nt, Homo sapiens
  misc_RNA (1)...(19): siRNA sense strand
gcaugucggcgucagauga

SEQ ID NO: 1771022 - RNA, 19 nt, Homo sapiens
  misc_RNA (1)...(19): siRNA sense strand
ucagcucuauugacgaauu

SEQ ID NO: 1771023 - RNA, 19 nt, Homo sapiens
  misc_RNA (1)...(19): siRNA sense strand
aagugaaguuguacaagaa

SEQ ID NO: 1771024 - RNA, 19 nt, Homo sapiens
  misc_RNA (1)...(19): siRNA sense strand
augaggaagugaaguugua

SEQ ID NO: 1771025 - RNA, 19 nt, Homo sapiens
  misc_RNA (1)...(19): siRNA sense strand
gacguggucucgcucuuca

SEQ ID NO: 1771026 - RNA, 19 nt, Homo sapiens
  misc_RNA (1)...(19): siRNA sense strand
gacgaauucugccgcaagu

SEQ ID NO: 1771027 - RNA, 19 nt, Homo sapiens
  misc_RNA (1)...(19): siRNA sense strand
ggagcuguaugaggaagug

SEQ ID NO: 1771028 - RNA, 19 nt, Homo sapiens
  misc_RNA (1)...(19): siRNA sense strand
ccauggagcggaucaagga

SEQ ID NO: 1771029 - RNA, 19 nt, Homo sapiens
  misc_RNA (1)...(19): siRNA sense strand
cgaauucugccgcaaguuc

SEQ ID NO: 1771030 - RNA, 19 nt, Homo sapiens
  misc_RNA (1)...(19): siRNA sense strand
ccaccucccacccgacuuu

SEQ ID NO: 1771031 - RNA, 19 nt, Homo sapiens
  misc_RNA (1)...(19): siRNA sense strand
gcuccugguccaauacaaa

SEQ ID NO: 1771032 - RNA, 19 nt, Homo sapiens
  misc_RNA (1)...(19): siRNA sense strand
gcagguccagggcucagaa

SEQ ID NO: 1771033 - RNA, 19 nt, Homo sapiens
  misc_RNA (1)...(19): siRNA sense strand
cagaaaucagcucuauuga

SEQ ID NO: 1771034 - RNA, 19 nt, Homo sapiens
  misc_RNA (1)...(19): siRNA sense strand
gguccagggcucagaaauc

SEQ ID NO: 1771035 - RNA, 19 nt, Homo sapiens
  misc_RNA (1)...(19): siRNA sense strand
acaagccggagcuguauga

SEQ ID NO: 1771036 - RNA, 19 nt, Homo sapiens
  misc_RNA (1)...(19): siRNA sense strand
caaugcaagcccuggagaa

SEQ ID NO: 1771037 - RNA, 19 nt, Homo sapiens
  misc_RNA (1)...(19): siRNA sense strand
gggagaaguacgacaacau

SEQ ID NO: 1771038 - RNA, 19 nt, Homo sapiens
  misc_RNA (1)...(19): siRNA sense strand
ucaucacggucauggacaa

SEQ ID NO: 1771039 - RNA, 19 nt, Homo sapiens
  misc_RNA (1)...(19): siRNA sense strand
uguaugaggaagugaaguu

SEQ ID NO: 1771040 - RNA, 19 nt, Homo sapiens
  misc_RNA (1)...(19): siRNA sense strand
cagcucuauugacgaauuc

SEQ ID NO: 1771041 - RNA, 19 nt, Homo sapiens
  misc_RNA (1)...(19): siRNA sense strand
uggagaaggccuacaucaa

SEQ ID NO: 1771042 - RNA, 19 nt, Homo sapiens
  misc_RNA (1)...(19): siRNA sense strand
ggaagugaaguuguacaag

SEQ ID NO: 1771043 - RNA, 19 nt, Homo sapiens
  misc_RNA (1)...(19): siRNA sense strand
gggagagggagaaguacga

SEQ ID NO: 1771044 - RNA, 19 nt, Homo sapiens
  misc_RNA (1)...(19): siRNA sense strand
cgacaagggcaaccucaac

SEQ ID NO: 1771045 - RNA, 19 nt, Homo sapiens
  misc_RNA (1)...(19): siRNA sense strand
cccgggagagggagaagua

SEQ ID NO: 1771046 - RNA, 19 nt, Homo sapiens
  misc_RNA (1)...(19): siRNA sense strand
agagggagaaguacgacaa

SEQ ID NO: 1771047 - RNA, 19 nt, Homo sapiens
  misc_RNA (1)...(19): siRNA sense strand
gaagugaaguuguacaaga

SEQ ID NO: 1771048 - RNA, 19 nt, Homo sapiens
  misc_RNA (1)...(19): siRNA sense strand
ggaacaagccggagcugua

SEQ ID NO: 1771049 - RNA, 19 nt, Homo sapiens
  misc_RNA (1)...(19): siRNA sense strand
gcucagaaaucagcucuau

SEQ ID NO: 1771050 - RNA, 19 nt, Homo sapiens
  misc_RNA (1)...(19): siRNA sense strand
ucagaaaucagcucuauug

SEQ ID NO: 1771051 - RNA, 19 nt, Homo sapiens
  misc_RNA (1)...(19): siRNA sense strand
ggagaaggccuacaucaag

SEQ ID NO: 1771052 - RNA, 19 nt, Homo sapiens
  misc_RNA (1)...(19): siRNA sense strand
gaacaagccggagcuguau

SEQ ID NO: 1771053 - RNA, 19 nt, Homo sapiens
  misc_RNA (1)...(19): siRNA sense strand
ggagaaguacgacaacaug

SEQ ID NO: 1771054 - RNA, 19 nt, Homo sapiens
  misc_RNA (1)...(19): siRNA sense strand
aaucagcucuauugacgaa

SEQ ID NO: 1771055 - RNA, 19 nt, Homo sapiens
  misc_RNA (1)...(19): siRNA sense strand
guccagggcucagaaauca

SEQ ID NO: 1771056 - RNA, 19 nt, Homo sapiens
  misc_RNA (1)...(19): siRNA sense strand
gcaugucggcgucagauga

SEQ ID NO: 1771057 - RNA, 19 nt, Homo sapiens
  misc_RNA (1)...(19): siRNA sense strand
ucagcucuauugacgaauu

SEQ ID NO: 1771058 - RNA, 19 nt, Homo sapiens
  misc_RNA (1)...(19): siRNA sense strand
aagugaaguuguacaagaa

SEQ ID NO: 1771059 - RNA, 19 nt, Homo sapiens
  misc_RNA (1)...(19): siRNA sense strand
augaggaagugaaguugua

SEQ ID NO: 1771060 - RNA, 19 nt, Homo sapiens
  misc_RNA (1)...(19): siRNA sense strand
gacguggucucgcucuuca

SEQ ID NO: 1771061 - RNA, 19 nt, Homo sapiens
  misc_RNA (1)...(19): siRNA sense strand
gacgaauucugccgcaagu

SEQ ID NO: 1771062 - RNA, 19 nt, Homo sapiens
  misc_RNA (1)...(19): siRNA sense strand
ggagcuguaugaggaagug

SEQ ID NO: 1771063 - RNA, 19 nt, Homo sapiens
  misc_RNA (1)...(19): siRNA sense strand
ccauggagcggaucaagga

SEQ ID NO: 1771064 - RNA, 19 nt, Homo sapiens
  misc_RNA (1)...(19): siRNA sense strand
cgaauucugccgcaaguuc

SEQ ID NO: 1771065 - RNA, 19 nt, Homo sapiens
  misc_RNA (1)...(19): siRNA sense strand
ccaccucccacccgacuuu

SEQ ID NO: 1771066 - RNA, 19 nt, Homo sapiens
  misc_RNA (1)...(19): siRNA sense strand
gcuccugguccaauacaaa

SEQ ID NO: 1771067 - RNA, 19 nt, Homo sapiens
  misc_RNA (1)...(19): siRNA sense strand
gcagguccagggcucagaa

SEQ ID NO: 1771068 - RNA, 19 nt, Homo sapiens
  misc_RNA (1)...(19): siRNA sense strand
cagaaaucagcucuauuga

SEQ ID NO: 1771069 - RNA, 19 nt, Homo sapiens
  misc_RNA (1)...(19): siRNA sense strand
gguccagggcucagaaauc

SEQ ID NO: 1771070 - RNA, 19 nt, Homo sapiens
  misc_RNA (1)...(19): siRNA sense strand
acaagccggagcuguauga

SEQ ID NO: 1771071 - RNA, 19 nt, Homo sapiens
  misc_RNA (1)...(19): siRNA sense strand
caaugcaagcccuggagaa

SEQ ID NO: 1771072 - RNA, 19 nt, Homo sapiens
  misc_RNA (1)...(19): siRNA sense strand
gggagaaguacgacaacau

SEQ ID NO: 1771073 - RNA, 19 nt, Homo sapiens
  misc_RNA (1)...(19): siRNA sense strand
ucaucacggucauggacaa

SEQ ID NO: 1771074 - RNA, 19 nt, Homo sapiens
  misc_RNA (1)...(19): siRNA sense strand
uguaugaggaagugaaguu

SEQ ID NO: 1771075 - RNA, 19 nt, Homo sapiens
  misc_RNA (1)...(19): siRNA sense strand
cagcucuauugacgaauuc

SEQ ID NO: 1771076 - RNA, 19 nt, Homo sapiens
  misc_RNA (1)...(19): siRNA sense strand
uggagaaggccuacaucaa

SEQ ID NO: 1771077 - RNA, 19 nt, Homo sapiens
  misc_RNA (1)...(19): siRNA sense strand
ggaagugaaguuguacaag

SEQ ID NO: 1771078 - RNA, 19 nt, Homo sapiens
  misc_RNA (1)...(19): siRNA sense strand
gggagagggagaaguacga

SEQ ID NO: 1771079 - RNA, 19 nt, Homo sapiens
  misc_RNA (1)...(19): siRNA sense strand
cgacaagggcaaccucaac

SEQ ID NO: 1771080 - RNA, 19 nt, Homo sapiens
  misc_RNA (1)...(19): siRNA sense strand
cccgggagagggagaagua

SEQ ID NO: 1771081 - RNA, 19 nt, Homo sapiens
  misc_RNA (1)...(19): siRNA sense strand
agagggagaaguacgacaa

SEQ ID NO: 1771082 - RNA, 19 nt, Homo sapiens
  misc_RNA (1)...(19): siRNA sense strand
ucagaugccugcagucauu

SEQ ID NO: 1771083 - RNA, 19 nt, Homo sapiens
  misc_RNA (1)...(19): siRNA sense strand
caacaagggcaacaagaaa

SEQ ID NO: 1771084 - RNA, 19 nt, Homo sapiens
  misc_RNA (1)...(19): siRNA sense strand
gaccuacgccuaccuguuu

SEQ ID NO: 1771085 - RNA, 19 nt, Homo sapiens
  misc_RNA (1)...(19): siRNA sense strand
ucuacaagcuggucaguga

SEQ ID NO: 1771086 - RNA, 19 nt, Homo sapiens
  misc_RNA (1)...(19): siRNA sense strand
ccaacuuccucaacaacua

SEQ ID NO: 1771087 - RNA, 19 nt, Homo sapiens
  misc_RNA (1)...(19): siRNA sense strand
gccuguaccucaacauuug

SEQ ID NO: 1771088 - RNA, 19 nt, Homo sapiens
  misc_RNA (1)...(19): siRNA sense strand
cgacaugccugccaucaac

SEQ ID NO: 1771089 - RNA, 19 nt, Homo sapiens
  misc_RNA (1)...(19): siRNA sense strand
uggaaggcgucaauaagaa

SEQ ID NO: 1771090 - RNA, 19 nt, Homo sapiens
  misc_RNA (1)...(19): siRNA sense strand
caacauggacggccacauc

SEQ ID NO: 1771091 - RNA, 19 nt, Homo sapiens
  misc_RNA (1)...(19): siRNA sense strand
cgacaucgacuauauagca

SEQ ID NO: 1771092 - RNA, 19 nt, Homo sapiens
  misc_RNA (1)...(19): siRNA sense strand
agacugugguggacuuuga

SEQ ID NO: 1771093 - RNA, 19 nt, Homo sapiens
  misc_RNA (1)...(19): siRNA sense strand
ugagaccgauguccucuuc

SEQ ID NO: 1771094 - RNA, 19 nt, Homo sapiens
  misc_RNA (1)...(19): siRNA sense strand
cccugacgcuggccuauaa

SEQ ID NO: 1771095 - RNA, 19 nt, Homo sapiens
  misc_RNA (1)...(19): siRNA sense strand
ccacagaugacuccaagga

SEQ ID NO: 1771096 - RNA, 19 nt, Homo sapiens
  misc_RNA (1)...(19): siRNA sense strand
gcgccaagacgaccuuuga

SEQ ID NO: 1771097 - RNA, 19 nt, Homo sapiens
  misc_RNA (1)...(19): siRNA sense strand
ccgccgacaucgacuauau

SEQ ID NO: 1771098 - RNA, 19 nt, Homo sapiens
  misc_RNA (1)...(19): siRNA sense strand
ccaagacgaccuuugaugu

SEQ ID NO: 1771099 - RNA, 19 nt, Homo sapiens
  misc_RNA (1)...(19): siRNA sense strand
gaucagcacauggccauug

SEQ ID NO: 1771100 - RNA, 19 nt, Homo sapiens
  misc_RNA (1)...(19): siRNA sense strand
cagaugacauucaguacgu

SEQ ID NO: 1771101 - RNA, 19 nt, Homo sapiens
  misc_RNA (1)...(19): siRNA sense strand
guggaaggcgucaauaaga

SEQ ID NO: 1771102 - RNA, 19 nt, Homo sapiens
  misc_RNA (1)...(19): siRNA sense strand
ccaacaacaucacgcucuu

SEQ ID NO: 1771103 - RNA, 19 nt, Homo sapiens
  misc_RNA (1)...(19): siRNA sense strand
gggccaacuuccucaacaa

SEQ ID NO: 1771104 - RNA, 19 nt, Homo sapiens
  misc_RNA (1)...(19): siRNA sense strand
ucaacaagggcaacaagaa

SEQ ID NO: 1771105 - RNA, 19 nt, Homo sapiens
  misc_RNA (1)...(19): siRNA sense strand
acgccaaucugccagguaa

SEQ ID NO: 1771106 - RNA, 19 nt, Homo sapiens
  misc_RNA (1)...(19): siRNA sense strand
ggaugaagacugccuguac

SEQ ID NO: 1771107 - RNA, 19 nt, Homo sapiens
  misc_RNA (1)...(19): siRNA sense strand
agaauaagaagaagacugu

SEQ ID NO: 1771108 - RNA, 19 nt, Homo sapiens
  misc_RNA (1)...(19): siRNA sense strand
ggaggaggacuucuacaag

SEQ ID NO: 1771109 - RNA, 19 nt, Homo sapiens
  misc_RNA (1)...(19): siRNA sense strand
ucacggaggaggacuucua

SEQ ID NO: 1771110 - RNA, 19 nt, Homo sapiens
  misc_RNA (1)...(19): siRNA sense strand
ggaccugcccguuaugauc

SEQ ID NO: 1771111 - RNA, 19 nt, Homo sapiens
  misc_RNA (1)...(19): siRNA sense strand
ugucauugauggagacuuc

SEQ ID NO: 1771112 - RNA, 19 nt, Homo sapiens
  misc_RNA (1)...(19): siRNA sense strand
ggagaucaccaagaagaug

SEQ ID NO: 1771113 - RNA, 19 nt, Homo sapiens
  misc_RNA (1)...(19): siRNA sense strand
ccaagagugccaagaccua

SEQ ID NO: 1771114 - RNA, 19 nt, Homo sapiens
  misc_RNA (1)...(19): siRNA sense strand
agaagacugugguggacuu

SEQ ID NO: 1771115 - RNA, 19 nt, Homo sapiens
  misc_RNA (1)...(19): siRNA sense strand
gaugacauucaguacguuu

SEQ ID NO: 1771116 - RNA, 19 nt, Homo sapiens
  misc_RNA (1)...(19): siRNA sense strand
gcccagugucugaagguua

SEQ ID NO: 1771117 - RNA, 19 nt, Homo sapiens
  misc_RNA (1)...(19): siRNA sense strand
gggccgaccaugcagauga

SEQ ID NO: 1771118 - RNA, 19 nt, Homo sapiens
  misc_RNA (1)...(19): siRNA sense strand
gggcuucgucccugucauu

SEQ ID NO: 1771119 - RNA, 19 nt, Homo sapiens
  misc_RNA (1)...(19): siRNA sense strand
ccucaacaacuaccuguau

SEQ ID NO: 1771120 - RNA, 19 nt, Homo sapiens
  misc_RNA (1)...(19): siRNA sense strand
ucaacaacuaccuguauga

SEQ ID NO: 1771121 - RNA, 19 nt, Homo sapiens
  misc_RNA (1)...(19): siRNA sense strand
cgaccaugcagaugacauu

SEQ ID NO: 1771122 - RNA, 19 nt, Homo sapiens
  misc_RNA (1)...(19): siRNA sense strand
ggaaggcgucaauaagaag

SEQ ID NO: 1771123 - RNA, 19 nt, Homo sapiens
  misc_RNA (1)...(19): siRNA sense strand
caagacgaccuuugauguc

SEQ ID NO: 1771124 - RNA, 19 nt, Homo sapiens
  misc_RNA (1)...(19): siRNA sense strand
gaacccuacacuacggaaa

SEQ ID NO: 1771125 - RNA, 19 nt, Homo sapiens
  misc_RNA (1)...(19): siRNA sense strand
gcucagaugccugcaguca

SEQ ID NO: 1771126 - RNA, 19 nt, Homo sapiens
  misc_RNA (1)...(19): siRNA sense strand
cuacuggacccucaccuau

SEQ ID NO: 1771127 - RNA, 19 nt, Homo sapiens
  misc_RNA (1)...(19): siRNA sense strand
gcuacuggacccucaccua

SEQ ID NO: 1771128 - RNA, 19 nt, Homo sapiens
  misc_RNA (1)...(19): siRNA sense strand
uugcuugggugaagaggaa

SEQ ID NO: 1771129 - RNA, 19 nt, Homo sapiens
  misc_RNA (1)...(19): siRNA sense strand
gccaagacgaccuuugaug

SEQ ID NO: 1771130 - RNA, 19 nt, Homo sapiens
  misc_RNA (1)...(19): siRNA sense strand
ggccauugcuugggugaag

SEQ ID NO: 1771131 - RNA, 19 nt, Homo sapiens
  misc_RNA (1)...(19): siRNA sense strand
gaagacugugguggacuuu

SEQ ID NO: 1771132 - RNA, 19 nt, Homo sapiens
  misc_RNA (1)...(19): siRNA sense strand
cccaggagaauaagaagaa

SEQ ID NO: 1771133 - RNA, 19 nt, Homo sapiens
  misc_RNA (1)...(19): siRNA sense strand
ggacccaucccaggagaau

SEQ ID NO: 1771134 - RNA, 19 nt, Homo sapiens
  misc_RNA (1)...(19): siRNA sense strand
cuucgucccugucauugau

SEQ ID NO: 1771135 - RNA, 19 nt, Homo sapiens
  misc_RNA (1)...(19): siRNA sense strand
caucccaggagaauaagaa

SEQ ID NO: 1771136 - RNA, 19 nt, Homo sapiens
  misc_RNA (1)...(19): siRNA sense strand
cggaggaggacuucuacaa

SEQ ID NO: 1771137 - RNA, 19 nt, Homo sapiens
  misc_RNA (1)...(19): siRNA sense strand
acccaucccaggagaauaa

SEQ ID NO: 1771138 - RNA, 19 nt, Homo sapiens
  misc_RNA (1)...(19): siRNA sense strand
caaucugccagguaacuau

SEQ ID NO: 1771139 - RNA, 19 nt, Homo sapiens
  misc_RNA (1)...(19): siRNA sense strand
ccucucggaugcccgucua

SEQ ID NO: 1771140 - RNA, 19 nt, Homo sapiens
  misc_RNA (1)...(19): siRNA sense strand
gugacucuguggacaucuu

SEQ ID NO: 1771141 - RNA, 19 nt, Homo sapiens
  misc_RNA (1)...(19): siRNA sense strand
cagagccaaugccaagagu

SEQ ID NO: 1771142 - RNA, 19 nt, Homo sapiens
  misc_RNA (1)...(19): siRNA sense strand
aagcggagccugagaacca

SEQ ID NO: 1771143 - RNA, 19 nt, Homo sapiens
  misc_RNA (1)...(19): siRNA sense strand
gggcagcagcuccaugaag

SEQ ID NO: 1771144 - RNA, 19 nt, Homo sapiens
  misc_RNA (1)...(19): siRNA sense strand
accuggagaucaccaagaa

SEQ ID NO: 1771145 - RNA, 19 nt, Homo sapiens
  misc_RNA (1)...(19): siRNA sense strand
ccaugcagaugacauucag

SEQ ID NO: 1771146 - RNA, 19 nt, Homo sapiens
  misc_RNA (1)...(19): siRNA sense strand
cucaacaacuaccuguaug

SEQ ID NO: 1771147 - RNA, 19 nt, Homo sapiens
  misc_RNA (1)...(19): siRNA sense strand
gacgaccuuugaugucuac

SEQ ID NO: 1771148 - RNA, 19 nt, Homo sapiens
  misc_RNA (1)...(19): siRNA sense strand
gggaugaagacugccugua

SEQ ID NO: 1771149 - RNA, 19 nt, Homo sapiens
  misc_RNA (1)...(19): siRNA sense strand
ccaaucugccagguaacua

SEQ ID NO: 1771150 - RNA, 19 nt, Homo sapiens
  misc_RNA (1)...(19): siRNA sense strand
ugccugcagucauuagguu

SEQ ID NO: 1771151 - RNA, 19 nt, Homo sapiens
  misc_RNA (1)...(19): siRNA sense strand
cuggagaucaccaagaaga

SEQ ID NO: 1771152 - RNA, 19 nt, Homo sapiens
  misc_RNA (1)...(19): siRNA sense strand
gacaggacagucucuaagg

SEQ ID NO: 1771153 - RNA, 19 nt, Homo sapiens
  misc_RNA (1)...(19): siRNA sense strand
augcagaugacauucagua

SEQ ID NO: 1771154 - RNA, 19 nt, Homo sapiens
  misc_RNA (1)...(19): siRNA sense strand
ggacccugaaggccaagaa

SEQ ID NO: 1771155 - RNA, 19 nt, Homo sapiens
  misc_RNA (1)...(19): siRNA sense strand
aagacugccuguaccucaa

SEQ ID NO: 1771156 - RNA, 19 nt, Homo sapiens
  misc_RNA (1)...(19): siRNA sense strand
gcccugacgcuggccuaua

SEQ ID NO: 1771157 - RNA, 19 nt, Homo sapiens
  misc_RNA (1)...(19): siRNA sense strand
caacaacaucacgcucuuc

SEQ ID NO: 1771158 - RNA, 19 nt, Homo sapiens
  misc_RNA (1)...(19): siRNA sense strand
cagaugccugcagucauua

SEQ ID NO: 1771159 - RNA, 19 nt, Homo sapiens
  misc_RNA (1)...(19): siRNA sense strand
gaccugcccguuaugaucu

SEQ ID NO: 1771160 - RNA, 19 nt, Homo sapiens
  misc_RNA (1)...(19): siRNA sense strand
gccgacaucgacuauauag

SEQ ID NO: 1771161 - RNA, 19 nt, Homo sapiens
  misc_RNA (1)...(19): siRNA sense strand
ggaaagaaaucguguguuu

SEQ ID NO: 1771162 - RNA, 19 nt, Homo sapiens
  misc_RNA (1)...(19): siRNA sense strand
gaaggaagaggauuuauug

SEQ ID NO: 1771163 - RNA, 19 nt, Homo sapiens
  misc_RNA (1)...(19): siRNA sense strand
gcaaugggcuggcuugucu

SEQ ID NO: 1771164 - RNA, 19 nt, Homo sapiens
  misc_RNA (1)...(19): siRNA sense strand
ucacaauucucauguauuc

SEQ ID NO: 1771165 - RNA, 19 nt, Homo sapiens
  misc_RNA (1)...(19): siRNA sense strand
gcaauguuccagauuauuu

SEQ ID NO: 1771166 - RNA, 19 nt, Homo sapiens
  misc_RNA (1)...(19): siRNA sense strand
gcgaaugucaccauauaua

SEQ ID NO: 1771167 - RNA, 19 nt, Homo sapiens
  misc_RNA (1)...(19): siRNA sense strand
gaauuugcauggcuugaga

SEQ ID NO: 1771168 - RNA, 19 nt, Homo sapiens
  misc_RNA (1)...(19): siRNA sense strand
gaaaauggagccaauuaua

SEQ ID NO: 1771169 - RNA, 19 nt, Homo sapiens
  misc_RNA (1)...(19): siRNA sense strand
aagaauagcugacgugaag

SEQ ID NO: 1771170 - RNA, 19 nt, Homo sapiens
  misc_RNA (1)...(19): siRNA sense strand
uaaaggaaguggaaauugg

SEQ ID NO: 1771171 - RNA, 19 nt, Homo sapiens
  misc_RNA (1)...(19): siRNA sense strand
aaucaaaguuucagcaaug

SEQ ID NO: 1771172 - RNA, 19 nt, Homo sapiens
  misc_RNA (1)...(19): siRNA sense strand
gagcaaggcuuuucucugu

SEQ ID NO: 1771173 - RNA, 19 nt, Homo sapiens
  misc_RNA (1)...(19): siRNA sense strand
gaaccaagaauucaacaag

SEQ ID NO: 1771174 - RNA, 19 nt, Homo sapiens
  misc_RNA (1)...(19): siRNA sense strand
cgaaugucaccauauauaa

SEQ ID NO: 1771175 - RNA, 19 nt, Homo sapiens
  misc_RNA (1)...(19): siRNA sense strand
guacagggcgcacaaguca

SEQ ID NO: 1771176 - RNA, 19 nt, Homo sapiens
  misc_RNA (1)...(19): siRNA sense strand
ggauugguauuacucacaa

SEQ ID NO: 1771177 - RNA, 19 nt, Homo sapiens
  misc_RNA (1)...(19): siRNA sense strand
gaaagaaaucguguguuug

SEQ ID NO: 1771178 - RNA, 19 nt, Homo sapiens
  misc_RNA (1)...(19): siRNA sense strand
gaaaaugaggcuuuaauug

SEQ ID NO: 1771179 - RNA, 19 nt, Homo sapiens
  misc_RNA (1)...(19): siRNA sense strand
cagcaccucuugagugguu

SEQ ID NO: 1771180 - RNA, 19 nt, Homo sapiens
  misc_RNA (1)...(19): siRNA sense strand
ccauugaccucuacaacug

SEQ ID NO: 1771181 - RNA, 19 nt, Homo sapiens
  misc_RNA (1)...(19): siRNA sense strand
gaucuuagcaauucucaca

SEQ ID NO: 1771182 - RNA, 19 nt, Homo sapiens
  misc_RNA (1)...(19): siRNA sense strand
ugaaauaaaggaaguggaa

SEQ ID NO: 1771183 - RNA, 19 nt, Homo sapiens
  misc_RNA (1)...(19): siRNA sense strand
uagcugacgugaaggaaga

SEQ ID NO: 1771184 - RNA, 19 nt, Homo sapiens
  misc_RNA (1)...(19): siRNA sense strand
ugucagaagucccacauuc

SEQ ID NO: 1771185 - RNA, 19 nt, Homo sapiens
  misc_RNA (1)...(19): siRNA sense strand
agaagucccacauucaaua

SEQ ID NO: 1771186 - RNA, 19 nt, Homo sapiens
  misc_RNA (1)...(19): siRNA sense strand
gcaaggcuuuucucuguuu

SEQ ID NO: 1771187 - RNA, 19 nt, Homo sapiens
  misc_RNA (1)...(19): siRNA sense strand
uaacuugcucugcuuguuu

SEQ ID NO: 1771188 - RNA, 19 nt, Homo sapiens
  misc_RNA (1)...(19): siRNA sense strand
gaaauaaaggaaguggaaa

SEQ ID NO: 1771189 - RNA, 19 nt, Homo sapiens
  misc_RNA (1)...(19): siRNA sense strand
uugauaaugugaugacuga

SEQ ID NO: 1771190 - RNA, 19 nt, Homo sapiens
  misc_RNA (1)...(19): siRNA sense strand
augcgaaugucaccauaua

SEQ ID NO: 1771191 - RNA, 19 nt, Homo sapiens
  misc_RNA (1)...(19): siRNA sense strand
cagcagcaaaguuuaguaa

SEQ ID NO: 1771192 - RNA, 19 nt, Homo sapiens
  misc_RNA (1)...(19): siRNA sense strand
ggagccaauuauaguguga

SEQ ID NO: 1771193 - RNA, 19 nt, Homo sapiens
  misc_RNA (1)...(19): siRNA sense strand
ugaaggaagaggauuuauu

SEQ ID NO: 1771194 - RNA, 19 nt, Homo sapiens
  misc_RNA (1)...(19): siRNA sense strand
gagaaggcacaccguaaga

SEQ ID NO: 1771195 - RNA, 19 nt, Homo sapiens
  misc_RNA (1)...(19): siRNA sense strand
guuacaccguggauuggua

SEQ ID NO: 1771196 - RNA, 19 nt, Homo sapiens
  misc_RNA (1)...(19): siRNA sense strand
uugagugguuuaagaauug

SEQ ID NO: 1771197 - RNA, 19 nt, Homo sapiens
  misc_RNA (1)...(19): siRNA sense strand
gaauagcugacgugaagga

SEQ ID NO: 1771198 - RNA, 19 nt, Homo sapiens
  misc_RNA (1)...(19): siRNA sense strand
ucucacaauucucauguau

SEQ ID NO: 1771199 - RNA, 19 nt, Homo sapiens
  misc_RNA (1)...(19): siRNA sense strand
gguauuacucacaaacaaa

SEQ ID NO: 1771200 - RNA, 19 nt, Homo sapiens
  misc_RNA (1)...(19): siRNA sense strand
aaccaagaauucaacaaga

SEQ ID NO: 1771201 - RNA, 19 nt, Homo sapiens
  misc_RNA (1)...(19): siRNA sense strand
ggaaaaugaggcuuuaauu

SEQ ID NO: 1771202 - RNA, 19 nt, Homo sapiens
  misc_RNA (1)...(19): siRNA sense strand
auugcaauguuccagauua

SEQ ID NO: 1771203 - RNA, 19 nt, Homo sapiens
  misc_RNA (1)...(19): siRNA sense strand
cuugagugguuuaagaauu

SEQ ID NO: 1771204 - RNA, 19 nt, Homo sapiens
  misc_RNA (1)...(19): siRNA sense strand
gaagucccacauucaauag

SEQ ID NO: 1771205 - RNA, 19 nt, Homo sapiens
  misc_RNA (1)...(19): siRNA sense strand
ucagaagucccacauucaa

SEQ ID NO: 1771206 - RNA, 19 nt, Homo sapiens
  misc_RNA (1)...(19): siRNA sense strand
ggacuggauaugcgaaugu

SEQ ID NO: 1771207 - RNA, 19 nt, Homo sapiens
  misc_RNA (1)...(19): siRNA sense strand
cuaguuacaccguggauug

SEQ ID NO: 1771208 - RNA, 19 nt, Homo sapiens
  misc_RNA (1)...(19): siRNA sense strand
aaagaaaucguguguuugc

SEQ ID NO: 1771209 - RNA, 19 nt, Homo sapiens
  misc_RNA (1)...(19): siRNA sense strand
gccguccuguggcagcuua

SEQ ID NO: 1771210 - RNA, 19 nt, Homo sapiens
  misc_RNA (1)...(19): siRNA sense strand
gaaaaggcacucaguucuu

SEQ ID NO: 1771211 - RNA, 19 nt, Homo sapiens
  misc_RNA (1)...(19): siRNA sense strand
ggcuuuaauuguaagaugu

SEQ ID NO: 1771212 - RNA, 19 nt, Homo sapiens
  misc_RNA (1)...(19): siRNA sense strand
aaauggagccaauuauagu

SEQ ID NO: 1771213 - RNA, 19 nt, Homo sapiens
  misc_RNA (1)...(19): siRNA sense strand
cuucaaggaucaagguaca

SEQ ID NO: 1771214 - RNA, 19 nt, Homo sapiens
  misc_RNA (1)...(19): siRNA sense strand
gcaccucuugagugguuua

SEQ ID NO: 1771215 - RNA, 19 nt, Homo sapiens
  misc_RNA (1)...(19): siRNA sense strand
caauguuccagauuauuug

SEQ ID NO: 1771216 - RNA, 19 nt, Homo sapiens
  misc_RNA (1)...(19): siRNA sense strand
cuaacuugcucugcuuguu

SEQ ID NO: 1771217 - RNA, 19 nt, Homo sapiens
  misc_RNA (1)...(19): siRNA sense strand
aggcacaccguaagacuaa

SEQ ID NO: 1771218 - RNA, 19 nt, Homo sapiens
  misc_RNA (1)...(19): siRNA sense strand
cgugaaggaagaggauuua

SEQ ID NO: 1771219 - RNA, 19 nt, Homo sapiens
  misc_RNA (1)...(19): siRNA sense strand
ccacagcagcaaaguuuag

SEQ ID NO: 1771220 - RNA, 19 nt, Homo sapiens
  misc_RNA (1)...(19): siRNA sense strand
gcugauucugguauuuaua

SEQ ID NO: 1771221 - RNA, 19 nt, Homo sapiens
  misc_RNA (1)...(19): siRNA sense strand
gaaggcacaccguaagacu

SEQ ID NO: 1771222 - RNA, 19 nt, Homo sapiens
  misc_RNA (1)...(19): siRNA sense strand
acagggcgcacaagucauu

SEQ ID NO: 1771223 - RNA, 19 nt, Homo sapiens
  misc_RNA (1)...(19): siRNA sense strand
caacuggacagcaccucuu

SEQ ID NO: 1771224 - RNA, 19 nt, Homo sapiens
  misc_RNA (1)...(19): siRNA sense strand
cauggggccuggaaaauga

SEQ ID NO: 1771225 - RNA, 19 nt, Homo sapiens
  misc_RNA (1)...(19): siRNA sense strand
ugguauuacucacaaacaa

SEQ ID NO: 1771226 - RNA, 19 nt, Homo sapiens
  misc_RNA (1)...(19): siRNA sense strand
guccuaccauugaccucua

SEQ ID NO: 1771227 - RNA, 19 nt, Homo sapiens
  misc_RNA (1)...(19): siRNA sense strand
gauugguauuacucacaaa

SEQ ID NO: 1771228 - RNA, 19 nt, Homo sapiens
  misc_RNA (1)...(19): siRNA sense strand
aaaaggcacucaguucuug

SEQ ID NO: 1771229 - RNA, 19 nt, Homo sapiens
  misc_RNA (1)...(19): siRNA sense strand
uuuauuguccuaccauuga

SEQ ID NO: 1771230 - RNA, 19 nt, Homo sapiens
  misc_RNA (1)...(19): siRNA sense strand
gauaugcgaaugucaccau

SEQ ID NO: 1771231 - RNA, 19 nt, Homo sapiens
  misc_RNA (1)...(19): siRNA sense strand
caggaaagaaaucgugugu

SEQ ID NO: 1771232 - RNA, 19 nt, Homo sapiens
  misc_RNA (1)...(19): siRNA sense strand
gcacaccguaagacuaagu

SEQ ID NO: 1771233 - RNA, 19 nt, Homo sapiens
  misc_RNA (1)...(19): siRNA sense strand
caagguacagggcgcacaa

SEQ ID NO: 1771234 - RNA, 19 nt, Homo sapiens
  misc_RNA (1)...(19): siRNA sense strand
uugcaauguuccagauuau

SEQ ID NO: 1771235 - RNA, 19 nt, Homo sapiens
  misc_RNA (1)...(19): siRNA sense strand
acaaaaguauucccacuca

SEQ ID NO: 1771236 - RNA, 19 nt, Homo sapiens
  misc_RNA (1)...(19): siRNA sense strand
uaagaauagcugacgugaa

SEQ ID NO: 1771237 - RNA, 19 nt, Homo sapiens
  misc_RNA (1)...(19): siRNA sense strand
ucuuagcaauucucacaau

SEQ ID NO: 1771238 - RNA, 19 nt, Homo sapiens
  misc_RNA (1)...(19): siRNA sense strand
aaaggaaguggaaauugga

SEQ ID NO: 1771239 - RNA, 19 nt, Homo sapiens
  misc_RNA (1)...(19): siRNA sense strand
uuccacagcagcaaaguuu

SEQ ID NO: 1771240 - RNA, 19 nt, Homo sapiens
  misc_RNA (1)...(19): siRNA sense strand
guugcugauucugguauuu

SEQ ID NO: 1771241 - RNA, 19 nt, Homo sapiens
  misc_RNA (1)...(19): siRNA sense strand
ggaaguggaaauuggaaaa

SEQ ID NO: 1771242 - RNA, 19 nt, Homo sapiens
  misc_RNA (1)...(19): siRNA sense strand
gcagcuuaauggaacaaaa

SEQ ID NO: 1771243 - RNA, 19 nt, Homo sapiens
  misc_RNA (1)...(19): siRNA sense strand
gacaugguuuuaagaauag

SEQ ID NO: 1771244 - RNA, 19 nt, Homo sapiens
  misc_RNA (1)...(19): siRNA sense strand
cagaagucccacauucaau

SEQ ID NO: 1771245 - RNA, 19 nt, Homo sapiens
  misc_RNA (1)...(19): siRNA sense strand
aggcuuuaauuguaagaug

SEQ ID NO: 1771246 - RNA, 19 nt, Homo sapiens
  misc_RNA (1)...(19): siRNA sense strand
caacaagaggaagggcaaa

SEQ ID NO: 1771247 - RNA, 19 nt, Homo sapiens
  misc_RNA (1)...(19): siRNA sense strand
ggaaaaggcacucaguucu

SEQ ID NO: 1771248 - RNA, 19 nt, Homo sapiens
  misc_RNA (1)...(19): siRNA sense strand
caaugaaaauggagccaau

SEQ ID NO: 1771249 - RNA, 19 nt, Homo sapiens
  misc_RNA (1)...(19): siRNA sense strand
gucagaagucccacauuca

SEQ ID NO: 1771250 - RNA, 19 nt, Homo sapiens
  misc_RNA (1)...(19): siRNA sense strand
ugagaaggcacaccguaag

SEQ ID NO: 1771251 - RNA, 19 nt, Homo sapiens
  misc_RNA (1)...(19): siRNA sense strand
aggauuuauugcugcagua

SEQ ID NO: 1771252 - RNA, 19 nt, Homo sapiens
  misc_RNA (1)...(19): siRNA sense strand
gaggaagggcaaaaucaaa

SEQ ID NO: 1771253 - RNA, 19 nt, Homo sapiens
  misc_RNA (1)...(19): siRNA sense strand
auaaaggaaguggaaauug

SEQ ID NO: 1771254 - RNA, 19 nt, Homo sapiens
  misc_RNA (1)...(19): siRNA sense strand
agaauugucaggcucuuca

SEQ ID NO: 1771255 - RNA, 19 nt, Homo sapiens
  misc_RNA (1)...(19): siRNA sense strand
gacaaggaaaaccuaguua

SEQ ID NO: 1771256 - RNA, 19 nt, Homo sapiens
  misc_RNA (1)...(19): siRNA sense strand
acaccguggauugguauua

SEQ ID NO: 1771257 - RNA, 19 nt, Homo sapiens
  misc_RNA (1)...(19): siRNA sense strand
uguuccagauuauuugaug

SEQ ID NO: 1771258 - RNA, 19 nt, Homo sapiens
  misc_RNA (1)...(19): siRNA sense strand
agauugcaauguuccagau

SEQ ID NO: 1771259 - RNA, 19 nt, Homo sapiens
  misc_RNA (1)...(19): siRNA sense strand
accaagaauucaacaagag

SEQ ID NO: 1771260 - RNA, 19 nt, Homo sapiens
  misc_RNA (1)...(19): siRNA sense strand
caccguggauugguauuac

SEQ ID NO: 1771261 - RNA, 19 nt, Homo sapiens
  misc_RNA (1)...(19): siRNA sense strand
ggaaagaaaucguguguuu

SEQ ID NO: 1771262 - RNA, 19 nt, Homo sapiens
  misc_RNA (1)...(19): siRNA sense strand
gaaggaagaggauuuauug

SEQ ID NO: 1771263 - RNA, 19 nt, Homo sapiens
  misc_RNA (1)...(19): siRNA sense strand
gcaaugggcuggcuugucu

SEQ ID NO: 1771264 - RNA, 19 nt, Homo sapiens
  misc_RNA (1)...(19): siRNA sense strand
ucacaauucucauguauuc

SEQ ID NO: 1771265 - RNA, 19 nt, Homo sapiens
  misc_RNA (1)...(19): siRNA sense strand
gcaauguuccagauuauuu

SEQ ID NO: 1771266 - RNA, 19 nt, Homo sapiens
  misc_RNA (1)...(19): siRNA sense strand
gcgaaugucaccauauaua

SEQ ID NO: 1771267 - RNA, 19 nt, Homo sapiens
  misc_RNA (1)...(19): siRNA sense strand
gaauuugcauggcuugaga

SEQ ID NO: 1771268 - RNA, 19 nt, Homo sapiens
  misc_RNA (1)...(19): siRNA sense strand
gaaaauggagccaauuaua

SEQ ID NO: 1771269 - RNA, 19 nt, Homo sapiens
  misc_RNA (1)...(19): siRNA sense strand
aagaauagcugacgugaag

SEQ ID NO: 1771270 - RNA, 19 nt, Homo sapiens
  misc_RNA (1)...(19): siRNA sense strand
uaaaggaaguggaaauugg

SEQ ID NO: 1771271 - RNA, 19 nt, Homo sapiens
  misc_RNA (1)...(19): siRNA sense strand
aaucaaaguuucagcaaug

SEQ ID NO: 1771272 - RNA, 19 nt, Homo sapiens
  misc_RNA (1)...(19): siRNA sense strand
gagcaaggcuuuucucugu

SEQ ID NO: 1771273 - RNA, 19 nt, Homo sapiens
  misc_RNA (1)...(19): siRNA sense strand
gaaccaagaauucaacaag

SEQ ID NO: 1771274 - RNA, 19 nt, Homo sapiens
  misc_RNA (1)...(19): siRNA sense strand
cgaaugucaccauauauaa

SEQ ID NO: 1771275 - RNA, 19 nt, Homo sapiens
  misc_RNA (1)...(19): siRNA sense strand
guacagggcgcacaaguca

SEQ ID NO: 1771276 - RNA, 19 nt, Homo sapiens
  misc_RNA (1)...(19): siRNA sense strand
ggauugguauuacucacaa

SEQ ID NO: 1771277 - RNA, 19 nt, Homo sapiens
  misc_RNA (1)...(19): siRNA sense strand
gaaagaaaucguguguuug

SEQ ID NO: 1771278 - RNA, 19 nt, Homo sapiens
  misc_RNA (1)...(19): siRNA sense strand
gaaaaugaggcuuuaauug

SEQ ID NO: 1771279 - RNA, 19 nt, Homo sapiens
  misc_RNA (1)...(19): siRNA sense strand
cagcaccucuugagugguu

SEQ ID NO: 1771280 - RNA, 19 nt, Homo sapiens
  misc_RNA (1)...(19): siRNA sense strand
ccauugaccucuacaacug

SEQ ID NO: 1771281 - RNA, 19 nt, Homo sapiens
  misc_RNA (1)...(19): siRNA sense strand
gaucuuagcaauucucaca

SEQ ID NO: 1771282 - RNA, 19 nt, Homo sapiens
  misc_RNA (1)...(19): siRNA sense strand
ugaaauaaaggaaguggaa

SEQ ID NO: 1771283 - RNA, 19 nt, Homo sapiens
  misc_RNA (1)...(19): siRNA sense strand
uagcugacgugaaggaaga

SEQ ID NO: 1771284 - RNA, 19 nt, Homo sapiens
  misc_RNA (1)...(19): siRNA sense strand
ugucagaagucccacauuc

SEQ ID NO: 1771285 - RNA, 19 nt, Homo sapiens
  misc_RNA (1)...(19): siRNA sense strand
agaagucccacauucaaua

SEQ ID NO: 1771286 - RNA, 19 nt, Homo sapiens
  misc_RNA (1)...(19): siRNA sense strand
gcaaggcuuuucucuguuu

SEQ ID NO: 1771287 - RNA, 19 nt, Homo sapiens
  misc_RNA (1)...(19): siRNA sense strand
uaacuugcucugcuuguuu

SEQ ID NO: 1771288 - RNA, 19 nt, Homo sapiens
  misc_RNA (1)...(19): siRNA sense strand
gaaauaaaggaaguggaaa

SEQ ID NO: 1771289 - RNA, 19 nt, Homo sapiens
  misc_RNA (1)...(19): siRNA sense strand
uugauaaugugaugacuga

SEQ ID NO: 1771290 - RNA, 19 nt, Homo sapiens
  misc_RNA (1)...(19): siRNA sense strand
augcgaaugucaccauaua

SEQ ID NO: 1771291 - RNA, 19 nt, Homo sapiens
  misc_RNA (1)...(19): siRNA sense strand
cagcagcaaaguuuaguaa

SEQ ID NO: 1771292 - RNA, 19 nt, Homo sapiens
  misc_RNA (1)...(19): siRNA sense strand
ggagccaauuauaguguga

SEQ ID NO: 1771293 - RNA, 19 nt, Homo sapiens
  misc_RNA (1)...(19): siRNA sense strand
ugaaggaagaggauuuauu

SEQ ID NO: 1771294 - RNA, 19 nt, Homo sapiens
  misc_RNA (1)...(19): siRNA sense strand
gagaaggcacaccguaaga

SEQ ID NO: 1771295 - RNA, 19 nt, Homo sapiens
  misc_RNA (1)...(19): siRNA sense strand
guuacaccguggauuggua

SEQ ID NO: 1771296 - RNA, 19 nt, Homo sapiens
  misc_RNA (1)...(19): siRNA sense strand
uugagugguuuaagaauug

SEQ ID NO: 1771297 - RNA, 19 nt, Homo sapiens
  misc_RNA (1)...(19): siRNA sense strand
gaauagcugacgugaagga

SEQ ID NO: 1771298 - RNA, 19 nt, Homo sapiens
  misc_RNA (1)...(19): siRNA sense strand
ucucacaauucucauguau

SEQ ID NO: 1771299 - RNA, 19 nt, Homo sapiens
  misc_RNA (1)...(19): siRNA sense strand
gguauuacucacaaacaaa

SEQ ID NO: 1771300 - RNA, 19 nt, Homo sapiens
  misc_RNA (1)...(19): siRNA sense strand
aaccaagaauucaacaaga

SEQ ID NO: 1771301 - RNA, 19 nt, Homo sapiens
  misc_RNA (1)...(19): siRNA sense strand
ggaaaaugaggcuuuaauu

SEQ ID NO: 1771302 - RNA, 19 nt, Homo sapiens
  misc_RNA (1)...(19): siRNA sense strand
auugcaauguuccagauua

SEQ ID NO: 1771303 - RNA, 19 nt, Homo sapiens
  misc_RNA (1)...(19): siRNA sense strand
cuugagugguuuaagaauu

SEQ ID NO: 1771304 - RNA, 19 nt, Homo sapiens
  misc_RNA (1)...(19): siRNA sense strand
gaagucccacauucaauag

SEQ ID NO: 1771305 - RNA, 19 nt, Homo sapiens
  misc_RNA (1)...(19): siRNA sense strand
ucagaagucccacauucaa

SEQ ID NO: 1771306 - RNA, 19 nt, Homo sapiens
  misc_RNA (1)...(19): siRNA sense strand
ggacuggauaugcgaaugu

SEQ ID NO: 1771307 - RNA, 19 nt, Homo sapiens
  misc_RNA (1)...(19): siRNA sense strand
cuaguuacaccguggauug

SEQ ID NO: 1771308 - RNA, 19 nt, Homo sapiens
  misc_RNA (1)...(19): siRNA sense strand
aaagaaaucguguguuugc

SEQ ID NO: 1771309 - RNA, 19 nt, Homo sapiens
  misc_RNA (1)...(19): siRNA sense strand
gccguccuguggcagcuua

SEQ ID NO: 1771310 - RNA, 19 nt, Homo sapiens
  misc_RNA (1)...(19): siRNA sense strand
gaaaaggcacucaguucuu

SEQ ID NO: 1771311 - RNA, 19 nt, Homo sapiens
  misc_RNA (1)...(19): siRNA sense strand
ggcuuuaauuguaagaugu

SEQ ID NO: 1771312 - RNA, 19 nt, Homo sapiens
  misc_RNA (1)...(19): siRNA sense strand
aaauggagccaauuauagu

SEQ ID NO: 1771313 - RNA, 19 nt, Homo sapiens
  misc_RNA (1)...(19): siRNA sense strand
cuucaaggaucaagguaca

SEQ ID NO: 1771314 - RNA, 19 nt, Homo sapiens
  misc_RNA (1)...(19): siRNA sense strand
gcaccucuugagugguuua

SEQ ID NO: 1771315 - RNA, 19 nt, Homo sapiens
  misc_RNA (1)...(19): siRNA sense strand
caauguuccagauuauuug

SEQ ID NO: 1771316 - RNA, 19 nt, Homo sapiens
  misc_RNA (1)...(19): siRNA sense strand
cuaacuugcucugcuuguu

SEQ ID NO: 1771317 - RNA, 19 nt, Homo sapiens
  misc_RNA (1)...(19): siRNA sense strand
aggcacaccguaagacuaa

SEQ ID NO: 1771318 - RNA, 19 nt, Homo sapiens
  misc_RNA (1)...(19): siRNA sense strand
cgugaaggaagaggauuua

SEQ ID NO: 1771319 - RNA, 19 nt, Homo sapiens
  misc_RNA (1)...(19): siRNA sense strand
ccacagcagcaaaguuuag

SEQ ID NO: 1771320 - RNA, 19 nt, Homo sapiens
  misc_RNA (1)...(19): siRNA sense strand
gcugauucugguauuuaua

SEQ ID NO: 1771321 - RNA, 19 nt, Homo sapiens
  misc_RNA (1)...(19): siRNA sense strand
gaaggcacaccguaagacu

SEQ ID NO: 1771322 - RNA, 19 nt, Homo sapiens
  misc_RNA (1)...(19): siRNA sense strand
acagggcgcacaagucauu

SEQ ID NO: 1771323 - RNA, 19 nt, Homo sapiens
  misc_RNA (1)...(19): siRNA sense strand
caacuggacagcaccucuu

SEQ ID NO: 1771324 - RNA, 19 nt, Homo sapiens
  misc_RNA (1)...(19): siRNA sense strand
cauggggccuggaaaauga

SEQ ID NO: 1771325 - RNA, 19 nt, Homo sapiens
  misc_RNA (1)...(19): siRNA sense strand
ugguauuacucacaaacaa

SEQ ID NO: 1771326 - RNA, 19 nt, Homo sapiens
  misc_RNA (1)...(19): siRNA sense strand
guccuaccauugaccucua

SEQ ID NO: 1771327 - RNA, 19 nt, Homo sapiens
  misc_RNA (1)...(19): siRNA sense strand
gauugguauuacucacaaa

SEQ ID NO: 1771328 - RNA, 19 nt, Homo sapiens
  misc_RNA (1)...(19): siRNA sense strand
aaaaggcacucaguucuug

SEQ ID NO: 1771329 - RNA, 19 nt, Homo sapiens
  misc_RNA (1)...(19): siRNA sense strand
uuuauuguccuaccauuga

SEQ ID NO: 1771330 - RNA, 19 nt, Homo sapiens
  misc_RNA (1)...(19): siRNA sense strand
gauaugcgaaugucaccau

SEQ ID NO: 1771331 - RNA, 19 nt, Homo sapiens
  misc_RNA (1)...(19): siRNA sense strand
caggaaagaaaucgugugu

SEQ ID NO: 1771332 - RNA, 19 nt, Homo sapiens
  misc_RNA (1)...(19): siRNA sense strand
gcacaccguaagacuaagu

SEQ ID NO: 1771333 - RNA, 19 nt, Homo sapiens
  misc_RNA (1)...(19): siRNA sense strand
caagguacagggcgcacaa

SEQ ID NO: 1771334 - RNA, 19 nt, Homo sapiens
  misc_RNA (1)...(19): siRNA sense strand
uugcaauguuccagauuau

SEQ ID NO: 1771335 - RNA, 19 nt, Homo sapiens
  misc_RNA (1)...(19): siRNA sense strand
acaaaaguauucccacuca

SEQ ID NO: 1771336 - RNA, 19 nt, Homo sapiens
  misc_RNA (1)...(19): siRNA sense strand
uaagaauagcugacgugaa

SEQ ID NO: 1771337 - RNA, 19 nt, Homo sapiens
  misc_RNA (1)...(19): siRNA sense strand
ucuuagcaauucucacaau

SEQ ID NO: 1771338 - RNA, 19 nt, Homo sapiens
  misc_RNA (1)...(19): siRNA sense strand
aaaggaaguggaaauugga

SEQ ID NO: 1771339 - RNA, 19 nt, Homo sapiens
  misc_RNA (1)...(19): siRNA sense strand
uuccacagcagcaaaguuu

SEQ ID NO: 1771340 - RNA, 19 nt, Homo sapiens
  misc_RNA (1)...(19): siRNA sense strand
guugcugauucugguauuu

SEQ ID NO: 1771341 - RNA, 19 nt, Homo sapiens
  misc_RNA (1)...(19): siRNA sense strand
ggaaguggaaauuggaaaa

SEQ ID NO: 1771342 - RNA, 19 nt, Homo sapiens
  misc_RNA (1)...(19): siRNA sense strand
gcagcuuaauggaacaaaa

SEQ ID NO: 1771343 - RNA, 19 nt, Homo sapiens
  misc_RNA (1)...(19): siRNA sense strand
gacaugguuuuaagaauag

SEQ ID NO: 1771344 - RNA, 19 nt, Homo sapiens
  misc_RNA (1)...(19): siRNA sense strand
cagaagucccacauucaau

SEQ ID NO: 1771345 - RNA, 19 nt, Homo sapiens
  misc_RNA (1)...(19): siRNA sense strand
aggcuuuaauuguaagaug

SEQ ID NO: 1771346 - RNA, 19 nt, Homo sapiens
  misc_RNA (1)...(19): siRNA sense strand
caacaagaggaagggcaaa

SEQ ID NO: 1771347 - RNA, 19 nt, Homo sapiens
  misc_RNA (1)...(19): siRNA sense strand
ggaaaaggcacucaguucu

SEQ ID NO: 1771348 - RNA, 19 nt, Homo sapiens
  misc_RNA (1)...(19): siRNA sense strand
caaugaaaauggagccaau

SEQ ID NO: 1771349 - RNA, 19 nt, Homo sapiens
  misc_RNA (1)...(19): siRNA sense strand
gucagaagucccacauuca

SEQ ID NO: 1771350 - RNA, 19 nt, Homo sapiens
  misc_RNA (1)...(19): siRNA sense strand
ugagaaggcacaccguaag

SEQ ID NO: 1771351 - RNA, 19 nt, Homo sapiens
  misc_RNA (1)...(19): siRNA sense strand
aggauuuauugcugcagua

SEQ ID NO: 1771352 - RNA, 19 nt, Homo sapiens
  misc_RNA (1)...(19): siRNA sense strand
gaggaagggcaaaaucaaa

SEQ ID NO: 1771353 - RNA, 19 nt, Homo sapiens
  misc_RNA (1)...(19): siRNA sense strand
auaaaggaaguggaaauug

SEQ ID NO: 1771354 - RNA, 19 nt, Homo sapiens
  misc_RNA (1)...(19): siRNA sense strand
agaauugucaggcucuuca

SEQ ID NO: 1771355 - RNA, 19 nt, Homo sapiens
  misc_RNA (1)...(19): siRNA sense strand
gacaaggaaaaccuaguua

SEQ ID NO: 1771356 - RNA, 19 nt, Homo sapiens
  misc_RNA (1)...(19): siRNA sense strand
acaccguggauugguauua

SEQ ID NO: 1771357 - RNA, 19 nt, Homo sapiens
  misc_RNA (1)...(19): siRNA sense strand
uguuccagauuauuugaug

SEQ ID NO: 1771358 - RNA, 19 nt, Homo sapiens
  misc_RNA (1)...(19): siRNA sense strand
agauugcaauguuccagau

SEQ ID NO: 1771359 - RNA, 19 nt, Homo sapiens
  misc_RNA (1)...(19): siRNA sense strand
accaagaauucaacaagag

SEQ ID NO: 1771360 - RNA, 19 nt, Homo sapiens
  misc_RNA (1)...(19): siRNA sense strand
caccguggauugguauuac

SEQ ID NO: 1771361 - RNA, 19 nt, Homo sapiens
  misc_RNA (1)...(19): siRNA sense strand
ggaaagaaaucguguguuu

SEQ ID NO: 1771362 - RNA, 19 nt, Homo sapiens
  misc_RNA (1)...(19): siRNA sense strand
ucacaauucucauguauuc

SEQ ID NO: 1771363 - RNA, 19 nt, Homo sapiens
  misc_RNA (1)...(19): siRNA sense strand
gcaauguuccagauuauuu

SEQ ID NO: 1771364 - RNA, 19 nt, Homo sapiens
  misc_RNA (1)...(19): siRNA sense strand
gcgaaugucaccauauaua

SEQ ID NO: 1771365 - RNA, 19 nt, Homo sapiens
  misc_RNA (1)...(19): siRNA sense strand
gaaaauggagccaauuaua

SEQ ID NO: 1771366 - RNA, 19 nt, Homo sapiens
  misc_RNA (1)...(19): siRNA sense strand
cgaaugucaccauauauaa

SEQ ID NO: 1771367 - RNA, 19 nt, Homo sapiens
  misc_RNA (1)...(19): siRNA sense strand
guacagggcgcacaaguca

SEQ ID NO: 1771368 - RNA, 19 nt, Homo sapiens
  misc_RNA (1)...(19): siRNA sense strand
ggauugguauuacucacaa

SEQ ID NO: 1771369 - RNA, 19 nt, Homo sapiens
  misc_RNA (1)...(19): siRNA sense strand
gaaagaaaucguguguuug

SEQ ID NO: 1771370 - RNA, 19 nt, Homo sapiens
  misc_RNA (1)...(19): siRNA sense strand
gaaaaugaggcuuuaauug

SEQ ID NO: 1771371 - RNA, 19 nt, Homo sapiens
  misc_RNA (1)...(19): siRNA sense strand
cagcaccucuugagugguu

SEQ ID NO: 1771372 - RNA, 19 nt, Homo sapiens
  misc_RNA (1)...(19): siRNA sense strand
ccauugaccucuacaacug

SEQ ID NO: 1771373 - RNA, 19 nt, Homo sapiens
  misc_RNA (1)...(19): siRNA sense strand
gaucuuagcaauucucaca

SEQ ID NO: 1771374 - RNA, 19 nt, Homo sapiens
  misc_RNA (1)...(19): siRNA sense strand
ugucagaagucccacauuc

SEQ ID NO: 1771375 - RNA, 19 nt, Homo sapiens
  misc_RNA (1)...(19): siRNA sense strand
agaagucccacauucaaua

SEQ ID NO: 1771376 - RNA, 19 nt, Homo sapiens
  misc_RNA (1)...(19): siRNA sense strand
uugauaaugugaugacuga

SEQ ID NO: 1771377 - RNA, 19 nt, Homo sapiens
  misc_RNA (1)...(19): siRNA sense strand
cagcagcaaaguuuaguaa

SEQ ID NO: 1771378 - RNA, 19 nt, Homo sapiens
  misc_RNA (1)...(19): siRNA sense strand
augcgaaugucaccauaua

SEQ ID NO: 1771379 - RNA, 19 nt, Homo sapiens
  misc_RNA (1)...(19): siRNA sense strand
ggagccaauuauaguguga

SEQ ID NO: 1771380 - RNA, 19 nt, Homo sapiens
  misc_RNA (1)...(19): siRNA sense strand
guuacaccguggauuggua

SEQ ID NO: 1771381 - RNA, 19 nt, Homo sapiens
  misc_RNA (1)...(19): siRNA sense strand
ucucacaauucucauguau

SEQ ID NO: 1771382 - RNA, 19 nt, Homo sapiens
  misc_RNA (1)...(19): siRNA sense strand
uugagugguuuaagaauug

SEQ ID NO: 1771383 - RNA, 19 nt, Homo sapiens
  misc_RNA (1)...(19): siRNA sense strand
gguauuacucacaaacaaa

SEQ ID NO: 1771384 - RNA, 19 nt, Homo sapiens
  misc_RNA (1)...(19): siRNA sense strand
ggaaaaugaggcuuuaauu

SEQ ID NO: 1771385 - RNA, 19 nt, Homo sapiens
  misc_RNA (1)...(19): siRNA sense strand
auugcaauguuccagauua

SEQ ID NO: 1771386 - RNA, 19 nt, Homo sapiens
  misc_RNA (1)...(19): siRNA sense strand
cuugagugguuuaagaauu

SEQ ID NO: 1771387 - RNA, 19 nt, Homo sapiens
  misc_RNA (1)...(19): siRNA sense strand
gaagucccacauucaauag

SEQ ID NO: 1771388 - RNA, 19 nt, Homo sapiens
  misc_RNA (1)...(19): siRNA sense strand
ucagaagucccacauucaa

SEQ ID NO: 1771389 - RNA, 19 nt, Homo sapiens
  misc_RNA (1)...(19): siRNA sense strand
ggacuggauaugcgaaugu

SEQ ID NO: 1771390 - RNA, 19 nt, Homo sapiens
  misc_RNA (1)...(19): siRNA sense strand
cuaguuacaccguggauug

SEQ ID NO: 1771391 - RNA, 19 nt, Homo sapiens
  misc_RNA (1)...(19): siRNA sense strand
aaagaaaucguguguuugc

SEQ ID NO: 1771392 - RNA, 19 nt, Homo sapiens
  misc_RNA (1)...(19): siRNA sense strand
ggcuuuaauuguaagaugu

SEQ ID NO: 1771393 - RNA, 19 nt, Homo sapiens
  misc_RNA (1)...(19): siRNA sense strand
aaauggagccaauuauagu

SEQ ID NO: 1771394 - RNA, 19 nt, Homo sapiens
  misc_RNA (1)...(19): siRNA sense strand
cuucaaggaucaagguaca

SEQ ID NO: 1771395 - RNA, 19 nt, Homo sapiens
  misc_RNA (1)...(19): siRNA sense strand
gcaccucuugagugguuua

SEQ ID NO: 1771396 - RNA, 19 nt, Homo sapiens
  misc_RNA (1)...(19): siRNA sense strand
caauguuccagauuauuug

SEQ ID NO: 1771397 - RNA, 19 nt, Homo sapiens
  misc_RNA (1)...(19): siRNA sense strand
ccacagcagcaaaguuuag

SEQ ID NO: 1771398 - RNA, 19 nt, Homo sapiens
  misc_RNA (1)...(19): siRNA sense strand
gcugauucugguauuuaua

SEQ ID NO: 1771399 - RNA, 19 nt, Homo sapiens
  misc_RNA (1)...(19): siRNA sense strand
acagggcgcacaagucauu

SEQ ID NO: 1771400 - RNA, 19 nt, Homo sapiens
  misc_RNA (1)...(19): siRNA sense strand
caacuggacagcaccucuu

SEQ ID NO: 1771401 - RNA, 19 nt, Homo sapiens
  misc_RNA (1)...(19): siRNA sense strand
cauggggccuggaaaauga

SEQ ID NO: 1771402 - RNA, 19 nt, Homo sapiens
  misc_RNA (1)...(19): siRNA sense strand
ugguauuacucacaaacaa

SEQ ID NO: 1771403 - RNA, 19 nt, Homo sapiens
  misc_RNA (1)...(19): siRNA sense strand
guccuaccauugaccucua

SEQ ID NO: 1771404 - RNA, 19 nt, Homo sapiens
  misc_RNA (1)...(19): siRNA sense strand
gauugguauuacucacaaa

SEQ ID NO: 1771405 - RNA, 19 nt, Homo sapiens
  misc_RNA (1)...(19): siRNA sense strand
uuuauuguccuaccauuga

SEQ ID NO: 1771406 - RNA, 19 nt, Homo sapiens
  misc_RNA (1)...(19): siRNA sense strand
gauaugcgaaugucaccau

SEQ ID NO: 1771407 - RNA, 19 nt, Homo sapiens
  misc_RNA (1)...(19): siRNA sense strand
caggaaagaaaucgugugu

SEQ ID NO: 1771408 - RNA, 19 nt, Homo sapiens
  misc_RNA (1)...(19): siRNA sense strand
caagguacagggcgcacaa

SEQ ID NO: 1771409 - RNA, 19 nt, Homo sapiens
  misc_RNA (1)...(19): siRNA sense strand
uugcaauguuccagauuau

SEQ ID NO: 1771410 - RNA, 19 nt, Homo sapiens
  misc_RNA (1)...(19): siRNA sense strand
acaaaaguauucccacuca

SEQ ID NO: 1771411 - RNA, 19 nt, Homo sapiens
  misc_RNA (1)...(19): siRNA sense strand
ucuuagcaauucucacaau

SEQ ID NO: 1771412 - RNA, 19 nt, Homo sapiens
  misc_RNA (1)...(19): siRNA sense strand
uuccacagcagcaaaguuu

SEQ ID NO: 1771413 - RNA, 19 nt, Homo sapiens
  misc_RNA (1)...(19): siRNA sense strand
guugcugauucugguauuu

SEQ ID NO: 1771414 - RNA, 19 nt, Homo sapiens
  misc_RNA (1)...(19): siRNA sense strand
cagaagucccacauucaau

SEQ ID NO: 1771415 - RNA, 19 nt, Homo sapiens
  misc_RNA (1)...(19): siRNA sense strand
aggcuuuaauuguaagaug

SEQ ID NO: 1771416 - RNA, 19 nt, Homo sapiens
  misc_RNA (1)...(19): siRNA sense strand
caaugaaaauggagccaau

SEQ ID NO: 1771417 - RNA, 19 nt, Homo sapiens
  misc_RNA (1)...(19): siRNA sense strand
acaccguggauugguauua

SEQ ID NO: 1771418 - RNA, 19 nt, Homo sapiens
  misc_RNA (1)...(19): siRNA sense strand
agaauugucaggcucuuca

SEQ ID NO: 1771419 - RNA, 19 nt, Homo sapiens
  misc_RNA (1)...(19): siRNA sense strand
uguuccagauuauuugaug

SEQ ID NO: 1771420 - RNA, 19 nt, Homo sapiens
  misc_RNA (1)...(19): siRNA sense strand
agauugcaauguuccagau

SEQ ID NO: 1771421 - RNA, 19 nt, Homo sapiens
  misc_RNA (1)...(19): siRNA sense strand
gucagaagucccacauuca

SEQ ID NO: 1771422 - RNA, 19 nt, Homo sapiens
  misc_RNA (1)...(19): siRNA sense strand
gacaaggaaaaccuaguua

SEQ ID NO: 1771423 - RNA, 19 nt, Homo sapiens
  misc_RNA (1)...(19): siRNA sense strand
caccguggauugguauuac

SEQ ID NO: 1771424 - RNA, 19 nt, Homo sapiens
  misc_RNA (1)...(19): siRNA sense strand
ccagguccuucacggucaa

SEQ ID NO: 1771425 - RNA, 19 nt, Homo sapiens
  misc_RNA (1)...(19): siRNA sense strand
uugcugauucugguauuua

SEQ ID NO: 1771426 - RNA, 19 nt, Homo sapiens
  misc_RNA (1)...(19): siRNA sense strand
gaacaaccucucugaagaa

SEQ ID NO: 1771427 - RNA, 19 nt, Homo sapiens
  misc_RNA (1)...(19): siRNA sense strand
gccaaugacucaagcugua

SEQ ID NO: 1771428 - RNA, 19 nt, Homo sapiens
  misc_RNA (1)...(19): siRNA sense strand
caaagaagccagccaaauc

SEQ ID NO: 1771429 - RNA, 19 nt, Homo sapiens
  misc_RNA (1)...(19): siRNA sense strand
gcagacagcaucgagauuu

SEQ ID NO: 1771430 - RNA, 19 nt, Homo sapiens
  misc_RNA (1)...(19): siRNA sense strand
cagacagcaucgagauuua

SEQ ID NO: 1771431 - RNA, 19 nt, Homo sapiens
  misc_RNA (1)...(19): siRNA sense strand
aaaggaaacugucaucgau

SEQ ID NO: 1771432 - RNA, 19 nt, Homo sapiens
  misc_RNA (1)...(19): siRNA sense strand
agaacaaccucucugaaga

SEQ ID NO: 1771433 - RNA, 19 nt, Homo sapiens
  misc_RNA (1)...(19): siRNA sense strand
caaccucucugaagaaguc

SEQ ID NO: 1771434 - RNA, 19 nt, Homo sapiens
  misc_RNA (1)...(19): siRNA sense strand
cuacugaugucccagaaau

SEQ ID NO: 1771435 - RNA, 19 nt, Homo sapiens
  misc_RNA (1)...(19): siRNA sense strand
acaaggagaccaaagagaa

SEQ ID NO: 1771436 - RNA, 19 nt, Homo sapiens
  misc_RNA (1)...(19): siRNA sense strand
gaggauaucagcaugaagu

SEQ ID NO: 1771437 - RNA, 19 nt, Homo sapiens
  misc_RNA (1)...(19): siRNA sense strand
aaacugucaucgauaggaa

SEQ ID NO: 1771438 - RNA, 19 nt, Homo sapiens
  misc_RNA (1)...(19): siRNA sense strand
caaagccguucaucucagu

SEQ ID NO: 1771439 - RNA, 19 nt, Homo sapiens
  misc_RNA (1)...(19): siRNA sense strand
gaaacugucaucgauagga

SEQ ID NO: 1771440 - RNA, 19 nt, Homo sapiens
  misc_RNA (1)...(19): siRNA sense strand
gaagaggaaggaagagaag

SEQ ID NO: 1771441 - RNA, 19 nt, Homo sapiens
  misc_RNA (1)...(19): siRNA sense strand
gcugccagauggacaagga

SEQ ID NO: 1771442 - RNA, 19 nt, Homo sapiens
  misc_RNA (1)...(19): siRNA sense strand
ggacaaggagaccaaagag

SEQ ID NO: 1771443 - RNA, 19 nt, Homo sapiens
  misc_RNA (1)...(19): siRNA sense strand
gaggaaggaagagaagaaa

SEQ ID NO: 1771444 - RNA, 19 nt, Homo sapiens
  misc_RNA (1)...(19): siRNA sense strand
gacggcuacugguuccuaa

SEQ ID NO: 1771445 - RNA, 19 nt, Homo sapiens
  misc_RNA (1)...(19): siRNA sense strand
ccaaagaagccagccaaau

SEQ ID NO: 1771446 - RNA, 19 nt, Homo sapiens
  misc_RNA (1)...(19): siRNA sense strand
gagaagaggaaggaagaga

SEQ ID NO: 1771447 - RNA, 19 nt, Homo sapiens
  misc_RNA (1)...(19): siRNA sense strand
ggacagccaggaccacaag

SEQ ID NO: 1771448 - RNA, 19 nt, Homo sapiens
  misc_RNA (1)...(19): siRNA sense strand
aggaaacugucaucgauag

SEQ ID NO: 1771449 - RNA, 19 nt, Homo sapiens
  misc_RNA (1)...(19): siRNA sense strand
gacaaggagaccaaagaga

SEQ ID NO: 1771450 - RNA, 19 nt, Homo sapiens
  misc_RNA (1)...(19): siRNA sense strand
ccagagcaguacugagucu

SEQ ID NO: 1771451 - RNA, 19 nt, Homo sapiens
  misc_RNA (1)...(19): siRNA sense strand
cuaguggcguauaagaaga

SEQ ID NO: 1771452 - RNA, 19 nt, Homo sapiens
  misc_RNA (1)...(19): siRNA sense strand
ccaaugacucaagcuguaa

SEQ ID NO: 1771453 - RNA, 19 nt, Homo sapiens
  misc_RNA (1)...(19): siRNA sense strand
ucgaggauaucagcaugaa

SEQ ID NO: 1771454 - RNA, 19 nt, Homo sapiens
  misc_RNA (1)...(19): siRNA sense strand
cagcaugaaguucgaugaa

SEQ ID NO: 1771455 - RNA, 19 nt, Homo sapiens
  misc_RNA (1)...(19): siRNA sense strand
caagcuguaagucaucuga

SEQ ID NO: 1771456 - RNA, 19 nt, Homo sapiens
  misc_RNA (1)...(19): siRNA sense strand
cccagaaauuccagcaguu

SEQ ID NO: 1771457 - RNA, 19 nt, Homo sapiens
  misc_RNA (1)...(19): siRNA sense strand
guccagagcaguacugagu

SEQ ID NO: 1771458 - RNA, 19 nt, Homo sapiens
  misc_RNA (1)...(19): siRNA sense strand
caagauugcccagaucaag

SEQ ID NO: 1771459 - RNA, 19 nt, Homo sapiens
  misc_RNA (1)...(19): siRNA sense strand
ccgagaagaggaaggaaga

SEQ ID NO: 1771460 - RNA, 19 nt, Homo sapiens
  misc_RNA (1)...(19): siRNA sense strand
gcgcagacagcaucgagau

SEQ ID NO: 1771461 - RNA, 19 nt, Homo sapiens
  misc_RNA (1)...(19): siRNA sense strand
agaagaggaaggaagagaa

SEQ ID NO: 1771462 - RNA, 19 nt, Homo sapiens
  misc_RNA (1)...(19): siRNA sense strand
ggaaggaagagaagaaacc

SEQ ID NO: 1771463 - RNA, 19 nt, Homo sapiens
  misc_RNA (1)...(19): siRNA sense strand
gacagcaucgagauuuaug

SEQ ID NO: 1771464 - RNA, 19 nt, Homo sapiens
  misc_RNA (1)...(19): siRNA sense strand
gaaggaagagaagaaacca

SEQ ID NO: 1771465 - RNA, 19 nt, Homo sapiens
  misc_RNA (1)...(19): siRNA sense strand
agaggaaggaagagaagaa

SEQ ID NO: 1771466 - RNA, 19 nt, Homo sapiens
  misc_RNA (1)...(19): siRNA sense strand
caugccuaguggcguauaa

SEQ ID NO: 1771467 - RNA, 19 nt, Homo sapiens
  misc_RNA (1)...(19): siRNA sense strand
cuucaaagccguucaucuc

SEQ ID NO: 1771468 - RNA, 19 nt, Homo sapiens
  misc_RNA (1)...(19): siRNA sense strand
aaggaaacugucaucgaua

SEQ ID NO: 1771469 - RNA, 19 nt, Homo sapiens
  misc_RNA (1)...(19): siRNA sense strand
cacaagagcgaggugacua

SEQ ID NO: 1771470 - RNA, 19 nt, Homo sapiens
  misc_RNA (1)...(19): siRNA sense strand
ccagaaauuccagcaguuc

SEQ ID NO: 1771471 - RNA, 19 nt, Homo sapiens
  misc_RNA (1)...(19): siRNA sense strand
cuacugguuccuaaagcua

SEQ ID NO: 1771472 - RNA, 19 nt, Homo sapiens
  misc_RNA (1)...(19): siRNA sense strand
gcuacugguuccuaaagcu

SEQ ID NO: 1771473 - RNA, 19 nt, Homo sapiens
  misc_RNA (1)...(19): siRNA sense strand
ccaggaugccaaugacuca

SEQ ID NO: 1771474 - RNA, 19 nt, Homo sapiens
  misc_RNA (1)...(19): siRNA sense strand
gugcccagcuacugauguc

SEQ ID NO: 1771475 - RNA, 19 nt, Homo sapiens
  misc_RNA (1)...(19): siRNA sense strand
ugucaucgauaggaauaca

SEQ ID NO: 1771476 - RNA, 19 nt, Homo sapiens
  misc_RNA (1)...(19): siRNA sense strand
ggauaucagcaugaaguuc

SEQ ID NO: 1771477 - RNA, 19 nt, Homo sapiens
  misc_RNA (1)...(19): siRNA sense strand
ccuaguggcguauaagaag

SEQ ID NO: 1771478 - RNA, 19 nt, Homo sapiens
  misc_RNA (1)...(19): siRNA sense strand
caaggagaccaaagagaac

SEQ ID NO: 1771479 - RNA, 19 nt, Homo sapiens
  misc_RNA (1)...(19): siRNA sense strand
gcgcaaccucuccuaugga

SEQ ID NO: 1771480 - RNA, 19 nt, Homo sapiens
  misc_RNA (1)...(19): siRNA sense strand
caagcgcaaccucuccuau

SEQ ID NO: 1771481 - RNA, 19 nt, Homo sapiens
  misc_RNA (1)...(19): siRNA sense strand
gaacaaccucucugaagaa

SEQ ID NO: 1771482 - RNA, 19 nt, Homo sapiens
  misc_RNA (1)...(19): siRNA sense strand
gccaaugacucaagcugua

SEQ ID NO: 1771483 - RNA, 19 nt, Homo sapiens
  misc_RNA (1)...(19): siRNA sense strand
caaagaagccagccaaauc

SEQ ID NO: 1771484 - RNA, 19 nt, Homo sapiens
  misc_RNA (1)...(19): siRNA sense strand
gcagacagcaucgagauuu

SEQ ID NO: 1771485 - RNA, 19 nt, Homo sapiens
  misc_RNA (1)...(19): siRNA sense strand
cagacagcaucgagauuua

SEQ ID NO: 1771486 - RNA, 19 nt, Homo sapiens
  misc_RNA (1)...(19): siRNA sense strand
aaaggaaacugucaucgau

SEQ ID NO: 1771487 - RNA, 19 nt, Homo sapiens
  misc_RNA (1)...(19): siRNA sense strand
agaacaaccucucugaaga

SEQ ID NO: 1771488 - RNA, 19 nt, Homo sapiens
  misc_RNA (1)...(19): siRNA sense strand
caaccucucugaagaaguc

SEQ ID NO: 1771489 - RNA, 19 nt, Homo sapiens
  misc_RNA (1)...(19): siRNA sense strand
cuacugaugucccagaaau

SEQ ID NO: 1771490 - RNA, 19 nt, Homo sapiens
  misc_RNA (1)...(19): siRNA sense strand
acaaggagaccaaagagaa

SEQ ID NO: 1771491 - RNA, 19 nt, Homo sapiens
  misc_RNA (1)...(19): siRNA sense strand
gaggauaucagcaugaagu

SEQ ID NO: 1771492 - RNA, 19 nt, Homo sapiens
  misc_RNA (1)...(19): siRNA sense strand
aaacugucaucgauaggaa

SEQ ID NO: 1771493 - RNA, 19 nt, Homo sapiens
  misc_RNA (1)...(19): siRNA sense strand
caaagccguucaucucagu

SEQ ID NO: 1771494 - RNA, 19 nt, Homo sapiens
  misc_RNA (1)...(19): siRNA sense strand
gaaacugucaucgauagga

SEQ ID NO: 1771495 - RNA, 19 nt, Homo sapiens
  misc_RNA (1)...(19): siRNA sense strand
gaagaggaaggaagagaag

SEQ ID NO: 1771496 - RNA, 19 nt, Homo sapiens
  misc_RNA (1)...(19): siRNA sense strand
gcugccagauggacaagga

SEQ ID NO: 1771497 - RNA, 19 nt, Homo sapiens
  misc_RNA (1)...(19): siRNA sense strand
ggacaaggagaccaaagag

SEQ ID NO: 1771498 - RNA, 19 nt, Homo sapiens
  misc_RNA (1)...(19): siRNA sense strand
gaggaaggaagagaagaaa

SEQ ID NO: 1771499 - RNA, 19 nt, Homo sapiens
  misc_RNA (1)...(19): siRNA sense strand
gacggcuacugguuccuaa

SEQ ID NO: 1771500 - RNA, 19 nt, Homo sapiens
  misc_RNA (1)...(19): siRNA sense strand
ccaaagaagccagccaaau

SEQ ID NO: 1771501 - RNA, 19 nt, Homo sapiens
  misc_RNA (1)...(19): siRNA sense strand
gagaagaggaaggaagaga

SEQ ID NO: 1771502 - RNA, 19 nt, Homo sapiens
  misc_RNA (1)...(19): siRNA sense strand
ggacagccaggaccacaag

SEQ ID NO: 1771503 - RNA, 19 nt, Homo sapiens
  misc_RNA (1)...(19): siRNA sense strand
aggaaacugucaucgauag

SEQ ID NO: 1771504 - RNA, 19 nt, Homo sapiens
  misc_RNA (1)...(19): siRNA sense strand
gacaaggagaccaaagaga

SEQ ID NO: 1771505 - RNA, 19 nt, Homo sapiens
  misc_RNA (1)...(19): siRNA sense strand
ccagagcaguacugagucu

SEQ ID NO: 1771506 - RNA, 19 nt, Homo sapiens
  misc_RNA (1)...(19): siRNA sense strand
cuaguggcguauaagaaga

SEQ ID NO: 1771507 - RNA, 19 nt, Homo sapiens
  misc_RNA (1)...(19): siRNA sense strand
ccaaugacucaagcuguaa

SEQ ID NO: 1771508 - RNA, 19 nt, Homo sapiens
  misc_RNA (1)...(19): siRNA sense strand
ucgaggauaucagcaugaa

SEQ ID NO: 1771509 - RNA, 19 nt, Homo sapiens
  misc_RNA (1)...(19): siRNA sense strand
cagcaugaaguucgaugaa

SEQ ID NO: 1771510 - RNA, 19 nt, Homo sapiens
  misc_RNA (1)...(19): siRNA sense strand
caagcuguaagucaucuga

SEQ ID NO: 1771511 - RNA, 19 nt, Homo sapiens
  misc_RNA (1)...(19): siRNA sense strand
cccagaaauuccagcaguu

SEQ ID NO: 1771512 - RNA, 19 nt, Homo sapiens
  misc_RNA (1)...(19): siRNA sense strand
guccagagcaguacugagu

SEQ ID NO: 1771513 - RNA, 19 nt, Homo sapiens
  misc_RNA (1)...(19): siRNA sense strand
caagauugcccagaucaag

SEQ ID NO: 1771514 - RNA, 19 nt, Homo sapiens
  misc_RNA (1)...(19): siRNA sense strand
ccgagaagaggaaggaaga

SEQ ID NO: 1771515 - RNA, 19 nt, Homo sapiens
  misc_RNA (1)...(19): siRNA sense strand
gcgcagacagcaucgagau

SEQ ID NO: 1771516 - RNA, 19 nt, Homo sapiens
  misc_RNA (1)...(19): siRNA sense strand
agaagaggaaggaagagaa

SEQ ID NO: 1771517 - RNA, 19 nt, Homo sapiens
  misc_RNA (1)...(19): siRNA sense strand
ggaaggaagagaagaaacc

SEQ ID NO: 1771518 - RNA, 19 nt, Homo sapiens
  misc_RNA (1)...(19): siRNA sense strand
gacagcaucgagauuuaug

SEQ ID NO: 1771519 - RNA, 19 nt, Homo sapiens
  misc_RNA (1)...(19): siRNA sense strand
gaaggaagagaagaaacca

SEQ ID NO: 1771520 - RNA, 19 nt, Homo sapiens
  misc_RNA (1)...(19): siRNA sense strand
agaggaaggaagagaagaa

SEQ ID NO: 1771521 - RNA, 19 nt, Homo sapiens
  misc_RNA (1)...(19): siRNA sense strand
caugccuaguggcguauaa

SEQ ID NO: 1771522 - RNA, 19 nt, Homo sapiens
  misc_RNA (1)...(19): siRNA sense strand
cuucaaagccguucaucuc

SEQ ID NO: 1771523 - RNA, 19 nt, Homo sapiens
  misc_RNA (1)...(19): siRNA sense strand
aaggaaacugucaucgaua

SEQ ID NO: 1771524 - RNA, 19 nt, Homo sapiens
  misc_RNA (1)...(19): siRNA sense strand
cacaagagcgaggugacua

SEQ ID NO: 1771525 - RNA, 19 nt, Homo sapiens
  misc_RNA (1)...(19): siRNA sense strand
ccagaaauuccagcaguuc

SEQ ID NO: 1771526 - RNA, 19 nt, Homo sapiens
  misc_RNA (1)...(19): siRNA sense strand
cuacugguuccuaaagcua

SEQ ID NO: 1771527 - RNA, 19 nt, Homo sapiens
  misc_RNA (1)...(19): siRNA sense strand
gcuacugguuccuaaagcu

SEQ ID NO: 1771528 - RNA, 19 nt, Homo sapiens
  misc_RNA (1)...(19): siRNA sense strand
ccaggaugccaaugacuca

SEQ ID NO: 1771529 - RNA, 19 nt, Homo sapiens
  misc_RNA (1)...(19): siRNA sense strand
gugcccagcuacugauguc

SEQ ID NO: 1771530 - RNA, 19 nt, Homo sapiens
  misc_RNA (1)...(19): siRNA sense strand
ugucaucgauaggaauaca

SEQ ID NO: 1771531 - RNA, 19 nt, Homo sapiens
  misc_RNA (1)...(19): siRNA sense strand
ggauaucagcaugaaguuc

SEQ ID NO: 1771532 - RNA, 19 nt, Homo sapiens
  misc_RNA (1)...(19): siRNA sense strand
ccuaguggcguauaagaag

SEQ ID NO: 1771533 - RNA, 19 nt, Homo sapiens
  misc_RNA (1)...(19): siRNA sense strand
caaggagaccaaagagaac

SEQ ID NO: 1771534 - RNA, 19 nt, Homo sapiens
  misc_RNA (1)...(19): siRNA sense strand
gcgcaaccucuccuaugga

SEQ ID NO: 1771535 - RNA, 19 nt, Homo sapiens
  misc_RNA (1)...(19): siRNA sense strand
caagcgcaaccucuccuau

SEQ ID NO: 1771536 - RNA, 19 nt, Homo sapiens
  misc_RNA (1)...(19): siRNA sense strand
gcacauagcuggagccaau

SEQ ID NO: 1771537 - RNA, 19 nt, Homo sapiens
  misc_RNA (1)...(19): siRNA sense strand
ggacaugccuguugagaau

SEQ ID NO: 1771538 - RNA, 19 nt, Homo sapiens
  misc_RNA (1)...(19): siRNA sense strand
ggacagaccaagagaauaa

SEQ ID NO: 1771539 - RNA, 19 nt, Homo sapiens
  misc_RNA (1)...(19): siRNA sense strand
ggaccaaccuguauaggaa

SEQ ID NO: 1771540 - RNA, 19 nt, Homo sapiens
  misc_RNA (1)...(19): siRNA sense strand
gaacgacgccgaggaagua

SEQ ID NO: 1771541 - RNA, 19 nt, Homo sapiens
  misc_RNA (1)...(19): siRNA sense strand
gcaagaaaguguccuucga

SEQ ID NO: 1771542 - RNA, 19 nt, Homo sapiens
  misc_RNA (1)...(19): siRNA sense strand
gcaaugggaccucgguaua

SEQ ID NO: 1771543 - RNA, 19 nt, Homo sapiens
  misc_RNA (1)...(19): siRNA sense strand
gaacuggacaugccuguug

SEQ ID NO: 1771544 - RNA, 19 nt, Homo sapiens
  misc_RNA (1)...(19): siRNA sense strand
cgacaacuuugaggaaauu

SEQ ID NO: 1771545 - RNA, 19 nt, Homo sapiens
  misc_RNA (1)...(19): siRNA sense strand
uagaggagauggaggagaa

SEQ ID NO: 1771546 - RNA, 19 nt, Homo sapiens
  misc_RNA (1)...(19): siRNA sense strand
gcagauggcagagcuauug

SEQ ID NO: 1771547 - RNA, 19 nt, Homo sapiens
  misc_RNA (1)...(19): siRNA sense strand
gaccuggacuggauagaug

SEQ ID NO: 1771548 - RNA, 19 nt, Homo sapiens
  misc_RNA (1)...(19): siRNA sense strand
gaagauccucguucaguau

SEQ ID NO: 1771549 - RNA, 19 nt, Homo sapiens
  misc_RNA (1)...(19): siRNA sense strand
gggcaucacccaagagaaa

SEQ ID NO: 1771550 - RNA, 19 nt, Homo sapiens
  misc_RNA (1)...(19): siRNA sense strand
uggaugagaugccaauaga

SEQ ID NO: 1771551 - RNA, 19 nt, Homo sapiens
  misc_RNA (1)...(19): siRNA sense strand
gaagaaaugggcacaguac

SEQ ID NO: 1771552 - RNA, 19 nt, Homo sapiens
  misc_RNA (1)...(19): siRNA sense strand
ggacauccacugcaugauc

SEQ ID NO: 1771553 - RNA, 19 nt, Homo sapiens
  misc_RNA (1)...(19): siRNA sense strand
ggucagugccuaccaguau

SEQ ID NO: 1771554 - RNA, 19 nt, Homo sapiens
  misc_RNA (1)...(19): siRNA sense strand
caacucggaugggaacaug

SEQ ID NO: 1771555 - RNA, 19 nt, Homo sapiens
  misc_RNA (1)...(19): siRNA sense strand
ccauggagcuagucucagu

SEQ ID NO: 1771556 - RNA, 19 nt, Homo sapiens
  misc_RNA (1)...(19): siRNA sense strand
gcccugauuugugcaauga

SEQ ID NO: 1771557 - RNA, 19 nt, Homo sapiens
  misc_RNA (1)...(19): siRNA sense strand
cagcggaccuccaccuaca

SEQ ID NO: 1771558 - RNA, 19 nt, Homo sapiens
  misc_RNA (1)...(19): siRNA sense strand
gaggaacgacgccgaggaa

SEQ ID NO: 1771559 - RNA, 19 nt, Homo sapiens
  misc_RNA (1)...(19): siRNA sense strand
cgaauuuccuaccaagauc

SEQ ID NO: 1771560 - RNA, 19 nt, Homo sapiens
  misc_RNA (1)...(19): siRNA sense strand
ugcaugaggugccugacua

SEQ ID NO: 1771561 - RNA, 19 nt, Homo sapiens
  misc_RNA (1)...(19): siRNA sense strand
gaacccacccuggauguca

SEQ ID NO: 1771562 - RNA, 19 nt, Homo sapiens
  misc_RNA (1)...(19): siRNA sense strand
aaugggaccucgguauauu

SEQ ID NO: 1771563 - RNA, 19 nt, Homo sapiens
  misc_RNA (1)...(19): siRNA sense strand
gaucggaggcagaacuuca

SEQ ID NO: 1771564 - RNA, 19 nt, Homo sapiens
  misc_RNA (1)...(19): siRNA sense strand
gugcuacucuccgaauuuc

SEQ ID NO: 1771565 - RNA, 19 nt, Homo sapiens
  misc_RNA (1)...(19): siRNA sense strand
caagaucccacgaggugaa

SEQ ID NO: 1771566 - RNA, 19 nt, Homo sapiens
  misc_RNA (1)...(19): siRNA sense strand
gcggacauccacugcauga

SEQ ID NO: 1771567 - RNA, 19 nt, Homo sapiens
  misc_RNA (1)...(19): siRNA sense strand
ugaagaaaugggcacagua

SEQ ID NO: 1771568 - RNA, 19 nt, Homo sapiens
  misc_RNA (1)...(19): siRNA sense strand
ggagugcagcugaggauca

SEQ ID NO: 1771569 - RNA, 19 nt, Homo sapiens
  misc_RNA (1)...(19): siRNA sense strand
ggaccucgguauauuacac

SEQ ID NO: 1771570 - RNA, 19 nt, Homo sapiens
  misc_RNA (1)...(19): siRNA sense strand
acaucaaccuggugaagau

SEQ ID NO: 1771571 - RNA, 19 nt, Homo sapiens
  misc_RNA (1)...(19): siRNA sense strand
gagaagcccgugcuacucu

SEQ ID NO: 1771572 - RNA, 19 nt, Homo sapiens
  misc_RNA (1)...(19): siRNA sense strand
ggagcuagucucagugcaa

SEQ ID NO: 1771573 - RNA, 19 nt, Homo sapiens
  misc_RNA (1)...(19): siRNA sense strand
caacuuugaggaaauugug

SEQ ID NO: 1771574 - RNA, 19 nt, Homo sapiens
  misc_RNA (1)...(19): siRNA sense strand
gcauggcuguugccguauc

SEQ ID NO: 1771575 - RNA, 19 nt, Homo sapiens
  misc_RNA (1)...(19): siRNA sense strand
caaugggaccucgguauau

SEQ ID NO: 1771576 - RNA, 19 nt, Homo sapiens
  misc_RNA (1)...(19): siRNA sense strand
ggaacgacgccgaggaagu

SEQ ID NO: 1771577 - RNA, 19 nt, Homo sapiens
  misc_RNA (1)...(19): siRNA sense strand
ccacacugcugcacauagc

SEQ ID NO: 1771578 - RNA, 19 nt, Homo sapiens
  misc_RNA (1)...(19): siRNA sense strand
caggacagaccaagagaau

SEQ ID NO: 1771579 - RNA, 19 nt, Homo sapiens
  misc_RNA (1)...(19): siRNA sense strand
uguauaggaaggaguauga

SEQ ID NO: 1771580 - RNA, 19 nt, Homo sapiens
  misc_RNA (1)...(19): siRNA sense strand
caucgacaacuuugaggaa

SEQ ID NO: 1771581 - RNA, 19 nt, Homo sapiens
  misc_RNA (1)...(19): siRNA sense strand
gggcgagaguagcagugaa

SEQ ID NO: 1771582 - RNA, 19 nt, Homo sapiens
  misc_RNA (1)...(19): siRNA sense strand
uagcuggagccaauggaua

SEQ ID NO: 1771583 - RNA, 19 nt, Homo sapiens
  misc_RNA (1)...(19): siRNA sense strand
ggaccuggacuggauagau

SEQ ID NO: 1771584 - RNA, 19 nt, Homo sapiens
  misc_RNA (1)...(19): siRNA sense strand
gcuguugccguaucuccua

SEQ ID NO: 1771585 - RNA, 19 nt, Homo sapiens
  misc_RNA (1)...(19): siRNA sense strand
agucacagcugaggcacaa

SEQ ID NO: 1771586 - RNA, 19 nt, Homo sapiens
  misc_RNA (1)...(19): siRNA sense strand
ggaugaacccacccuggau

SEQ ID NO: 1771587 - RNA, 19 nt, Homo sapiens
  misc_RNA (1)...(19): siRNA sense strand
aagagaauaaggacccuaa

SEQ ID NO: 1771588 - RNA, 19 nt, Homo sapiens
  misc_RNA (1)...(19): siRNA sense strand
cgacuugcuugcugucaac

SEQ ID NO: 1771589 - RNA, 19 nt, Homo sapiens
  misc_RNA (1)...(19): siRNA sense strand
gugcugcaucgacaacuuu

SEQ ID NO: 1771590 - RNA, 19 nt, Homo sapiens
  misc_RNA (1)...(19): siRNA sense strand
gaccaggacagaccaagag

SEQ ID NO: 1771591 - RNA, 19 nt, Homo sapiens
  misc_RNA (1)...(19): siRNA sense strand
ggcagaacuucaccguaca

SEQ ID NO: 1771592 - RNA, 19 nt, Homo sapiens
  misc_RNA (1)...(19): siRNA sense strand
ggagaagcccgugcuacuc

SEQ ID NO: 1771593 - RNA, 19 nt, Homo sapiens
  misc_RNA (1)...(19): siRNA sense strand
agaaaugggcacaguacga

SEQ ID NO: 1771594 - RNA, 19 nt, Homo sapiens
  misc_RNA (1)...(19): siRNA sense strand
ccgaauuuccuaccaagau

SEQ ID NO: 1771595 - RNA, 19 nt, Homo sapiens
  misc_RNA (1)...(19): siRNA sense strand
ggagugcguguggauguga

SEQ ID NO: 1771596 - RNA, 19 nt, Homo sapiens
  misc_RNA (1)...(19): siRNA sense strand
ucgacaacuuugaggaaau

SEQ ID NO: 1771597 - RNA, 19 nt, Homo sapiens
  misc_RNA (1)...(19): siRNA sense strand
gcgaggaggaagaguucaa

SEQ ID NO: 1771598 - RNA, 19 nt, Homo sapiens
  misc_RNA (1)...(19): siRNA sense strand
gagugcguguggaugugaa

SEQ ID NO: 1771599 - RNA, 19 nt, Homo sapiens
  misc_RNA (1)...(19): siRNA sense strand
gucagugccuaccaguaug

SEQ ID NO: 1771600 - RNA, 19 nt, Homo sapiens
  misc_RNA (1)...(19): siRNA sense strand
ccaaugugaacgccaagga

SEQ ID NO: 1771601 - RNA, 19 nt, Homo sapiens
  misc_RNA (1)...(19): siRNA sense strand
agacgcuucuggagcugaa

SEQ ID NO: 1771602 - RNA, 19 nt, Homo sapiens
  misc_RNA (1)...(19): siRNA sense strand
ucagggagaccaggacaga

SEQ ID NO: 1771603 - RNA, 19 nt, Homo sapiens
  misc_RNA (1)...(19): siRNA sense strand
cugaagaaaugggcacagu

SEQ ID NO: 1771604 - RNA, 19 nt, Homo sapiens
  misc_RNA (1)...(19): siRNA sense strand
cgugcuacucuccgaauuu

SEQ ID NO: 1771605 - RNA, 19 nt, Homo sapiens
  misc_RNA (1)...(19): siRNA sense strand
gugcaaggacauccaugga

SEQ ID NO: 1771606 - RNA, 19 nt, Homo sapiens
  misc_RNA (1)...(19): siRNA sense strand
ccgacuugcuugcugucaa

SEQ ID NO: 1771607 - RNA, 19 nt, Homo sapiens
  misc_RNA (1)...(19): siRNA sense strand
gcuagucucagugcaagga

SEQ ID NO: 1771608 - RNA, 19 nt, Homo sapiens
  misc_RNA (1)...(19): siRNA sense strand
ggaaacugcuggagaugaa

SEQ ID NO: 1771609 - RNA, 19 nt, Homo sapiens
  misc_RNA (1)...(19): siRNA sense strand
gaaagaagaagaccaagga

SEQ ID NO: 1771610 - RNA, 19 nt, Homo sapiens
  misc_RNA (1)...(19): siRNA sense strand
ggacagagacguauaugug

SEQ ID NO: 1771611 - RNA, 19 nt, Homo sapiens
  misc_RNA (1)...(19): siRNA sense strand
gcaauaaauucuagacaag

SEQ ID NO: 1771612 - RNA, 19 nt, Homo sapiens
  misc_RNA (1)...(19): siRNA sense strand
gaauggacgucucaucguu

SEQ ID NO: 1771613 - RNA, 19 nt, Homo sapiens
  misc_RNA (1)...(19): siRNA sense strand
caaugacucuguugugauu

SEQ ID NO: 1771614 - RNA, 19 nt, Homo sapiens
  misc_RNA (1)...(19): siRNA sense strand
gcuaauacuugcccaacuu

SEQ ID NO: 1771615 - RNA, 19 nt, Homo sapiens
  misc_RNA (1)...(19): siRNA sense strand
ggaagcagaacccauagaa

SEQ ID NO: 1771616 - RNA, 19 nt, Homo sapiens
  misc_RNA (1)...(19): siRNA sense strand
ugaagaaugcuaauacuug

SEQ ID NO: 1771617 - RNA, 19 nt, Homo sapiens
  misc_RNA (1)...(19): siRNA sense strand
gaagcgaacucgggaagca

SEQ ID NO: 1771618 - RNA, 19 nt, Homo sapiens
  misc_RNA (1)...(19): siRNA sense strand
acucagagaucgugcagaa

SEQ ID NO: 1771619 - RNA, 19 nt, Homo sapiens
  misc_RNA (1)...(19): siRNA sense strand
ggacggauacucagagauc

SEQ ID NO: 1771620 - RNA, 19 nt, Homo sapiens
  misc_RNA (1)...(19): siRNA sense strand
ccauagaacucguggaaac

SEQ ID NO: 1771621 - RNA, 19 nt, Homo sapiens
  misc_RNA (1)...(19): siRNA sense strand
gaagaagaccaaggaggaa

SEQ ID NO: 1771622 - RNA, 19 nt, Homo sapiens
  misc_RNA (1)...(19): siRNA sense strand
gacagagacguauauguga

SEQ ID NO: 1771623 - RNA, 19 nt, Homo sapiens
  misc_RNA (1)...(19): siRNA sense strand
ucagagaucgugcagaaug

SEQ ID NO: 1771624 - RNA, 19 nt, Homo sapiens
  misc_RNA (1)...(19): siRNA sense strand
ucucaucguuuccacagaa

SEQ ID NO: 1771625 - RNA, 19 nt, Homo sapiens
  misc_RNA (1)...(19): siRNA sense strand
gcagugacgaugaggaguu

SEQ ID NO: 1771626 - RNA, 19 nt, Homo sapiens
  misc_RNA (1)...(19): siRNA sense strand
gacgaaagaagaagaccaa

SEQ ID NO: 1771627 - RNA, 19 nt, Homo sapiens
  misc_RNA (1)...(19): siRNA sense strand
cguggaaacugcuggagau

SEQ ID NO: 1771628 - RNA, 19 nt, Homo sapiens
  misc_RNA (1)...(19): siRNA sense strand
gaaauuguggaccucacuu

SEQ ID NO: 1771629 - RNA, 19 nt, Homo sapiens
  misc_RNA (1)...(19): siRNA sense strand
ccagaaacgccagggauga

SEQ ID NO: 1771630 - RNA, 19 nt, Homo sapiens
  misc_RNA (1)...(19): siRNA sense strand
guggagcaauaaauucuag

SEQ ID NO: 1771631 - RNA, 19 nt, Homo sapiens
  misc_RNA (1)...(19): siRNA sense strand
gcgucgugguggagcaaua

SEQ ID NO: 1771632 - RNA, 19 nt, Homo sapiens
  misc_RNA (1)...(19): siRNA sense strand
cuuggaagcagaacccaua

SEQ ID NO: 1771633 - RNA, 19 nt, Homo sapiens
  misc_RNA (1)...(19): siRNA sense strand
ugugauuguugacgaaaga

SEQ ID NO: 1771634 - RNA, 19 nt, Homo sapiens
  misc_RNA (1)...(19): siRNA sense strand
ugguugaucugacucacaa

SEQ ID NO: 1771635 - RNA, 19 nt, Homo sapiens
  misc_RNA (1)...(19): siRNA sense strand
gccagugccuccgugauuc

SEQ ID NO: 1771636 - RNA, 19 nt, Homo sapiens
  misc_RNA (1)...(19): siRNA sense strand
gagcaauaaauucuagaca

SEQ ID NO: 1771637 - RNA, 19 nt, Homo sapiens
  misc_RNA (1)...(19): siRNA sense strand
agaaugcggccaugucuuc

SEQ ID NO: 1771638 - RNA, 19 nt, Homo sapiens
  misc_RNA (1)...(19): siRNA sense strand
gcagaauggacgucucauc

SEQ ID NO: 1771639 - RNA, 19 nt, Homo sapiens
  misc_RNA (1)...(19): siRNA sense strand
ggugagcagugacgaugag

SEQ ID NO: 1771640 - RNA, 19 nt, Homo sapiens
  misc_RNA (1)...(19): siRNA sense strand
gcuguguggugagcaguga

SEQ ID NO: 1771641 - RNA, 19 nt, Homo sapiens
  misc_RNA (1)...(19): siRNA sense strand
gaaacugcuggagaugaaa

SEQ ID NO: 1771642 - RNA, 19 nt, Homo sapiens
  misc_RNA (1)...(19): siRNA sense strand
gauuguugacgaaagaaga

SEQ ID NO: 1771643 - RNA, 19 nt, Homo sapiens
  misc_RNA (1)...(19): siRNA sense strand
aauacuugcccaacuugua

SEQ ID NO: 1771644 - RNA, 19 nt, Homo sapiens
  misc_RNA (1)...(19): siRNA sense strand
cagagaucgugcagaaugg

SEQ ID NO: 1771645 - RNA, 19 nt, Homo sapiens
  misc_RNA (1)...(19): siRNA sense strand
ccagggacagagacguaua

SEQ ID NO: 1771646 - RNA, 19 nt, Homo sapiens
  misc_RNA (1)...(19): siRNA sense strand
agaccaaggaggaaugcua

SEQ ID NO: 1771647 - RNA, 19 nt, Homo sapiens
  misc_RNA (1)...(19): siRNA sense strand
uagagccuguggugguuga

SEQ ID NO: 1771648 - RNA, 19 nt, Homo sapiens
  misc_RNA (1)...(19): siRNA sense strand
cgugguggagcaauaaauu

SEQ ID NO: 1771649 - RNA, 19 nt, Homo sapiens
  misc_RNA (1)...(19): siRNA sense strand
cagugacgaugaggaguug

SEQ ID NO: 1771650 - RNA, 19 nt, Homo sapiens
  misc_RNA (1)...(19): siRNA sense strand
aagcagaacccauagaacu

SEQ ID NO: 1771651 - RNA, 19 nt, Homo sapiens
  misc_RNA (1)...(19): siRNA sense strand
gguggagcaauaaauucua

SEQ ID NO: 1771652 - RNA, 19 nt, Homo sapiens
  misc_RNA (1)...(19): siRNA sense strand
gcggccaugucuucuguag

SEQ ID NO: 1771653 - RNA, 19 nt, Homo sapiens
  misc_RNA (1)...(19): siRNA sense strand
gaagcagaacccauagaac

SEQ ID NO: 1771654 - RNA, 19 nt, Homo sapiens
  misc_RNA (1)...(19): siRNA sense strand
uugcccaacuuguaggaaa

SEQ ID NO: 1771655 - RNA, 19 nt, Homo sapiens
  misc_RNA (1)...(19): siRNA sense strand
gcauggacggauacucaga

SEQ ID NO: 1771656 - RNA, 19 nt, Homo sapiens
  misc_RNA (1)...(19): siRNA sense strand
guaccaccccauuuauaua

SEQ ID NO: 1771657 - RNA, 19 nt, Homo sapiens
  misc_RNA (1)...(19): siRNA sense strand
ccugaagaaugcuaauacu

SEQ ID NO: 1771658 - RNA, 19 nt, Homo sapiens
  misc_RNA (1)...(19): siRNA sense strand
cuacccauacucccagaaa

SEQ ID NO: 1771659 - RNA, 19 nt, Homo sapiens
  misc_RNA (1)...(19): siRNA sense strand
cgagaucuccuuggaagca

SEQ ID NO: 1771660 - RNA, 19 nt, Homo sapiens
  misc_RNA (1)...(19): siRNA sense strand
ugacucacaaugacucugu

SEQ ID NO: 1771661 - RNA, 19 nt, Homo sapiens
  misc_RNA (1)...(19): siRNA sense strand
cugcauggacggauacuca

SEQ ID NO: 1771662 - RNA, 19 nt, Homo sapiens
  misc_RNA (1)...(19): siRNA sense strand
ccaaggaggaaugcuagga

SEQ ID NO: 1771663 - RNA, 19 nt, Homo sapiens
  misc_RNA (1)...(19): siRNA sense strand
acucuguugugauuguuga

SEQ ID NO: 1771664 - RNA, 19 nt, Homo sapiens
  misc_RNA (1)...(19): siRNA sense strand
gugcagaauggacgucuca

SEQ ID NO: 1771665 - RNA, 19 nt, Homo sapiens
  misc_RNA (1)...(19): siRNA sense strand
gaaccagacugacucaaac

SEQ ID NO: 1771666 - RNA, 19 nt, Homo sapiens
  misc_RNA (1)...(19): siRNA sense strand
uuaacaagauggccaagga

SEQ ID NO: 1771667 - RNA, 19 nt, Homo sapiens
  misc_RNA (1)...(19): siRNA sense strand
gaugaccuaugccaagagu

SEQ ID NO: 1771668 - RNA, 19 nt, Homo sapiens
  misc_RNA (1)...(19): siRNA sense strand
gacaucguccacauccuua

SEQ ID NO: 1771669 - RNA, 19 nt, Homo sapiens
  misc_RNA (1)...(19): siRNA sense strand
gaaaagugcaagcaauuug

SEQ ID NO: 1771670 - RNA, 19 nt, Homo sapiens
  misc_RNA (1)...(19): siRNA sense strand
guccagcccucuccagugu

SEQ ID NO: 1771671 - RNA, 19 nt, Homo sapiens
  misc_RNA (1)...(19): siRNA sense strand
guccacauccuuaacaaga

SEQ ID NO: 1771672 - RNA, 19 nt, Homo sapiens
  misc_RNA (1)...(19): siRNA sense strand
ccagcccucuccaguguau

SEQ ID NO: 1771673 - RNA, 19 nt, Homo sapiens
  misc_RNA (1)...(19): siRNA sense strand
gagcagcaauuccccauuc

SEQ ID NO: 1771674 - RNA, 19 nt, Homo sapiens
  misc_RNA (1)...(19): siRNA sense strand
ccugaguucuggugccaaa

SEQ ID NO: 1771675 - RNA, 19 nt, Homo sapiens
  misc_RNA (1)...(19): siRNA sense strand
gggagccgaugaccuaugc

SEQ ID NO: 1771676 - RNA, 19 nt, Homo sapiens
  misc_RNA (1)...(19): siRNA sense strand
agaaccagacugacucaaa

SEQ ID NO: 1771677 - RNA, 19 nt, Homo sapiens
  misc_RNA (1)...(19): siRNA sense strand
ccgaugaccuaugccaaga

SEQ ID NO: 1771678 - RNA, 19 nt, Homo sapiens
  misc_RNA (1)...(19): siRNA sense strand
ugugggagccgaugaccua

SEQ ID NO: 1771679 - RNA, 19 nt, Homo sapiens
  misc_RNA (1)...(19): siRNA sense strand
ccaagagugugaggacauc

SEQ ID NO: 1771680 - RNA, 19 nt, Homo sapiens
  misc_RNA (1)...(19): siRNA sense strand
ggaaaagugcaagcaauuu

SEQ ID NO: 1771681 - RNA, 19 nt, Homo sapiens
  misc_RNA (1)...(19): siRNA sense strand
gcggauccaagccaugauu

SEQ ID NO: 1771682 - RNA, 19 nt, Homo sapiens
  misc_RNA (1)...(19): siRNA sense strand
ugaccuaugccaagagugu

SEQ ID NO: 1771683 - RNA, 19 nt, Homo sapiens
  misc_RNA (1)...(19): siRNA sense strand
caccugggccugugcaaau

SEQ ID NO: 1771684 - RNA, 19 nt, Homo sapiens
  misc_RNA (1)...(19): siRNA sense strand
ugacucaaacggcaucugu

SEQ ID NO: 1771685 - RNA, 19 nt, Homo sapiens
  misc_RNA (1)...(19): siRNA sense strand
cugcagggcucugaucaag

SEQ ID NO: 1771686 - RNA, 19 nt, Homo sapiens
  misc_RNA (1)...(19): siRNA sense strand
gcaacguccuccccuugaa

SEQ ID NO: 1771687 - RNA, 19 nt, Homo sapiens
  misc_RNA (1)...(19): siRNA sense strand
ccacagccccgaccuuuga

SEQ ID NO: 1771688 - RNA, 19 nt, Homo sapiens
  misc_RNA (1)...(19): siRNA sense strand
ggccauaccacaggcaaug

SEQ ID NO: 1771689 - RNA, 19 nt, Homo sapiens
  misc_RNA (1)...(19): siRNA sense strand
cagcagcgagcaggccaua

SEQ ID NO: 1771690 - RNA, 19 nt, Homo sapiens
  misc_RNA (1)...(19): siRNA sense strand
gagcaggagccagggaugu

SEQ ID NO: 1771691 - RNA, 19 nt, Homo sapiens
  misc_RNA (1)...(19): siRNA sense strand
gggaaaagugcaagcaauu

SEQ ID NO: 1771692 - RNA, 19 nt, Homo sapiens
  misc_RNA (1)...(19): siRNA sense strand
acucaaacggcaucuguau

SEQ ID NO: 1771693 - RNA, 19 nt, Homo sapiens
  misc_RNA (1)...(19): siRNA sense strand
gcaggagccagggauguca

SEQ ID NO: 1771694 - RNA, 19 nt, Homo sapiens
  misc_RNA (1)...(19): siRNA sense strand
gacucaaacggcaucugua

SEQ ID NO: 1771695 - RNA, 19 nt, Homo sapiens
  misc_RNA (1)...(19): siRNA sense strand
gaaccagacugacucaaac

SEQ ID NO: 1771696 - RNA, 19 nt, Homo sapiens
  misc_RNA (1)...(19): siRNA sense strand
uuaacaagauggccaagga

SEQ ID NO: 1771697 - RNA, 19 nt, Homo sapiens
  misc_RNA (1)...(19): siRNA sense strand
gaugaccuaugccaagagu

SEQ ID NO: 1771698 - RNA, 19 nt, Homo sapiens
  misc_RNA (1)...(19): siRNA sense strand
gacaucguccacauccuua

SEQ ID NO: 1771699 - RNA, 19 nt, Homo sapiens
  misc_RNA (1)...(19): siRNA sense strand
gaaaagugcaagcaauuug

SEQ ID NO: 1771700 - RNA, 19 nt, Homo sapiens
  misc_RNA (1)...(19): siRNA sense strand
guccagcccucuccagugu

SEQ ID NO: 1771701 - RNA, 19 nt, Homo sapiens
  misc_RNA (1)...(19): siRNA sense strand
guccacauccuuaacaaga

SEQ ID NO: 1771702 - RNA, 19 nt, Homo sapiens
  misc_RNA (1)...(19): siRNA sense strand
ccagcccucuccaguguau

SEQ ID NO: 1771703 - RNA, 19 nt, Homo sapiens
  misc_RNA (1)...(19): siRNA sense strand
gagcagcaauuccccauuc

SEQ ID NO: 1771704 - RNA, 19 nt, Homo sapiens
  misc_RNA (1)...(19): siRNA sense strand
ccugaguucuggugccaaa

SEQ ID NO: 1771705 - RNA, 19 nt, Homo sapiens
  misc_RNA (1)...(19): siRNA sense strand
gggagccgaugaccuaugc

SEQ ID NO: 1771706 - RNA, 19 nt, Homo sapiens
  misc_RNA (1)...(19): siRNA sense strand
agaaccagacugacucaaa

SEQ ID NO: 1771707 - RNA, 19 nt, Homo sapiens
  misc_RNA (1)...(19): siRNA sense strand
ccgaugaccuaugccaaga

SEQ ID NO: 1771708 - RNA, 19 nt, Homo sapiens
  misc_RNA (1)...(19): siRNA sense strand
ugugggagccgaugaccua

SEQ ID NO: 1771709 - RNA, 19 nt, Homo sapiens
  misc_RNA (1)...(19): siRNA sense strand
ccaagagugugaggacauc

SEQ ID NO: 1771710 - RNA, 19 nt, Homo sapiens
  misc_RNA (1)...(19): siRNA sense strand
ggaaaagugcaagcaauuu

SEQ ID NO: 1771711 - RNA, 19 nt, Homo sapiens
  misc_RNA (1)...(19): siRNA sense strand
gcggauccaagccaugauu

SEQ ID NO: 1771712 - RNA, 19 nt, Homo sapiens
  misc_RNA (1)...(19): siRNA sense strand
ugaccuaugccaagagugu

SEQ ID NO: 1771713 - RNA, 19 nt, Homo sapiens
  misc_RNA (1)...(19): siRNA sense strand
caccugggccugugcaaau

SEQ ID NO: 1771714 - RNA, 19 nt, Homo sapiens
  misc_RNA (1)...(19): siRNA sense strand
ugacucaaacggcaucugu

SEQ ID NO: 1771715 - RNA, 19 nt, Homo sapiens
  misc_RNA (1)...(19): siRNA sense strand
cugcagggcucugaucaag

SEQ ID NO: 1771716 - RNA, 19 nt, Homo sapiens
  misc_RNA (1)...(19): siRNA sense strand
gcaacguccuccccuugaa

SEQ ID NO: 1771717 - RNA, 19 nt, Homo sapiens
  misc_RNA (1)...(19): siRNA sense strand
ccacagccccgaccuuuga

SEQ ID NO: 1771718 - RNA, 19 nt, Homo sapiens
  misc_RNA (1)...(19): siRNA sense strand
ggccauaccacaggcaaug

SEQ ID NO: 1771719 - RNA, 19 nt, Homo sapiens
  misc_RNA (1)...(19): siRNA sense strand
cagcagcgagcaggccaua

SEQ ID NO: 1771720 - RNA, 19 nt, Homo sapiens
  misc_RNA (1)...(19): siRNA sense strand
gagcaggagccagggaugu

SEQ ID NO: 1771721 - RNA, 19 nt, Homo sapiens
  misc_RNA (1)...(19): siRNA sense strand
gggaaaagugcaagcaauu

SEQ ID NO: 1771722 - RNA, 19 nt, Homo sapiens
  misc_RNA (1)...(19): siRNA sense strand
acucaaacggcaucuguau

SEQ ID NO: 1771723 - RNA, 19 nt, Homo sapiens
  misc_RNA (1)...(19): siRNA sense strand
gcaggagccagggauguca

SEQ ID NO: 1771724 - RNA, 19 nt, Homo sapiens
  misc_RNA (1)...(19): siRNA sense strand
gacucaaacggcaucugua

SEQ ID NO: 1771725 - RNA, 19 nt, Homo sapiens
  misc_RNA (1)...(19): siRNA sense strand
gaagaaaccuuaccucaag

SEQ ID NO: 1771726 - RNA, 19 nt, Homo sapiens
  misc_RNA (1)...(19): siRNA sense strand
gagaagaggccuauuauca

SEQ ID NO: 1771727 - RNA, 19 nt, Homo sapiens
  misc_RNA (1)...(19): siRNA sense strand
gaagaggccuauuaucagu

SEQ ID NO: 1771728 - RNA, 19 nt, Homo sapiens
  misc_RNA (1)...(19): siRNA sense strand
gaaauaacaucagaagaac

SEQ ID NO: 1771729 - RNA, 19 nt, Homo sapiens
  misc_RNA (1)...(19): siRNA sense strand
gcaagagcgucuccacaga

SEQ ID NO: 1771730 - RNA, 19 nt, Homo sapiens
  misc_RNA (1)...(19): siRNA sense strand
gaugaagauuaucggcuua

SEQ ID NO: 1771731 - RNA, 19 nt, Homo sapiens
  misc_RNA (1)...(19): siRNA sense strand
gaagauuaucggcuuauga

SEQ ID NO: 1771732 - RNA, 19 nt, Homo sapiens
  misc_RNA (1)...(19): siRNA sense strand
acagagaagaggccuauua

SEQ ID NO: 1771733 - RNA, 19 nt, Homo sapiens
  misc_RNA (1)...(19): siRNA sense strand
ugagagauggaacgaauua

SEQ ID NO: 1771734 - RNA, 19 nt, Homo sapiens
  misc_RNA (1)...(19): siRNA sense strand
gagagaccauaaucuuuua

SEQ ID NO: 1771735 - RNA, 19 nt, Homo sapiens
  misc_RNA (1)...(19): siRNA sense strand
ucagaagucccuagagaaa

SEQ ID NO: 1771736 - RNA, 19 nt, Homo sapiens
  misc_RNA (1)...(19): siRNA sense strand
ggaaaugcaacucgaagug

SEQ ID NO: 1771737 - RNA, 19 nt, Homo sapiens
  misc_RNA (1)...(19): siRNA sense strand
ggagaaauaacaucagaag

SEQ ID NO: 1771738 - RNA, 19 nt, Homo sapiens
  misc_RNA (1)...(19): siRNA sense strand
gcgguuagauggcgucaag

SEQ ID NO: 1771739 - RNA, 19 nt, Homo sapiens
  misc_RNA (1)...(19): siRNA sense strand
uagaaugguugaacaccuu

SEQ ID NO: 1771740 - RNA, 19 nt, Homo sapiens
  misc_RNA (1)...(19): siRNA sense strand
agaggccuauuaucaguuu

SEQ ID NO: 1771741 - RNA, 19 nt, Homo sapiens
  misc_RNA (1)...(19): siRNA sense strand
acucagaagucccuagaga

SEQ ID NO: 1771742 - RNA, 19 nt, Homo sapiens
  misc_RNA (1)...(19): siRNA sense strand
ugaagaaaccuuaccucaa

SEQ ID NO: 1771743 - RNA, 19 nt, Homo sapiens
  misc_RNA (1)...(19): siRNA sense strand
cagccugacuugagagaug

SEQ ID NO: 1771744 - RNA, 19 nt, Homo sapiens
  misc_RNA (1)...(19): siRNA sense strand
ugaacucaaugaugaagau

SEQ ID NO: 1771745 - RNA, 19 nt, Homo sapiens
  misc_RNA (1)...(19): siRNA sense strand
cagagaagaggccuauuau

SEQ ID NO: 1771746 - RNA, 19 nt, Homo sapiens
  misc_RNA (1)...(19): siRNA sense strand
agaagucccuagagaaagu

SEQ ID NO: 1771747 - RNA, 19 nt, Homo sapiens
  misc_RNA (1)...(19): siRNA sense strand
gaucagaugguggcaguga

SEQ ID NO: 1771748 - RNA, 19 nt, Homo sapiens
  misc_RNA (1)...(19): siRNA sense strand
cuagagaaaguucacauga

SEQ ID NO: 1771749 - RNA, 19 nt, Homo sapiens
  misc_RNA (1)...(19): siRNA sense strand
gaauuacagagacucagaa

SEQ ID NO: 1771750 - RNA, 19 nt, Homo sapiens
  misc_RNA (1)...(19): siRNA sense strand
cuugagagauggaacgaau

SEQ ID NO: 1771751 - RNA, 19 nt, Homo sapiens
  misc_RNA (1)...(19): siRNA sense strand
gaugguggcagugaagaaa

SEQ ID NO: 1771752 - RNA, 19 nt, Homo sapiens
  misc_RNA (1)...(19): siRNA sense strand
gagaaauaacaucagaaga

SEQ ID NO: 1771753 - RNA, 19 nt, Homo sapiens
  misc_RNA (1)...(19): siRNA sense strand
gaacugcaacagcgguuag

SEQ ID NO: 1771754 - RNA, 19 nt, Homo sapiens
  misc_RNA (1)...(19): siRNA sense strand
aggaacaacuagcaucuca

SEQ ID NO: 1771755 - RNA, 19 nt, Homo sapiens
  misc_RNA (1)...(19): siRNA sense strand
ggaacgaauuacagagacu

SEQ ID NO: 1771756 - RNA, 19 nt, Homo sapiens
  misc_RNA (1)...(19): siRNA sense strand
ccacagagaagaggccuau

SEQ ID NO: 1771757 - RNA, 19 nt, Homo sapiens
  misc_RNA (1)...(19): siRNA sense strand
gcaacucgaaguggacaaa

SEQ ID NO: 1771758 - RNA, 19 nt, Homo sapiens
  misc_RNA (1)...(19): siRNA sense strand
gaacucaaugaugaagauu

SEQ ID NO: 1771759 - RNA, 19 nt, Homo sapiens
  misc_RNA (1)...(19): siRNA sense strand
cuggagaaauaacaucaga

SEQ ID NO: 1771760 - RNA, 19 nt, Homo sapiens
  misc_RNA (1)...(19): siRNA sense strand
cgaauuacagagacucaga

SEQ ID NO: 1771761 - RNA, 19 nt, Homo sapiens
  misc_RNA (1)...(19): siRNA sense strand
ggccuauuaucaguuuauu

SEQ ID NO: 1771762 - RNA, 19 nt, Homo sapiens
  misc_RNA (1)...(19): siRNA sense strand
uagauggcgucaaggaaca

SEQ ID NO: 1771763 - RNA, 19 nt, Homo sapiens
  misc_RNA (1)...(19): siRNA sense strand
auuaucggcuuaugagaga

SEQ ID NO: 1771764 - RNA, 19 nt, Homo sapiens
  misc_RNA (1)...(19): siRNA sense strand
aaccuuaccucaagaccau

SEQ ID NO: 1771765 - RNA, 19 nt, Homo sapiens
  misc_RNA (1)...(19): siRNA sense strand
ucaagaccauaaucaucau

SEQ ID NO: 1771766 - RNA, 19 nt, Homo sapiens
  misc_RNA (1)...(19): siRNA sense strand
caaggaacaacuagcaucu

SEQ ID NO: 1771767 - RNA, 19 nt, Homo sapiens
  misc_RNA (1)...(19): siRNA sense strand
uggcagugaagaaaccuua

SEQ ID NO: 1771768 - RNA, 19 nt, Homo sapiens
  misc_RNA (1)...(19): siRNA sense strand
aagaaaccuuaccucaaga

SEQ ID NO: 1771769 - RNA, 19 nt, Homo sapiens
  misc_RNA (1)...(19): siRNA sense strand
ugaagauuaucggcuuaug

SEQ ID NO: 1771770 - RNA, 19 nt, Homo sapiens
  misc_RNA (1)...(19): siRNA sense strand
gagauggaacgaauuacag

SEQ ID NO: 1771771 - RNA, 19 nt, Homo sapiens
  misc_RNA (1)...(19): siRNA sense strand
ugagagaccauaaucuuuu

SEQ ID NO: 1771772 - RNA, 19 nt, Homo sapiens
  misc_RNA (1)...(19): siRNA sense strand
ggacaaaaugggaaccaaa

SEQ ID NO: 1771773 - RNA, 19 nt, Homo sapiens
  misc_RNA (1)...(19): siRNA sense strand
aauaacaucagaagaacug

SEQ ID NO: 1771774 - RNA, 19 nt, Homo sapiens
  misc_RNA (1)...(19): siRNA sense strand
gagaagauggcagcaagag

SEQ ID NO: 1771775 - RNA, 19 nt, Homo sapiens
  misc_RNA (1)...(19): siRNA sense strand
gaggccuauuaucaguuua

SEQ ID NO: 1771776 - RNA, 19 nt, Homo sapiens
  misc_RNA (1)...(19): siRNA sense strand
cuucuagaaugguugaaca

SEQ ID NO: 1771777 - RNA, 19 nt, Homo sapiens
  misc_RNA (1)...(19): siRNA sense strand
aggcaccccuggagaaaua

SEQ ID NO: 1771778 - RNA, 19 nt, Homo sapiens
  misc_RNA (1)...(19): siRNA sense strand
gguuagauggcgucaagga

SEQ ID NO: 1771779 - RNA, 19 nt, Homo sapiens
  misc_RNA (1)...(19): siRNA sense strand
ccucaagaccauaaucauc

SEQ ID NO: 1771780 - RNA, 19 nt, Homo sapiens
  misc_RNA (1)...(19): siRNA sense strand
cucaagaccauaaucauca

SEQ ID NO: 1771781 - RNA, 19 nt, Homo sapiens
  misc_RNA (1)...(19): siRNA sense strand
agaagaggccuauuaucag

SEQ ID NO: 1771782 - RNA, 19 nt, Homo sapiens
  misc_RNA (1)...(19): siRNA sense strand
caucagaagaacugcaaca

SEQ ID NO: 1771783 - RNA, 19 nt, Homo sapiens
  misc_RNA (1)...(19): siRNA sense strand
agagauggaacgaauuaca

SEQ ID NO: 1771784 - RNA, 19 nt, Homo sapiens
  misc_RNA (1)...(19): siRNA sense strand
guuagauggcgucaaggaa

SEQ ID NO: 1771785 - RNA, 19 nt, Homo sapiens
  misc_RNA (1)...(19): siRNA sense strand
gaagaaaccuuaccucaag

SEQ ID NO: 1771786 - RNA, 19 nt, Homo sapiens
  misc_RNA (1)...(19): siRNA sense strand
gagaagaggccuauuauca

SEQ ID NO: 1771787 - RNA, 19 nt, Homo sapiens
  misc_RNA (1)...(19): siRNA sense strand
gaagaggccuauuaucagu

SEQ ID NO: 1771788 - RNA, 19 nt, Homo sapiens
  misc_RNA (1)...(19): siRNA sense strand
gaaauaacaucagaagaac

SEQ ID NO: 1771789 - RNA, 19 nt, Homo sapiens
  misc_RNA (1)...(19): siRNA sense strand
gcaagagcgucuccacaga

SEQ ID NO: 1771790 - RNA, 19 nt, Homo sapiens
  misc_RNA (1)...(19): siRNA sense strand
gaugaagauuaucggcuua

SEQ ID NO: 1771791 - RNA, 19 nt, Homo sapiens
  misc_RNA (1)...(19): siRNA sense strand
gaagauuaucggcuuauga

SEQ ID NO: 1771792 - RNA, 19 nt, Homo sapiens
  misc_RNA (1)...(19): siRNA sense strand
acagagaagaggccuauua

SEQ ID NO: 1771793 - RNA, 19 nt, Homo sapiens
  misc_RNA (1)...(19): siRNA sense strand
ugagagauggaacgaauua

SEQ ID NO: 1771794 - RNA, 19 nt, Homo sapiens
  misc_RNA (1)...(19): siRNA sense strand
gagagaccauaaucuuuua

SEQ ID NO: 1771795 - RNA, 19 nt, Homo sapiens
  misc_RNA (1)...(19): siRNA sense strand
ucagaagucccuagagaaa

SEQ ID NO: 1771796 - RNA, 19 nt, Homo sapiens
  misc_RNA (1)...(19): siRNA sense strand
ggaaaugcaacucgaagug

SEQ ID NO: 1771797 - RNA, 19 nt, Homo sapiens
  misc_RNA (1)...(19): siRNA sense strand
ggagaaauaacaucagaag

SEQ ID NO: 1771798 - RNA, 19 nt, Homo sapiens
  misc_RNA (1)...(19): siRNA sense strand
gcgguuagauggcgucaag

SEQ ID NO: 1771799 - RNA, 19 nt, Homo sapiens
  misc_RNA (1)...(19): siRNA sense strand
uagaaugguugaacaccuu

SEQ ID NO: 1771800 - RNA, 19 nt, Homo sapiens
  misc_RNA (1)...(19): siRNA sense strand
agaggccuauuaucaguuu

SEQ ID NO: 1771801 - RNA, 19 nt, Homo sapiens
  misc_RNA (1)...(19): siRNA sense strand
acucagaagucccuagaga

SEQ ID NO: 1771802 - RNA, 19 nt, Homo sapiens
  misc_RNA (1)...(19): siRNA sense strand
ugaagaaaccuuaccucaa

SEQ ID NO: 1771803 - RNA, 19 nt, Homo sapiens
  misc_RNA (1)...(19): siRNA sense strand
cagccugacuugagagaug

SEQ ID NO: 1771804 - RNA, 19 nt, Homo sapiens
  misc_RNA (1)...(19): siRNA sense strand
ugaacucaaugaugaagau

SEQ ID NO: 1771805 - RNA, 19 nt, Homo sapiens
  misc_RNA (1)...(19): siRNA sense strand
cagagaagaggccuauuau

SEQ ID NO: 1771806 - RNA, 19 nt, Homo sapiens
  misc_RNA (1)...(19): siRNA sense strand
agaagucccuagagaaagu

SEQ ID NO: 1771807 - RNA, 19 nt, Homo sapiens
  misc_RNA (1)...(19): siRNA sense strand
gaucagaugguggcaguga

SEQ ID NO: 1771808 - RNA, 19 nt, Homo sapiens
  misc_RNA (1)...(19): siRNA sense strand
cuagagaaaguucacauga

SEQ ID NO: 1771809 - RNA, 19 nt, Homo sapiens
  misc_RNA (1)...(19): siRNA sense strand
gaauuacagagacucagaa

SEQ ID NO: 1771810 - RNA, 19 nt, Homo sapiens
  misc_RNA (1)...(19): siRNA sense strand
cuugagagauggaacgaau

SEQ ID NO: 1771811 - RNA, 19 nt, Homo sapiens
  misc_RNA (1)...(19): siRNA sense strand
gaugguggcagugaagaaa

SEQ ID NO: 1771812 - RNA, 19 nt, Homo sapiens
  misc_RNA (1)...(19): siRNA sense strand
gagaaauaacaucagaaga

SEQ ID NO: 1771813 - RNA, 19 nt, Homo sapiens
  misc_RNA (1)...(19): siRNA sense strand
gaacugcaacagcgguuag

SEQ ID NO: 1771814 - RNA, 19 nt, Homo sapiens
  misc_RNA (1)...(19): siRNA sense strand
aggaacaacuagcaucuca

SEQ ID NO: 1771815 - RNA, 19 nt, Homo sapiens
  misc_RNA (1)...(19): siRNA sense strand
ggaacgaauuacagagacu

SEQ ID NO: 1771816 - RNA, 19 nt, Homo sapiens
  misc_RNA (1)...(19): siRNA sense strand
ccacagagaagaggccuau

SEQ ID NO: 1771817 - RNA, 19 nt, Homo sapiens
  misc_RNA (1)...(19): siRNA sense strand
gcaacucgaaguggacaaa

SEQ ID NO: 1771818 - RNA, 19 nt, Homo sapiens
  misc_RNA (1)...(19): siRNA sense strand
gaacucaaugaugaagauu

SEQ ID NO: 1771819 - RNA, 19 nt, Homo sapiens
  misc_RNA (1)...(19): siRNA sense strand
cuggagaaauaacaucaga

SEQ ID NO: 1771820 - RNA, 19 nt, Homo sapiens
  misc_RNA (1)...(19): siRNA sense strand
cgaauuacagagacucaga

SEQ ID NO: 1771821 - RNA, 19 nt, Homo sapiens
  misc_RNA (1)...(19): siRNA sense strand
ggccuauuaucaguuuauu

SEQ ID NO: 1771822 - RNA, 19 nt, Homo sapiens
  misc_RNA (1)...(19): siRNA sense strand
uagauggcgucaaggaaca

SEQ ID NO: 1771823 - RNA, 19 nt, Homo sapiens
  misc_RNA (1)...(19): siRNA sense strand
auuaucggcuuaugagaga

SEQ ID NO: 1771824 - RNA, 19 nt, Homo sapiens
  misc_RNA (1)...(19): siRNA sense strand
aaccuuaccucaagaccau

SEQ ID NO: 1771825 - RNA, 19 nt, Homo sapiens
  misc_RNA (1)...(19): siRNA sense strand
ucaagaccauaaucaucau

SEQ ID NO: 1771826 - RNA, 19 nt, Homo sapiens
  misc_RNA (1)...(19): siRNA sense strand
caaggaacaacuagcaucu

SEQ ID NO: 1771827 - RNA, 19 nt, Homo sapiens
  misc_RNA (1)...(19): siRNA sense strand
uggcagugaagaaaccuua

SEQ ID NO: 1771828 - RNA, 19 nt, Homo sapiens
  misc_RNA (1)...(19): siRNA sense strand
aagaaaccuuaccucaaga

SEQ ID NO: 1771829 - RNA, 19 nt, Homo sapiens
  misc_RNA (1)...(19): siRNA sense strand
ugaagauuaucggcuuaug

SEQ ID NO: 1771830 - RNA, 19 nt, Homo sapiens
  misc_RNA (1)...(19): siRNA sense strand
gagauggaacgaauuacag

SEQ ID NO: 1771831 - RNA, 19 nt, Homo sapiens
  misc_RNA (1)...(19): siRNA sense strand
ugagagaccauaaucuuuu

SEQ ID NO: 1771832 - RNA, 19 nt, Homo sapiens
  misc_RNA (1)...(19): siRNA sense strand
ggacaaaaugggaaccaaa

SEQ ID NO: 1771833 - RNA, 19 nt, Homo sapiens
  misc_RNA (1)...(19): siRNA sense strand
aauaacaucagaagaacug

SEQ ID NO: 1771834 - RNA, 19 nt, Homo sapiens
  misc_RNA (1)...(19): siRNA sense strand
gagaagauggcagcaagag

SEQ ID NO: 1771835 - RNA, 19 nt, Homo sapiens
  misc_RNA (1)...(19): siRNA sense strand
gaggccuauuaucaguuua

SEQ ID NO: 1771836 - RNA, 19 nt, Homo sapiens
  misc_RNA (1)...(19): siRNA sense strand
cuucuagaaugguugaaca

SEQ ID NO: 1771837 - RNA, 19 nt, Homo sapiens
  misc_RNA (1)...(19): siRNA sense strand
aggcaccccuggagaaaua

SEQ ID NO: 1771838 - RNA, 19 nt, Homo sapiens
  misc_RNA (1)...(19): siRNA sense strand
gguuagauggcgucaagga

SEQ ID NO: 1771839 - RNA, 19 nt, Homo sapiens
  misc_RNA (1)...(19): siRNA sense strand
ccucaagaccauaaucauc

SEQ ID NO: 1771840 - RNA, 19 nt, Homo sapiens
  misc_RNA (1)...(19): siRNA sense strand
cucaagaccauaaucauca

SEQ ID NO: 1771841 - RNA, 19 nt, Homo sapiens
  misc_RNA (1)...(19): siRNA sense strand
agaagaggccuauuaucag

SEQ ID NO: 1771842 - RNA, 19 nt, Homo sapiens
  misc_RNA (1)...(19): siRNA sense strand
caucagaagaacugcaaca

SEQ ID NO: 1771843 - RNA, 19 nt, Homo sapiens
  misc_RNA (1)...(19): siRNA sense strand
agagauggaacgaauuaca

SEQ ID NO: 1771844 - RNA, 19 nt, Homo sapiens
  misc_RNA (1)...(19): siRNA sense strand
guuagauggcgucaaggaa

SEQ ID NO: 1771845 - RNA, 19 nt, Homo sapiens
  misc_RNA (1)...(19): siRNA sense strand
gaagaaaccuuaccucaag

SEQ ID NO: 1771846 - RNA, 19 nt, Homo sapiens
  misc_RNA (1)...(19): siRNA sense strand
gagaagaggccuauuauca

SEQ ID NO: 1771847 - RNA, 19 nt, Homo sapiens
  misc_RNA (1)...(19): siRNA sense strand
gaagaggccuauuaucagu

SEQ ID NO: 1771848 - RNA, 19 nt, Homo sapiens
  misc_RNA (1)...(19): siRNA sense strand
gaaauaacaucagaagaac

SEQ ID NO: 1771849 - RNA, 19 nt, Homo sapiens
  misc_RNA (1)...(19): siRNA sense strand
gcaagagcgucuccacaga

SEQ ID NO: 1771850 - RNA, 19 nt, Homo sapiens
  misc_RNA (1)...(19): siRNA sense strand
gaugaagauuaucggcuua

SEQ ID NO: 1771851 - RNA, 19 nt, Homo sapiens
  misc_RNA (1)...(19): siRNA sense strand
gaagauuaucggcuuauga

SEQ ID NO: 1771852 - RNA, 19 nt, Homo sapiens
  misc_RNA (1)...(19): siRNA sense strand
acagagaagaggccuauua

SEQ ID NO: 1771853 - RNA, 19 nt, Homo sapiens
  misc_RNA (1)...(19): siRNA sense strand
ugagagauggaacgaauua

SEQ ID NO: 1771854 - RNA, 19 nt, Homo sapiens
  misc_RNA (1)...(19): siRNA sense strand
gagagaccauaaucuuuua

SEQ ID NO: 1771855 - RNA, 19 nt, Homo sapiens
  misc_RNA (1)...(19): siRNA sense strand
ucagaagucccuagagaaa

SEQ ID NO: 1771856 - RNA, 19 nt, Homo sapiens
  misc_RNA (1)...(19): siRNA sense strand
ggaaaugcaacucgaagug

SEQ ID NO: 1771857 - RNA, 19 nt, Homo sapiens
  misc_RNA (1)...(19): siRNA sense strand
ggagaaauaacaucagaag

SEQ ID NO: 1771858 - RNA, 19 nt, Homo sapiens
  misc_RNA (1)...(19): siRNA sense strand
gcgguuagauggcgucaag

SEQ ID NO: 1771859 - RNA, 19 nt, Homo sapiens
  misc_RNA (1)...(19): siRNA sense strand
uagaaugguugaacaccuu

SEQ ID NO: 1771860 - RNA, 19 nt, Homo sapiens
  misc_RNA (1)...(19): siRNA sense strand
agaggccuauuaucaguuu

SEQ ID NO: 1771861 - RNA, 19 nt, Homo sapiens
  misc_RNA (1)...(19): siRNA sense strand
acucagaagucccuagaga

SEQ ID NO: 1771862 - RNA, 19 nt, Homo sapiens
  misc_RNA (1)...(19): siRNA sense strand
ugaagaaaccuuaccucaa

SEQ ID NO: 1771863 - RNA, 19 nt, Homo sapiens
  misc_RNA (1)...(19): siRNA sense strand
cagccugacuugagagaug

SEQ ID NO: 1771864 - RNA, 19 nt, Homo sapiens
  misc_RNA (1)...(19): siRNA sense strand
ugaacucaaugaugaagau

SEQ ID NO: 1771865 - RNA, 19 nt, Homo sapiens
  misc_RNA (1)...(19): siRNA sense strand
cagagaagaggccuauuau

SEQ ID NO: 1771866 - RNA, 19 nt, Homo sapiens
  misc_RNA (1)...(19): siRNA sense strand
agaagucccuagagaaagu

SEQ ID NO: 1771867 - RNA, 19 nt, Homo sapiens
  misc_RNA (1)...(19): siRNA sense strand
gaucagaugguggcaguga

SEQ ID NO: 1771868 - RNA, 19 nt, Homo sapiens
  misc_RNA (1)...(19): siRNA sense strand
cuagagaaaguucacauga

SEQ ID NO: 1771869 - RNA, 19 nt, Homo sapiens
  misc_RNA (1)...(19): siRNA sense strand
gaauuacagagacucagaa

SEQ ID NO: 1771870 - RNA, 19 nt, Homo sapiens
  misc_RNA (1)...(19): siRNA sense strand
cuugagagauggaacgaau

SEQ ID NO: 1771871 - RNA, 19 nt, Homo sapiens
  misc_RNA (1)...(19): siRNA sense strand
gaugguggcagugaagaaa

SEQ ID NO: 1771872 - RNA, 19 nt, Homo sapiens
  misc_RNA (1)...(19): siRNA sense strand
gagaaauaacaucagaaga

SEQ ID NO: 1771873 - RNA, 19 nt, Homo sapiens
  misc_RNA (1)...(19): siRNA sense strand
gaacugcaacagcgguuag

SEQ ID NO: 1771874 - RNA, 19 nt, Homo sapiens
  misc_RNA (1)...(19): siRNA sense strand
aggaacaacuagcaucuca

SEQ ID NO: 1771875 - RNA, 19 nt, Homo sapiens
  misc_RNA (1)...(19): siRNA sense strand
ggaacgaauuacagagacu

SEQ ID NO: 1771876 - RNA, 19 nt, Homo sapiens
  misc_RNA (1)...(19): siRNA sense strand
ccacagagaagaggccuau

SEQ ID NO: 1771877 - RNA, 19 nt, Homo sapiens
  misc_RNA (1)...(19): siRNA sense strand
gcaacucgaaguggacaaa

SEQ ID NO: 1771878 - RNA, 19 nt, Homo sapiens
  misc_RNA (1)...(19): siRNA sense strand
gaacucaaugaugaagauu

SEQ ID NO: 1771879 - RNA, 19 nt, Homo sapiens
  misc_RNA (1)...(19): siRNA sense strand
cuggagaaauaacaucaga

SEQ ID NO: 1771880 - RNA, 19 nt, Homo sapiens
  misc_RNA (1)...(19): siRNA sense strand
cgaauuacagagacucaga

SEQ ID NO: 1771881 - RNA, 19 nt, Homo sapiens
  misc_RNA (1)...(19): siRNA sense strand
ggccuauuaucaguuuauu

SEQ ID NO: 1771882 - RNA, 19 nt, Homo sapiens
  misc_RNA (1)...(19): siRNA sense strand
uagauggcgucaaggaaca

SEQ ID NO: 1771883 - RNA, 19 nt, Homo sapiens
  misc_RNA (1)...(19): siRNA sense strand
auuaucggcuuaugagaga

SEQ ID NO: 1771884 - RNA, 19 nt, Homo sapiens
  misc_RNA (1)...(19): siRNA sense strand
aaccuuaccucaagaccau

SEQ ID NO: 1771885 - RNA, 19 nt, Homo sapiens
  misc_RNA (1)...(19): siRNA sense strand
ucaagaccauaaucaucau

SEQ ID NO: 1771886 - RNA, 19 nt, Homo sapiens
  misc_RNA (1)...(19): siRNA sense strand
caaggaacaacuagcaucu

SEQ ID NO: 1771887 - RNA, 19 nt, Homo sapiens
  misc_RNA (1)...(19): siRNA sense strand
uggcagugaagaaaccuua

SEQ ID NO: 1771888 - RNA, 19 nt, Homo sapiens
  misc_RNA (1)...(19): siRNA sense strand
aagaaaccuuaccucaaga

SEQ ID NO: 1771889 - RNA, 19 nt, Homo sapiens
  misc_RNA (1)...(19): siRNA sense strand
ugaagauuaucggcuuaug

SEQ ID NO: 1771890 - RNA, 19 nt, Homo sapiens
  misc_RNA (1)...(19): siRNA sense strand
gagauggaacgaauuacag

SEQ ID NO: 1771891 - RNA, 19 nt, Homo sapiens
  misc_RNA (1)...(19): siRNA sense strand
ugagagaccauaaucuuuu

SEQ ID NO: 1771892 - RNA, 19 nt, Homo sapiens
  misc_RNA (1)...(19): siRNA sense strand
ggacaaaaugggaaccaaa

SEQ ID NO: 1771893 - RNA, 19 nt, Homo sapiens
  misc_RNA (1)...(19): siRNA sense strand
aauaacaucagaagaacug

SEQ ID NO: 1771894 - RNA, 19 nt, Homo sapiens
  misc_RNA (1)...(19): siRNA sense strand
gagaagauggcagcaagag

SEQ ID NO: 1771895 - RNA, 19 nt, Homo sapiens
  misc_RNA (1)...(19): siRNA sense strand
gaggccuauuaucaguuua

SEQ ID NO: 1771896 - RNA, 19 nt, Homo sapiens
  misc_RNA (1)...(19): siRNA sense strand
cuucuagaaugguugaaca

SEQ ID NO: 1771897 - RNA, 19 nt, Homo sapiens
  misc_RNA (1)...(19): siRNA sense strand
aggcaccccuggagaaaua

SEQ ID NO: 1771898 - RNA, 19 nt, Homo sapiens
  misc_RNA (1)...(19): siRNA sense strand
gguuagauggcgucaagga

SEQ ID NO: 1771899 - RNA, 19 nt, Homo sapiens
  misc_RNA (1)...(19): siRNA sense strand
ccucaagaccauaaucauc

SEQ ID NO: 1771900 - RNA, 19 nt, Homo sapiens
  misc_RNA (1)...(19): siRNA sense strand
cucaagaccauaaucauca

SEQ ID NO: 1771901 - RNA, 19 nt, Homo sapiens
  misc_RNA (1)...(19): siRNA sense strand
agaagaggccuauuaucag

SEQ ID NO: 1771902 - RNA, 19 nt, Homo sapiens
  misc_RNA (1)...(19): siRNA sense strand
caucagaagaacugcaaca

SEQ ID NO: 1771903 - RNA, 19 nt, Homo sapiens
  misc_RNA (1)...(19): siRNA sense strand
agagauggaacgaauuaca

SEQ ID NO: 1771904 - RNA, 19 nt, Homo sapiens
  misc_RNA (1)...(19): siRNA sense strand
guuagauggcgucaaggaa

SEQ ID NO: 1771905 - RNA, 19 nt, Homo sapiens
  misc_RNA (1)...(19): siRNA sense strand
gaagaaaccuuaccucaag

SEQ ID NO: 1771906 - RNA, 19 nt, Homo sapiens
  misc_RNA (1)...(19): siRNA sense strand
gagaagaggccuauuauca

SEQ ID NO: 1771907 - RNA, 19 nt, Homo sapiens
  misc_RNA (1)...(19): siRNA sense strand
gaagaggccuauuaucagu

SEQ ID NO: 1771908 - RNA, 19 nt, Homo sapiens
  misc_RNA (1)...(19): siRNA sense strand
gaaauaacaucagaagaac

SEQ ID NO: 1771909 - RNA, 19 nt, Homo sapiens
  misc_RNA (1)...(19): siRNA sense strand
gcaagagcgucuccacaga

SEQ ID NO: 1771910 - RNA, 19 nt, Homo sapiens
  misc_RNA (1)...(19): siRNA sense strand
gaugaagauuaucggcuua

SEQ ID NO: 1771911 - RNA, 19 nt, Homo sapiens
  misc_RNA (1)...(19): siRNA sense strand
gaagauuaucggcuuauga

SEQ ID NO: 1771912 - RNA, 19 nt, Homo sapiens
  misc_RNA (1)...(19): siRNA sense strand
acagagaagaggccuauua

SEQ ID NO: 1771913 - RNA, 19 nt, Homo sapiens
  misc_RNA (1)...(19): siRNA sense strand
ugagagauggaacgaauua

SEQ ID NO: 1771914 - RNA, 19 nt, Homo sapiens
  misc_RNA (1)...(19): siRNA sense strand
gagagaccauaaucuuuua

SEQ ID NO: 1771915 - RNA, 19 nt, Homo sapiens
  misc_RNA (1)...(19): siRNA sense strand
ucagaagucccuagagaaa

SEQ ID NO: 1771916 - RNA, 19 nt, Homo sapiens
  misc_RNA (1)...(19): siRNA sense strand
ggaaaugcaacucgaagug

SEQ ID NO: 1771917 - RNA, 19 nt, Homo sapiens
  misc_RNA (1)...(19): siRNA sense strand
ggagaaauaacaucagaag

SEQ ID NO: 1771918 - RNA, 19 nt, Homo sapiens
  misc_RNA (1)...(19): siRNA sense strand
gcgguuagauggcgucaag

SEQ ID NO: 1771919 - RNA, 19 nt, Homo sapiens
  misc_RNA (1)...(19): siRNA sense strand
uagaaugguugaacaccuu

SEQ ID NO: 1771920 - RNA, 19 nt, Homo sapiens
  misc_RNA (1)...(19): siRNA sense strand
agaggccuauuaucaguuu

SEQ ID NO: 1771921 - RNA, 19 nt, Homo sapiens
  misc_RNA (1)...(19): siRNA sense strand
acucagaagucccuagaga

SEQ ID NO: 1771922 - RNA, 19 nt, Homo sapiens
  misc_RNA (1)...(19): siRNA sense strand
ugaagaaaccuuaccucaa

SEQ ID NO: 1771923 - RNA, 19 nt, Homo sapiens
  misc_RNA (1)...(19): siRNA sense strand
cagccugacuugagagaug

SEQ ID NO: 1771924 - RNA, 19 nt, Homo sapiens
  misc_RNA (1)...(19): siRNA sense strand
ugaacucaaugaugaagau

SEQ ID NO: 1771925 - RNA, 19 nt, Homo sapiens
  misc_RNA (1)...(19): siRNA sense strand
cagagaagaggccuauuau

SEQ ID NO: 1771926 - RNA, 19 nt, Homo sapiens
  misc_RNA (1)...(19): siRNA sense strand
agaagucccuagagaaagu

SEQ ID NO: 1771927 - RNA, 19 nt, Homo sapiens
  misc_RNA (1)...(19): siRNA sense strand
gaucagaugguggcaguga

SEQ ID NO: 1771928 - RNA, 19 nt, Homo sapiens
  misc_RNA (1)...(19): siRNA sense strand
cuagagaaaguucacauga

SEQ ID NO: 1771929 - RNA, 19 nt, Homo sapiens
  misc_RNA (1)...(19): siRNA sense strand
gaauuacagagacucagaa

SEQ ID NO: 1771930 - RNA, 19 nt, Homo sapiens
  misc_RNA (1)...(19): siRNA sense strand
cuugagagauggaacgaau

SEQ ID NO: 1771931 - RNA, 19 nt, Homo sapiens
  misc_RNA (1)...(19): siRNA sense strand
gaugguggcagugaagaaa

SEQ ID NO: 1771932 - RNA, 19 nt, Homo sapiens
  misc_RNA (1)...(19): siRNA sense strand
gagaaauaacaucagaaga

SEQ ID NO: 1771933 - RNA, 19 nt, Homo sapiens
  misc_RNA (1)...(19): siRNA sense strand
gaacugcaacagcgguuag

SEQ ID NO: 1771934 - RNA, 19 nt, Homo sapiens
  misc_RNA (1)...(19): siRNA sense strand
aggaacaacuagcaucuca

SEQ ID NO: 1771935 - RNA, 19 nt, Homo sapiens
  misc_RNA (1)...(19): siRNA sense strand
ggaacgaauuacagagacu

SEQ ID NO: 1771936 - RNA, 19 nt, Homo sapiens
  misc_RNA (1)...(19): siRNA sense strand
ccacagagaagaggccuau

SEQ ID NO: 1771937 - RNA, 19 nt, Homo sapiens
  misc_RNA (1)...(19): siRNA sense strand
gcaacucgaaguggacaaa

SEQ ID NO: 1771938 - RNA, 19 nt, Homo sapiens
  misc_RNA (1)...(19): siRNA sense strand
gaacucaaugaugaagauu

SEQ ID NO: 1771939 - RNA, 19 nt, Homo sapiens
  misc_RNA (1)...(19): siRNA sense strand
cuggagaaauaacaucaga

SEQ ID NO: 1771940 - RNA, 19 nt, Homo sapiens
  misc_RNA (1)...(19): siRNA sense strand
cgaauuacagagacucaga

SEQ ID NO: 1771941 - RNA, 19 nt, Homo sapiens
  misc_RNA (1)...(19): siRNA sense strand
ggccuauuaucaguuuauu

SEQ ID NO: 1771942 - RNA, 19 nt, Homo sapiens
  misc_RNA (1)...(19): siRNA sense strand
uagauggcgucaaggaaca

SEQ ID NO: 1771943 - RNA, 19 nt, Homo sapiens
  misc_RNA (1)...(19): siRNA sense strand
auuaucggcuuaugagaga

SEQ ID NO: 1771944 - RNA, 19 nt, Homo sapiens
  misc_RNA (1)...(19): siRNA sense strand
aaccuuaccucaagaccau

SEQ ID NO: 1771945 - RNA, 19 nt, Homo sapiens
  misc_RNA (1)...(19): siRNA sense strand
ucaagaccauaaucaucau

SEQ ID NO: 1771946 - RNA, 19 nt, Homo sapiens
  misc_RNA (1)...(19): siRNA sense strand
caaggaacaacuagcaucu

SEQ ID NO: 1771947 - RNA, 19 nt, Homo sapiens
  misc_RNA (1)...(19): siRNA sense strand
uggcagugaagaaaccuua

SEQ ID NO: 1771948 - RNA, 19 nt, Homo sapiens
  misc_RNA (1)...(19): siRNA sense strand
aagaaaccuuaccucaaga

SEQ ID NO: 1771949 - RNA, 19 nt, Homo sapiens
  misc_RNA (1)...(19): siRNA sense strand
ugaagauuaucggcuuaug

SEQ ID NO: 1771950 - RNA, 19 nt, Homo sapiens
  misc_RNA (1)...(19): siRNA sense strand
gagauggaacgaauuacag

SEQ ID NO: 1771951 - RNA, 19 nt, Homo sapiens
  misc_RNA (1)...(19): siRNA sense strand
ugagagaccauaaucuuuu

SEQ ID NO: 1771952 - RNA, 19 nt, Homo sapiens
  misc_RNA (1)...(19): siRNA sense strand
ggacaaaaugggaaccaaa

SEQ ID NO: 1771953 - RNA, 19 nt, Homo sapiens
  misc_RNA (1)...(19): siRNA sense strand
aauaacaucagaagaacug

SEQ ID NO: 1771954 - RNA, 19 nt, Homo sapiens
  misc_RNA (1)...(19): siRNA sense strand
gagaagauggcagcaagag

SEQ ID NO: 1771955 - RNA, 19 nt, Homo sapiens
  misc_RNA (1)...(19): siRNA sense strand
gaggccuauuaucaguuua

SEQ ID NO: 1771956 - RNA, 19 nt, Homo sapiens
  misc_RNA (1)...(19): siRNA sense strand
cuucuagaaugguugaaca

SEQ ID NO: 1771957 - RNA, 19 nt, Homo sapiens
  misc_RNA (1)...(19): siRNA sense strand
aggcaccccuggagaaaua

SEQ ID NO: 1771958 - RNA, 19 nt, Homo sapiens
  misc_RNA (1)...(19): siRNA sense strand
gguuagauggcgucaagga

SEQ ID NO: 1771959 - RNA, 19 nt, Homo sapiens
  misc_RNA (1)...(19): siRNA sense strand
ccucaagaccauaaucauc

SEQ ID NO: 1771960 - RNA, 19 nt, Homo sapiens
  misc_RNA (1)...(19): siRNA sense strand
cucaagaccauaaucauca

SEQ ID NO: 1771961 - RNA, 19 nt, Homo sapiens
  misc_RNA (1)...(19): siRNA sense strand
agaagaggccuauuaucag

SEQ ID NO: 1771962 - RNA, 19 nt, Homo sapiens
  misc_RNA (1)...(19): siRNA sense strand
caucagaagaacugcaaca

SEQ ID NO: 1771963 - RNA, 19 nt, Homo sapiens
  misc_RNA (1)...(19): siRNA sense strand
agagauggaacgaauuaca

SEQ ID NO: 1771964 - RNA, 19 nt, Homo sapiens
  misc_RNA (1)...(19): siRNA sense strand
guuagauggcgucaaggaa

SEQ ID NO: 1771965 - RNA, 19 nt, Homo sapiens
  misc_RNA (1)...(19): siRNA sense strand
gaagaaaccuuaccucaag

SEQ ID NO: 1771966 - RNA, 19 nt, Homo sapiens
  misc_RNA (1)...(19): siRNA sense strand
gagaagaggccuauuauca

SEQ ID NO: 1771967 - RNA, 19 nt, Homo sapiens
  misc_RNA (1)...(19): siRNA sense strand
gaagaggccuauuaucagu

SEQ ID NO: 1771968 - RNA, 19 nt, Homo sapiens
  misc_RNA (1)...(19): siRNA sense strand
gaaauaacaucagaagaac

SEQ ID NO: 1771969 - RNA, 19 nt, Homo sapiens
  misc_RNA (1)...(19): siRNA sense strand
gcaagagcgucuccacaga

SEQ ID NO: 1771970 - RNA, 19 nt, Homo sapiens
  misc_RNA (1)...(19): siRNA sense strand
gaugaagauuaucggcuua

SEQ ID NO: 1771971 - RNA, 19 nt, Homo sapiens
  misc_RNA (1)...(19): siRNA sense strand
gaagauuaucggcuuauga

SEQ ID NO: 1771972 - RNA, 19 nt, Homo sapiens
  misc_RNA (1)...(19): siRNA sense strand
acagagaagaggccuauua

SEQ ID NO: 1771973 - RNA, 19 nt, Homo sapiens
  misc_RNA (1)...(19): siRNA sense strand
ugagagauggaacgaauua

SEQ ID NO: 1771974 - RNA, 19 nt, Homo sapiens
  misc_RNA (1)...(19): siRNA sense strand
gagagaccauaaucuuuua

SEQ ID NO: 1771975 - RNA, 19 nt, Homo sapiens
  misc_RNA (1)...(19): siRNA sense strand
ucagaagucccuagagaaa

SEQ ID NO: 1771976 - RNA, 19 nt, Homo sapiens
  misc_RNA (1)...(19): siRNA sense strand
ggaaaugcaacucgaagug

SEQ ID NO: 1771977 - RNA, 19 nt, Homo sapiens
  misc_RNA (1)...(19): siRNA sense strand
ggagaaauaacaucagaag

SEQ ID NO: 1771978 - RNA, 19 nt, Homo sapiens
  misc_RNA (1)...(19): siRNA sense strand
gcgguuagauggcgucaag

SEQ ID NO: 1771979 - RNA, 19 nt, Homo sapiens
  misc_RNA (1)...(19): siRNA sense strand
uagaaugguugaacaccuu

SEQ ID NO: 1771980 - RNA, 19 nt, Homo sapiens
  misc_RNA (1)...(19): siRNA sense strand
agaggccuauuaucaguuu

SEQ ID NO: 1771981 - RNA, 19 nt, Homo sapiens
  misc_RNA (1)...(19): siRNA sense strand
acucagaagucccuagaga

SEQ ID NO: 1771982 - RNA, 19 nt, Homo sapiens
  misc_RNA (1)...(19): siRNA sense strand
ugaagaaaccuuaccucaa

SEQ ID NO: 1771983 - RNA, 19 nt, Homo sapiens
  misc_RNA (1)...(19): siRNA sense strand
cagccugacuugagagaug

SEQ ID NO: 1771984 - RNA, 19 nt, Homo sapiens
  misc_RNA (1)...(19): siRNA sense strand
ugaacucaaugaugaagau

SEQ ID NO: 1771985 - RNA, 19 nt, Homo sapiens
  misc_RNA (1)...(19): siRNA sense strand
cagagaagaggccuauuau

SEQ ID NO: 1771986 - RNA, 19 nt, Homo sapiens
  misc_RNA (1)...(19): siRNA sense strand
agaagucccuagagaaagu

SEQ ID NO: 1771987 - RNA, 19 nt, Homo sapiens
  misc_RNA (1)...(19): siRNA sense strand
gaucagaugguggcaguga

SEQ ID NO: 1771988 - RNA, 19 nt, Homo sapiens
  misc_RNA (1)...(19): siRNA sense strand
cuagagaaaguucacauga

SEQ ID NO: 1771989 - RNA, 19 nt, Homo sapiens
  misc_RNA (1)...(19): siRNA sense strand
gaauuacagagacucagaa

SEQ ID NO: 1771990 - RNA, 19 nt, Homo sapiens
  misc_RNA (1)...(19): siRNA sense strand
cuugagagauggaacgaau

SEQ ID NO: 1771991 - RNA, 19 nt, Homo sapiens
  misc_RNA (1)...(19): siRNA sense strand
gaugguggcagugaagaaa

SEQ ID NO: 1771992 - RNA, 19 nt, Homo sapiens
  misc_RNA (1)...(19): siRNA sense strand
gagaaauaacaucagaaga

SEQ ID NO: 1771993 - RNA, 19 nt, Homo sapiens
  misc_RNA (1)...(19): siRNA sense strand
gaacugcaacagcgguuag

SEQ ID NO: 1771994 - RNA, 19 nt, Homo sapiens
  misc_RNA (1)...(19): siRNA sense strand
aggaacaacuagcaucuca

SEQ ID NO: 1771995 - RNA, 19 nt, Homo sapiens
  misc_RNA (1)...(19): siRNA sense strand
ggaacgaauuacagagacu

SEQ ID NO: 1771996 - RNA, 19 nt, Homo sapiens
  misc_RNA (1)...(19): siRNA sense strand
ccacagagaagaggccuau

SEQ ID NO: 1771997 - RNA, 19 nt, Homo sapiens
  misc_RNA (1)...(19): siRNA sense strand
gcaacucgaaguggacaaa

SEQ ID NO: 1771998 - RNA, 19 nt, Homo sapiens
  misc_RNA (1)...(19): siRNA sense strand
gaacucaaugaugaagauu

SEQ ID NO: 1771999 - RNA, 19 nt, Homo sapiens
  misc_RNA (1)...(19): siRNA sense strand
cuggagaaauaacaucaga

SEQ ID NO: 1772000 - RNA, 19 nt, Homo sapiens
  misc_RNA (1)...(19): siRNA sense strand
cgaauuacagagacucaga

SEQ ID NO: 1772001 - RNA, 19 nt, Homo sapiens
  misc_RNA (1)...(19): siRNA sense strand
ggccuauuaucaguuuauu

SEQ ID NO: 1772002 - RNA, 19 nt, Homo sapiens
  misc_RNA (1)...(19): siRNA sense strand
uagauggcgucaaggaaca

SEQ ID NO: 1772003 - RNA, 19 nt, Homo sapiens
  misc_RNA (1)...(19): siRNA sense strand
auuaucggcuuaugagaga

SEQ ID NO: 1772004 - RNA, 19 nt, Homo sapiens
  misc_RNA (1)...(19): siRNA sense strand
aaccuuaccucaagaccau

SEQ ID NO: 1772005 - RNA, 19 nt, Homo sapiens
  misc_RNA (1)...(19): siRNA sense strand
ucaagaccauaaucaucau

SEQ ID NO: 1772006 - RNA, 19 nt, Homo sapiens
  misc_RNA (1)...(19): siRNA sense strand
caaggaacaacuagcaucu

SEQ ID NO: 1772007 - RNA, 19 nt, Homo sapiens
  misc_RNA (1)...(19): siRNA sense strand
uggcagugaagaaaccuua

SEQ ID NO: 1772008 - RNA, 19 nt, Homo sapiens
  misc_RNA (1)...(19): siRNA sense strand
aagaaaccuuaccucaaga

SEQ ID NO: 1772009 - RNA, 19 nt, Homo sapiens
  misc_RNA (1)...(19): siRNA sense strand
ugaagauuaucggcuuaug

SEQ ID NO: 1772010 - RNA, 19 nt, Homo sapiens
  misc_RNA (1)...(19): siRNA sense strand
gagauggaacgaauuacag

SEQ ID NO: 1772011 - RNA, 19 nt, Homo sapiens
  misc_RNA (1)...(19): siRNA sense strand
ugagagaccauaaucuuuu

SEQ ID NO: 1772012 - RNA, 19 nt, Homo sapiens
  misc_RNA (1)...(19): siRNA sense strand
ggacaaaaugggaaccaaa

SEQ ID NO: 1772013 - RNA, 19 nt, Homo sapiens
  misc_RNA (1)...(19): siRNA sense strand
aauaacaucagaagaacug

SEQ ID NO: 1772014 - RNA, 19 nt, Homo sapiens
  misc_RNA (1)...(19): siRNA sense strand
gagaagauggcagcaagag

SEQ ID NO: 1772015 - RNA, 19 nt, Homo sapiens
  misc_RNA (1)...(19): siRNA sense strand
gaggccuauuaucaguuua

SEQ ID NO: 1772016 - RNA, 19 nt, Homo sapiens
  misc_RNA (1)...(19): siRNA sense strand
cuucuagaaugguugaaca

SEQ ID NO: 1772017 - RNA, 19 nt, Homo sapiens
  misc_RNA (1)...(19): siRNA sense strand
aggcaccccuggagaaaua

SEQ ID NO: 1772018 - RNA, 19 nt, Homo sapiens
  misc_RNA (1)...(19): siRNA sense strand
gguuagauggcgucaagga

SEQ ID NO: 1772019 - RNA, 19 nt, Homo sapiens
  misc_RNA (1)...(19): siRNA sense strand
ccucaagaccauaaucauc

SEQ ID NO: 1772020 - RNA, 19 nt, Homo sapiens
  misc_RNA (1)...(19): siRNA sense strand
cucaagaccauaaucauca

SEQ ID NO: 1772021 - RNA, 19 nt, Homo sapiens
  misc_RNA (1)...(19): siRNA sense strand
agaagaggccuauuaucag

SEQ ID NO: 1772022 - RNA, 19 nt, Homo sapiens
  misc_RNA (1)...(19): siRNA sense strand
caucagaagaacugcaaca

SEQ ID NO: 1772023 - RNA, 19 nt, Homo sapiens
  misc_RNA (1)...(19): siRNA sense strand
agagauggaacgaauuaca

SEQ ID NO: 1772024 - RNA, 19 nt, Homo sapiens
  misc_RNA (1)...(19): siRNA sense strand
guuagauggcgucaaggaa

SEQ ID NO: 1772025 - RNA, 19 nt, Homo sapiens
  misc_RNA (1)...(19): siRNA sense strand
gaagaaaccuuaccucaag

SEQ ID NO: 1772026 - RNA, 19 nt, Homo sapiens
  misc_RNA (1)...(19): siRNA sense strand
gagaagaggccuauuauca

SEQ ID NO: 1772027 - RNA, 19 nt, Homo sapiens
  misc_RNA (1)...(19): siRNA sense strand
gaagaggccuauuaucagu

SEQ ID NO: 1772028 - RNA, 19 nt, Homo sapiens
  misc_RNA (1)...(19): siRNA sense strand
gaaauaacaucagaagaac

SEQ ID NO: 1772029 - RNA, 19 nt, Homo sapiens
  misc_RNA (1)...(19): siRNA sense strand
gcaagagcgucuccacaga

SEQ ID NO: 1772030 - RNA, 19 nt, Homo sapiens
  misc_RNA (1)...(19): siRNA sense strand
gaugaagauuaucggcuua

SEQ ID NO: 1772031 - RNA, 19 nt, Homo sapiens
  misc_RNA (1)...(19): siRNA sense strand
gaagauuaucggcuuauga

SEQ ID NO: 1772032 - RNA, 19 nt, Homo sapiens
  misc_RNA (1)...(19): siRNA sense strand
acagagaagaggccuauua

SEQ ID NO: 1772033 - RNA, 19 nt, Homo sapiens
  misc_RNA (1)...(19): siRNA sense strand
ugagagauggaacgaauua

SEQ ID NO: 1772034 - RNA, 19 nt, Homo sapiens
  misc_RNA (1)...(19): siRNA sense strand
gagagaccauaaucuuuua

SEQ ID NO: 1772035 - RNA, 19 nt, Homo sapiens
  misc_RNA (1)...(19): siRNA sense strand
ucagaagucccuagagaaa

SEQ ID NO: 1772036 - RNA, 19 nt, Homo sapiens
  misc_RNA (1)...(19): siRNA sense strand
ggaaaugcaacucgaagug

SEQ ID NO: 1772037 - RNA, 19 nt, Homo sapiens
  misc_RNA (1)...(19): siRNA sense strand
ggagaaauaacaucagaag

SEQ ID NO: 1772038 - RNA, 19 nt, Homo sapiens
  misc_RNA (1)...(19): siRNA sense strand
gcgguuagauggcgucaag

SEQ ID NO: 1772039 - RNA, 19 nt, Homo sapiens
  misc_RNA (1)...(19): siRNA sense strand
uagaaugguugaacaccuu

SEQ ID NO: 1772040 - RNA, 19 nt, Homo sapiens
  misc_RNA (1)...(19): siRNA sense strand
agaggccuauuaucaguuu

SEQ ID NO: 1772041 - RNA, 19 nt, Homo sapiens
  misc_RNA (1)...(19): siRNA sense strand
acucagaagucccuagaga

SEQ ID NO: 1772042 - RNA, 19 nt, Homo sapiens
  misc_RNA (1)...(19): siRNA sense strand
ugaagaaaccuuaccucaa

SEQ ID NO: 1772043 - RNA, 19 nt, Homo sapiens
  misc_RNA (1)...(19): siRNA sense strand
cagccugacuugagagaug

SEQ ID NO: 1772044 - RNA, 19 nt, Homo sapiens
  misc_RNA (1)...(19): siRNA sense strand
ugaacucaaugaugaagau

SEQ ID NO: 1772045 - RNA, 19 nt, Homo sapiens
  misc_RNA (1)...(19): siRNA sense strand
cagagaagaggccuauuau

SEQ ID NO: 1772046 - RNA, 19 nt, Homo sapiens
  misc_RNA (1)...(19): siRNA sense strand
agaagucccuagagaaagu

SEQ ID NO: 1772047 - RNA, 19 nt, Homo sapiens
  misc_RNA (1)...(19): siRNA sense strand
gaucagaugguggcaguga

SEQ ID NO: 1772048 - RNA, 19 nt, Homo sapiens
  misc_RNA (1)...(19): siRNA sense strand
cuagagaaaguucacauga

SEQ ID NO: 1772049 - RNA, 19 nt, Homo sapiens
  misc_RNA (1)...(19): siRNA sense strand
gaauuacagagacucagaa

SEQ ID NO: 1772050 - RNA, 19 nt, Homo sapiens
  misc_RNA (1)...(19): siRNA sense strand
cuugagagauggaacgaau

SEQ ID NO: 1772051 - RNA, 19 nt, Homo sapiens
  misc_RNA (1)...(19): siRNA sense strand
gaugguggcagugaagaaa

SEQ ID NO: 1772052 - RNA, 19 nt, Homo sapiens
  misc_RNA (1)...(19): siRNA sense strand
gagaaauaacaucagaaga

SEQ ID NO: 1772053 - RNA, 19 nt, Homo sapiens
  misc_RNA (1)...(19): siRNA sense strand
gaacugcaacagcgguuag

SEQ ID NO: 1772054 - RNA, 19 nt, Homo sapiens
  misc_RNA (1)...(19): siRNA sense strand
aggaacaacuagcaucuca

SEQ ID NO: 1772055 - RNA, 19 nt, Homo sapiens
  misc_RNA (1)...(19): siRNA sense strand
ggaacgaauuacagagacu

SEQ ID NO: 1772056 - RNA, 19 nt, Homo sapiens
  misc_RNA (1)...(19): siRNA sense strand
ccacagagaagaggccuau

SEQ ID NO: 1772057 - RNA, 19 nt, Homo sapiens
  misc_RNA (1)...(19): siRNA sense strand
gcaacucgaaguggacaaa

SEQ ID NO: 1772058 - RNA, 19 nt, Homo sapiens
  misc_RNA (1)...(19): siRNA sense strand
gaacucaaugaugaagauu

SEQ ID NO: 1772059 - RNA, 19 nt, Homo sapiens
  misc_RNA (1)...(19): siRNA sense strand
cuggagaaauaacaucaga

SEQ ID NO: 1772060 - RNA, 19 nt, Homo sapiens
  misc_RNA (1)...(19): siRNA sense strand
cgaauuacagagacucaga

SEQ ID NO: 1772061 - RNA, 19 nt, Homo sapiens
  misc_RNA (1)...(19): siRNA sense strand
ggccuauuaucaguuuauu

SEQ ID NO: 1772062 - RNA, 19 nt, Homo sapiens
  misc_RNA (1)...(19): siRNA sense strand
uagauggcgucaaggaaca

SEQ ID NO: 1772063 - RNA, 19 nt, Homo sapiens
  misc_RNA (1)...(19): siRNA sense strand
auuaucggcuuaugagaga

SEQ ID NO: 1772064 - RNA, 19 nt, Homo sapiens
  misc_RNA (1)...(19): siRNA sense strand
aaccuuaccucaagaccau

SEQ ID NO: 1772065 - RNA, 19 nt, Homo sapiens
  misc_RNA (1)...(19): siRNA sense strand
ucaagaccauaaucaucau

SEQ ID NO: 1772066 - RNA, 19 nt, Homo sapiens
  misc_RNA (1)...(19): siRNA sense strand
caaggaacaacuagcaucu

SEQ ID NO: 1772067 - RNA, 19 nt, Homo sapiens
  misc_RNA (1)...(19): siRNA sense strand
uggcagugaagaaaccuua

SEQ ID NO: 1772068 - RNA, 19 nt, Homo sapiens
  misc_RNA (1)...(19): siRNA sense strand
aagaaaccuuaccucaaga

SEQ ID NO: 1772069 - RNA, 19 nt, Homo sapiens
  misc_RNA (1)...(19): siRNA sense strand
ugaagauuaucggcuuaug

SEQ ID NO: 1772070 - RNA, 19 nt, Homo sapiens
  misc_RNA (1)...(19): siRNA sense strand
gagauggaacgaauuacag

SEQ ID NO: 1772071 - RNA, 19 nt, Homo sapiens
  misc_RNA (1)...(19): siRNA sense strand
ugagagaccauaaucuuuu

SEQ ID NO: 1772072 - RNA, 19 nt, Homo sapiens
  misc_RNA (1)...(19): siRNA sense strand
ggacaaaaugggaaccaaa

SEQ ID NO: 1772073 - RNA, 19 nt, Homo sapiens
  misc_RNA (1)...(19): siRNA sense strand
aauaacaucagaagaacug

SEQ ID NO: 1772074 - RNA, 19 nt, Homo sapiens
  misc_RNA (1)...(19): siRNA sense strand
gagaagauggcagcaagag

SEQ ID NO: 1772075 - RNA, 19 nt, Homo sapiens
  misc_RNA (1)...(19): siRNA sense strand
gaggccuauuaucaguuua

SEQ ID NO: 1772076 - RNA, 19 nt, Homo sapiens
  misc_RNA (1)...(19): siRNA sense strand
cuucuagaaugguugaaca

SEQ ID NO: 1772077 - RNA, 19 nt, Homo sapiens
  misc_RNA (1)...(19): siRNA sense strand
aggcaccccuggagaaaua

SEQ ID NO: 1772078 - RNA, 19 nt, Homo sapiens
  misc_RNA (1)...(19): siRNA sense strand
gguuagauggcgucaagga

SEQ ID NO: 1772079 - RNA, 19 nt, Homo sapiens
  misc_RNA (1)...(19): siRNA sense strand
ccucaagaccauaaucauc

SEQ ID NO: 1772080 - RNA, 19 nt, Homo sapiens
  misc_RNA (1)...(19): siRNA sense strand
cucaagaccauaaucauca

SEQ ID NO: 1772081 - RNA, 19 nt, Homo sapiens
  misc_RNA (1)...(19): siRNA sense strand
agaagaggccuauuaucag

SEQ ID NO: 1772082 - RNA, 19 nt, Homo sapiens
  misc_RNA (1)...(19): siRNA sense strand
caucagaagaacugcaaca

SEQ ID NO: 1772083 - RNA, 19 nt, Homo sapiens
  misc_RNA (1)...(19): siRNA sense strand
agagauggaacgaauuaca

SEQ ID NO: 1772084 - RNA, 19 nt, Homo sapiens
  misc_RNA (1)...(19): siRNA sense strand
guuagauggcgucaaggaa

SEQ ID NO: 1772085 - RNA, 19 nt, Homo sapiens
  misc_RNA (1)...(19): siRNA sense strand
gaagaaaccuuaccucaag

SEQ ID NO: 1772086 - RNA, 19 nt, Homo sapiens
  misc_RNA (1)...(19): siRNA sense strand
gagaagaggccuauuauca

SEQ ID NO: 1772087 - RNA, 19 nt, Homo sapiens
  misc_RNA (1)...(19): siRNA sense strand
gaagaggccuauuaucagu

SEQ ID NO: 1772088 - RNA, 19 nt, Homo sapiens
  misc_RNA (1)...(19): siRNA sense strand
gaaauaacaucagaagaac

SEQ ID NO: 1772089 - RNA, 19 nt, Homo sapiens
  misc_RNA (1)...(19): siRNA sense strand
gcaagagcgucuccacaga

SEQ ID NO: 1772090 - RNA, 19 nt, Homo sapiens
  misc_RNA (1)...(19): siRNA sense strand
gaugaagauuaucggcuua

SEQ ID NO: 1772091 - RNA, 19 nt, Homo sapiens
  misc_RNA (1)...(19): siRNA sense strand
gaagauuaucggcuuauga

SEQ ID NO: 1772092 - RNA, 19 nt, Homo sapiens
  misc_RNA (1)...(19): siRNA sense strand
acagagaagaggccuauua

SEQ ID NO: 1772093 - RNA, 19 nt, Homo sapiens
  misc_RNA (1)...(19): siRNA sense strand
ugagagauggaacgaauua

SEQ ID NO: 1772094 - RNA, 19 nt, Homo sapiens
  misc_RNA (1)...(19): siRNA sense strand
gagagaccauaaucuuuua

SEQ ID NO: 1772095 - RNA, 19 nt, Homo sapiens
  misc_RNA (1)...(19): siRNA sense strand
ucagaagucccuagagaaa

SEQ ID NO: 1772096 - RNA, 19 nt, Homo sapiens
  misc_RNA (1)...(19): siRNA sense strand
ggaaaugcaacucgaagug

SEQ ID NO: 1772097 - RNA, 19 nt, Homo sapiens
  misc_RNA (1)...(19): siRNA sense strand
ggagaaauaacaucagaag

SEQ ID NO: 1772098 - RNA, 19 nt, Homo sapiens
  misc_RNA (1)...(19): siRNA sense strand
gcgguuagauggcgucaag

SEQ ID NO: 1772099 - RNA, 19 nt, Homo sapiens
  misc_RNA (1)...(19): siRNA sense strand
uagaaugguugaacaccuu

SEQ ID NO: 1772100 - RNA, 19 nt, Homo sapiens
  misc_RNA (1)...(19): siRNA sense strand
agaggccuauuaucaguuu

SEQ ID NO: 1772101 - RNA, 19 nt, Homo sapiens
  misc_RNA (1)...(19): siRNA sense strand
acucagaagucccuagaga

SEQ ID NO: 1772102 - RNA, 19 nt, Homo sapiens
  misc_RNA (1)...(19): siRNA sense strand
ugaagaaaccuuaccucaa

SEQ ID NO: 1772103 - RNA, 19 nt, Homo sapiens
  misc_RNA (1)...(19): siRNA sense strand
cagccugacuugagagaug

SEQ ID NO: 1772104 - RNA, 19 nt, Homo sapiens
  misc_RNA (1)...(19): siRNA sense strand
ugaacucaaugaugaagau

SEQ ID NO: 1772105 - RNA, 19 nt, Homo sapiens
  misc_RNA (1)...(19): siRNA sense strand
cagagaagaggccuauuau

SEQ ID NO: 1772106 - RNA, 19 nt, Homo sapiens
  misc_RNA (1)...(19): siRNA sense strand
agaagucccuagagaaagu

SEQ ID NO: 1772107 - RNA, 19 nt, Homo sapiens
  misc_RNA (1)...(19): siRNA sense strand
gaucagaugguggcaguga

SEQ ID NO: 1772108 - RNA, 19 nt, Homo sapiens
  misc_RNA (1)...(19): siRNA sense strand
cuagagaaaguucacauga

SEQ ID NO: 1772109 - RNA, 19 nt, Homo sapiens
  misc_RNA (1)...(19): siRNA sense strand
gaauuacagagacucagaa

SEQ ID NO: 1772110 - RNA, 19 nt, Homo sapiens
  misc_RNA (1)...(19): siRNA sense strand
cuugagagauggaacgaau

SEQ ID NO: 1772111 - RNA, 19 nt, Homo sapiens
  misc_RNA (1)...(19): siRNA sense strand
gaugguggcagugaagaaa

SEQ ID NO: 1772112 - RNA, 19 nt, Homo sapiens
  misc_RNA (1)...(19): siRNA sense strand
gagaaauaacaucagaaga

SEQ ID NO: 1772113 - RNA, 19 nt, Homo sapiens
  misc_RNA (1)...(19): siRNA sense strand
gaacugcaacagcgguuag

SEQ ID NO: 1772114 - RNA, 19 nt, Homo sapiens
  misc_RNA (1)...(19): siRNA sense strand
aggaacaacuagcaucuca

SEQ ID NO: 1772115 - RNA, 19 nt, Homo sapiens
  misc_RNA (1)...(19): siRNA sense strand
ggaacgaauuacagagacu

SEQ ID NO: 1772116 - RNA, 19 nt, Homo sapiens
  misc_RNA (1)...(19): siRNA sense strand
ccacagagaagaggccuau

SEQ ID NO: 1772117 - RNA, 19 nt, Homo sapiens
  misc_RNA (1)...(19): siRNA sense strand
gcaacucgaaguggacaaa

SEQ ID NO: 1772118 - RNA, 19 nt, Homo sapiens
  misc_RNA (1)...(19): siRNA sense strand
gaacucaaugaugaagauu

SEQ ID NO: 1772119 - RNA, 19 nt, Homo sapiens
  misc_RNA (1)...(19): siRNA sense strand
cuggagaaauaacaucaga

SEQ ID NO: 1772120 - RNA, 19 nt, Homo sapiens
  misc_RNA (1)...(19): siRNA sense strand
cgaauuacagagacucaga

SEQ ID NO: 1772121 - RNA, 19 nt, Homo sapiens
  misc_RNA (1)...(19): siRNA sense strand
ggccuauuaucaguuuauu

SEQ ID NO: 1772122 - RNA, 19 nt, Homo sapiens
  misc_RNA (1)...(19): siRNA sense strand
uagauggcgucaaggaaca

SEQ ID NO: 1772123 - RNA, 19 nt, Homo sapiens
  misc_RNA (1)...(19): siRNA sense strand
auuaucggcuuaugagaga

SEQ ID NO: 1772124 - RNA, 19 nt, Homo sapiens
  misc_RNA (1)...(19): siRNA sense strand
aaccuuaccucaagaccau

SEQ ID NO: 1772125 - RNA, 19 nt, Homo sapiens
  misc_RNA (1)...(19): siRNA sense strand
ucaagaccauaaucaucau

SEQ ID NO: 1772126 - RNA, 19 nt, Homo sapiens
  misc_RNA (1)...(19): siRNA sense strand
caaggaacaacuagcaucu

SEQ ID NO: 1772127 - RNA, 19 nt, Homo sapiens
  misc_RNA (1)...(19): siRNA sense strand
uggcagugaagaaaccuua

SEQ ID NO: 1772128 - RNA, 19 nt, Homo sapiens
  misc_RNA (1)...(19): siRNA sense strand
aagaaaccuuaccucaaga

SEQ ID NO: 1772129 - RNA, 19 nt, Homo sapiens
  misc_RNA (1)...(19): siRNA sense strand
ugaagauuaucggcuuaug

SEQ ID NO: 1772130 - RNA, 19 nt, Homo sapiens
  misc_RNA (1)...(19): siRNA sense strand
gagauggaacgaauuacag

SEQ ID NO: 1772131 - RNA, 19 nt, Homo sapiens
  misc_RNA (1)...(19): siRNA sense strand
ugagagaccauaaucuuuu

SEQ ID NO: 1772132 - RNA, 19 nt, Homo sapiens
  misc_RNA (1)...(19): siRNA sense strand
ggacaaaaugggaaccaaa

SEQ ID NO: 1772133 - RNA, 19 nt, Homo sapiens
  misc_RNA (1)...(19): siRNA sense strand
aauaacaucagaagaacug

SEQ ID NO: 1772134 - RNA, 19 nt, Homo sapiens
  misc_RNA (1)...(19): siRNA sense strand
gagaagauggcagcaagag

SEQ ID NO: 1772135 - RNA, 19 nt, Homo sapiens
  misc_RNA (1)...(19): siRNA sense strand
gaggccuauuaucaguuua

SEQ ID NO: 1772136 - RNA, 19 nt, Homo sapiens
  misc_RNA (1)...(19): siRNA sense strand
cuucuagaaugguugaaca

SEQ ID NO: 1772137 - RNA, 19 nt, Homo sapiens
  misc_RNA (1)...(19): siRNA sense strand
aggcaccccuggagaaaua

SEQ ID NO: 1772138 - RNA, 19 nt, Homo sapiens
  misc_RNA (1)...(19): siRNA sense strand
gguuagauggcgucaagga

SEQ ID NO: 1772139 - RNA, 19 nt, Homo sapiens
  misc_RNA (1)...(19): siRNA sense strand
ccucaagaccauaaucauc

SEQ ID NO: 1772140 - RNA, 19 nt, Homo sapiens
  misc_RNA (1)...(19): siRNA sense strand
cucaagaccauaaucauca

SEQ ID NO: 1772141 - RNA, 19 nt, Homo sapiens
  misc_RNA (1)...(19): siRNA sense strand
agaagaggccuauuaucag

SEQ ID NO: 1772142 - RNA, 19 nt, Homo sapiens
  misc_RNA (1)...(19): siRNA sense strand
caucagaagaacugcaaca

SEQ ID NO: 1772143 - RNA, 19 nt, Homo sapiens
  misc_RNA (1)...(19): siRNA sense strand
agagauggaacgaauuaca

SEQ ID NO: 1772144 - RNA, 19 nt, Homo sapiens
  misc_RNA (1)...(19): siRNA sense strand
guuagauggcgucaaggaa

SEQ ID NO: 1772145 - RNA, 19 nt, Homo sapiens
  misc_RNA (1)...(19): siRNA sense strand
gaagaaaccuuaccucaag

SEQ ID NO: 1772146 - RNA, 19 nt, Homo sapiens
  misc_RNA (1)...(19): siRNA sense strand
gagaagaggccuauuauca

SEQ ID NO: 1772147 - RNA, 19 nt, Homo sapiens
  misc_RNA (1)...(19): siRNA sense strand
gaagaggccuauuaucagu

SEQ ID NO: 1772148 - RNA, 19 nt, Homo sapiens
  misc_RNA (1)...(19): siRNA sense strand
gaaauaacaucagaagaac

SEQ ID NO: 1772149 - RNA, 19 nt, Homo sapiens
  misc_RNA (1)...(19): siRNA sense strand
gcaagagcgucuccacaga

SEQ ID NO: 1772150 - RNA, 19 nt, Homo sapiens
  misc_RNA (1)...(19): siRNA sense strand
gaugaagauuaucggcuua

SEQ ID NO: 1772151 - RNA, 19 nt, Homo sapiens
  misc_RNA (1)...(19): siRNA sense strand
gaagauuaucggcuuauga

SEQ ID NO: 1772152 - RNA, 19 nt, Homo sapiens
  misc_RNA (1)...(19): siRNA sense strand
acagagaagaggccuauua

SEQ ID NO: 1772153 - RNA, 19 nt, Homo sapiens
  misc_RNA (1)...(19): siRNA sense strand
ugagagauggaacgaauua

SEQ ID NO: 1772154 - RNA, 19 nt, Homo sapiens
  misc_RNA (1)...(19): siRNA sense strand
gagagaccauaaucuuuua

SEQ ID NO: 1772155 - RNA, 19 nt, Homo sapiens
  misc_RNA (1)...(19): siRNA sense strand
ucagaagucccuagagaaa

SEQ ID NO: 1772156 - RNA, 19 nt, Homo sapiens
  misc_RNA (1)...(19): siRNA sense strand
ggaaaugcaacucgaagug

SEQ ID NO: 1772157 - RNA, 19 nt, Homo sapiens
  misc_RNA (1)...(19): siRNA sense strand
ggagaaauaacaucagaag

SEQ ID NO: 1772158 - RNA, 19 nt, Homo sapiens
  misc_RNA (1)...(19): siRNA sense strand
gcgguuagauggcgucaag

SEQ ID NO: 1772159 - RNA, 19 nt, Homo sapiens
  misc_RNA (1)...(19): siRNA sense strand
uagaaugguugaacaccuu

SEQ ID NO: 1772160 - RNA, 19 nt, Homo sapiens
  misc_RNA (1)...(19): siRNA sense strand
agaggccuauuaucaguuu

SEQ ID NO: 1772161 - RNA, 19 nt, Homo sapiens
  misc_RNA (1)...(19): siRNA sense strand
acucagaagucccuagaga

SEQ ID NO: 1772162 - RNA, 19 nt, Homo sapiens
  misc_RNA (1)...(19): siRNA sense strand
ugaagaaaccuuaccucaa

SEQ ID NO: 1772163 - RNA, 19 nt, Homo sapiens
  misc_RNA (1)...(19): siRNA sense strand
cagccugacuugagagaug

SEQ ID NO: 1772164 - RNA, 19 nt, Homo sapiens
  misc_RNA (1)...(19): siRNA sense strand
ugaacucaaugaugaagau

SEQ ID NO: 1772165 - RNA, 19 nt, Homo sapiens
  misc_RNA (1)...(19): siRNA sense strand
cagagaagaggccuauuau

SEQ ID NO: 1772166 - RNA, 19 nt, Homo sapiens
  misc_RNA (1)...(19): siRNA sense strand
agaagucccuagagaaagu

SEQ ID NO: 1772167 - RNA, 19 nt, Homo sapiens
  misc_RNA (1)...(19): siRNA sense strand
gaucagaugguggcaguga

SEQ ID NO: 1772168 - RNA, 19 nt, Homo sapiens
  misc_RNA (1)...(19): siRNA sense strand
cuagagaaaguucacauga

SEQ ID NO: 1772169 - RNA, 19 nt, Homo sapiens
  misc_RNA (1)...(19): siRNA sense strand
gaauuacagagacucagaa

SEQ ID NO: 1772170 - RNA, 19 nt, Homo sapiens
  misc_RNA (1)...(19): siRNA sense strand
cuugagagauggaacgaau

SEQ ID NO: 1772171 - RNA, 19 nt, Homo sapiens
  misc_RNA (1)...(19): siRNA sense strand
gaugguggcagugaagaaa

SEQ ID NO: 1772172 - RNA, 19 nt, Homo sapiens
  misc_RNA (1)...(19): siRNA sense strand
gagaaauaacaucagaaga

SEQ ID NO: 1772173 - RNA, 19 nt, Homo sapiens
  misc_RNA (1)...(19): siRNA sense strand
gaacugcaacagcgguuag

SEQ ID NO: 1772174 - RNA, 19 nt, Homo sapiens
  misc_RNA (1)...(19): siRNA sense strand
aggaacaacuagcaucuca

SEQ ID NO: 1772175 - RNA, 19 nt, Homo sapiens
  misc_RNA (1)...(19): siRNA sense strand
ggaacgaauuacagagacu

SEQ ID NO: 1772176 - RNA, 19 nt, Homo sapiens
  misc_RNA (1)...(19): siRNA sense strand
ccacagagaagaggccuau

SEQ ID NO: 1772177 - RNA, 19 nt, Homo sapiens
  misc_RNA (1)...(19): siRNA sense strand
gcaacucgaaguggacaaa

SEQ ID NO: 1772178 - RNA, 19 nt, Homo sapiens
  misc_RNA (1)...(19): siRNA sense strand
gaacucaaugaugaagauu

SEQ ID NO: 1772179 - RNA, 19 nt, Homo sapiens
  misc_RNA (1)...(19): siRNA sense strand
cuggagaaauaacaucaga

SEQ ID NO: 1772180 - RNA, 19 nt, Homo sapiens
  misc_RNA (1)...(19): siRNA sense strand
cgaauuacagagacucaga

SEQ ID NO: 1772181 - RNA, 19 nt, Homo sapiens
  misc_RNA (1)...(19): siRNA sense strand
ggccuauuaucaguuuauu

SEQ ID NO: 1772182 - RNA, 19 nt, Homo sapiens
  misc_RNA (1)...(19): siRNA sense strand
uagauggcgucaaggaaca

SEQ ID NO: 1772183 - RNA, 19 nt, Homo sapiens
  misc_RNA (1)...(19): siRNA sense strand
auuaucggcuuaugagaga

SEQ ID NO: 1772184 - RNA, 19 nt, Homo sapiens
  misc_RNA (1)...(19): siRNA sense strand
aaccuuaccucaagaccau

SEQ ID NO: 1772185 - RNA, 19 nt, Homo sapiens
  misc_RNA (1)...(19): siRNA sense strand
ucaagaccauaaucaucau

SEQ ID NO: 1772186 - RNA, 19 nt, Homo sapiens
  misc_RNA (1)...(19): siRNA sense strand
caaggaacaacuagcaucu

SEQ ID NO: 1772187 - RNA, 19 nt, Homo sapiens
  misc_RNA (1)...(19): siRNA sense strand
uggcagugaagaaaccuua

SEQ ID NO: 1772188 - RNA, 19 nt, Homo sapiens
  misc_RNA (1)...(19): siRNA sense strand
aagaaaccuuaccucaaga

SEQ ID NO: 1772189 - RNA, 19 nt, Homo sapiens
  misc_RNA (1)...(19): siRNA sense strand
ugaagauuaucggcuuaug

SEQ ID NO: 1772190 - RNA, 19 nt, Homo sapiens
  misc_RNA (1)...(19): siRNA sense strand
gagauggaacgaauuacag

SEQ ID NO: 1772191 - RNA, 19 nt, Homo sapiens
  misc_RNA (1)...(19): siRNA sense strand
ugagagaccauaaucuuuu

SEQ ID NO: 1772192 - RNA, 19 nt, Homo sapiens
  misc_RNA (1)...(19): siRNA sense strand
ggacaaaaugggaaccaaa

SEQ ID NO: 1772193 - RNA, 19 nt, Homo sapiens
  misc_RNA (1)...(19): siRNA sense strand
aauaacaucagaagaacug

SEQ ID NO: 1772194 - RNA, 19 nt, Homo sapiens
  misc_RNA (1)...(19): siRNA sense strand
gagaagauggcagcaagag

SEQ ID NO: 1772195 - RNA, 19 nt, Homo sapiens
  misc_RNA (1)...(19): siRNA sense strand
gaggccuauuaucaguuua

SEQ ID NO: 1772196 - RNA, 19 nt, Homo sapiens
  misc_RNA (1)...(19): siRNA sense strand
cuucuagaaugguugaaca

SEQ ID NO: 1772197 - RNA, 19 nt, Homo sapiens
  misc_RNA (1)...(19): siRNA sense strand
aggcaccccuggagaaaua

SEQ ID NO: 1772198 - RNA, 19 nt, Homo sapiens
  misc_RNA (1)...(19): siRNA sense strand
gguuagauggcgucaagga

SEQ ID NO: 1772199 - RNA, 19 nt, Homo sapiens
  misc_RNA (1)...(19): siRNA sense strand
ccucaagaccauaaucauc

SEQ ID NO: 1772200 - RNA, 19 nt, Homo sapiens
  misc_RNA (1)...(19): siRNA sense strand
cucaagaccauaaucauca

SEQ ID NO: 1772201 - RNA, 19 nt, Homo sapiens
  misc_RNA (1)...(19): siRNA sense strand
agaagaggccuauuaucag

SEQ ID NO: 1772202 - RNA, 19 nt, Homo sapiens
  misc_RNA (1)...(19): siRNA sense strand
caucagaagaacugcaaca

SEQ ID NO: 1772203 - RNA, 19 nt, Homo sapiens
  misc_RNA (1)...(19): siRNA sense strand
agagauggaacgaauuaca

SEQ ID NO: 1772204 - RNA, 19 nt, Homo sapiens
  misc_RNA (1)...(19): siRNA sense strand
guuagauggcgucaaggaa

SEQ ID NO: 1772205 - RNA, 19 nt, Homo sapiens
  misc_RNA (1)...(19): siRNA sense strand
gaagaaaccuuaccucaag

SEQ ID NO: 1772206 - RNA, 19 nt, Homo sapiens
  misc_RNA (1)...(19): siRNA sense strand
gagaagaggccuauuauca

SEQ ID NO: 1772207 - RNA, 19 nt, Homo sapiens
  misc_RNA (1)...(19): siRNA sense strand
gaagaggccuauuaucagu

SEQ ID NO: 1772208 - RNA, 19 nt, Homo sapiens
  misc_RNA (1)...(19): siRNA sense strand
gaaauaacaucagaagaac

SEQ ID NO: 1772209 - RNA, 19 nt, Homo sapiens
  misc_RNA (1)...(19): siRNA sense strand
gcaagagcgucuccacaga

SEQ ID NO: 1772210 - RNA, 19 nt, Homo sapiens
  misc_RNA (1)...(19): siRNA sense strand
gaugaagauuaucggcuua

SEQ ID NO: 1772211 - RNA, 19 nt, Homo sapiens
  misc_RNA (1)...(19): siRNA sense strand
gaagauuaucggcuuauga

SEQ ID NO: 1772212 - RNA, 19 nt, Homo sapiens
  misc_RNA (1)...(19): siRNA sense strand
acagagaagaggccuauua

SEQ ID NO: 1772213 - RNA, 19 nt, Homo sapiens
  misc_RNA (1)...(19): siRNA sense strand
ugagagauggaacgaauua

SEQ ID NO: 1772214 - RNA, 19 nt, Homo sapiens
  misc_RNA (1)...(19): siRNA sense strand
gagagaccauaaucuuuua

SEQ ID NO: 1772215 - RNA, 19 nt, Homo sapiens
  misc_RNA (1)...(19): siRNA sense strand
ucagaagucccuagagaaa

SEQ ID NO: 1772216 - RNA, 19 nt, Homo sapiens
  misc_RNA (1)...(19): siRNA sense strand
ggaaaugcaacucgaagug

SEQ ID NO: 1772217 - RNA, 19 nt, Homo sapiens
  misc_RNA (1)...(19): siRNA sense strand
ggagaaauaacaucagaag

SEQ ID NO: 1772218 - RNA, 19 nt, Homo sapiens
  misc_RNA (1)...(19): siRNA sense strand
gcgguuagauggcgucaag

SEQ ID NO: 1772219 - RNA, 19 nt, Homo sapiens
  misc_RNA (1)...(19): siRNA sense strand
uagaaugguugaacaccuu

SEQ ID NO: 1772220 - RNA, 19 nt, Homo sapiens
  misc_RNA (1)...(19): siRNA sense strand
agaggccuauuaucaguuu

SEQ ID NO: 1772221 - RNA, 19 nt, Homo sapiens
  misc_RNA (1)...(19): siRNA sense strand
acucagaagucccuagaga

SEQ ID NO: 1772222 - RNA, 19 nt, Homo sapiens
  misc_RNA (1)...(19): siRNA sense strand
ugaagaaaccuuaccucaa

SEQ ID NO: 1772223 - RNA, 19 nt, Homo sapiens
  misc_RNA (1)...(19): siRNA sense strand
cagccugacuugagagaug

SEQ ID NO: 1772224 - RNA, 19 nt, Homo sapiens
  misc_RNA (1)...(19): siRNA sense strand
ugaacucaaugaugaagau

SEQ ID NO: 1772225 - RNA, 19 nt, Homo sapiens
  misc_RNA (1)...(19): siRNA sense strand
cagagaagaggccuauuau

SEQ ID NO: 1772226 - RNA, 19 nt, Homo sapiens
  misc_RNA (1)...(19): siRNA sense strand
agaagucccuagagaaagu

SEQ ID NO: 1772227 - RNA, 19 nt, Homo sapiens
  misc_RNA (1)...(19): siRNA sense strand
gaucagaugguggcaguga

SEQ ID NO: 1772228 - RNA, 19 nt, Homo sapiens
  misc_RNA (1)...(19): siRNA sense strand
cuagagaaaguucacauga

SEQ ID NO: 1772229 - RNA, 19 nt, Homo sapiens
  misc_RNA (1)...(19): siRNA sense strand
gaauuacagagacucagaa

SEQ ID NO: 1772230 - RNA, 19 nt, Homo sapiens
  misc_RNA (1)...(19): siRNA sense strand
cuugagagauggaacgaau

SEQ ID NO: 1772231 - RNA, 19 nt, Homo sapiens
  misc_RNA (1)...(19): siRNA sense strand
gaugguggcagugaagaaa

SEQ ID NO: 1772232 - RNA, 19 nt, Homo sapiens
  misc_RNA (1)...(19): siRNA sense strand
gagaaauaacaucagaaga

SEQ ID NO: 1772233 - RNA, 19 nt, Homo sapiens
  misc_RNA (1)...(19): siRNA sense strand
gaacugcaacagcgguuag

SEQ ID NO: 1772234 - RNA, 19 nt, Homo sapiens
  misc_RNA (1)...(19): siRNA sense strand
aggaacaacuagcaucuca

SEQ ID NO: 1772235 - RNA, 19 nt, Homo sapiens
  misc_RNA (1)...(19): siRNA sense strand
ggaacgaauuacagagacu

SEQ ID NO: 1772236 - RNA, 19 nt, Homo sapiens
  misc_RNA (1)...(19): siRNA sense strand
ccacagagaagaggccuau

SEQ ID NO: 1772237 - RNA, 19 nt, Homo sapiens
  misc_RNA (1)...(19): siRNA sense strand
gcaacucgaaguggacaaa

SEQ ID NO: 1772238 - RNA, 19 nt, Homo sapiens
  misc_RNA (1)...(19): siRNA sense strand
gaacucaaugaugaagauu

SEQ ID NO: 1772239 - RNA, 19 nt, Homo sapiens
  misc_RNA (1)...(19): siRNA sense strand
cuggagaaauaacaucaga

SEQ ID NO: 1772240 - RNA, 19 nt, Homo sapiens
  misc_RNA (1)...(19): siRNA sense strand
cgaauuacagagacucaga

SEQ ID NO: 1772241 - RNA, 19 nt, Homo sapiens
  misc_RNA (1)...(19): siRNA sense strand
ggccuauuaucaguuuauu

SEQ ID NO: 1772242 - RNA, 19 nt, Homo sapiens
  misc_RNA (1)...(19): siRNA sense strand
uagauggcgucaaggaaca

SEQ ID NO: 1772243 - RNA, 19 nt, Homo sapiens
  misc_RNA (1)...(19): siRNA sense strand
auuaucggcuuaugagaga

SEQ ID NO: 1772244 - RNA, 19 nt, Homo sapiens
  misc_RNA (1)...(19): siRNA sense strand
aaccuuaccucaagaccau

SEQ ID NO: 1772245 - RNA, 19 nt, Homo sapiens
  misc_RNA (1)...(19): siRNA sense strand
ucaagaccauaaucaucau

SEQ ID NO: 1772246 - RNA, 19 nt, Homo sapiens
  misc_RNA (1)...(19): siRNA sense strand
caaggaacaacuagcaucu

SEQ ID NO: 1772247 - RNA, 19 nt, Homo sapiens
  misc_RNA (1)...(19): siRNA sense strand
uggcagugaagaaaccuua

SEQ ID NO: 1772248 - RNA, 19 nt, Homo sapiens
  misc_RNA (1)...(19): siRNA sense strand
aagaaaccuuaccucaaga

SEQ ID NO: 1772249 - RNA, 19 nt, Homo sapiens
  misc_RNA (1)...(19): siRNA sense strand
ugaagauuaucggcuuaug

SEQ ID NO: 1772250 - RNA, 19 nt, Homo sapiens
  misc_RNA (1)...(19): siRNA sense strand
gagauggaacgaauuacag

SEQ ID NO: 1772251 - RNA, 19 nt, Homo sapiens
  misc_RNA (1)...(19): siRNA sense strand
ugagagaccauaaucuuuu

SEQ ID NO: 1772252 - RNA, 19 nt, Homo sapiens
  misc_RNA (1)...(19): siRNA sense strand
ggacaaaaugggaaccaaa

SEQ ID NO: 1772253 - RNA, 19 nt, Homo sapiens
  misc_RNA (1)...(19): siRNA sense strand
aauaacaucagaagaacug

SEQ ID NO: 1772254 - RNA, 19 nt, Homo sapiens
  misc_RNA (1)...(19): siRNA sense strand
gagaagauggcagcaagag

SEQ ID NO: 1772255 - RNA, 19 nt, Homo sapiens
  misc_RNA (1)...(19): siRNA sense strand
gaggccuauuaucaguuua

SEQ ID NO: 1772256 - RNA, 19 nt, Homo sapiens
  misc_RNA (1)...(19): siRNA sense strand
cuucuagaaugguugaaca

SEQ ID NO: 1772257 - RNA, 19 nt, Homo sapiens
  misc_RNA (1)...(19): siRNA sense strand
aggcaccccuggagaaaua

SEQ ID NO: 1772258 - RNA, 19 nt, Homo sapiens
  misc_RNA (1)...(19): siRNA sense strand
gguuagauggcgucaagga

SEQ ID NO: 1772259 - RNA, 19 nt, Homo sapiens
  misc_RNA (1)...(19): siRNA sense strand
ccucaagaccauaaucauc

SEQ ID NO: 1772260 - RNA, 19 nt, Homo sapiens
  misc_RNA (1)...(19): siRNA sense strand
cucaagaccauaaucauca

SEQ ID NO: 1772261 - RNA, 19 nt, Homo sapiens
  misc_RNA (1)...(19): siRNA sense strand
agaagaggccuauuaucag

SEQ ID NO: 1772262 - RNA, 19 nt, Homo sapiens
  misc_RNA (1)...(19): siRNA sense strand
caucagaagaacugcaaca

SEQ ID NO: 1772263 - RNA, 19 nt, Homo sapiens
  misc_RNA (1)...(19): siRNA sense strand
agagauggaacgaauuaca

SEQ ID NO: 1772264 - RNA, 19 nt, Homo sapiens
  misc_RNA (1)...(19): siRNA sense strand
guuagauggcgucaaggaa

SEQ ID NO: 1772265 - RNA, 19 nt, Homo sapiens
  misc_RNA (1)...(19): siRNA sense strand
gaagaaaccuuaccucaag

SEQ ID NO: 1772266 - RNA, 19 nt, Homo sapiens
  misc_RNA (1)...(19): siRNA sense strand
gagaagaggccuauuauca

SEQ ID NO: 1772267 - RNA, 19 nt, Homo sapiens
  misc_RNA (1)...(19): siRNA sense strand
gaagaggccuauuaucagu

SEQ ID NO: 1772268 - RNA, 19 nt, Homo sapiens
  misc_RNA (1)...(19): siRNA sense strand
gaaauaacaucagaagaac

SEQ ID NO: 1772269 - RNA, 19 nt, Homo sapiens
  misc_RNA (1)...(19): siRNA sense strand
gcaagagcgucuccacaga

SEQ ID NO: 1772270 - RNA, 19 nt, Homo sapiens
  misc_RNA (1)...(19): siRNA sense strand
gaugaagauuaucggcuua

SEQ ID NO: 1772271 - RNA, 19 nt, Homo sapiens
  misc_RNA (1)...(19): siRNA sense strand
gaagauuaucggcuuauga

SEQ ID NO: 1772272 - RNA, 19 nt, Homo sapiens
  misc_RNA (1)...(19): siRNA sense strand
acagagaagaggccuauua

SEQ ID NO: 1772273 - RNA, 19 nt, Homo sapiens
  misc_RNA (1)...(19): siRNA sense strand
ugagagauggaacgaauua

SEQ ID NO: 1772274 - RNA, 19 nt, Homo sapiens
  misc_RNA (1)...(19): siRNA sense strand
gagagaccauaaucuuuua

SEQ ID NO: 1772275 - RNA, 19 nt, Homo sapiens
  misc_RNA (1)...(19): siRNA sense strand
ucagaagucccuagagaaa

SEQ ID NO: 1772276 - RNA, 19 nt, Homo sapiens
  misc_RNA (1)...(19): siRNA sense strand
ggaaaugcaacucgaagug

SEQ ID NO: 1772277 - RNA, 19 nt, Homo sapiens
  misc_RNA (1)...(19): siRNA sense strand
ggagaaauaacaucagaag

SEQ ID NO: 1772278 - RNA, 19 nt, Homo sapiens
  misc_RNA (1)...(19): siRNA sense strand
gcgguuagauggcgucaag

SEQ ID NO: 1772279 - RNA, 19 nt, Homo sapiens
  misc_RNA (1)...(19): siRNA sense strand
uagaaugguugaacaccuu

SEQ ID NO: 1772280 - RNA, 19 nt, Homo sapiens
  misc_RNA (1)...(19): siRNA sense strand
agaggccuauuaucaguuu

SEQ ID NO: 1772281 - RNA, 19 nt, Homo sapiens
  misc_RNA (1)...(19): siRNA sense strand
acucagaagucccuagaga

SEQ ID NO: 1772282 - RNA, 19 nt, Homo sapiens
  misc_RNA (1)...(19): siRNA sense strand
ugaagaaaccuuaccucaa

SEQ ID NO: 1772283 - RNA, 19 nt, Homo sapiens
  misc_RNA (1)...(19): siRNA sense strand
cagccugacuugagagaug

SEQ ID NO: 1772284 - RNA, 19 nt, Homo sapiens
  misc_RNA (1)...(19): siRNA sense strand
ugaacucaaugaugaagau

SEQ ID NO: 1772285 - RNA, 19 nt, Homo sapiens
  misc_RNA (1)...(19): siRNA sense strand
cagagaagaggccuauuau

SEQ ID NO: 1772286 - RNA, 19 nt, Homo sapiens
  misc_RNA (1)...(19): siRNA sense strand
agaagucccuagagaaagu

SEQ ID NO: 1772287 - RNA, 19 nt, Homo sapiens
  misc_RNA (1)...(19): siRNA sense strand
gaucagaugguggcaguga

SEQ ID NO: 1772288 - RNA, 19 nt, Homo sapiens
  misc_RNA (1)...(19): siRNA sense strand
cuagagaaaguucacauga

SEQ ID NO: 1772289 - RNA, 19 nt, Homo sapiens
  misc_RNA (1)...(19): siRNA sense strand
gaauuacagagacucagaa

SEQ ID NO: 1772290 - RNA, 19 nt, Homo sapiens
  misc_RNA (1)...(19): siRNA sense strand
cuugagagauggaacgaau

SEQ ID NO: 1772291 - RNA, 19 nt, Homo sapiens
  misc_RNA (1)...(19): siRNA sense strand
gaugguggcagugaagaaa

SEQ ID NO: 1772292 - RNA, 19 nt, Homo sapiens
  misc_RNA (1)...(19): siRNA sense strand
gagaaauaacaucagaaga

SEQ ID NO: 1772293 - RNA, 19 nt, Homo sapiens
  misc_RNA (1)...(19): siRNA sense strand
gaacugcaacagcgguuag

SEQ ID NO: 1772294 - RNA, 19 nt, Homo sapiens
  misc_RNA (1)...(19): siRNA sense strand
aggaacaacuagcaucuca

SEQ ID NO: 1772295 - RNA, 19 nt, Homo sapiens
  misc_RNA (1)...(19): siRNA sense strand
ggaacgaauuacagagacu

SEQ ID NO: 1772296 - RNA, 19 nt, Homo sapiens
  misc_RNA (1)...(19): siRNA sense strand
ccacagagaagaggccuau

SEQ ID NO: 1772297 - RNA, 19 nt, Homo sapiens
  misc_RNA (1)...(19): siRNA sense strand
gcaacucgaaguggacaaa

SEQ ID NO: 1772298 - RNA, 19 nt, Homo sapiens
  misc_RNA (1)...(19): siRNA sense strand
gaacucaaugaugaagauu

SEQ ID NO: 1772299 - RNA, 19 nt, Homo sapiens
  misc_RNA (1)...(19): siRNA sense strand
cuggagaaauaacaucaga

SEQ ID NO: 1772300 - RNA, 19 nt, Homo sapiens
  misc_RNA (1)...(19): siRNA sense strand
cgaauuacagagacucaga

SEQ ID NO: 1772301 - RNA, 19 nt, Homo sapiens
  misc_RNA (1)...(19): siRNA sense strand
ggccuauuaucaguuuauu

SEQ ID NO: 1772302 - RNA, 19 nt, Homo sapiens
  misc_RNA (1)...(19): siRNA sense strand
uagauggcgucaaggaaca

SEQ ID NO: 1772303 - RNA, 19 nt, Homo sapiens
  misc_RNA (1)...(19): siRNA sense strand
auuaucggcuuaugagaga

SEQ ID NO: 1772304 - RNA, 19 nt, Homo sapiens
  misc_RNA (1)...(19): siRNA sense strand
aaccuuaccucaagaccau

SEQ ID NO: 1772305 - RNA, 19 nt, Homo sapiens
  misc_RNA (1)...(19): siRNA sense strand
ucaagaccauaaucaucau

SEQ ID NO: 1772306 - RNA, 19 nt, Homo sapiens
  misc_RNA (1)...(19): siRNA sense strand
caaggaacaacuagcaucu

SEQ ID NO: 1772307 - RNA, 19 nt, Homo sapiens
  misc_RNA (1)...(19): siRNA sense strand
uggcagugaagaaaccuua

SEQ ID NO: 1772308 - RNA, 19 nt, Homo sapiens
  misc_RNA (1)...(19): siRNA sense strand
aagaaaccuuaccucaaga

SEQ ID NO: 1772309 - RNA, 19 nt, Homo sapiens
  misc_RNA (1)...(19): siRNA sense strand
ugaagauuaucggcuuaug

SEQ ID NO: 1772310 - RNA, 19 nt, Homo sapiens
  misc_RNA (1)...(19): siRNA sense strand
gagauggaacgaauuacag

SEQ ID NO: 1772311 - RNA, 19 nt, Homo sapiens
  misc_RNA (1)...(19): siRNA sense strand
ugagagaccauaaucuuuu

SEQ ID NO: 1772312 - RNA, 19 nt, Homo sapiens
  misc_RNA (1)...(19): siRNA sense strand
ggacaaaaugggaaccaaa

SEQ ID NO: 1772313 - RNA, 19 nt, Homo sapiens
  misc_RNA (1)...(19): siRNA sense strand
aauaacaucagaagaacug

SEQ ID NO: 1772314 - RNA, 19 nt, Homo sapiens
  misc_RNA (1)...(19): siRNA sense strand
gagaagauggcagcaagag

SEQ ID NO: 1772315 - RNA, 19 nt, Homo sapiens
  misc_RNA (1)...(19): siRNA sense strand
gaggccuauuaucaguuua

SEQ ID NO: 1772316 - RNA, 19 nt, Homo sapiens
  misc_RNA (1)...(19): siRNA sense strand
cuucuagaaugguugaaca

SEQ ID NO: 1772317 - RNA, 19 nt, Homo sapiens
  misc_RNA (1)...(19): siRNA sense strand
aggcaccccuggagaaaua

SEQ ID NO: 1772318 - RNA, 19 nt, Homo sapiens
  misc_RNA (1)...(19): siRNA sense strand
gguuagauggcgucaagga

SEQ ID NO: 1772319 - RNA, 19 nt, Homo sapiens
  misc_RNA (1)...(19): siRNA sense strand
ccucaagaccauaaucauc

SEQ ID NO: 1772320 - RNA, 19 nt, Homo sapiens
  misc_RNA (1)...(19): siRNA sense strand
cucaagaccauaaucauca

SEQ ID NO: 1772321 - RNA, 19 nt, Homo sapiens
  misc_RNA (1)...(19): siRNA sense strand
agaagaggccuauuaucag

SEQ ID NO: 1772322 - RNA, 19 nt, Homo sapiens
  misc_RNA (1)...(19): siRNA sense strand
caucagaagaacugcaaca

SEQ ID NO: 1772323 - RNA, 19 nt, Homo sapiens
  misc_RNA (1)...(19): siRNA sense strand
agagauggaacgaauuaca

SEQ ID NO: 1772324 - RNA, 19 nt, Homo sapiens
  misc_RNA (1)...(19): siRNA sense strand
guuagauggcgucaaggaa

SEQ ID NO: 1772325 - RNA, 19 nt, Homo sapiens
  misc_RNA (1)...(19): siRNA sense strand
gaagaaaccuuaccucaag

SEQ ID NO: 1772326 - RNA, 19 nt, Homo sapiens
  misc_RNA (1)...(19): siRNA sense strand
gagaagaggccuauuauca

SEQ ID NO: 1772327 - RNA, 19 nt, Homo sapiens
  misc_RNA (1)...(19): siRNA sense strand
gaagaggccuauuaucagu

SEQ ID NO: 1772328 - RNA, 19 nt, Homo sapiens
  misc_RNA (1)...(19): siRNA sense strand
gaaauaacaucagaagaac

SEQ ID NO: 1772329 - RNA, 19 nt, Homo sapiens
  misc_RNA (1)...(19): siRNA sense strand
gcaagagcgucuccacaga

SEQ ID NO: 1772330 - RNA, 19 nt, Homo sapiens
  misc_RNA (1)...(19): siRNA sense strand
gaugaagauuaucggcuua

SEQ ID NO: 1772331 - RNA, 19 nt, Homo sapiens
  misc_RNA (1)...(19): siRNA sense strand
gaagauuaucggcuuauga

SEQ ID NO: 1772332 - RNA, 19 nt, Homo sapiens
  misc_RNA (1)...(19): siRNA sense strand
acagagaagaggccuauua

SEQ ID NO: 1772333 - RNA, 19 nt, Homo sapiens
  misc_RNA (1)...(19): siRNA sense strand
ugagagauggaacgaauua

SEQ ID NO: 1772334 - RNA, 19 nt, Homo sapiens
  misc_RNA (1)...(19): siRNA sense strand
gagagaccauaaucuuuua

SEQ ID NO: 1772335 - RNA, 19 nt, Homo sapiens
  misc_RNA (1)...(19): siRNA sense strand
ucagaagucccuagagaaa

SEQ ID NO: 1772336 - RNA, 19 nt, Homo sapiens
  misc_RNA (1)...(19): siRNA sense strand
ggaaaugcaacucgaagug

SEQ ID NO: 1772337 - RNA, 19 nt, Homo sapiens
  misc_RNA (1)...(19): siRNA sense strand
ggagaaauaacaucagaag

SEQ ID NO: 1772338 - RNA, 19 nt, Homo sapiens
  misc_RNA (1)...(19): siRNA sense strand
gcgguuagauggcgucaag

SEQ ID NO: 1772339 - RNA, 19 nt, Homo sapiens
  misc_RNA (1)...(19): siRNA sense strand
uagaaugguugaacaccuu

SEQ ID NO: 1772340 - RNA, 19 nt, Homo sapiens
  misc_RNA (1)...(19): siRNA sense strand
agaggccuauuaucaguuu

SEQ ID NO: 1772341 - RNA, 19 nt, Homo sapiens
  misc_RNA (1)...(19): siRNA sense strand
acucagaagucccuagaga

SEQ ID NO: 1772342 - RNA, 19 nt, Homo sapiens
  misc_RNA (1)...(19): siRNA sense strand
ugaagaaaccuuaccucaa

SEQ ID NO: 1772343 - RNA, 19 nt, Homo sapiens
  misc_RNA (1)...(19): siRNA sense strand
cagccugacuugagagaug

SEQ ID NO: 1772344 - RNA, 19 nt, Homo sapiens
  misc_RNA (1)...(19): siRNA sense strand
ugaacucaaugaugaagau

SEQ ID NO: 1772345 - RNA, 19 nt, Homo sapiens
  misc_RNA (1)...(19): siRNA sense strand
cagagaagaggccuauuau

SEQ ID NO: 1772346 - RNA, 19 nt, Homo sapiens
  misc_RNA (1)...(19): siRNA sense strand
agaagucccuagagaaagu

SEQ ID NO: 1772347 - RNA, 19 nt, Homo sapiens
  misc_RNA (1)...(19): siRNA sense strand
gaucagaugguggcaguga

SEQ ID NO: 1772348 - RNA, 19 nt, Homo sapiens
  misc_RNA (1)...(19): siRNA sense strand
cuagagaaaguucacauga

SEQ ID NO: 1772349 - RNA, 19 nt, Homo sapiens
  misc_RNA (1)...(19): siRNA sense strand
gaauuacagagacucagaa

SEQ ID NO: 1772350 - RNA, 19 nt, Homo sapiens
  misc_RNA (1)...(19): siRNA sense strand
cuugagagauggaacgaau

SEQ ID NO: 1772351 - RNA, 19 nt, Homo sapiens
  misc_RNA (1)...(19): siRNA sense strand
gaugguggcagugaagaaa

SEQ ID NO: 1772352 - RNA, 19 nt, Homo sapiens
  misc_RNA (1)...(19): siRNA sense strand
gagaaauaacaucagaaga

SEQ ID NO: 1772353 - RNA, 19 nt, Homo sapiens
  misc_RNA (1)...(19): siRNA sense strand
gaacugcaacagcgguuag

SEQ ID NO: 1772354 - RNA, 19 nt, Homo sapiens
  misc_RNA (1)...(19): siRNA sense strand
aggaacaacuagcaucuca

SEQ ID NO: 1772355 - RNA, 19 nt, Homo sapiens
  misc_RNA (1)...(19): siRNA sense strand
ggaacgaauuacagagacu

SEQ ID NO: 1772356 - RNA, 19 nt, Homo sapiens
  misc_RNA (1)...(19): siRNA sense strand
ccacagagaagaggccuau

SEQ ID NO: 1772357 - RNA, 19 nt, Homo sapiens
  misc_RNA (1)...(19): siRNA sense strand
gcaacucgaaguggacaaa

SEQ ID NO: 1772358 - RNA, 19 nt, Homo sapiens
  misc_RNA (1)...(19): siRNA sense strand
gaacucaaugaugaagauu

SEQ ID NO: 1772359 - RNA, 19 nt, Homo sapiens
  misc_RNA (1)...(19): siRNA sense strand
cuggagaaauaacaucaga

SEQ ID NO: 1772360 - RNA, 19 nt, Homo sapiens
  misc_RNA (1)...(19): siRNA sense strand
cgaauuacagagacucaga

SEQ ID NO: 1772361 - RNA, 19 nt, Homo sapiens
  misc_RNA (1)...(19): siRNA sense strand
ggccuauuaucaguuuauu

SEQ ID NO: 1772362 - RNA, 19 nt, Homo sapiens
  misc_RNA (1)...(19): siRNA sense strand
uagauggcgucaaggaaca

SEQ ID NO: 1772363 - RNA, 19 nt, Homo sapiens
  misc_RNA (1)...(19): siRNA sense strand
auuaucggcuuaugagaga

SEQ ID NO: 1772364 - RNA, 19 nt, Homo sapiens
  misc_RNA (1)...(19): siRNA sense strand
aaccuuaccucaagaccau

SEQ ID NO: 1772365 - RNA, 19 nt, Homo sapiens
  misc_RNA (1)...(19): siRNA sense strand
ucaagaccauaaucaucau

SEQ ID NO: 1772366 - RNA, 19 nt, Homo sapiens
  misc_RNA (1)...(19): siRNA sense strand
caaggaacaacuagcaucu

SEQ ID NO: 1772367 - RNA, 19 nt, Homo sapiens
  misc_RNA (1)...(19): siRNA sense strand
uggcagugaagaaaccuua

SEQ ID NO: 1772368 - RNA, 19 nt, Homo sapiens
  misc_RNA (1)...(19): siRNA sense strand
aagaaaccuuaccucaaga

SEQ ID NO: 1772369 - RNA, 19 nt, Homo sapiens
  misc_RNA (1)...(19): siRNA sense strand
ugaagauuaucggcuuaug

SEQ ID NO: 1772370 - RNA, 19 nt, Homo sapiens
  misc_RNA (1)...(19): siRNA sense strand
gagauggaacgaauuacag

SEQ ID NO: 1772371 - RNA, 19 nt, Homo sapiens
  misc_RNA (1)...(19): siRNA sense strand
ugagagaccauaaucuuuu

SEQ ID NO: 1772372 - RNA, 19 nt, Homo sapiens
  misc_RNA (1)...(19): siRNA sense strand
ggacaaaaugggaaccaaa

SEQ ID NO: 1772373 - RNA, 19 nt, Homo sapiens
  misc_RNA (1)...(19): siRNA sense strand
aauaacaucagaagaacug

SEQ ID NO: 1772374 - RNA, 19 nt, Homo sapiens
  misc_RNA (1)...(19): siRNA sense strand
gagaagauggcagcaagag

SEQ ID NO: 1772375 - RNA, 19 nt, Homo sapiens
  misc_RNA (1)...(19): siRNA sense strand
gaggccuauuaucaguuua

SEQ ID NO: 1772376 - RNA, 19 nt, Homo sapiens
  misc_RNA (1)...(19): siRNA sense strand
cuucuagaaugguugaaca

SEQ ID NO: 1772377 - RNA, 19 nt, Homo sapiens
  misc_RNA (1)...(19): siRNA sense strand
aggcaccccuggagaaaua

SEQ ID NO: 1772378 - RNA, 19 nt, Homo sapiens
  misc_RNA (1)...(19): siRNA sense strand
gguuagauggcgucaagga

SEQ ID NO: 1772379 - RNA, 19 nt, Homo sapiens
  misc_RNA (1)...(19): siRNA sense strand
ccucaagaccauaaucauc

SEQ ID NO: 1772380 - RNA, 19 nt, Homo sapiens
  misc_RNA (1)...(19): siRNA sense strand
cucaagaccauaaucauca

SEQ ID NO: 1772381 - RNA, 19 nt, Homo sapiens
  misc_RNA (1)...(19): siRNA sense strand
agaagaggccuauuaucag

SEQ ID NO: 1772382 - RNA, 19 nt, Homo sapiens
  misc_RNA (1)...(19): siRNA sense strand
caucagaagaacugcaaca

SEQ ID NO: 1772383 - RNA, 19 nt, Homo sapiens
  misc_RNA (1)...(19): siRNA sense strand
agagauggaacgaauuaca

SEQ ID NO: 1772384 - RNA, 19 nt, Homo sapiens
  misc_RNA (1)...(19): siRNA sense strand
guuagauggcgucaaggaa

SEQ ID NO: 1772385 - RNA, 19 nt, Homo sapiens
  misc_RNA (1)...(19): siRNA sense strand
gaagaaaccuuaccucaag

SEQ ID NO: 1772386 - RNA, 19 nt, Homo sapiens
  misc_RNA (1)...(19): siRNA sense strand
gagaagaggccuauuauca

SEQ ID NO: 1772387 - RNA, 19 nt, Homo sapiens
  misc_RNA (1)...(19): siRNA sense strand
gaagaggccuauuaucagu

SEQ ID NO: 1772388 - RNA, 19 nt, Homo sapiens
  misc_RNA (1)...(19): siRNA sense strand
gaaauaacaucagaagaac

SEQ ID NO: 1772389 - RNA, 19 nt, Homo sapiens
  misc_RNA (1)...(19): siRNA sense strand
gcaagagcgucuccacaga

SEQ ID NO: 1772390 - RNA, 19 nt, Homo sapiens
  misc_RNA (1)...(19): siRNA sense strand
gaugaagauuaucggcuua

SEQ ID NO: 1772391 - RNA, 19 nt, Homo sapiens
  misc_RNA (1)...(19): siRNA sense strand
gaagauuaucggcuuauga

SEQ ID NO: 1772392 - RNA, 19 nt, Homo sapiens
  misc_RNA (1)...(19): siRNA sense strand
acagagaagaggccuauua

SEQ ID NO: 1772393 - RNA, 19 nt, Homo sapiens
  misc_RNA (1)...(19): siRNA sense strand
ugagagauggaacgaauua

SEQ ID NO: 1772394 - RNA, 19 nt, Homo sapiens
  misc_RNA (1)...(19): siRNA sense strand
gagagaccauaaucuuuua

SEQ ID NO: 1772395 - RNA, 19 nt, Homo sapiens
  misc_RNA (1)...(19): siRNA sense strand
ucagaagucccuagagaaa

SEQ ID NO: 1772396 - RNA, 19 nt, Homo sapiens
  misc_RNA (1)...(19): siRNA sense strand
ggaaaugcaacucgaagug

SEQ ID NO: 1772397 - RNA, 19 nt, Homo sapiens
  misc_RNA (1)...(19): siRNA sense strand
ggagaaauaacaucagaag

SEQ ID NO: 1772398 - RNA, 19 nt, Homo sapiens
  misc_RNA (1)...(19): siRNA sense strand
gcgguuagauggcgucaag

SEQ ID NO: 1772399 - RNA, 19 nt, Homo sapiens
  misc_RNA (1)...(19): siRNA sense strand
uagaaugguugaacaccuu

SEQ ID NO: 1772400 - RNA, 19 nt, Homo sapiens
  misc_RNA (1)...(19): siRNA sense strand
agaggccuauuaucaguuu

SEQ ID NO: 1772401 - RNA, 19 nt, Homo sapiens
  misc_RNA (1)...(19): siRNA sense strand
acucagaagucccuagaga

SEQ ID NO: 1772402 - RNA, 19 nt, Homo sapiens
  misc_RNA (1)...(19): siRNA sense strand
ugaagaaaccuuaccucaa

SEQ ID NO: 1772403 - RNA, 19 nt, Homo sapiens
  misc_RNA (1)...(19): siRNA sense strand
cagccugacuugagagaug

SEQ ID NO: 1772404 - RNA, 19 nt, Homo sapiens
  misc_RNA (1)...(19): siRNA sense strand
ugaacucaaugaugaagau

SEQ ID NO: 1772405 - RNA, 19 nt, Homo sapiens
  misc_RNA (1)...(19): siRNA sense strand
cagagaagaggccuauuau

SEQ ID NO: 1772406 - RNA, 19 nt, Homo sapiens
  misc_RNA (1)...(19): siRNA sense strand
agaagucccuagagaaagu

SEQ ID NO: 1772407 - RNA, 19 nt, Homo sapiens
  misc_RNA (1)...(19): siRNA sense strand
gaucagaugguggcaguga

SEQ ID NO: 1772408 - RNA, 19 nt, Homo sapiens
  misc_RNA (1)...(19): siRNA sense strand
cuagagaaaguucacauga

SEQ ID NO: 1772409 - RNA, 19 nt, Homo sapiens
  misc_RNA (1)...(19): siRNA sense strand
gaauuacagagacucagaa

SEQ ID NO: 1772410 - RNA, 19 nt, Homo sapiens
  misc_RNA (1)...(19): siRNA sense strand
cuugagagauggaacgaau

SEQ ID NO: 1772411 - RNA, 19 nt, Homo sapiens
  misc_RNA (1)...(19): siRNA sense strand
gaugguggcagugaagaaa

SEQ ID NO: 1772412 - RNA, 19 nt, Homo sapiens
  misc_RNA (1)...(19): siRNA sense strand
gagaaauaacaucagaaga

SEQ ID NO: 1772413 - RNA, 19 nt, Homo sapiens
  misc_RNA (1)...(19): siRNA sense strand
gaacugcaacagcgguuag

SEQ ID NO: 1772414 - RNA, 19 nt, Homo sapiens
  misc_RNA (1)...(19): siRNA sense strand
aggaacaacuagcaucuca

SEQ ID NO: 1772415 - RNA, 19 nt, Homo sapiens
  misc_RNA (1)...(19): siRNA sense strand
ggaacgaauuacagagacu

SEQ ID NO: 1772416 - RNA, 19 nt, Homo sapiens
  misc_RNA (1)...(19): siRNA sense strand
ccacagagaagaggccuau

SEQ ID NO: 1772417 - RNA, 19 nt, Homo sapiens
  misc_RNA (1)...(19): siRNA sense strand
gcaacucgaaguggacaaa

SEQ ID NO: 1772418 - RNA, 19 nt, Homo sapiens
  misc_RNA (1)...(19): siRNA sense strand
gaacucaaugaugaagauu

SEQ ID NO: 1772419 - RNA, 19 nt, Homo sapiens
  misc_RNA (1)...(19): siRNA sense strand
cuggagaaauaacaucaga

SEQ ID NO: 1772420 - RNA, 19 nt, Homo sapiens
  misc_RNA (1)...(19): siRNA sense strand
cgaauuacagagacucaga

SEQ ID NO: 1772421 - RNA, 19 nt, Homo sapiens
  misc_RNA (1)...(19): siRNA sense strand
ggccuauuaucaguuuauu

SEQ ID NO: 1772422 - RNA, 19 nt, Homo sapiens
  misc_RNA (1)...(19): siRNA sense strand
uagauggcgucaaggaaca

SEQ ID NO: 1772423 - RNA, 19 nt, Homo sapiens
  misc_RNA (1)...(19): siRNA sense strand
auuaucggcuuaugagaga

SEQ ID NO: 1772424 - RNA, 19 nt, Homo sapiens
  misc_RNA (1)...(19): siRNA sense strand
aaccuuaccucaagaccau

SEQ ID NO: 1772425 - RNA, 19 nt, Homo sapiens
  misc_RNA (1)...(19): siRNA sense strand
ucaagaccauaaucaucau

SEQ ID NO: 1772426 - RNA, 19 nt, Homo sapiens
  misc_RNA (1)...(19): siRNA sense strand
caaggaacaacuagcaucu

SEQ ID NO: 1772427 - RNA, 19 nt, Homo sapiens
  misc_RNA (1)...(19): siRNA sense strand
uggcagugaagaaaccuua

SEQ ID NO: 1772428 - RNA, 19 nt, Homo sapiens
  misc_RNA (1)...(19): siRNA sense strand
aagaaaccuuaccucaaga

SEQ ID NO: 1772429 - RNA, 19 nt, Homo sapiens
  misc_RNA (1)...(19): siRNA sense strand
ugaagauuaucggcuuaug

SEQ ID NO: 1772430 - RNA, 19 nt, Homo sapiens
  misc_RNA (1)...(19): siRNA sense strand
gagauggaacgaauuacag

SEQ ID NO: 1772431 - RNA, 19 nt, Homo sapiens
  misc_RNA (1)...(19): siRNA sense strand
ugagagaccauaaucuuuu

SEQ ID NO: 1772432 - RNA, 19 nt, Homo sapiens
  misc_RNA (1)...(19): siRNA sense strand
ggacaaaaugggaaccaaa

SEQ ID NO: 1772433 - RNA, 19 nt, Homo sapiens
  misc_RNA (1)...(19): siRNA sense strand
aauaacaucagaagaacug

SEQ ID NO: 1772434 - RNA, 19 nt, Homo sapiens
  misc_RNA (1)...(19): siRNA sense strand
gagaagauggcagcaagag

SEQ ID NO: 1772435 - RNA, 19 nt, Homo sapiens
  misc_RNA (1)...(19): siRNA sense strand
gaggccuauuaucaguuua

SEQ ID NO: 1772436 - RNA, 19 nt, Homo sapiens
  misc_RNA (1)...(19): siRNA sense strand
cuucuagaaugguugaaca

SEQ ID NO: 1772437 - RNA, 19 nt, Homo sapiens
  misc_RNA (1)...(19): siRNA sense strand
aggcaccccuggagaaaua

SEQ ID NO: 1772438 - RNA, 19 nt, Homo sapiens
  misc_RNA (1)...(19): siRNA sense strand
gguuagauggcgucaagga

SEQ ID NO: 1772439 - RNA, 19 nt, Homo sapiens
  misc_RNA (1)...(19): siRNA sense strand
ccucaagaccauaaucauc

SEQ ID NO: 1772440 - RNA, 19 nt, Homo sapiens
  misc_RNA (1)...(19): siRNA sense strand
cucaagaccauaaucauca

SEQ ID NO: 1772441 - RNA, 19 nt, Homo sapiens
  misc_RNA (1)...(19): siRNA sense strand
agaagaggccuauuaucag

SEQ ID NO: 1772442 - RNA, 19 nt, Homo sapiens
  misc_RNA (1)...(19): siRNA sense strand
caucagaagaacugcaaca

SEQ ID NO: 1772443 - RNA, 19 nt, Homo sapiens
  misc_RNA (1)...(19): siRNA sense strand
agagauggaacgaauuaca

SEQ ID NO: 1772444 - RNA, 19 nt, Homo sapiens
  misc_RNA (1)...(19): siRNA sense strand
guuagauggcgucaaggaa

SEQ ID NO: 1772445 - RNA, 19 nt, Homo sapiens
  misc_RNA (1)...(19): siRNA sense strand
gaagaaaccuuaccucaag

SEQ ID NO: 1772446 - RNA, 19 nt, Homo sapiens
  misc_RNA (1)...(19): siRNA sense strand
gagaagaggccuauuauca

SEQ ID NO: 1772447 - RNA, 19 nt, Homo sapiens
  misc_RNA (1)...(19): siRNA sense strand
gaagaggccuauuaucagu

SEQ ID NO: 1772448 - RNA, 19 nt, Homo sapiens
  misc_RNA (1)...(19): siRNA sense strand
gaaauaacaucagaagaac

SEQ ID NO: 1772449 - RNA, 19 nt, Homo sapiens
  misc_RNA (1)...(19): siRNA sense strand
gcaagagcgucuccacaga

SEQ ID NO: 1772450 - RNA, 19 nt, Homo sapiens
  misc_RNA (1)...(19): siRNA sense strand
gaugaagauuaucggcuua

SEQ ID NO: 1772451 - RNA, 19 nt, Homo sapiens
  misc_RNA (1)...(19): siRNA sense strand
gaagauuaucggcuuauga

SEQ ID NO: 1772452 - RNA, 19 nt, Homo sapiens
  misc_RNA (1)...(19): siRNA sense strand
acagagaagaggccuauua

SEQ ID NO: 1772453 - RNA, 19 nt, Homo sapiens
  misc_RNA (1)...(19): siRNA sense strand
ugagagauggaacgaauua

SEQ ID NO: 1772454 - RNA, 19 nt, Homo sapiens
  misc_RNA (1)...(19): siRNA sense strand
gagagaccauaaucuuuua

SEQ ID NO: 1772455 - RNA, 19 nt, Homo sapiens
  misc_RNA (1)...(19): siRNA sense strand
ucagaagucccuagagaaa

SEQ ID NO: 1772456 - RNA, 19 nt, Homo sapiens
  misc_RNA (1)...(19): siRNA sense strand
ggaaaugcaacucgaagug

SEQ ID NO: 1772457 - RNA, 19 nt, Homo sapiens
  misc_RNA (1)...(19): siRNA sense strand
ggagaaauaacaucagaag

SEQ ID NO: 1772458 - RNA, 19 nt, Homo sapiens
  misc_RNA (1)...(19): siRNA sense strand
gcgguuagauggcgucaag

SEQ ID NO: 1772459 - RNA, 19 nt, Homo sapiens
  misc_RNA (1)...(19): siRNA sense strand
uagaaugguugaacaccuu

SEQ ID NO: 1772460 - RNA, 19 nt, Homo sapiens
  misc_RNA (1)...(19): siRNA sense strand
agaggccuauuaucaguuu

SEQ ID NO: 1772461 - RNA, 19 nt, Homo sapiens
  misc_RNA (1)...(19): siRNA sense strand
acucagaagucccuagaga

SEQ ID NO: 1772462 - RNA, 19 nt, Homo sapiens
  misc_RNA (1)...(19): siRNA sense strand
ugaagaaaccuuaccucaa

SEQ ID NO: 1772463 - RNA, 19 nt, Homo sapiens
  misc_RNA (1)...(19): siRNA sense strand
cagccugacuugagagaug

SEQ ID NO: 1772464 - RNA, 19 nt, Homo sapiens
  misc_RNA (1)...(19): siRNA sense strand
ugaacucaaugaugaagau

SEQ ID NO: 1772465 - RNA, 19 nt, Homo sapiens
  misc_RNA (1)...(19): siRNA sense strand
cagagaagaggccuauuau

SEQ ID NO: 1772466 - RNA, 19 nt, Homo sapiens
  misc_RNA (1)...(19): siRNA sense strand
agaagucccuagagaaagu

SEQ ID NO: 1772467 - RNA, 19 nt, Homo sapiens
  misc_RNA (1)...(19): siRNA sense strand
gaucagaugguggcaguga

SEQ ID NO: 1772468 - RNA, 19 nt, Homo sapiens
  misc_RNA (1)...(19): siRNA sense strand
cuagagaaaguucacauga

SEQ ID NO: 1772469 - RNA, 19 nt, Homo sapiens
  misc_RNA (1)...(19): siRNA sense strand
gaauuacagagacucagaa

SEQ ID NO: 1772470 - RNA, 19 nt, Homo sapiens
  misc_RNA (1)...(19): siRNA sense strand
cuugagagauggaacgaau

SEQ ID NO: 1772471 - RNA, 19 nt, Homo sapiens
  misc_RNA (1)...(19): siRNA sense strand
gaugguggcagugaagaaa

SEQ ID NO: 1772472 - RNA, 19 nt, Homo sapiens
  misc_RNA (1)...(19): siRNA sense strand
gagaaauaacaucagaaga

SEQ ID NO: 1772473 - RNA, 19 nt, Homo sapiens
  misc_RNA (1)...(19): siRNA sense strand
gaacugcaacagcgguuag

SEQ ID NO: 1772474 - RNA, 19 nt, Homo sapiens
  misc_RNA (1)...(19): siRNA sense strand
aggaacaacuagcaucuca

SEQ ID NO: 1772475 - RNA, 19 nt, Homo sapiens
  misc_RNA (1)...(19): siRNA sense strand
ggaacgaauuacagagacu

SEQ ID NO: 1772476 - RNA, 19 nt, Homo sapiens
  misc_RNA (1)...(19): siRNA sense strand
ccacagagaagaggccuau

SEQ ID NO: 1772477 - RNA, 19 nt, Homo sapiens
  misc_RNA (1)...(19): siRNA sense strand
gcaacucgaaguggacaaa

SEQ ID NO: 1772478 - RNA, 19 nt, Homo sapiens
  misc_RNA (1)...(19): siRNA sense strand
gaacucaaugaugaagauu

SEQ ID NO: 1772479 - RNA, 19 nt, Homo sapiens
  misc_RNA (1)...(19): siRNA sense strand
cuggagaaauaacaucaga

SEQ ID NO: 1772480 - RNA, 19 nt, Homo sapiens
  misc_RNA (1)...(19): siRNA sense strand
cgaauuacagagacucaga

SEQ ID NO: 1772481 - RNA, 19 nt, Homo sapiens
  misc_RNA (1)...(19): siRNA sense strand
ggccuauuaucaguuuauu

SEQ ID NO: 1772482 - RNA, 19 nt, Homo sapiens
  misc_RNA (1)...(19): siRNA sense strand
uagauggcgucaaggaaca

SEQ ID NO: 1772483 - RNA, 19 nt, Homo sapiens
  misc_RNA (1)...(19): siRNA sense strand
auuaucggcuuaugagaga

SEQ ID NO: 1772484 - RNA, 19 nt, Homo sapiens
  misc_RNA (1)...(19): siRNA sense strand
aaccuuaccucaagaccau

SEQ ID NO: 1772485 - RNA, 19 nt, Homo sapiens
  misc_RNA (1)...(19): siRNA sense strand
ucaagaccauaaucaucau

SEQ ID NO: 1772486 - RNA, 19 nt, Homo sapiens
  misc_RNA (1)...(19): siRNA sense strand
caaggaacaacuagcaucu

SEQ ID NO: 1772487 - RNA, 19 nt, Homo sapiens
  misc_RNA (1)...(19): siRNA sense strand
uggcagugaagaaaccuua

SEQ ID NO: 1772488 - RNA, 19 nt, Homo sapiens
  misc_RNA (1)...(19): siRNA sense strand
aagaaaccuuaccucaaga

SEQ ID NO: 1772489 - RNA, 19 nt, Homo sapiens
  misc_RNA (1)...(19): siRNA sense strand
ugaagauuaucggcuuaug

SEQ ID NO: 1772490 - RNA, 19 nt, Homo sapiens
  misc_RNA (1)...(19): siRNA sense strand
gagauggaacgaauuacag

SEQ ID NO: 1772491 - RNA, 19 nt, Homo sapiens
  misc_RNA (1)...(19): siRNA sense strand
ugagagaccauaaucuuuu

SEQ ID NO: 1772492 - RNA, 19 nt, Homo sapiens
  misc_RNA (1)...(19): siRNA sense strand
ggacaaaaugggaaccaaa

SEQ ID NO: 1772493 - RNA, 19 nt, Homo sapiens
  misc_RNA (1)...(19): siRNA sense strand
aauaacaucagaagaacug

SEQ ID NO: 1772494 - RNA, 19 nt, Homo sapiens
  misc_RNA (1)...(19): siRNA sense strand
gagaagauggcagcaagag

SEQ ID NO: 1772495 - RNA, 19 nt, Homo sapiens
  misc_RNA (1)...(19): siRNA sense strand
gaggccuauuaucaguuua

SEQ ID NO: 1772496 - RNA, 19 nt, Homo sapiens
  misc_RNA (1)...(19): siRNA sense strand
cuucuagaaugguugaaca

SEQ ID NO: 1772497 - RNA, 19 nt, Homo sapiens
  misc_RNA (1)...(19): siRNA sense strand
aggcaccccuggagaaaua

SEQ ID NO: 1772498 - RNA, 19 nt, Homo sapiens
  misc_RNA (1)...(19): siRNA sense strand
gguuagauggcgucaagga

SEQ ID NO: 1772499 - RNA, 19 nt, Homo sapiens
  misc_RNA (1)...(19): siRNA sense strand
ccucaagaccauaaucauc

SEQ ID NO: 1772500 - RNA, 19 nt, Homo sapiens
  misc_RNA (1)...(19): siRNA sense strand
cucaagaccauaaucauca

SEQ ID NO: 1772501 - RNA, 19 nt, Homo sapiens
  misc_RNA (1)...(19): siRNA sense strand
agaagaggccuauuaucag

SEQ ID NO: 1772502 - RNA, 19 nt, Homo sapiens
  misc_RNA (1)...(19): siRNA sense strand
caucagaagaacugcaaca

SEQ ID NO: 1772503 - RNA, 19 nt, Homo sapiens
  misc_RNA (1)...(19): siRNA sense strand
agagauggaacgaauuaca

SEQ ID NO: 1772504 - RNA, 19 nt, Homo sapiens
  misc_RNA (1)...(19): siRNA sense strand
guuagauggcgucaaggaa

SEQ ID NO: 1772505 - RNA, 19 nt, Homo sapiens
  misc_RNA (1)...(19): siRNA sense strand
gaagaaaccuuaccucaag

SEQ ID NO: 1772506 - RNA, 19 nt, Homo sapiens
  misc_RNA (1)...(19): siRNA sense strand
gagaagaggccuauuauca

SEQ ID NO: 1772507 - RNA, 19 nt, Homo sapiens
  misc_RNA (1)...(19): siRNA sense strand
gaagaggccuauuaucagu

SEQ ID NO: 1772508 - RNA, 19 nt, Homo sapiens
  misc_RNA (1)...(19): siRNA sense strand
gaaauaacaucagaagaac

SEQ ID NO: 1772509 - RNA, 19 nt, Homo sapiens
  misc_RNA (1)...(19): siRNA sense strand
gcaagagcgucuccacaga

SEQ ID NO: 1772510 - RNA, 19 nt, Homo sapiens
  misc_RNA (1)...(19): siRNA sense strand
gaugaagauuaucggcuua

SEQ ID NO: 1772511 - RNA, 19 nt, Homo sapiens
  misc_RNA (1)...(19): siRNA sense strand
gaagauuaucggcuuauga

SEQ ID NO: 1772512 - RNA, 19 nt, Homo sapiens
  misc_RNA (1)...(19): siRNA sense strand
acagagaagaggccuauua

SEQ ID NO: 1772513 - RNA, 19 nt, Homo sapiens
  misc_RNA (1)...(19): siRNA sense strand
ugagagauggaacgaauua

SEQ ID NO: 1772514 - RNA, 19 nt, Homo sapiens
  misc_RNA (1)...(19): siRNA sense strand
gagagaccauaaucuuuua

SEQ ID NO: 1772515 - RNA, 19 nt, Homo sapiens
  misc_RNA (1)...(19): siRNA sense strand
ucagaagucccuagagaaa

SEQ ID NO: 1772516 - RNA, 19 nt, Homo sapiens
  misc_RNA (1)...(19): siRNA sense strand
ggaaaugcaacucgaagug

SEQ ID NO: 1772517 - RNA, 19 nt, Homo sapiens
  misc_RNA (1)...(19): siRNA sense strand
ggagaaauaacaucagaag

SEQ ID NO: 1772518 - RNA, 19 nt, Homo sapiens
  misc_RNA (1)...(19): siRNA sense strand
gcgguuagauggcgucaag

SEQ ID NO: 1772519 - RNA, 19 nt, Homo sapiens
  misc_RNA (1)...(19): siRNA sense strand
uagaaugguugaacaccuu

SEQ ID NO: 1772520 - RNA, 19 nt, Homo sapiens
  misc_RNA (1)...(19): siRNA sense strand
agaggccuauuaucaguuu

SEQ ID NO: 1772521 - RNA, 19 nt, Homo sapiens
  misc_RNA (1)...(19): siRNA sense strand
acucagaagucccuagaga

SEQ ID NO: 1772522 - RNA, 19 nt, Homo sapiens
  misc_RNA (1)...(19): siRNA sense strand
ugaagaaaccuuaccucaa

SEQ ID NO: 1772523 - RNA, 19 nt, Homo sapiens
  misc_RNA (1)...(19): siRNA sense strand
cagccugacuugagagaug

SEQ ID NO: 1772524 - RNA, 19 nt, Homo sapiens
  misc_RNA (1)...(19): siRNA sense strand
ugaacucaaugaugaagau

SEQ ID NO: 1772525 - RNA, 19 nt, Homo sapiens
  misc_RNA (1)...(19): siRNA sense strand
cagagaagaggccuauuau

SEQ ID NO: 1772526 - RNA, 19 nt, Homo sapiens
  misc_RNA (1)...(19): siRNA sense strand
agaagucccuagagaaagu

SEQ ID NO: 1772527 - RNA, 19 nt, Homo sapiens
  misc_RNA (1)...(19): siRNA sense strand
gaucagaugguggcaguga

SEQ ID NO: 1772528 - RNA, 19 nt, Homo sapiens
  misc_RNA (1)...(19): siRNA sense strand
cuagagaaaguucacauga

SEQ ID NO: 1772529 - RNA, 19 nt, Homo sapiens
  misc_RNA (1)...(19): siRNA sense strand
gaauuacagagacucagaa

SEQ ID NO: 1772530 - RNA, 19 nt, Homo sapiens
  misc_RNA (1)...(19): siRNA sense strand
cuugagagauggaacgaau

SEQ ID NO: 1772531 - RNA, 19 nt, Homo sapiens
  misc_RNA (1)...(19): siRNA sense strand
gaugguggcagugaagaaa

SEQ ID NO: 1772532 - RNA, 19 nt, Homo sapiens
  misc_RNA (1)...(19): siRNA sense strand
gagaaauaacaucagaaga

SEQ ID NO: 1772533 - RNA, 19 nt, Homo sapiens
  misc_RNA (1)...(19): siRNA sense strand
gaacugcaacagcgguuag

SEQ ID NO: 1772534 - RNA, 19 nt, Homo sapiens
  misc_RNA (1)...(19): siRNA sense strand
aggaacaacuagcaucuca

SEQ ID NO: 1772535 - RNA, 19 nt, Homo sapiens
  misc_RNA (1)...(19): siRNA sense strand
ggaacgaauuacagagacu

SEQ ID NO: 1772536 - RNA, 19 nt, Homo sapiens
  misc_RNA (1)...(19): siRNA sense strand
ccacagagaagaggccuau

SEQ ID NO: 1772537 - RNA, 19 nt, Homo sapiens
  misc_RNA (1)...(19): siRNA sense strand
gcaacucgaaguggacaaa

SEQ ID NO: 1772538 - RNA, 19 nt, Homo sapiens
  misc_RNA (1)...(19): siRNA sense strand
gaacucaaugaugaagauu

SEQ ID NO: 1772539 - RNA, 19 nt, Homo sapiens
  misc_RNA (1)...(19): siRNA sense strand
cuggagaaauaacaucaga

SEQ ID NO: 1772540 - RNA, 19 nt, Homo sapiens
  misc_RNA (1)...(19): siRNA sense strand
cgaauuacagagacucaga

SEQ ID NO: 1772541 - RNA, 19 nt, Homo sapiens
  misc_RNA (1)...(19): siRNA sense strand
ggccuauuaucaguuuauu

SEQ ID NO: 1772542 - RNA, 19 nt, Homo sapiens
  misc_RNA (1)...(19): siRNA sense strand
uagauggcgucaaggaaca

SEQ ID NO: 1772543 - RNA, 19 nt, Homo sapiens
  misc_RNA (1)...(19): siRNA sense strand
auuaucggcuuaugagaga

SEQ ID NO: 1772544 - RNA, 19 nt, Homo sapiens
  misc_RNA (1)...(19): siRNA sense strand
aaccuuaccucaagaccau

SEQ ID NO: 1772545 - RNA, 19 nt, Homo sapiens
  misc_RNA (1)...(19): siRNA sense strand
ucaagaccauaaucaucau

SEQ ID NO: 1772546 - RNA, 19 nt, Homo sapiens
  misc_RNA (1)...(19): siRNA sense strand
caaggaacaacuagcaucu

SEQ ID NO: 1772547 - RNA, 19 nt, Homo sapiens
  misc_RNA (1)...(19): siRNA sense strand
uggcagugaagaaaccuua

SEQ ID NO: 1772548 - RNA, 19 nt, Homo sapiens
  misc_RNA (1)...(19): siRNA sense strand
aagaaaccuuaccucaaga

SEQ ID NO: 1772549 - RNA, 19 nt, Homo sapiens
  misc_RNA (1)...(19): siRNA sense strand
ugaagauuaucggcuuaug

SEQ ID NO: 1772550 - RNA, 19 nt, Homo sapiens
  misc_RNA (1)...(19): siRNA sense strand
gagauggaacgaauuacag

SEQ ID NO: 1772551 - RNA, 19 nt, Homo sapiens
  misc_RNA (1)...(19): siRNA sense strand
ugagagaccauaaucuuuu

SEQ ID NO: 1772552 - RNA, 19 nt, Homo sapiens
  misc_RNA (1)...(19): siRNA sense strand
ggacaaaaugggaaccaaa

SEQ ID NO: 1772553 - RNA, 19 nt, Homo sapiens
  misc_RNA (1)...(19): siRNA sense strand
aauaacaucagaagaacug

SEQ ID NO: 1772554 - RNA, 19 nt, Homo sapiens
  misc_RNA (1)...(19): siRNA sense strand
gagaagauggcagcaagag

SEQ ID NO: 1772555 - RNA, 19 nt, Homo sapiens
  misc_RNA (1)...(19): siRNA sense strand
gaggccuauuaucaguuua

SEQ ID NO: 1772556 - RNA, 19 nt, Homo sapiens
  misc_RNA (1)...(19): siRNA sense strand
cuucuagaaugguugaaca

SEQ ID NO: 1772557 - RNA, 19 nt, Homo sapiens
  misc_RNA (1)...(19): siRNA sense strand
aggcaccccuggagaaaua

SEQ ID NO: 1772558 - RNA, 19 nt, Homo sapiens
  misc_RNA (1)...(19): siRNA sense strand
gguuagauggcgucaagga

SEQ ID NO: 1772559 - RNA, 19 nt, Homo sapiens
  misc_RNA (1)...(19): siRNA sense strand
ccucaagaccauaaucauc

SEQ ID NO: 1772560 - RNA, 19 nt, Homo sapiens
  misc_RNA (1)...(19): siRNA sense strand
cucaagaccauaaucauca

SEQ ID NO: 1772561 - RNA, 19 nt, Homo sapiens
  misc_RNA (1)...(19): siRNA sense strand
agaagaggccuauuaucag

SEQ ID NO: 1772562 - RNA, 19 nt, Homo sapiens
  misc_RNA (1)...(19): siRNA sense strand
caucagaagaacugcaaca

SEQ ID NO: 1772563 - RNA, 19 nt, Homo sapiens
  misc_RNA (1)...(19): siRNA sense strand
agagauggaacgaauuaca

SEQ ID NO: 1772564 - RNA, 19 nt, Homo sapiens
  misc_RNA (1)...(19): siRNA sense strand
guuagauggcgucaaggaa

SEQ ID NO: 1772565 - RNA, 19 nt, Homo sapiens
  misc_RNA (1)...(19): siRNA sense strand
gaagaaaccuuaccucaag

SEQ ID NO: 1772566 - RNA, 19 nt, Homo sapiens
  misc_RNA (1)...(19): siRNA sense strand
gagaagaggccuauuauca

SEQ ID NO: 1772567 - RNA, 19 nt, Homo sapiens
  misc_RNA (1)...(19): siRNA sense strand
gaagaggccuauuaucagu

SEQ ID NO: 1772568 - RNA, 19 nt, Homo sapiens
  misc_RNA (1)...(19): siRNA sense strand
gaaauaacaucagaagaac

SEQ ID NO: 1772569 - RNA, 19 nt, Homo sapiens
  misc_RNA (1)...(19): siRNA sense strand
gcaagagcgucuccacaga

SEQ ID NO: 1772570 - RNA, 19 nt, Homo sapiens
  misc_RNA (1)...(19): siRNA sense strand
gaugaagauuaucggcuua

SEQ ID NO: 1772571 - RNA, 19 nt, Homo sapiens
  misc_RNA (1)...(19): siRNA sense strand
gaagauuaucggcuuauga

SEQ ID NO: 1772572 - RNA, 19 nt, Homo sapiens
  misc_RNA (1)...(19): siRNA sense strand
acagagaagaggccuauua

SEQ ID NO: 1772573 - RNA, 19 nt, Homo sapiens
  misc_RNA (1)...(19): siRNA sense strand
ugagagauggaacgaauua

SEQ ID NO: 1772574 - RNA, 19 nt, Homo sapiens
  misc_RNA (1)...(19): siRNA sense strand
gagagaccauaaucuuuua

SEQ ID NO: 1772575 - RNA, 19 nt, Homo sapiens
  misc_RNA (1)...(19): siRNA sense strand
ucagaagucccuagagaaa

SEQ ID NO: 1772576 - RNA, 19 nt, Homo sapiens
  misc_RNA (1)...(19): siRNA sense strand
ggaaaugcaacucgaagug

SEQ ID NO: 1772577 - RNA, 19 nt, Homo sapiens
  misc_RNA (1)...(19): siRNA sense strand
ggagaaauaacaucagaag

SEQ ID NO: 1772578 - RNA, 19 nt, Homo sapiens
  misc_RNA (1)...(19): siRNA sense strand
gcgguuagauggcgucaag

SEQ ID NO: 1772579 - RNA, 19 nt, Homo sapiens
  misc_RNA (1)...(19): siRNA sense strand
uagaaugguugaacaccuu

SEQ ID NO: 1772580 - RNA, 19 nt, Homo sapiens
  misc_RNA (1)...(19): siRNA sense strand
agaggccuauuaucaguuu

SEQ ID NO: 1772581 - RNA, 19 nt, Homo sapiens
  misc_RNA (1)...(19): siRNA sense strand
acucagaagucccuagaga

SEQ ID NO: 1772582 - RNA, 19 nt, Homo sapiens
  misc_RNA (1)...(19): siRNA sense strand
ugaagaaaccuuaccucaa

SEQ ID NO: 1772583 - RNA, 19 nt, Homo sapiens
  misc_RNA (1)...(19): siRNA sense strand
cagccugacuugagagaug

SEQ ID NO: 1772584 - RNA, 19 nt, Homo sapiens
  misc_RNA (1)...(19): siRNA sense strand
ugaacucaaugaugaagau

SEQ ID NO: 1772585 - RNA, 19 nt, Homo sapiens
  misc_RNA (1)...(19): siRNA sense strand
cagagaagaggccuauuau

SEQ ID NO: 1772586 - RNA, 19 nt, Homo sapiens
  misc_RNA (1)...(19): siRNA sense strand
agaagucccuagagaaagu

SEQ ID NO: 1772587 - RNA, 19 nt, Homo sapiens
  misc_RNA (1)...(19): siRNA sense strand
gaucagaugguggcaguga

SEQ ID NO: 1772588 - RNA, 19 nt, Homo sapiens
  misc_RNA (1)...(19): siRNA sense strand
cuagagaaaguucacauga

SEQ ID NO: 1772589 - RNA, 19 nt, Homo sapiens
  misc_RNA (1)...(19): siRNA sense strand
gaauuacagagacucagaa

SEQ ID NO: 1772590 - RNA, 19 nt, Homo sapiens
  misc_RNA (1)...(19): siRNA sense strand
cuugagagauggaacgaau

SEQ ID NO: 1772591 - RNA, 19 nt, Homo sapiens
  misc_RNA (1)...(19): siRNA sense strand
gaugguggcagugaagaaa

SEQ ID NO: 1772592 - RNA, 19 nt, Homo sapiens
  misc_RNA (1)...(19): siRNA sense strand
gagaaauaacaucagaaga

SEQ ID NO: 1772593 - RNA, 19 nt, Homo sapiens
  misc_RNA (1)...(19): siRNA sense strand
gaacugcaacagcgguuag

SEQ ID NO: 1772594 - RNA, 19 nt, Homo sapiens
  misc_RNA (1)...(19): siRNA sense strand
aggaacaacuagcaucuca

SEQ ID NO: 1772595 - RNA, 19 nt, Homo sapiens
  misc_RNA (1)...(19): siRNA sense strand
ggaacgaauuacagagacu

SEQ ID NO: 1772596 - RNA, 19 nt, Homo sapiens
  misc_RNA (1)...(19): siRNA sense strand
ccacagagaagaggccuau

SEQ ID NO: 1772597 - RNA, 19 nt, Homo sapiens
  misc_RNA (1)...(19): siRNA sense strand
gcaacucgaaguggacaaa

SEQ ID NO: 1772598 - RNA, 19 nt, Homo sapiens
  misc_RNA (1)...(19): siRNA sense strand
gaacucaaugaugaagauu

SEQ ID NO: 1772599 - RNA, 19 nt, Homo sapiens
  misc_RNA (1)...(19): siRNA sense strand
cuggagaaauaacaucaga

SEQ ID NO: 1772600 - RNA, 19 nt, Homo sapiens
  misc_RNA (1)...(19): siRNA sense strand
cgaauuacagagacucaga

SEQ ID NO: 1772601 - RNA, 19 nt, Homo sapiens
  misc_RNA (1)...(19): siRNA sense strand
ggccuauuaucaguuuauu

SEQ ID NO: 1772602 - RNA, 19 nt, Homo sapiens
  misc_RNA (1)...(19): siRNA sense strand
uagauggcgucaaggaaca

SEQ ID NO: 1772603 - RNA, 19 nt, Homo sapiens
  misc_RNA (1)...(19): siRNA sense strand
auuaucggcuuaugagaga

SEQ ID NO: 1772604 - RNA, 19 nt, Homo sapiens
  misc_RNA (1)...(19): siRNA sense strand
aaccuuaccucaagaccau

SEQ ID NO: 1772605 - RNA, 19 nt, Homo sapiens
  misc_RNA (1)...(19): siRNA sense strand
ucaagaccauaaucaucau

SEQ ID NO: 1772606 - RNA, 19 nt, Homo sapiens
  misc_RNA (1)...(19): siRNA sense strand
caaggaacaacuagcaucu

SEQ ID NO: 1772607 - RNA, 19 nt, Homo sapiens
  misc_RNA (1)...(19): siRNA sense strand
uggcagugaagaaaccuua

SEQ ID NO: 1772608 - RNA, 19 nt, Homo sapiens
  misc_RNA (1)...(19): siRNA sense strand
aagaaaccuuaccucaaga

SEQ ID NO: 1772609 - RNA, 19 nt, Homo sapiens
  misc_RNA (1)...(19): siRNA sense strand
ugaagauuaucggcuuaug

SEQ ID NO: 1772610 - RNA, 19 nt, Homo sapiens
  misc_RNA (1)...(19): siRNA sense strand
gagauggaacgaauuacag

SEQ ID NO: 1772611 - RNA, 19 nt, Homo sapiens
  misc_RNA (1)...(19): siRNA sense strand
ugagagaccauaaucuuuu

SEQ ID NO: 1772612 - RNA, 19 nt, Homo sapiens
  misc_RNA (1)...(19): siRNA sense strand
ggacaaaaugggaaccaaa

SEQ ID NO: 1772613 - RNA, 19 nt, Homo sapiens
  misc_RNA (1)...(19): siRNA sense strand
aauaacaucagaagaacug

SEQ ID NO: 1772614 - RNA, 19 nt, Homo sapiens
  misc_RNA (1)...(19): siRNA sense strand
gagaagauggcagcaagag

SEQ ID NO: 1772615 - RNA, 19 nt, Homo sapiens
  misc_RNA (1)...(19): siRNA sense strand
gaggccuauuaucaguuua

SEQ ID NO: 1772616 - RNA, 19 nt, Homo sapiens
  misc_RNA (1)...(19): siRNA sense strand
cuucuagaaugguugaaca

SEQ ID NO: 1772617 - RNA, 19 nt, Homo sapiens
  misc_RNA (1)...(19): siRNA sense strand
aggcaccccuggagaaaua

SEQ ID NO: 1772618 - RNA, 19 nt, Homo sapiens
  misc_RNA (1)...(19): siRNA sense strand
gguuagauggcgucaagga

SEQ ID NO: 1772619 - RNA, 19 nt, Homo sapiens
  misc_RNA (1)...(19): siRNA sense strand
ccucaagaccauaaucauc

SEQ ID NO: 1772620 - RNA, 19 nt, Homo sapiens
  misc_RNA (1)...(19): siRNA sense strand
cucaagaccauaaucauca

SEQ ID NO: 1772621 - RNA, 19 nt, Homo sapiens
  misc_RNA (1)...(19): siRNA sense strand
agaagaggccuauuaucag

SEQ ID NO: 1772622 - RNA, 19 nt, Homo sapiens
  misc_RNA (1)...(19): siRNA sense strand
caucagaagaacugcaaca

SEQ ID NO: 1772623 - RNA, 19 nt, Homo sapiens
  misc_RNA (1)...(19): siRNA sense strand
agagauggaacgaauuaca

SEQ ID NO: 1772624 - RNA, 19 nt, Homo sapiens
  misc_RNA (1)...(19): siRNA sense strand
guuagauggcgucaaggaa

SEQ ID NO: 1772625 - RNA, 19 nt, Homo sapiens
  misc_RNA (1)...(19): siRNA sense strand
gaagaaaccuuaccucaag

SEQ ID NO: 1772626 - RNA, 19 nt, Homo sapiens
  misc_RNA (1)...(19): siRNA sense strand
gagaagaggccuauuauca

SEQ ID NO: 1772627 - RNA, 19 nt, Homo sapiens
  misc_RNA (1)...(19): siRNA sense strand
gaagaggccuauuaucagu

SEQ ID NO: 1772628 - RNA, 19 nt, Homo sapiens
  misc_RNA (1)...(19): siRNA sense strand
gaaauaacaucagaagaac

SEQ ID NO: 1772629 - RNA, 19 nt, Homo sapiens
  misc_RNA (1)...(19): siRNA sense strand
gcaagagcgucuccacaga

SEQ ID NO: 1772630 - RNA, 19 nt, Homo sapiens
  misc_RNA (1)...(19): siRNA sense strand
gaugaagauuaucggcuua

SEQ ID NO: 1772631 - RNA, 19 nt, Homo sapiens
  misc_RNA (1)...(19): siRNA sense strand
gaagauuaucggcuuauga

SEQ ID NO: 1772632 - RNA, 19 nt, Homo sapiens
  misc_RNA (1)...(19): siRNA sense strand
acagagaagaggccuauua

SEQ ID NO: 1772633 - RNA, 19 nt, Homo sapiens
  misc_RNA (1)...(19): siRNA sense strand
ugagagauggaacgaauua

SEQ ID NO: 1772634 - RNA, 19 nt, Homo sapiens
  misc_RNA (1)...(19): siRNA sense strand
gagagaccauaaucuuuua

SEQ ID NO: 1772635 - RNA, 19 nt, Homo sapiens
  misc_RNA (1)...(19): siRNA sense strand
ucagaagucccuagagaaa

SEQ ID NO: 1772636 - RNA, 19 nt, Homo sapiens
  misc_RNA (1)...(19): siRNA sense strand
ggaaaugcaacucgaagug

SEQ ID NO: 1772637 - RNA, 19 nt, Homo sapiens
  misc_RNA (1)...(19): siRNA sense strand
ggagaaauaacaucagaag

SEQ ID NO: 1772638 - RNA, 19 nt, Homo sapiens
  misc_RNA (1)...(19): siRNA sense strand
gcgguuagauggcgucaag

SEQ ID NO: 1772639 - RNA, 19 nt, Homo sapiens
  misc_RNA (1)...(19): siRNA sense strand
uagaaugguugaacaccuu

SEQ ID NO: 1772640 - RNA, 19 nt, Homo sapiens
  misc_RNA (1)...(19): siRNA sense strand
agaggccuauuaucaguuu

SEQ ID NO: 1772641 - RNA, 19 nt, Homo sapiens
  misc_RNA (1)...(19): siRNA sense strand
acucagaagucccuagaga

SEQ ID NO: 1772642 - RNA, 19 nt, Homo sapiens
  misc_RNA (1)...(19): siRNA sense strand
ugaagaaaccuuaccucaa

SEQ ID NO: 1772643 - RNA, 19 nt, Homo sapiens
  misc_RNA (1)...(19): siRNA sense strand
cagccugacuugagagaug

SEQ ID NO: 1772644 - RNA, 19 nt, Homo sapiens
  misc_RNA (1)...(19): siRNA sense strand
ugaacucaaugaugaagau

SEQ ID NO: 1772645 - RNA, 19 nt, Homo sapiens
  misc_RNA (1)...(19): siRNA sense strand
cagagaagaggccuauuau

SEQ ID NO: 1772646 - RNA, 19 nt, Homo sapiens
  misc_RNA (1)...(19): siRNA sense strand
agaagucccuagagaaagu

SEQ ID NO: 1772647 - RNA, 19 nt, Homo sapiens
  misc_RNA (1)...(19): siRNA sense strand
gaucagaugguggcaguga

SEQ ID NO: 1772648 - RNA, 19 nt, Homo sapiens
  misc_RNA (1)...(19): siRNA sense strand
cuagagaaaguucacauga

SEQ ID NO: 1772649 - RNA, 19 nt, Homo sapiens
  misc_RNA (1)...(19): siRNA sense strand
gaauuacagagacucagaa

SEQ ID NO: 1772650 - RNA, 19 nt, Homo sapiens
  misc_RNA (1)...(19): siRNA sense strand
cuugagagauggaacgaau

SEQ ID NO: 1772651 - RNA, 19 nt, Homo sapiens
  misc_RNA (1)...(19): siRNA sense strand
gaugguggcagugaagaaa

SEQ ID NO: 1772652 - RNA, 19 nt, Homo sapiens
  misc_RNA (1)...(19): siRNA sense strand
gagaaauaacaucagaaga

SEQ ID NO: 1772653 - RNA, 19 nt, Homo sapiens
  misc_RNA (1)...(19): siRNA sense strand
gaacugcaacagcgguuag

SEQ ID NO: 1772654 - RNA, 19 nt, Homo sapiens
  misc_RNA (1)...(19): siRNA sense strand
aggaacaacuagcaucuca

SEQ ID NO: 1772655 - RNA, 19 nt, Homo sapiens
  misc_RNA (1)...(19): siRNA sense strand
ggaacgaauuacagagacu

SEQ ID NO: 1772656 - RNA, 19 nt, Homo sapiens
  misc_RNA (1)...(19): siRNA sense strand
ccacagagaagaggccuau

SEQ ID NO: 1772657 - RNA, 19 nt, Homo sapiens
  misc_RNA (1)...(19): siRNA sense strand
gcaacucgaaguggacaaa

SEQ ID NO: 1772658 - RNA, 19 nt, Homo sapiens
  misc_RNA (1)...(19): siRNA sense strand
gaacucaaugaugaagauu

SEQ ID NO: 1772659 - RNA, 19 nt, Homo sapiens
  misc_RNA (1)...(19): siRNA sense strand
cuggagaaauaacaucaga

SEQ ID NO: 1772660 - RNA, 19 nt, Homo sapiens
  misc_RNA (1)...(19): siRNA sense strand
cgaauuacagagacucaga

SEQ ID NO: 1772661 - RNA, 19 nt, Homo sapiens
  misc_RNA (1)...(19): siRNA sense strand
ggccuauuaucaguuuauu

SEQ ID NO: 1772662 - RNA, 19 nt, Homo sapiens
  misc_RNA (1)...(19): siRNA sense strand
uagauggcgucaaggaaca

SEQ ID NO: 1772663 - RNA, 19 nt, Homo sapiens
  misc_RNA (1)...(19): siRNA sense strand
auuaucggcuuaugagaga

SEQ ID NO: 1772664 - RNA, 19 nt, Homo sapiens
  misc_RNA (1)...(19): siRNA sense strand
aaccuuaccucaagaccau

SEQ ID NO: 1772665 - RNA, 19 nt, Homo sapiens
  misc_RNA (1)...(19): siRNA sense strand
ucaagaccauaaucaucau

SEQ ID NO: 1772666 - RNA, 19 nt, Homo sapiens
  misc_RNA (1)...(19): siRNA sense strand
caaggaacaacuagcaucu

SEQ ID NO: 1772667 - RNA, 19 nt, Homo sapiens
  misc_RNA (1)...(19): siRNA sense strand
uggcagugaagaaaccuua

SEQ ID NO: 1772668 - RNA, 19 nt, Homo sapiens
  misc_RNA (1)...(19): siRNA sense strand
aagaaaccuuaccucaaga

SEQ ID NO: 1772669 - RNA, 19 nt, Homo sapiens
  misc_RNA (1)...(19): siRNA sense strand
ugaagauuaucggcuuaug

SEQ ID NO: 1772670 - RNA, 19 nt, Homo sapiens
  misc_RNA (1)...(19): siRNA sense strand
gagauggaacgaauuacag

SEQ ID NO: 1772671 - RNA, 19 nt, Homo sapiens
  misc_RNA (1)...(19): siRNA sense strand
ugagagaccauaaucuuuu

SEQ ID NO: 1772672 - RNA, 19 nt, Homo sapiens
  misc_RNA (1)...(19): siRNA sense strand
ggacaaaaugggaaccaaa

SEQ ID NO: 1772673 - RNA, 19 nt, Homo sapiens
  misc_RNA (1)...(19): siRNA sense strand
aauaacaucagaagaacug

SEQ ID NO: 1772674 - RNA, 19 nt, Homo sapiens
  misc_RNA (1)...(19): siRNA sense strand
gagaagauggcagcaagag

SEQ ID NO: 1772675 - RNA, 19 nt, Homo sapiens
  misc_RNA (1)...(19): siRNA sense strand
gaggccuauuaucaguuua

SEQ ID NO: 1772676 - RNA, 19 nt, Homo sapiens
  misc_RNA (1)...(19): siRNA sense strand
cuucuagaaugguugaaca

SEQ ID NO: 1772677 - RNA, 19 nt, Homo sapiens
  misc_RNA (1)...(19): siRNA sense strand
aggcaccccuggagaaaua

SEQ ID NO: 1772678 - RNA, 19 nt, Homo sapiens
  misc_RNA (1)...(19): siRNA sense strand
gguuagauggcgucaagga

SEQ ID NO: 1772679 - RNA, 19 nt, Homo sapiens
  misc_RNA (1)...(19): siRNA sense strand
ccucaagaccauaaucauc

SEQ ID NO: 1772680 - RNA, 19 nt, Homo sapiens
  misc_RNA (1)...(19): siRNA sense strand
cucaagaccauaaucauca

SEQ ID NO: 1772681 - RNA, 19 nt, Homo sapiens
  misc_RNA (1)...(19): siRNA sense strand
agaagaggccuauuaucag

SEQ ID NO: 1772682 - RNA, 19 nt, Homo sapiens
  misc_RNA (1)...(19): siRNA sense strand
caucagaagaacugcaaca

SEQ ID NO: 1772683 - RNA, 19 nt, Homo sapiens
  misc_RNA (1)...(19): siRNA sense strand
agagauggaacgaauuaca

SEQ ID NO: 1772684 - RNA, 19 nt, Homo sapiens
  misc_RNA (1)...(19): siRNA sense strand
guuagauggcgucaaggaa

SEQ ID NO: 1772685 - RNA, 19 nt, Homo sapiens
  misc_RNA (1)...(19): siRNA sense strand
caaagaagguugucagaug

SEQ ID NO: 1772686 - RNA, 19 nt, Homo sapiens
  misc_RNA (1)...(19): siRNA sense strand
gaauacaucuuccauccaa

SEQ ID NO: 1772687 - RNA, 19 nt, Homo sapiens
  misc_RNA (1)...(19): siRNA sense strand
gagcuuggcugaagaggaa

SEQ ID NO: 1772688 - RNA, 19 nt, Homo sapiens
  misc_RNA (1)...(19): siRNA sense strand
uaaaugaaaucucggaaga

SEQ ID NO: 1772689 - RNA, 19 nt, Homo sapiens
  misc_RNA (1)...(19): siRNA sense strand
gaacaugagaugaaugaaa

SEQ ID NO: 1772690 - RNA, 19 nt, Homo sapiens
  misc_RNA (1)...(19): siRNA sense strand
caagagcucuccgaaauga

SEQ ID NO: 1772691 - RNA, 19 nt, Homo sapiens
  misc_RNA (1)...(19): siRNA sense strand
cgaaguauguccagaaugu

SEQ ID NO: 1772692 - RNA, 19 nt, Homo sapiens
  misc_RNA (1)...(19): siRNA sense strand
gcucaccauugaacaguua

SEQ ID NO: 1772693 - RNA, 19 nt, Homo sapiens
  misc_RNA (1)...(19): siRNA sense strand
gaacacagaaacacuaaau

SEQ ID NO: 1772694 - RNA, 19 nt, Homo sapiens
  misc_RNA (1)...(19): siRNA sense strand
cgaaaugaaacacaacuua

SEQ ID NO: 1772695 - RNA, 19 nt, Homo sapiens
  misc_RNA (1)...(19): siRNA sense strand
aaagaaaccuggcuuacug

SEQ ID NO: 1772696 - RNA, 19 nt, Homo sapiens
  misc_RNA (1)...(19): siRNA sense strand
ugucauagauuuaggagaa

SEQ ID NO: 1772697 - RNA, 19 nt, Homo sapiens
  misc_RNA (1)...(19): siRNA sense strand
ugcaagagauggagguuua

SEQ ID NO: 1772698 - RNA, 19 nt, Homo sapiens
  misc_RNA (1)...(19): siRNA sense strand
ccucaugucuaaagaaauu

SEQ ID NO: 1772699 - RNA, 19 nt, Homo sapiens
  misc_RNA (1)...(19): siRNA sense strand
gcaaauagcgaaaguaguc

SEQ ID NO: 1772700 - RNA, 19 nt, Homo sapiens
  misc_RNA (1)...(19): siRNA sense strand
gcaaagcugagauggauuu

SEQ ID NO: 1772701 - RNA, 19 nt, Homo sapiens
  misc_RNA (1)...(19): siRNA sense strand
ccgcugauauugccaagua

SEQ ID NO: 1772702 - RNA, 19 nt, Homo sapiens
  misc_RNA (1)...(19): siRNA sense strand
ccacagagcuuggcugaag

SEQ ID NO: 1772703 - RNA, 19 nt, Homo sapiens
  misc_RNA (1)...(19): siRNA sense strand
aaagagccaucugcuguua

SEQ ID NO: 1772704 - RNA, 19 nt, Homo sapiens
  misc_RNA (1)...(19): siRNA sense strand
gcaggucgaugcccgauuc

SEQ ID NO: 1772705 - RNA, 19 nt, Homo sapiens
  misc_RNA (1)...(19): siRNA sense strand
gcagcauccugaaucuuaa

SEQ ID NO: 1772706 - RNA, 19 nt, Homo sapiens
  misc_RNA (1)...(19): siRNA sense strand
ggacagaugcauuccagaa

SEQ ID NO: 1772707 - RNA, 19 nt, Homo sapiens
  misc_RNA (1)...(19): siRNA sense strand
caaagaaccaucucccaaa

SEQ ID NO: 1772708 - RNA, 19 nt, Homo sapiens
  misc_RNA (1)...(19): siRNA sense strand
gagcgaacuugucauagau

SEQ ID NO: 1772709 - RNA, 19 nt, Homo sapiens
  misc_RNA (1)...(19): siRNA sense strand
ugaaugaaaucgaaguaug

SEQ ID NO: 1772710 - RNA, 19 nt, Homo sapiens
  misc_RNA (1)...(19): siRNA sense strand
uaaccuggaucgaagcaaa

SEQ ID NO: 1772711 - RNA, 19 nt, Homo sapiens
  misc_RNA (1)...(19): siRNA sense strand
ugacagaaauauacaacga

SEQ ID NO: 1772712 - RNA, 19 nt, Homo sapiens
  misc_RNA (1)...(19): siRNA sense strand
caaacccaguggagauuaa

SEQ ID NO: 1772713 - RNA, 19 nt, Homo sapiens
  misc_RNA (1)...(19): siRNA sense strand
uauccuaccugcucaaguu

SEQ ID NO: 1772714 - RNA, 19 nt, Homo sapiens
  misc_RNA (1)...(19): siRNA sense strand
gaaaugaaacacaacuuag

SEQ ID NO: 1772715 - RNA, 19 nt, Homo sapiens
  misc_RNA (1)...(19): siRNA sense strand
ggcagcauccugaaucuua

SEQ ID NO: 1772716 - RNA, 19 nt, Homo sapiens
  misc_RNA (1)...(19): siRNA sense strand
ugagaugaaugaaaucgaa

SEQ ID NO: 1772717 - RNA, 19 nt, Homo sapiens
  misc_RNA (1)...(19): siRNA sense strand
gcacaacugcaucauuuau

SEQ ID NO: 1772718 - RNA, 19 nt, Homo sapiens
  misc_RNA (1)...(19): siRNA sense strand
gcgaacuugucauagauuu

SEQ ID NO: 1772719 - RNA, 19 nt, Homo sapiens
  misc_RNA (1)...(19): siRNA sense strand
gcacagcgauucggaggau

SEQ ID NO: 1772720 - RNA, 19 nt, Homo sapiens
  misc_RNA (1)...(19): siRNA sense strand
aagcugagauggauuugaa

SEQ ID NO: 1772721 - RNA, 19 nt, Homo sapiens
  misc_RNA (1)...(19): siRNA sense strand
gaacauccgcaggaaguuu

SEQ ID NO: 1772722 - RNA, 19 nt, Homo sapiens
  misc_RNA (1)...(19): siRNA sense strand
cagaaacacuaaauaaguc

SEQ ID NO: 1772723 - RNA, 19 nt, Homo sapiens
  misc_RNA (1)...(19): siRNA sense strand
aaaccuggcuuacugaaca

SEQ ID NO: 1772724 - RNA, 19 nt, Homo sapiens
  misc_RNA (1)...(19): siRNA sense strand
gagcagcagugaugagaag

SEQ ID NO: 1772725 - RNA, 19 nt, Homo sapiens
  misc_RNA (1)...(19): siRNA sense strand
gaacagcacccugacuaug

SEQ ID NO: 1772726 - RNA, 19 nt, Homo sapiens
  misc_RNA (1)...(19): siRNA sense strand
caucaacuguccagcagaa

SEQ ID NO: 1772727 - RNA, 19 nt, Homo sapiens
  misc_RNA (1)...(19): siRNA sense strand
gggccuggguuccaauaaa

SEQ ID NO: 1772728 - RNA, 19 nt, Homo sapiens
  misc_RNA (1)...(19): siRNA sense strand
gaaugaaaucgaaguaugu

SEQ ID NO: 1772729 - RNA, 19 nt, Homo sapiens
  misc_RNA (1)...(19): siRNA sense strand
gcaucgagacccagaguaa

SEQ ID NO: 1772730 - RNA, 19 nt, Homo sapiens
  misc_RNA (1)...(19): siRNA sense strand
agaagcagcuggaguugga

SEQ ID NO: 1772731 - RNA, 19 nt, Homo sapiens
  misc_RNA (1)...(19): siRNA sense strand
ggacaagcagggaguuuau

SEQ ID NO: 1772732 - RNA, 19 nt, Homo sapiens
  misc_RNA (1)...(19): siRNA sense strand
caacagccaguaucaaaug

SEQ ID NO: 1772733 - RNA, 19 nt, Homo sapiens
  misc_RNA (1)...(19): siRNA sense strand
ccauggacuuccuggauaa

SEQ ID NO: 1772734 - RNA, 19 nt, Homo sapiens
  misc_RNA (1)...(19): siRNA sense strand
gagacgcccuccuccauuc

SEQ ID NO: 1772735 - RNA, 19 nt, Homo sapiens
  misc_RNA (1)...(19): siRNA sense strand
gaacuugucauagauuuag

SEQ ID NO: 1772736 - RNA, 19 nt, Homo sapiens
  misc_RNA (1)...(19): siRNA sense strand
aggauaaacugaagggaaa

SEQ ID NO: 1772737 - RNA, 19 nt, Homo sapiens
  misc_RNA (1)...(19): siRNA sense strand
caaagcacaauuaggcaua

SEQ ID NO: 1772738 - RNA, 19 nt, Homo sapiens
  misc_RNA (1)...(19): siRNA sense strand
ggucgaugcccgauucuuu

SEQ ID NO: 1772739 - RNA, 19 nt, Homo sapiens
  misc_RNA (1)...(19): siRNA sense strand
cauaaaggauaaacugaag

SEQ ID NO: 1772740 - RNA, 19 nt, Homo sapiens
  misc_RNA (1)...(19): siRNA sense strand
gcacaauuaggcauaaaug

SEQ ID NO: 1772741 - RNA, 19 nt, Homo sapiens
  misc_RNA (1)...(19): siRNA sense strand
aaucacaaauugacgcaaa

SEQ ID NO: 1772742 - RNA, 19 nt, Homo sapiens
  misc_RNA (1)...(19): siRNA sense strand
gcucgacccuugaccuuuc

SEQ ID NO: 1772743 - RNA, 19 nt, Homo sapiens
  misc_RNA (1)...(19): siRNA sense strand
ugaagaagcagcuggaguu

SEQ ID NO: 1772744 - RNA, 19 nt, Homo sapiens
  misc_RNA (1)...(19): siRNA sense strand
uaagaaggaacccaaagaa

SEQ ID NO: 1772745 - RNA, 19 nt, Homo sapiens
  misc_RNA (1)...(19): siRNA sense strand
gaacgagccagaagacaca

SEQ ID NO: 1772746 - RNA, 19 nt, Homo sapiens
  misc_RNA (1)...(19): siRNA sense strand
gaguugcaaagcacaauua

SEQ ID NO: 1772747 - RNA, 19 nt, Homo sapiens
  misc_RNA (1)...(19): siRNA sense strand
ggauuuccuugucggauau

SEQ ID NO: 1772748 - RNA, 19 nt, Homo sapiens
  misc_RNA (1)...(19): siRNA sense strand
gaacagcccagaaaagaaa

SEQ ID NO: 1772749 - RNA, 19 nt, Homo sapiens
  misc_RNA (1)...(19): siRNA sense strand
aagcaaagcugagauggau

SEQ ID NO: 1772750 - RNA, 19 nt, Homo sapiens
  misc_RNA (1)...(19): siRNA sense strand
ccagaagcccguuccauug

SEQ ID NO: 1772751 - RNA, 19 nt, Homo sapiens
  misc_RNA (1)...(19): siRNA sense strand
agcaagagcucuccgaaau

SEQ ID NO: 1772752 - RNA, 19 nt, Homo sapiens
  misc_RNA (1)...(19): siRNA sense strand
agagcgaacuugucauaga

SEQ ID NO: 1772753 - RNA, 19 nt, Homo sapiens
  misc_RNA (1)...(19): siRNA sense strand
ccaagauccugaugagcaa

SEQ ID NO: 1772754 - RNA, 19 nt, Homo sapiens
  misc_RNA (1)...(19): siRNA sense strand
caaaagcucuaagggauaa

SEQ ID NO: 1772755 - RNA, 19 nt, Homo sapiens
  misc_RNA (1)...(19): siRNA sense strand
caaguuugccauucagaaa

SEQ ID NO: 1772756 - RNA, 19 nt, Homo sapiens
  misc_RNA (1)...(19): siRNA sense strand
ggaguaauaaauccaguug

SEQ ID NO: 1772757 - RNA, 19 nt, Homo sapiens
  misc_RNA (1)...(19): siRNA sense strand
ggagacgucagcugagaaa

SEQ ID NO: 1772758 - RNA, 19 nt, Homo sapiens
  misc_RNA (1)...(19): siRNA sense strand
gaaggaacccaaagaacca

SEQ ID NO: 1772759 - RNA, 19 nt, Homo sapiens
  misc_RNA (1)...(19): siRNA sense strand
cggauuuccuugucggaua

SEQ ID NO: 1772760 - RNA, 19 nt, Homo sapiens
  misc_RNA (1)...(19): siRNA sense strand
gagaacauccgcaggaagu

SEQ ID NO: 1772761 - RNA, 19 nt, Homo sapiens
  misc_RNA (1)...(19): siRNA sense strand
gauaguagcgauagugagu

SEQ ID NO: 1772762 - RNA, 19 nt, Homo sapiens
  misc_RNA (1)...(19): siRNA sense strand
ggaacaaugacagaaauau

SEQ ID NO: 1772763 - RNA, 19 nt, Homo sapiens
  misc_RNA (1)...(19): siRNA sense strand
gcaauaaaaggaacaauga

SEQ ID NO: 1772764 - RNA, 19 nt, Homo sapiens
  misc_RNA (1)...(19): siRNA sense strand
gaugaaugaaaucgaagua

SEQ ID NO: 1772765 - RNA, 19 nt, Homo sapiens
  misc_RNA (1)...(19): siRNA sense strand
gaagagccuccucccgaaa

SEQ ID NO: 1772766 - RNA, 19 nt, Homo sapiens
  misc_RNA (1)...(19): siRNA sense strand
gcaagagcucuccgaaaug

SEQ ID NO: 1772767 - RNA, 19 nt, Homo sapiens
  misc_RNA (1)...(19): siRNA sense strand
gcccugagccugagaagga

SEQ ID NO: 1772768 - RNA, 19 nt, Homo sapiens
  misc_RNA (1)...(19): siRNA sense strand
gguuccagcugaaucuuga

SEQ ID NO: 1772769 - RNA, 19 nt, Homo sapiens
  misc_RNA (1)...(19): siRNA sense strand
gaagcaaagcugagaugga

SEQ ID NO: 1772770 - RNA, 19 nt, Homo sapiens
  misc_RNA (1)...(19): siRNA sense strand
guaaagccaugacaaugcu

SEQ ID NO: 1772771 - RNA, 19 nt, Homo sapiens
  misc_RNA (1)...(19): siRNA sense strand
agagccaucugcuguuaaa

SEQ ID NO: 1772772 - RNA, 19 nt, Homo sapiens
  misc_RNA (1)...(19): siRNA sense strand
gaccauagagaguugcaaa

SEQ ID NO: 1772773 - RNA, 19 nt, Homo sapiens
  misc_RNA (1)...(19): siRNA sense strand
gcgagucgguccagcaaca

SEQ ID NO: 1772774 - RNA, 19 nt, Homo sapiens
  misc_RNA (1)...(19): siRNA sense strand
gggacaagcagggaguuua

SEQ ID NO: 1772775 - RNA, 19 nt, Homo sapiens
  misc_RNA (1)...(19): siRNA sense strand
ucaccagccuccaccaaga

SEQ ID NO: 1772776 - RNA, 19 nt, Homo sapiens
  misc_RNA (1)...(19): siRNA sense strand
uaccucaugucuaaagaaa

SEQ ID NO: 1772777 - RNA, 19 nt, Homo sapiens
  misc_RNA (1)...(19): siRNA sense strand
aauaauugcuaccucaugu

SEQ ID NO: 1772778 - RNA, 19 nt, Homo sapiens
  misc_RNA (1)...(19): siRNA sense strand
ggccuggguuccaauaaau

SEQ ID NO: 1772779 - RNA, 19 nt, Homo sapiens
  misc_RNA (1)...(19): siRNA sense strand
guagcaauccacauccuuu

SEQ ID NO: 1772780 - RNA, 19 nt, Homo sapiens
  misc_RNA (1)...(19): siRNA sense strand
ccacuggccugagcacaug

SEQ ID NO: 1772781 - RNA, 19 nt, Homo sapiens
  misc_RNA (1)...(19): siRNA sense strand
gaagcacaauagcugagau

SEQ ID NO: 1772782 - RNA, 19 nt, Homo sapiens
  misc_RNA (1)...(19): siRNA sense strand
gauauugccaaguacacua

SEQ ID NO: 1772783 - RNA, 19 nt, Homo sapiens
  misc_RNA (1)...(19): siRNA sense strand
agagagcgaacuugucaua

SEQ ID NO: 1772784 - RNA, 19 nt, Homo sapiens
  misc_RNA (1)...(19): siRNA sense strand
gcaggaugcugagaagaag

SEQ ID NO: 1772785 - RNA, 19 nt, Homo sapiens
  misc_RNA (1)...(19): siRNA sense strand
caaagaagguugucagaug

SEQ ID NO: 1772786 - RNA, 19 nt, Homo sapiens
  misc_RNA (1)...(19): siRNA sense strand
gaauacaucuuccauccaa

SEQ ID NO: 1772787 - RNA, 19 nt, Homo sapiens
  misc_RNA (1)...(19): siRNA sense strand
gagcuuggcugaagaggaa

SEQ ID NO: 1772788 - RNA, 19 nt, Homo sapiens
  misc_RNA (1)...(19): siRNA sense strand
uaaaugaaaucucggaaga

SEQ ID NO: 1772789 - RNA, 19 nt, Homo sapiens
  misc_RNA (1)...(19): siRNA sense strand
gaacaugagaugaaugaaa

SEQ ID NO: 1772790 - RNA, 19 nt, Homo sapiens
  misc_RNA (1)...(19): siRNA sense strand
caagagcucuccgaaauga

SEQ ID NO: 1772791 - RNA, 19 nt, Homo sapiens
  misc_RNA (1)...(19): siRNA sense strand
cgaaguauguccagaaugu

SEQ ID NO: 1772792 - RNA, 19 nt, Homo sapiens
  misc_RNA (1)...(19): siRNA sense strand
gcucaccauugaacaguua

SEQ ID NO: 1772793 - RNA, 19 nt, Homo sapiens
  misc_RNA (1)...(19): siRNA sense strand
gaacacagaaacacuaaau

SEQ ID NO: 1772794 - RNA, 19 nt, Homo sapiens
  misc_RNA (1)...(19): siRNA sense strand
cgaaaugaaacacaacuua

SEQ ID NO: 1772795 - RNA, 19 nt, Homo sapiens
  misc_RNA (1)...(19): siRNA sense strand
aaagaaaccuggcuuacug

SEQ ID NO: 1772796 - RNA, 19 nt, Homo sapiens
  misc_RNA (1)...(19): siRNA sense strand
ugucauagauuuaggagaa

SEQ ID NO: 1772797 - RNA, 19 nt, Homo sapiens
  misc_RNA (1)...(19): siRNA sense strand
ugcaagagauggagguuua

SEQ ID NO: 1772798 - RNA, 19 nt, Homo sapiens
  misc_RNA (1)...(19): siRNA sense strand
ccucaugucuaaagaaauu

SEQ ID NO: 1772799 - RNA, 19 nt, Homo sapiens
  misc_RNA (1)...(19): siRNA sense strand
gcaaauagcgaaaguaguc

SEQ ID NO: 1772800 - RNA, 19 nt, Homo sapiens
  misc_RNA (1)...(19): siRNA sense strand
gcaaagcugagauggauuu

SEQ ID NO: 1772801 - RNA, 19 nt, Homo sapiens
  misc_RNA (1)...(19): siRNA sense strand
ccgcugauauugccaagua

SEQ ID NO: 1772802 - RNA, 19 nt, Homo sapiens
  misc_RNA (1)...(19): siRNA sense strand
ccacagagcuuggcugaag

SEQ ID NO: 1772803 - RNA, 19 nt, Homo sapiens
  misc_RNA (1)...(19): siRNA sense strand
aaagagccaucugcuguua

SEQ ID NO: 1772804 - RNA, 19 nt, Homo sapiens
  misc_RNA (1)...(19): siRNA sense strand
gcaggucgaugcccgauuc

SEQ ID NO: 1772805 - RNA, 19 nt, Homo sapiens
  misc_RNA (1)...(19): siRNA sense strand
gcagcauccugaaucuuaa

SEQ ID NO: 1772806 - RNA, 19 nt, Homo sapiens
  misc_RNA (1)...(19): siRNA sense strand
ggacagaugcauuccagaa

SEQ ID NO: 1772807 - RNA, 19 nt, Homo sapiens
  misc_RNA (1)...(19): siRNA sense strand
caaagaaccaucucccaaa

SEQ ID NO: 1772808 - RNA, 19 nt, Homo sapiens
  misc_RNA (1)...(19): siRNA sense strand
gagcgaacuugucauagau

SEQ ID NO: 1772809 - RNA, 19 nt, Homo sapiens
  misc_RNA (1)...(19): siRNA sense strand
ugaaugaaaucgaaguaug

SEQ ID NO: 1772810 - RNA, 19 nt, Homo sapiens
  misc_RNA (1)...(19): siRNA sense strand
uaaccuggaucgaagcaaa

SEQ ID NO: 1772811 - RNA, 19 nt, Homo sapiens
  misc_RNA (1)...(19): siRNA sense strand
ugacagaaauauacaacga

SEQ ID NO: 1772812 - RNA, 19 nt, Homo sapiens
  misc_RNA (1)...(19): siRNA sense strand
caaacccaguggagauuaa

SEQ ID NO: 1772813 - RNA, 19 nt, Homo sapiens
  misc_RNA (1)...(19): siRNA sense strand
uauccuaccugcucaaguu

SEQ ID NO: 1772814 - RNA, 19 nt, Homo sapiens
  misc_RNA (1)...(19): siRNA sense strand
gaaaugaaacacaacuuag

SEQ ID NO: 1772815 - RNA, 19 nt, Homo sapiens
  misc_RNA (1)...(19): siRNA sense strand
ggcagcauccugaaucuua

SEQ ID NO: 1772816 - RNA, 19 nt, Homo sapiens
  misc_RNA (1)...(19): siRNA sense strand
ugagaugaaugaaaucgaa

SEQ ID NO: 1772817 - RNA, 19 nt, Homo sapiens
  misc_RNA (1)...(19): siRNA sense strand
gcacaacugcaucauuuau

SEQ ID NO: 1772818 - RNA, 19 nt, Homo sapiens
  misc_RNA (1)...(19): siRNA sense strand
gcgaacuugucauagauuu

SEQ ID NO: 1772819 - RNA, 19 nt, Homo sapiens
  misc_RNA (1)...(19): siRNA sense strand
gcacagcgauucggaggau

SEQ ID NO: 1772820 - RNA, 19 nt, Homo sapiens
  misc_RNA (1)...(19): siRNA sense strand
aagcugagauggauuugaa

SEQ ID NO: 1772821 - RNA, 19 nt, Homo sapiens
  misc_RNA (1)...(19): siRNA sense strand
gaacauccgcaggaaguuu

SEQ ID NO: 1772822 - RNA, 19 nt, Homo sapiens
  misc_RNA (1)...(19): siRNA sense strand
cagaaacacuaaauaaguc

SEQ ID NO: 1772823 - RNA, 19 nt, Homo sapiens
  misc_RNA (1)...(19): siRNA sense strand
aaaccuggcuuacugaaca

SEQ ID NO: 1772824 - RNA, 19 nt, Homo sapiens
  misc_RNA (1)...(19): siRNA sense strand
gagcagcagugaugagaag

SEQ ID NO: 1772825 - RNA, 19 nt, Homo sapiens
  misc_RNA (1)...(19): siRNA sense strand
gaacagcacccugacuaug

SEQ ID NO: 1772826 - RNA, 19 nt, Homo sapiens
  misc_RNA (1)...(19): siRNA sense strand
caucaacuguccagcagaa

SEQ ID NO: 1772827 - RNA, 19 nt, Homo sapiens
  misc_RNA (1)...(19): siRNA sense strand
gggccuggguuccaauaaa

SEQ ID NO: 1772828 - RNA, 19 nt, Homo sapiens
  misc_RNA (1)...(19): siRNA sense strand
gaaugaaaucgaaguaugu

SEQ ID NO: 1772829 - RNA, 19 nt, Homo sapiens
  misc_RNA (1)...(19): siRNA sense strand
gcaucgagacccagaguaa

SEQ ID NO: 1772830 - RNA, 19 nt, Homo sapiens
  misc_RNA (1)...(19): siRNA sense strand
agaagcagcuggaguugga

SEQ ID NO: 1772831 - RNA, 19 nt, Homo sapiens
  misc_RNA (1)...(19): siRNA sense strand
ggacaagcagggaguuuau

SEQ ID NO: 1772832 - RNA, 19 nt, Homo sapiens
  misc_RNA (1)...(19): siRNA sense strand
caacagccaguaucaaaug

SEQ ID NO: 1772833 - RNA, 19 nt, Homo sapiens
  misc_RNA (1)...(19): siRNA sense strand
ccauggacuuccuggauaa

SEQ ID NO: 1772834 - RNA, 19 nt, Homo sapiens
  misc_RNA (1)...(19): siRNA sense strand
gagacgcccuccuccauuc

SEQ ID NO: 1772835 - RNA, 19 nt, Homo sapiens
  misc_RNA (1)...(19): siRNA sense strand
gaacuugucauagauuuag

SEQ ID NO: 1772836 - RNA, 19 nt, Homo sapiens
  misc_RNA (1)...(19): siRNA sense strand
aggauaaacugaagggaaa

SEQ ID NO: 1772837 - RNA, 19 nt, Homo sapiens
  misc_RNA (1)...(19): siRNA sense strand
caaagcacaauuaggcaua

SEQ ID NO: 1772838 - RNA, 19 nt, Homo sapiens
  misc_RNA (1)...(19): siRNA sense strand
ggucgaugcccgauucuuu

SEQ ID NO: 1772839 - RNA, 19 nt, Homo sapiens
  misc_RNA (1)...(19): siRNA sense strand
cauaaaggauaaacugaag

SEQ ID NO: 1772840 - RNA, 19 nt, Homo sapiens
  misc_RNA (1)...(19): siRNA sense strand
gcacaauuaggcauaaaug

SEQ ID NO: 1772841 - RNA, 19 nt, Homo sapiens
  misc_RNA (1)...(19): siRNA sense strand
aaucacaaauugacgcaaa

SEQ ID NO: 1772842 - RNA, 19 nt, Homo sapiens
  misc_RNA (1)...(19): siRNA sense strand
gcucgacccuugaccuuuc

SEQ ID NO: 1772843 - RNA, 19 nt, Homo sapiens
  misc_RNA (1)...(19): siRNA sense strand
ugaagaagcagcuggaguu

SEQ ID NO: 1772844 - RNA, 19 nt, Homo sapiens
  misc_RNA (1)...(19): siRNA sense strand
uaagaaggaacccaaagaa

SEQ ID NO: 1772845 - RNA, 19 nt, Homo sapiens
  misc_RNA (1)...(19): siRNA sense strand
gaacgagccagaagacaca

SEQ ID NO: 1772846 - RNA, 19 nt, Homo sapiens
  misc_RNA (1)...(19): siRNA sense strand
gaguugcaaagcacaauua

SEQ ID NO: 1772847 - RNA, 19 nt, Homo sapiens
  misc_RNA (1)...(19): siRNA sense strand
ggauuuccuugucggauau

SEQ ID NO: 1772848 - RNA, 19 nt, Homo sapiens
  misc_RNA (1)...(19): siRNA sense strand
gaacagcccagaaaagaaa

SEQ ID NO: 1772849 - RNA, 19 nt, Homo sapiens
  misc_RNA (1)...(19): siRNA sense strand
aagcaaagcugagauggau

SEQ ID NO: 1772850 - RNA, 19 nt, Homo sapiens
  misc_RNA (1)...(19): siRNA sense strand
ccagaagcccguuccauug

SEQ ID NO: 1772851 - RNA, 19 nt, Homo sapiens
  misc_RNA (1)...(19): siRNA sense strand
agcaagagcucuccgaaau

SEQ ID NO: 1772852 - RNA, 19 nt, Homo sapiens
  misc_RNA (1)...(19): siRNA sense strand
agagcgaacuugucauaga

SEQ ID NO: 1772853 - RNA, 19 nt, Homo sapiens
  misc_RNA (1)...(19): siRNA sense strand
ccaagauccugaugagcaa

SEQ ID NO: 1772854 - RNA, 19 nt, Homo sapiens
  misc_RNA (1)...(19): siRNA sense strand
caaaagcucuaagggauaa

SEQ ID NO: 1772855 - RNA, 19 nt, Homo sapiens
  misc_RNA (1)...(19): siRNA sense strand
caaguuugccauucagaaa

SEQ ID NO: 1772856 - RNA, 19 nt, Homo sapiens
  misc_RNA (1)...(19): siRNA sense strand
ggaguaauaaauccaguug

SEQ ID NO: 1772857 - RNA, 19 nt, Homo sapiens
  misc_RNA (1)...(19): siRNA sense strand
ggagacgucagcugagaaa

SEQ ID NO: 1772858 - RNA, 19 nt, Homo sapiens
  misc_RNA (1)...(19): siRNA sense strand
gaaggaacccaaagaacca

SEQ ID NO: 1772859 - RNA, 19 nt, Homo sapiens
  misc_RNA (1)...(19): siRNA sense strand
cggauuuccuugucggaua

SEQ ID NO: 1772860 - RNA, 19 nt, Homo sapiens
  misc_RNA (1)...(19): siRNA sense strand
gagaacauccgcaggaagu

SEQ ID NO: 1772861 - RNA, 19 nt, Homo sapiens
  misc_RNA (1)...(19): siRNA sense strand
gauaguagcgauagugagu

SEQ ID NO: 1772862 - RNA, 19 nt, Homo sapiens
  misc_RNA (1)...(19): siRNA sense strand
ggaacaaugacagaaauau

SEQ ID NO: 1772863 - RNA, 19 nt, Homo sapiens
  misc_RNA (1)...(19): siRNA sense strand
gcaauaaaaggaacaauga

SEQ ID NO: 1772864 - RNA, 19 nt, Homo sapiens
  misc_RNA (1)...(19): siRNA sense strand
gaugaaugaaaucgaagua

SEQ ID NO: 1772865 - RNA, 19 nt, Homo sapiens
  misc_RNA (1)...(19): siRNA sense strand
gaagagccuccucccgaaa

SEQ ID NO: 1772866 - RNA, 19 nt, Homo sapiens
  misc_RNA (1)...(19): siRNA sense strand
gcaagagcucuccgaaaug

SEQ ID NO: 1772867 - RNA, 19 nt, Homo sapiens
  misc_RNA (1)...(19): siRNA sense strand
gcccugagccugagaagga

SEQ ID NO: 1772868 - RNA, 19 nt, Homo sapiens
  misc_RNA (1)...(19): siRNA sense strand
gguuccagcugaaucuuga

SEQ ID NO: 1772869 - RNA, 19 nt, Homo sapiens
  misc_RNA (1)...(19): siRNA sense strand
gaagcaaagcugagaugga

SEQ ID NO: 1772870 - RNA, 19 nt, Homo sapiens
  misc_RNA (1)...(19): siRNA sense strand
guaaagccaugacaaugcu

SEQ ID NO: 1772871 - RNA, 19 nt, Homo sapiens
  misc_RNA (1)...(19): siRNA sense strand
agagccaucugcuguuaaa

SEQ ID NO: 1772872 - RNA, 19 nt, Homo sapiens
  misc_RNA (1)...(19): siRNA sense strand
gaccauagagaguugcaaa

SEQ ID NO: 1772873 - RNA, 19 nt, Homo sapiens
  misc_RNA (1)...(19): siRNA sense strand
gcgagucgguccagcaaca

SEQ ID NO: 1772874 - RNA, 19 nt, Homo sapiens
  misc_RNA (1)...(19): siRNA sense strand
gggacaagcagggaguuua

SEQ ID NO: 1772875 - RNA, 19 nt, Homo sapiens
  misc_RNA (1)...(19): siRNA sense strand
ucaccagccuccaccaaga

SEQ ID NO: 1772876 - RNA, 19 nt, Homo sapiens
  misc_RNA (1)...(19): siRNA sense strand
uaccucaugucuaaagaaa

SEQ ID NO: 1772877 - RNA, 19 nt, Homo sapiens
  misc_RNA (1)...(19): siRNA sense strand
aauaauugcuaccucaugu

SEQ ID NO: 1772878 - RNA, 19 nt, Homo sapiens
  misc_RNA (1)...(19): siRNA sense strand
ggccuggguuccaauaaau

SEQ ID NO: 1772879 - RNA, 19 nt, Homo sapiens
  misc_RNA (1)...(19): siRNA sense strand
guagcaauccacauccuuu

SEQ ID NO: 1772880 - RNA, 19 nt, Homo sapiens
  misc_RNA (1)...(19): siRNA sense strand
ccacuggccugagcacaug

SEQ ID NO: 1772881 - RNA, 19 nt, Homo sapiens
  misc_RNA (1)...(19): siRNA sense strand
gaagcacaauagcugagau

SEQ ID NO: 1772882 - RNA, 19 nt, Homo sapiens
  misc_RNA (1)...(19): siRNA sense strand
gauauugccaaguacacua

SEQ ID NO: 1772883 - RNA, 19 nt, Homo sapiens
  misc_RNA (1)...(19): siRNA sense strand
agagagcgaacuugucaua

SEQ ID NO: 1772884 - RNA, 19 nt, Homo sapiens
  misc_RNA (1)...(19): siRNA sense strand
gcaggaugcugagaagaag

SEQ ID NO: 1772885 - RNA, 19 nt, Homo sapiens
  misc_RNA (1)...(19): siRNA sense strand
caaagaagguugucagaug

SEQ ID NO: 1772886 - RNA, 19 nt, Homo sapiens
  misc_RNA (1)...(19): siRNA sense strand
gaauacaucuuccauccaa

SEQ ID NO: 1772887 - RNA, 19 nt, Homo sapiens
  misc_RNA (1)...(19): siRNA sense strand
gagcuuggcugaagaggaa

SEQ ID NO: 1772888 - RNA, 19 nt, Homo sapiens
  misc_RNA (1)...(19): siRNA sense strand
uaaaugaaaucucggaaga

SEQ ID NO: 1772889 - RNA, 19 nt, Homo sapiens
  misc_RNA (1)...(19): siRNA sense strand
gaacaugagaugaaugaaa

SEQ ID NO: 1772890 - RNA, 19 nt, Homo sapiens
  misc_RNA (1)...(19): siRNA sense strand
caagagcucuccgaaauga

SEQ ID NO: 1772891 - RNA, 19 nt, Homo sapiens
  misc_RNA (1)...(19): siRNA sense strand
cgaaguauguccagaaugu

SEQ ID NO: 1772892 - RNA, 19 nt, Homo sapiens
  misc_RNA (1)...(19): siRNA sense strand
gcucaccauugaacaguua

SEQ ID NO: 1772893 - RNA, 19 nt, Homo sapiens
  misc_RNA (1)...(19): siRNA sense strand
gaacacagaaacacuaaau

SEQ ID NO: 1772894 - RNA, 19 nt, Homo sapiens
  misc_RNA (1)...(19): siRNA sense strand
cgaaaugaaacacaacuua

SEQ ID NO: 1772895 - RNA, 19 nt, Homo sapiens
  misc_RNA (1)...(19): siRNA sense strand
aaagaaaccuggcuuacug

SEQ ID NO: 1772896 - RNA, 19 nt, Homo sapiens
  misc_RNA (1)...(19): siRNA sense strand
ugucauagauuuaggagaa

SEQ ID NO: 1772897 - RNA, 19 nt, Homo sapiens
  misc_RNA (1)...(19): siRNA sense strand
ugcaagagauggagguuua

SEQ ID NO: 1772898 - RNA, 19 nt, Homo sapiens
  misc_RNA (1)...(19): siRNA sense strand
ccucaugucuaaagaaauu

SEQ ID NO: 1772899 - RNA, 19 nt, Homo sapiens
  misc_RNA (1)...(19): siRNA sense strand
gcaaauagcgaaaguaguc

SEQ ID NO: 1772900 - RNA, 19 nt, Homo sapiens
  misc_RNA (1)...(19): siRNA sense strand
gcaaagcugagauggauuu

SEQ ID NO: 1772901 - RNA, 19 nt, Homo sapiens
  misc_RNA (1)...(19): siRNA sense strand
ccgcugauauugccaagua

SEQ ID NO: 1772902 - RNA, 19 nt, Homo sapiens
  misc_RNA (1)...(19): siRNA sense strand
ccacagagcuuggcugaag

SEQ ID NO: 1772903 - RNA, 19 nt, Homo sapiens
  misc_RNA (1)...(19): siRNA sense strand
aaagagccaucugcuguua

SEQ ID NO: 1772904 - RNA, 19 nt, Homo sapiens
  misc_RNA (1)...(19): siRNA sense strand
gcaggucgaugcccgauuc

SEQ ID NO: 1772905 - RNA, 19 nt, Homo sapiens
  misc_RNA (1)...(19): siRNA sense strand
gcagcauccugaaucuuaa

SEQ ID NO: 1772906 - RNA, 19 nt, Homo sapiens
  misc_RNA (1)...(19): siRNA sense strand
ggacagaugcauuccagaa

SEQ ID NO: 1772907 - RNA, 19 nt, Homo sapiens
  misc_RNA (1)...(19): siRNA sense strand
caaagaaccaucucccaaa

SEQ ID NO: 1772908 - RNA, 19 nt, Homo sapiens
  misc_RNA (1)...(19): siRNA sense strand
gagcgaacuugucauagau

SEQ ID NO: 1772909 - RNA, 19 nt, Homo sapiens
  misc_RNA (1)...(19): siRNA sense strand
ugaaugaaaucgaaguaug

SEQ ID NO: 1772910 - RNA, 19 nt, Homo sapiens
  misc_RNA (1)...(19): siRNA sense strand
uaaccuggaucgaagcaaa

SEQ ID NO: 1772911 - RNA, 19 nt, Homo sapiens
  misc_RNA (1)...(19): siRNA sense strand
ugacagaaauauacaacga

SEQ ID NO: 1772912 - RNA, 19 nt, Homo sapiens
  misc_RNA (1)...(19): siRNA sense strand
caaacccaguggagauuaa

SEQ ID NO: 1772913 - RNA, 19 nt, Homo sapiens
  misc_RNA (1)...(19): siRNA sense strand
uauccuaccugcucaaguu

SEQ ID NO: 1772914 - RNA, 19 nt, Homo sapiens
  misc_RNA (1)...(19): siRNA sense strand
gaaaugaaacacaacuuag

SEQ ID NO: 1772915 - RNA, 19 nt, Homo sapiens
  misc_RNA (1)...(19): siRNA sense strand
ggcagcauccugaaucuua

SEQ ID NO: 1772916 - RNA, 19 nt, Homo sapiens
  misc_RNA (1)...(19): siRNA sense strand
ugagaugaaugaaaucgaa

SEQ ID NO: 1772917 - RNA, 19 nt, Homo sapiens
  misc_RNA (1)...(19): siRNA sense strand
gcacaacugcaucauuuau

SEQ ID NO: 1772918 - RNA, 19 nt, Homo sapiens
  misc_RNA (1)...(19): siRNA sense strand
gcgaacuugucauagauuu

SEQ ID NO: 1772919 - RNA, 19 nt, Homo sapiens
  misc_RNA (1)...(19): siRNA sense strand
gcacagcgauucggaggau

SEQ ID NO: 1772920 - RNA, 19 nt, Homo sapiens
  misc_RNA (1)...(19): siRNA sense strand
aagcugagauggauuugaa

SEQ ID NO: 1772921 - RNA, 19 nt, Homo sapiens
  misc_RNA (1)...(19): siRNA sense strand
gaacauccgcaggaaguuu

SEQ ID NO: 1772922 - RNA, 19 nt, Homo sapiens
  misc_RNA (1)...(19): siRNA sense strand
cagaaacacuaaauaaguc

SEQ ID NO: 1772923 - RNA, 19 nt, Homo sapiens
  misc_RNA (1)...(19): siRNA sense strand
aaaccuggcuuacugaaca

SEQ ID NO: 1772924 - RNA, 19 nt, Homo sapiens
  misc_RNA (1)...(19): siRNA sense strand
gagcagcagugaugagaag

SEQ ID NO: 1772925 - RNA, 19 nt, Homo sapiens
  misc_RNA (1)...(19): siRNA sense strand
gaacagcacccugacuaug

SEQ ID NO: 1772926 - RNA, 19 nt, Homo sapiens
  misc_RNA (1)...(19): siRNA sense strand
caucaacuguccagcagaa

SEQ ID NO: 1772927 - RNA, 19 nt, Homo sapiens
  misc_RNA (1)...(19): siRNA sense strand
gggccuggguuccaauaaa

SEQ ID NO: 1772928 - RNA, 19 nt, Homo sapiens
  misc_RNA (1)...(19): siRNA sense strand
gaaugaaaucgaaguaugu

SEQ ID NO: 1772929 - RNA, 19 nt, Homo sapiens
  misc_RNA (1)...(19): siRNA sense strand
gcaucgagacccagaguaa

SEQ ID NO: 1772930 - RNA, 19 nt, Homo sapiens
  misc_RNA (1)...(19): siRNA sense strand
agaagcagcuggaguugga

SEQ ID NO: 1772931 - RNA, 19 nt, Homo sapiens
  misc_RNA (1)...(19): siRNA sense strand
ggacaagcagggaguuuau

SEQ ID NO: 1772932 - RNA, 19 nt, Homo sapiens
  misc_RNA (1)...(19): siRNA sense strand
caacagccaguaucaaaug

SEQ ID NO: 1772933 - RNA, 19 nt, Homo sapiens
  misc_RNA (1)...(19): siRNA sense strand
ccauggacuuccuggauaa

SEQ ID NO: 1772934 - RNA, 19 nt, Homo sapiens
  misc_RNA (1)...(19): siRNA sense strand
gagacgcccuccuccauuc

SEQ ID NO: 1772935 - RNA, 19 nt, Homo sapiens
  misc_RNA (1)...(19): siRNA sense strand
gaacuugucauagauuuag

SEQ ID NO: 1772936 - RNA, 19 nt, Homo sapiens
  misc_RNA (1)...(19): siRNA sense strand
aggauaaacugaagggaaa

SEQ ID NO: 1772937 - RNA, 19 nt, Homo sapiens
  misc_RNA (1)...(19): siRNA sense strand
caaagcacaauuaggcaua

SEQ ID NO: 1772938 - RNA, 19 nt, Homo sapiens
  misc_RNA (1)...(19): siRNA sense strand
ggucgaugcccgauucuuu

SEQ ID NO: 1772939 - RNA, 19 nt, Homo sapiens
  misc_RNA (1)...(19): siRNA sense strand
cauaaaggauaaacugaag

SEQ ID NO: 1772940 - RNA, 19 nt, Homo sapiens
  misc_RNA (1)...(19): siRNA sense strand
gcacaauuaggcauaaaug

SEQ ID NO: 1772941 - RNA, 19 nt, Homo sapiens
  misc_RNA (1)...(19): siRNA sense strand
aaucacaaauugacgcaaa

SEQ ID NO: 1772942 - RNA, 19 nt, Homo sapiens
  misc_RNA (1)...(19): siRNA sense strand
gcucgacccuugaccuuuc

SEQ ID NO: 1772943 - RNA, 19 nt, Homo sapiens
  misc_RNA (1)...(19): siRNA sense strand
ugaagaagcagcuggaguu

SEQ ID NO: 1772944 - RNA, 19 nt, Homo sapiens
  misc_RNA (1)...(19): siRNA sense strand
uaagaaggaacccaaagaa

SEQ ID NO: 1772945 - RNA, 19 nt, Homo sapiens
  misc_RNA (1)...(19): siRNA sense strand
gaacgagccagaagacaca

SEQ ID NO: 1772946 - RNA, 19 nt, Homo sapiens
  misc_RNA (1)...(19): siRNA sense strand
gaguugcaaagcacaauua

SEQ ID NO: 1772947 - RNA, 19 nt, Homo sapiens
  misc_RNA (1)...(19): siRNA sense strand
ggauuuccuugucggauau

SEQ ID NO: 1772948 - RNA, 19 nt, Homo sapiens
  misc_RNA (1)...(19): siRNA sense strand
gaacagcccagaaaagaaa

SEQ ID NO: 1772949 - RNA, 19 nt, Homo sapiens
  misc_RNA (1)...(19): siRNA sense strand
aagcaaagcugagauggau

SEQ ID NO: 1772950 - RNA, 19 nt, Homo sapiens
  misc_RNA (1)...(19): siRNA sense strand
ccagaagcccguuccauug

SEQ ID NO: 1772951 - RNA, 19 nt, Homo sapiens
  misc_RNA (1)...(19): siRNA sense strand
agcaagagcucuccgaaau

SEQ ID NO: 1772952 - RNA, 19 nt, Homo sapiens
  misc_RNA (1)...(19): siRNA sense strand
agagcgaacuugucauaga

SEQ ID NO: 1772953 - RNA, 19 nt, Homo sapiens
  misc_RNA (1)...(19): siRNA sense strand
ccaagauccugaugagcaa

SEQ ID NO: 1772954 - RNA, 19 nt, Homo sapiens
  misc_RNA (1)...(19): siRNA sense strand
caaaagcucuaagggauaa

SEQ ID NO: 1772955 - RNA, 19 nt, Homo sapiens
  misc_RNA (1)...(19): siRNA sense strand
caaguuugccauucagaaa

SEQ ID NO: 1772956 - RNA, 19 nt, Homo sapiens
  misc_RNA (1)...(19): siRNA sense strand
ggaguaauaaauccaguug

SEQ ID NO: 1772957 - RNA, 19 nt, Homo sapiens
  misc_RNA (1)...(19): siRNA sense strand
ggagacgucagcugagaaa

SEQ ID NO: 1772958 - RNA, 19 nt, Homo sapiens
  misc_RNA (1)...(19): siRNA sense strand
gaaggaacccaaagaacca

SEQ ID NO: 1772959 - RNA, 19 nt, Homo sapiens
  misc_RNA (1)...(19): siRNA sense strand
cggauuuccuugucggaua

SEQ ID NO: 1772960 - RNA, 19 nt, Homo sapiens
  misc_RNA (1)...(19): siRNA sense strand
gagaacauccgcaggaagu

SEQ ID NO: 1772961 - RNA, 19 nt, Homo sapiens
  misc_RNA (1)...(19): siRNA sense strand
gauaguagcgauagugagu

SEQ ID NO: 1772962 - RNA, 19 nt, Homo sapiens
  misc_RNA (1)...(19): siRNA sense strand
ggaacaaugacagaaauau

SEQ ID NO: 1772963 - RNA, 19 nt, Homo sapiens
  misc_RNA (1)...(19): siRNA sense strand
gcaauaaaaggaacaauga

SEQ ID NO: 1772964 - RNA, 19 nt, Homo sapiens
  misc_RNA (1)...(19): siRNA sense strand
gaugaaugaaaucgaagua

SEQ ID NO: 1772965 - RNA, 19 nt, Homo sapiens
  misc_RNA (1)...(19): siRNA sense strand
gaagagccuccucccgaaa

SEQ ID NO: 1772966 - RNA, 19 nt, Homo sapiens
  misc_RNA (1)...(19): siRNA sense strand
gcaagagcucuccgaaaug

SEQ ID NO: 1772967 - RNA, 19 nt, Homo sapiens
  misc_RNA (1)...(19): siRNA sense strand
gcccugagccugagaagga

SEQ ID NO: 1772968 - RNA, 19 nt, Homo sapiens
  misc_RNA (1)...(19): siRNA sense strand
gguuccagcugaaucuuga

SEQ ID NO: 1772969 - RNA, 19 nt, Homo sapiens
  misc_RNA (1)...(19): siRNA sense strand
gaagcaaagcugagaugga

SEQ ID NO: 1772970 - RNA, 19 nt, Homo sapiens
  misc_RNA (1)...(19): siRNA sense strand
guaaagccaugacaaugcu

SEQ ID NO: 1772971 - RNA, 19 nt, Homo sapiens
  misc_RNA (1)...(19): siRNA sense strand
agagccaucugcuguuaaa

SEQ ID NO: 1772972 - RNA, 19 nt, Homo sapiens
  misc_RNA (1)...(19): siRNA sense strand
gaccauagagaguugcaaa

SEQ ID NO: 1772973 - RNA, 19 nt, Homo sapiens
  misc_RNA (1)...(19): siRNA sense strand
gcgagucgguccagcaaca

SEQ ID NO: 1772974 - RNA, 19 nt, Homo sapiens
  misc_RNA (1)...(19): siRNA sense strand
gggacaagcagggaguuua

SEQ ID NO: 1772975 - RNA, 19 nt, Homo sapiens
  misc_RNA (1)...(19): siRNA sense strand
ucaccagccuccaccaaga

SEQ ID NO: 1772976 - RNA, 19 nt, Homo sapiens
  misc_RNA (1)...(19): siRNA sense strand
uaccucaugucuaaagaaa

SEQ ID NO: 1772977 - RNA, 19 nt, Homo sapiens
  misc_RNA (1)...(19): siRNA sense strand
aauaauugcuaccucaugu

SEQ ID NO: 1772978 - RNA, 19 nt, Homo sapiens
  misc_RNA (1)...(19): siRNA sense strand
ggccuggguuccaauaaau

SEQ ID NO: 1772979 - RNA, 19 nt, Homo sapiens
  misc_RNA (1)...(19): siRNA sense strand
guagcaauccacauccuuu

SEQ ID NO: 1772980 - RNA, 19 nt, Homo sapiens
  misc_RNA (1)...(19): siRNA sense strand
ccacuggccugagcacaug

SEQ ID NO: 1772981 - RNA, 19 nt, Homo sapiens
  misc_RNA (1)...(19): siRNA sense strand
gaagcacaauagcugagau

SEQ ID NO: 1772982 - RNA, 19 nt, Homo sapiens
  misc_RNA (1)...(19): siRNA sense strand
gauauugccaaguacacua

SEQ ID NO: 1772983 - RNA, 19 nt, Homo sapiens
  misc_RNA (1)...(19): siRNA sense strand
agagagcgaacuugucaua

SEQ ID NO: 1772984 - RNA, 19 nt, Homo sapiens
  misc_RNA (1)...(19): siRNA sense strand
gcaggaugcugagaagaag

SEQ ID NO: 1772985 - RNA, 19 nt, Homo sapiens
  misc_RNA (1)...(19): siRNA sense strand
caaagaagguugucagaug

SEQ ID NO: 1772986 - RNA, 19 nt, Homo sapiens
  misc_RNA (1)...(19): siRNA sense strand
gaauacaucuuccauccaa

SEQ ID NO: 1772987 - RNA, 19 nt, Homo sapiens
  misc_RNA (1)...(19): siRNA sense strand
gagcuuggcugaagaggaa

SEQ ID NO: 1772988 - RNA, 19 nt, Homo sapiens
  misc_RNA (1)...(19): siRNA sense strand
uaaaugaaaucucggaaga

SEQ ID NO: 1772989 - RNA, 19 nt, Homo sapiens
  misc_RNA (1)...(19): siRNA sense strand
gaacaugagaugaaugaaa

SEQ ID NO: 1772990 - RNA, 19 nt, Homo sapiens
  misc_RNA (1)...(19): siRNA sense strand
caagagcucuccgaaauga

SEQ ID NO: 1772991 - RNA, 19 nt, Homo sapiens
  misc_RNA (1)...(19): siRNA sense strand
cgaaguauguccagaaugu

SEQ ID NO: 1772992 - RNA, 19 nt, Homo sapiens
  misc_RNA (1)...(19): siRNA sense strand
gcucaccauugaacaguua

SEQ ID NO: 1772993 - RNA, 19 nt, Homo sapiens
  misc_RNA (1)...(19): siRNA sense strand
gaacacagaaacacuaaau

SEQ ID NO: 1772994 - RNA, 19 nt, Homo sapiens
  misc_RNA (1)...(19): siRNA sense strand
cgaaaugaaacacaacuua

SEQ ID NO: 1772995 - RNA, 19 nt, Homo sapiens
  misc_RNA (1)...(19): siRNA sense strand
aaagaaaccuggcuuacug

SEQ ID NO: 1772996 - RNA, 19 nt, Homo sapiens
  misc_RNA (1)...(19): siRNA sense strand
ugucauagauuuaggagaa

SEQ ID NO: 1772997 - RNA, 19 nt, Homo sapiens
  misc_RNA (1)...(19): siRNA sense strand
ugcaagagauggagguuua

SEQ ID NO: 1772998 - RNA, 19 nt, Homo sapiens
  misc_RNA (1)...(19): siRNA sense strand
ccucaugucuaaagaaauu

SEQ ID NO: 1772999 - RNA, 19 nt, Homo sapiens
  misc_RNA (1)...(19): siRNA sense strand
gcaaauagcgaaaguaguc

SEQ ID NO: 1773000 - RNA, 19 nt, Homo sapiens
  misc_RNA (1)...(19): siRNA sense strand
gcaaagcugagauggauuu

SEQ ID NO: 1773001 - RNA, 19 nt, Homo sapiens
  misc_RNA (1)...(19): siRNA sense strand
ccgcugauauugccaagua

SEQ ID NO: 1773002 - RNA, 19 nt, Homo sapiens
  misc_RNA (1)...(19): siRNA sense strand
ccacagagcuuggcugaag

SEQ ID NO: 1773003 - RNA, 19 nt, Homo sapiens
  misc_RNA (1)...(19): siRNA sense strand
aaagagccaucugcuguua

SEQ ID NO: 1773004 - RNA, 19 nt, Homo sapiens
  misc_RNA (1)...(19): siRNA sense strand
gcaggucgaugcccgauuc

SEQ ID NO: 1773005 - RNA, 19 nt, Homo sapiens
  misc_RNA (1)...(19): siRNA sense strand
gcagcauccugaaucuuaa

SEQ ID NO: 1773006 - RNA, 19 nt, Homo sapiens
  misc_RNA (1)...(19): siRNA sense strand
ggacagaugcauuccagaa

SEQ ID NO: 1773007 - RNA, 19 nt, Homo sapiens
  misc_RNA (1)...(19): siRNA sense strand
caaagaaccaucucccaaa

SEQ ID NO: 1773008 - RNA, 19 nt, Homo sapiens
  misc_RNA (1)...(19): siRNA sense strand
gagcgaacuugucauagau

SEQ ID NO: 1773009 - RNA, 19 nt, Homo sapiens
  misc_RNA (1)...(19): siRNA sense strand
ugaaugaaaucgaaguaug

SEQ ID NO: 1773010 - RNA, 19 nt, Homo sapiens
  misc_RNA (1)...(19): siRNA sense strand
uaaccuggaucgaagcaaa

SEQ ID NO: 1773011 - RNA, 19 nt, Homo sapiens
  misc_RNA (1)...(19): siRNA sense strand
ugacagaaauauacaacga

SEQ ID NO: 1773012 - RNA, 19 nt, Homo sapiens
  misc_RNA (1)...(19): siRNA sense strand
caaacccaguggagauuaa

SEQ ID NO: 1773013 - RNA, 19 nt, Homo sapiens
  misc_RNA (1)...(19): siRNA sense strand
uauccuaccugcucaaguu

SEQ ID NO: 1773014 - RNA, 19 nt, Homo sapiens
  misc_RNA (1)...(19): siRNA sense strand
gaaaugaaacacaacuuag

SEQ ID NO: 1773015 - RNA, 19 nt, Homo sapiens
  misc_RNA (1)...(19): siRNA sense strand
ggcagcauccugaaucuua

SEQ ID NO: 1773016 - RNA, 19 nt, Homo sapiens
  misc_RNA (1)...(19): siRNA sense strand
ugagaugaaugaaaucgaa

SEQ ID NO: 1773017 - RNA, 19 nt, Homo sapiens
  misc_RNA (1)...(19): siRNA sense strand
gcacaacugcaucauuuau

SEQ ID NO: 1773018 - RNA, 19 nt, Homo sapiens
  misc_RNA (1)...(19): siRNA sense strand
gcgaacuugucauagauuu

SEQ ID NO: 1773019 - RNA, 19 nt, Homo sapiens
  misc_RNA (1)...(19): siRNA sense strand
gcacagcgauucggaggau

SEQ ID NO: 1773020 - RNA, 19 nt, Homo sapiens
  misc_RNA (1)...(19): siRNA sense strand
aagcugagauggauuugaa

SEQ ID NO: 1773021 - RNA, 19 nt, Homo sapiens
  misc_RNA (1)...(19): siRNA sense strand
gaacauccgcaggaaguuu

SEQ ID NO: 1773022 - RNA, 19 nt, Homo sapiens
  misc_RNA (1)...(19): siRNA sense strand
cagaaacacuaaauaaguc

SEQ ID NO: 1773023 - RNA, 19 nt, Homo sapiens
  misc_RNA (1)...(19): siRNA sense strand
aaaccuggcuuacugaaca

SEQ ID NO: 1773024 - RNA, 19 nt, Homo sapiens
  misc_RNA (1)...(19): siRNA sense strand
gagcagcagugaugagaag

SEQ ID NO: 1773025 - RNA, 19 nt, Homo sapiens
  misc_RNA (1)...(19): siRNA sense strand
gaacagcacccugacuaug

SEQ ID NO: 1773026 - RNA, 19 nt, Homo sapiens
  misc_RNA (1)...(19): siRNA sense strand
caucaacuguccagcagaa

SEQ ID NO: 1773027 - RNA, 19 nt, Homo sapiens
  misc_RNA (1)...(19): siRNA sense strand
gggccuggguuccaauaaa

SEQ ID NO: 1773028 - RNA, 19 nt, Homo sapiens
  misc_RNA (1)...(19): siRNA sense strand
gaaugaaaucgaaguaugu

SEQ ID NO: 1773029 - RNA, 19 nt, Homo sapiens
  misc_RNA (1)...(19): siRNA sense strand
gcaucgagacccagaguaa

SEQ ID NO: 1773030 - RNA, 19 nt, Homo sapiens
  misc_RNA (1)...(19): siRNA sense strand
agaagcagcuggaguugga

SEQ ID NO: 1773031 - RNA, 19 nt, Homo sapiens
  misc_RNA (1)...(19): siRNA sense strand
ggacaagcagggaguuuau

SEQ ID NO: 1773032 - RNA, 19 nt, Homo sapiens
  misc_RNA (1)...(19): siRNA sense strand
caacagccaguaucaaaug

SEQ ID NO: 1773033 - RNA, 19 nt, Homo sapiens
  misc_RNA (1)...(19): siRNA sense strand
ccauggacuuccuggauaa

SEQ ID NO: 1773034 - RNA, 19 nt, Homo sapiens
  misc_RNA (1)...(19): siRNA sense strand
gagacgcccuccuccauuc

SEQ ID NO: 1773035 - RNA, 19 nt, Homo sapiens
  misc_RNA (1)...(19): siRNA sense strand
gaacuugucauagauuuag

SEQ ID NO: 1773036 - RNA, 19 nt, Homo sapiens
  misc_RNA (1)...(19): siRNA sense strand
aggauaaacugaagggaaa

SEQ ID NO: 1773037 - RNA, 19 nt, Homo sapiens
  misc_RNA (1)...(19): siRNA sense strand
caaagcacaauuaggcaua

SEQ ID NO: 1773038 - RNA, 19 nt, Homo sapiens
  misc_RNA (1)...(19): siRNA sense strand
ggucgaugcccgauucuuu

SEQ ID NO: 1773039 - RNA, 19 nt, Homo sapiens
  misc_RNA (1)...(19): siRNA sense strand
cauaaaggauaaacugaag

SEQ ID NO: 1773040 - RNA, 19 nt, Homo sapiens
  misc_RNA (1)...(19): siRNA sense strand
gcacaauuaggcauaaaug

SEQ ID NO: 1773041 - RNA, 19 nt, Homo sapiens
  misc_RNA (1)...(19): siRNA sense strand
aaucacaaauugacgcaaa

SEQ ID NO: 1773042 - RNA, 19 nt, Homo sapiens
  misc_RNA (1)...(19): siRNA sense strand
gcucgacccuugaccuuuc

SEQ ID NO: 1773043 - RNA, 19 nt, Homo sapiens
  misc_RNA (1)...(19): siRNA sense strand
ugaagaagcagcuggaguu

SEQ ID NO: 1773044 - RNA, 19 nt, Homo sapiens
  misc_RNA (1)...(19): siRNA sense strand
uaagaaggaacccaaagaa

SEQ ID NO: 1773045 - RNA, 19 nt, Homo sapiens
  misc_RNA (1)...(19): siRNA sense strand
gaacgagccagaagacaca

SEQ ID NO: 1773046 - RNA, 19 nt, Homo sapiens
  misc_RNA (1)...(19): siRNA sense strand
gaguugcaaagcacaauua

SEQ ID NO: 1773047 - RNA, 19 nt, Homo sapiens
  misc_RNA (1)...(19): siRNA sense strand
ggauuuccuugucggauau

SEQ ID NO: 1773048 - RNA, 19 nt, Homo sapiens
  misc_RNA (1)...(19): siRNA sense strand
gaacagcccagaaaagaaa

SEQ ID NO: 1773049 - RNA, 19 nt, Homo sapiens
  misc_RNA (1)...(19): siRNA sense strand
aagcaaagcugagauggau

SEQ ID NO: 1773050 - RNA, 19 nt, Homo sapiens
  misc_RNA (1)...(19): siRNA sense strand
ccagaagcccguuccauug

SEQ ID NO: 1773051 - RNA, 19 nt, Homo sapiens
  misc_RNA (1)...(19): siRNA sense strand
agcaagagcucuccgaaau

SEQ ID NO: 1773052 - RNA, 19 nt, Homo sapiens
  misc_RNA (1)...(19): siRNA sense strand
agagcgaacuugucauaga

SEQ ID NO: 1773053 - RNA, 19 nt, Homo sapiens
  misc_RNA (1)...(19): siRNA sense strand
ccaagauccugaugagcaa

SEQ ID NO: 1773054 - RNA, 19 nt, Homo sapiens
  misc_RNA (1)...(19): siRNA sense strand
caaaagcucuaagggauaa

SEQ ID NO: 1773055 - RNA, 19 nt, Homo sapiens
  misc_RNA (1)...(19): siRNA sense strand
caaguuugccauucagaaa

SEQ ID NO: 1773056 - RNA, 19 nt, Homo sapiens
  misc_RNA (1)...(19): siRNA sense strand
ggaguaauaaauccaguug

SEQ ID NO: 1773057 - RNA, 19 nt, Homo sapiens
  misc_RNA (1)...(19): siRNA sense strand
ggagacgucagcugagaaa

SEQ ID NO: 1773058 - RNA, 19 nt, Homo sapiens
  misc_RNA (1)...(19): siRNA sense strand
gaaggaacccaaagaacca

SEQ ID NO: 1773059 - RNA, 19 nt, Homo sapiens
  misc_RNA (1)...(19): siRNA sense strand
cggauuuccuugucggaua

SEQ ID NO: 1773060 - RNA, 19 nt, Homo sapiens
  misc_RNA (1)...(19): siRNA sense strand
gagaacauccgcaggaagu

SEQ ID NO: 1773061 - RNA, 19 nt, Homo sapiens
  misc_RNA (1)...(19): siRNA sense strand
gauaguagcgauagugagu

SEQ ID NO: 1773062 - RNA, 19 nt, Homo sapiens
  misc_RNA (1)...(19): siRNA sense strand
ggaacaaugacagaaauau

SEQ ID NO: 1773063 - RNA, 19 nt, Homo sapiens
  misc_RNA (1)...(19): siRNA sense strand
gcaauaaaaggaacaauga

SEQ ID NO: 1773064 - RNA, 19 nt, Homo sapiens
  misc_RNA (1)...(19): siRNA sense strand
gaugaaugaaaucgaagua

SEQ ID NO: 1773065 - RNA, 19 nt, Homo sapiens
  misc_RNA (1)...(19): siRNA sense strand
gaagagccuccucccgaaa

SEQ ID NO: 1773066 - RNA, 19 nt, Homo sapiens
  misc_RNA (1)...(19): siRNA sense strand
gcaagagcucuccgaaaug

SEQ ID NO: 1773067 - RNA, 19 nt, Homo sapiens
  misc_RNA (1)...(19): siRNA sense strand
gcccugagccugagaagga

SEQ ID NO: 1773068 - RNA, 19 nt, Homo sapiens
  misc_RNA (1)...(19): siRNA sense strand
gguuccagcugaaucuuga

SEQ ID NO: 1773069 - RNA, 19 nt, Homo sapiens
  misc_RNA (1)...(19): siRNA sense strand
gaagcaaagcugagaugga

SEQ ID NO: 1773070 - RNA, 19 nt, Homo sapiens
  misc_RNA (1)...(19): siRNA sense strand
guaaagccaugacaaugcu

SEQ ID NO: 1773071 - RNA, 19 nt, Homo sapiens
  misc_RNA (1)...(19): siRNA sense strand
agagccaucugcuguuaaa

SEQ ID NO: 1773072 - RNA, 19 nt, Homo sapiens
  misc_RNA (1)...(19): siRNA sense strand
gaccauagagaguugcaaa

SEQ ID NO: 1773073 - RNA, 19 nt, Homo sapiens
  misc_RNA (1)...(19): siRNA sense strand
gcgagucgguccagcaaca

SEQ ID NO: 1773074 - RNA, 19 nt, Homo sapiens
  misc_RNA (1)...(19): siRNA sense strand
gggacaagcagggaguuua

SEQ ID NO: 1773075 - RNA, 19 nt, Homo sapiens
  misc_RNA (1)...(19): siRNA sense strand
ucaccagccuccaccaaga

SEQ ID NO: 1773076 - RNA, 19 nt, Homo sapiens
  misc_RNA (1)...(19): siRNA sense strand
uaccucaugucuaaagaaa

SEQ ID NO: 1773077 - RNA, 19 nt, Homo sapiens
  misc_RNA (1)...(19): siRNA sense strand
aauaauugcuaccucaugu

SEQ ID NO: 1773078 - RNA, 19 nt, Homo sapiens
  misc_RNA (1)...(19): siRNA sense strand
ggccuggguuccaauaaau

SEQ ID NO: 1773079 - RNA, 19 nt, Homo sapiens
  misc_RNA (1)...(19): siRNA sense strand
guagcaauccacauccuuu

SEQ ID NO: 1773080 - RNA, 19 nt, Homo sapiens
  misc_RNA (1)...(19): siRNA sense strand
ccacuggccugagcacaug

SEQ ID NO: 1773081 - RNA, 19 nt, Homo sapiens
  misc_RNA (1)...(19): siRNA sense strand
gaagcacaauagcugagau

SEQ ID NO: 1773082 - RNA, 19 nt, Homo sapiens
  misc_RNA (1)...(19): siRNA sense strand
gauauugccaaguacacua

SEQ ID NO: 1773083 - RNA, 19 nt, Homo sapiens
  misc_RNA (1)...(19): siRNA sense strand
agagagcgaacuugucaua

SEQ ID NO: 1773084 - RNA, 19 nt, Homo sapiens
  misc_RNA (1)...(19): siRNA sense strand
gcaggaugcugagaagaag

SEQ ID NO: 1773085 - RNA, 19 nt, Homo sapiens
  misc_RNA (1)...(19): siRNA sense strand
caaagaagguugucagaug

SEQ ID NO: 1773086 - RNA, 19 nt, Homo sapiens
  misc_RNA (1)...(19): siRNA sense strand
gaauacaucuuccauccaa

SEQ ID NO: 1773087 - RNA, 19 nt, Homo sapiens
  misc_RNA (1)...(19): siRNA sense strand
gagcuuggcugaagaggaa

SEQ ID NO: 1773088 - RNA, 19 nt, Homo sapiens
  misc_RNA (1)...(19): siRNA sense strand
uaaaugaaaucucggaaga

SEQ ID NO: 1773089 - RNA, 19 nt, Homo sapiens
  misc_RNA (1)...(19): siRNA sense strand
gaacaugagaugaaugaaa

SEQ ID NO: 1773090 - RNA, 19 nt, Homo sapiens
  misc_RNA (1)...(19): siRNA sense strand
caagagcucuccgaaauga

SEQ ID NO: 1773091 - RNA, 19 nt, Homo sapiens
  misc_RNA (1)...(19): siRNA sense strand
cgaaguauguccagaaugu

SEQ ID NO: 1773092 - RNA, 19 nt, Homo sapiens
  misc_RNA (1)...(19): siRNA sense strand
gcucaccauugaacaguua

SEQ ID NO: 1773093 - RNA, 19 nt, Homo sapiens
  misc_RNA (1)...(19): siRNA sense strand
gaacacagaaacacuaaau

SEQ ID NO: 1773094 - RNA, 19 nt, Homo sapiens
  misc_RNA (1)...(19): siRNA sense strand
cgaaaugaaacacaacuua

SEQ ID NO: 1773095 - RNA, 19 nt, Homo sapiens
  misc_RNA (1)...(19): siRNA sense strand
aaagaaaccuggcuuacug

SEQ ID NO: 1773096 - RNA, 19 nt, Homo sapiens
  misc_RNA (1)...(19): siRNA sense strand
ugucauagauuuaggagaa

SEQ ID NO: 1773097 - RNA, 19 nt, Homo sapiens
  misc_RNA (1)...(19): siRNA sense strand
ugcaagagauggagguuua

SEQ ID NO: 1773098 - RNA, 19 nt, Homo sapiens
  misc_RNA (1)...(19): siRNA sense strand
ccucaugucuaaagaaauu

SEQ ID NO: 1773099 - RNA, 19 nt, Homo sapiens
  misc_RNA (1)...(19): siRNA sense strand
gcaaauagcgaaaguaguc

SEQ ID NO: 1773100 - RNA, 19 nt, Homo sapiens
  misc_RNA (1)...(19): siRNA sense strand
gcaaagcugagauggauuu

SEQ ID NO: 1773101 - RNA, 19 nt, Homo sapiens
  misc_RNA (1)...(19): siRNA sense strand
ccgcugauauugccaagua

SEQ ID NO: 1773102 - RNA, 19 nt, Homo sapiens
  misc_RNA (1)...(19): siRNA sense strand
ccacagagcuuggcugaag

SEQ ID NO: 1773103 - RNA, 19 nt, Homo sapiens
  misc_RNA (1)...(19): siRNA sense strand
aaagagccaucugcuguua

SEQ ID NO: 1773104 - RNA, 19 nt, Homo sapiens
  misc_RNA (1)...(19): siRNA sense strand
gcaggucgaugcccgauuc

SEQ ID NO: 1773105 - RNA, 19 nt, Homo sapiens
  misc_RNA (1)...(19): siRNA sense strand
gcagcauccugaaucuuaa

SEQ ID NO: 1773106 - RNA, 19 nt, Homo sapiens
  misc_RNA (1)...(19): siRNA sense strand
ggacagaugcauuccagaa

SEQ ID NO: 1773107 - RNA, 19 nt, Homo sapiens
  misc_RNA (1)...(19): siRNA sense strand
caaagaaccaucucccaaa

SEQ ID NO: 1773108 - RNA, 19 nt, Homo sapiens
  misc_RNA (1)...(19): siRNA sense strand
gagcgaacuugucauagau

SEQ ID NO: 1773109 - RNA, 19 nt, Homo sapiens
  misc_RNA (1)...(19): siRNA sense strand
ugaaugaaaucgaaguaug

SEQ ID NO: 1773110 - RNA, 19 nt, Homo sapiens
  misc_RNA (1)...(19): siRNA sense strand
uaaccuggaucgaagcaaa

SEQ ID NO: 1773111 - RNA, 19 nt, Homo sapiens
  misc_RNA (1)...(19): siRNA sense strand
ugacagaaauauacaacga

SEQ ID NO: 1773112 - RNA, 19 nt, Homo sapiens
  misc_RNA (1)...(19): siRNA sense strand
caaacccaguggagauuaa

SEQ ID NO: 1773113 - RNA, 19 nt, Homo sapiens
  misc_RNA (1)...(19): siRNA sense strand
uauccuaccugcucaaguu

SEQ ID NO: 1773114 - RNA, 19 nt, Homo sapiens
  misc_RNA (1)...(19): siRNA sense strand
gaaaugaaacacaacuuag

SEQ ID NO: 1773115 - RNA, 19 nt, Homo sapiens
  misc_RNA (1)...(19): siRNA sense strand
ggcagcauccugaaucuua

SEQ ID NO: 1773116 - RNA, 19 nt, Homo sapiens
  misc_RNA (1)...(19): siRNA sense strand
ugagaugaaugaaaucgaa

SEQ ID NO: 1773117 - RNA, 19 nt, Homo sapiens
  misc_RNA (1)...(19): siRNA sense strand
gcacaacugcaucauuuau

SEQ ID NO: 1773118 - RNA, 19 nt, Homo sapiens
  misc_RNA (1)...(19): siRNA sense strand
gcgaacuugucauagauuu

SEQ ID NO: 1773119 - RNA, 19 nt, Homo sapiens
  misc_RNA (1)...(19): siRNA sense strand
gcacagcgauucggaggau

SEQ ID NO: 1773120 - RNA, 19 nt, Homo sapiens
  misc_RNA (1)...(19): siRNA sense strand
aagcugagauggauuugaa

SEQ ID NO: 1773121 - RNA, 19 nt, Homo sapiens
  misc_RNA (1)...(19): siRNA sense strand
gaacauccgcaggaaguuu

SEQ ID NO: 1773122 - RNA, 19 nt, Homo sapiens
  misc_RNA (1)...(19): siRNA sense strand
cagaaacacuaaauaaguc

SEQ ID NO: 1773123 - RNA, 19 nt, Homo sapiens
  misc_RNA (1)...(19): siRNA sense strand
aaaccuggcuuacugaaca

SEQ ID NO: 1773124 - RNA, 19 nt, Homo sapiens
  misc_RNA (1)...(19): siRNA sense strand
gagcagcagugaugagaag

SEQ ID NO: 1773125 - RNA, 19 nt, Homo sapiens
  misc_RNA (1)...(19): siRNA sense strand
gaacagcacccugacuaug

SEQ ID NO: 1773126 - RNA, 19 nt, Homo sapiens
  misc_RNA (1)...(19): siRNA sense strand
caucaacuguccagcagaa

SEQ ID NO: 1773127 - RNA, 19 nt, Homo sapiens
  misc_RNA (1)...(19): siRNA sense strand
gggccuggguuccaauaaa

SEQ ID NO: 1773128 - RNA, 19 nt, Homo sapiens
  misc_RNA (1)...(19): siRNA sense strand
gaaugaaaucgaaguaugu

SEQ ID NO: 1773129 - RNA, 19 nt, Homo sapiens
  misc_RNA (1)...(19): siRNA sense strand
gcaucgagacccagaguaa

SEQ ID NO: 1773130 - RNA, 19 nt, Homo sapiens
  misc_RNA (1)...(19): siRNA sense strand
agaagcagcuggaguugga

SEQ ID NO: 1773131 - RNA, 19 nt, Homo sapiens
  misc_RNA (1)...(19): siRNA sense strand
ggacaagcagggaguuuau

SEQ ID NO: 1773132 - RNA, 19 nt, Homo sapiens
  misc_RNA (1)...(19): siRNA sense strand
caacagccaguaucaaaug

SEQ ID NO: 1773133 - RNA, 19 nt, Homo sapiens
  misc_RNA (1)...(19): siRNA sense strand
ccauggacuuccuggauaa

SEQ ID NO: 1773134 - RNA, 19 nt, Homo sapiens
  misc_RNA (1)...(19): siRNA sense strand
gagacgcccuccuccauuc

SEQ ID NO: 1773135 - RNA, 19 nt, Homo sapiens
  misc_RNA (1)...(19): siRNA sense strand
gaacuugucauagauuuag

SEQ ID NO: 1773136 - RNA, 19 nt, Homo sapiens
  misc_RNA (1)...(19): siRNA sense strand
aggauaaacugaagggaaa

SEQ ID NO: 1773137 - RNA, 19 nt, Homo sapiens
  misc_RNA (1)...(19): siRNA sense strand
caaagcacaauuaggcaua

SEQ ID NO: 1773138 - RNA, 19 nt, Homo sapiens
  misc_RNA (1)...(19): siRNA sense strand
ggucgaugcccgauucuuu

SEQ ID NO: 1773139 - RNA, 19 nt, Homo sapiens
  misc_RNA (1)...(19): siRNA sense strand
cauaaaggauaaacugaag

SEQ ID NO: 1773140 - RNA, 19 nt, Homo sapiens
  misc_RNA (1)...(19): siRNA sense strand
gcacaauuaggcauaaaug

SEQ ID NO: 1773141 - RNA, 19 nt, Homo sapiens
  misc_RNA (1)...(19): siRNA sense strand
aaucacaaauugacgcaaa

SEQ ID NO: 1773142 - RNA, 19 nt, Homo sapiens
  misc_RNA (1)...(19): siRNA sense strand
gcucgacccuugaccuuuc

SEQ ID NO: 1773143 - RNA, 19 nt, Homo sapiens
  misc_RNA (1)...(19): siRNA sense strand
ugaagaagcagcuggaguu

SEQ ID NO: 1773144 - RNA, 19 nt, Homo sapiens
  misc_RNA (1)...(19): siRNA sense strand
uaagaaggaacccaaagaa

SEQ ID NO: 1773145 - RNA, 19 nt, Homo sapiens
  misc_RNA (1)...(19): siRNA sense strand
gaacgagccagaagacaca

SEQ ID NO: 1773146 - RNA, 19 nt, Homo sapiens
  misc_RNA (1)...(19): siRNA sense strand
gaguugcaaagcacaauua

SEQ ID NO: 1773147 - RNA, 19 nt, Homo sapiens
  misc_RNA (1)...(19): siRNA sense strand
ggauuuccuugucggauau

SEQ ID NO: 1773148 - RNA, 19 nt, Homo sapiens
  misc_RNA (1)...(19): siRNA sense strand
gaacagcccagaaaagaaa

SEQ ID NO: 1773149 - RNA, 19 nt, Homo sapiens
  misc_RNA (1)...(19): siRNA sense strand
aagcaaagcugagauggau

SEQ ID NO: 1773150 - RNA, 19 nt, Homo sapiens
  misc_RNA (1)...(19): siRNA sense strand
ccagaagcccguuccauug

SEQ ID NO: 1773151 - RNA, 19 nt, Homo sapiens
  misc_RNA (1)...(19): siRNA sense strand
agcaagagcucuccgaaau

SEQ ID NO: 1773152 - RNA, 19 nt, Homo sapiens
  misc_RNA (1)...(19): siRNA sense strand
agagcgaacuugucauaga

SEQ ID NO: 1773153 - RNA, 19 nt, Homo sapiens
  misc_RNA (1)...(19): siRNA sense strand
ccaagauccugaugagcaa

SEQ ID NO: 1773154 - RNA, 19 nt, Homo sapiens
  misc_RNA (1)...(19): siRNA sense strand
caaaagcucuaagggauaa

SEQ ID NO: 1773155 - RNA, 19 nt, Homo sapiens
  misc_RNA (1)...(19): siRNA sense strand
caaguuugccauucagaaa

SEQ ID NO: 1773156 - RNA, 19 nt, Homo sapiens
  misc_RNA (1)...(19): siRNA sense strand
ggaguaauaaauccaguug

SEQ ID NO: 1773157 - RNA, 19 nt, Homo sapiens
  misc_RNA (1)...(19): siRNA sense strand
ggagacgucagcugagaaa

SEQ ID NO: 1773158 - RNA, 19 nt, Homo sapiens
  misc_RNA (1)...(19): siRNA sense strand
gaaggaacccaaagaacca

SEQ ID NO: 1773159 - RNA, 19 nt, Homo sapiens
  misc_RNA (1)...(19): siRNA sense strand
cggauuuccuugucggaua

SEQ ID NO: 1773160 - RNA, 19 nt, Homo sapiens
  misc_RNA (1)...(19): siRNA sense strand
gagaacauccgcaggaagu

SEQ ID NO: 1773161 - RNA, 19 nt, Homo sapiens
  misc_RNA (1)...(19): siRNA sense strand
gauaguagcgauagugagu

SEQ ID NO: 1773162 - RNA, 19 nt, Homo sapiens
  misc_RNA (1)...(19): siRNA sense strand
ggaacaaugacagaaauau

SEQ ID NO: 1773163 - RNA, 19 nt, Homo sapiens
  misc_RNA (1)...(19): siRNA sense strand
gcaauaaaaggaacaauga

SEQ ID NO: 1773164 - RNA, 19 nt, Homo sapiens
  misc_RNA (1)...(19): siRNA sense strand
gaugaaugaaaucgaagua

SEQ ID NO: 1773165 - RNA, 19 nt, Homo sapiens
  misc_RNA (1)...(19): siRNA sense strand
gaagagccuccucccgaaa

SEQ ID NO: 1773166 - RNA, 19 nt, Homo sapiens
  misc_RNA (1)...(19): siRNA sense strand
gcaagagcucuccgaaaug

SEQ ID NO: 1773167 - RNA, 19 nt, Homo sapiens
  misc_RNA (1)...(19): siRNA sense strand
gcccugagccugagaagga

SEQ ID NO: 1773168 - RNA, 19 nt, Homo sapiens
  misc_RNA (1)...(19): siRNA sense strand
gguuccagcugaaucuuga

SEQ ID NO: 1773169 - RNA, 19 nt, Homo sapiens
  misc_RNA (1)...(19): siRNA sense strand
gaagcaaagcugagaugga

SEQ ID NO: 1773170 - RNA, 19 nt, Homo sapiens
  misc_RNA (1)...(19): siRNA sense strand
guaaagccaugacaaugcu

SEQ ID NO: 1773171 - RNA, 19 nt, Homo sapiens
  misc_RNA (1)...(19): siRNA sense strand
agagccaucugcuguuaaa

SEQ ID NO: 1773172 - RNA, 19 nt, Homo sapiens
  misc_RNA (1)...(19): siRNA sense strand
gaccauagagaguugcaaa

SEQ ID NO: 1773173 - RNA, 19 nt, Homo sapiens
  misc_RNA (1)...(19): siRNA sense strand
gcgagucgguccagcaaca

SEQ ID NO: 1773174 - RNA, 19 nt, Homo sapiens
  misc_RNA (1)...(19): siRNA sense strand
gggacaagcagggaguuua

SEQ ID NO: 1773175 - RNA, 19 nt, Homo sapiens
  misc_RNA (1)...(19): siRNA sense strand
ucaccagccuccaccaaga

SEQ ID NO: 1773176 - RNA, 19 nt, Homo sapiens
  misc_RNA (1)...(19): siRNA sense strand
uaccucaugucuaaagaaa

SEQ ID NO: 1773177 - RNA, 19 nt, Homo sapiens
  misc_RNA (1)...(19): siRNA sense strand
aauaauugcuaccucaugu

SEQ ID NO: 1773178 - RNA, 19 nt, Homo sapiens
  misc_RNA (1)...(19): siRNA sense strand
ggccuggguuccaauaaau

SEQ ID NO: 1773179 - RNA, 19 nt, Homo sapiens
  misc_RNA (1)...(19): siRNA sense strand
guagcaauccacauccuuu

SEQ ID NO: 1773180 - RNA, 19 nt, Homo sapiens
  misc_RNA (1)...(19): siRNA sense strand
ccacuggccugagcacaug

SEQ ID NO: 1773181 - RNA, 19 nt, Homo sapiens
  misc_RNA (1)...(19): siRNA sense strand
gaagcacaauagcugagau

SEQ ID NO: 1773182 - RNA, 19 nt, Homo sapiens
  misc_RNA (1)...(19): siRNA sense strand
gauauugccaaguacacua

SEQ ID NO: 1773183 - RNA, 19 nt, Homo sapiens
  misc_RNA (1)...(19): siRNA sense strand
agagagcgaacuugucaua

SEQ ID NO: 1773184 - RNA, 19 nt, Homo sapiens
  misc_RNA (1)...(19): siRNA sense strand
gcaggaugcugagaagaag

SEQ ID NO: 1773185 - RNA, 19 nt, Homo sapiens
  misc_RNA (1)...(19): siRNA sense strand
caaagaagguugucagaug

SEQ ID NO: 1773186 - RNA, 19 nt, Homo sapiens
  misc_RNA (1)...(19): siRNA sense strand
gaauacaucuuccauccaa

SEQ ID NO: 1773187 - RNA, 19 nt, Homo sapiens
  misc_RNA (1)...(19): siRNA sense strand
gagcuuggcugaagaggaa

SEQ ID NO: 1773188 - RNA, 19 nt, Homo sapiens
  misc_RNA (1)...(19): siRNA sense strand
uaaaugaaaucucggaaga

SEQ ID NO: 1773189 - RNA, 19 nt, Homo sapiens
  misc_RNA (1)...(19): siRNA sense strand
gaacaugagaugaaugaaa

SEQ ID NO: 1773190 - RNA, 19 nt, Homo sapiens
  misc_RNA (1)...(19): siRNA sense strand
caagagcucuccgaaauga

SEQ ID NO: 1773191 - RNA, 19 nt, Homo sapiens
  misc_RNA (1)...(19): siRNA sense strand
cgaaguauguccagaaugu

SEQ ID NO: 1773192 - RNA, 19 nt, Homo sapiens
  misc_RNA (1)...(19): siRNA sense strand
gcucaccauugaacaguua

SEQ ID NO: 1773193 - RNA, 19 nt, Homo sapiens
  misc_RNA (1)...(19): siRNA sense strand
gaacacagaaacacuaaau

SEQ ID NO: 1773194 - RNA, 19 nt, Homo sapiens
  misc_RNA (1)...(19): siRNA sense strand
cgaaaugaaacacaacuua

SEQ ID NO: 1773195 - RNA, 19 nt, Homo sapiens
  misc_RNA (1)...(19): siRNA sense strand
aaagaaaccuggcuuacug

SEQ ID NO: 1773196 - RNA, 19 nt, Homo sapiens
  misc_RNA (1)...(19): siRNA sense strand
ugucauagauuuaggagaa

SEQ ID NO: 1773197 - RNA, 19 nt, Homo sapiens
  misc_RNA (1)...(19): siRNA sense strand
ugcaagagauggagguuua

SEQ ID NO: 1773198 - RNA, 19 nt, Homo sapiens
  misc_RNA (1)...(19): siRNA sense strand
ccucaugucuaaagaaauu

SEQ ID NO: 1773199 - RNA, 19 nt, Homo sapiens
  misc_RNA (1)...(19): siRNA sense strand
gcaaauagcgaaaguaguc

SEQ ID NO: 1773200 - RNA, 19 nt, Homo sapiens
  misc_RNA (1)...(19): siRNA sense strand
gcaaagcugagauggauuu

SEQ ID NO: 1773201 - RNA, 19 nt, Homo sapiens
  misc_RNA (1)...(19): siRNA sense strand
ccgcugauauugccaagua

SEQ ID NO: 1773202 - RNA, 19 nt, Homo sapiens
  misc_RNA (1)...(19): siRNA sense strand
ccacagagcuuggcugaag

SEQ ID NO: 1773203 - RNA, 19 nt, Homo sapiens
  misc_RNA (1)...(19): siRNA sense strand
aaagagccaucugcuguua

SEQ ID NO: 1773204 - RNA, 19 nt, Homo sapiens
  misc_RNA (1)...(19): siRNA sense strand
gcaggucgaugcccgauuc

SEQ ID NO: 1773205 - RNA, 19 nt, Homo sapiens
  misc_RNA (1)...(19): siRNA sense strand
gcagcauccugaaucuuaa

SEQ ID NO: 1773206 - RNA, 19 nt, Homo sapiens
  misc_RNA (1)...(19): siRNA sense strand
ggacagaugcauuccagaa

SEQ ID NO: 1773207 - RNA, 19 nt, Homo sapiens
  misc_RNA (1)...(19): siRNA sense strand
caaagaaccaucucccaaa

SEQ ID NO: 1773208 - RNA, 19 nt, Homo sapiens
  misc_RNA (1)...(19): siRNA sense strand
gagcgaacuugucauagau

SEQ ID NO: 1773209 - RNA, 19 nt, Homo sapiens
  misc_RNA (1)...(19): siRNA sense strand
ugaaugaaaucgaaguaug

SEQ ID NO: 1773210 - RNA, 19 nt, Homo sapiens
  misc_RNA (1)...(19): siRNA sense strand
uaaccuggaucgaagcaaa

SEQ ID NO: 1773211 - RNA, 19 nt, Homo sapiens
  misc_RNA (1)...(19): siRNA sense strand
ugacagaaauauacaacga

SEQ ID NO: 1773212 - RNA, 19 nt, Homo sapiens
  misc_RNA (1)...(19): siRNA sense strand
caaacccaguggagauuaa

SEQ ID NO: 1773213 - RNA, 19 nt, Homo sapiens
  misc_RNA (1)...(19): siRNA sense strand
uauccuaccugcucaaguu

SEQ ID NO: 1773214 - RNA, 19 nt, Homo sapiens
  misc_RNA (1)...(19): siRNA sense strand
gaaaugaaacacaacuuag

SEQ ID NO: 1773215 - RNA, 19 nt, Homo sapiens
  misc_RNA (1)...(19): siRNA sense strand
ggcagcauccugaaucuua

SEQ ID NO: 1773216 - RNA, 19 nt, Homo sapiens
  misc_RNA (1)...(19): siRNA sense strand
ugagaugaaugaaaucgaa

SEQ ID NO: 1773217 - RNA, 19 nt, Homo sapiens
  misc_RNA (1)...(19): siRNA sense strand
gcacaacugcaucauuuau

SEQ ID NO: 1773218 - RNA, 19 nt, Homo sapiens
  misc_RNA (1)...(19): siRNA sense strand
gcgaacuugucauagauuu

SEQ ID NO: 1773219 - RNA, 19 nt, Homo sapiens
  misc_RNA (1)...(19): siRNA sense strand
gcacagcgauucggaggau

SEQ ID NO: 1773220 - RNA, 19 nt, Homo sapiens
  misc_RNA (1)...(19): siRNA sense strand
aagcugagauggauuugaa

SEQ ID NO: 1773221 - RNA, 19 nt, Homo sapiens
  misc_RNA (1)...(19): siRNA sense strand
gaacauccgcaggaaguuu

SEQ ID NO: 1773222 - RNA, 19 nt, Homo sapiens
  misc_RNA (1)...(19): siRNA sense strand
cagaaacacuaaauaaguc

SEQ ID NO: 1773223 - RNA, 19 nt, Homo sapiens
  misc_RNA (1)...(19): siRNA sense strand
aaaccuggcuuacugaaca

SEQ ID NO: 1773224 - RNA, 19 nt, Homo sapiens
  misc_RNA (1)...(19): siRNA sense strand
gagcagcagugaugagaag

SEQ ID NO: 1773225 - RNA, 19 nt, Homo sapiens
  misc_RNA (1)...(19): siRNA sense strand
gaacagcacccugacuaug

SEQ ID NO: 1773226 - RNA, 19 nt, Homo sapiens
  misc_RNA (1)...(19): siRNA sense strand
caucaacuguccagcagaa

SEQ ID NO: 1773227 - RNA, 19 nt, Homo sapiens
  misc_RNA (1)...(19): siRNA sense strand
gggccuggguuccaauaaa

SEQ ID NO: 1773228 - RNA, 19 nt, Homo sapiens
  misc_RNA (1)...(19): siRNA sense strand
gaaugaaaucgaaguaugu

SEQ ID NO: 1773229 - RNA, 19 nt, Homo sapiens
  misc_RNA (1)...(19): siRNA sense strand
gcaucgagacccagaguaa

SEQ ID NO: 1773230 - RNA, 19 nt, Homo sapiens
  misc_RNA (1)...(19): siRNA sense strand
agaagcagcuggaguugga

SEQ ID NO: 1773231 - RNA, 19 nt, Homo sapiens
  misc_RNA (1)...(19): siRNA sense strand
ggacaagcagggaguuuau

SEQ ID NO: 1773232 - RNA, 19 nt, Homo sapiens
  misc_RNA (1)...(19): siRNA sense strand
caacagccaguaucaaaug

SEQ ID NO: 1773233 - RNA, 19 nt, Homo sapiens
  misc_RNA (1)...(19): siRNA sense strand
ccauggacuuccuggauaa

SEQ ID NO: 1773234 - RNA, 19 nt, Homo sapiens
  misc_RNA (1)...(19): siRNA sense strand
gagacgcccuccuccauuc

SEQ ID NO: 1773235 - RNA, 19 nt, Homo sapiens
  misc_RNA (1)...(19): siRNA sense strand
gaacuugucauagauuuag

SEQ ID NO: 1773236 - RNA, 19 nt, Homo sapiens
  misc_RNA (1)...(19): siRNA sense strand
aggauaaacugaagggaaa

SEQ ID NO: 1773237 - RNA, 19 nt, Homo sapiens
  misc_RNA (1)...(19): siRNA sense strand
caaagcacaauuaggcaua

SEQ ID NO: 1773238 - RNA, 19 nt, Homo sapiens
  misc_RNA (1)...(19): siRNA sense strand
ggucgaugcccgauucuuu

SEQ ID NO: 1773239 - RNA, 19 nt, Homo sapiens
  misc_RNA (1)...(19): siRNA sense strand
cauaaaggauaaacugaag

SEQ ID NO: 1773240 - RNA, 19 nt, Homo sapiens
  misc_RNA (1)...(19): siRNA sense strand
gcacaauuaggcauaaaug

SEQ ID NO: 1773241 - RNA, 19 nt, Homo sapiens
  misc_RNA (1)...(19): siRNA sense strand
aaucacaaauugacgcaaa

SEQ ID NO: 1773242 - RNA, 19 nt, Homo sapiens
  misc_RNA (1)...(19): siRNA sense strand
gcucgacccuugaccuuuc

SEQ ID NO: 1773243 - RNA, 19 nt, Homo sapiens
  misc_RNA (1)...(19): siRNA sense strand
ugaagaagcagcuggaguu

SEQ ID NO: 1773244 - RNA, 19 nt, Homo sapiens
  misc_RNA (1)...(19): siRNA sense strand
uaagaaggaacccaaagaa

SEQ ID NO: 1773245 - RNA, 19 nt, Homo sapiens
  misc_RNA (1)...(19): siRNA sense strand
gaacgagccagaagacaca

SEQ ID NO: 1773246 - RNA, 19 nt, Homo sapiens
  misc_RNA (1)...(19): siRNA sense strand
gaguugcaaagcacaauua

SEQ ID NO: 1773247 - RNA, 19 nt, Homo sapiens
  misc_RNA (1)...(19): siRNA sense strand
ggauuuccuugucggauau

SEQ ID NO: 1773248 - RNA, 19 nt, Homo sapiens
  misc_RNA (1)...(19): siRNA sense strand
gaacagcccagaaaagaaa

SEQ ID NO: 1773249 - RNA, 19 nt, Homo sapiens
  misc_RNA (1)...(19): siRNA sense strand
aagcaaagcugagauggau

SEQ ID NO: 1773250 - RNA, 19 nt, Homo sapiens
  misc_RNA (1)...(19): siRNA sense strand
ccagaagcccguuccauug

SEQ ID NO: 1773251 - RNA, 19 nt, Homo sapiens
  misc_RNA (1)...(19): siRNA sense strand
agcaagagcucuccgaaau

SEQ ID NO: 1773252 - RNA, 19 nt, Homo sapiens
  misc_RNA (1)...(19): siRNA sense strand
agagcgaacuugucauaga

SEQ ID NO: 1773253 - RNA, 19 nt, Homo sapiens
  misc_RNA (1)...(19): siRNA sense strand
ccaagauccugaugagcaa

SEQ ID NO: 1773254 - RNA, 19 nt, Homo sapiens
  misc_RNA (1)...(19): siRNA sense strand
caaaagcucuaagggauaa

SEQ ID NO: 1773255 - RNA, 19 nt, Homo sapiens
  misc_RNA (1)...(19): siRNA sense strand
caaguuugccauucagaaa

SEQ ID NO: 1773256 - RNA, 19 nt, Homo sapiens
  misc_RNA (1)...(19): siRNA sense strand
ggaguaauaaauccaguug

SEQ ID NO: 1773257 - RNA, 19 nt, Homo sapiens
  misc_RNA (1)...(19): siRNA sense strand
ggagacgucagcugagaaa

SEQ ID NO: 1773258 - RNA, 19 nt, Homo sapiens
  misc_RNA (1)...(19): siRNA sense strand
gaaggaacccaaagaacca

SEQ ID NO: 1773259 - RNA, 19 nt, Homo sapiens
  misc_RNA (1)...(19): siRNA sense strand
cggauuuccuugucggaua

SEQ ID NO: 1773260 - RNA, 19 nt, Homo sapiens
  misc_RNA (1)...(19): siRNA sense strand
gagaacauccgcaggaagu

SEQ ID NO: 1773261 - RNA, 19 nt, Homo sapiens
  misc_RNA (1)...(19): siRNA sense strand
gauaguagcgauagugagu

SEQ ID NO: 1773262 - RNA, 19 nt, Homo sapiens
  misc_RNA (1)...(19): siRNA sense strand
ggaacaaugacagaaauau

SEQ ID NO: 1773263 - RNA, 19 nt, Homo sapiens
  misc_RNA (1)...(19): siRNA sense strand
gcaauaaaaggaacaauga

SEQ ID NO: 1773264 - RNA, 19 nt, Homo sapiens
  misc_RNA (1)...(19): siRNA sense strand
gaugaaugaaaucgaagua

SEQ ID NO: 1773265 - RNA, 19 nt, Homo sapiens
  misc_RNA (1)...(19): siRNA sense strand
gaagagccuccucccgaaa

SEQ ID NO: 1773266 - RNA, 19 nt, Homo sapiens
  misc_RNA (1)...(19): siRNA sense strand
gcaagagcucuccgaaaug

SEQ ID NO: 1773267 - RNA, 19 nt, Homo sapiens
  misc_RNA (1)...(19): siRNA sense strand
gcccugagccugagaagga

SEQ ID NO: 1773268 - RNA, 19 nt, Homo sapiens
  misc_RNA (1)...(19): siRNA sense strand
gguuccagcugaaucuuga

SEQ ID NO: 1773269 - RNA, 19 nt, Homo sapiens
  misc_RNA (1)...(19): siRNA sense strand
gaagcaaagcugagaugga

SEQ ID NO: 1773270 - RNA, 19 nt, Homo sapiens
  misc_RNA (1)...(19): siRNA sense strand
guaaagccaugacaaugcu

SEQ ID NO: 1773271 - RNA, 19 nt, Homo sapiens
  misc_RNA (1)...(19): siRNA sense strand
agagccaucugcuguuaaa

SEQ ID NO: 1773272 - RNA, 19 nt, Homo sapiens
  misc_RNA (1)...(19): siRNA sense strand
gaccauagagaguugcaaa

SEQ ID NO: 1773273 - RNA, 19 nt, Homo sapiens
  misc_RNA (1)...(19): siRNA sense strand
gcgagucgguccagcaaca

SEQ ID NO: 1773274 - RNA, 19 nt, Homo sapiens
  misc_RNA (1)...(19): siRNA sense strand
gggacaagcagggaguuua

SEQ ID NO: 1773275 - RNA, 19 nt, Homo sapiens
  misc_RNA (1)...(19): siRNA sense strand
ucaccagccuccaccaaga

SEQ ID NO: 1773276 - RNA, 19 nt, Homo sapiens
  misc_RNA (1)...(19): siRNA sense strand
uaccucaugucuaaagaaa

SEQ ID NO: 1773277 - RNA, 19 nt, Homo sapiens
  misc_RNA (1)...(19): siRNA sense strand
aauaauugcuaccucaugu

SEQ ID NO: 1773278 - RNA, 19 nt, Homo sapiens
  misc_RNA (1)...(19): siRNA sense strand
ggccuggguuccaauaaau

SEQ ID NO: 1773279 - RNA, 19 nt, Homo sapiens
  misc_RNA (1)...(19): siRNA sense strand
guagcaauccacauccuuu

SEQ ID NO: 1773280 - RNA, 19 nt, Homo sapiens
  misc_RNA (1)...(19): siRNA sense strand
ccacuggccugagcacaug

SEQ ID NO: 1773281 - RNA, 19 nt, Homo sapiens
  misc_RNA (1)...(19): siRNA sense strand
gaagcacaauagcugagau

SEQ ID NO: 1773282 - RNA, 19 nt, Homo sapiens
  misc_RNA (1)...(19): siRNA sense strand
gauauugccaaguacacua

SEQ ID NO: 1773283 - RNA, 19 nt, Homo sapiens
  misc_RNA (1)...(19): siRNA sense strand
agagagcgaacuugucaua

SEQ ID NO: 1773284 - RNA, 19 nt, Homo sapiens
  misc_RNA (1)...(19): siRNA sense strand
gcaggaugcugagaagaag

SEQ ID NO: 1773285 - RNA, 19 nt, Homo sapiens
  misc_RNA (1)...(19): siRNA sense strand
ggaaugagauuucagagau

SEQ ID NO: 1773286 - RNA, 19 nt, Homo sapiens
  misc_RNA (1)...(19): siRNA sense strand
guggaggacuucaagaaua

SEQ ID NO: 1773287 - RNA, 19 nt, Homo sapiens
  misc_RNA (1)...(19): siRNA sense strand
gugaauaucucugugauga

SEQ ID NO: 1773288 - RNA, 19 nt, Homo sapiens
  misc_RNA (1)...(19): siRNA sense strand
gaauaucucugugaugaau

SEQ ID NO: 1773289 - RNA, 19 nt, Homo sapiens
  misc_RNA (1)...(19): siRNA sense strand
guacgaagaugaaauuaac

SEQ ID NO: 1773290 - RNA, 19 nt, Homo sapiens
  misc_RNA (1)...(19): siRNA sense strand
gaaccagcgugccaaguug

SEQ ID NO: 1773291 - RNA, 19 nt, Homo sapiens
  misc_RNA (1)...(19): siRNA sense strand
ucaagacccucaacaacaa

SEQ ID NO: 1773292 - RNA, 19 nt, Homo sapiens
  misc_RNA (1)...(19): siRNA sense strand
gagcagaagucggccaaga

SEQ ID NO: 1773293 - RNA, 19 nt, Homo sapiens
  misc_RNA (1)...(19): siRNA sense strand
gaauaaguacgaagaugaa

SEQ ID NO: 1773294 - RNA, 19 nt, Homo sapiens
  misc_RNA (1)...(19): siRNA sense strand
uggaggacuucaagaauaa

SEQ ID NO: 1773295 - RNA, 19 nt, Homo sapiens
  misc_RNA (1)...(19): siRNA sense strand
gaaugagauuucagagaug

SEQ ID NO: 1773296 - RNA, 19 nt, Homo sapiens
  misc_RNA (1)...(19): siRNA sense strand
caagguggaugcccugaau

SEQ ID NO: 1773297 - RNA, 19 nt, Homo sapiens
  misc_RNA (1)...(19): siRNA sense strand
uggaugcccugaaugauga

SEQ ID NO: 1773298 - RNA, 19 nt, Homo sapiens
  misc_RNA (1)...(19): siRNA sense strand
gaagaaggauguggaugcu

SEQ ID NO: 1773299 - RNA, 19 nt, Homo sapiens
  misc_RNA (1)...(19): siRNA sense strand
gaggagagcgagcagauca

SEQ ID NO: 1773300 - RNA, 19 nt, Homo sapiens
  misc_RNA (1)...(19): siRNA sense strand
caucaucgcugaggucaag

SEQ ID NO: 1773301 - RNA, 19 nt, Homo sapiens
  misc_RNA (1)...(19): siRNA sense strand
gaucaagacccucaacaac

SEQ ID NO: 1773302 - RNA, 19 nt, Homo sapiens
  misc_RNA (1)...(19): siRNA sense strand
gagcugcagucccagaucu

SEQ ID NO: 1773303 - RNA, 19 nt, Homo sapiens
  misc_RNA (1)...(19): siRNA sense strand
agaauaaguacgaagauga

SEQ ID NO: 1773304 - RNA, 19 nt, Homo sapiens
  misc_RNA (1)...(19): siRNA sense strand
ucaagaauaaguacgaaga

SEQ ID NO: 1773305 - RNA, 19 nt, Homo sapiens
  misc_RNA (1)...(19): siRNA sense strand
gcaaugcccugagcuucuc

SEQ ID NO: 1773306 - RNA, 19 nt, Homo sapiens
  misc_RNA (1)...(19): siRNA sense strand
gguaccagaccaaguuuga

SEQ ID NO: 1773307 - RNA, 19 nt, Homo sapiens
  misc_RNA (1)...(19): siRNA sense strand
acaacaaguuugccuccuu

SEQ ID NO: 1773308 - RNA, 19 nt, Homo sapiens
  misc_RNA (1)...(19): siRNA sense strand
augaggagauggccaaaug

SEQ ID NO: 1773309 - RNA, 19 nt, Homo sapiens
  misc_RNA (1)...(19): siRNA sense strand
caaguuugccuccuucauc

SEQ ID NO: 1773310 - RNA, 19 nt, Homo sapiens
  misc_RNA (1)...(19): siRNA sense strand
aaugagauuucagagauga

SEQ ID NO: 1773311 - RNA, 19 nt, Homo sapiens
  misc_RNA (1)...(19): siRNA sense strand
aagaauaaguacgaagaug

SEQ ID NO: 1773312 - RNA, 19 nt, Homo sapiens
  misc_RNA (1)...(19): siRNA sense strand
gcugagaucgacaacauca

SEQ ID NO: 1773313 - RNA, 19 nt, Homo sapiens
  misc_RNA (1)...(19): siRNA sense strand
ggaccuggacggcaucauc

SEQ ID NO: 1773314 - RNA, 19 nt, Homo sapiens
  misc_RNA (1)...(19): siRNA sense strand
acaucgagaucgccaccua

SEQ ID NO: 1773315 - RNA, 19 nt, Homo sapiens
  misc_RNA (1)...(19): siRNA sense strand
aggcugagaucgacaacau

SEQ ID NO: 1773316 - RNA, 19 nt, Homo sapiens
  misc_RNA (1)...(19): siRNA sense strand
acaagcugcuggagaccaa

SEQ ID NO: 1773317 - RNA, 19 nt, Homo sapiens
  misc_RNA (1)...(19): siRNA sense strand
gaagcuggcccuggacauc

SEQ ID NO: 1773318 - RNA, 19 nt, Homo sapiens
  misc_RNA (1)...(19): siRNA sense strand
uccgcgaggucaccauuaa

SEQ ID NO: 1773319 - RNA, 19 nt, Homo sapiens
  misc_RNA (1)...(19): siRNA sense strand
gguggaggacuucaagaau

SEQ ID NO: 1773320 - RNA, 19 nt, Homo sapiens
  misc_RNA (1)...(19): siRNA sense strand
gcagcaaugcccugagcuu

SEQ ID NO: 1773321 - RNA, 19 nt, Homo sapiens
  misc_RNA (1)...(19): siRNA sense strand
guggaugcccugaaugaug

SEQ ID NO: 1773322 - RNA, 19 nt, Homo sapiens
  misc_RNA (1)...(19): siRNA sense strand
caagaauaaguacgaagau

SEQ ID NO: 1773323 - RNA, 19 nt, Homo sapiens
  misc_RNA (1)...(19): siRNA sense strand
agaaccagcgugccaaguu

SEQ ID NO: 1773324 - RNA, 19 nt, Homo sapiens
  misc_RNA (1)...(19): siRNA sense strand
uguggaugcugccuacaug

SEQ ID NO: 1773325 - RNA, 19 nt, Homo sapiens
  misc_RNA (1)...(19): siRNA sense strand
ggaaccaugggcagcaaug

SEQ ID NO: 1773326 - RNA, 19 nt, Homo sapiens
  misc_RNA (1)...(19): siRNA sense strand
gacccucaacaacaaguuu

SEQ ID NO: 1773327 - RNA, 19 nt, Homo sapiens
  misc_RNA (1)...(19): siRNA sense strand
gagaucgacaacaucaaga

SEQ ID NO: 1773328 - RNA, 19 nt, Homo sapiens
  misc_RNA (1)...(19): siRNA sense strand
gaggagauggccaaaugca

SEQ ID NO: 1773329 - RNA, 19 nt, Homo sapiens
  misc_RNA (1)...(19): siRNA sense strand
uaccagaccaaguuugaga

SEQ ID NO: 1773330 - RNA, 19 nt, Homo sapiens
  misc_RNA (1)...(19): siRNA sense strand
ggagagcgagcagaucaag

SEQ ID NO: 1773331 - RNA, 19 nt, Homo sapiens
  misc_RNA (1)...(19): siRNA sense strand
caucuguggugcuguccau

SEQ ID NO: 1773332 - RNA, 19 nt, Homo sapiens
  misc_RNA (1)...(19): siRNA sense strand
cggaaugagauuucagaga

SEQ ID NO: 1773333 - RNA, 19 nt, Homo sapiens
  misc_RNA (1)...(19): siRNA sense strand
ugagaucgacaacaucaag

SEQ ID NO: 1773334 - RNA, 19 nt, Homo sapiens
  misc_RNA (1)...(19): siRNA sense strand
cuucaagaauaaguacgaa

SEQ ID NO: 1773335 - RNA, 19 nt, Homo sapiens
  misc_RNA (1)...(19): siRNA sense strand
gagagcgagcagaucaaga

SEQ ID NO: 1773336 - RNA, 19 nt, Homo sapiens
  misc_RNA (1)...(19): siRNA sense strand
cugggcuccugaaggcuua

SEQ ID NO: 1773337 - RNA, 19 nt, Homo sapiens
  misc_RNA (1)...(19): siRNA sense strand
gaaccaagagucugaauuc

SEQ ID NO: 1773338 - RNA, 19 nt, Homo sapiens
  misc_RNA (1)...(19): siRNA sense strand
ggguagagcuggaagacuu

SEQ ID NO: 1773339 - RNA, 19 nt, Homo sapiens
  misc_RNA (1)...(19): siRNA sense strand
uggaagacuuuaaugguaa

SEQ ID NO: 1773340 - RNA, 19 nt, Homo sapiens
  misc_RNA (1)...(19): siRNA sense strand
cuggaagacuuuaauggua

SEQ ID NO: 1773341 - RNA, 19 nt, Homo sapiens
  misc_RNA (1)...(19): siRNA sense strand
ccacaaauauggcauugac

SEQ ID NO: 1773342 - RNA, 19 nt, Homo sapiens
  misc_RNA (1)...(19): siRNA sense strand
ggugguaugcauccuguua

SEQ ID NO: 1773343 - RNA, 19 nt, Homo sapiens
  misc_RNA (1)...(19): siRNA sense strand
gagaauuugcaccagcuua

SEQ ID NO: 1773344 - RNA, 19 nt, Homo sapiens
  misc_RNA (1)...(19): siRNA sense strand
gcggcuggcugguguuuca

SEQ ID NO: 1773345 - RNA, 19 nt, Homo sapiens
  misc_RNA (1)...(19): siRNA sense strand
ggaaccaagagucugaauu

SEQ ID NO: 1773346 - RNA, 19 nt, Homo sapiens
  misc_RNA (1)...(19): siRNA sense strand
ggaggcccuuuaccaccua

SEQ ID NO: 1773347 - RNA, 19 nt, Homo sapiens
  misc_RNA (1)...(19): siRNA sense strand
gaaacugccgggagcuguu

SEQ ID NO: 1773348 - RNA, 19 nt, Homo sapiens
  misc_RNA (1)...(19): siRNA sense strand
ggaugguucuguggauuuc

SEQ ID NO: 1773349 - RNA, 19 nt, Homo sapiens
  misc_RNA (1)...(19): siRNA sense strand
ggaagacuuuaaugguaac

SEQ ID NO: 1773350 - RNA, 19 nt, Homo sapiens
  misc_RNA (1)...(19): siRNA sense strand
gcccacaaauauggcauug

SEQ ID NO: 1773351 - RNA, 19 nt, Homo sapiens
  misc_RNA (1)...(19): siRNA sense strand
cuaugacgcugaccacgau

SEQ ID NO: 1773352 - RNA, 19 nt, Homo sapiens
  misc_RNA (1)...(19): siRNA sense strand
gagcuggaagacuuuaaug

SEQ ID NO: 1773353 - RNA, 19 nt, Homo sapiens
  misc_RNA (1)...(19): siRNA sense strand
ucggugagguagaccacua

SEQ ID NO: 1773354 - RNA, 19 nt, Homo sapiens
  misc_RNA (1)...(19): siRNA sense strand
ccaggaugguucuguggau

SEQ ID NO: 1773355 - RNA, 19 nt, Homo sapiens
  misc_RNA (1)...(19): siRNA sense strand
gaccacgauucaagcaaca

SEQ ID NO: 1773356 - RNA, 19 nt, Homo sapiens
  misc_RNA (1)...(19): siRNA sense strand
ucccggagcuccaggaagu

SEQ ID NO: 1773357 - RNA, 19 nt, Homo sapiens
  misc_RNA (1)...(19): siRNA sense strand
caggaugguucuguggauu

SEQ ID NO: 1773358 - RNA, 19 nt, Homo sapiens
  misc_RNA (1)...(19): siRNA sense strand
gcuggaagacuuuaauggu

SEQ ID NO: 1773359 - RNA, 19 nt, Homo sapiens
  misc_RNA (1)...(19): siRNA sense strand
gguagagcuggaagacuuu

SEQ ID NO: 1773360 - RNA, 19 nt, Homo sapiens
  misc_RNA (1)...(19): siRNA sense strand
guagagcuggaagacuuua

SEQ ID NO: 1773361 - RNA, 19 nt, Homo sapiens
  misc_RNA (1)...(19): siRNA sense strand
aauucuggcugggaaauga

SEQ ID NO: 1773362 - RNA, 19 nt, Homo sapiens
  misc_RNA (1)...(19): siRNA sense strand
cacagugggaggcccuuua

SEQ ID NO: 1773363 - RNA, 19 nt, Homo sapiens
  misc_RNA (1)...(19): siRNA sense strand
guggauuucuuccgcucuu

SEQ ID NO: 1773364 - RNA, 19 nt, Homo sapiens
  misc_RNA (1)...(19): siRNA sense strand
aaaucucaauggucgcuau

SEQ ID NO: 1773365 - RNA, 19 nt, Homo sapiens
  misc_RNA (1)...(19): siRNA sense strand
uguuaccgaucaaaucuca

SEQ ID NO: 1773366 - RNA, 19 nt, Homo sapiens
  misc_RNA (1)...(19): siRNA sense strand
ccgaucaaaucucaauggu

SEQ ID NO: 1773367 - RNA, 19 nt, Homo sapiens
  misc_RNA (1)...(19): siRNA sense strand
cacggugccuggugguaug

SEQ ID NO: 1773368 - RNA, 19 nt, Homo sapiens
  misc_RNA (1)...(19): siRNA sense strand
ccgcaggguucggaugaug

SEQ ID NO: 1773369 - RNA, 19 nt, Homo sapiens
  misc_RNA (1)...(19): siRNA sense strand
gaauucuggcugggaaaug

SEQ ID NO: 1773370 - RNA, 19 nt, Homo sapiens
  misc_RNA (1)...(19): siRNA sense strand
ucucaauggucgcuaugca

SEQ ID NO: 1773371 - RNA, 19 nt, Homo sapiens
  misc_RNA (1)...(19): siRNA sense strand
gaaccaagagucugaauuc

SEQ ID NO: 1773372 - RNA, 19 nt, Homo sapiens
  misc_RNA (1)...(19): siRNA sense strand
ggguagagcuggaagacuu

SEQ ID NO: 1773373 - RNA, 19 nt, Homo sapiens
  misc_RNA (1)...(19): siRNA sense strand
uggaagacuuuaaugguaa

SEQ ID NO: 1773374 - RNA, 19 nt, Homo sapiens
  misc_RNA (1)...(19): siRNA sense strand
cuggaagacuuuaauggua

SEQ ID NO: 1773375 - RNA, 19 nt, Homo sapiens
  misc_RNA (1)...(19): siRNA sense strand
ccacaaauauggcauugac

SEQ ID NO: 1773376 - RNA, 19 nt, Homo sapiens
  misc_RNA (1)...(19): siRNA sense strand
ggugguaugcauccuguua

SEQ ID NO: 1773377 - RNA, 19 nt, Homo sapiens
  misc_RNA (1)...(19): siRNA sense strand
gagaauuugcaccagcuua

SEQ ID NO: 1773378 - RNA, 19 nt, Homo sapiens
  misc_RNA (1)...(19): siRNA sense strand
gcggcuggcugguguuuca

SEQ ID NO: 1773379 - RNA, 19 nt, Homo sapiens
  misc_RNA (1)...(19): siRNA sense strand
ggaaccaagagucugaauu

SEQ ID NO: 1773380 - RNA, 19 nt, Homo sapiens
  misc_RNA (1)...(19): siRNA sense strand
ggaggcccuuuaccaccua

SEQ ID NO: 1773381 - RNA, 19 nt, Homo sapiens
  misc_RNA (1)...(19): siRNA sense strand
gaaacugccgggagcuguu

SEQ ID NO: 1773382 - RNA, 19 nt, Homo sapiens
  misc_RNA (1)...(19): siRNA sense strand
ggaugguucuguggauuuc

SEQ ID NO: 1773383 - RNA, 19 nt, Homo sapiens
  misc_RNA (1)...(19): siRNA sense strand
ggaagacuuuaaugguaac

SEQ ID NO: 1773384 - RNA, 19 nt, Homo sapiens
  misc_RNA (1)...(19): siRNA sense strand
gcccacaaauauggcauug

SEQ ID NO: 1773385 - RNA, 19 nt, Homo sapiens
  misc_RNA (1)...(19): siRNA sense strand
cuaugacgcugaccacgau

SEQ ID NO: 1773386 - RNA, 19 nt, Homo sapiens
  misc_RNA (1)...(19): siRNA sense strand
gagcuggaagacuuuaaug

SEQ ID NO: 1773387 - RNA, 19 nt, Homo sapiens
  misc_RNA (1)...(19): siRNA sense strand
ucggugagguagaccacua

SEQ ID NO: 1773388 - RNA, 19 nt, Homo sapiens
  misc_RNA (1)...(19): siRNA sense strand
ccaggaugguucuguggau

SEQ ID NO: 1773389 - RNA, 19 nt, Homo sapiens
  misc_RNA (1)...(19): siRNA sense strand
gaccacgauucaagcaaca

SEQ ID NO: 1773390 - RNA, 19 nt, Homo sapiens
  misc_RNA (1)...(19): siRNA sense strand
ucccggagcuccaggaagu

SEQ ID NO: 1773391 - RNA, 19 nt, Homo sapiens
  misc_RNA (1)...(19): siRNA sense strand
caggaugguucuguggauu

SEQ ID NO: 1773392 - RNA, 19 nt, Homo sapiens
  misc_RNA (1)...(19): siRNA sense strand
gcuggaagacuuuaauggu

SEQ ID NO: 1773393 - RNA, 19 nt, Homo sapiens
  misc_RNA (1)...(19): siRNA sense strand
gguagagcuggaagacuuu

SEQ ID NO: 1773394 - RNA, 19 nt, Homo sapiens
  misc_RNA (1)...(19): siRNA sense strand
guagagcuggaagacuuua

SEQ ID NO: 1773395 - RNA, 19 nt, Homo sapiens
  misc_RNA (1)...(19): siRNA sense strand
aauucuggcugggaaauga

SEQ ID NO: 1773396 - RNA, 19 nt, Homo sapiens
  misc_RNA (1)...(19): siRNA sense strand
cacagugggaggcccuuua

SEQ ID NO: 1773397 - RNA, 19 nt, Homo sapiens
  misc_RNA (1)...(19): siRNA sense strand
guggauuucuuccgcucuu

SEQ ID NO: 1773398 - RNA, 19 nt, Homo sapiens
  misc_RNA (1)...(19): siRNA sense strand
aaaucucaauggucgcuau

SEQ ID NO: 1773399 - RNA, 19 nt, Homo sapiens
  misc_RNA (1)...(19): siRNA sense strand
uguuaccgaucaaaucuca

SEQ ID NO: 1773400 - RNA, 19 nt, Homo sapiens
  misc_RNA (1)...(19): siRNA sense strand
ccgaucaaaucucaauggu

SEQ ID NO: 1773401 - RNA, 19 nt, Homo sapiens
  misc_RNA (1)...(19): siRNA sense strand
cacggugccuggugguaug

SEQ ID NO: 1773402 - RNA, 19 nt, Homo sapiens
  misc_RNA (1)...(19): siRNA sense strand
ccgcaggguucggaugaug

SEQ ID NO: 1773403 - RNA, 19 nt, Homo sapiens
  misc_RNA (1)...(19): siRNA sense strand
gaauucuggcugggaaaug

SEQ ID NO: 1773404 - RNA, 19 nt, Homo sapiens
  misc_RNA (1)...(19): siRNA sense strand
ucucaauggucgcuaugca

SEQ ID NO: 1773405 - RNA, 19 nt, Homo sapiens
  misc_RNA (1)...(19): siRNA sense strand
gaacaaacccagaauauga

SEQ ID NO: 1773406 - RNA, 19 nt, Homo sapiens
  misc_RNA (1)...(19): siRNA sense strand
gaacaaauuuccagugaug

SEQ ID NO: 1773407 - RNA, 19 nt, Homo sapiens
  misc_RNA (1)...(19): siRNA sense strand
gguaacagcuuuagaagaa

SEQ ID NO: 1773408 - RNA, 19 nt, Homo sapiens
  misc_RNA (1)...(19): siRNA sense strand
gaagaucaguuuaauggaa

SEQ ID NO: 1773409 - RNA, 19 nt, Homo sapiens
  misc_RNA (1)...(19): siRNA sense strand
gagcaaaguucucauauag

SEQ ID NO: 1773410 - RNA, 19 nt, Homo sapiens
  misc_RNA (1)...(19): siRNA sense strand
gaucugaaauggaaucuug

SEQ ID NO: 1773411 - RNA, 19 nt, Homo sapiens
  misc_RNA (1)...(19): siRNA sense strand
gcaaaguucucauauagau

SEQ ID NO: 1773412 - RNA, 19 nt, Homo sapiens
  misc_RNA (1)...(19): siRNA sense strand
agaaagaucugaaauggaa

SEQ ID NO: 1773413 - RNA, 19 nt, Homo sapiens
  misc_RNA (1)...(19): siRNA sense strand
ggagaaagaagaucaguuu

SEQ ID NO: 1773414 - RNA, 19 nt, Homo sapiens
  misc_RNA (1)...(19): siRNA sense strand
ggaagaaggugaagaggau

SEQ ID NO: 1773415 - RNA, 19 nt, Homo sapiens
  misc_RNA (1)...(19): siRNA sense strand
gcaauauucugaugaagga

SEQ ID NO: 1773416 - RNA, 19 nt, Homo sapiens
  misc_RNA (1)...(19): siRNA sense strand
gaauaucgauaacuugaug

SEQ ID NO: 1773417 - RNA, 19 nt, Homo sapiens
  misc_RNA (1)...(19): siRNA sense strand
ggaguacuauuccaaagaa

SEQ ID NO: 1773418 - RNA, 19 nt, Homo sapiens
  misc_RNA (1)...(19): siRNA sense strand
gcucaaagcugggaccaaa

SEQ ID NO: 1773419 - RNA, 19 nt, Homo sapiens
  misc_RNA (1)...(19): siRNA sense strand
ggaucaagguccagauaaa

SEQ ID NO: 1773420 - RNA, 19 nt, Homo sapiens
  misc_RNA (1)...(19): siRNA sense strand
ggauagugaugaacagaaa

SEQ ID NO: 1773421 - RNA, 19 nt, Homo sapiens
  misc_RNA (1)...(19): siRNA sense strand
cuucagcgcuuguuacuuu

SEQ ID NO: 1773422 - RNA, 19 nt, Homo sapiens
  misc_RNA (1)...(19): siRNA sense strand
ggacuacccuucacagagu

SEQ ID NO: 1773423 - RNA, 19 nt, Homo sapiens
  misc_RNA (1)...(19): siRNA sense strand
auacacugcugaagacuua

SEQ ID NO: 1773424 - RNA, 19 nt, Homo sapiens
  misc_RNA (1)...(19): siRNA sense strand
ggacaugcguguuccuuca

SEQ ID NO: 1773425 - RNA, 19 nt, Homo sapiens
  misc_RNA (1)...(19): siRNA sense strand
uuagauaucuucacaguca

SEQ ID NO: 1773426 - RNA, 19 nt, Homo sapiens
  misc_RNA (1)...(19): siRNA sense strand
acucaaaggugaauacuga

SEQ ID NO: 1773427 - RNA, 19 nt, Homo sapiens
  misc_RNA (1)...(19): siRNA sense strand
gagaagaagaugaagauga

SEQ ID NO: 1773428 - RNA, 19 nt, Homo sapiens
  misc_RNA (1)...(19): siRNA sense strand
ucacagaguuacuacuauu

SEQ ID NO: 1773429 - RNA, 19 nt, Homo sapiens
  misc_RNA (1)...(19): siRNA sense strand
cuacaggacucaacacaga

SEQ ID NO: 1773430 - RNA, 19 nt, Homo sapiens
  misc_RNA (1)...(19): siRNA sense strand
gguggaagcuucuauggau

SEQ ID NO: 1773431 - RNA, 19 nt, Homo sapiens
  misc_RNA (1)...(19): siRNA sense strand
gagaacaaacccagaauau

SEQ ID NO: 1773432 - RNA, 19 nt, Homo sapiens
  misc_RNA (1)...(19): siRNA sense strand
gaagucuugucagagauua

SEQ ID NO: 1773433 - RNA, 19 nt, Homo sapiens
  misc_RNA (1)...(19): siRNA sense strand
gagaauacuuccaucaucu

SEQ ID NO: 1773434 - RNA, 19 nt, Homo sapiens
  misc_RNA (1)...(19): siRNA sense strand
gaaggaauggacacguuua

SEQ ID NO: 1773435 - RNA, 19 nt, Homo sapiens
  misc_RNA (1)...(19): siRNA sense strand
gcaucucucuugaagcuuu

SEQ ID NO: 1773436 - RNA, 19 nt, Homo sapiens
  misc_RNA (1)...(19): siRNA sense strand
cagaaggaauggaagcuuu

SEQ ID NO: 1773437 - RNA, 19 nt, Homo sapiens
  misc_RNA (1)...(19): siRNA sense strand
gaagggcaauauucugaug

SEQ ID NO: 1773438 - RNA, 19 nt, Homo sapiens
  misc_RNA (1)...(19): siRNA sense strand
cgacacagaugcuggacuu

SEQ ID NO: 1773439 - RNA, 19 nt, Homo sapiens
  misc_RNA (1)...(19): siRNA sense strand
agaagucaguagcuuauaa

SEQ ID NO: 1773440 - RNA, 19 nt, Homo sapiens
  misc_RNA (1)...(19): siRNA sense strand
gaacuucuguuugcugauc

SEQ ID NO: 1773441 - RNA, 19 nt, Homo sapiens
  misc_RNA (1)...(19): siRNA sense strand
ccugagagguggauccuuu

SEQ ID NO: 1773442 - RNA, 19 nt, Homo sapiens
  misc_RNA (1)...(19): siRNA sense strand
agaagaagaugaagaugau

SEQ ID NO: 1773443 - RNA, 19 nt, Homo sapiens
  misc_RNA (1)...(19): siRNA sense strand
gucaguagcuuauaauuac

SEQ ID NO: 1773444 - RNA, 19 nt, Homo sapiens
  misc_RNA (1)...(19): siRNA sense strand
guaccacucuuauacuuca

SEQ ID NO: 1773445 - RNA, 19 nt, Homo sapiens
  misc_RNA (1)...(19): siRNA sense strand
uaacugcaucccaaacuua

SEQ ID NO: 1773446 - RNA, 19 nt, Homo sapiens
  misc_RNA (1)...(19): siRNA sense strand
gaacccugcacaaucuuua

SEQ ID NO: 1773447 - RNA, 19 nt, Homo sapiens
  misc_RNA (1)...(19): siRNA sense strand
ccaacgauggcacgaauua

SEQ ID NO: 1773448 - RNA, 19 nt, Homo sapiens
  misc_RNA (1)...(19): siRNA sense strand
gagaaagaagaucaguuua

SEQ ID NO: 1773449 - RNA, 19 nt, Homo sapiens
  misc_RNA (1)...(19): siRNA sense strand
guuaagcuauuugcaauug

SEQ ID NO: 1773450 - RNA, 19 nt, Homo sapiens
  misc_RNA (1)...(19): siRNA sense strand
agaggaagaugaagaggaa

SEQ ID NO: 1773451 - RNA, 19 nt, Homo sapiens
  misc_RNA (1)...(19): siRNA sense strand
caaccuaucgccuuaaaug

SEQ ID NO: 1773452 - RNA, 19 nt, Homo sapiens
  misc_RNA (1)...(19): siRNA sense strand
aaagaagccuugggugauu

SEQ ID NO: 1773453 - RNA, 19 nt, Homo sapiens
  misc_RNA (1)...(19): siRNA sense strand
uaugaagucuugucagaga

SEQ ID NO: 1773454 - RNA, 19 nt, Homo sapiens
  misc_RNA (1)...(19): siRNA sense strand
ugggaagccuggaauauga

SEQ ID NO: 1773455 - RNA, 19 nt, Homo sapiens
  misc_RNA (1)...(19): siRNA sense strand
gaacgugaaacauuuaagu

SEQ ID NO: 1773456 - RNA, 19 nt, Homo sapiens
  misc_RNA (1)...(19): siRNA sense strand
ggaugaugguuaugaacaa

SEQ ID NO: 1773457 - RNA, 19 nt, Homo sapiens
  misc_RNA (1)...(19): siRNA sense strand
cuaagaggcugguauaacu

SEQ ID NO: 1773458 - RNA, 19 nt, Homo sapiens
  misc_RNA (1)...(19): siRNA sense strand
ucacagucaucacuucuug

SEQ ID NO: 1773459 - RNA, 19 nt, Homo sapiens
  misc_RNA (1)...(19): siRNA sense strand
ggaggaagaggaagaugaa

SEQ ID NO: 1773460 - RNA, 19 nt, Homo sapiens
  misc_RNA (1)...(19): siRNA sense strand
gaaaaggaauccaaaacau

SEQ ID NO: 1773461 - RNA, 19 nt, Homo sapiens
  misc_RNA (1)...(19): siRNA sense strand
caaaauggguaacagcuuu

SEQ ID NO: 1773462 - RNA, 19 nt, Homo sapiens
  misc_RNA (1)...(19): siRNA sense strand
ccaaucugaugguguuauu

SEQ ID NO: 1773463 - RNA, 19 nt, Homo sapiens
  misc_RNA (1)...(19): siRNA sense strand
ggaagaagaggaugaggau

SEQ ID NO: 1773464 - RNA, 19 nt, Homo sapiens
  misc_RNA (1)...(19): siRNA sense strand
ggacacguuuauucgaguu

SEQ ID NO: 1773465 - RNA, 19 nt, Homo sapiens
  misc_RNA (1)...(19): siRNA sense strand
gaaggucuccaaucugaug

SEQ ID NO: 1773466 - RNA, 19 nt, Homo sapiens
  misc_RNA (1)...(19): siRNA sense strand
agugaucaguggauuauuu

SEQ ID NO: 1773467 - RNA, 19 nt, Homo sapiens
  misc_RNA (1)...(19): siRNA sense strand
gaugaugguuaugaacaaa

SEQ ID NO: 1773468 - RNA, 19 nt, Homo sapiens
  misc_RNA (1)...(19): siRNA sense strand
gaaguuucuugcacaguca

SEQ ID NO: 1773469 - RNA, 19 nt, Homo sapiens
  misc_RNA (1)...(19): siRNA sense strand
guggauccuuugaguuuaa

SEQ ID NO: 1773470 - RNA, 19 nt, Homo sapiens
  misc_RNA (1)...(19): siRNA sense strand
aggaaggucuccaaucuga

SEQ ID NO: 1773471 - RNA, 19 nt, Homo sapiens
  misc_RNA (1)...(19): siRNA sense strand
gaauacuuccaucaucuuu

SEQ ID NO: 1773472 - RNA, 19 nt, Homo sapiens
  misc_RNA (1)...(19): siRNA sense strand
cguguucucuguaauguug

SEQ ID NO: 1773473 - RNA, 19 nt, Homo sapiens
  misc_RNA (1)...(19): siRNA sense strand
gaugauccauacccuguuc

SEQ ID NO: 1773474 - RNA, 19 nt, Homo sapiens
  misc_RNA (1)...(19): siRNA sense strand
uuauuaaccuccuagaaga

SEQ ID NO: 1773475 - RNA, 19 nt, Homo sapiens
  misc_RNA (1)...(19): siRNA sense strand
ccauuucuaugaagucuug

SEQ ID NO: 1773476 - RNA, 19 nt, Homo sapiens
  misc_RNA (1)...(19): siRNA sense strand
ggguuaagcuauuugcaau

SEQ ID NO: 1773477 - RNA, 19 nt, Homo sapiens
  misc_RNA (1)...(19): siRNA sense strand
uggaauugcugacuuggaa

SEQ ID NO: 1773478 - RNA, 19 nt, Homo sapiens
  misc_RNA (1)...(19): siRNA sense strand
ugaagaggaugaagaaggu

SEQ ID NO: 1773479 - RNA, 19 nt, Homo sapiens
  misc_RNA (1)...(19): siRNA sense strand
uagagaagauuacuuugag

SEQ ID NO: 1773480 - RNA, 19 nt, Homo sapiens
  misc_RNA (1)...(19): siRNA sense strand
gagacucuggccaauaaua

SEQ ID NO: 1773481 - RNA, 19 nt, Homo sapiens
  misc_RNA (1)...(19): siRNA sense strand
gguggauccuuugaguuua

SEQ ID NO: 1773482 - RNA, 19 nt, Homo sapiens
  misc_RNA (1)...(19): siRNA sense strand
uagaaaggcuuauuaaccu

SEQ ID NO: 1773483 - RNA, 19 nt, Homo sapiens
  misc_RNA (1)...(19): siRNA sense strand
gaucagcuguuggccaugu

SEQ ID NO: 1773484 - RNA, 19 nt, Homo sapiens
  misc_RNA (1)...(19): siRNA sense strand
acacaaggaguuaaugaaa

SEQ ID NO: 1773485 - RNA, 19 nt, Homo sapiens
  misc_RNA (1)...(19): siRNA sense strand
cacacucacucuucuuaaa

SEQ ID NO: 1773486 - RNA, 19 nt, Homo sapiens
  misc_RNA (1)...(19): siRNA sense strand
ugaagaugauguggaugua

SEQ ID NO: 1773487 - RNA, 19 nt, Homo sapiens
  misc_RNA (1)...(19): siRNA sense strand
gcacacucacucuucuuaa

SEQ ID NO: 1773488 - RNA, 19 nt, Homo sapiens
  misc_RNA (1)...(19): siRNA sense strand
auauagaugugguucguuu

SEQ ID NO: 1773489 - RNA, 19 nt, Homo sapiens
  misc_RNA (1)...(19): siRNA sense strand
aauggaaucuugccguuau

SEQ ID NO: 1773490 - RNA, 19 nt, Homo sapiens
  misc_RNA (1)...(19): siRNA sense strand
cagaauaucgauaacuuga

SEQ ID NO: 1773491 - RNA, 19 nt, Homo sapiens
  misc_RNA (1)...(19): siRNA sense strand
uccauacccuguucucuuu

SEQ ID NO: 1773492 - RNA, 19 nt, Homo sapiens
  misc_RNA (1)...(19): siRNA sense strand
ucuaugaagucuugucaga

SEQ ID NO: 1773493 - RNA, 19 nt, Homo sapiens
  misc_RNA (1)...(19): siRNA sense strand
cuuggaacgugaaacauuu

SEQ ID NO: 1773494 - RNA, 19 nt, Homo sapiens
  misc_RNA (1)...(19): siRNA sense strand
gaugaucgacgaacaguag

SEQ ID NO: 1773495 - RNA, 19 nt, Homo sapiens
  misc_RNA (1)...(19): siRNA sense strand
caaagcugggaccaaauua

SEQ ID NO: 1773496 - RNA, 19 nt, Homo sapiens
  misc_RNA (1)...(19): siRNA sense strand
gcugcugccucuuccauug

SEQ ID NO: 1773497 - RNA, 19 nt, Homo sapiens
  misc_RNA (1)...(19): siRNA sense strand
gaagucaguagcuuauaau

SEQ ID NO: 1773498 - RNA, 19 nt, Homo sapiens
  misc_RNA (1)...(19): siRNA sense strand
gaaacagaccauucagauc

SEQ ID NO: 1773499 - RNA, 19 nt, Homo sapiens
  misc_RNA (1)...(19): siRNA sense strand
ggacucaacacagacauug

SEQ ID NO: 1773500 - RNA, 19 nt, Homo sapiens
  misc_RNA (1)...(19): siRNA sense strand
ggauauggaucuuuuggaa

SEQ ID NO: 1773501 - RNA, 19 nt, Homo sapiens
  misc_RNA (1)...(19): siRNA sense strand
guggaagcuucuauggaua

SEQ ID NO: 1773502 - RNA, 19 nt, Homo sapiens
  misc_RNA (1)...(19): siRNA sense strand
uaagagguaggcagaauga

SEQ ID NO: 1773503 - RNA, 19 nt, Homo sapiens
  misc_RNA (1)...(19): siRNA sense strand
gaucaguggauuauuugaa

SEQ ID NO: 1773504 - RNA, 19 nt, Homo sapiens
  misc_RNA (1)...(19): siRNA sense strand
ggagugaucaguggauuau

SEQ ID NO: 1773505 - RNA, 19 nt, Homo sapiens
  misc_RNA (1)...(19): siRNA sense strand
gaacaaacccagaauauga

SEQ ID NO: 1773506 - RNA, 19 nt, Homo sapiens
  misc_RNA (1)...(19): siRNA sense strand
gaacaaauuuccagugaug

SEQ ID NO: 1773507 - RNA, 19 nt, Homo sapiens
  misc_RNA (1)...(19): siRNA sense strand
gguaacagcuuuagaagaa

SEQ ID NO: 1773508 - RNA, 19 nt, Homo sapiens
  misc_RNA (1)...(19): siRNA sense strand
gaagaucaguuuaauggaa

SEQ ID NO: 1773509 - RNA, 19 nt, Homo sapiens
  misc_RNA (1)...(19): siRNA sense strand
gagcaaaguucucauauag

SEQ ID NO: 1773510 - RNA, 19 nt, Homo sapiens
  misc_RNA (1)...(19): siRNA sense strand
gaucugaaauggaaucuug

SEQ ID NO: 1773511 - RNA, 19 nt, Homo sapiens
  misc_RNA (1)...(19): siRNA sense strand
gcaaaguucucauauagau

SEQ ID NO: 1773512 - RNA, 19 nt, Homo sapiens
  misc_RNA (1)...(19): siRNA sense strand
agaaagaucugaaauggaa

SEQ ID NO: 1773513 - RNA, 19 nt, Homo sapiens
  misc_RNA (1)...(19): siRNA sense strand
ggagaaagaagaucaguuu

SEQ ID NO: 1773514 - RNA, 19 nt, Homo sapiens
  misc_RNA (1)...(19): siRNA sense strand
ggaagaaggugaagaggau

SEQ ID NO: 1773515 - RNA, 19 nt, Homo sapiens
  misc_RNA (1)...(19): siRNA sense strand
gcaauauucugaugaagga

SEQ ID NO: 1773516 - RNA, 19 nt, Homo sapiens
  misc_RNA (1)...(19): siRNA sense strand
gaauaucgauaacuugaug

SEQ ID NO: 1773517 - RNA, 19 nt, Homo sapiens
  misc_RNA (1)...(19): siRNA sense strand
ggaguacuauuccaaagaa

SEQ ID NO: 1773518 - RNA, 19 nt, Homo sapiens
  misc_RNA (1)...(19): siRNA sense strand
gcucaaagcugggaccaaa

SEQ ID NO: 1773519 - RNA, 19 nt, Homo sapiens
  misc_RNA (1)...(19): siRNA sense strand
ggaucaagguccagauaaa

SEQ ID NO: 1773520 - RNA, 19 nt, Homo sapiens
  misc_RNA (1)...(19): siRNA sense strand
ggauagugaugaacagaaa

SEQ ID NO: 1773521 - RNA, 19 nt, Homo sapiens
  misc_RNA (1)...(19): siRNA sense strand
cuucagcgcuuguuacuuu

SEQ ID NO: 1773522 - RNA, 19 nt, Homo sapiens
  misc_RNA (1)...(19): siRNA sense strand
ggacuacccuucacagagu

SEQ ID NO: 1773523 - RNA, 19 nt, Homo sapiens
  misc_RNA (1)...(19): siRNA sense strand
auacacugcugaagacuua

SEQ ID NO: 1773524 - RNA, 19 nt, Homo sapiens
  misc_RNA (1)...(19): siRNA sense strand
ggacaugcguguuccuuca

SEQ ID NO: 1773525 - RNA, 19 nt, Homo sapiens
  misc_RNA (1)...(19): siRNA sense strand
uuagauaucuucacaguca

SEQ ID NO: 1773526 - RNA, 19 nt, Homo sapiens
  misc_RNA (1)...(19): siRNA sense strand
acucaaaggugaauacuga

SEQ ID NO: 1773527 - RNA, 19 nt, Homo sapiens
  misc_RNA (1)...(19): siRNA sense strand
gagaagaagaugaagauga

SEQ ID NO: 1773528 - RNA, 19 nt, Homo sapiens
  misc_RNA (1)...(19): siRNA sense strand
ucacagaguuacuacuauu

SEQ ID NO: 1773529 - RNA, 19 nt, Homo sapiens
  misc_RNA (1)...(19): siRNA sense strand
cuacaggacucaacacaga

SEQ ID NO: 1773530 - RNA, 19 nt, Homo sapiens
  misc_RNA (1)...(19): siRNA sense strand
gguggaagcuucuauggau

SEQ ID NO: 1773531 - RNA, 19 nt, Homo sapiens
  misc_RNA (1)...(19): siRNA sense strand
gagaacaaacccagaauau

SEQ ID NO: 1773532 - RNA, 19 nt, Homo sapiens
  misc_RNA (1)...(19): siRNA sense strand
gaagucuugucagagauua

SEQ ID NO: 1773533 - RNA, 19 nt, Homo sapiens
  misc_RNA (1)...(19): siRNA sense strand
gagaauacuuccaucaucu

SEQ ID NO: 1773534 - RNA, 19 nt, Homo sapiens
  misc_RNA (1)...(19): siRNA sense strand
gaaggaauggacacguuua

SEQ ID NO: 1773535 - RNA, 19 nt, Homo sapiens
  misc_RNA (1)...(19): siRNA sense strand
gcaucucucuugaagcuuu

SEQ ID NO: 1773536 - RNA, 19 nt, Homo sapiens
  misc_RNA (1)...(19): siRNA sense strand
cagaaggaauggaagcuuu

SEQ ID NO: 1773537 - RNA, 19 nt, Homo sapiens
  misc_RNA (1)...(19): siRNA sense strand
gaagggcaauauucugaug

SEQ ID NO: 1773538 - RNA, 19 nt, Homo sapiens
  misc_RNA (1)...(19): siRNA sense strand
cgacacagaugcuggacuu

SEQ ID NO: 1773539 - RNA, 19 nt, Homo sapiens
  misc_RNA (1)...(19): siRNA sense strand
agaagucaguagcuuauaa

SEQ ID NO: 1773540 - RNA, 19 nt, Homo sapiens
  misc_RNA (1)...(19): siRNA sense strand
gaacuucuguuugcugauc

SEQ ID NO: 1773541 - RNA, 19 nt, Homo sapiens
  misc_RNA (1)...(19): siRNA sense strand
ccugagagguggauccuuu

SEQ ID NO: 1773542 - RNA, 19 nt, Homo sapiens
  misc_RNA (1)...(19): siRNA sense strand
agaagaagaugaagaugau

SEQ ID NO: 1773543 - RNA, 19 nt, Homo sapiens
  misc_RNA (1)...(19): siRNA sense strand
gucaguagcuuauaauuac

SEQ ID NO: 1773544 - RNA, 19 nt, Homo sapiens
  misc_RNA (1)...(19): siRNA sense strand
guaccacucuuauacuuca

SEQ ID NO: 1773545 - RNA, 19 nt, Homo sapiens
  misc_RNA (1)...(19): siRNA sense strand
uaacugcaucccaaacuua

SEQ ID NO: 1773546 - RNA, 19 nt, Homo sapiens
  misc_RNA (1)...(19): siRNA sense strand
gaacccugcacaaucuuua

SEQ ID NO: 1773547 - RNA, 19 nt, Homo sapiens
  misc_RNA (1)...(19): siRNA sense strand
ccaacgauggcacgaauua

SEQ ID NO: 1773548 - RNA, 19 nt, Homo sapiens
  misc_RNA (1)...(19): siRNA sense strand
gagaaagaagaucaguuua

SEQ ID NO: 1773549 - RNA, 19 nt, Homo sapiens
  misc_RNA (1)...(19): siRNA sense strand
guuaagcuauuugcaauug

SEQ ID NO: 1773550 - RNA, 19 nt, Homo sapiens
  misc_RNA (1)...(19): siRNA sense strand
agaggaagaugaagaggaa

SEQ ID NO: 1773551 - RNA, 19 nt, Homo sapiens
  misc_RNA (1)...(19): siRNA sense strand
caaccuaucgccuuaaaug

SEQ ID NO: 1773552 - RNA, 19 nt, Homo sapiens
  misc_RNA (1)...(19): siRNA sense strand
aaagaagccuugggugauu

SEQ ID NO: 1773553 - RNA, 19 nt, Homo sapiens
  misc_RNA (1)...(19): siRNA sense strand
uaugaagucuugucagaga

SEQ ID NO: 1773554 - RNA, 19 nt, Homo sapiens
  misc_RNA (1)...(19): siRNA sense strand
ugggaagccuggaauauga

SEQ ID NO: 1773555 - RNA, 19 nt, Homo sapiens
  misc_RNA (1)...(19): siRNA sense strand
gaacgugaaacauuuaagu

SEQ ID NO: 1773556 - RNA, 19 nt, Homo sapiens
  misc_RNA (1)...(19): siRNA sense strand
ggaugaugguuaugaacaa

SEQ ID NO: 1773557 - RNA, 19 nt, Homo sapiens
  misc_RNA (1)...(19): siRNA sense strand
cuaagaggcugguauaacu

SEQ ID NO: 1773558 - RNA, 19 nt, Homo sapiens
  misc_RNA (1)...(19): siRNA sense strand
ucacagucaucacuucuug

SEQ ID NO: 1773559 - RNA, 19 nt, Homo sapiens
  misc_RNA (1)...(19): siRNA sense strand
ggaggaagaggaagaugaa

SEQ ID NO: 1773560 - RNA, 19 nt, Homo sapiens
  misc_RNA (1)...(19): siRNA sense strand
gaaaaggaauccaaaacau

SEQ ID NO: 1773561 - RNA, 19 nt, Homo sapiens
  misc_RNA (1)...(19): siRNA sense strand
caaaauggguaacagcuuu

SEQ ID NO: 1773562 - RNA, 19 nt, Homo sapiens
  misc_RNA (1)...(19): siRNA sense strand
ccaaucugaugguguuauu

SEQ ID NO: 1773563 - RNA, 19 nt, Homo sapiens
  misc_RNA (1)...(19): siRNA sense strand
ggaagaagaggaugaggau

SEQ ID NO: 1773564 - RNA, 19 nt, Homo sapiens
  misc_RNA (1)...(19): siRNA sense strand
ggacacguuuauucgaguu

SEQ ID NO: 1773565 - RNA, 19 nt, Homo sapiens
  misc_RNA (1)...(19): siRNA sense strand
gaaggucuccaaucugaug

SEQ ID NO: 1773566 - RNA, 19 nt, Homo sapiens
  misc_RNA (1)...(19): siRNA sense strand
agugaucaguggauuauuu

SEQ ID NO: 1773567 - RNA, 19 nt, Homo sapiens
  misc_RNA (1)...(19): siRNA sense strand
gaugaugguuaugaacaaa

SEQ ID NO: 1773568 - RNA, 19 nt, Homo sapiens
  misc_RNA (1)...(19): siRNA sense strand
gaaguuucuugcacaguca

SEQ ID NO: 1773569 - RNA, 19 nt, Homo sapiens
  misc_RNA (1)...(19): siRNA sense strand
guggauccuuugaguuuaa

SEQ ID NO: 1773570 - RNA, 19 nt, Homo sapiens
  misc_RNA (1)...(19): siRNA sense strand
aggaaggucuccaaucuga

SEQ ID NO: 1773571 - RNA, 19 nt, Homo sapiens
  misc_RNA (1)...(19): siRNA sense strand
gaauacuuccaucaucuuu

SEQ ID NO: 1773572 - RNA, 19 nt, Homo sapiens
  misc_RNA (1)...(19): siRNA sense strand
cguguucucuguaauguug

SEQ ID NO: 1773573 - RNA, 19 nt, Homo sapiens
  misc_RNA (1)...(19): siRNA sense strand
gaugauccauacccuguuc

SEQ ID NO: 1773574 - RNA, 19 nt, Homo sapiens
  misc_RNA (1)...(19): siRNA sense strand
uuauuaaccuccuagaaga

SEQ ID NO: 1773575 - RNA, 19 nt, Homo sapiens
  misc_RNA (1)...(19): siRNA sense strand
ccauuucuaugaagucuug

SEQ ID NO: 1773576 - RNA, 19 nt, Homo sapiens
  misc_RNA (1)...(19): siRNA sense strand
ggguuaagcuauuugcaau

SEQ ID NO: 1773577 - RNA, 19 nt, Homo sapiens
  misc_RNA (1)...(19): siRNA sense strand
uggaauugcugacuuggaa

SEQ ID NO: 1773578 - RNA, 19 nt, Homo sapiens
  misc_RNA (1)...(19): siRNA sense strand
ugaagaggaugaagaaggu

SEQ ID NO: 1773579 - RNA, 19 nt, Homo sapiens
  misc_RNA (1)...(19): siRNA sense strand
uagagaagauuacuuugag

SEQ ID NO: 1773580 - RNA, 19 nt, Homo sapiens
  misc_RNA (1)...(19): siRNA sense strand
gagacucuggccaauaaua

SEQ ID NO: 1773581 - RNA, 19 nt, Homo sapiens
  misc_RNA (1)...(19): siRNA sense strand
gguggauccuuugaguuua

SEQ ID NO: 1773582 - RNA, 19 nt, Homo sapiens
  misc_RNA (1)...(19): siRNA sense strand
uagaaaggcuuauuaaccu

SEQ ID NO: 1773583 - RNA, 19 nt, Homo sapiens
  misc_RNA (1)...(19): siRNA sense strand
gaucagcuguuggccaugu

SEQ ID NO: 1773584 - RNA, 19 nt, Homo sapiens
  misc_RNA (1)...(19): siRNA sense strand
acacaaggaguuaaugaaa

SEQ ID NO: 1773585 - RNA, 19 nt, Homo sapiens
  misc_RNA (1)...(19): siRNA sense strand
cacacucacucuucuuaaa

SEQ ID NO: 1773586 - RNA, 19 nt, Homo sapiens
  misc_RNA (1)...(19): siRNA sense strand
ugaagaugauguggaugua

SEQ ID NO: 1773587 - RNA, 19 nt, Homo sapiens
  misc_RNA (1)...(19): siRNA sense strand
gcacacucacucuucuuaa

SEQ ID NO: 1773588 - RNA, 19 nt, Homo sapiens
  misc_RNA (1)...(19): siRNA sense strand
auauagaugugguucguuu

SEQ ID NO: 1773589 - RNA, 19 nt, Homo sapiens
  misc_RNA (1)...(19): siRNA sense strand
aauggaaucuugccguuau

SEQ ID NO: 1773590 - RNA, 19 nt, Homo sapiens
  misc_RNA (1)...(19): siRNA sense strand
cagaauaucgauaacuuga

SEQ ID NO: 1773591 - RNA, 19 nt, Homo sapiens
  misc_RNA (1)...(19): siRNA sense strand
ucuaugaagucuugucaga

SEQ ID NO: 1773592 - RNA, 19 nt, Homo sapiens
  misc_RNA (1)...(19): siRNA sense strand
cuuggaacgugaaacauuu

SEQ ID NO: 1773593 - RNA, 19 nt, Homo sapiens
  misc_RNA (1)...(19): siRNA sense strand
gaugaucgacgaacaguag

SEQ ID NO: 1773594 - RNA, 19 nt, Homo sapiens
  misc_RNA (1)...(19): siRNA sense strand
gccaaccuaucgccuuaaa

SEQ ID NO: 1773595 - RNA, 19 nt, Homo sapiens
  misc_RNA (1)...(19): siRNA sense strand
gcugcugccucuuccauug

SEQ ID NO: 1773596 - RNA, 19 nt, Homo sapiens
  misc_RNA (1)...(19): siRNA sense strand
gaagucaguagcuuauaau

SEQ ID NO: 1773597 - RNA, 19 nt, Homo sapiens
  misc_RNA (1)...(19): siRNA sense strand
gaaacagaccauucagauc

SEQ ID NO: 1773598 - RNA, 19 nt, Homo sapiens
  misc_RNA (1)...(19): siRNA sense strand
ggacucaacacagacauug

SEQ ID NO: 1773599 - RNA, 19 nt, Homo sapiens
  misc_RNA (1)...(19): siRNA sense strand
ggauauggaucuuuuggaa

SEQ ID NO: 1773600 - RNA, 19 nt, Homo sapiens
  misc_RNA (1)...(19): siRNA sense strand
guggaagcuucuauggaua

SEQ ID NO: 1773601 - RNA, 19 nt, Homo sapiens
  misc_RNA (1)...(19): siRNA sense strand
uaagagguaggcagaauga

SEQ ID NO: 1773602 - RNA, 19 nt, Homo sapiens
  misc_RNA (1)...(19): siRNA sense strand
gaucaguggauuauuugaa

SEQ ID NO: 1773603 - RNA, 19 nt, Homo sapiens
  misc_RNA (1)...(19): siRNA sense strand
ggagugaucaguggauuau

SEQ ID NO: 1773604 - RNA, 19 nt, Homo sapiens
  misc_RNA (1)...(19): siRNA sense strand
caaagcugggaccaaauua

SEQ ID NO: 1773605 - RNA, 19 nt, Homo sapiens
  misc_RNA (1)...(19): siRNA sense strand
gaacaaacccagaauauga

SEQ ID NO: 1773606 - RNA, 19 nt, Homo sapiens
  misc_RNA (1)...(19): siRNA sense strand
gaacaaauuuccagugaug

SEQ ID NO: 1773607 - RNA, 19 nt, Homo sapiens
  misc_RNA (1)...(19): siRNA sense strand
gguaacagcuuuagaagaa

SEQ ID NO: 1773608 - RNA, 19 nt, Homo sapiens
  misc_RNA (1)...(19): siRNA sense strand
gaagaucaguuuaauggaa

SEQ ID NO: 1773609 - RNA, 19 nt, Homo sapiens
  misc_RNA (1)...(19): siRNA sense strand
gagcaaaguucucauauag

SEQ ID NO: 1773610 - RNA, 19 nt, Homo sapiens
  misc_RNA (1)...(19): siRNA sense strand
gaucugaaauggaaucuug

SEQ ID NO: 1773611 - RNA, 19 nt, Homo sapiens
  misc_RNA (1)...(19): siRNA sense strand
gcaaaguucucauauagau

SEQ ID NO: 1773612 - RNA, 19 nt, Homo sapiens
  misc_RNA (1)...(19): siRNA sense strand
agaaagaucugaaauggaa

SEQ ID NO: 1773613 - RNA, 19 nt, Homo sapiens
  misc_RNA (1)...(19): siRNA sense strand
ggagaaagaagaucaguuu

SEQ ID NO: 1773614 - RNA, 19 nt, Homo sapiens
  misc_RNA (1)...(19): siRNA sense strand
ggaagaaggugaagaggau

SEQ ID NO: 1773615 - RNA, 19 nt, Homo sapiens
  misc_RNA (1)...(19): siRNA sense strand
gcaauauucugaugaagga

SEQ ID NO: 1773616 - RNA, 19 nt, Homo sapiens
  misc_RNA (1)...(19): siRNA sense strand
gaauaucgauaacuugaug

SEQ ID NO: 1773617 - RNA, 19 nt, Homo sapiens
  misc_RNA (1)...(19): siRNA sense strand
ggaguacuauuccaaagaa

SEQ ID NO: 1773618 - RNA, 19 nt, Homo sapiens
  misc_RNA (1)...(19): siRNA sense strand
gcucaaagcugggaccaaa

SEQ ID NO: 1773619 - RNA, 19 nt, Homo sapiens
  misc_RNA (1)...(19): siRNA sense strand
ggaucaagguccagauaaa

SEQ ID NO: 1773620 - RNA, 19 nt, Homo sapiens
  misc_RNA (1)...(19): siRNA sense strand
ggauagugaugaacagaaa

SEQ ID NO: 1773621 - RNA, 19 nt, Homo sapiens
  misc_RNA (1)...(19): siRNA sense strand
cuucagcgcuuguuacuuu

SEQ ID NO: 1773622 - RNA, 19 nt, Homo sapiens
  misc_RNA (1)...(19): siRNA sense strand
ggacuacccuucacagagu

SEQ ID NO: 1773623 - RNA, 19 nt, Homo sapiens
  misc_RNA (1)...(19): siRNA sense strand
auacacugcugaagacuua

SEQ ID NO: 1773624 - RNA, 19 nt, Homo sapiens
  misc_RNA (1)...(19): siRNA sense strand
ggacaugcguguuccuuca

SEQ ID NO: 1773625 - RNA, 19 nt, Homo sapiens
  misc_RNA (1)...(19): siRNA sense strand
uuagauaucuucacaguca

SEQ ID NO: 1773626 - RNA, 19 nt, Homo sapiens
  misc_RNA (1)...(19): siRNA sense strand
acucaaaggugaauacuga

SEQ ID NO: 1773627 - RNA, 19 nt, Homo sapiens
  misc_RNA (1)...(19): siRNA sense strand
gagaagaagaugaagauga

SEQ ID NO: 1773628 - RNA, 19 nt, Homo sapiens
  misc_RNA (1)...(19): siRNA sense strand
ucacagaguuacuacuauu

SEQ ID NO: 1773629 - RNA, 19 nt, Homo sapiens
  misc_RNA (1)...(19): siRNA sense strand
cuacaggacucaacacaga

SEQ ID NO: 1773630 - RNA, 19 nt, Homo sapiens
  misc_RNA (1)...(19): siRNA sense strand
gguggaagcuucuauggau

SEQ ID NO: 1773631 - RNA, 19 nt, Homo sapiens
  misc_RNA (1)...(19): siRNA sense strand
gagaacaaacccagaauau

SEQ ID NO: 1773632 - RNA, 19 nt, Homo sapiens
  misc_RNA (1)...(19): siRNA sense strand
gaagucuugucagagauua

SEQ ID NO: 1773633 - RNA, 19 nt, Homo sapiens
  misc_RNA (1)...(19): siRNA sense strand
gagaauacuuccaucaucu

SEQ ID NO: 1773634 - RNA, 19 nt, Homo sapiens
  misc_RNA (1)...(19): siRNA sense strand
gaaggaauggacacguuua

SEQ ID NO: 1773635 - RNA, 19 nt, Homo sapiens
  misc_RNA (1)...(19): siRNA sense strand
gcaucucucuugaagcuuu

SEQ ID NO: 1773636 - RNA, 19 nt, Homo sapiens
  misc_RNA (1)...(19): siRNA sense strand
cagaaggaauggaagcuuu

SEQ ID NO: 1773637 - RNA, 19 nt, Homo sapiens
  misc_RNA (1)...(19): siRNA sense strand
gaagggcaauauucugaug

SEQ ID NO: 1773638 - RNA, 19 nt, Homo sapiens
  misc_RNA (1)...(19): siRNA sense strand
cgacacagaugcuggacuu

SEQ ID NO: 1773639 - RNA, 19 nt, Homo sapiens
  misc_RNA (1)...(19): siRNA sense strand
agaagucaguagcuuauaa

SEQ ID NO: 1773640 - RNA, 19 nt, Homo sapiens
  misc_RNA (1)...(19): siRNA sense strand
gaacuucuguuugcugauc

SEQ ID NO: 1773641 - RNA, 19 nt, Homo sapiens
  misc_RNA (1)...(19): siRNA sense strand
ccugagagguggauccuuu

SEQ ID NO: 1773642 - RNA, 19 nt, Homo sapiens
  misc_RNA (1)...(19): siRNA sense strand
agaagaagaugaagaugau

SEQ ID NO: 1773643 - RNA, 19 nt, Homo sapiens
  misc_RNA (1)...(19): siRNA sense strand
gucaguagcuuauaauuac

SEQ ID NO: 1773644 - RNA, 19 nt, Homo sapiens
  misc_RNA (1)...(19): siRNA sense strand
guaccacucuuauacuuca

SEQ ID NO: 1773645 - RNA, 19 nt, Homo sapiens
  misc_RNA (1)...(19): siRNA sense strand
uaacugcaucccaaacuua

SEQ ID NO: 1773646 - RNA, 19 nt, Homo sapiens
  misc_RNA (1)...(19): siRNA sense strand
gaacccugcacaaucuuua

SEQ ID NO: 1773647 - RNA, 19 nt, Homo sapiens
  misc_RNA (1)...(19): siRNA sense strand
ccaacgauggcacgaauua

SEQ ID NO: 1773648 - RNA, 19 nt, Homo sapiens
  misc_RNA (1)...(19): siRNA sense strand
gagaaagaagaucaguuua

SEQ ID NO: 1773649 - RNA, 19 nt, Homo sapiens
  misc_RNA (1)...(19): siRNA sense strand
guuaagcuauuugcaauug

SEQ ID NO: 1773650 - RNA, 19 nt, Homo sapiens
  misc_RNA (1)...(19): siRNA sense strand
agaggaagaugaagaggaa

SEQ ID NO: 1773651 - RNA, 19 nt, Homo sapiens
  misc_RNA (1)...(19): siRNA sense strand
caaccuaucgccuuaaaug

SEQ ID NO: 1773652 - RNA, 19 nt, Homo sapiens
  misc_RNA (1)...(19): siRNA sense strand
aaagaagccuugggugauu

SEQ ID NO: 1773653 - RNA, 19 nt, Homo sapiens
  misc_RNA (1)...(19): siRNA sense strand
uaugaagucuugucagaga

SEQ ID NO: 1773654 - RNA, 19 nt, Homo sapiens
  misc_RNA (1)...(19): siRNA sense strand
ugggaagccuggaauauga

SEQ ID NO: 1773655 - RNA, 19 nt, Homo sapiens
  misc_RNA (1)...(19): siRNA sense strand
gaacgugaaacauuuaagu

SEQ ID NO: 1773656 - RNA, 19 nt, Homo sapiens
  misc_RNA (1)...(19): siRNA sense strand
ggaugaugguuaugaacaa

SEQ ID NO: 1773657 - RNA, 19 nt, Homo sapiens
  misc_RNA (1)...(19): siRNA sense strand
cuaagaggcugguauaacu

SEQ ID NO: 1773658 - RNA, 19 nt, Homo sapiens
  misc_RNA (1)...(19): siRNA sense strand
ucacagucaucacuucuug

SEQ ID NO: 1773659 - RNA, 19 nt, Homo sapiens
  misc_RNA (1)...(19): siRNA sense strand
ggaggaagaggaagaugaa

SEQ ID NO: 1773660 - RNA, 19 nt, Homo sapiens
  misc_RNA (1)...(19): siRNA sense strand
gaaaaggaauccaaaacau

SEQ ID NO: 1773661 - RNA, 19 nt, Homo sapiens
  misc_RNA (1)...(19): siRNA sense strand
caaaauggguaacagcuuu

SEQ ID NO: 1773662 - RNA, 19 nt, Homo sapiens
  misc_RNA (1)...(19): siRNA sense strand
ccaaucugaugguguuauu

SEQ ID NO: 1773663 - RNA, 19 nt, Homo sapiens
  misc_RNA (1)...(19): siRNA sense strand
ggaagaagaggaugaggau

SEQ ID NO: 1773664 - RNA, 19 nt, Homo sapiens
  misc_RNA (1)...(19): siRNA sense strand
ggacacguuuauucgaguu

SEQ ID NO: 1773665 - RNA, 19 nt, Homo sapiens
  misc_RNA (1)...(19): siRNA sense strand
gaaggucuccaaucugaug

SEQ ID NO: 1773666 - RNA, 19 nt, Homo sapiens
  misc_RNA (1)...(19): siRNA sense strand
agugaucaguggauuauuu

SEQ ID NO: 1773667 - RNA, 19 nt, Homo sapiens
  misc_RNA (1)...(19): siRNA sense strand
gaugaugguuaugaacaaa

SEQ ID NO: 1773668 - RNA, 19 nt, Homo sapiens
  misc_RNA (1)...(19): siRNA sense strand
gaaguuucuugcacaguca

SEQ ID NO: 1773669 - RNA, 19 nt, Homo sapiens
  misc_RNA (1)...(19): siRNA sense strand
guggauccuuugaguuuaa

SEQ ID NO: 1773670 - RNA, 19 nt, Homo sapiens
  misc_RNA (1)...(19): siRNA sense strand
aggaaggucuccaaucuga

SEQ ID NO: 1773671 - RNA, 19 nt, Homo sapiens
  misc_RNA (1)...(19): siRNA sense strand
gaauacuuccaucaucuuu

SEQ ID NO: 1773672 - RNA, 19 nt, Homo sapiens
  misc_RNA (1)...(19): siRNA sense strand
cguguucucuguaauguug

SEQ ID NO: 1773673 - RNA, 19 nt, Homo sapiens
  misc_RNA (1)...(19): siRNA sense strand
gaugauccauacccuguuc

SEQ ID NO: 1773674 - RNA, 19 nt, Homo sapiens
  misc_RNA (1)...(19): siRNA sense strand
uuauuaaccuccuagaaga

SEQ ID NO: 1773675 - RNA, 19 nt, Homo sapiens
  misc_RNA (1)...(19): siRNA sense strand
ccauuucuaugaagucuug

SEQ ID NO: 1773676 - RNA, 19 nt, Homo sapiens
  misc_RNA (1)...(19): siRNA sense strand
ggguuaagcuauuugcaau

SEQ ID NO: 1773677 - RNA, 19 nt, Homo sapiens
  misc_RNA (1)...(19): siRNA sense strand
uggaauugcugacuuggaa

SEQ ID NO: 1773678 - RNA, 19 nt, Homo sapiens
  misc_RNA (1)...(19): siRNA sense strand
ugaagaggaugaagaaggu

SEQ ID NO: 1773679 - RNA, 19 nt, Homo sapiens
  misc_RNA (1)...(19): siRNA sense strand
uagagaagauuacuuugag

SEQ ID NO: 1773680 - RNA, 19 nt, Homo sapiens
  misc_RNA (1)...(19): siRNA sense strand
gagacucuggccaauaaua

SEQ ID NO: 1773681 - RNA, 19 nt, Homo sapiens
  misc_RNA (1)...(19): siRNA sense strand
gguggauccuuugaguuua

SEQ ID NO: 1773682 - RNA, 19 nt, Homo sapiens
  misc_RNA (1)...(19): siRNA sense strand
uagaaaggcuuauuaaccu

SEQ ID NO: 1773683 - RNA, 19 nt, Homo sapiens
  misc_RNA (1)...(19): siRNA sense strand
gaucagcuguuggccaugu

SEQ ID NO: 1773684 - RNA, 19 nt, Homo sapiens
  misc_RNA (1)...(19): siRNA sense strand
acacaaggaguuaaugaaa

SEQ ID NO: 1773685 - RNA, 19 nt, Homo sapiens
  misc_RNA (1)...(19): siRNA sense strand
cacacucacucuucuuaaa

SEQ ID NO: 1773686 - RNA, 19 nt, Homo sapiens
  misc_RNA (1)...(19): siRNA sense strand
ugaagaugauguggaugua

SEQ ID NO: 1773687 - RNA, 19 nt, Homo sapiens
  misc_RNA (1)...(19): siRNA sense strand
gcacacucacucuucuuaa

SEQ ID NO: 1773688 - RNA, 19 nt, Homo sapiens
  misc_RNA (1)...(19): siRNA sense strand
auauagaugugguucguuu

SEQ ID NO: 1773689 - RNA, 19 nt, Homo sapiens
  misc_RNA (1)...(19): siRNA sense strand
aauggaaucuugccguuau

SEQ ID NO: 1773690 - RNA, 19 nt, Homo sapiens
  misc_RNA (1)...(19): siRNA sense strand
cagaauaucgauaacuuga

SEQ ID NO: 1773691 - RNA, 19 nt, Homo sapiens
  misc_RNA (1)...(19): siRNA sense strand
uccauacccuguucucuuu

SEQ ID NO: 1773692 - RNA, 19 nt, Homo sapiens
  misc_RNA (1)...(19): siRNA sense strand
ucuaugaagucuugucaga

SEQ ID NO: 1773693 - RNA, 19 nt, Homo sapiens
  misc_RNA (1)...(19): siRNA sense strand
cuuggaacgugaaacauuu

SEQ ID NO: 1773694 - RNA, 19 nt, Homo sapiens
  misc_RNA (1)...(19): siRNA sense strand
gaugaucgacgaacaguag

SEQ ID NO: 1773695 - RNA, 19 nt, Homo sapiens
  misc_RNA (1)...(19): siRNA sense strand
caaagcugggaccaaauua

SEQ ID NO: 1773696 - RNA, 19 nt, Homo sapiens
  misc_RNA (1)...(19): siRNA sense strand
gcugcugccucuuccauug

SEQ ID NO: 1773697 - RNA, 19 nt, Homo sapiens
  misc_RNA (1)...(19): siRNA sense strand
gaagucaguagcuuauaau

SEQ ID NO: 1773698 - RNA, 19 nt, Homo sapiens
  misc_RNA (1)...(19): siRNA sense strand
gaaacagaccauucagauc

SEQ ID NO: 1773699 - RNA, 19 nt, Homo sapiens
  misc_RNA (1)...(19): siRNA sense strand
ggacucaacacagacauug

SEQ ID NO: 1773700 - RNA, 19 nt, Homo sapiens
  misc_RNA (1)...(19): siRNA sense strand
ggauauggaucuuuuggaa

SEQ ID NO: 1773701 - RNA, 19 nt, Homo sapiens
  misc_RNA (1)...(19): siRNA sense strand
guggaagcuucuauggaua

SEQ ID NO: 1773702 - RNA, 19 nt, Homo sapiens
  misc_RNA (1)...(19): siRNA sense strand
uaagagguaggcagaauga

SEQ ID NO: 1773703 - RNA, 19 nt, Homo sapiens
  misc_RNA (1)...(19): siRNA sense strand
gaucaguggauuauuugaa

SEQ ID NO: 1773704 - RNA, 19 nt, Homo sapiens
  misc_RNA (1)...(19): siRNA sense strand
ggagugaucaguggauuau

SEQ ID NO: 1773705 - RNA, 19 nt, Homo sapiens
  misc_RNA (1)...(19): siRNA sense strand
gaacaaacccagaauauga

SEQ ID NO: 1773706 - RNA, 19 nt, Homo sapiens
  misc_RNA (1)...(19): siRNA sense strand
gaacaaauuuccagugaug

SEQ ID NO: 1773707 - RNA, 19 nt, Homo sapiens
  misc_RNA (1)...(19): siRNA sense strand
gguaacagcuuuagaagaa

SEQ ID NO: 1773708 - RNA, 19 nt, Homo sapiens
  misc_RNA (1)...(19): siRNA sense strand
gaagaucaguuuaauggaa

SEQ ID NO: 1773709 - RNA, 19 nt, Homo sapiens
  misc_RNA (1)...(19): siRNA sense strand
gagcaaaguucucauauag

SEQ ID NO: 1773710 - RNA, 19 nt, Homo sapiens
  misc_RNA (1)...(19): siRNA sense strand
gaucugaaauggaaucuug

SEQ ID NO: 1773711 - RNA, 19 nt, Homo sapiens
  misc_RNA (1)...(19): siRNA sense strand
gcaaaguucucauauagau

SEQ ID NO: 1773712 - RNA, 19 nt, Homo sapiens
  misc_RNA (1)...(19): siRNA sense strand
agaaagaucugaaauggaa

SEQ ID NO: 1773713 - RNA, 19 nt, Homo sapiens
  misc_RNA (1)...(19): siRNA sense strand
ggagaaagaagaucaguuu

SEQ ID NO: 1773714 - RNA, 19 nt, Homo sapiens
  misc_RNA (1)...(19): siRNA sense strand
ggaagaaggugaagaggau

SEQ ID NO: 1773715 - RNA, 19 nt, Homo sapiens
  misc_RNA (1)...(19): siRNA sense strand
gcaauauucugaugaagga

SEQ ID NO: 1773716 - RNA, 19 nt, Homo sapiens
  misc_RNA (1)...(19): siRNA sense strand
gaauaucgauaacuugaug

SEQ ID NO: 1773717 - RNA, 19 nt, Homo sapiens
  misc_RNA (1)...(19): siRNA sense strand
ggaguacuauuccaaagaa

SEQ ID NO: 1773718 - RNA, 19 nt, Homo sapiens
  misc_RNA (1)...(19): siRNA sense strand
gcucaaagcugggaccaaa

SEQ ID NO: 1773719 - RNA, 19 nt, Homo sapiens
  misc_RNA (1)...(19): siRNA sense strand
ggaucaagguccagauaaa

SEQ ID NO: 1773720 - RNA, 19 nt, Homo sapiens
  misc_RNA (1)...(19): siRNA sense strand
ggauagugaugaacagaaa

SEQ ID NO: 1773721 - RNA, 19 nt, Homo sapiens
  misc_RNA (1)...(19): siRNA sense strand
cuucagcgcuuguuacuuu

SEQ ID NO: 1773722 - RNA, 19 nt, Homo sapiens
  misc_RNA (1)...(19): siRNA sense strand
ggacuacccuucacagagu

SEQ ID NO: 1773723 - RNA, 19 nt, Homo sapiens
  misc_RNA (1)...(19): siRNA sense strand
auacacugcugaagacuua

SEQ ID NO: 1773724 - RNA, 19 nt, Homo sapiens
  misc_RNA (1)...(19): siRNA sense strand
ggacaugcguguuccuuca

SEQ ID NO: 1773725 - RNA, 19 nt, Homo sapiens
  misc_RNA (1)...(19): siRNA sense strand
uuagauaucuucacaguca

SEQ ID NO: 1773726 - RNA, 19 nt, Homo sapiens
  misc_RNA (1)...(19): siRNA sense strand
acucaaaggugaauacuga

SEQ ID NO: 1773727 - RNA, 19 nt, Homo sapiens
  misc_RNA (1)...(19): siRNA sense strand
gagaagaagaugaagauga

SEQ ID NO: 1773728 - RNA, 19 nt, Homo sapiens
  misc_RNA (1)...(19): siRNA sense strand
ucacagaguuacuacuauu

SEQ ID NO: 1773729 - RNA, 19 nt, Homo sapiens
  misc_RNA (1)...(19): siRNA sense strand
cuacaggacucaacacaga

SEQ ID NO: 1773730 - RNA, 19 nt, Homo sapiens
  misc_RNA (1)...(19): siRNA sense strand
gguggaagcuucuauggau

SEQ ID NO: 1773731 - RNA, 19 nt, Homo sapiens
  misc_RNA (1)...(19): siRNA sense strand
gagaacaaacccagaauau

SEQ ID NO: 1773732 - RNA, 19 nt, Homo sapiens
  misc_RNA (1)...(19): siRNA sense strand
gaagucuugucagagauua

SEQ ID NO: 1773733 - RNA, 19 nt, Homo sapiens
  misc_RNA (1)...(19): siRNA sense strand
gagaauacuuccaucaucu

SEQ ID NO: 1773734 - RNA, 19 nt, Homo sapiens
  misc_RNA (1)...(19): siRNA sense strand
gaaggaauggacacguuua

SEQ ID NO: 1773735 - RNA, 19 nt, Homo sapiens
  misc_RNA (1)...(19): siRNA sense strand
gcaucucucuugaagcuuu

SEQ ID NO: 1773736 - RNA, 19 nt, Homo sapiens
  misc_RNA (1)...(19): siRNA sense strand
cagaaggaauggaagcuuu

SEQ ID NO: 1773737 - RNA, 19 nt, Homo sapiens
  misc_RNA (1)...(19): siRNA sense strand
gaagggcaauauucugaug

SEQ ID NO: 1773738 - RNA, 19 nt, Homo sapiens
  misc_RNA (1)...(19): siRNA sense strand
cgacacagaugcuggacuu

SEQ ID NO: 1773739 - RNA, 19 nt, Homo sapiens
  misc_RNA (1)...(19): siRNA sense strand
agaagucaguagcuuauaa

SEQ ID NO: 1773740 - RNA, 19 nt, Homo sapiens
  misc_RNA (1)...(19): siRNA sense strand
gaacuucuguuugcugauc

SEQ ID NO: 1773741 - RNA, 19 nt, Homo sapiens
  misc_RNA (1)...(19): siRNA sense strand
ccugagagguggauccuuu

SEQ ID NO: 1773742 - RNA, 19 nt, Homo sapiens
  misc_RNA (1)...(19): siRNA sense strand
agaagaagaugaagaugau

SEQ ID NO: 1773743 - RNA, 19 nt, Homo sapiens
  misc_RNA (1)...(19): siRNA sense strand
gucaguagcuuauaauuac

SEQ ID NO: 1773744 - RNA, 19 nt, Homo sapiens
  misc_RNA (1)...(19): siRNA sense strand
guaccacucuuauacuuca

SEQ ID NO: 1773745 - RNA, 19 nt, Homo sapiens
  misc_RNA (1)...(19): siRNA sense strand
uaacugcaucccaaacuua

SEQ ID NO: 1773746 - RNA, 19 nt, Homo sapiens
  misc_RNA (1)...(19): siRNA sense strand
gaacccugcacaaucuuua

SEQ ID NO: 1773747 - RNA, 19 nt, Homo sapiens
  misc_RNA (1)...(19): siRNA sense strand
ccaacgauggcacgaauua

SEQ ID NO: 1773748 - RNA, 19 nt, Homo sapiens
  misc_RNA (1)...(19): siRNA sense strand
gagaaagaagaucaguuua

SEQ ID NO: 1773749 - RNA, 19 nt, Homo sapiens
  misc_RNA (1)...(19): siRNA sense strand
guuaagcuauuugcaauug

SEQ ID NO: 1773750 - RNA, 19 nt, Homo sapiens
  misc_RNA (1)...(19): siRNA sense strand
agaggaagaugaagaggaa

SEQ ID NO: 1773751 - RNA, 19 nt, Homo sapiens
  misc_RNA (1)...(19): siRNA sense strand
caaccuaucgccuuaaaug

SEQ ID NO: 1773752 - RNA, 19 nt, Homo sapiens
  misc_RNA (1)...(19): siRNA sense strand
aaagaagccuugggugauu

SEQ ID NO: 1773753 - RNA, 19 nt, Homo sapiens
  misc_RNA (1)...(19): siRNA sense strand
uaugaagucuugucagaga

SEQ ID NO: 1773754 - RNA, 19 nt, Homo sapiens
  misc_RNA (1)...(19): siRNA sense strand
ugggaagccuggaauauga

SEQ ID NO: 1773755 - RNA, 19 nt, Homo sapiens
  misc_RNA (1)...(19): siRNA sense strand
gaacgugaaacauuuaagu

SEQ ID NO: 1773756 - RNA, 19 nt, Homo sapiens
  misc_RNA (1)...(19): siRNA sense strand
ggaugaugguuaugaacaa

SEQ ID NO: 1773757 - RNA, 19 nt, Homo sapiens
  misc_RNA (1)...(19): siRNA sense strand
cuaagaggcugguauaacu

SEQ ID NO: 1773758 - RNA, 19 nt, Homo sapiens
  misc_RNA (1)...(19): siRNA sense strand
ucacagucaucacuucuug

SEQ ID NO: 1773759 - RNA, 19 nt, Homo sapiens
  misc_RNA (1)...(19): siRNA sense strand
ggaggaagaggaagaugaa

SEQ ID NO: 1773760 - RNA, 19 nt, Homo sapiens
  misc_RNA (1)...(19): siRNA sense strand
gaaaaggaauccaaaacau

SEQ ID NO: 1773761 - RNA, 19 nt, Homo sapiens
  misc_RNA (1)...(19): siRNA sense strand
caaaauggguaacagcuuu

SEQ ID NO: 1773762 - RNA, 19 nt, Homo sapiens
  misc_RNA (1)...(19): siRNA sense strand
ccaaucugaugguguuauu

SEQ ID NO: 1773763 - RNA, 19 nt, Homo sapiens
  misc_RNA (1)...(19): siRNA sense strand
ggaagaagaggaugaggau

SEQ ID NO: 1773764 - RNA, 19 nt, Homo sapiens
  misc_RNA (1)...(19): siRNA sense strand
ggacacguuuauucgaguu

SEQ ID NO: 1773765 - RNA, 19 nt, Homo sapiens
  misc_RNA (1)...(19): siRNA sense strand
gaaggucuccaaucugaug

SEQ ID NO: 1773766 - RNA, 19 nt, Homo sapiens
  misc_RNA (1)...(19): siRNA sense strand
agugaucaguggauuauuu

SEQ ID NO: 1773767 - RNA, 19 nt, Homo sapiens
  misc_RNA (1)...(19): siRNA sense strand
gaugaugguuaugaacaaa

SEQ ID NO: 1773768 - RNA, 19 nt, Homo sapiens
  misc_RNA (1)...(19): siRNA sense strand
gaaguuucuugcacaguca

SEQ ID NO: 1773769 - RNA, 19 nt, Homo sapiens
  misc_RNA (1)...(19): siRNA sense strand
guggauccuuugaguuuaa

SEQ ID NO: 1773770 - RNA, 19 nt, Homo sapiens
  misc_RNA (1)...(19): siRNA sense strand
aggaaggucuccaaucuga

SEQ ID NO: 1773771 - RNA, 19 nt, Homo sapiens
  misc_RNA (1)...(19): siRNA sense strand
gaauacuuccaucaucuuu

SEQ ID NO: 1773772 - RNA, 19 nt, Homo sapiens
  misc_RNA (1)...(19): siRNA sense strand
cguguucucuguaauguug

SEQ ID NO: 1773773 - RNA, 19 nt, Homo sapiens
  misc_RNA (1)...(19): siRNA sense strand
gaugauccauacccuguuc

SEQ ID NO: 1773774 - RNA, 19 nt, Homo sapiens
  misc_RNA (1)...(19): siRNA sense strand
uuauuaaccuccuagaaga

SEQ ID NO: 1773775 - RNA, 19 nt, Homo sapiens
  misc_RNA (1)...(19): siRNA sense strand
ccauuucuaugaagucuug

SEQ ID NO: 1773776 - RNA, 19 nt, Homo sapiens
  misc_RNA (1)...(19): siRNA sense strand
ggguuaagcuauuugcaau

SEQ ID NO: 1773777 - RNA, 19 nt, Homo sapiens
  misc_RNA (1)...(19): siRNA sense strand
uggaauugcugacuuggaa

SEQ ID NO: 1773778 - RNA, 19 nt, Homo sapiens
  misc_RNA (1)...(19): siRNA sense strand
ugaagaggaugaagaaggu

SEQ ID NO: 1773779 - RNA, 19 nt, Homo sapiens
  misc_RNA (1)...(19): siRNA sense strand
uagagaagauuacuuugag

SEQ ID NO: 1773780 - RNA, 19 nt, Homo sapiens
  misc_RNA (1)...(19): siRNA sense strand
gagacucuggccaauaaua

SEQ ID NO: 1773781 - RNA, 19 nt, Homo sapiens
  misc_RNA (1)...(19): siRNA sense strand
gguggauccuuugaguuua

SEQ ID NO: 1773782 - RNA, 19 nt, Homo sapiens
  misc_RNA (1)...(19): siRNA sense strand
uagaaaggcuuauuaaccu

SEQ ID NO: 1773783 - RNA, 19 nt, Homo sapiens
  misc_RNA (1)...(19): siRNA sense strand
gaucagcuguuggccaugu

SEQ ID NO: 1773784 - RNA, 19 nt, Homo sapiens
  misc_RNA (1)...(19): siRNA sense strand
acacaaggaguuaaugaaa

SEQ ID NO: 1773785 - RNA, 19 nt, Homo sapiens
  misc_RNA (1)...(19): siRNA sense strand
cacacucacucuucuuaaa

SEQ ID NO: 1773786 - RNA, 19 nt, Homo sapiens
  misc_RNA (1)...(19): siRNA sense strand
ugaagaugauguggaugua

SEQ ID NO: 1773787 - RNA, 19 nt, Homo sapiens
  misc_RNA (1)...(19): siRNA sense strand
gcacacucacucuucuuaa

SEQ ID NO: 1773788 - RNA, 19 nt, Homo sapiens
  misc_RNA (1)...(19): siRNA sense strand
auauagaugugguucguuu

SEQ ID NO: 1773789 - RNA, 19 nt, Homo sapiens
  misc_RNA (1)...(19): siRNA sense strand
aauggaaucuugccguuau

SEQ ID NO: 1773790 - RNA, 19 nt, Homo sapiens
  misc_RNA (1)...(19): siRNA sense strand
cagaauaucgauaacuuga

SEQ ID NO: 1773791 - RNA, 19 nt, Homo sapiens
  misc_RNA (1)...(19): siRNA sense strand
ucuaugaagucuugucaga

SEQ ID NO: 1773792 - RNA, 19 nt, Homo sapiens
  misc_RNA (1)...(19): siRNA sense strand
cuuggaacgugaaacauuu

SEQ ID NO: 1773793 - RNA, 19 nt, Homo sapiens
  misc_RNA (1)...(19): siRNA sense strand
gaugaucgacgaacaguag

SEQ ID NO: 1773794 - RNA, 19 nt, Homo sapiens
  misc_RNA (1)...(19): siRNA sense strand
gccaaccuaucgccuuaaa

SEQ ID NO: 1773795 - RNA, 19 nt, Homo sapiens
  misc_RNA (1)...(19): siRNA sense strand
gcugcugccucuuccauug

SEQ ID NO: 1773796 - RNA, 19 nt, Homo sapiens
  misc_RNA (1)...(19): siRNA sense strand
gaagucaguagcuuauaau

SEQ ID NO: 1773797 - RNA, 19 nt, Homo sapiens
  misc_RNA (1)...(19): siRNA sense strand
gaaacagaccauucagauc

SEQ ID NO: 1773798 - RNA, 19 nt, Homo sapiens
  misc_RNA (1)...(19): siRNA sense strand
ggacucaacacagacauug

SEQ ID NO: 1773799 - RNA, 19 nt, Homo sapiens
  misc_RNA (1)...(19): siRNA sense strand
ggauauggaucuuuuggaa

SEQ ID NO: 1773800 - RNA, 19 nt, Homo sapiens
  misc_RNA (1)...(19): siRNA sense strand
guggaagcuucuauggaua

SEQ ID NO: 1773801 - RNA, 19 nt, Homo sapiens
  misc_RNA (1)...(19): siRNA sense strand
uaagagguaggcagaauga

SEQ ID NO: 1773802 - RNA, 19 nt, Homo sapiens
  misc_RNA (1)...(19): siRNA sense strand
gaucaguggauuauuugaa

SEQ ID NO: 1773803 - RNA, 19 nt, Homo sapiens
  misc_RNA (1)...(19): siRNA sense strand
ggagugaucaguggauuau

SEQ ID NO: 1773804 - RNA, 19 nt, Homo sapiens
  misc_RNA (1)...(19): siRNA sense strand
caaagcugggaccaaauua

SEQ ID NO: 1773805 - RNA, 19 nt, Homo sapiens
  misc_RNA (1)...(19): siRNA sense strand
gaacaacuacaaaguauga

SEQ ID NO: 1773806 - RNA, 19 nt, Homo sapiens
  misc_RNA (1)...(19): siRNA sense strand
ccaacuggguguucuguaa

SEQ ID NO: 1773807 - RNA, 19 nt, Homo sapiens
  misc_RNA (1)...(19): siRNA sense strand
gcagauagaacaacuacaa

SEQ ID NO: 1773808 - RNA, 19 nt, Homo sapiens
  misc_RNA (1)...(19): siRNA sense strand
ggaagucagugcugcagau

SEQ ID NO: 1773809 - RNA, 19 nt, Homo sapiens
  misc_RNA (1)...(19): siRNA sense strand
gauggaaguugaucucucu

SEQ ID NO: 1773810 - RNA, 19 nt, Homo sapiens
  misc_RNA (1)...(19): siRNA sense strand
gaagaaucccuuaggaagu

SEQ ID NO: 1773811 - RNA, 19 nt, Homo sapiens
  misc_RNA (1)...(19): siRNA sense strand
gauagaacaacuacaaagu

SEQ ID NO: 1773812 - RNA, 19 nt, Homo sapiens
  misc_RNA (1)...(19): siRNA sense strand
gagaucaucacaacaaaca

SEQ ID NO: 1773813 - RNA, 19 nt, Homo sapiens
  misc_RNA (1)...(19): siRNA sense strand
gaagucagugcugcagaua

SEQ ID NO: 1773814 - RNA, 19 nt, Homo sapiens
  misc_RNA (1)...(19): siRNA sense strand
aagaaguacuccagggaaa

SEQ ID NO: 1773815 - RNA, 19 nt, Homo sapiens
  misc_RNA (1)...(19): siRNA sense strand
acacaggaagagauuguua

SEQ ID NO: 1773816 - RNA, 19 nt, Homo sapiens
  misc_RNA (1)...(19): siRNA sense strand
gaaugaaugcuugauuugu

SEQ ID NO: 1773817 - RNA, 19 nt, Homo sapiens
  misc_RNA (1)...(19): siRNA sense strand
ggaaaccucccagauuuua

SEQ ID NO: 1773818 - RNA, 19 nt, Homo sapiens
  misc_RNA (1)...(19): siRNA sense strand
acgcagauauccaggcauu

SEQ ID NO: 1773819 - RNA, 19 nt, Homo sapiens
  misc_RNA (1)...(19): siRNA sense strand
caaacagcuuucagcacaa

SEQ ID NO: 1773820 - RNA, 19 nt, Homo sapiens
  misc_RNA (1)...(19): siRNA sense strand
agucagugcugcagauaga

SEQ ID NO: 1773821 - RNA, 19 nt, Homo sapiens
  misc_RNA (1)...(19): siRNA sense strand
uggagucgauggaaguuga

SEQ ID NO: 1773822 - RNA, 19 nt, Homo sapiens
  misc_RNA (1)...(19): siRNA sense strand
caucacaacaaacagcuuu

SEQ ID NO: 1773823 - RNA, 19 nt, Homo sapiens
  misc_RNA (1)...(19): siRNA sense strand
gcugccaccucacucauca

SEQ ID NO: 1773824 - RNA, 19 nt, Homo sapiens
  misc_RNA (1)...(19): siRNA sense strand
gaaguugaucucucuccuu

SEQ ID NO: 1773825 - RNA, 19 nt, Homo sapiens
  misc_RNA (1)...(19): siRNA sense strand
aaacagcuuucagcacaau

SEQ ID NO: 1773826 - RNA, 19 nt, Homo sapiens
  misc_RNA (1)...(19): siRNA sense strand
gcagauauccaggcauucu

SEQ ID NO: 1773827 - RNA, 19 nt, Homo sapiens
  misc_RNA (1)...(19): siRNA sense strand
aaagauuucuagguuggaa

SEQ ID NO: 1773828 - RNA, 19 nt, Homo sapiens
  misc_RNA (1)...(19): siRNA sense strand
caacuacaaaguaugagau

SEQ ID NO: 1773829 - RNA, 19 nt, Homo sapiens
  misc_RNA (1)...(19): siRNA sense strand
uaaagcuccuugucguaca

SEQ ID NO: 1773830 - RNA, 19 nt, Homo sapiens
  misc_RNA (1)...(19): siRNA sense strand
aagaaucccuuaggaaguc

SEQ ID NO: 1773831 - RNA, 19 nt, Homo sapiens
  misc_RNA (1)...(19): siRNA sense strand
gagauuguuagccuucuau

SEQ ID NO: 1773832 - RNA, 19 nt, Homo sapiens
  misc_RNA (1)...(19): siRNA sense strand
cagauagaacaacuacaaa

SEQ ID NO: 1773833 - RNA, 19 nt, Homo sapiens
  misc_RNA (1)...(19): siRNA sense strand
aaacacaggaagagauugu

SEQ ID NO: 1773834 - RNA, 19 nt, Homo sapiens
  misc_RNA (1)...(19): siRNA sense strand
guugaucucucuccuucuc

SEQ ID NO: 1773835 - RNA, 19 nt, Homo sapiens
  misc_RNA (1)...(19): siRNA sense strand
agaaugaaugcuugauuug

SEQ ID NO: 1773836 - RNA, 19 nt, Homo sapiens
  misc_RNA (1)...(19): siRNA sense strand
cacaggacgucgugcuuca

SEQ ID NO: 1773837 - RNA, 19 nt, Homo sapiens
  misc_RNA (1)...(19): siRNA sense strand
gcauaccgacgcagauauc

SEQ ID NO: 1773838 - RNA, 19 nt, Homo sapiens
  misc_RNA (1)...(19): siRNA sense strand
agagauuguuagccuucua

SEQ ID NO: 1773839 - RNA, 19 nt, Homo sapiens
  misc_RNA (1)...(19): siRNA sense strand
caacuggguguucuguaau

SEQ ID NO: 1773840 - RNA, 19 nt, Homo sapiens
  misc_RNA (1)...(19): siRNA sense strand
aagcauaccgacgcagaua

SEQ ID NO: 1773841 - RNA, 19 nt, Homo sapiens
  misc_RNA (1)...(19): siRNA sense strand
caacugcgggcacguguac

SEQ ID NO: 1773842 - RNA, 19 nt, Homo sapiens
  misc_RNA (1)...(19): siRNA sense strand
auuguuagccuucuauaga

SEQ ID NO: 1773843 - RNA, 19 nt, Homo sapiens
  misc_RNA (1)...(19): siRNA sense strand
uggaagaaucccuuaggaa

SEQ ID NO: 1773844 - RNA, 19 nt, Homo sapiens
  misc_RNA (1)...(19): siRNA sense strand
gcuccuugucguacaguuu

SEQ ID NO: 1773845 - RNA, 19 nt, Homo sapiens
  misc_RNA (1)...(19): siRNA sense strand
uguaaagcuccuugucgua

SEQ ID NO: 1773846 - RNA, 19 nt, Homo sapiens
  misc_RNA (1)...(19): siRNA sense strand
uauccaggcauucuucaug

SEQ ID NO: 1773847 - RNA, 19 nt, Homo sapiens
  misc_RNA (1)...(19): siRNA sense strand
caugauuaguccaccucaa

SEQ ID NO: 1773848 - RNA, 19 nt, Homo sapiens
  misc_RNA (1)...(19): siRNA sense strand
uuggaagaaucccuuagga

SEQ ID NO: 1773849 - RNA, 19 nt, Homo sapiens
  misc_RNA (1)...(19): siRNA sense strand
auccaggcauucuucauga

SEQ ID NO: 1773850 - RNA, 19 nt, Homo sapiens
  misc_RNA (1)...(19): siRNA sense strand
gcuucagccucaccaacug

SEQ ID NO: 1773851 - RNA, 19 nt, Homo sapiens
  misc_RNA (1)...(19): siRNA sense strand
acagcuuucagcacaauaa

SEQ ID NO: 1773852 - RNA, 19 nt, Homo sapiens
  misc_RNA (1)...(19): siRNA sense strand
gauuguuagccuucuauag

SEQ ID NO: 1773853 - RNA, 19 nt, Homo sapiens
  misc_RNA (1)...(19): siRNA sense strand
gauuaguccaccucaagau

SEQ ID NO: 1773854 - RNA, 19 nt, Homo sapiens
  misc_RNA (1)...(19): siRNA sense strand
ucucucuccuucuccgauu

SEQ ID NO: 1773855 - RNA, 19 nt, Homo sapiens
  misc_RNA (1)...(19): siRNA sense strand
gaacaacuacaaaguauga

SEQ ID NO: 1773856 - RNA, 19 nt, Homo sapiens
  misc_RNA (1)...(19): siRNA sense strand
ccaacuggguguucuguaa

SEQ ID NO: 1773857 - RNA, 19 nt, Homo sapiens
  misc_RNA (1)...(19): siRNA sense strand
gcagauagaacaacuacaa

SEQ ID NO: 1773858 - RNA, 19 nt, Homo sapiens
  misc_RNA (1)...(19): siRNA sense strand
ggaagucagugcugcagau

SEQ ID NO: 1773859 - RNA, 19 nt, Homo sapiens
  misc_RNA (1)...(19): siRNA sense strand
gauggaaguugaucucucu

SEQ ID NO: 1773860 - RNA, 19 nt, Homo sapiens
  misc_RNA (1)...(19): siRNA sense strand
gaagaaucccuuaggaagu

SEQ ID NO: 1773861 - RNA, 19 nt, Homo sapiens
  misc_RNA (1)...(19): siRNA sense strand
gauagaacaacuacaaagu

SEQ ID NO: 1773862 - RNA, 19 nt, Homo sapiens
  misc_RNA (1)...(19): siRNA sense strand
gagaucaucacaacaaaca

SEQ ID NO: 1773863 - RNA, 19 nt, Homo sapiens
  misc_RNA (1)...(19): siRNA sense strand
gaagucagugcugcagaua

SEQ ID NO: 1773864 - RNA, 19 nt, Homo sapiens
  misc_RNA (1)...(19): siRNA sense strand
aagaaguacuccagggaaa

SEQ ID NO: 1773865 - RNA, 19 nt, Homo sapiens
  misc_RNA (1)...(19): siRNA sense strand
acacaggaagagauuguua

SEQ ID NO: 1773866 - RNA, 19 nt, Homo sapiens
  misc_RNA (1)...(19): siRNA sense strand
gaaugaaugcuugauuugu

SEQ ID NO: 1773867 - RNA, 19 nt, Homo sapiens
  misc_RNA (1)...(19): siRNA sense strand
ggaaaccucccagauuuua

SEQ ID NO: 1773868 - RNA, 19 nt, Homo sapiens
  misc_RNA (1)...(19): siRNA sense strand
acgcagauauccaggcauu

SEQ ID NO: 1773869 - RNA, 19 nt, Homo sapiens
  misc_RNA (1)...(19): siRNA sense strand
caaacagcuuucagcacaa

SEQ ID NO: 1773870 - RNA, 19 nt, Homo sapiens
  misc_RNA (1)...(19): siRNA sense strand
agucagugcugcagauaga

SEQ ID NO: 1773871 - RNA, 19 nt, Homo sapiens
  misc_RNA (1)...(19): siRNA sense strand
uggagucgauggaaguuga

SEQ ID NO: 1773872 - RNA, 19 nt, Homo sapiens
  misc_RNA (1)...(19): siRNA sense strand
caucacaacaaacagcuuu

SEQ ID NO: 1773873 - RNA, 19 nt, Homo sapiens
  misc_RNA (1)...(19): siRNA sense strand
gcugccaccucacucauca

SEQ ID NO: 1773874 - RNA, 19 nt, Homo sapiens
  misc_RNA (1)...(19): siRNA sense strand
gaaguugaucucucuccuu

SEQ ID NO: 1773875 - RNA, 19 nt, Homo sapiens
  misc_RNA (1)...(19): siRNA sense strand
aaacagcuuucagcacaau

SEQ ID NO: 1773876 - RNA, 19 nt, Homo sapiens
  misc_RNA (1)...(19): siRNA sense strand
gcagauauccaggcauucu

SEQ ID NO: 1773877 - RNA, 19 nt, Homo sapiens
  misc_RNA (1)...(19): siRNA sense strand
aaagauuucuagguuggaa

SEQ ID NO: 1773878 - RNA, 19 nt, Homo sapiens
  misc_RNA (1)...(19): siRNA sense strand
caacuacaaaguaugagau

SEQ ID NO: 1773879 - RNA, 19 nt, Homo sapiens
  misc_RNA (1)...(19): siRNA sense strand
uaaagcuccuugucguaca

SEQ ID NO: 1773880 - RNA, 19 nt, Homo sapiens
  misc_RNA (1)...(19): siRNA sense strand
ggaggcuggucccaaccuu

SEQ ID NO: 1773881 - RNA, 19 nt, Homo sapiens
  misc_RNA (1)...(19): siRNA sense strand
aagaaucccuuaggaaguc

SEQ ID NO: 1773882 - RNA, 19 nt, Homo sapiens
  misc_RNA (1)...(19): siRNA sense strand
gagauuguuagccuucuau

SEQ ID NO: 1773883 - RNA, 19 nt, Homo sapiens
  misc_RNA (1)...(19): siRNA sense strand
cagauagaacaacuacaaa

SEQ ID NO: 1773884 - RNA, 19 nt, Homo sapiens
  misc_RNA (1)...(19): siRNA sense strand
aaacacaggaagagauugu

SEQ ID NO: 1773885 - RNA, 19 nt, Homo sapiens
  misc_RNA (1)...(19): siRNA sense strand
guugaucucucuccuucuc

SEQ ID NO: 1773886 - RNA, 19 nt, Homo sapiens
  misc_RNA (1)...(19): siRNA sense strand
cacaggacgucgugcuuca

SEQ ID NO: 1773887 - RNA, 19 nt, Homo sapiens
  misc_RNA (1)...(19): siRNA sense strand
agaaugaaugcuugauuug

SEQ ID NO: 1773888 - RNA, 19 nt, Homo sapiens
  misc_RNA (1)...(19): siRNA sense strand
gcauaccgacgcagauauc

SEQ ID NO: 1773889 - RNA, 19 nt, Homo sapiens
  misc_RNA (1)...(19): siRNA sense strand
agagauuguuagccuucua

SEQ ID NO: 1773890 - RNA, 19 nt, Homo sapiens
  misc_RNA (1)...(19): siRNA sense strand
caacuggguguucuguaau

SEQ ID NO: 1773891 - RNA, 19 nt, Homo sapiens
  misc_RNA (1)...(19): siRNA sense strand
aagcauaccgacgcagaua

SEQ ID NO: 1773892 - RNA, 19 nt, Homo sapiens
  misc_RNA (1)...(19): siRNA sense strand
caacugcgggcacguguac

SEQ ID NO: 1773893 - RNA, 19 nt, Homo sapiens
  misc_RNA (1)...(19): siRNA sense strand
auuguuagccuucuauaga

SEQ ID NO: 1773894 - RNA, 19 nt, Homo sapiens
  misc_RNA (1)...(19): siRNA sense strand
gcuccuugucguacaguuu

SEQ ID NO: 1773895 - RNA, 19 nt, Homo sapiens
  misc_RNA (1)...(19): siRNA sense strand
uguaaagcuccuugucgua

SEQ ID NO: 1773896 - RNA, 19 nt, Homo sapiens
  misc_RNA (1)...(19): siRNA sense strand
uggaagaaucccuuaggaa

SEQ ID NO: 1773897 - RNA, 19 nt, Homo sapiens
  misc_RNA (1)...(19): siRNA sense strand
uauccaggcauucuucaug

SEQ ID NO: 1773898 - RNA, 19 nt, Homo sapiens
  misc_RNA (1)...(19): siRNA sense strand
caugauuaguccaccucaa

SEQ ID NO: 1773899 - RNA, 19 nt, Homo sapiens
  misc_RNA (1)...(19): siRNA sense strand
uuggaagaaucccuuagga

SEQ ID NO: 1773900 - RNA, 19 nt, Homo sapiens
  misc_RNA (1)...(19): siRNA sense strand
auccaggcauucuucauga

SEQ ID NO: 1773901 - RNA, 19 nt, Homo sapiens
  misc_RNA (1)...(19): siRNA sense strand
gcuucagccucaccaacug

SEQ ID NO: 1773902 - RNA, 19 nt, Homo sapiens
  misc_RNA (1)...(19): siRNA sense strand
acagcuuucagcacaauaa

SEQ ID NO: 1773903 - RNA, 19 nt, Homo sapiens
  misc_RNA (1)...(19): siRNA sense strand
gauuguuagccuucuauag

SEQ ID NO: 1773904 - RNA, 19 nt, Homo sapiens
  misc_RNA (1)...(19): siRNA sense strand
gauuaguccaccucaagau

SEQ ID NO: 1773905 - RNA, 19 nt, Homo sapiens
  misc_RNA (1)...(19): siRNA sense strand
ucucucuccuucuccgauu

SEQ ID NO: 1773906 - RNA, 19 nt, Homo sapiens
  misc_RNA (1)...(19): siRNA sense strand
gaagaaggauuuguaguga

SEQ ID NO: 1773907 - RNA, 19 nt, Homo sapiens
  misc_RNA (1)...(19): siRNA sense strand
gaacaucacucacauuugc

SEQ ID NO: 1773908 - RNA, 19 nt, Homo sapiens
  misc_RNA (1)...(19): siRNA sense strand
gaaacugguuggugaagaa

SEQ ID NO: 1773909 - RNA, 19 nt, Homo sapiens
  misc_RNA (1)...(19): siRNA sense strand
caaugaagauaccagagua

SEQ ID NO: 1773910 - RNA, 19 nt, Homo sapiens
  misc_RNA (1)...(19): siRNA sense strand
ugaggaagaugaugugauu

SEQ ID NO: 1773911 - RNA, 19 nt, Homo sapiens
  misc_RNA (1)...(19): siRNA sense strand
caagugacauugagauuuc

SEQ ID NO: 1773912 - RNA, 19 nt, Homo sapiens
  misc_RNA (1)...(19): siRNA sense strand
ucagagaagucauucagaa

SEQ ID NO: 1773913 - RNA, 19 nt, Homo sapiens
  misc_RNA (1)...(19): siRNA sense strand
ggagauggcuucgugaaca

SEQ ID NO: 1773914 - RNA, 19 nt, Homo sapiens
  misc_RNA (1)...(19): siRNA sense strand
caaccuagauggaaagaag

SEQ ID NO: 1773915 - RNA, 19 nt, Homo sapiens
  misc_RNA (1)...(19): siRNA sense strand
ugccaaagcuguaauugaa

SEQ ID NO: 1773916 - RNA, 19 nt, Homo sapiens
  misc_RNA (1)...(19): siRNA sense strand
gccaagggacuucaucuua

SEQ ID NO: 1773917 - RNA, 19 nt, Homo sapiens
  misc_RNA (1)...(19): siRNA sense strand
gagagaggcugcgaguaaa

SEQ ID NO: 1773918 - RNA, 19 nt, Homo sapiens
  misc_RNA (1)...(19): siRNA sense strand
acacgaggauucuucauga

SEQ ID NO: 1773919 - RNA, 19 nt, Homo sapiens
  misc_RNA (1)...(19): siRNA sense strand
ucagaucacucagcucuuu

SEQ ID NO: 1773920 - RNA, 19 nt, Homo sapiens
  misc_RNA (1)...(19): siRNA sense strand
gaagauaccagaguacaug

SEQ ID NO: 1773921 - RNA, 19 nt, Homo sapiens
  misc_RNA (1)...(19): siRNA sense strand
gcaacaaaguccucaaugc

SEQ ID NO: 1773922 - RNA, 19 nt, Homo sapiens
  misc_RNA (1)...(19): siRNA sense strand
gaaagaagauuuugguagu

SEQ ID NO: 1773923 - RNA, 19 nt, Homo sapiens
  misc_RNA (1)...(19): siRNA sense strand
cgaaacagaacaaguuaaa

SEQ ID NO: 1773924 - RNA, 19 nt, Homo sapiens
  misc_RNA (1)...(19): siRNA sense strand
ugagagaggcugcgaguaa

SEQ ID NO: 1773925 - RNA, 19 nt, Homo sapiens
  misc_RNA (1)...(19): siRNA sense strand
gaagaggaagugaguaaau

SEQ ID NO: 1773926 - RNA, 19 nt, Homo sapiens
  misc_RNA (1)...(19): siRNA sense strand
ucacgaggcugacauugug

SEQ ID NO: 1773927 - RNA, 19 nt, Homo sapiens
  misc_RNA (1)...(19): siRNA sense strand
ggaccgacguuuggaguga

SEQ ID NO: 1773928 - RNA, 19 nt, Homo sapiens
  misc_RNA (1)...(19): siRNA sense strand
gcagugaagccgagauuau

SEQ ID NO: 1773929 - RNA, 19 nt, Homo sapiens
  misc_RNA (1)...(19): siRNA sense strand
ggguguggcucuccaagaa

SEQ ID NO: 1773930 - RNA, 19 nt, Homo sapiens
  misc_RNA (1)...(19): siRNA sense strand
ggaagcugcucuacaaugc

SEQ ID NO: 1773931 - RNA, 19 nt, Homo sapiens
  misc_RNA (1)...(19): siRNA sense strand
aagccgagauuauagauga

SEQ ID NO: 1773932 - RNA, 19 nt, Homo sapiens
  misc_RNA (1)...(19): siRNA sense strand
guuaaaggaucaagcagau

SEQ ID NO: 1773933 - RNA, 19 nt, Homo sapiens
  misc_RNA (1)...(19): siRNA sense strand
cauaggcgcuggguucauu

SEQ ID NO: 1773934 - RNA, 19 nt, Homo sapiens
  misc_RNA (1)...(19): siRNA sense strand
gacuucaucuuaccuauca

SEQ ID NO: 1773935 - RNA, 19 nt, Homo sapiens
  misc_RNA (1)...(19): siRNA sense strand
gcuguaaccuccagaagca

SEQ ID NO: 1773936 - RNA, 19 nt, Homo sapiens
  misc_RNA (1)...(19): siRNA sense strand
gaaauuugcccaucugcau

SEQ ID NO: 1773937 - RNA, 19 nt, Homo sapiens
  misc_RNA (1)...(19): siRNA sense strand
caacugcucccaugacuuc

SEQ ID NO: 1773938 - RNA, 19 nt, Homo sapiens
  misc_RNA (1)...(19): siRNA sense strand
ucacuugacuggagacauc

SEQ ID NO: 1773939 - RNA, 19 nt, Homo sapiens
  misc_RNA (1)...(19): siRNA sense strand
guguggcucuccaagaaua

SEQ ID NO: 1773940 - RNA, 19 nt, Homo sapiens
  misc_RNA (1)...(19): siRNA sense strand
gcgcugagauugacuuggu

SEQ ID NO: 1773941 - RNA, 19 nt, Homo sapiens
  misc_RNA (1)...(19): siRNA sense strand
acacagagaagggccauua

SEQ ID NO: 1773942 - RNA, 19 nt, Homo sapiens
  misc_RNA (1)...(19): siRNA sense strand
cagaagaggaagugaguaa

SEQ ID NO: 1773943 - RNA, 19 nt, Homo sapiens
  misc_RNA (1)...(19): siRNA sense strand
auaaucggcugguuccuuu

SEQ ID NO: 1773944 - RNA, 19 nt, Homo sapiens
  misc_RNA (1)...(19): siRNA sense strand
gcaaagccaaaguacguuu

SEQ ID NO: 1773945 - RNA, 19 nt, Homo sapiens
  misc_RNA (1)...(19): siRNA sense strand
caaaauagaucguuacacu

SEQ ID NO: 1773946 - RNA, 19 nt, Homo sapiens
  misc_RNA (1)...(19): siRNA sense strand
gacaagauaaggaccauug

SEQ ID NO: 1773947 - RNA, 19 nt, Homo sapiens
  misc_RNA (1)...(19): siRNA sense strand
ggugacaggugcuuugaca

SEQ ID NO: 1773948 - RNA, 19 nt, Homo sapiens
  misc_RNA (1)...(19): siRNA sense strand
gaaaacacgcaaacagaua

SEQ ID NO: 1773949 - RNA, 19 nt, Homo sapiens
  misc_RNA (1)...(19): siRNA sense strand
ggaguucaaccuucacuug

SEQ ID NO: 1773950 - RNA, 19 nt, Homo sapiens
  misc_RNA (1)...(19): siRNA sense strand
ucugagaacuuguuuagca

SEQ ID NO: 1773951 - RNA, 19 nt, Homo sapiens
  misc_RNA (1)...(19): siRNA sense strand
ccaagggacuucaucuuac

SEQ ID NO: 1773952 - RNA, 19 nt, Homo sapiens
  misc_RNA (1)...(19): siRNA sense strand
gauuccaguuccuguauga

SEQ ID NO: 1773953 - RNA, 19 nt, Homo sapiens
  misc_RNA (1)...(19): siRNA sense strand
aagaggaagugaguaaauu

SEQ ID NO: 1773954 - RNA, 19 nt, Homo sapiens
  misc_RNA (1)...(19): siRNA sense strand
gcuugcagaugaaauugaa

SEQ ID NO: 1773955 - RNA, 19 nt, Homo sapiens
  misc_RNA (1)...(19): siRNA sense strand
gggaugcccaugaauguuu

SEQ ID NO: 1773956 - RNA, 19 nt, Homo sapiens
  misc_RNA (1)...(19): siRNA sense strand
ugacauagaucuugauacc

SEQ ID NO: 1773957 - RNA, 19 nt, Homo sapiens
  misc_RNA (1)...(19): siRNA sense strand
ggauggugguggccaguga

SEQ ID NO: 1773958 - RNA, 19 nt, Homo sapiens
  misc_RNA (1)...(19): siRNA sense strand
gaagggaagagcacaguca

SEQ ID NO: 1773959 - RNA, 19 nt, Homo sapiens
  misc_RNA (1)...(19): siRNA sense strand
ugaauggugucagagaauu

SEQ ID NO: 1773960 - RNA, 19 nt, Homo sapiens
  misc_RNA (1)...(19): siRNA sense strand
cgagcacacugacagaaga

SEQ ID NO: 1773961 - RNA, 19 nt, Homo sapiens
  misc_RNA (1)...(19): siRNA sense strand
gguggagacuucacugcuu

SEQ ID NO: 1773962 - RNA, 19 nt, Homo sapiens
  misc_RNA (1)...(19): siRNA sense strand
caacaggguuuuggaaauu

SEQ ID NO: 1773963 - RNA, 19 nt, Homo sapiens
  misc_RNA (1)...(19): siRNA sense strand
ugaagaaggauuuguagug

SEQ ID NO: 1773964 - RNA, 19 nt, Homo sapiens
  misc_RNA (1)...(19): siRNA sense strand
gauaaggcucuguauaauc

SEQ ID NO: 1773965 - RNA, 19 nt, Homo sapiens
  misc_RNA (1)...(19): siRNA sense strand
ggauggaguaacagacaua

SEQ ID NO: 1773966 - RNA, 19 nt, Homo sapiens
  misc_RNA (1)...(19): siRNA sense strand
ggugcgagcucugaagaug

SEQ ID NO: 1773967 - RNA, 19 nt, Homo sapiens
  misc_RNA (1)...(19): siRNA sense strand
gacaggugcuuugacaguu

SEQ ID NO: 1773968 - RNA, 19 nt, Homo sapiens
  misc_RNA (1)...(19): siRNA sense strand
uggcagagaguauuggaua

SEQ ID NO: 1773969 - RNA, 19 nt, Homo sapiens
  misc_RNA (1)...(19): siRNA sense strand
gaggaagugaguaaauuug

SEQ ID NO: 1773970 - RNA, 19 nt, Homo sapiens
  misc_RNA (1)...(19): siRNA sense strand
gaauggugucagagaauuu

SEQ ID NO: 1773971 - RNA, 19 nt, Homo sapiens
  misc_RNA (1)...(19): siRNA sense strand
uagaaagguuaaaggauca

SEQ ID NO: 1773972 - RNA, 19 nt, Homo sapiens
  misc_RNA (1)...(19): siRNA sense strand
uuuggaagcugcucuacaa

SEQ ID NO: 1773973 - RNA, 19 nt, Homo sapiens
  misc_RNA (1)...(19): siRNA sense strand
cagugaagccgagauuaua

SEQ ID NO: 1773974 - RNA, 19 nt, Homo sapiens
  misc_RNA (1)...(19): siRNA sense strand
ccaagugacauugagauuu

SEQ ID NO: 1773975 - RNA, 19 nt, Homo sapiens
  misc_RNA (1)...(19): siRNA sense strand
caaggagauuggauugcuu

SEQ ID NO: 1773976 - RNA, 19 nt, Homo sapiens
  misc_RNA (1)...(19): siRNA sense strand
aaauagaucguuacacuca

SEQ ID NO: 1773977 - RNA, 19 nt, Homo sapiens
  misc_RNA (1)...(19): siRNA sense strand
gcugguuccuuuagugaau

SEQ ID NO: 1773978 - RNA, 19 nt, Homo sapiens
  misc_RNA (1)...(19): siRNA sense strand
agauaaggcucuguauaau

SEQ ID NO: 1773979 - RNA, 19 nt, Homo sapiens
  misc_RNA (1)...(19): siRNA sense strand
caucaccgcugccaauaac

SEQ ID NO: 1773980 - RNA, 19 nt, Homo sapiens
  misc_RNA (1)...(19): siRNA sense strand
ggacagccucgcagacaug

SEQ ID NO: 1773981 - RNA, 19 nt, Homo sapiens
  misc_RNA (1)...(19): siRNA sense strand
gauguucagguuccaauug

SEQ ID NO: 1773982 - RNA, 19 nt, Homo sapiens
  misc_RNA (1)...(19): siRNA sense strand
cggcugguguuccucuuaa

SEQ ID NO: 1773983 - RNA, 19 nt, Homo sapiens
  misc_RNA (1)...(19): siRNA sense strand
acaggugcuuugacaguuu

SEQ ID NO: 1773984 - RNA, 19 nt, Homo sapiens
  misc_RNA (1)...(19): siRNA sense strand
ccaaagcuguaauugaacu

SEQ ID NO: 1773985 - RNA, 19 nt, Homo sapiens
  misc_RNA (1)...(19): siRNA sense strand
aaacagaacaaguuaaagg

SEQ ID NO: 1773986 - RNA, 19 nt, Homo sapiens
  misc_RNA (1)...(19): siRNA sense strand
caggaaaucaaccagaauu

SEQ ID NO: 1773987 - RNA, 19 nt, Homo sapiens
  misc_RNA (1)...(19): siRNA sense strand
ccgcacaccugaaugucaa

SEQ ID NO: 1773988 - RNA, 19 nt, Homo sapiens
  misc_RNA (1)...(19): siRNA sense strand
caagaggacaaacuccaaa

SEQ ID NO: 1773989 - RNA, 19 nt, Homo sapiens
  misc_RNA (1)...(19): siRNA sense strand
gcccaugaauguuuuguuu

SEQ ID NO: 1773990 - RNA, 19 nt, Homo sapiens
  misc_RNA (1)...(19): siRNA sense strand
caaagauauugaacucucu

SEQ ID NO: 1773991 - RNA, 19 nt, Homo sapiens
  misc_RNA (1)...(19): siRNA sense strand
gaaauucuucaacaucaag

SEQ ID NO: 1773992 - RNA, 19 nt, Homo sapiens
  misc_RNA (1)...(19): siRNA sense strand
uuggauugcuugcagauga

SEQ ID NO: 1773993 - RNA, 19 nt, Homo sapiens
  misc_RNA (1)...(19): siRNA sense strand
cuauggagccaaagauauu

SEQ ID NO: 1773994 - RNA, 19 nt, Homo sapiens
  misc_RNA (1)...(19): siRNA sense strand
aaugaccgauuucuacgaa

SEQ ID NO: 1773995 - RNA, 19 nt, Homo sapiens
  misc_RNA (1)...(19): siRNA sense strand
gggaauaaauaagacugau

SEQ ID NO: 1773996 - RNA, 19 nt, Homo sapiens
  misc_RNA (1)...(19): siRNA sense strand
cuagauggaaagaagauuu

SEQ ID NO: 1773997 - RNA, 19 nt, Homo sapiens
  misc_RNA (1)...(19): siRNA sense strand
ggucugaacaucacucaca

SEQ ID NO: 1773998 - RNA, 19 nt, Homo sapiens
  misc_RNA (1)...(19): siRNA sense strand
gggacuccaucgucagaga

SEQ ID NO: 1773999 - RNA, 19 nt, Homo sapiens
  misc_RNA (1)...(19): siRNA sense strand
ugaggaggcuggucugaac

SEQ ID NO: 1774000 - RNA, 19 nt, Homo sapiens
  misc_RNA (1)...(19): siRNA sense strand
caaugccuguuccagagaa

SEQ ID NO: 1774001 - RNA, 19 nt, Homo sapiens
  misc_RNA (1)...(19): siRNA sense strand
agauugacuugguguguga

SEQ ID NO: 1774002 - RNA, 19 nt, Homo sapiens
  misc_RNA (1)...(19): siRNA sense strand
ggugguggccagugacaaa

SEQ ID NO: 1774003 - RNA, 19 nt, Homo sapiens
  misc_RNA (1)...(19): siRNA sense strand
auaaggcucuguauaaucg

SEQ ID NO: 1774004 - RNA, 19 nt, Homo sapiens
  misc_RNA (1)...(19): siRNA sense strand
caaaagcaaagccaaagua

SEQ ID NO: 1774005 - RNA, 19 nt, Homo sapiens
  misc_RNA (1)...(19): siRNA sense strand
gaaaaggguccaugacaau

SEQ ID NO: 1774006 - RNA, 19 nt, Homo sapiens
  misc_RNA (1)...(19): siRNA sense strand
cagcaaauauccauucuuu

SEQ ID NO: 1774007 - RNA, 19 nt, Homo sapiens
  misc_RNA (1)...(19): siRNA sense strand
gcaaauguaugaagagaug

SEQ ID NO: 1774008 - RNA, 19 nt, Homo sapiens
  misc_RNA (1)...(19): siRNA sense strand
caucagagcuuuaaaugug

SEQ ID NO: 1774009 - RNA, 19 nt, Homo sapiens
  misc_RNA (1)...(19): siRNA sense strand
caacaaagauaagcaagaa

SEQ ID NO: 1774010 - RNA, 19 nt, Homo sapiens
  misc_RNA (1)...(19): siRNA sense strand
gagaugaugugacugauga

SEQ ID NO: 1774011 - RNA, 19 nt, Homo sapiens
  misc_RNA (1)...(19): siRNA sense strand
gaagaaagcacagauuauu

SEQ ID NO: 1774012 - RNA, 19 nt, Homo sapiens
  misc_RNA (1)...(19): siRNA sense strand
gcagaaauuuauuccauga

SEQ ID NO: 1774013 - RNA, 19 nt, Homo sapiens
  misc_RNA (1)...(19): siRNA sense strand
gaacagauggagucaauga

SEQ ID NO: 1774014 - RNA, 19 nt, Homo sapiens
  misc_RNA (1)...(19): siRNA sense strand
gaacgcagauuugauagug

SEQ ID NO: 1774015 - RNA, 19 nt, Homo sapiens
  misc_RNA (1)...(19): siRNA sense strand
gacauuggcuucuguucua

SEQ ID NO: 1774016 - RNA, 19 nt, Homo sapiens
  misc_RNA (1)...(19): siRNA sense strand
gauauugccugguuugaug

SEQ ID NO: 1774017 - RNA, 19 nt, Homo sapiens
  misc_RNA (1)...(19): siRNA sense strand
gauagcaacugaagcuuug

SEQ ID NO: 1774018 - RNA, 19 nt, Homo sapiens
  misc_RNA (1)...(19): siRNA sense strand
gagaugacauuccugauuc

SEQ ID NO: 1774019 - RNA, 19 nt, Homo sapiens
  misc_RNA (1)...(19): siRNA sense strand
ucaaagccauguuauauca

SEQ ID NO: 1774020 - RNA, 19 nt, Homo sapiens
  misc_RNA (1)...(19): siRNA sense strand
gaaagacaguagcauuugu

SEQ ID NO: 1774021 - RNA, 19 nt, Homo sapiens
  misc_RNA (1)...(19): siRNA sense strand
ugaagggaauuuagaguuu

SEQ ID NO: 1774022 - RNA, 19 nt, Homo sapiens
  misc_RNA (1)...(19): siRNA sense strand
ucauggaguuuccuaauaa

SEQ ID NO: 1774023 - RNA, 19 nt, Homo sapiens
  misc_RNA (1)...(19): siRNA sense strand
uaagcaugcuggaaagaua

SEQ ID NO: 1774024 - RNA, 19 nt, Homo sapiens
  misc_RNA (1)...(19): siRNA sense strand
gcacaccgacuuucuacua

SEQ ID NO: 1774025 - RNA, 19 nt, Homo sapiens
  misc_RNA (1)...(19): siRNA sense strand
gagggcauguucauaguuu

SEQ ID NO: 1774026 - RNA, 19 nt, Homo sapiens
  misc_RNA (1)...(19): siRNA sense strand
ccugaagucucucuauuaa

SEQ ID NO: 1774027 - RNA, 19 nt, Homo sapiens
  misc_RNA (1)...(19): siRNA sense strand
ccugagaaaucgagacaua

SEQ ID NO: 1774028 - RNA, 19 nt, Homo sapiens
  misc_RNA (1)...(19): siRNA sense strand
agaaauaccucgaagaaag

SEQ ID NO: 1774029 - RNA, 19 nt, Homo sapiens
  misc_RNA (1)...(19): siRNA sense strand
gaaaagcacuucuguucaa

SEQ ID NO: 1774030 - RNA, 19 nt, Homo sapiens
  misc_RNA (1)...(19): siRNA sense strand
aaacaaagacuagcuauug

SEQ ID NO: 1774031 - RNA, 19 nt, Homo sapiens
  misc_RNA (1)...(19): siRNA sense strand
guaacaauaucaaguaugg

SEQ ID NO: 1774032 - RNA, 19 nt, Homo sapiens
  misc_RNA (1)...(19): siRNA sense strand
gcaacagguuccaggauug

SEQ ID NO: 1774033 - RNA, 19 nt, Homo sapiens
  misc_RNA (1)...(19): siRNA sense strand
gaaauacaacacacaaguu

SEQ ID NO: 1774034 - RNA, 19 nt, Homo sapiens
  misc_RNA (1)...(19): siRNA sense strand
gcagcaggguuucgauuug

SEQ ID NO: 1774035 - RNA, 19 nt, Homo sapiens
  misc_RNA (1)...(19): siRNA sense strand
ucagaacgcagauuugaua

SEQ ID NO: 1774036 - RNA, 19 nt, Homo sapiens
  misc_RNA (1)...(19): siRNA sense strand
ggagaugacauuccugauu

SEQ ID NO: 1774037 - RNA, 19 nt, Homo sapiens
  misc_RNA (1)...(19): siRNA sense strand
gaauuuagaguuucgagaa

SEQ ID NO: 1774038 - RNA, 19 nt, Homo sapiens
  misc_RNA (1)...(19): siRNA sense strand
gagcaaauguaugaagaga

SEQ ID NO: 1774039 - RNA, 19 nt, Homo sapiens
  misc_RNA (1)...(19): siRNA sense strand
gccaugccuuuauauauuu

SEQ ID NO: 1774040 - RNA, 19 nt, Homo sapiens
  misc_RNA (1)...(19): siRNA sense strand
gccauuagaugagaucaaa

SEQ ID NO: 1774041 - RNA, 19 nt, Homo sapiens
  misc_RNA (1)...(19): siRNA sense strand
gaacaaggaacucaucaag

SEQ ID NO: 1774042 - RNA, 19 nt, Homo sapiens
  misc_RNA (1)...(19): siRNA sense strand
ggacaagugcuguuugaug

SEQ ID NO: 1774043 - RNA, 19 nt, Homo sapiens
  misc_RNA (1)...(19): siRNA sense strand
cuucagcccucgauaauga

SEQ ID NO: 1774044 - RNA, 19 nt, Homo sapiens
  misc_RNA (1)...(19): siRNA sense strand
caaagaagccgcaaaugca

SEQ ID NO: 1774045 - RNA, 19 nt, Homo sapiens
  misc_RNA (1)...(19): siRNA sense strand
cgcaauugcucgugccuua

SEQ ID NO: 1774046 - RNA, 19 nt, Homo sapiens
  misc_RNA (1)...(19): siRNA sense strand
gaaacaaagacuagcuauu

SEQ ID NO: 1774047 - RNA, 19 nt, Homo sapiens
  misc_RNA (1)...(19): siRNA sense strand
gaucaaagaagccgcaaau

SEQ ID NO: 1774048 - RNA, 19 nt, Homo sapiens
  misc_RNA (1)...(19): siRNA sense strand
caacugaagcuuuggagaa

SEQ ID NO: 1774049 - RNA, 19 nt, Homo sapiens
  misc_RNA (1)...(19): siRNA sense strand
gcaaaggucggacuacaau

SEQ ID NO: 1774050 - RNA, 19 nt, Homo sapiens
  misc_RNA (1)...(19): siRNA sense strand
ugagaaaucgagacauaua

SEQ ID NO: 1774051 - RNA, 19 nt, Homo sapiens
  misc_RNA (1)...(19): siRNA sense strand
gaagggaauuuagaguuuc

SEQ ID NO: 1774052 - RNA, 19 nt, Homo sapiens
  misc_RNA (1)...(19): siRNA sense strand
acaaggaacucaucaagag

SEQ ID NO: 1774053 - RNA, 19 nt, Homo sapiens
  misc_RNA (1)...(19): siRNA sense strand
ggaaagacaguagcauuug

SEQ ID NO: 1774054 - RNA, 19 nt, Homo sapiens
  misc_RNA (1)...(19): siRNA sense strand
gagcaaaggucggacuaca

SEQ ID NO: 1774055 - RNA, 19 nt, Homo sapiens
  misc_RNA (1)...(19): siRNA sense strand
caacuaacaugggacuuuc

SEQ ID NO: 1774056 - RNA, 19 nt, Homo sapiens
  misc_RNA (1)...(19): siRNA sense strand
gcaacuaacaugggacuuu

SEQ ID NO: 1774057 - RNA, 19 nt, Homo sapiens
  misc_RNA (1)...(19): siRNA sense strand
ggaauccacccaaucuaaa

SEQ ID NO: 1774058 - RNA, 19 nt, Homo sapiens
  misc_RNA (1)...(19): siRNA sense strand
gacauauucuacugaaaga

SEQ ID NO: 1774059 - RNA, 19 nt, Homo sapiens
  misc_RNA (1)...(19): siRNA sense strand
acaggaggcuugacaacaa

SEQ ID NO: 1774060 - RNA, 19 nt, Homo sapiens
  misc_RNA (1)...(19): siRNA sense strand
caagagcuccugagaaauc

SEQ ID NO: 1774061 - RNA, 19 nt, Homo sapiens
  misc_RNA (1)...(19): siRNA sense strand
gcacuucuguucaacuucu

SEQ ID NO: 1774062 - RNA, 19 nt, Homo sapiens
  misc_RNA (1)...(19): siRNA sense strand
ggaaagauagcaacugaag

SEQ ID NO: 1774063 - RNA, 19 nt, Homo sapiens
  misc_RNA (1)...(19): siRNA sense strand
ggacuuucaguuaucauuu

SEQ ID NO: 1774064 - RNA, 19 nt, Homo sapiens
  misc_RNA (1)...(19): siRNA sense strand
gaggaaagacaguagcauu

SEQ ID NO: 1774065 - RNA, 19 nt, Homo sapiens
  misc_RNA (1)...(19): siRNA sense strand
gcaauugcauauggagcua

SEQ ID NO: 1774066 - RNA, 19 nt, Homo sapiens
  misc_RNA (1)...(19): siRNA sense strand
ugaagagcaucaagucaga

SEQ ID NO: 1774067 - RNA, 19 nt, Homo sapiens
  misc_RNA (1)...(19): siRNA sense strand
agagauaagucuuccugaa

SEQ ID NO: 1774068 - RNA, 19 nt, Homo sapiens
  misc_RNA (1)...(19): siRNA sense strand
aaacagaggaucgcaauug

SEQ ID NO: 1774069 - RNA, 19 nt, Homo sapiens
  misc_RNA (1)...(19): siRNA sense strand
aucaagagcuccugagaaa

SEQ ID NO: 1774070 - RNA, 19 nt, Homo sapiens
  misc_RNA (1)...(19): siRNA sense strand
gcaaggacaagugcuguuu

SEQ ID NO: 1774071 - RNA, 19 nt, Homo sapiens
  misc_RNA (1)...(19): siRNA sense strand
ucgaagaaagcacagauua

SEQ ID NO: 1774072 - RNA, 19 nt, Homo sapiens
  misc_RNA (1)...(19): siRNA sense strand
agaaugacaucagagcuuu

SEQ ID NO: 1774073 - RNA, 19 nt, Homo sapiens
  misc_RNA (1)...(19): siRNA sense strand
uaacaugggacuuucaguu

SEQ ID NO: 1774074 - RNA, 19 nt, Homo sapiens
  misc_RNA (1)...(19): siRNA sense strand
ucaaugacauauucuacug

SEQ ID NO: 1774075 - RNA, 19 nt, Homo sapiens
  misc_RNA (1)...(19): siRNA sense strand
caacuucugcagagacuuu

SEQ ID NO: 1774076 - RNA, 19 nt, Homo sapiens
  misc_RNA (1)...(19): siRNA sense strand
ccauagauauagcacaaau

SEQ ID NO: 1774077 - RNA, 19 nt, Homo sapiens
  misc_RNA (1)...(19): siRNA sense strand
gguguuauuugcuuuguca

SEQ ID NO: 1774078 - RNA, 19 nt, Homo sapiens
  misc_RNA (1)...(19): siRNA sense strand
caacaauauuagccauaga

SEQ ID NO: 1774079 - RNA, 19 nt, Homo sapiens
  misc_RNA (1)...(19): siRNA sense strand
gcuuaucccucaguauuga

SEQ ID NO: 1774080 - RNA, 19 nt, Homo sapiens
  misc_RNA (1)...(19): siRNA sense strand
gaacuuaagcaugcuggaa

SEQ ID NO: 1774081 - RNA, 19 nt, Homo sapiens
  misc_RNA (1)...(19): siRNA sense strand
ggaagcaaaugcguaugau

SEQ ID NO: 1774082 - RNA, 19 nt, Homo sapiens
  misc_RNA (1)...(19): siRNA sense strand
gcucgugccuuaguucgaa

SEQ ID NO: 1774083 - RNA, 19 nt, Homo sapiens
  misc_RNA (1)...(19): siRNA sense strand
ccacuucagcccucgauaa

SEQ ID NO: 1774084 - RNA, 19 nt, Homo sapiens
  misc_RNA (1)...(19): siRNA sense strand
gagaaugacaucagagcuu

SEQ ID NO: 1774085 - RNA, 19 nt, Homo sapiens
  misc_RNA (1)...(19): siRNA sense strand
gcaaaagaauugaauguac

SEQ ID NO: 1774086 - RNA, 19 nt, Homo sapiens
  misc_RNA (1)...(19): siRNA sense strand
agccaugccuuuauauauu

SEQ ID NO: 1774087 - RNA, 19 nt, Homo sapiens
  misc_RNA (1)...(19): siRNA sense strand
cuggaaagauagcaacuga

SEQ ID NO: 1774088 - RNA, 19 nt, Homo sapiens
  misc_RNA (1)...(19): siRNA sense strand
gagaaaucgagacauauau

SEQ ID NO: 1774089 - RNA, 19 nt, Homo sapiens
  misc_RNA (1)...(19): siRNA sense strand
gggaagcaaaugcguauga

SEQ ID NO: 1774090 - RNA, 19 nt, Homo sapiens
  misc_RNA (1)...(19): siRNA sense strand
ggaccaccaucaguaacaa

SEQ ID NO: 1774091 - RNA, 19 nt, Homo sapiens
  misc_RNA (1)...(19): siRNA sense strand
gaagcaaaugcguaugauu

SEQ ID NO: 1774092 - RNA, 19 nt, Homo sapiens
  misc_RNA (1)...(19): siRNA sense strand
acagaaauaccucgaagaa

SEQ ID NO: 1774093 - RNA, 19 nt, Homo sapiens
  misc_RNA (1)...(19): siRNA sense strand
ugacaggaaugauugaaac

SEQ ID NO: 1774094 - RNA, 19 nt, Homo sapiens
  misc_RNA (1)...(19): siRNA sense strand
gauagugguucugcacaau

SEQ ID NO: 1774095 - RNA, 19 nt, Homo sapiens
  misc_RNA (1)...(19): siRNA sense strand
caauucagaacgcagauuu

SEQ ID NO: 1774096 - RNA, 19 nt, Homo sapiens
  misc_RNA (1)...(19): siRNA sense strand
cacacaaguuggacugaaa

SEQ ID NO: 1774097 - RNA, 19 nt, Homo sapiens
  misc_RNA (1)...(19): siRNA sense strand
gaaugacaucagagcuuua

SEQ ID NO: 1774098 - RNA, 19 nt, Homo sapiens
  misc_RNA (1)...(19): siRNA sense strand
gaagugcagauuugauugu

SEQ ID NO: 1774099 - RNA, 19 nt, Homo sapiens
  misc_RNA (1)...(19): siRNA sense strand
cgaagaaagcacagauuau

SEQ ID NO: 1774100 - RNA, 19 nt, Homo sapiens
  misc_RNA (1)...(19): siRNA sense strand
ggauuggcgucuuaacaca

SEQ ID NO: 1774101 - RNA, 19 nt, Homo sapiens
  misc_RNA (1)...(19): siRNA sense strand
guuauuugcuuugucaguu

SEQ ID NO: 1774102 - RNA, 19 nt, Homo sapiens
  misc_RNA (1)...(19): siRNA sense strand
gacaucagagcuuuaaaug

SEQ ID NO: 1774103 - RNA, 19 nt, Homo sapiens
  misc_RNA (1)...(19): siRNA sense strand
cauggaguuuccuaauaaa

SEQ ID NO: 1774104 - RNA, 19 nt, Homo sapiens
  misc_RNA (1)...(19): siRNA sense strand
guuagugaaugcacaguca

SEQ ID NO: 1774105 - RNA, 19 nt, Homo sapiens
  misc_RNA (1)...(19): siRNA sense strand
aaagauaaaggaacaagga

SEQ ID NO: 1774106 - RNA, 19 nt, Homo sapiens
  misc_RNA (1)...(19): siRNA sense strand
gcagauggaugaccucuuu

SEQ ID NO: 1774107 - RNA, 19 nt, Homo sapiens
  misc_RNA (1)...(19): siRNA sense strand
cagcagcccuuuaucaaua

SEQ ID NO: 1774108 - RNA, 19 nt, Homo sapiens
  misc_RNA (1)...(19): siRNA sense strand
caaauacaguucuuccaua

SEQ ID NO: 1774109 - RNA, 19 nt, Homo sapiens
  misc_RNA (1)...(19): siRNA sense strand
gaaaagagcucgacuagca

SEQ ID NO: 1774110 - RNA, 19 nt, Homo sapiens
  misc_RNA (1)...(19): siRNA sense strand
gcaaagccaucccaagaau

SEQ ID NO: 1774111 - RNA, 19 nt, Homo sapiens
  misc_RNA (1)...(19): siRNA sense strand
ggacuccaguguuaaagaa

SEQ ID NO: 1774112 - RNA, 19 nt, Homo sapiens
  misc_RNA (1)...(19): siRNA sense strand
ucgaagagcugaagaggaa

SEQ ID NO: 1774113 - RNA, 19 nt, Homo sapiens
  misc_RNA (1)...(19): siRNA sense strand
caguuuaucugccagcuua

SEQ ID NO: 1774114 - RNA, 19 nt, Homo sapiens
  misc_RNA (1)...(19): siRNA sense strand
gaacgagccagaacugaaa

SEQ ID NO: 1774115 - RNA, 19 nt, Homo sapiens
  misc_RNA (1)...(19): siRNA sense strand
gaacaguccagucucagua

SEQ ID NO: 1774116 - RNA, 19 nt, Homo sapiens
  misc_RNA (1)...(19): siRNA sense strand
caacaagucagaaagguuu

SEQ ID NO: 1774117 - RNA, 19 nt, Homo sapiens
  misc_RNA (1)...(19): siRNA sense strand
ucagggcgauuucucauuu

SEQ ID NO: 1774118 - RNA, 19 nt, Homo sapiens
  misc_RNA (1)...(19): siRNA sense strand
agaaugaucugcugaguca

SEQ ID NO: 1774119 - RNA, 19 nt, Homo sapiens
  misc_RNA (1)...(19): siRNA sense strand
cauguucucugcugacuuu

SEQ ID NO: 1774120 - RNA, 19 nt, Homo sapiens
  misc_RNA (1)...(19): siRNA sense strand
gaaauuccuccacuacaaa

SEQ ID NO: 1774121 - RNA, 19 nt, Homo sapiens
  misc_RNA (1)...(19): siRNA sense strand
ggcauuccaugaacagaua

SEQ ID NO: 1774122 - RNA, 19 nt, Homo sapiens
  misc_RNA (1)...(19): siRNA sense strand
ugaaauuccuccacuacaa

SEQ ID NO: 1774123 - RNA, 19 nt, Homo sapiens
  misc_RNA (1)...(19): siRNA sense strand
uggaugaccucuuugauau

SEQ ID NO: 1774124 - RNA, 19 nt, Homo sapiens
  misc_RNA (1)...(19): siRNA sense strand
ggcaccaccuguaucuuua

SEQ ID NO: 1774125 - RNA, 19 nt, Homo sapiens
  misc_RNA (1)...(19): siRNA sense strand
cuacucagaugaaguugaa

SEQ ID NO: 1774126 - RNA, 19 nt, Homo sapiens
  misc_RNA (1)...(19): siRNA sense strand
agaggaaacuggaacaaga

SEQ ID NO: 1774127 - RNA, 19 nt, Homo sapiens
  misc_RNA (1)...(19): siRNA sense strand
ggguaaagaaguuaaagua

SEQ ID NO: 1774128 - RNA, 19 nt, Homo sapiens
  misc_RNA (1)...(19): siRNA sense strand
gaaagagaagcaaaucgaa

SEQ ID NO: 1774129 - RNA, 19 nt, Homo sapiens
  misc_RNA (1)...(19): siRNA sense strand
cuauggagcugguagagaa

SEQ ID NO: 1774130 - RNA, 19 nt, Homo sapiens
  misc_RNA (1)...(19): siRNA sense strand
gaacugaagacagaacuga

SEQ ID NO: 1774131 - RNA, 19 nt, Homo sapiens
  misc_RNA (1)...(19): siRNA sense strand
gagcucgacuagcagauga

SEQ ID NO: 1774132 - RNA, 19 nt, Homo sapiens
  misc_RNA (1)...(19): siRNA sense strand
caaugaaauuccuccacua

SEQ ID NO: 1774133 - RNA, 19 nt, Homo sapiens
  misc_RNA (1)...(19): siRNA sense strand
gaaccuaugggcaguuuau

SEQ ID NO: 1774134 - RNA, 19 nt, Homo sapiens
  misc_RNA (1)...(19): siRNA sense strand
ccaaauggcaccaccugua

SEQ ID NO: 1774135 - RNA, 19 nt, Homo sapiens
  misc_RNA (1)...(19): siRNA sense strand
guccagcacucucuauuug

SEQ ID NO: 1774136 - RNA, 19 nt, Homo sapiens
  misc_RNA (1)...(19): siRNA sense strand
gaaucgccaucuccuguga

SEQ ID NO: 1774137 - RNA, 19 nt, Homo sapiens
  misc_RNA (1)...(19): siRNA sense strand
gugaagcuguggcucauga

SEQ ID NO: 1774138 - RNA, 19 nt, Homo sapiens
  misc_RNA (1)...(19): siRNA sense strand
uuucuuggauggaacuuua

SEQ ID NO: 1774139 - RNA, 19 nt, Homo sapiens
  misc_RNA (1)...(19): siRNA sense strand
gugcaaagaucccaaacca

SEQ ID NO: 1774140 - RNA, 19 nt, Homo sapiens
  misc_RNA (1)...(19): siRNA sense strand
gaaguuaaaguaccaccaa

SEQ ID NO: 1774141 - RNA, 19 nt, Homo sapiens
  misc_RNA (1)...(19): siRNA sense strand
ggaacgagccagaacugaa

SEQ ID NO: 1774142 - RNA, 19 nt, Homo sapiens
  misc_RNA (1)...(19): siRNA sense strand
ggaugaagugggaccuuua

SEQ ID NO: 1774143 - RNA, 19 nt, Homo sapiens
  misc_RNA (1)...(19): siRNA sense strand
auacaguucuuccauauca

SEQ ID NO: 1774144 - RNA, 19 nt, Homo sapiens
  misc_RNA (1)...(19): siRNA sense strand
ugacaaacaccguagcaaa

SEQ ID NO: 1774145 - RNA, 19 nt, Homo sapiens
  misc_RNA (1)...(19): siRNA sense strand
gcagauggacucuaacuac

SEQ ID NO: 1774146 - RNA, 19 nt, Homo sapiens
  misc_RNA (1)...(19): siRNA sense strand
gaugucgccuucacaguuc

SEQ ID NO: 1774147 - RNA, 19 nt, Homo sapiens
  misc_RNA (1)...(19): siRNA sense strand
caacgcaacccguguggaa

SEQ ID NO: 1774148 - RNA, 19 nt, Homo sapiens
  misc_RNA (1)...(19): siRNA sense strand
caacaguuccugaauucuu

SEQ ID NO: 1774149 - RNA, 19 nt, Homo sapiens
  misc_RNA (1)...(19): siRNA sense strand
gaagcuuucuuggauggaa

SEQ ID NO: 1774150 - RNA, 19 nt, Homo sapiens
  misc_RNA (1)...(19): siRNA sense strand
gcaguccagucaaaacuua

SEQ ID NO: 1774151 - RNA, 19 nt, Homo sapiens
  misc_RNA (1)...(19): siRNA sense strand
agacagcagugacgcuuug

SEQ ID NO: 1774152 - RNA, 19 nt, Homo sapiens
  misc_RNA (1)...(19): siRNA sense strand
caaauggcaccaccuguau

SEQ ID NO: 1774153 - RNA, 19 nt, Homo sapiens
  misc_RNA (1)...(19): siRNA sense strand
aaacucagcaucaucaaau

SEQ ID NO: 1774154 - RNA, 19 nt, Homo sapiens
  misc_RNA (1)...(19): siRNA sense strand
caucuacuccugugagaaa

SEQ ID NO: 1774155 - RNA, 19 nt, Homo sapiens
  misc_RNA (1)...(19): siRNA sense strand
agaagcagcacuacaacua

SEQ ID NO: 1774156 - RNA, 19 nt, Homo sapiens
  misc_RNA (1)...(19): siRNA sense strand
uaaaguaccaccaauacau

SEQ ID NO: 1774157 - RNA, 19 nt, Homo sapiens
  misc_RNA (1)...(19): siRNA sense strand
ccaagaauccaaaugacaa

SEQ ID NO: 1774158 - RNA, 19 nt, Homo sapiens
  misc_RNA (1)...(19): siRNA sense strand
ucaagccacucaaugacaa

SEQ ID NO: 1774159 - RNA, 19 nt, Homo sapiens
  misc_RNA (1)...(19): siRNA sense strand
agaaccaacuagaagcuuu

SEQ ID NO: 1774160 - RNA, 19 nt, Homo sapiens
  misc_RNA (1)...(19): siRNA sense strand
aaacauggcagacacuuuc

SEQ ID NO: 1774161 - RNA, 19 nt, Homo sapiens
  misc_RNA (1)...(19): siRNA sense strand
caucuccugugacuacaaa

SEQ ID NO: 1774162 - RNA, 19 nt, Homo sapiens
  misc_RNA (1)...(19): siRNA sense strand
guucucugcugacuuucua

SEQ ID NO: 1774163 - RNA, 19 nt, Homo sapiens
  misc_RNA (1)...(19): siRNA sense strand
gacaaauaaugaagacagu

SEQ ID NO: 1774164 - RNA, 19 nt, Homo sapiens
  misc_RNA (1)...(19): siRNA sense strand
gagauuaugaccaugaugu

SEQ ID NO: 1774165 - RNA, 19 nt, Homo sapiens
  misc_RNA (1)...(19): siRNA sense strand
ggcgauuucucauuugaug

SEQ ID NO: 1774166 - RNA, 19 nt, Homo sapiens
  misc_RNA (1)...(19): siRNA sense strand
cuacaaagcagcagugaag

SEQ ID NO: 1774167 - RNA, 19 nt, Homo sapiens
  misc_RNA (1)...(19): siRNA sense strand
caauaaggccuccaacagu

SEQ ID NO: 1774168 - RNA, 19 nt, Homo sapiens
  misc_RNA (1)...(19): siRNA sense strand
agaaugagccgcagaugga

SEQ ID NO: 1774169 - RNA, 19 nt, Homo sapiens
  misc_RNA (1)...(19): siRNA sense strand
ccaaaccacggguaaagaa

SEQ ID NO: 1774170 - RNA, 19 nt, Homo sapiens
  misc_RNA (1)...(19): siRNA sense strand
ucaccgagauuaugaccau

SEQ ID NO: 1774171 - RNA, 19 nt, Homo sapiens
  misc_RNA (1)...(19): siRNA sense strand
ucacaguucuugaguucau

SEQ ID NO: 1774172 - RNA, 19 nt, Homo sapiens
  misc_RNA (1)...(19): siRNA sense strand
aagcaaagccaucccaaga

SEQ ID NO: 1774173 - RNA, 19 nt, Homo sapiens
  misc_RNA (1)...(19): siRNA sense strand
cagguaugcuggaccauuc

SEQ ID NO: 1774174 - RNA, 19 nt, Homo sapiens
  misc_RNA (1)...(19): siRNA sense strand
ggaccuaacacacccaaca

SEQ ID NO: 1774175 - RNA, 19 nt, Homo sapiens
  misc_RNA (1)...(19): siRNA sense strand
gaauugccaccuacaggaa

SEQ ID NO: 1774176 - RNA, 19 nt, Homo sapiens
  misc_RNA (1)...(19): siRNA sense strand
ucagaagggugagaagaau

SEQ ID NO: 1774177 - RNA, 19 nt, Homo sapiens
  misc_RNA (1)...(19): siRNA sense strand
cccaacaguuccugaauuc

SEQ ID NO: 1774178 - RNA, 19 nt, Homo sapiens
  misc_RNA (1)...(19): siRNA sense strand
aagcagcagugaagacaga

SEQ ID NO: 1774179 - RNA, 19 nt, Homo sapiens
  misc_RNA (1)...(19): siRNA sense strand
cgauagacaccgaggauga

SEQ ID NO: 1774180 - RNA, 19 nt, Homo sapiens
  misc_RNA (1)...(19): siRNA sense strand
gacgagagaacaacuagug

SEQ ID NO: 1774181 - RNA, 19 nt, Homo sapiens
  misc_RNA (1)...(19): siRNA sense strand
ugacuuaaagguaucagaa

SEQ ID NO: 1774182 - RNA, 19 nt, Homo sapiens
  misc_RNA (1)...(19): siRNA sense strand
gaacaaugccacaccuaac

SEQ ID NO: 1774183 - RNA, 19 nt, Homo sapiens
  misc_RNA (1)...(19): siRNA sense strand
caagaauccaaaugacaaa

SEQ ID NO: 1774184 - RNA, 19 nt, Homo sapiens
  misc_RNA (1)...(19): siRNA sense strand
gcuggaccauucacacuca

SEQ ID NO: 1774185 - RNA, 19 nt, Homo sapiens
  misc_RNA (1)...(19): siRNA sense strand
cagcuuagagaaccaacua

SEQ ID NO: 1774186 - RNA, 19 nt, Homo sapiens
  misc_RNA (1)...(19): siRNA sense strand
ggagaaagagaagcaaauc

SEQ ID NO: 1774187 - RNA, 19 nt, Homo sapiens
  misc_RNA (1)...(19): siRNA sense strand
caccaaaccggaccucauu

SEQ ID NO: 1774188 - RNA, 19 nt, Homo sapiens
  misc_RNA (1)...(19): siRNA sense strand
cuggaugacuuaaagguau

SEQ ID NO: 1774189 - RNA, 19 nt, Homo sapiens
  misc_RNA (1)...(19): siRNA sense strand
caagacagaauacaucuac

SEQ ID NO: 1774190 - RNA, 19 nt, Homo sapiens
  misc_RNA (1)...(19): siRNA sense strand
ugaacaaugccacaccuaa

SEQ ID NO: 1774191 - RNA, 19 nt, Homo sapiens
  misc_RNA (1)...(19): siRNA sense strand
cauccugccugcaccauuc

SEQ ID NO: 1774192 - RNA, 19 nt, Homo sapiens
  misc_RNA (1)...(19): siRNA sense strand
ccaauacauuccaccagau

SEQ ID NO: 1774193 - RNA, 19 nt, Homo sapiens
  misc_RNA (1)...(19): siRNA sense strand
aagcaggaaugcagacuca

SEQ ID NO: 1774194 - RNA, 19 nt, Homo sapiens
  misc_RNA (1)...(19): siRNA sense strand
gaagaggaaacuggaacaa

SEQ ID NO: 1774195 - RNA, 19 nt, Homo sapiens
  misc_RNA (1)...(19): siRNA sense strand
acuguggccuugccgguua

SEQ ID NO: 1774196 - RNA, 19 nt, Homo sapiens
  misc_RNA (1)...(19): siRNA sense strand
uaacacaccaagacagaau

SEQ ID NO: 1774197 - RNA, 19 nt, Homo sapiens
  misc_RNA (1)...(19): siRNA sense strand
aaaguaccaccaauacauu

SEQ ID NO: 1774198 - RNA, 19 nt, Homo sapiens
  misc_RNA (1)...(19): siRNA sense strand
uagaaccuaugggcaguuu

SEQ ID NO: 1774199 - RNA, 19 nt, Homo sapiens
  misc_RNA (1)...(19): siRNA sense strand
ccacaaugccagugaauac

SEQ ID NO: 1774200 - RNA, 19 nt, Homo sapiens
  misc_RNA (1)...(19): siRNA sense strand
gauagacaccgaggaugaa

SEQ ID NO: 1774201 - RNA, 19 nt, Homo sapiens
  misc_RNA (1)...(19): siRNA sense strand
gcaagcuucaggagaaaga

SEQ ID NO: 1774202 - RNA, 19 nt, Homo sapiens
  misc_RNA (1)...(19): siRNA sense strand
gaagagcccagcggcauuc

SEQ ID NO: 1774203 - RNA, 19 nt, Homo sapiens
  misc_RNA (1)...(19): siRNA sense strand
ccaaaccggaccucauuga

SEQ ID NO: 1774204 - RNA, 19 nt, Homo sapiens
  misc_RNA (1)...(19): siRNA sense strand
gaucagaagggugagaaga

SEQ ID NO: 1774205 - RNA, 19 nt, Homo sapiens
  misc_RNA (1)...(19): siRNA sense strand
gaaccaacuagaagcuuuc

SEQ ID NO: 1774206 - RNA, 19 nt, Homo sapiens
  misc_RNA (1)...(19): siRNA sense strand
gaacagccauaaccaaaua

SEQ ID NO: 1774207 - RNA, 19 nt, Homo sapiens
  misc_RNA (1)...(19): siRNA sense strand
ggagauggcucauaaggua

SEQ ID NO: 1774208 - RNA, 19 nt, Homo sapiens
  misc_RNA (1)...(19): siRNA sense strand
gaugauaccucaaggaauu

SEQ ID NO: 1774209 - RNA, 19 nt, Homo sapiens
  misc_RNA (1)...(19): siRNA sense strand
ggaaugaucuucuggaugu

SEQ ID NO: 1774210 - RNA, 19 nt, Homo sapiens
  misc_RNA (1)...(19): siRNA sense strand
gauaaacgcucccuaaaca

SEQ ID NO: 1774211 - RNA, 19 nt, Homo sapiens
  misc_RNA (1)...(19): siRNA sense strand
gguauuagcuguaaaguca

SEQ ID NO: 1774212 - RNA, 19 nt, Homo sapiens
  misc_RNA (1)...(19): siRNA sense strand
gcacagauguagccauuga

SEQ ID NO: 1774213 - RNA, 19 nt, Homo sapiens
  misc_RNA (1)...(19): siRNA sense strand
gcaaaggaguccaucauau

SEQ ID NO: 1774214 - RNA, 19 nt, Homo sapiens
  misc_RNA (1)...(19): siRNA sense strand
ggaaagaauucaucuaagu

SEQ ID NO: 1774215 - RNA, 19 nt, Homo sapiens
  misc_RNA (1)...(19): siRNA sense strand
gaaaucagcguucauguug

SEQ ID NO: 1774216 - RNA, 19 nt, Homo sapiens
  misc_RNA (1)...(19): siRNA sense strand
gcacauugcugaagaccaa

SEQ ID NO: 1774217 - RNA, 19 nt, Homo sapiens
  misc_RNA (1)...(19): siRNA sense strand
gagaauaggucugccauug

SEQ ID NO: 1774218 - RNA, 19 nt, Homo sapiens
  misc_RNA (1)...(19): siRNA sense strand
ucaagaagcuacuauuguu

SEQ ID NO: 1774219 - RNA, 19 nt, Homo sapiens
  misc_RNA (1)...(19): siRNA sense strand
caaaggaguccaucauaua

SEQ ID NO: 1774220 - RNA, 19 nt, Homo sapiens
  misc_RNA (1)...(19): siRNA sense strand
cuaaagaacacaccaguua

SEQ ID NO: 1774221 - RNA, 19 nt, Homo sapiens
  misc_RNA (1)...(19): siRNA sense strand
ugaaggacauucuauggua

SEQ ID NO: 1774222 - RNA, 19 nt, Homo sapiens
  misc_RNA (1)...(19): siRNA sense strand
cuacuaaccucuccagaaa

SEQ ID NO: 1774223 - RNA, 19 nt, Homo sapiens
  misc_RNA (1)...(19): siRNA sense strand
auaaagcacugaagcauaa

SEQ ID NO: 1774224 - RNA, 19 nt, Homo sapiens
  misc_RNA (1)...(19): siRNA sense strand
gaauaggucugccauugug

SEQ ID NO: 1774225 - RNA, 19 nt, Homo sapiens
  misc_RNA (1)...(19): siRNA sense strand
gaaaccaacuuacgagagu

SEQ ID NO: 1774226 - RNA, 19 nt, Homo sapiens
  misc_RNA (1)...(19): siRNA sense strand
gauaagacuggaaccauua

SEQ ID NO: 1774227 - RNA, 19 nt, Homo sapiens
  misc_RNA (1)...(19): siRNA sense strand
gcaaugggacuguugagua

SEQ ID NO: 1774228 - RNA, 19 nt, Homo sapiens
  misc_RNA (1)...(19): siRNA sense strand
gaaagacagucaagaggau

SEQ ID NO: 1774229 - RNA, 19 nt, Homo sapiens
  misc_RNA (1)...(19): siRNA sense strand
gggaguggaugauuagaaa

SEQ ID NO: 1774230 - RNA, 19 nt, Homo sapiens
  misc_RNA (1)...(19): siRNA sense strand
ucacuuagaucauaaacga

SEQ ID NO: 1774231 - RNA, 19 nt, Homo sapiens
  misc_RNA (1)...(19): siRNA sense strand
ugaugacacugcauuauaa

SEQ ID NO: 1774232 - RNA, 19 nt, Homo sapiens
  misc_RNA (1)...(19): siRNA sense strand
gaugggaucugcagcaaug

SEQ ID NO: 1774233 - RNA, 19 nt, Homo sapiens
  misc_RNA (1)...(19): siRNA sense strand
ggucugccauugugaagua

SEQ ID NO: 1774234 - RNA, 19 nt, Homo sapiens
  misc_RNA (1)...(19): siRNA sense strand
gcuguaaagucaccaauau

SEQ ID NO: 1774235 - RNA, 19 nt, Homo sapiens
  misc_RNA (1)...(19): siRNA sense strand
ggagauaucauuaaaguag

SEQ ID NO: 1774236 - RNA, 19 nt, Homo sapiens
  misc_RNA (1)...(19): siRNA sense strand
ugaagcagcugaugugguu

SEQ ID NO: 1774237 - RNA, 19 nt, Homo sapiens
  misc_RNA (1)...(19): siRNA sense strand
cagaacgggucacugcuua

SEQ ID NO: 1774238 - RNA, 19 nt, Homo sapiens
  misc_RNA (1)...(19): siRNA sense strand
caacguggagauaucauua

SEQ ID NO: 1774239 - RNA, 19 nt, Homo sapiens
  misc_RNA (1)...(19): siRNA sense strand
gaaacgauaauacgauuug

SEQ ID NO: 1774240 - RNA, 19 nt, Homo sapiens
  misc_RNA (1)...(19): siRNA sense strand
gugccaggcugugguauua

SEQ ID NO: 1774241 - RNA, 19 nt, Homo sapiens
  misc_RNA (1)...(19): siRNA sense strand
gaucucaaaugcucuuaau

SEQ ID NO: 1774242 - RNA, 19 nt, Homo sapiens
  misc_RNA (1)...(19): siRNA sense strand
ccauacaauugaaagcuua

SEQ ID NO: 1774243 - RNA, 19 nt, Homo sapiens
  misc_RNA (1)...(19): siRNA sense strand
cauuggagauggcucauaa

SEQ ID NO: 1774244 - RNA, 19 nt, Homo sapiens
  misc_RNA (1)...(19): siRNA sense strand
acacaacccuuucucaaau

SEQ ID NO: 1774245 - RNA, 19 nt, Homo sapiens
  misc_RNA (1)...(19): siRNA sense strand
gcauuugccuacucuuuga

SEQ ID NO: 1774246 - RNA, 19 nt, Homo sapiens
  misc_RNA (1)...(19): siRNA sense strand
caaugggacuguugaguau

SEQ ID NO: 1774247 - RNA, 19 nt, Homo sapiens
  misc_RNA (1)...(19): siRNA sense strand
gccgauggcuggaacauau

SEQ ID NO: 1774248 - RNA, 19 nt, Homo sapiens
  misc_RNA (1)...(19): siRNA sense strand
cagcauaguaguuucuuua

SEQ ID NO: 1774249 - RNA, 19 nt, Homo sapiens
  misc_RNA (1)...(19): siRNA sense strand
uaaacucacuacugucuga

SEQ ID NO: 1774250 - RNA, 19 nt, Homo sapiens
  misc_RNA (1)...(19): siRNA sense strand
cagaauaucacaccauaaa

SEQ ID NO: 1774251 - RNA, 19 nt, Homo sapiens
  misc_RNA (1)...(19): siRNA sense strand
cagaaacgauaauacgauu

SEQ ID NO: 1774252 - RNA, 19 nt, Homo sapiens
  misc_RNA (1)...(19): siRNA sense strand
ggaagaggcacaaacauca

SEQ ID NO: 1774253 - RNA, 19 nt, Homo sapiens
  misc_RNA (1)...(19): siRNA sense strand
aauaaucccuucuauagug

SEQ ID NO: 1774254 - RNA, 19 nt, Homo sapiens
  misc_RNA (1)...(19): siRNA sense strand
gauaaggaaugaucuucug

SEQ ID NO: 1774255 - RNA, 19 nt, Homo sapiens
  misc_RNA (1)...(19): siRNA sense strand
uaaagguagugguauuuga

SEQ ID NO: 1774256 - RNA, 19 nt, Homo sapiens
  misc_RNA (1)...(19): siRNA sense strand
gacaauaaucccuucuaua

SEQ ID NO: 1774257 - RNA, 19 nt, Homo sapiens
  misc_RNA (1)...(19): siRNA sense strand
ggaccggauuguuaauuau

SEQ ID NO: 1774258 - RNA, 19 nt, Homo sapiens
  misc_RNA (1)...(19): siRNA sense strand
ggugggagauggaaucaau

SEQ ID NO: 1774259 - RNA, 19 nt, Homo sapiens
  misc_RNA (1)...(19): siRNA sense strand
ucacaagguugcuaaagug

SEQ ID NO: 1774260 - RNA, 19 nt, Homo sapiens
  misc_RNA (1)...(19): siRNA sense strand
ggaauauagaggacaauaa

SEQ ID NO: 1774261 - RNA, 19 nt, Homo sapiens
  misc_RNA (1)...(19): siRNA sense strand
gaugguggguacaggagua

SEQ ID NO: 1774262 - RNA, 19 nt, Homo sapiens
  misc_RNA (1)...(19): siRNA sense strand
gaaagaauucaucuaagug

SEQ ID NO: 1774263 - RNA, 19 nt, Homo sapiens
  misc_RNA (1)...(19): siRNA sense strand
ucagaagggucacagcaaa

SEQ ID NO: 1774264 - RNA, 19 nt, Homo sapiens
  misc_RNA (1)...(19): siRNA sense strand
gguguuugcugaaguucua

SEQ ID NO: 1774265 - RNA, 19 nt, Homo sapiens
  misc_RNA (1)...(19): siRNA sense strand
aaguaaagguucuaacuga

SEQ ID NO: 1774266 - RNA, 19 nt, Homo sapiens
  misc_RNA (1)...(19): siRNA sense strand
uugcaacucuucaccauaa

SEQ ID NO: 1774267 - RNA, 19 nt, Homo sapiens
  misc_RNA (1)...(19): siRNA sense strand
caagugaaguugagaguac

SEQ ID NO: 1774268 - RNA, 19 nt, Homo sapiens
  misc_RNA (1)...(19): siRNA sense strand
uaucugcacuccaauaugu

SEQ ID NO: 1774269 - RNA, 19 nt, Homo sapiens
  misc_RNA (1)...(19): siRNA sense strand
gucaggagcuugugaagau

SEQ ID NO: 1774270 - RNA, 19 nt, Homo sapiens
  misc_RNA (1)...(19): siRNA sense strand
aacaggagcuggacacuga

SEQ ID NO: 1774271 - RNA, 19 nt, Homo sapiens
  misc_RNA (1)...(19): siRNA sense strand
gaacagaaacgauaauacg

SEQ ID NO: 1774272 - RNA, 19 nt, Homo sapiens
  misc_RNA (1)...(19): siRNA sense strand
gagccaaagugaacccuau

SEQ ID NO: 1774273 - RNA, 19 nt, Homo sapiens
  misc_RNA (1)...(19): siRNA sense strand
guaguuagccagccucuga

SEQ ID NO: 1774274 - RNA, 19 nt, Homo sapiens
  misc_RNA (1)...(19): siRNA sense strand
gcauaguaguuucuuuaga

SEQ ID NO: 1774275 - RNA, 19 nt, Homo sapiens
  misc_RNA (1)...(19): siRNA sense strand
ugacaauaaucccuucuau

SEQ ID NO: 1774276 - RNA, 19 nt, Homo sapiens
  misc_RNA (1)...(19): siRNA sense strand
auugaaggcuugcuacaua

SEQ ID NO: 1774277 - RNA, 19 nt, Homo sapiens
  misc_RNA (1)...(19): siRNA sense strand
cugcauagauuuccagguu

SEQ ID NO: 1774278 - RNA, 19 nt, Homo sapiens
  misc_RNA (1)...(19): siRNA sense strand
guggagauaucauuaaagu

SEQ ID NO: 1774279 - RNA, 19 nt, Homo sapiens
  misc_RNA (1)...(19): siRNA sense strand
gaaacugugauaaacauug

SEQ ID NO: 1774280 - RNA, 19 nt, Homo sapiens
  misc_RNA (1)...(19): siRNA sense strand
guaagcagcauaguaguuu

SEQ ID NO: 1774281 - RNA, 19 nt, Homo sapiens
  misc_RNA (1)...(19): siRNA sense strand
ugaauucuguuaccauuuc

SEQ ID NO: 1774282 - RNA, 19 nt, Homo sapiens
  misc_RNA (1)...(19): siRNA sense strand
acaauaaucccuucuauag

SEQ ID NO: 1774283 - RNA, 19 nt, Homo sapiens
  misc_RNA (1)...(19): siRNA sense strand
uagaagacaugggauuuga

SEQ ID NO: 1774284 - RNA, 19 nt, Homo sapiens
  misc_RNA (1)...(19): siRNA sense strand
uggaccggauuguuaauua

SEQ ID NO: 1774285 - RNA, 19 nt, Homo sapiens
  misc_RNA (1)...(19): siRNA sense strand
ucccauagcugcuggaguu

SEQ ID NO: 1774286 - RNA, 19 nt, Homo sapiens
  misc_RNA (1)...(19): siRNA sense strand
ucaagaggauucggauaaa

SEQ ID NO: 1774287 - RNA, 19 nt, Homo sapiens
  misc_RNA (1)...(19): siRNA sense strand
auaaaguccucauugguaa

SEQ ID NO: 1774288 - RNA, 19 nt, Homo sapiens
  misc_RNA (1)...(19): siRNA sense strand
guaaagguucuaacugaaa

SEQ ID NO: 1774289 - RNA, 19 nt, Homo sapiens
  misc_RNA (1)...(19): siRNA sense strand
ugauaagacuggaaccauu

SEQ ID NO: 1774290 - RNA, 19 nt, Homo sapiens
  misc_RNA (1)...(19): siRNA sense strand
cauaguaguuucuuuagag

SEQ ID NO: 1774291 - RNA, 19 nt, Homo sapiens
  misc_RNA (1)...(19): siRNA sense strand
gcagaacuggcuauccaua

SEQ ID NO: 1774292 - RNA, 19 nt, Homo sapiens
  misc_RNA (1)...(19): siRNA sense strand
ugacugaacaugagagaaa

SEQ ID NO: 1774293 - RNA, 19 nt, Homo sapiens
  misc_RNA (1)...(19): siRNA sense strand
gcauagauuuccagguugu

SEQ ID NO: 1774294 - RNA, 19 nt, Homo sapiens
  misc_RNA (1)...(19): siRNA sense strand
gaaggaaagaauucaucua

SEQ ID NO: 1774295 - RNA, 19 nt, Homo sapiens
  misc_RNA (1)...(19): siRNA sense strand
gaagacaugggauuugaug

SEQ ID NO: 1774296 - RNA, 19 nt, Homo sapiens
  misc_RNA (1)...(19): siRNA sense strand
uaaagaacacaccaguuaa

SEQ ID NO: 1774297 - RNA, 19 nt, Homo sapiens
  misc_RNA (1)...(19): siRNA sense strand
cagcguucauguuggaaua

SEQ ID NO: 1774298 - RNA, 19 nt, Homo sapiens
  misc_RNA (1)...(19): siRNA sense strand
agaacuggcuauccauauu

SEQ ID NO: 1774299 - RNA, 19 nt, Homo sapiens
  misc_RNA (1)...(19): siRNA sense strand
gaacagucaucaacuucgu

SEQ ID NO: 1774300 - RNA, 19 nt, Homo sapiens
  misc_RNA (1)...(19): siRNA sense strand
guagugguauuugauaaga

SEQ ID NO: 1774301 - RNA, 19 nt, Homo sapiens
  misc_RNA (1)...(19): siRNA sense strand
gacuugcgcuuccugugua

SEQ ID NO: 1774302 - RNA, 19 nt, Homo sapiens
  misc_RNA (1)...(19): siRNA sense strand
gaacacaccaguuaaaucc

SEQ ID NO: 1774303 - RNA, 19 nt, Homo sapiens
  misc_RNA (1)...(19): siRNA sense strand
aacagaauaucacaccaua

SEQ ID NO: 1774304 - RNA, 19 nt, Homo sapiens
  misc_RNA (1)...(19): siRNA sense strand
gauuagaaauggucuuguc

SEQ ID NO: 1774305 - RNA, 19 nt, Homo sapiens
  misc_RNA (1)...(19): siRNA sense strand
guaaagucaccaauauuga

SEQ ID NO: 1774306 - RNA, 19 nt, Homo sapiens
  misc_RNA (1)...(19): siRNA sense strand
gcaaagcccuuguuaaguu

SEQ ID NO: 1774307 - RNA, 19 nt, Homo sapiens
  misc_RNA (1)...(19): siRNA sense strand
gaacaaaacugcccaagua

SEQ ID NO: 1774308 - RNA, 19 nt, Homo sapiens
  misc_RNA (1)...(19): siRNA sense strand
gaacagagaccuugggaua

SEQ ID NO: 1774309 - RNA, 19 nt, Homo sapiens
  misc_RNA (1)...(19): siRNA sense strand
ggacaaauggcaucacuua

SEQ ID NO: 1774310 - RNA, 19 nt, Homo sapiens
  misc_RNA (1)...(19): siRNA sense strand
gauaaagacugugauguuu

SEQ ID NO: 1774311 - RNA, 19 nt, Homo sapiens
  misc_RNA (1)...(19): siRNA sense strand
ggacaggauuuccaauuug

SEQ ID NO: 1774312 - RNA, 19 nt, Homo sapiens
  misc_RNA (1)...(19): siRNA sense strand
ggaauugggugcaaaguca

SEQ ID NO: 1774313 - RNA, 19 nt, Homo sapiens
  misc_RNA (1)...(19): siRNA sense strand
gcaauaccauggcugauga

SEQ ID NO: 1774314 - RNA, 19 nt, Homo sapiens
  misc_RNA (1)...(19): siRNA sense strand
gaucacaggucuuccaguu

SEQ ID NO: 1774315 - RNA, 19 nt, Homo sapiens
  misc_RNA (1)...(19): siRNA sense strand
gagaauagauggaaugcau

SEQ ID NO: 1774316 - RNA, 19 nt, Homo sapiens
  misc_RNA (1)...(19): siRNA sense strand
aaaggaaucugcagaaaga

SEQ ID NO: 1774317 - RNA, 19 nt, Homo sapiens
  misc_RNA (1)...(19): siRNA sense strand
ucugaaagcuguucuacua

SEQ ID NO: 1774318 - RNA, 19 nt, Homo sapiens
  misc_RNA (1)...(19): siRNA sense strand
acucagagcugcuauagaa

SEQ ID NO: 1774319 - RNA, 19 nt, Homo sapiens
  misc_RNA (1)...(19): siRNA sense strand
uaaagacugugauguuuga

SEQ ID NO: 1774320 - RNA, 19 nt, Homo sapiens
  misc_RNA (1)...(19): siRNA sense strand
ggaagaggcucagauguca

SEQ ID NO: 1774321 - RNA, 19 nt, Homo sapiens
  misc_RNA (1)...(19): siRNA sense strand
gaaaggcagagaucaagua

SEQ ID NO: 1774322 - RNA, 19 nt, Homo sapiens
  misc_RNA (1)...(19): siRNA sense strand
uccaggagcuccagaauaa

SEQ ID NO: 1774323 - RNA, 19 nt, Homo sapiens
  misc_RNA (1)...(19): siRNA sense strand
aggcagagaucaaguauga

SEQ ID NO: 1774324 - RNA, 19 nt, Homo sapiens
  misc_RNA (1)...(19): siRNA sense strand
gaagacagccagagcuauu

SEQ ID NO: 1774325 - RNA, 19 nt, Homo sapiens
  misc_RNA (1)...(19): siRNA sense strand
ugacaagacuggcaccauu

SEQ ID NO: 1774326 - RNA, 19 nt, Homo sapiens
  misc_RNA (1)...(19): siRNA sense strand
gaaauaaagcaguggaaga

SEQ ID NO: 1774327 - RNA, 19 nt, Homo sapiens
  misc_RNA (1)...(19): siRNA sense strand
gacaggauuuccaauuuga

SEQ ID NO: 1774328 - RNA, 19 nt, Homo sapiens
  misc_RNA (1)...(19): siRNA sense strand
cgagauagcucaguucauc

SEQ ID NO: 1774329 - RNA, 19 nt, Homo sapiens
  misc_RNA (1)...(19): siRNA sense strand
gaagaagaguuuugcuuuu

SEQ ID NO: 1774330 - RNA, 19 nt, Homo sapiens
  misc_RNA (1)...(19): siRNA sense strand
caaauacuguaaagaggaa

SEQ ID NO: 1774331 - RNA, 19 nt, Homo sapiens
  misc_RNA (1)...(19): siRNA sense strand
caaagcccuuguuaaguuu

SEQ ID NO: 1774332 - RNA, 19 nt, Homo sapiens
  misc_RNA (1)...(19): siRNA sense strand
cugcaacaguucuuuauaa

SEQ ID NO: 1774333 - RNA, 19 nt, Homo sapiens
  misc_RNA (1)...(19): siRNA sense strand
caaaguggcucccuuaagc

SEQ ID NO: 1774334 - RNA, 19 nt, Homo sapiens
  misc_RNA (1)...(19): siRNA sense strand
uagauggaaugcauuguaa

SEQ ID NO: 1774335 - RNA, 19 nt, Homo sapiens
  misc_RNA (1)...(19): siRNA sense strand
caacaguucuuuauaaucc

SEQ ID NO: 1774336 - RNA, 19 nt, Homo sapiens
  misc_RNA (1)...(19): siRNA sense strand
ggaagaaagucgccauggu

SEQ ID NO: 1774337 - RNA, 19 nt, Homo sapiens
  misc_RNA (1)...(19): siRNA sense strand
gaggacaauuuaaucauca

SEQ ID NO: 1774338 - RNA, 19 nt, Homo sapiens
  misc_RNA (1)...(19): siRNA sense strand
guaauugcgaggucuauaa

SEQ ID NO: 1774339 - RNA, 19 nt, Homo sapiens
  misc_RNA (1)...(19): siRNA sense strand
aagaggccgucaucacuua

SEQ ID NO: 1774340 - RNA, 19 nt, Homo sapiens
  misc_RNA (1)...(19): siRNA sense strand
gacaagacuggcaccauua

SEQ ID NO: 1774341 - RNA, 19 nt, Homo sapiens
  misc_RNA (1)...(19): siRNA sense strand
uagaagacaugggauuuga

SEQ ID NO: 1774342 - RNA, 19 nt, Homo sapiens
  misc_RNA (1)...(19): siRNA sense strand
cagcucaagugcuauaaga

SEQ ID NO: 1774343 - RNA, 19 nt, Homo sapiens
  misc_RNA (1)...(19): siRNA sense strand
gauauugagcgguuacaaa

SEQ ID NO: 1774344 - RNA, 19 nt, Homo sapiens
  misc_RNA (1)...(19): siRNA sense strand
gcguggcagucaccaaaua

SEQ ID NO: 1774345 - RNA, 19 nt, Homo sapiens
  misc_RNA (1)...(19): siRNA sense strand
gcagaaagaagcugguguu

SEQ ID NO: 1774346 - RNA, 19 nt, Homo sapiens
  misc_RNA (1)...(19): siRNA sense strand
ggacagaucacaggucuuc

SEQ ID NO: 1774347 - RNA, 19 nt, Homo sapiens
  misc_RNA (1)...(19): siRNA sense strand
gaauagauggaaugcauug

SEQ ID NO: 1774348 - RNA, 19 nt, Homo sapiens
  misc_RNA (1)...(19): siRNA sense strand
ggaaugcauuguaagucuu

SEQ ID NO: 1774349 - RNA, 19 nt, Homo sapiens
  misc_RNA (1)...(19): siRNA sense strand
gcauucaccuuuccaagag

SEQ ID NO: 1774350 - RNA, 19 nt, Homo sapiens
  misc_RNA (1)...(19): siRNA sense strand
gaccuucucugugcugauu

SEQ ID NO: 1774351 - RNA, 19 nt, Homo sapiens
  misc_RNA (1)...(19): siRNA sense strand
cagcaaagcccuuguuaag

SEQ ID NO: 1774352 - RNA, 19 nt, Homo sapiens
  misc_RNA (1)...(19): siRNA sense strand
gaaaggaaucugcagaaag

SEQ ID NO: 1774353 - RNA, 19 nt, Homo sapiens
  misc_RNA (1)...(19): siRNA sense strand
ggaauuccauggugcaaac

SEQ ID NO: 1774354 - RNA, 19 nt, Homo sapiens
  misc_RNA (1)...(19): siRNA sense strand
uaaaguaugacccuucuug

SEQ ID NO: 1774355 - RNA, 19 nt, Homo sapiens
  misc_RNA (1)...(19): siRNA sense strand
gaggagcccugugacauuc

SEQ ID NO: 1774356 - RNA, 19 nt, Homo sapiens
  misc_RNA (1)...(19): siRNA sense strand
gaagaacucagagcugcua

SEQ ID NO: 1774357 - RNA, 19 nt, Homo sapiens
  misc_RNA (1)...(19): siRNA sense strand
gaggacaggauuuccaauu

SEQ ID NO: 1774358 - RNA, 19 nt, Homo sapiens
  misc_RNA (1)...(19): siRNA sense strand
cuacuaacccucuuggaaa

SEQ ID NO: 1774359 - RNA, 19 nt, Homo sapiens
  misc_RNA (1)...(19): siRNA sense strand
ugacaauguuggcuaugaa

SEQ ID NO: 1774360 - RNA, 19 nt, Homo sapiens
  misc_RNA (1)...(19): siRNA sense strand
ucagggaccauguaaauga

SEQ ID NO: 1774361 - RNA, 19 nt, Homo sapiens
  misc_RNA (1)...(19): siRNA sense strand
gaacucagagcugcuauag

SEQ ID NO: 1774362 - RNA, 19 nt, Homo sapiens
  misc_RNA (1)...(19): siRNA sense strand
gcagggaugaggagcagua

SEQ ID NO: 1774363 - RNA, 19 nt, Homo sapiens
  misc_RNA (1)...(19): siRNA sense strand
ugacagaccacgagaugaa

SEQ ID NO: 1774364 - RNA, 19 nt, Homo sapiens
  misc_RNA (1)...(19): siRNA sense strand
agaaaggaaucugcagaaa

SEQ ID NO: 1774365 - RNA, 19 nt, Homo sapiens
  misc_RNA (1)...(19): siRNA sense strand
aggacaggauuuccaauuu

SEQ ID NO: 1774366 - RNA, 19 nt, Homo sapiens
  misc_RNA (1)...(19): siRNA sense strand
ucacaggucuuccaguucu

SEQ ID NO: 1774367 - RNA, 19 nt, Homo sapiens
  misc_RNA (1)...(19): siRNA sense strand
caacugagaauagauggaa

SEQ ID NO: 1774368 - RNA, 19 nt, Homo sapiens
  misc_RNA (1)...(19): siRNA sense strand
ccaggucagugugcacaua

SEQ ID NO: 1774369 - RNA, 19 nt, Homo sapiens
  misc_RNA (1)...(19): siRNA sense strand
acaaauggcaucacuuaug

SEQ ID NO: 1774370 - RNA, 19 nt, Homo sapiens
  misc_RNA (1)...(19): siRNA sense strand
uaaaguuucucuuccugau

SEQ ID NO: 1774371 - RNA, 19 nt, Homo sapiens
  misc_RNA (1)...(19): siRNA sense strand
aaacugcccaaguaaagua

SEQ ID NO: 1774372 - RNA, 19 nt, Homo sapiens
  misc_RNA (1)...(19): siRNA sense strand
ggagaagccaugccaguca

SEQ ID NO: 1774373 - RNA, 19 nt, Homo sapiens
  misc_RNA (1)...(19): siRNA sense strand
gagauggcgcacaagauaa

SEQ ID NO: 1774374 - RNA, 19 nt, Homo sapiens
  misc_RNA (1)...(19): siRNA sense strand
acaaagcacuaacccaaag

SEQ ID NO: 1774375 - RNA, 19 nt, Homo sapiens
  misc_RNA (1)...(19): siRNA sense strand
gugccaggcuguggaauug

SEQ ID NO: 1774376 - RNA, 19 nt, Homo sapiens
  misc_RNA (1)...(19): siRNA sense strand
aaauaaagcaguggaagaa

SEQ ID NO: 1774377 - RNA, 19 nt, Homo sapiens
  misc_RNA (1)...(19): siRNA sense strand
gaaccagcaaugaagaaga

SEQ ID NO: 1774378 - RNA, 19 nt, Homo sapiens
  misc_RNA (1)...(19): siRNA sense strand
gucaggaucuugggcauga

SEQ ID NO: 1774379 - RNA, 19 nt, Homo sapiens
  misc_RNA (1)...(19): siRNA sense strand
ggugugcucugugggauga

SEQ ID NO: 1774380 - RNA, 19 nt, Homo sapiens
  misc_RNA (1)...(19): siRNA sense strand
aagaggaacuuggaacaga

SEQ ID NO: 1774381 - RNA, 19 nt, Homo sapiens
  misc_RNA (1)...(19): siRNA sense strand
gcucugugcucauuaaagc

SEQ ID NO: 1774382 - RNA, 19 nt, Homo sapiens
  misc_RNA (1)...(19): siRNA sense strand
ugaaaggcaucaucagcau

SEQ ID NO: 1774383 - RNA, 19 nt, Homo sapiens
  misc_RNA (1)...(19): siRNA sense strand
ucucugugcugauuggaaa

SEQ ID NO: 1774384 - RNA, 19 nt, Homo sapiens
  misc_RNA (1)...(19): siRNA sense strand
caagauaaagacugugaug

SEQ ID NO: 1774385 - RNA, 19 nt, Homo sapiens
  misc_RNA (1)...(19): siRNA sense strand
gaggugaucauccgguuug

SEQ ID NO: 1774386 - RNA, 19 nt, Homo sapiens
  misc_RNA (1)...(19): siRNA sense strand
ugaggacaauuuaaucauc

SEQ ID NO: 1774387 - RNA, 19 nt, Homo sapiens
  misc_RNA (1)...(19): siRNA sense strand
uggcuaaacucaugucucu

SEQ ID NO: 1774388 - RNA, 19 nt, Homo sapiens
  misc_RNA (1)...(19): siRNA sense strand
gaccacaagauggaaauaa

SEQ ID NO: 1774389 - RNA, 19 nt, Homo sapiens
  misc_RNA (1)...(19): siRNA sense strand
guaauuagcccagaagaac

SEQ ID NO: 1774390 - RNA, 19 nt, Homo sapiens
  misc_RNA (1)...(19): siRNA sense strand
gcaaaguggcucccuuaag

SEQ ID NO: 1774391 - RNA, 19 nt, Homo sapiens
  misc_RNA (1)...(19): siRNA sense strand
ucacuuaucagccuuaucu

SEQ ID NO: 1774392 - RNA, 19 nt, Homo sapiens
  misc_RNA (1)...(19): siRNA sense strand
ggucucugcuccugaaugg

SEQ ID NO: 1774393 - RNA, 19 nt, Homo sapiens
  misc_RNA (1)...(19): siRNA sense strand
cagcaaugaagaagaguuu

SEQ ID NO: 1774394 - RNA, 19 nt, Homo sapiens
  misc_RNA (1)...(19): siRNA sense strand
gaggacaaauggcaucacu

SEQ ID NO: 1774395 - RNA, 19 nt, Homo sapiens
  misc_RNA (1)...(19): siRNA sense strand
gaaacugcaaggaguagug

SEQ ID NO: 1774396 - RNA, 19 nt, Homo sapiens
  misc_RNA (1)...(19): siRNA sense strand
agauaaagacugugauguu

SEQ ID NO: 1774397 - RNA, 19 nt, Homo sapiens
  misc_RNA (1)...(19): siRNA sense strand
gcaacaguucuuuauaauc

SEQ ID NO: 1774398 - RNA, 19 nt, Homo sapiens
  misc_RNA (1)...(19): siRNA sense strand
gaagggagugggacagauc

SEQ ID NO: 1774399 - RNA, 19 nt, Homo sapiens
  misc_RNA (1)...(19): siRNA sense strand
agucuugcgucuugaauau

SEQ ID NO: 1774400 - RNA, 19 nt, Homo sapiens
  misc_RNA (1)...(19): siRNA sense strand
uccuggcacugauuuauaa

SEQ ID NO: 1774401 - RNA, 19 nt, Homo sapiens
  misc_RNA (1)...(19): siRNA sense strand
agacugugauguuugacaa

SEQ ID NO: 1774402 - RNA, 19 nt, Homo sapiens
  misc_RNA (1)...(19): siRNA sense strand
accacaagauggaaauaaa

SEQ ID NO: 1774403 - RNA, 19 nt, Homo sapiens
  misc_RNA (1)...(19): siRNA sense strand
gcugaccgguuuaguggau

SEQ ID NO: 1774404 - RNA, 19 nt, Homo sapiens
  misc_RNA (1)...(19): siRNA sense strand
ccacagaagccaccguugu

SEQ ID NO: 1774405 - RNA, 19 nt, Homo sapiens
  misc_RNA (1)...(19): siRNA sense strand
gccgguggcuggaacacuu

SEQ ID NO: 1774406 - RNA, 19 nt, Homo sapiens
  misc_RNA (1)...(19): siRNA sense strand
uaucaaagcugcuguauuc

SEQ ID NO: 1774407 - RNA, 19 nt, Homo sapiens
  misc_RNA (1)...(19): siRNA sense strand
gagcagaugucuuuaauag

SEQ ID NO: 1774408 - RNA, 19 nt, Homo sapiens
  misc_RNA (1)...(19): siRNA sense strand
gcaugaagaugucgaagaa

SEQ ID NO: 1774409 - RNA, 19 nt, Homo sapiens
  misc_RNA (1)...(19): siRNA sense strand
gaaggcaggagauuuaaua

SEQ ID NO: 1774410 - RNA, 19 nt, Homo sapiens
  misc_RNA (1)...(19): siRNA sense strand
gcaccuauuugguucauuu

SEQ ID NO: 1774411 - RNA, 19 nt, Homo sapiens
  misc_RNA (1)...(19): siRNA sense strand
ggcaggagauuuaauauug

SEQ ID NO: 1774412 - RNA, 19 nt, Homo sapiens
  misc_RNA (1)...(19): siRNA sense strand
gcagaugucuuuaauagca

SEQ ID NO: 1774413 - RNA, 19 nt, Homo sapiens
  misc_RNA (1)...(19): siRNA sense strand
gcaaacaacuuacuauggu

SEQ ID NO: 1774414 - RNA, 19 nt, Homo sapiens
  misc_RNA (1)...(19): siRNA sense strand
gcucuuuacuucaauauga

SEQ ID NO: 1774415 - RNA, 19 nt, Homo sapiens
  misc_RNA (1)...(19): siRNA sense strand
gaaaggcaccuauuugguu

SEQ ID NO: 1774416 - RNA, 19 nt, Homo sapiens
  misc_RNA (1)...(19): siRNA sense strand
aaagaaggcaggagauuua

SEQ ID NO: 1774417 - RNA, 19 nt, Homo sapiens
  misc_RNA (1)...(19): siRNA sense strand
ggagaguucugcauguuga

SEQ ID NO: 1774418 - RNA, 19 nt, Homo sapiens
  misc_RNA (1)...(19): siRNA sense strand
gcuguauucucgaggauua

SEQ ID NO: 1774419 - RNA, 19 nt, Homo sapiens
  misc_RNA (1)...(19): siRNA sense strand
gcaggagauuuaauauuga

SEQ ID NO: 1774420 - RNA, 19 nt, Homo sapiens
  misc_RNA (1)...(19): siRNA sense strand
caaacaggcugaaacacuu

SEQ ID NO: 1774421 - RNA, 19 nt, Homo sapiens
  misc_RNA (1)...(19): siRNA sense strand
uaaaggauaugaagagauc

SEQ ID NO: 1774422 - RNA, 19 nt, Homo sapiens
  misc_RNA (1)...(19): siRNA sense strand
ugagaaauauccugaugaa

SEQ ID NO: 1774423 - RNA, 19 nt, Homo sapiens
  misc_RNA (1)...(19): siRNA sense strand
gggcagugcugauuacaga

SEQ ID NO: 1774424 - RNA, 19 nt, Homo sapiens
  misc_RNA (1)...(19): siRNA sense strand
gugcagaaauuguuuguuc

SEQ ID NO: 1774425 - RNA, 19 nt, Homo sapiens
  misc_RNA (1)...(19): siRNA sense strand
ggaaaacagugacauugua

SEQ ID NO: 1774426 - RNA, 19 nt, Homo sapiens
  misc_RNA (1)...(19): siRNA sense strand
caaacaacuuacuauggua

SEQ ID NO: 1774427 - RNA, 19 nt, Homo sapiens
  misc_RNA (1)...(19): siRNA sense strand
gcagaagacaugagugaaa

SEQ ID NO: 1774428 - RNA, 19 nt, Homo sapiens
  misc_RNA (1)...(19): siRNA sense strand
ccacagagcaaccaaagaa

SEQ ID NO: 1774429 - RNA, 19 nt, Homo sapiens
  misc_RNA (1)...(19): siRNA sense strand
gaucaacagauuuccauuu

SEQ ID NO: 1774430 - RNA, 19 nt, Homo sapiens
  misc_RNA (1)...(19): siRNA sense strand
gaaaugcucacagaacaaa

SEQ ID NO: 1774431 - RNA, 19 nt, Homo sapiens
  misc_RNA (1)...(19): siRNA sense strand
gcagcugcauguucaagaa

SEQ ID NO: 1774432 - RNA, 19 nt, Homo sapiens
  misc_RNA (1)...(19): siRNA sense strand
gcacaaaccuuggaaaccu

SEQ ID NO: 1774433 - RNA, 19 nt, Homo sapiens
  misc_RNA (1)...(19): siRNA sense strand
ggaguuugaugugaucgua

SEQ ID NO: 1774434 - RNA, 19 nt, Homo sapiens
  misc_RNA (1)...(19): siRNA sense strand
acagugacauuguaaguga

SEQ ID NO: 1774435 - RNA, 19 nt, Homo sapiens
  misc_RNA (1)...(19): siRNA sense strand
caacagauuuccauuuuga

SEQ ID NO: 1774436 - RNA, 19 nt, Homo sapiens
  misc_RNA (1)...(19): siRNA sense strand
agaauaaucucugagcauu

SEQ ID NO: 1774437 - RNA, 19 nt, Homo sapiens
  misc_RNA (1)...(19): siRNA sense strand
caggaugugugcuguguuu

SEQ ID NO: 1774438 - RNA, 19 nt, Homo sapiens
  misc_RNA (1)...(19): siRNA sense strand
agaaugcgcuagaaguaaa

SEQ ID NO: 1774439 - RNA, 19 nt, Homo sapiens
  misc_RNA (1)...(19): siRNA sense strand
ggacaaaacuauucaacau

SEQ ID NO: 1774440 - RNA, 19 nt, Homo sapiens
  misc_RNA (1)...(19): siRNA sense strand
gcaugaaaggcaccuauuu

SEQ ID NO: 1774441 - RNA, 19 nt, Homo sapiens
  misc_RNA (1)...(19): siRNA sense strand
gauaugaagagaucacauu

SEQ ID NO: 1774442 - RNA, 19 nt, Homo sapiens
  misc_RNA (1)...(19): siRNA sense strand
gaaaagcgaaugcuaauga

SEQ ID NO: 1774443 - RNA, 19 nt, Homo sapiens
  misc_RNA (1)...(19): siRNA sense strand
gaaaugauaaugcagucaa

SEQ ID NO: 1774444 - RNA, 19 nt, Homo sapiens
  misc_RNA (1)...(19): siRNA sense strand
cagaauuacuuacucacaa

SEQ ID NO: 1774445 - RNA, 19 nt, Homo sapiens
  misc_RNA (1)...(19): siRNA sense strand
gauuuaccauccaacguuu

SEQ ID NO: 1774446 - RNA, 19 nt, Homo sapiens
  misc_RNA (1)...(19): siRNA sense strand
cagagcagaugucuuuaau

SEQ ID NO: 1774447 - RNA, 19 nt, Homo sapiens
  misc_RNA (1)...(19): siRNA sense strand
gccaucaacuucagcagaa

SEQ ID NO: 1774448 - RNA, 19 nt, Homo sapiens
  misc_RNA (1)...(19): siRNA sense strand
gcagugcugauuacagaua

SEQ ID NO: 1774449 - RNA, 19 nt, Homo sapiens
  misc_RNA (1)...(19): siRNA sense strand
gacaguuacuuuccugaga

SEQ ID NO: 1774450 - RNA, 19 nt, Homo sapiens
  misc_RNA (1)...(19): siRNA sense strand
agcaggagcuguuauaaug

SEQ ID NO: 1774451 - RNA, 19 nt, Homo sapiens
  misc_RNA (1)...(19): siRNA sense strand
uagaaucaguugugcagaa

SEQ ID NO: 1774452 - RNA, 19 nt, Homo sapiens
  misc_RNA (1)...(19): siRNA sense strand
gagaaugcgcuagaaguaa

SEQ ID NO: 1774453 - RNA, 19 nt, Homo sapiens
  misc_RNA (1)...(19): siRNA sense strand
gcaauuauagaucaguuug

SEQ ID NO: 1774454 - RNA, 19 nt, Homo sapiens
  misc_RNA (1)...(19): siRNA sense strand
ggacaaagaauccagaaaa

SEQ ID NO: 1774455 - RNA, 19 nt, Homo sapiens
  misc_RNA (1)...(19): siRNA sense strand
caauugcaaugacaucaga

SEQ ID NO: 1774456 - RNA, 19 nt, Homo sapiens
  misc_RNA (1)...(19): siRNA sense strand
agaaguaaauggugcugaa

SEQ ID NO: 1774457 - RNA, 19 nt, Homo sapiens
  misc_RNA (1)...(19): siRNA sense strand
ccacagaagcugcagauuc

SEQ ID NO: 1774458 - RNA, 19 nt, Homo sapiens
  misc_RNA (1)...(19): siRNA sense strand
cugaagacauuauccuuga

SEQ ID NO: 1774459 - RNA, 19 nt, Homo sapiens
  misc_RNA (1)...(19): siRNA sense strand
uaaagaaggcaggagauuu

SEQ ID NO: 1774460 - RNA, 19 nt, Homo sapiens
  misc_RNA (1)...(19): siRNA sense strand
gaauaaucucugagcauuu

SEQ ID NO: 1774461 - RNA, 19 nt, Homo sapiens
  misc_RNA (1)...(19): siRNA sense strand
auacugaaauggagauaga

SEQ ID NO: 1774462 - RNA, 19 nt, Homo sapiens
  misc_RNA (1)...(19): siRNA sense strand
cuaaaggaauaccaggaaa

SEQ ID NO: 1774463 - RNA, 19 nt, Homo sapiens
  misc_RNA (1)...(19): siRNA sense strand
aaucaguugugcagaaauu

SEQ ID NO: 1774464 - RNA, 19 nt, Homo sapiens
  misc_RNA (1)...(19): siRNA sense strand
gaagagaucacauuuuaug

SEQ ID NO: 1774465 - RNA, 19 nt, Homo sapiens
  misc_RNA (1)...(19): siRNA sense strand
gaaaaccauugugaugaua

SEQ ID NO: 1774466 - RNA, 19 nt, Homo sapiens
  misc_RNA (1)...(19): siRNA sense strand
ggacggguuugccugaauc

SEQ ID NO: 1774467 - RNA, 19 nt, Homo sapiens
  misc_RNA (1)...(19): siRNA sense strand
agauucagaucaacagauu

SEQ ID NO: 1774468 - RNA, 19 nt, Homo sapiens
  misc_RNA (1)...(19): siRNA sense strand
uaugagaaauauccugaug

SEQ ID NO: 1774469 - RNA, 19 nt, Homo sapiens
  misc_RNA (1)...(19): siRNA sense strand
gaagacauuauccuugaug

SEQ ID NO: 1774470 - RNA, 19 nt, Homo sapiens
  misc_RNA (1)...(19): siRNA sense strand
uaccaggauucuugcauuu

SEQ ID NO: 1774471 - RNA, 19 nt, Homo sapiens
  misc_RNA (1)...(19): siRNA sense strand
uggcccagauugugguuua

SEQ ID NO: 1774472 - RNA, 19 nt, Homo sapiens
  misc_RNA (1)...(19): siRNA sense strand
ucaguuuggucagagaaua

SEQ ID NO: 1774473 - RNA, 19 nt, Homo sapiens
  misc_RNA (1)...(19): siRNA sense strand
aagcagcgauccagagaau

SEQ ID NO: 1774474 - RNA, 19 nt, Homo sapiens
  misc_RNA (1)...(19): siRNA sense strand
ggaaagcacaaaccuugga

SEQ ID NO: 1774475 - RNA, 19 nt, Homo sapiens
  misc_RNA (1)...(19): siRNA sense strand
aauaaucucugagcauuuc

SEQ ID NO: 1774476 - RNA, 19 nt, Homo sapiens
  misc_RNA (1)...(19): siRNA sense strand
gcuaaaggaauaccaggaa

SEQ ID NO: 1774477 - RNA, 19 nt, Homo sapiens
  misc_RNA (1)...(19): siRNA sense strand
caugaaaggcaccuauuug

SEQ ID NO: 1774478 - RNA, 19 nt, Homo sapiens
  misc_RNA (1)...(19): siRNA sense strand
gaaagcacaaaccuuggaa

SEQ ID NO: 1774479 - RNA, 19 nt, Homo sapiens
  misc_RNA (1)...(19): siRNA sense strand
agaauucugugggcucuuu

SEQ ID NO: 1774480 - RNA, 19 nt, Homo sapiens
  misc_RNA (1)...(19): siRNA sense strand
agagaaugcgcuagaagua

SEQ ID NO: 1774481 - RNA, 19 nt, Homo sapiens
  misc_RNA (1)...(19): siRNA sense strand
gcaggagcuguuauaauga

SEQ ID NO: 1774482 - RNA, 19 nt, Homo sapiens
  misc_RNA (1)...(19): siRNA sense strand
aaacagcaagagaagauuu

SEQ ID NO: 1774483 - RNA, 19 nt, Homo sapiens
  misc_RNA (1)...(19): siRNA sense strand
ccagagcagaugucuuuaa

SEQ ID NO: 1774484 - RNA, 19 nt, Homo sapiens
  misc_RNA (1)...(19): siRNA sense strand
cagcagaagacaugaguga

SEQ ID NO: 1774485 - RNA, 19 nt, Homo sapiens
  misc_RNA (1)...(19): siRNA sense strand
gaaaacagugacauuguaa

SEQ ID NO: 1774486 - RNA, 19 nt, Homo sapiens
  misc_RNA (1)...(19): siRNA sense strand
ucugugggcucuuuacuuc

SEQ ID NO: 1774487 - RNA, 19 nt, Homo sapiens
  misc_RNA (1)...(19): siRNA sense strand
acaguuacuuuccugagaa

SEQ ID NO: 1774488 - RNA, 19 nt, Homo sapiens
  misc_RNA (1)...(19): siRNA sense strand
uuaccaggauucuugcauu

SEQ ID NO: 1774489 - RNA, 19 nt, Homo sapiens
  misc_RNA (1)...(19): siRNA sense strand
ggauuugcaugaagauguc

SEQ ID NO: 1774490 - RNA, 19 nt, Homo sapiens
  misc_RNA (1)...(19): siRNA sense strand
cacaaaccuuggaaaccua

SEQ ID NO: 1774491 - RNA, 19 nt, Homo sapiens
  misc_RNA (1)...(19): siRNA sense strand
agaaucaguugugcagaaa

SEQ ID NO: 1774492 - RNA, 19 nt, Homo sapiens
  misc_RNA (1)...(19): siRNA sense strand
gguggaauuuauugucuuc

SEQ ID NO: 1774493 - RNA, 19 nt, Homo sapiens
  misc_RNA (1)...(19): siRNA sense strand
aauauuaccaggauucuug

SEQ ID NO: 1774494 - RNA, 19 nt, Homo sapiens
  misc_RNA (1)...(19): siRNA sense strand
aaaugugccuauagcagaa

SEQ ID NO: 1774495 - RNA, 19 nt, Homo sapiens
  misc_RNA (1)...(19): siRNA sense strand
gauugugguuuaggaaaug

SEQ ID NO: 1774496 - RNA, 19 nt, Homo sapiens
  misc_RNA (1)...(19): siRNA sense strand
caggagcuguuauaaugau

SEQ ID NO: 1774497 - RNA, 19 nt, Homo sapiens
  misc_RNA (1)...(19): siRNA sense strand
uagucgauaugcagaguuu

SEQ ID NO: 1774498 - RNA, 19 nt, Homo sapiens
  misc_RNA (1)...(19): siRNA sense strand
gaggcuaacucggagacuu

SEQ ID NO: 1774499 - RNA, 19 nt, Homo sapiens
  misc_RNA (1)...(19): siRNA sense strand
guaagugacaguccagugu

SEQ ID NO: 1774500 - RNA, 19 nt, Homo sapiens
  misc_RNA (1)...(19): siRNA sense strand
ugacuugcacaucuucuaa

SEQ ID NO: 1774501 - RNA, 19 nt, Homo sapiens
  misc_RNA (1)...(19): siRNA sense strand
gacaaagaauccagaaaau

SEQ ID NO: 1774502 - RNA, 19 nt, Homo sapiens
  misc_RNA (1)...(19): siRNA sense strand
caacuuacuaugguagaaa

SEQ ID NO: 1774503 - RNA, 19 nt, Homo sapiens
  misc_RNA (1)...(19): siRNA sense strand
gcaagagaagauuuagaau

SEQ ID NO: 1774504 - RNA, 19 nt, Homo sapiens
  misc_RNA (1)...(19): siRNA sense strand
ggagcuguuauaaugauuu

SEQ ID NO: 1774505 - RNA, 19 nt, Homo sapiens
  misc_RNA (1)...(19): siRNA sense strand
gccagaggcuucagaaucc

SEQ ID NO: 1774506 - RNA, 19 nt, Homo sapiens
  misc_RNA (1)...(19): siRNA sense strand
gcaacaacuucucuuaugu

SEQ ID NO: 1774507 - RNA, 19 nt, Homo sapiens
  misc_RNA (1)...(19): siRNA sense strand
caacagcucaucacgauuu

SEQ ID NO: 1774508 - RNA, 19 nt, Homo sapiens
  misc_RNA (1)...(19): siRNA sense strand
ucaagggucugcuguggua

SEQ ID NO: 1774509 - RNA, 19 nt, Homo sapiens
  misc_RNA (1)...(19): siRNA sense strand
ggucuucgcuagcaucuca

SEQ ID NO: 1774510 - RNA, 19 nt, Homo sapiens
  misc_RNA (1)...(19): siRNA sense strand
ggccagcuauuucuuguug

SEQ ID NO: 1774511 - RNA, 19 nt, Homo sapiens
  misc_RNA (1)...(19): siRNA sense strand
ccacacucgucaucaaauu

SEQ ID NO: 1774512 - RNA, 19 nt, Homo sapiens
  misc_RNA (1)...(19): siRNA sense strand
ggucugcugugguacauug

SEQ ID NO: 1774513 - RNA, 19 nt, Homo sapiens
  misc_RNA (1)...(19): siRNA sense strand
cacaacagcucaucacgau

SEQ ID NO: 1774514 - RNA, 19 nt, Homo sapiens
  misc_RNA (1)...(19): siRNA sense strand
gugaacaccuuccacaaca

SEQ ID NO: 1774515 - RNA, 19 nt, Homo sapiens
  misc_RNA (1)...(19): siRNA sense strand
ugcaacaacuucucuuaug

SEQ ID NO: 1774516 - RNA, 19 nt, Homo sapiens
  misc_RNA (1)...(19): siRNA sense strand
caacaacuucucuuaugug

SEQ ID NO: 1774517 - RNA, 19 nt, Homo sapiens
  misc_RNA (1)...(19): siRNA sense strand
gaacaccuuccacaacauc

SEQ ID NO: 1774518 - RNA, 19 nt, Homo sapiens
  misc_RNA (1)...(19): siRNA sense strand
gcaccgggaguuugcaaug

SEQ ID NO: 1774519 - RNA, 19 nt, Homo sapiens
  misc_RNA (1)...(19): siRNA sense strand
cagccuacgugaacaccuu

SEQ ID NO: 1774520 - RNA, 19 nt, Homo sapiens
  misc_RNA (1)...(19): siRNA sense strand
gaugagcaccgggaguuug

SEQ ID NO: 1774521 - RNA, 19 nt, Homo sapiens
  misc_RNA (1)...(19): siRNA sense strand
cgacauccuuagccacaag

SEQ ID NO: 1774522 - RNA, 19 nt, Homo sapiens
  misc_RNA (1)...(19): siRNA sense strand
gagucacgcucagcaauac

SEQ ID NO: 1774523 - RNA, 19 nt, Homo sapiens
  misc_RNA (1)...(19): siRNA sense strand
caucacgauuugacugcaa

SEQ ID NO: 1774524 - RNA, 19 nt, Homo sapiens
  misc_RNA (1)...(19): siRNA sense strand
ccgaguauuucauuaacca

SEQ ID NO: 1774525 - RNA, 19 nt, Homo sapiens
  misc_RNA (1)...(19): siRNA sense strand
uaccucgucuuccugauca

SEQ ID NO: 1774526 - RNA, 19 nt, Homo sapiens
  misc_RNA (1)...(19): siRNA sense strand
gguguggucuucgcuagca

SEQ ID NO: 1774527 - RNA, 19 nt, Homo sapiens
  misc_RNA (1)...(19): siRNA sense strand
gcaucuaccucgucuuccu

SEQ ID NO: 1774528 - RNA, 19 nt, Homo sapiens
  misc_RNA (1)...(19): siRNA sense strand
gacugcaacucugucucua

SEQ ID NO: 1774529 - RNA, 19 nt, Homo sapiens
  misc_RNA (1)...(19): siRNA sense strand
uggcuuugccucugcauga

SEQ ID NO: 1774530 - RNA, 19 nt, Homo sapiens
  misc_RNA (1)...(19): siRNA sense strand
acaagaggacaucgggaaa

SEQ ID NO: 1774531 - RNA, 19 nt, Homo sapiens
  misc_RNA (1)...(19): siRNA sense strand
gugaugagcaccgggaguu

SEQ ID NO: 1774532 - RNA, 19 nt, Homo sapiens
  misc_RNA (1)...(19): siRNA sense strand
aagcaucuaccucgucuuc

SEQ ID NO: 1774533 - RNA, 19 nt, Homo sapiens
  misc_RNA (1)...(19): siRNA sense strand
ugaacaccuuccacaacau

SEQ ID NO: 1774534 - RNA, 19 nt, Homo sapiens
  misc_RNA (1)...(19): siRNA sense strand
gcugcugucgcauccguuu

SEQ ID NO: 1774535 - RNA, 19 nt, Homo sapiens
  misc_RNA (1)...(19): siRNA sense strand
agacgugugguucggcuuu

SEQ ID NO: 1774536 - RNA, 19 nt, Homo sapiens
  misc_RNA (1)...(19): siRNA sense strand
ccaaacaucuucaggauuu

SEQ ID NO: 1774537 - RNA, 19 nt, Homo sapiens
  misc_RNA (1)...(19): siRNA sense strand
caacugauuugcuguauuu

SEQ ID NO: 1774538 - RNA, 19 nt, Homo sapiens
  misc_RNA (1)...(19): siRNA sense strand
gaaagaaguugugguuauu

SEQ ID NO: 1774539 - RNA, 19 nt, Homo sapiens
  misc_RNA (1)...(19): siRNA sense strand
ggaagaacuuaaacucaua

SEQ ID NO: 1774540 - RNA, 19 nt, Homo sapiens
  misc_RNA (1)...(19): siRNA sense strand
gaagaacggccaauauuaa

SEQ ID NO: 1774541 - RNA, 19 nt, Homo sapiens
  misc_RNA (1)...(19): siRNA sense strand
gaacaaggacugcugguaa

SEQ ID NO: 1774542 - RNA, 19 nt, Homo sapiens
  misc_RNA (1)...(19): siRNA sense strand
gaaagaacaccacaagaaa

SEQ ID NO: 1774543 - RNA, 19 nt, Homo sapiens
  misc_RNA (1)...(19): siRNA sense strand
gagcaaagcuggcaaucga

SEQ ID NO: 1774544 - RNA, 19 nt, Homo sapiens
  misc_RNA (1)...(19): siRNA sense strand
gacgagagauguacauuau

SEQ ID NO: 1774545 - RNA, 19 nt, Homo sapiens
  misc_RNA (1)...(19): siRNA sense strand
gagcagaaauugccaucaa

SEQ ID NO: 1774546 - RNA, 19 nt, Homo sapiens
  misc_RNA (1)...(19): siRNA sense strand
gaucagcauucuuaacauu

SEQ ID NO: 1774547 - RNA, 19 nt, Homo sapiens
  misc_RNA (1)...(19): siRNA sense strand
ggugagaucagcauucuua

SEQ ID NO: 1774548 - RNA, 19 nt, Homo sapiens
  misc_RNA (1)...(19): siRNA sense strand
cgaagaacggccaauauua

SEQ ID NO: 1774549 - RNA, 19 nt, Homo sapiens
  misc_RNA (1)...(19): siRNA sense strand
ggacgagagauguacauua

SEQ ID NO: 1774550 - RNA, 19 nt, Homo sapiens
  misc_RNA (1)...(19): siRNA sense strand
gaaagauggucuacuggau

SEQ ID NO: 1774551 - RNA, 19 nt, Homo sapiens
  misc_RNA (1)...(19): siRNA sense strand
gaaauacgaaggauggaaa

SEQ ID NO: 1774552 - RNA, 19 nt, Homo sapiens
  misc_RNA (1)...(19): siRNA sense strand
cgagagauguacauuauca

SEQ ID NO: 1774553 - RNA, 19 nt, Homo sapiens
  misc_RNA (1)...(19): siRNA sense strand
gaacagaaacaaggacaaa

SEQ ID NO: 1774554 - RNA, 19 nt, Homo sapiens
  misc_RNA (1)...(19): siRNA sense strand
agaaagaaguugugguuau

SEQ ID NO: 1774555 - RNA, 19 nt, Homo sapiens
  misc_RNA (1)...(19): siRNA sense strand
gaagagaagguuacucgaa

SEQ ID NO: 1774556 - RNA, 19 nt, Homo sapiens
  misc_RNA (1)...(19): siRNA sense strand
ggucuacccugauauuaau

SEQ ID NO: 1774557 - RNA, 19 nt, Homo sapiens
  misc_RNA (1)...(19): siRNA sense strand
gagcaagucagaugauaaa

SEQ ID NO: 1774558 - RNA, 19 nt, Homo sapiens
  misc_RNA (1)...(19): siRNA sense strand
gcaaagauaagaaagaaca

SEQ ID NO: 1774559 - RNA, 19 nt, Homo sapiens
  misc_RNA (1)...(19): siRNA sense strand
cgaaauguaagcaaagaua

SEQ ID NO: 1774560 - RNA, 19 nt, Homo sapiens
  misc_RNA (1)...(19): siRNA sense strand
caagaaagaaguugugguu

SEQ ID NO: 1774561 - RNA, 19 nt, Homo sapiens
  misc_RNA (1)...(19): siRNA sense strand
cugauuaccuagaauauug

SEQ ID NO: 1774562 - RNA, 19 nt, Homo sapiens
  misc_RNA (1)...(19): siRNA sense strand
ggugguugauuuccuaauu

SEQ ID NO: 1774563 - RNA, 19 nt, Homo sapiens
  misc_RNA (1)...(19): siRNA sense strand
ggaaacacauauuacaacu

SEQ ID NO: 1774564 - RNA, 19 nt, Homo sapiens
  misc_RNA (1)...(19): siRNA sense strand
gaacuauccagaaauuaga

SEQ ID NO: 1774565 - RNA, 19 nt, Homo sapiens
  misc_RNA (1)...(19): siRNA sense strand
gacaaacuauccaaacauc

SEQ ID NO: 1774566 - RNA, 19 nt, Homo sapiens
  misc_RNA (1)...(19): siRNA sense strand
cagcagaaacugaaacaaa

SEQ ID NO: 1774567 - RNA, 19 nt, Homo sapiens
  misc_RNA (1)...(19): siRNA sense strand
agaaagaacaccacaagaa

SEQ ID NO: 1774568 - RNA, 19 nt, Homo sapiens
  misc_RNA (1)...(19): siRNA sense strand
gagaucagcauucuuaaca

SEQ ID NO: 1774569 - RNA, 19 nt, Homo sapiens
  misc_RNA (1)...(19): siRNA sense strand
cuacaguccuggagauuau

SEQ ID NO: 1774570 - RNA, 19 nt, Homo sapiens
  misc_RNA (1)...(19): siRNA sense strand
gguaaaggaagaacuuaaa

SEQ ID NO: 1774571 - RNA, 19 nt, Homo sapiens
  misc_RNA (1)...(19): siRNA sense strand
guaccugccuggugccauu

SEQ ID NO: 1774572 - RNA, 19 nt, Homo sapiens
  misc_RNA (1)...(19): siRNA sense strand
gcaaagauauggaaaagag

SEQ ID NO: 1774573 - RNA, 19 nt, Homo sapiens
  misc_RNA (1)...(19): siRNA sense strand
ggaacuauccagaaauuag

SEQ ID NO: 1774574 - RNA, 19 nt, Homo sapiens
  misc_RNA (1)...(19): siRNA sense strand
ucacucaguuugugguauu

SEQ ID NO: 1774575 - RNA, 19 nt, Homo sapiens
  misc_RNA (1)...(19): siRNA sense strand
uggaagcucuaacugagua

SEQ ID NO: 1774576 - RNA, 19 nt, Homo sapiens
  misc_RNA (1)...(19): siRNA sense strand
gugaacaacagcagcaaua

SEQ ID NO: 1774577 - RNA, 19 nt, Homo sapiens
  misc_RNA (1)...(19): siRNA sense strand
gcauguguguucuacucua

SEQ ID NO: 1774578 - RNA, 19 nt, Homo sapiens
  misc_RNA (1)...(19): siRNA sense strand
uaaacuugauguucuguca

SEQ ID NO: 1774579 - RNA, 19 nt, Homo sapiens
  misc_RNA (1)...(19): siRNA sense strand
gaaacaaggacaaacuauc

SEQ ID NO: 1774580 - RNA, 19 nt, Homo sapiens
  misc_RNA (1)...(19): siRNA sense strand
ucacugauaccaacugauu

SEQ ID NO: 1774581 - RNA, 19 nt, Homo sapiens
  misc_RNA (1)...(19): siRNA sense strand
ucaauacacagcagucuuu

SEQ ID NO: 1774582 - RNA, 19 nt, Homo sapiens
  misc_RNA (1)...(19): siRNA sense strand
aaugaaagauggucuacug

SEQ ID NO: 1774583 - RNA, 19 nt, Homo sapiens
  misc_RNA (1)...(19): siRNA sense strand
aaacuaagagcagaaauug

SEQ ID NO: 1774584 - RNA, 19 nt, Homo sapiens
  misc_RNA (1)...(19): siRNA sense strand
ugcaucacauuaccuguua

SEQ ID NO: 1774585 - RNA, 19 nt, Homo sapiens
  misc_RNA (1)...(19): siRNA sense strand
gaacaacagcagcaauaag

SEQ ID NO: 1774586 - RNA, 19 nt, Homo sapiens
  misc_RNA (1)...(19): siRNA sense strand
gaaugcagccagagcagaa

SEQ ID NO: 1774587 - RNA, 19 nt, Homo sapiens
  misc_RNA (1)...(19): siRNA sense strand
cgugagggauucugaguau

SEQ ID NO: 1774588 - RNA, 19 nt, Homo sapiens
  misc_RNA (1)...(19): siRNA sense strand
uuuccaaccuuguuaugua

SEQ ID NO: 1774589 - RNA, 19 nt, Homo sapiens
  misc_RNA (1)...(19): siRNA sense strand
gaaaugauacaugggucua

SEQ ID NO: 1774590 - RNA, 19 nt, Homo sapiens
  misc_RNA (1)...(19): siRNA sense strand
ucuaugauuuccaacauga

SEQ ID NO: 1774591 - RNA, 19 nt, Homo sapiens
  misc_RNA (1)...(19): siRNA sense strand
ggauuacguaucagacaua

SEQ ID NO: 1774592 - RNA, 19 nt, Homo sapiens
  misc_RNA (1)...(19): siRNA sense strand
gcagaaacugaaacaaaga

SEQ ID NO: 1774593 - RNA, 19 nt, Homo sapiens
  misc_RNA (1)...(19): siRNA sense strand
aagagaagguuacucgaau

SEQ ID NO: 1774594 - RNA, 19 nt, Homo sapiens
  misc_RNA (1)...(19): siRNA sense strand
ggacaaacuauccaaacau

SEQ ID NO: 1774595 - RNA, 19 nt, Homo sapiens
  misc_RNA (1)...(19): siRNA sense strand
aaagaggguuauuaaaugg

SEQ ID NO: 1774596 - RNA, 19 nt, Homo sapiens
  misc_RNA (1)...(19): siRNA sense strand
caaacuauccaaacaucuu

SEQ ID NO: 1774597 - RNA, 19 nt, Homo sapiens
  misc_RNA (1)...(19): siRNA sense strand
ccuagaauauuggcucauu

SEQ ID NO: 1774598 - RNA, 19 nt, Homo sapiens
  misc_RNA (1)...(19): siRNA sense strand
gaaucuuggcugaguauga

SEQ ID NO: 1774599 - RNA, 19 nt, Homo sapiens
  misc_RNA (1)...(19): siRNA sense strand
ggaguuggucuugaaauug

SEQ ID NO: 1774600 - RNA, 19 nt, Homo sapiens
  misc_RNA (1)...(19): siRNA sense strand
uggaguuggucuugaaauu

SEQ ID NO: 1774601 - RNA, 19 nt, Homo sapiens
  misc_RNA (1)...(19): siRNA sense strand
gaagaaucagagaaugaaa

SEQ ID NO: 1774602 - RNA, 19 nt, Homo sapiens
  misc_RNA (1)...(19): siRNA sense strand
gauguucugucacugauac

SEQ ID NO: 1774603 - RNA, 19 nt, Homo sapiens
  misc_RNA (1)...(19): siRNA sense strand
cuagaauauuggcucauuu

SEQ ID NO: 1774604 - RNA, 19 nt, Homo sapiens
  misc_RNA (1)...(19): siRNA sense strand
aagaaguugugguuauuga

SEQ ID NO: 1774605 - RNA, 19 nt, Homo sapiens
  misc_RNA (1)...(19): siRNA sense strand
ucuacuggaucuaaacauu

SEQ ID NO: 1774606 - RNA, 19 nt, Homo sapiens
  misc_RNA (1)...(19): siRNA sense strand
agauguacauuaucaagga

SEQ ID NO: 1774607 - RNA, 19 nt, Homo sapiens
  misc_RNA (1)...(19): siRNA sense strand
aacaaggacugcugguaaa

SEQ ID NO: 1774608 - RNA, 19 nt, Homo sapiens
  misc_RNA (1)...(19): siRNA sense strand
gauuguaccagauauugaa

SEQ ID NO: 1774609 - RNA, 19 nt, Homo sapiens
  misc_RNA (1)...(19): siRNA sense strand
gaagagcaagucagaugau

SEQ ID NO: 1774610 - RNA, 19 nt, Homo sapiens
  misc_RNA (1)...(19): siRNA sense strand
gauguacauuaucaaggaa

SEQ ID NO: 1774611 - RNA, 19 nt, Homo sapiens
  misc_RNA (1)...(19): siRNA sense strand
uuuccuaauuggaguguua

SEQ ID NO: 1774612 - RNA, 19 nt, Homo sapiens
  misc_RNA (1)...(19): siRNA sense strand
caucacagagggagcagua

SEQ ID NO: 1774613 - RNA, 19 nt, Homo sapiens
  misc_RNA (1)...(19): siRNA sense strand
gugguugauuuccuaauug

SEQ ID NO: 1774614 - RNA, 19 nt, Homo sapiens
  misc_RNA (1)...(19): siRNA sense strand
acgguucucucguauguuu

SEQ ID NO: 1774615 - RNA, 19 nt, Homo sapiens
  misc_RNA (1)...(19): siRNA sense strand
uaagaaagaacaccacaag

SEQ ID NO: 1774616 - RNA, 19 nt, Homo sapiens
  misc_RNA (1)...(19): siRNA sense strand
gaacaccacaagaaagaag

SEQ ID NO: 1774617 - RNA, 19 nt, Homo sapiens
  misc_RNA (1)...(19): siRNA sense strand
gauaaacuaagagcagaaa

SEQ ID NO: 1774618 - RNA, 19 nt, Homo sapiens
  misc_RNA (1)...(19): siRNA sense strand
cagaaacaaggacaaacua

SEQ ID NO: 1774619 - RNA, 19 nt, Homo sapiens
  misc_RNA (1)...(19): siRNA sense strand
ccucgggaaacacauauua

SEQ ID NO: 1774620 - RNA, 19 nt, Homo sapiens
  misc_RNA (1)...(19): siRNA sense strand
gaaguugugguuauugauc

SEQ ID NO: 1774621 - RNA, 19 nt, Homo sapiens
  misc_RNA (1)...(19): siRNA sense strand
aagagcaagucagaugaua

SEQ ID NO: 1774622 - RNA, 19 nt, Homo sapiens
  misc_RNA (1)...(19): siRNA sense strand
ccaaccuuguuauguauau

SEQ ID NO: 1774623 - RNA, 19 nt, Homo sapiens
  misc_RNA (1)...(19): siRNA sense strand
ccaacugauuugcuguauu

SEQ ID NO: 1774624 - RNA, 19 nt, Homo sapiens
  misc_RNA (1)...(19): siRNA sense strand
guacgaacaaggacagguu

SEQ ID NO: 1774625 - RNA, 19 nt, Homo sapiens
  misc_RNA (1)...(19): siRNA sense strand
ggaaauacgaaggauggaa

SEQ ID NO: 1774626 - RNA, 19 nt, Homo sapiens
  misc_RNA (1)...(19): siRNA sense strand
ucgaagaacggccaauauu

SEQ ID NO: 1774627 - RNA, 19 nt, Homo sapiens
  misc_RNA (1)...(19): siRNA sense strand
acacagcagucuuuuguaa

SEQ ID NO: 1774628 - RNA, 19 nt, Homo sapiens
  misc_RNA (1)...(19): siRNA sense strand
ccaucaacguucacuuaga

SEQ ID NO: 1774629 - RNA, 19 nt, Homo sapiens
  misc_RNA (1)...(19): siRNA sense strand
ggaaugcauguguguucua

SEQ ID NO: 1774630 - RNA, 19 nt, Homo sapiens
  misc_RNA (1)...(19): siRNA sense strand
gaaugcauguguguucuac

SEQ ID NO: 1774631 - RNA, 19 nt, Homo sapiens
  misc_RNA (1)...(19): siRNA sense strand
gaguuggucuugaaauugc

SEQ ID NO: 1774632 - RNA, 19 nt, Homo sapiens
  misc_RNA (1)...(19): siRNA sense strand
caucaacguucacuuagac

SEQ ID NO: 1774633 - RNA, 19 nt, Homo sapiens
  misc_RNA (1)...(19): siRNA sense strand
ggucuacacugacuuugac

SEQ ID NO: 1774634 - RNA, 19 nt, Homo sapiens
  misc_RNA (1)...(19): siRNA sense strand
uguguguucuacucuauuu

SEQ ID NO: 1774635 - RNA, 19 nt, Homo sapiens
  misc_RNA (1)...(19): siRNA sense strand
gagggaccuuggagcgaaa

SEQ ID NO: 1774636 - RNA, 19 nt, Homo sapiens
  misc_RNA (1)...(19): siRNA sense strand
gcacagaaauuaaaggaau

SEQ ID NO: 1774637 - RNA, 19 nt, Homo sapiens
  misc_RNA (1)...(19): siRNA sense strand
gcaaagugauugacuguga

SEQ ID NO: 1774638 - RNA, 19 nt, Homo sapiens
  misc_RNA (1)...(19): siRNA sense strand
agaggaagauguucacuua

SEQ ID NO: 1774639 - RNA, 19 nt, Homo sapiens
  misc_RNA (1)...(19): siRNA sense strand
ggacaucacugcccacuuc

SEQ ID NO: 1774640 - RNA, 19 nt, Homo sapiens
  misc_RNA (1)...(19): siRNA sense strand
gaucguggcucuucaggaa

SEQ ID NO: 1774641 - RNA, 19 nt, Homo sapiens
  misc_RNA (1)...(19): siRNA sense strand
agagggagcugcuaaugua

SEQ ID NO: 1774642 - RNA, 19 nt, Homo sapiens
  misc_RNA (1)...(19): siRNA sense strand
caccaaagcucaaggaguu

SEQ ID NO: 1774643 - RNA, 19 nt, Homo sapiens
  misc_RNA (1)...(19): siRNA sense strand
ggaaagccaucccgacaug

SEQ ID NO: 1774644 - RNA, 19 nt, Homo sapiens
  misc_RNA (1)...(19): siRNA sense strand
ugaaagggcacagaaauua

SEQ ID NO: 1774645 - RNA, 19 nt, Homo sapiens
  misc_RNA (1)...(19): siRNA sense strand
gaaagggcacagaaauuaa

SEQ ID NO: 1774646 - RNA, 19 nt, Homo sapiens
  misc_RNA (1)...(19): siRNA sense strand
guacagcagcaauuucuua

SEQ ID NO: 1774647 - RNA, 19 nt, Homo sapiens
  misc_RNA (1)...(19): siRNA sense strand
gcccuggucuuccuguuua

SEQ ID NO: 1774648 - RNA, 19 nt, Homo sapiens
  misc_RNA (1)...(19): siRNA sense strand
ugucagaacucgugccuuu

SEQ ID NO: 1774649 - RNA, 19 nt, Homo sapiens
  misc_RNA (1)...(19): siRNA sense strand
gguagaagguccacugugu

SEQ ID NO: 1774650 - RNA, 19 nt, Homo sapiens
  misc_RNA (1)...(19): siRNA sense strand
cagcaauccucgaguguuu

SEQ ID NO: 1774651 - RNA, 19 nt, Homo sapiens
  misc_RNA (1)...(19): siRNA sense strand
ucaacgcacugauggauuu

SEQ ID NO: 1774652 - RNA, 19 nt, Homo sapiens
  misc_RNA (1)...(19): siRNA sense strand
ggaguugguuggccauuug

SEQ ID NO: 1774653 - RNA, 19 nt, Homo sapiens
  misc_RNA (1)...(19): siRNA sense strand
gcacugcacuuugcgauuc

SEQ ID NO: 1774654 - RNA, 19 nt, Homo sapiens
  misc_RNA (1)...(19): siRNA sense strand
gggccaugcuuucugauuu

SEQ ID NO: 1774655 - RNA, 19 nt, Homo sapiens
  misc_RNA (1)...(19): siRNA sense strand
caucugaccucaaauagca

SEQ ID NO: 1774656 - RNA, 19 nt, Homo sapiens
  misc_RNA (1)...(19): siRNA sense strand
agaguuugcucaguauuua

SEQ ID NO: 1774657 - RNA, 19 nt, Homo sapiens
  misc_RNA (1)...(19): siRNA sense strand
gagaggagcuauugguuuu

SEQ ID NO: 1774658 - RNA, 19 nt, Homo sapiens
  misc_RNA (1)...(19): siRNA sense strand
ucacuuaacuuaccaagac

SEQ ID NO: 1774659 - RNA, 19 nt, Homo sapiens
  misc_RNA (1)...(19): siRNA sense strand
ggucaacucugagaugaga

SEQ ID NO: 1774660 - RNA, 19 nt, Homo sapiens
  misc_RNA (1)...(19): siRNA sense strand
ucacaucugaccucaaaua

SEQ ID NO: 1774661 - RNA, 19 nt, Homo sapiens
  misc_RNA (1)...(19): siRNA sense strand
gacgagggauuccuuguuc

SEQ ID NO: 1774662 - RNA, 19 nt, Homo sapiens
  misc_RNA (1)...(19): siRNA sense strand
gcacaggaaaugaggauau

SEQ ID NO: 1774663 - RNA, 19 nt, Homo sapiens
  misc_RNA (1)...(19): siRNA sense strand
gccaagcucuucaggaugu

SEQ ID NO: 1774664 - RNA, 19 nt, Homo sapiens
  misc_RNA (1)...(19): siRNA sense strand
ggauauuauuuccagauug

SEQ ID NO: 1774665 - RNA, 19 nt, Homo sapiens
  misc_RNA (1)...(19): siRNA sense strand
gaagagaagccagaagaug

SEQ ID NO: 1774666 - RNA, 19 nt, Homo sapiens
  misc_RNA (1)...(19): siRNA sense strand
gaagagagcagauaaaauc

SEQ ID NO: 1774667 - RNA, 19 nt, Homo sapiens
  misc_RNA (1)...(19): siRNA sense strand
gcaguguaauuuccacaga

SEQ ID NO: 1774668 - RNA, 19 nt, Homo sapiens
  misc_RNA (1)...(19): siRNA sense strand
ugacagcagcguugagaua

SEQ ID NO: 1774669 - RNA, 19 nt, Homo sapiens
  misc_RNA (1)...(19): siRNA sense strand
gagcugagagccuccauga

SEQ ID NO: 1774670 - RNA, 19 nt, Homo sapiens
  misc_RNA (1)...(19): siRNA sense strand
uaccauggcugcagcaaga

SEQ ID NO: 1774671 - RNA, 19 nt, Homo sapiens
  misc_RNA (1)...(19): siRNA sense strand
gcaggucacgguugaugua

SEQ ID NO: 1774672 - RNA, 19 nt, Homo sapiens
  misc_RNA (1)...(19): siRNA sense strand
gauauuauuuccagauugc

SEQ ID NO: 1774673 - RNA, 19 nt, Homo sapiens
  misc_RNA (1)...(19): siRNA sense strand
gguguggcaucuucacgua

SEQ ID NO: 1774674 - RNA, 19 nt, Homo sapiens
  misc_RNA (1)...(19): siRNA sense strand
ccaggagccucaucucuuc

SEQ ID NO: 1774675 - RNA, 19 nt, Homo sapiens
  misc_RNA (1)...(19): siRNA sense strand
ucaggaagcagcuaaagaa

SEQ ID NO: 1774676 - RNA, 19 nt, Homo sapiens
  misc_RNA (1)...(19): siRNA sense strand
cagccaagcucuucaggau

SEQ ID NO: 1774677 - RNA, 19 nt, Homo sapiens
  misc_RNA (1)...(19): siRNA sense strand
gcagagagaguggagcuuu

SEQ ID NO: 1774678 - RNA, 19 nt, Homo sapiens
  misc_RNA (1)...(19): siRNA sense strand
ccucugcguuccugucaua

SEQ ID NO: 1774679 - RNA, 19 nt, Homo sapiens
  misc_RNA (1)...(19): siRNA sense strand
gcacuuccucuuugagauu

SEQ ID NO: 1774680 - RNA, 19 nt, Homo sapiens
  misc_RNA (1)...(19): siRNA sense strand
ggaagauguucacuuaacu

SEQ ID NO: 1774681 - RNA, 19 nt, Homo sapiens
  misc_RNA (1)...(19): siRNA sense strand
cagccagcgugauguuaua

SEQ ID NO: 1774682 - RNA, 19 nt, Homo sapiens
  misc_RNA (1)...(19): siRNA sense strand
caacaagucagggaagaaa

SEQ ID NO: 1774683 - RNA, 19 nt, Homo sapiens
  misc_RNA (1)...(19): siRNA sense strand
ccguggaacugauaacaaa

SEQ ID NO: 1774684 - RNA, 19 nt, Homo sapiens
  misc_RNA (1)...(19): siRNA sense strand
guucugaggccuaugcuaa

SEQ ID NO: 1774685 - RNA, 19 nt, Homo sapiens
  misc_RNA (1)...(19): siRNA sense strand
gcagcaagaccucauagug

SEQ ID NO: 1774686 - RNA, 19 nt, Homo sapiens
  misc_RNA (1)...(19): siRNA sense strand
gcugagagccuccaugaca

SEQ ID NO: 1774687 - RNA, 19 nt, Homo sapiens
  misc_RNA (1)...(19): siRNA sense strand
ugacucagauacucacuca

SEQ ID NO: 1774688 - RNA, 19 nt, Homo sapiens
  misc_RNA (1)...(19): siRNA sense strand
ccagggccaugcuuucuga

SEQ ID NO: 1774689 - RNA, 19 nt, Homo sapiens
  misc_RNA (1)...(19): siRNA sense strand
gaagauguucacuuaacuu

SEQ ID NO: 1774690 - RNA, 19 nt, Homo sapiens
  misc_RNA (1)...(19): siRNA sense strand
uguuagaguuugcucagua

SEQ ID NO: 1774691 - RNA, 19 nt, Homo sapiens
  misc_RNA (1)...(19): siRNA sense strand
ggacgagggauuccuuguu

SEQ ID NO: 1774692 - RNA, 19 nt, Homo sapiens
  misc_RNA (1)...(19): siRNA sense strand
gcacagguggcagugauuu

SEQ ID NO: 1774693 - RNA, 19 nt, Homo sapiens
  misc_RNA (1)...(19): siRNA sense strand
uccgagagguguugaaaga

SEQ ID NO: 1774694 - RNA, 19 nt, Homo sapiens
  misc_RNA (1)...(19): siRNA sense strand
ugcaagagcugcuggaaag

SEQ ID NO: 1774695 - RNA, 19 nt, Homo sapiens
  misc_RNA (1)...(19): siRNA sense strand
uagaagguccacuguguaa

SEQ ID NO: 1774696 - RNA, 19 nt, Homo sapiens
  misc_RNA (1)...(19): siRNA sense strand
gaagcuggacugcgagaga

SEQ ID NO: 1774697 - RNA, 19 nt, Homo sapiens
  misc_RNA (1)...(19): siRNA sense strand
ugucuucccuguuagaguu

SEQ ID NO: 1774698 - RNA, 19 nt, Homo sapiens
  misc_RNA (1)...(19): siRNA sense strand
gcacuuugcgauucaacaa

SEQ ID NO: 1774699 - RNA, 19 nt, Homo sapiens
  misc_RNA (1)...(19): siRNA sense strand
cagcagcguugagauauca

SEQ ID NO: 1774700 - RNA, 19 nt, Homo sapiens
  misc_RNA (1)...(19): siRNA sense strand
guagaagguccacugugua

SEQ ID NO: 1774701 - RNA, 19 nt, Homo sapiens
  misc_RNA (1)...(19): siRNA sense strand
cgagagagaggagcuauug

SEQ ID NO: 1774702 - RNA, 19 nt, Homo sapiens
  misc_RNA (1)...(19): siRNA sense strand
gcuaaucauucuaguucau

SEQ ID NO: 1774703 - RNA, 19 nt, Homo sapiens
  misc_RNA (1)...(19): siRNA sense strand
gagagaggagcuauugguu

SEQ ID NO: 1774704 - RNA, 19 nt, Homo sapiens
  misc_RNA (1)...(19): siRNA sense strand
gcgagcaguucuuccacuu

SEQ ID NO: 1774705 - RNA, 19 nt, Homo sapiens
  misc_RNA (1)...(19): siRNA sense strand
cacaggaaaugaggauauu

SEQ ID NO: 1774706 - RNA, 19 nt, Homo sapiens
  misc_RNA (1)...(19): siRNA sense strand
cagcagcaauuucuuacuc

SEQ ID NO: 1774707 - RNA, 19 nt, Homo sapiens
  misc_RNA (1)...(19): siRNA sense strand
cagagagaguggagcuuug

SEQ ID NO: 1774708 - RNA, 19 nt, Homo sapiens
  misc_RNA (1)...(19): siRNA sense strand
guuagaguuugcucaguau

SEQ ID NO: 1774709 - RNA, 19 nt, Homo sapiens
  misc_RNA (1)...(19): siRNA sense strand
ccaagugccagacgaaaug

SEQ ID NO: 1774710 - RNA, 19 nt, Homo sapiens
  misc_RNA (1)...(19): siRNA sense strand
ggaagggucaagagggaaa

SEQ ID NO: 1774711 - RNA, 19 nt, Homo sapiens
  misc_RNA (1)...(19): siRNA sense strand
cuacgaggauuugucauca

SEQ ID NO: 1774712 - RNA, 19 nt, Homo sapiens
  misc_RNA (1)...(19): siRNA sense strand
ucacagacuacaucucauu

SEQ ID NO: 1774713 - RNA, 19 nt, Homo sapiens
  misc_RNA (1)...(19): siRNA sense strand
aaaauugucucucagcaaa

SEQ ID NO: 1774714 - RNA, 19 nt, Homo sapiens
  misc_RNA (1)...(19): siRNA sense strand
cugcagagaaugcugauuu

SEQ ID NO: 1774715 - RNA, 19 nt, Homo sapiens
  misc_RNA (1)...(19): siRNA sense strand
ggucacgguugauguacug

SEQ ID NO: 1774716 - RNA, 19 nt, Homo sapiens
  misc_RNA (1)...(19): siRNA sense strand
gggagcugcuaauguacaa

SEQ ID NO: 1774717 - RNA, 19 nt, Homo sapiens
  misc_RNA (1)...(19): siRNA sense strand
aaagggcacagaaauuaaa

SEQ ID NO: 1774718 - RNA, 19 nt, Homo sapiens
  misc_RNA (1)...(19): siRNA sense strand
aguauguucucccgucuuu

SEQ ID NO: 1774719 - RNA, 19 nt, Homo sapiens
  misc_RNA (1)...(19): siRNA sense strand
gagcacuuccucuuugaga

SEQ ID NO: 1774720 - RNA, 19 nt, Homo sapiens
  misc_RNA (1)...(19): siRNA sense strand
ggaagcauccugccagcau

SEQ ID NO: 1774721 - RNA, 19 nt, Homo sapiens
  misc_RNA (1)...(19): siRNA sense strand
aggaaucugugcugccuuu

SEQ ID NO: 1774722 - RNA, 19 nt, Homo sapiens
  misc_RNA (1)...(19): siRNA sense strand
gaaaauacagaguucuuug

SEQ ID NO: 1774723 - RNA, 19 nt, Homo sapiens
  misc_RNA (1)...(19): siRNA sense strand
caggaaaugaggauauuau

SEQ ID NO: 1774724 - RNA, 19 nt, Homo sapiens
  misc_RNA (1)...(19): siRNA sense strand
ggcgauccaugagcacuuu

SEQ ID NO: 1774725 - RNA, 19 nt, Homo sapiens
  misc_RNA (1)...(19): siRNA sense strand
guugaaagaggaagauguu

SEQ ID NO: 1774726 - RNA, 19 nt, Homo sapiens
  misc_RNA (1)...(19): siRNA sense strand
ugacaguucugaggccuau

SEQ ID NO: 1774727 - RNA, 19 nt, Homo sapiens
  misc_RNA (1)...(19): siRNA sense strand
ggccugcucugcugcugaa

SEQ ID NO: 1774728 - RNA, 19 nt, Homo sapiens
  misc_RNA (1)...(19): siRNA sense strand
aauacagaguucuuuguug

SEQ ID NO: 1774729 - RNA, 19 nt, Homo sapiens
  misc_RNA (1)...(19): siRNA sense strand
gaagguccacuguguaaaa

SEQ ID NO: 1774730 - RNA, 19 nt, Homo sapiens
  misc_RNA (1)...(19): siRNA sense strand
gcaguuugccagcgauuuc

SEQ ID NO: 1774731 - RNA, 19 nt, Homo sapiens
  misc_RNA (1)...(19): siRNA sense strand
agacagagggagcugcuaa

SEQ ID NO: 1774732 - RNA, 19 nt, Homo sapiens
  misc_RNA (1)...(19): siRNA sense strand
gaggaagauguucacuuaa

SEQ ID NO: 1774733 - RNA, 19 nt, Homo sapiens
  misc_RNA (1)...(19): siRNA sense strand
gaugacagcagcguugaga

SEQ ID NO: 1774734 - RNA, 19 nt, Homo sapiens
  misc_RNA (1)...(19): siRNA sense strand
gauguucacuuaacuuacc

SEQ ID NO: 1774735 - RNA, 19 nt, Homo sapiens
  misc_RNA (1)...(19): siRNA sense strand
ggacguagccagccuuucc

SEQ ID NO: 1774736 - RNA, 19 nt, Homo sapiens
  misc_RNA (1)...(19): siRNA sense strand
gggaauguccugauacuua

SEQ ID NO: 1774737 - RNA, 19 nt, Homo sapiens
  misc_RNA (1)...(19): siRNA sense strand
ggaaauggcugagcaucaa

SEQ ID NO: 1774738 - RNA, 19 nt, Homo sapiens
  misc_RNA (1)...(19): siRNA sense strand
gcaacuaucuucugaacau

SEQ ID NO: 1774739 - RNA, 19 nt, Homo sapiens
  misc_RNA (1)...(19): siRNA sense strand
gaacauccgcuauggacua

SEQ ID NO: 1774740 - RNA, 19 nt, Homo sapiens
  misc_RNA (1)...(19): siRNA sense strand
ggaggcaacuaucuucuga

SEQ ID NO: 1774741 - RNA, 19 nt, Homo sapiens
  misc_RNA (1)...(19): siRNA sense strand
gaacacaacaucuguaugg

SEQ ID NO: 1774742 - RNA, 19 nt, Homo sapiens
  misc_RNA (1)...(19): siRNA sense strand
ggauuugguuggugaauug

SEQ ID NO: 1774743 - RNA, 19 nt, Homo sapiens
  misc_RNA (1)...(19): siRNA sense strand
gcaccagcauugacaaguu

SEQ ID NO: 1774744 - RNA, 19 nt, Homo sapiens
  misc_RNA (1)...(19): siRNA sense strand
ucaaagggaucggcuguuu

SEQ ID NO: 1774745 - RNA, 19 nt, Homo sapiens
  misc_RNA (1)...(19): siRNA sense strand
uaacaaugcugggaauuca

SEQ ID NO: 1774746 - RNA, 19 nt, Homo sapiens
  misc_RNA (1)...(19): siRNA sense strand
gagugggaauguccugaua

SEQ ID NO: 1774747 - RNA, 19 nt, Homo sapiens
  misc_RNA (1)...(19): siRNA sense strand
gaguuugcuuggacuauaa

SEQ ID NO: 1774748 - RNA, 19 nt, Homo sapiens
  misc_RNA (1)...(19): siRNA sense strand
cacaacaucuguaugguau

SEQ ID NO: 1774749 - RNA, 19 nt, Homo sapiens
  misc_RNA (1)...(19): siRNA sense strand
guccacagauccagauaaa

SEQ ID NO: 1774750 - RNA, 19 nt, Homo sapiens
  misc_RNA (1)...(19): siRNA sense strand
ggaauguccugauacuuac

SEQ ID NO: 1774751 - RNA, 19 nt, Homo sapiens
  misc_RNA (1)...(19): siRNA sense strand
uaccucaacuacaaagaua

SEQ ID NO: 1774752 - RNA, 19 nt, Homo sapiens
  misc_RNA (1)...(19): siRNA sense strand
caaagggaucggcuguuua

SEQ ID NO: 1774753 - RNA, 19 nt, Homo sapiens
  misc_RNA (1)...(19): siRNA sense strand
gaucacaagugggagaugu

SEQ ID NO: 1774754 - RNA, 19 nt, Homo sapiens
  misc_RNA (1)...(19): siRNA sense strand
auaacuaccucaacuacaa

SEQ ID NO: 1774755 - RNA, 19 nt, Homo sapiens
  misc_RNA (1)...(19): siRNA sense strand
caccagcauugacaaguuu

SEQ ID NO: 1774756 - RNA, 19 nt, Homo sapiens
  misc_RNA (1)...(19): siRNA sense strand
agauaaaggucucuucauc

SEQ ID NO: 1774757 - RNA, 19 nt, Homo sapiens
  misc_RNA (1)...(19): siRNA sense strand
gccagaaaauggagucuua

SEQ ID NO: 1774758 - RNA, 19 nt, Homo sapiens
  misc_RNA (1)...(19): siRNA sense strand
gaggauacuauaacuguga

SEQ ID NO: 1774759 - RNA, 19 nt, Homo sapiens
  misc_RNA (1)...(19): siRNA sense strand
ggcauugucugauguuaca

SEQ ID NO: 1774760 - RNA, 19 nt, Homo sapiens
  misc_RNA (1)...(19): siRNA sense strand
gaagaggaacauccgcuau

SEQ ID NO: 1774761 - RNA, 19 nt, Homo sapiens
  misc_RNA (1)...(19): siRNA sense strand
aaagauggacugauuguuc

SEQ ID NO: 1774762 - RNA, 19 nt, Homo sapiens
  misc_RNA (1)...(19): siRNA sense strand
aacuaaagauggacugauu

SEQ ID NO: 1774763 - RNA, 19 nt, Homo sapiens
  misc_RNA (1)...(19): siRNA sense strand
uaacagcuauaaaccugau

SEQ ID NO: 1774764 - RNA, 19 nt, Homo sapiens
  misc_RNA (1)...(19): siRNA sense strand
gagcuguacgaccuuguua

SEQ ID NO: 1774765 - RNA, 19 nt, Homo sapiens
  misc_RNA (1)...(19): siRNA sense strand
cauccacucuaucuacuug

SEQ ID NO: 1774766 - RNA, 19 nt, Homo sapiens
  misc_RNA (1)...(19): siRNA sense strand
ccacagauccagauaaagg

SEQ ID NO: 1774767 - RNA, 19 nt, Homo sapiens
  misc_RNA (1)...(19): siRNA sense strand
gggauuugguuggugaauu

SEQ ID NO: 1774768 - RNA, 19 nt, Homo sapiens
  misc_RNA (1)...(19): siRNA sense strand
agaguuugcuuggacuaua

SEQ ID NO: 1774769 - RNA, 19 nt, Homo sapiens
  misc_RNA (1)...(19): siRNA sense strand
cuacaaagauaacaaugcu

SEQ ID NO: 1774770 - RNA, 19 nt, Homo sapiens
  misc_RNA (1)...(19): siRNA sense strand
gagaugugcaccagcauug

SEQ ID NO: 1774771 - RNA, 19 nt, Homo sapiens
  misc_RNA (1)...(19): siRNA sense strand
aaacaaugccagagcugua

SEQ ID NO: 1774772 - RNA, 19 nt, Homo sapiens
  misc_RNA (1)...(19): siRNA sense strand
gcuauaaaccugaucugau

SEQ ID NO: 1774773 - RNA, 19 nt, Homo sapiens
  misc_RNA (1)...(19): siRNA sense strand
gauaaaggucucuucaucu

SEQ ID NO: 1774774 - RNA, 19 nt, Homo sapiens
  misc_RNA (1)...(19): siRNA sense strand
gaaaggcuucuugcuguug

SEQ ID NO: 1774775 - RNA, 19 nt, Homo sapiens
  misc_RNA (1)...(19): siRNA sense strand
caacuaucuucugaacauu

SEQ ID NO: 1774776 - RNA, 19 nt, Homo sapiens
  misc_RNA (1)...(19): siRNA sense strand
ccacaaauuuucuuucaug

SEQ ID NO: 1774777 - RNA, 19 nt, Homo sapiens
  misc_RNA (1)...(19): siRNA sense strand
gaaaagaacacaacaucug

SEQ ID NO: 1774778 - RNA, 19 nt, Homo sapiens
  misc_RNA (1)...(19): siRNA sense strand
aaagggaucggcuguuuau

SEQ ID NO: 1774779 - RNA, 19 nt, Homo sapiens
  misc_RNA (1)...(19): siRNA sense strand
ggaauucaaggagaucuga

SEQ ID NO: 1774780 - RNA, 19 nt, Homo sapiens
  misc_RNA (1)...(19): siRNA sense strand
acacaacaucuguauggua

SEQ ID NO: 1774781 - RNA, 19 nt, Homo sapiens
  misc_RNA (1)...(19): siRNA sense strand
caccauggaggauacuaua

SEQ ID NO: 1774782 - RNA, 19 nt, Homo sapiens
  misc_RNA (1)...(19): siRNA sense strand
ggagaugugcaccagcauu

SEQ ID NO: 1774783 - RNA, 19 nt, Homo sapiens
  misc_RNA (1)...(19): siRNA sense strand
aaagaacacaacaucugua

SEQ ID NO: 1774784 - RNA, 19 nt, Homo sapiens
  misc_RNA (1)...(19): siRNA sense strand
acuauaccacucacucuua

SEQ ID NO: 1774785 - RNA, 19 nt, Homo sapiens
  misc_RNA (1)...(19): siRNA sense strand
auaaaggucucuucaucuc

SEQ ID NO: 1774786 - RNA, 19 nt, Homo sapiens
  misc_RNA (1)...(19): siRNA sense strand
gcugggaauucaaggagau

SEQ ID NO: 1774787 - RNA, 19 nt, Homo sapiens
  misc_RNA (1)...(19): siRNA sense strand
gggcuaucgucgugacaug

SEQ ID NO: 1774788 - RNA, 19 nt, Homo sapiens
  misc_RNA (1)...(19): siRNA sense strand
uaacuaccucaacuacaaa

SEQ ID NO: 1774789 - RNA, 19 nt, Homo sapiens
  misc_RNA (1)...(19): siRNA sense strand
gggaaauggcugagcauca

SEQ ID NO: 1774790 - RNA, 19 nt, Homo sapiens
  misc_RNA (1)...(19): siRNA sense strand
gcuucuugcuguugggaaa

SEQ ID NO: 1774791 - RNA, 19 nt, Homo sapiens
  misc_RNA (1)...(19): siRNA sense strand
gcugacaggagugaaguaa

SEQ ID NO: 1774792 - RNA, 19 nt, Homo sapiens
  misc_RNA (1)...(19): siRNA sense strand
ccagauaaaggucucuuca

SEQ ID NO: 1774793 - RNA, 19 nt, Homo sapiens
  misc_RNA (1)...(19): siRNA sense strand
ggcuaucuaugccuccaaa

SEQ ID NO: 1774794 - RNA, 19 nt, Homo sapiens
  misc_RNA (1)...(19): siRNA sense strand
ggacugauuguucccaucu

SEQ ID NO: 1774795 - RNA, 19 nt, Homo sapiens
  misc_RNA (1)...(19): siRNA sense strand
cauccgcuauggacuauac

SEQ ID NO: 1774796 - RNA, 19 nt, Homo sapiens
  misc_RNA (1)...(19): siRNA sense strand
gaaauggcugagcaucaau

SEQ ID NO: 1774797 - RNA, 19 nt, Homo sapiens
  misc_RNA (1)...(19): siRNA sense strand
gauaacaaugcugggaauu

SEQ ID NO: 1774798 - RNA, 19 nt, Homo sapiens
  misc_RNA (1)...(19): siRNA sense strand
cauggaggauacuauaacu

SEQ ID NO: 1774799 - RNA, 19 nt, Homo sapiens
  misc_RNA (1)...(19): siRNA sense strand
gcaguaccagcgcuucaug

SEQ ID NO: 1774800 - RNA, 19 nt, Homo sapiens
  misc_RNA (1)...(19): siRNA sense strand
ggacuauaccacucacucu

SEQ ID NO: 1774801 - RNA, 19 nt, Homo sapiens
  misc_RNA (1)...(19): siRNA sense strand
gguccacagauccagauaa

SEQ ID NO: 1774802 - RNA, 19 nt, Homo sapiens
  misc_RNA (1)...(19): siRNA sense strand
agauaacaaugcugggaau

SEQ ID NO: 1774803 - RNA, 19 nt, Homo sapiens
  misc_RNA (1)...(19): siRNA sense strand
gauacuauaacugugaaga

SEQ ID NO: 1774804 - RNA, 19 nt, Homo sapiens
  misc_RNA (1)...(19): siRNA sense strand
cuauaccacucacucuuag

SEQ ID NO: 1774805 - RNA, 19 nt, Homo sapiens
  misc_RNA (1)...(19): siRNA sense strand
uguacgaccuuguuaacag

SEQ ID NO: 1774806 - RNA, 19 nt, Homo sapiens
  misc_RNA (1)...(19): siRNA sense strand
ggaacagcucuccggaaga

SEQ ID NO: 1774807 - RNA, 19 nt, Homo sapiens
  misc_RNA (1)...(19): siRNA sense strand
cuaaagauggacugauugu

SEQ ID NO: 1774808 - RNA, 19 nt, Homo sapiens
  misc_RNA (1)...(19): siRNA sense strand
guccugauacuuacuggaa

SEQ ID NO: 1774809 - RNA, 19 nt, Homo sapiens
  misc_RNA (1)...(19): siRNA sense strand
gcagaguuugcuuggacua

SEQ ID NO: 1774810 - RNA, 19 nt, Homo sapiens
  misc_RNA (1)...(19): siRNA sense strand
guucagacaguaaguuugg

SEQ ID NO: 1774811 - RNA, 19 nt, Homo sapiens
  misc_RNA (1)...(19): siRNA sense strand
aaauggagucuuaaaccuu

SEQ ID NO: 1774812 - RNA, 19 nt, Homo sapiens
  misc_RNA (1)...(19): siRNA sense strand
agaggaacauccgcuaugg

SEQ ID NO: 1774813 - RNA, 19 nt, Homo sapiens
  misc_RNA (1)...(19): siRNA sense strand
aagaacacaacaucuguau

SEQ ID NO: 1774814 - RNA, 19 nt, Homo sapiens
  misc_RNA (1)...(19): siRNA sense strand
gacgacaaagcaucacgaa

SEQ ID NO: 1774815 - RNA, 19 nt, Homo sapiens
  misc_RNA (1)...(19): siRNA sense strand
uggaggauacuauaacugu

SEQ ID NO: 1774816 - RNA, 19 nt, Homo sapiens
  misc_RNA (1)...(19): siRNA sense strand
cgaccuuguuaacagcuau

SEQ ID NO: 1774817 - RNA, 19 nt, Homo sapiens
  misc_RNA (1)...(19): siRNA sense strand
gaggaacauccgcuaugga

SEQ ID NO: 1774818 - RNA, 19 nt, Homo sapiens
  misc_RNA (1)...(19): siRNA sense strand
gugggaauguccugauacu

SEQ ID NO: 1774819 - RNA, 19 nt, Homo sapiens
  misc_RNA (1)...(19): siRNA sense strand
ggagugggaauguccugau

SEQ ID NO: 1774820 - RNA, 19 nt, Homo sapiens
  misc_RNA (1)...(19): siRNA sense strand
gacuauaccacucacucuu

SEQ ID NO: 1774821 - RNA, 19 nt, Homo sapiens
  misc_RNA (1)...(19): siRNA sense strand
caacuaaagauggacugau

SEQ ID NO: 1774822 - RNA, 19 nt, Homo sapiens
  misc_RNA (1)...(19): siRNA sense strand
gaccuuguuaacagcuaua

SEQ ID NO: 1774823 - RNA, 19 nt, Homo sapiens
  misc_RNA (1)...(19): siRNA sense strand
ccauaacuaccucaacuac

SEQ ID NO: 1774824 - RNA, 19 nt, Homo sapiens
  misc_RNA (1)...(19): siRNA sense strand
uaaagauggacugauuguu

SEQ ID NO: 1774825 - RNA, 19 nt, Homo sapiens
  misc_RNA (1)...(19): siRNA sense strand
caagacagcuuuccacaug

SEQ ID NO: 1774826 - RNA, 19 nt, Homo sapiens
  misc_RNA (1)...(19): siRNA sense strand
gaacagauccgcagagagu

SEQ ID NO: 1774827 - RNA, 19 nt, Homo sapiens
  misc_RNA (1)...(19): siRNA sense strand
guaaucagaugggacagua

SEQ ID NO: 1774828 - RNA, 19 nt, Homo sapiens
  misc_RNA (1)...(19): siRNA sense strand
guaaucuucuuccuccaua

SEQ ID NO: 1774829 - RNA, 19 nt, Homo sapiens
  misc_RNA (1)...(19): siRNA sense strand
gggacuaucugcagguuau

SEQ ID NO: 1774830 - RNA, 19 nt, Homo sapiens
  misc_RNA (1)...(19): siRNA sense strand
ggaguacgcggacuugaga

SEQ ID NO: 1774831 - RNA, 19 nt, Homo sapiens
  misc_RNA (1)...(19): siRNA sense strand
gggaacagauccgcagaga

SEQ ID NO: 1774832 - RNA, 19 nt, Homo sapiens
  misc_RNA (1)...(19): siRNA sense strand
gagagauccuuuccugaag

SEQ ID NO: 1774833 - RNA, 19 nt, Homo sapiens
  misc_RNA (1)...(19): siRNA sense strand
gggaagaggcgcagagugu

SEQ ID NO: 1774834 - RNA, 19 nt, Homo sapiens
  misc_RNA (1)...(19): siRNA sense strand
ugagagauccuuuccugaa

SEQ ID NO: 1774835 - RNA, 19 nt, Homo sapiens
  misc_RNA (1)...(19): siRNA sense strand
ccagggcgaugugacguuu

SEQ ID NO: 1774836 - RNA, 19 nt, Homo sapiens
  misc_RNA (1)...(19): siRNA sense strand
ccgagugggugggcauuaa

SEQ ID NO: 1774837 - RNA, 19 nt, Homo sapiens
  misc_RNA (1)...(19): siRNA sense strand
gacguuugcuggcgaugga

SEQ ID NO: 1774838 - RNA, 19 nt, Homo sapiens
  misc_RNA (1)...(19): siRNA sense strand
gcuagucuguguccucucu

SEQ ID NO: 1774839 - RNA, 19 nt, Homo sapiens
  misc_RNA (1)...(19): siRNA sense strand
ggacuuucuuccaccaucu

SEQ ID NO: 1774840 - RNA, 19 nt, Homo sapiens
  misc_RNA (1)...(19): siRNA sense strand
ggacuugagagauccuuuc

SEQ ID NO: 1774841 - RNA, 19 nt, Homo sapiens
  misc_RNA (1)...(19): siRNA sense strand
ggcauggagugguguaaag

SEQ ID NO: 1774842 - RNA, 19 nt, Homo sapiens
  misc_RNA (1)...(19): siRNA sense strand
uguccucucuguaaucuuc

SEQ ID NO: 1774843 - RNA, 19 nt, Homo sapiens
  misc_RNA (1)...(19): siRNA sense strand
ggcaggccauggacugguu

SEQ ID NO: 1774844 - RNA, 19 nt, Homo sapiens
  misc_RNA (1)...(19): siRNA sense strand
cagugcaaccacaccauua

SEQ ID NO: 1774845 - RNA, 19 nt, Homo sapiens
  misc_RNA (1)...(19): siRNA sense strand
gcauggagugguguaaaga

SEQ ID NO: 1774846 - RNA, 19 nt, Homo sapiens
  misc_RNA (1)...(19): siRNA sense strand
ggaggaguacgcggacuug

SEQ ID NO: 1774847 - RNA, 19 nt, Homo sapiens
  misc_RNA (1)...(19): siRNA sense strand
auggagugguguaaagaaa

SEQ ID NO: 1774848 - RNA, 19 nt, Homo sapiens
  misc_RNA (1)...(19): siRNA sense strand
ccacaccauuaugaccauu

SEQ ID NO: 1774849 - RNA, 19 nt, Homo sapiens
  misc_RNA (1)...(19): siRNA sense strand
gagauccuuuccugaagcu

SEQ ID NO: 1774850 - RNA, 19 nt, Homo sapiens
  misc_RNA (1)...(19): siRNA sense strand
cauggagugguguaaagaa

SEQ ID NO: 1774851 - RNA, 19 nt, Homo sapiens
  misc_RNA (1)...(19): siRNA sense strand
cugaguuccugaagaucuu

SEQ ID NO: 1774852 - RNA, 19 nt, Homo sapiens
  misc_RNA (1)...(19): siRNA sense strand
gcuacaccguggaaagacu

SEQ ID NO: 1774853 - RNA, 19 nt, Homo sapiens
  misc_RNA (1)...(19): siRNA sense strand
gucuguguccucucuguaa

SEQ ID NO: 1774854 - RNA, 19 nt, Homo sapiens
  misc_RNA (1)...(19): siRNA sense strand
gugcaaccacaccauuaug

SEQ ID NO: 1774855 - RNA, 19 nt, Homo sapiens
  misc_RNA (1)...(19): siRNA sense strand
uaaucuucuuccuccauau

SEQ ID NO: 1774856 - RNA, 19 nt, Homo sapiens
  misc_RNA (1)...(19): siRNA sense strand
uauccugccugccaugcau

SEQ ID NO: 1774857 - RNA, 19 nt, Homo sapiens
  misc_RNA (1)...(19): siRNA sense strand
aaucagaugggacaguaug

SEQ ID NO: 1774858 - RNA, 19 nt, Homo sapiens
  misc_RNA (1)...(19): siRNA sense strand
ccaucuaccuggccaauua

SEQ ID NO: 1774859 - RNA, 19 nt, Homo sapiens
  misc_RNA (1)...(19): siRNA sense strand
gggaggaccuguucacuau

SEQ ID NO: 1774860 - RNA, 19 nt, Homo sapiens
  misc_RNA (1)...(19): siRNA sense strand
ggaaccagaugggcgagua

SEQ ID NO: 1774861 - RNA, 19 nt, Homo sapiens
  misc_RNA (1)...(19): siRNA sense strand
ccacagccgucaagggauu

SEQ ID NO: 1774862 - RNA, 19 nt, Homo sapiens
  misc_RNA (1)...(19): siRNA sense strand
gaggaccuguucacuauca

SEQ ID NO: 1774863 - RNA, 19 nt, Homo sapiens
  misc_RNA (1)...(19): siRNA sense strand
gggaggaggcccagaaguu

SEQ ID NO: 1774864 - RNA, 19 nt, Homo sapiens
  misc_RNA (1)...(19): siRNA sense strand
cuacagcucccucaucuuc

SEQ ID NO: 1774865 - RNA, 19 nt, Homo sapiens
  misc_RNA (1)...(19): siRNA sense strand
ggaggaggcccagaaguuc

SEQ ID NO: 1774866 - RNA, 19 nt, Homo sapiens
  misc_RNA (1)...(19): siRNA sense strand
gcgaguacgccacgcugua

SEQ ID NO: 1774867 - RNA, 19 nt, Homo sapiens
  misc_RNA (1)...(19): siRNA sense strand
caccuucuacuucgucuuu

SEQ ID NO: 1774868 - RNA, 19 nt, Homo sapiens
  misc_RNA (1)...(19): siRNA sense strand
cgacuccccuuuccucaaa

SEQ ID NO: 1774869 - RNA, 19 nt, Homo sapiens
  misc_RNA (1)...(19): siRNA sense strand
cuacuucgucuuugccauu

SEQ ID NO: 1774870 - RNA, 19 nt, Homo sapiens
  misc_RNA (1)...(19): siRNA sense strand
cgggaggaccuguucacua

SEQ ID NO: 1774871 - RNA, 19 nt, Homo sapiens
  misc_RNA (1)...(19): siRNA sense strand
gggcggagacaccaucuac

SEQ ID NO: 1774872 - RNA, 19 nt, Homo sapiens
  misc_RNA (1)...(19): siRNA sense strand
uguaaccacaccaucauga

SEQ ID NO: 1774873 - RNA, 19 nt, Homo sapiens
  misc_RNA (1)...(19): siRNA sense strand
gcccuuccuucuccaccuu

SEQ ID NO: 1774874 - RNA, 19 nt, Homo sapiens
  misc_RNA (1)...(19): siRNA sense strand
cgcuacagcucccucaucu

SEQ ID NO: 1774875 - RNA, 19 nt, Homo sapiens
  misc_RNA (1)...(19): siRNA sense strand
ggugucgggagaacauuga

SEQ ID NO: 1774876 - RNA, 19 nt, Homo sapiens
  misc_RNA (1)...(19): siRNA sense strand
ggacauggccuuuccacau

SEQ ID NO: 1774877 - RNA, 19 nt, Homo sapiens
  misc_RNA (1)...(19): siRNA sense strand
gacauggccuuuccacauc

SEQ ID NO: 1774878 - RNA, 19 nt, Homo sapiens
  misc_RNA (1)...(19): siRNA sense strand
ccgagaagcuguggaggaa

SEQ ID NO: 1774879 - RNA, 19 nt, Homo sapiens
  misc_RNA (1)...(19): siRNA sense strand
ugcaggagcuggacaagga

SEQ ID NO: 1774880 - RNA, 19 nt, Homo sapiens
  misc_RNA (1)...(19): siRNA sense strand
gugcaccacugggauauca

SEQ ID NO: 1774881 - RNA, 19 nt, Homo sapiens
  misc_RNA (1)...(19): siRNA sense strand
gcugguggcuguguguuuc

SEQ ID NO: 1774882 - RNA, 19 nt, Homo sapiens
  misc_RNA (1)...(19): siRNA sense strand
ggaucugguucaacuugga

SEQ ID NO: 1774883 - RNA, 19 nt, Homo sapiens
  misc_RNA (1)...(19): siRNA sense strand
ccgacuacaucaccgagaa

SEQ ID NO: 1774884 - RNA, 19 nt, Homo sapiens
  misc_RNA (1)...(19): siRNA sense strand
gcugggcacuggauuucug

SEQ ID NO: 1774885 - RNA, 19 nt, Homo sapiens
  misc_RNA (1)...(19): siRNA sense strand
gaagcaacuacgagagguu

SEQ ID NO: 1774886 - RNA, 19 nt, Homo sapiens
  misc_RNA (1)...(19): siRNA sense strand
cagcgacuccgacaucuuc

SEQ ID NO: 1774887 - RNA, 19 nt, Homo sapiens
  misc_RNA (1)...(19): siRNA sense strand
guacggacgcucccacaag

SEQ ID NO: 1774888 - RNA, 19 nt, Homo sapiens
  misc_RNA (1)...(19): siRNA sense strand
cagccagggugcgcuacua

SEQ ID NO: 1774889 - RNA, 19 nt, Homo sapiens
  misc_RNA (1)...(19): siRNA sense strand
gcaccacugggauaucaug

SEQ ID NO: 1774890 - RNA, 19 nt, Homo sapiens
  misc_RNA (1)...(19): siRNA sense strand
cugcaaggccugcuggaaa

SEQ ID NO: 1774891 - RNA, 19 nt, Homo sapiens
  misc_RNA (1)...(19): siRNA sense strand
gagacgcugucccgguaca

SEQ ID NO: 1774892 - RNA, 19 nt, Homo sapiens
  misc_RNA (1)...(19): siRNA sense strand
uggccgcacugcuauuuca

SEQ ID NO: 1774893 - RNA, 19 nt, Homo sapiens
  misc_RNA (1)...(19): siRNA sense strand
acugggauaucauguccaa

SEQ ID NO: 1774894 - RNA, 19 nt, Homo sapiens
  misc_RNA (1)...(19): siRNA sense strand
ccugcaggcucaucucaag

SEQ ID NO: 1774895 - RNA, 19 nt, Homo sapiens
  misc_RNA (1)...(19): siRNA sense strand
gcagcgacuccgacaucuu

SEQ ID NO: 1774896 - RNA, 19 nt, Homo sapiens
  misc_RNA (1)...(19): siRNA sense strand
ucagcugggcacuggauuu

SEQ ID NO: 1774897 - RNA, 19 nt, Homo sapiens
  misc_RNA (1)...(19): siRNA sense strand
gcaaggagcugcaguuugg

SEQ ID NO: 1774898 - RNA, 19 nt, Homo sapiens
  misc_RNA (1)...(19): siRNA sense strand
ccacggagcuggugugcaa

SEQ ID NO: 1774899 - RNA, 19 nt, Homo sapiens
  misc_RNA (1)...(19): siRNA sense strand
caacagaaccuucgacaag

SEQ ID NO: 1774900 - RNA, 19 nt, Homo sapiens
  misc_RNA (1)...(19): siRNA sense strand
ucaagugucuguucgagaa

SEQ ID NO: 1774901 - RNA, 19 nt, Homo sapiens
  misc_RNA (1)...(19): siRNA sense strand
gagcuggugugcaacagaa

SEQ ID NO: 1774902 - RNA, 19 nt, Homo sapiens
  misc_RNA (1)...(19): siRNA sense strand
gaccagcaaugacaacaug

SEQ ID NO: 1774903 - RNA, 19 nt, Homo sapiens
  misc_RNA (1)...(19): siRNA sense strand
ggugauggacuuccuguuu

SEQ ID NO: 1774904 - RNA, 19 nt, Homo sapiens
  misc_RNA (1)...(19): siRNA sense strand
agaaggagguggccaagau

SEQ ID NO: 1774905 - RNA, 19 nt, Homo sapiens
  misc_RNA (1)...(19): siRNA sense strand
acagaaccuucgacaagua

SEQ ID NO: 1774906 - RNA, 19 nt, Homo sapiens
  misc_RNA (1)...(19): siRNA sense strand
ccacacagacuacaaguuc

SEQ ID NO: 1774907 - RNA, 19 nt, Homo sapiens
  misc_RNA (1)...(19): siRNA sense strand
gugauggacuuccuguuug

SEQ ID NO: 1774908 - RNA, 19 nt, Homo sapiens
  misc_RNA (1)...(19): siRNA sense strand
gcuccgugcuggucauuga

SEQ ID NO: 1774909 - RNA, 19 nt, Homo sapiens
  misc_RNA (1)...(19): siRNA sense strand
gaucaacuucuucaucuuc

SEQ ID NO: 1774910 - RNA, 19 nt, Homo sapiens
  misc_RNA (1)...(19): siRNA sense strand
gcugguggcuguccucuac

SEQ ID NO: 1774911 - RNA, 19 nt, Homo sapiens
  misc_RNA (1)...(19): siRNA sense strand
agauugagguccagaagga

SEQ ID NO: 1774912 - RNA, 19 nt, Homo sapiens
  misc_RNA (1)...(19): siRNA sense strand
ugauggacuuccuguuuga

SEQ ID NO: 1774913 - RNA, 19 nt, Homo sapiens
  misc_RNA (1)...(19): siRNA sense strand
ccgcgguguucaugcaaua

SEQ ID NO: 1774914 - RNA, 19 nt, Homo sapiens
  misc_RNA (1)...(19): siRNA sense strand
gggcaguggucaagugucu

SEQ ID NO: 1774915 - RNA, 19 nt, Homo sapiens
  misc_RNA (1)...(19): siRNA sense strand
ccgccaagcucuucuucga

SEQ ID NO: 1774916 - RNA, 19 nt, Homo sapiens
  misc_RNA (1)...(19): siRNA sense strand
gaaccuucgacaaguauuc

SEQ ID NO: 1774917 - RNA, 19 nt, Homo sapiens
  misc_RNA (1)...(19): siRNA sense strand
gaaggagguggccaagaug

SEQ ID NO: 1774918 - RNA, 19 nt, Homo sapiens
  misc_RNA (1)...(19): siRNA sense strand
gcaacagaaccuucgacaa

SEQ ID NO: 1774919 - RNA, 19 nt, Homo sapiens
  misc_RNA (1)...(19): siRNA sense strand
ccgcucaggugauggacuu

SEQ ID NO: 1774920 - RNA, 19 nt, Homo sapiens
  misc_RNA (1)...(19): siRNA sense strand
gcugguggccucccuagau

SEQ ID NO: 1774921 - RNA, 19 nt, Homo sapiens
  misc_RNA (1)...(19): siRNA sense strand
cauccacgcgaaucuguuu

SEQ ID NO: 1774922 - RNA, 19 nt, Homo sapiens
  misc_RNA (1)...(19): siRNA sense strand
cugaucaacuucuucaucu

SEQ ID NO: 1774923 - RNA, 19 nt, Homo sapiens
  misc_RNA (1)...(19): siRNA sense strand
gcagcuuccaggugaugua

SEQ ID NO: 1774924 - RNA, 19 nt, Homo sapiens
  misc_RNA (1)...(19): siRNA sense strand
gcaccacacagacuacaag

SEQ ID NO: 1774925 - RNA, 19 nt, Homo sapiens
  misc_RNA (1)...(19): siRNA sense strand
gcaguggucaagugucugu

SEQ ID NO: 1774926 - RNA, 19 nt, Homo sapiens
  misc_RNA (1)...(19): siRNA sense strand
cugguggccucccuagauu

SEQ ID NO: 1774927 - RNA, 19 nt, Homo sapiens
  misc_RNA (1)...(19): siRNA sense strand
ggagauugagguccagaag

SEQ ID NO: 1774928 - RNA, 19 nt, Homo sapiens
  misc_RNA (1)...(19): siRNA sense strand
cgaaucuguuugcguccuu

SEQ ID NO: 1774929 - RNA, 19 nt, Homo sapiens
  misc_RNA (1)...(19): siRNA sense strand
ggagguggccaagauguac

SEQ ID NO: 1774930 - RNA, 19 nt, Homo sapiens
  misc_RNA (1)...(19): siRNA sense strand
uggacuuccuguuugagaa

SEQ ID NO: 1774931 - RNA, 19 nt, Homo sapiens
  misc_RNA (1)...(19): siRNA sense strand
caucuucguccgcaucguu

SEQ ID NO: 1774932 - RNA, 19 nt, Homo sapiens
  misc_RNA (1)...(19): siRNA sense strand
ccaauaccacggccaacau

SEQ ID NO: 1774933 - RNA, 19 nt, Homo sapiens
  misc_RNA (1)...(19): siRNA sense strand
ugaucaacuucuucaucuu

SEQ ID NO: 1774934 - RNA, 19 nt, Homo sapiens
  misc_RNA (1)...(19): siRNA sense strand
aacagaaccuucgacaagu

SEQ ID NO: 1774935 - RNA, 19 nt, Homo sapiens
  misc_RNA (1)...(19): siRNA sense strand
ggaccagcaaugacaacau

SEQ ID NO: 1774936 - RNA, 19 nt, Homo sapiens
  misc_RNA (1)...(19): siRNA sense strand
cagaaccuucgacaaguau

SEQ ID NO: 1774937 - RNA, 19 nt, Homo sapiens
  misc_RNA (1)...(19): siRNA sense strand
gcucuucuucgaccucuuc

SEQ ID NO: 1774938 - RNA, 19 nt, Homo sapiens
  misc_RNA (1)...(19): siRNA sense strand
ccugggcaguggucaagug

SEQ ID NO: 1774939 - RNA, 19 nt, Homo sapiens
  misc_RNA (1)...(19): siRNA sense strand
ggagcuggugugcaacaga

SEQ ID NO: 1774940 - RNA, 19 nt, Homo sapiens
  misc_RNA (1)...(19): siRNA sense strand
gauggauggcgaggagauu

SEQ ID NO: 1774941 - RNA, 19 nt, Homo sapiens
  misc_RNA (1)...(19): siRNA sense strand
uggcuguccucuacugcuu

SEQ ID NO: 1774942 - RNA, 19 nt, Homo sapiens
  misc_RNA (1)...(19): siRNA sense strand
ggagaugaagucacaauua

SEQ ID NO: 1774943 - RNA, 19 nt, Homo sapiens
  misc_RNA (1)...(19): siRNA sense strand
caaaggagaugaagucaca

SEQ ID NO: 1774944 - RNA, 19 nt, Homo sapiens
  misc_RNA (1)...(19): siRNA sense strand
gaaagacugugugcuuauu

SEQ ID NO: 1774945 - RNA, 19 nt, Homo sapiens
  misc_RNA (1)...(19): siRNA sense strand
caaacggccuuaccagaaa

SEQ ID NO: 1774946 - RNA, 19 nt, Homo sapiens
  misc_RNA (1)...(19): siRNA sense strand
cagaaagacugugugcuua

SEQ ID NO: 1774947 - RNA, 19 nt, Homo sapiens
  misc_RNA (1)...(19): siRNA sense strand
agaaaugacuugcaguuga

SEQ ID NO: 1774948 - RNA, 19 nt, Homo sapiens
  misc_RNA (1)...(19): siRNA sense strand
gggcugaaguugacauuau

SEQ ID NO: 1774949 - RNA, 19 nt, Homo sapiens
  misc_RNA (1)...(19): siRNA sense strand
gagaugaagucacaauuac

SEQ ID NO: 1774950 - RNA, 19 nt, Homo sapiens
  misc_RNA (1)...(19): siRNA sense strand
gaaaugacuugcaguugag

SEQ ID NO: 1774951 - RNA, 19 nt, Homo sapiens
  misc_RNA (1)...(19): siRNA sense strand
caauuacacugccacauau

SEQ ID NO: 1774952 - RNA, 19 nt, Homo sapiens
  misc_RNA (1)...(19): siRNA sense strand
cagcagcccuacaacagua

SEQ ID NO: 1774953 - RNA, 19 nt, Homo sapiens
  misc_RNA (1)...(19): siRNA sense strand
ggaagcaaccagcucauga

SEQ ID NO: 1774954 - RNA, 19 nt, Homo sapiens
  misc_RNA (1)...(19): siRNA sense strand
acaauuacacugccacaua

SEQ ID NO: 1774955 - RNA, 19 nt, Homo sapiens
  misc_RNA (1)...(19): siRNA sense strand
ucaugacacuggugaauau

SEQ ID NO: 1774956 - RNA, 19 nt, Homo sapiens
  misc_RNA (1)...(19): siRNA sense strand
aaacuucucccuugaaaga

SEQ ID NO: 1774957 - RNA, 19 nt, Homo sapiens
  misc_RNA (1)...(19): siRNA sense strand
gaagcaaccagcucaugaa

SEQ ID NO: 1774958 - RNA, 19 nt, Homo sapiens
  misc_RNA (1)...(19): siRNA sense strand
gcaaccagcucaugaacac

SEQ ID NO: 1774959 - RNA, 19 nt, Homo sapiens
  misc_RNA (1)...(19): siRNA sense strand
gacugugugcuuauuauua

SEQ ID NO: 1774960 - RNA, 19 nt, Homo sapiens
  misc_RNA (1)...(19): siRNA sense strand
ugaacacccucagaaauga

SEQ ID NO: 1774961 - RNA, 19 nt, Homo sapiens
  misc_RNA (1)...(19): siRNA sense strand
uauagacacuuccugugaa

SEQ ID NO: 1774962 - RNA, 19 nt, Homo sapiens
  misc_RNA (1)...(19): siRNA sense strand
gcagugacagugaugacua

SEQ ID NO: 1774963 - RNA, 19 nt, Homo sapiens
  misc_RNA (1)...(19): siRNA sense strand
ccagaaagacugugugcuu

SEQ ID NO: 1774964 - RNA, 19 nt, Homo sapiens
  misc_RNA (1)...(19): siRNA sense strand
cagcaucuauagacacuuc

SEQ ID NO: 1774965 - RNA, 19 nt, Homo sapiens
  misc_RNA (1)...(19): siRNA sense strand
gaaccucaguuggaugaca

SEQ ID NO: 1774966 - RNA, 19 nt, Homo sapiens
  misc_RNA (1)...(19): siRNA sense strand
ggcugaaguugacauuauu

SEQ ID NO: 1774967 - RNA, 19 nt, Homo sapiens
  misc_RNA (1)...(19): siRNA sense strand
gaaguugacauuauugaac

SEQ ID NO: 1774968 - RNA, 19 nt, Homo sapiens
  misc_RNA (1)...(19): siRNA sense strand
caaaacuucucccuugaaa

SEQ ID NO: 1774969 - RNA, 19 nt, Homo sapiens
  misc_RNA (1)...(19): siRNA sense strand
acaaacggccuuaccagaa

SEQ ID NO: 1774970 - RNA, 19 nt, Homo sapiens
  misc_RNA (1)...(19): siRNA sense strand
gcugagggcugaaguugac

SEQ ID NO: 1774971 - RNA, 19 nt, Homo sapiens
  misc_RNA (1)...(19): siRNA sense strand
gugaauaugugcuggaaaa

SEQ ID NO: 1774972 - RNA, 19 nt, Homo sapiens
  misc_RNA (1)...(19): siRNA sense strand
aaagacugugugcuuauua

SEQ ID NO: 1774973 - RNA, 19 nt, Homo sapiens
  misc_RNA (1)...(19): siRNA sense strand
ugacacuggugaauaugug

SEQ ID NO: 1774974 - RNA, 19 nt, Homo sapiens
  misc_RNA (1)...(19): siRNA sense strand
gagcugagggcugaaguug

SEQ ID NO: 1774975 - RNA, 19 nt, Homo sapiens
  misc_RNA (1)...(19): siRNA sense strand
aaaccagcaucuauagaca

SEQ ID NO: 1774976 - RNA, 19 nt, Homo sapiens
  misc_RNA (1)...(19): siRNA sense strand
ccacaccacccaugacugu

SEQ ID NO: 1774977 - RNA, 19 nt, Homo sapiens
  misc_RNA (1)...(19): siRNA sense strand
ucagaaaugacuugcaguu

SEQ ID NO: 1774978 - RNA, 19 nt, Homo sapiens
  misc_RNA (1)...(19): siRNA sense strand
caugaacacccucagaaau

SEQ ID NO: 1774979 - RNA, 19 nt, Homo sapiens
  misc_RNA (1)...(19): siRNA sense strand
cuauagacacuuccuguga

SEQ ID NO: 1774980 - RNA, 19 nt, Homo sapiens
  misc_RNA (1)...(19): siRNA sense strand
ggaacaaacggccuuacca

SEQ ID NO: 1774981 - RNA, 19 nt, Homo sapiens
  misc_RNA (1)...(19): siRNA sense strand
gcuucaaguuggcaaagga

SEQ ID NO: 1774982 - RNA, 19 nt, Homo sapiens
  misc_RNA (1)...(19): siRNA sense strand
aagacugugugcuuauuau

SEQ ID NO: 1774983 - RNA, 19 nt, Homo sapiens
  misc_RNA (1)...(19): siRNA sense strand
ucaugaacacccucagaaa

SEQ ID NO: 1774984 - RNA, 19 nt, Homo sapiens
  misc_RNA (1)...(19): siRNA sense strand
acuucucccuugaaagaua

SEQ ID NO: 1774985 - RNA, 19 nt, Homo sapiens
  misc_RNA (1)...(19): siRNA sense strand
gggccuccuuccacacuau

SEQ ID NO: 1774986 - RNA, 19 nt, Homo sapiens
  misc_RNA (1)...(19): siRNA sense strand
gggaagugaugacgauagc

SEQ ID NO: 1774987 - RNA, 19 nt, Homo sapiens
  misc_RNA (1)...(19): siRNA sense strand
gcucaugaacacccucaga

SEQ ID NO: 1774988 - RNA, 19 nt, Homo sapiens
  misc_RNA (1)...(19): siRNA sense strand
cuucucccuugaaagauaa

SEQ ID NO: 1774989 - RNA, 19 nt, Homo sapiens
  misc_RNA (1)...(19): siRNA sense strand
cagaaaugacuugcaguug

SEQ ID NO: 1774990 - RNA, 19 nt, Homo sapiens
  misc_RNA (1)...(19): siRNA sense strand
ccacacuauucguuaugau

SEQ ID NO: 1774991 - RNA, 19 nt, Homo sapiens
  misc_RNA (1)...(19): siRNA sense strand
uaaaccagcaucuauagac

SEQ ID NO: 1774992 - RNA, 19 nt, Homo sapiens
  misc_RNA (1)...(19): siRNA sense strand
agaaagacugugugcuuau

SEQ ID NO: 1774993 - RNA, 19 nt, Homo sapiens
  misc_RNA (1)...(19): siRNA sense strand
ggauccacaccacccauga

SEQ ID NO: 1774994 - RNA, 19 nt, Homo sapiens
  misc_RNA (1)...(19): siRNA sense strand
gcugaaguugacauuauug

SEQ ID NO: 1774995 - RNA, 19 nt, Homo sapiens
  misc_RNA (1)...(19): siRNA sense strand
aaacucaguagcagcauuc

SEQ ID NO: 1774996 - RNA, 19 nt, Homo sapiens
  misc_RNA (1)...(19): siRNA sense strand
gaugaagucacaauuacac

SEQ ID NO: 1774997 - RNA, 19 nt, Homo sapiens
  misc_RNA (1)...(19): siRNA sense strand
cagugacagugaugacuag

SEQ ID NO: 1774998 - RNA, 19 nt, Homo sapiens
  misc_RNA (1)...(19): siRNA sense strand
caccacccaugacuguguu

SEQ ID NO: 1774999 - RNA, 19 nt, Homo sapiens
  misc_RNA (1)...(19): siRNA sense strand
caaguuggcaaaggagaug

SEQ ID NO: 1775000 - RNA, 19 nt, Homo sapiens
  misc_RNA (1)...(19): siRNA sense strand
cacacuauucguuaugauu

SEQ ID NO: 1775001 - RNA, 19 nt, Homo sapiens
  misc_RNA (1)...(19): siRNA sense strand
ugagugagucuggcaguga

SEQ ID NO: 1775002 - RNA, 19 nt, Homo sapiens
  misc_RNA (1)...(19): siRNA sense strand
gacuugcaguugagugagu

SEQ ID NO: 1775003 - RNA, 19 nt, Homo sapiens
  misc_RNA (1)...(19): siRNA sense strand
augaacacccucagaaaug

SEQ ID NO: 1775004 - RNA, 19 nt, Homo sapiens
  misc_RNA (1)...(19): siRNA sense strand
uggcaaaggagaugaaguc

SEQ ID NO: 1775005 - RNA, 19 nt, Homo sapiens
  misc_RNA (1)...(19): siRNA sense strand
aaacggccuuaccagaaag

SEQ ID NO: 1775006 - RNA, 19 nt, Homo sapiens
  misc_RNA (1)...(19): siRNA sense strand
gcaguggaggcgaggacaa

SEQ ID NO: 1775007 - RNA, 19 nt, Homo sapiens
  misc_RNA (1)...(19): siRNA sense strand
cuuccacacuauucguuau

SEQ ID NO: 1775008 - RNA, 19 nt, Homo sapiens
  misc_RNA (1)...(19): siRNA sense strand
gauaaccccucaccugaac

SEQ ID NO: 1775009 - RNA, 19 nt, Homo sapiens
  misc_RNA (1)...(19): siRNA sense strand
ccuaaacgaugcuauauuu

SEQ ID NO: 1775010 - RNA, 19 nt, Homo sapiens
  misc_RNA (1)...(19): siRNA sense strand
gaaagguccauauugguua

SEQ ID NO: 1775011 - RNA, 19 nt, Homo sapiens
  misc_RNA (1)...(19): siRNA sense strand
ggaaagguccauauugguu

SEQ ID NO: 1775012 - RNA, 19 nt, Homo sapiens
  misc_RNA (1)...(19): siRNA sense strand
gaugagauggugauuguga

SEQ ID NO: 1775013 - RNA, 19 nt, Homo sapiens
  misc_RNA (1)...(19): siRNA sense strand
ucacuugguuccauuuguu

SEQ ID NO: 1775014 - RNA, 19 nt, Homo sapiens
  misc_RNA (1)...(19): siRNA sense strand
gagcaucacuugguuccau

SEQ ID NO: 1775015 - RNA, 19 nt, Homo sapiens
  misc_RNA (1)...(19): siRNA sense strand
cauauugguuaucuuccua

SEQ ID NO: 1775016 - RNA, 19 nt, Homo sapiens
  misc_RNA (1)...(19): siRNA sense strand
ucucagauguccuaaacga

SEQ ID NO: 1775017 - RNA, 19 nt, Homo sapiens
  misc_RNA (1)...(19): siRNA sense strand
ggcaagggcugcucaagac

SEQ ID NO: 1775018 - RNA, 19 nt, Homo sapiens
  misc_RNA (1)...(19): siRNA sense strand
aaugcgagguguacagaaa

SEQ ID NO: 1775019 - RNA, 19 nt, Homo sapiens
  misc_RNA (1)...(19): siRNA sense strand
gaugcuauauuugaugaag

SEQ ID NO: 1775020 - RNA, 19 nt, Homo sapiens
  misc_RNA (1)...(19): siRNA sense strand
aaagguccauauugguuau

SEQ ID NO: 1775021 - RNA, 19 nt, Homo sapiens
  misc_RNA (1)...(19): siRNA sense strand
augaugagauggugauugu

SEQ ID NO: 1775022 - RNA, 19 nt, Homo sapiens
  misc_RNA (1)...(19): siRNA sense strand
caaguucaggagcgccuua

SEQ ID NO: 1775023 - RNA, 19 nt, Homo sapiens
  misc_RNA (1)...(19): siRNA sense strand
ccaugcaguucuucaccaa

SEQ ID NO: 1775024 - RNA, 19 nt, Homo sapiens
  misc_RNA (1)...(19): siRNA sense strand
gcagcgaggaggauaacga

SEQ ID NO: 1775025 - RNA, 19 nt, Homo sapiens
  misc_RNA (1)...(19): siRNA sense strand
acgaugcuauauuugauga

SEQ ID NO: 1775026 - RNA, 19 nt, Homo sapiens
  misc_RNA (1)...(19): siRNA sense strand
uugcgaggauuguagaaau

SEQ ID NO: 1775027 - RNA, 19 nt, Homo sapiens
  misc_RNA (1)...(19): siRNA sense strand
gagcugaaccucccuaacc

SEQ ID NO: 1775028 - RNA, 19 nt, Homo sapiens
  misc_RNA (1)...(19): siRNA sense strand
guaaugcgagguguacaga

SEQ ID NO: 1775029 - RNA, 19 nt, Homo sapiens
  misc_RNA (1)...(19): siRNA sense strand
uguccuaaacgaugcuaua

SEQ ID NO: 1775030 - RNA, 19 nt, Homo sapiens
  misc_RNA (1)...(19): siRNA sense strand
guucaggagcgccuuacaa

SEQ ID NO: 1775031 - RNA, 19 nt, Homo sapiens
  misc_RNA (1)...(19): siRNA sense strand
cggcaagggcugcucaaga

SEQ ID NO: 1775032 - RNA, 19 nt, Homo sapiens
  misc_RNA (1)...(19): siRNA sense strand
agauggugauugugaagga

SEQ ID NO: 1775033 - RNA, 19 nt, Homo sapiens
  misc_RNA (1)...(19): siRNA sense strand
guuccugacucucauuagg

SEQ ID NO: 1775034 - RNA, 19 nt, Homo sapiens
  misc_RNA (1)...(19): siRNA sense strand
caaacuugcgaggauugua

SEQ ID NO: 1775035 - RNA, 19 nt, Homo sapiens
  misc_RNA (1)...(19): siRNA sense strand
gaaaaugaacagcaaaacu

SEQ ID NO: 1775036 - RNA, 19 nt, Homo sapiens
  misc_RNA (1)...(19): siRNA sense strand
ccucggccaugcaguucuu

SEQ ID NO: 1775037 - RNA, 19 nt, Homo sapiens
  misc_RNA (1)...(19): siRNA sense strand
gcaucacuugguuccauuu

SEQ ID NO: 1775038 - RNA, 19 nt, Homo sapiens
  misc_RNA (1)...(19): siRNA sense strand
aaacuugcgaggauuguag

SEQ ID NO: 1775039 - RNA, 19 nt, Homo sapiens
  misc_RNA (1)...(19): siRNA sense strand
cuaaacgaugcuauauuug

SEQ ID NO: 1775040 - RNA, 19 nt, Homo sapiens
  misc_RNA (1)...(19): siRNA sense strand
gguccauauugguuaucuu

SEQ ID NO: 1775041 - RNA, 19 nt, Homo sapiens
  misc_RNA (1)...(19): siRNA sense strand
uucaggagcgccuuacaaa

SEQ ID NO: 1775042 - RNA, 19 nt, Homo sapiens
  misc_RNA (1)...(19): siRNA sense strand
guccauauugguuaucuuc

SEQ ID NO: 1775043 - RNA, 19 nt, Homo sapiens
  misc_RNA (1)...(19): siRNA sense strand
caacgaaacucuggaaauu

SEQ ID NO: 1775044 - RNA, 19 nt, Homo sapiens
  misc_RNA (1)...(19): siRNA sense strand
gacuauaccuccauucaua

SEQ ID NO: 1775045 - RNA, 19 nt, Homo sapiens
  misc_RNA (1)...(19): siRNA sense strand
gaaaguggauaaggaauau

SEQ ID NO: 1775046 - RNA, 19 nt, Homo sapiens
  misc_RNA (1)...(19): siRNA sense strand
gaaaucacauaguaaccua

SEQ ID NO: 1775047 - RNA, 19 nt, Homo sapiens
  misc_RNA (1)...(19): siRNA sense strand
caugagaaaucacauagua

SEQ ID NO: 1775048 - RNA, 19 nt, Homo sapiens
  misc_RNA (1)...(19): siRNA sense strand
ggaaagaaugcccugauua

SEQ ID NO: 1775049 - RNA, 19 nt, Homo sapiens
  misc_RNA (1)...(19): siRNA sense strand
caacaucaguuccagugua

SEQ ID NO: 1775050 - RNA, 19 nt, Homo sapiens
  misc_RNA (1)...(19): siRNA sense strand
gaaagaaugcccugauuau

SEQ ID NO: 1775051 - RNA, 19 nt, Homo sapiens
  misc_RNA (1)...(19): siRNA sense strand
ucaccaagcugcccauauu

SEQ ID NO: 1775052 - RNA, 19 nt, Homo sapiens
  misc_RNA (1)...(19): siRNA sense strand
ggaagcagaucucuuaugc

SEQ ID NO: 1775053 - RNA, 19 nt, Homo sapiens
  misc_RNA (1)...(19): siRNA sense strand
gcaaccagauccacccauu

SEQ ID NO: 1775054 - RNA, 19 nt, Homo sapiens
  misc_RNA (1)...(19): siRNA sense strand
uaacagugaugcuauuugu

SEQ ID NO: 1775055 - RNA, 19 nt, Homo sapiens
  misc_RNA (1)...(19): siRNA sense strand
ggaugguucuggaguauga

SEQ ID NO: 1775056 - RNA, 19 nt, Homo sapiens
  misc_RNA (1)...(19): siRNA sense strand
uaacucaccuuaucaugau

SEQ ID NO: 1775057 - RNA, 19 nt, Homo sapiens
  misc_RNA (1)...(19): siRNA sense strand
ccauacagcuguucuauac

SEQ ID NO: 1775058 - RNA, 19 nt, Homo sapiens
  misc_RNA (1)...(19): siRNA sense strand
ggacaaugccuacuucugu

SEQ ID NO: 1775059 - RNA, 19 nt, Homo sapiens
  misc_RNA (1)...(19): siRNA sense strand
gaacacaaucuuagccauu

SEQ ID NO: 1775060 - RNA, 19 nt, Homo sapiens
  misc_RNA (1)...(19): siRNA sense strand
gaaggaacacucaagaaug

SEQ ID NO: 1775061 - RNA, 19 nt, Homo sapiens
  misc_RNA (1)...(19): siRNA sense strand
ucagugaggugcucuaugu

SEQ ID NO: 1775062 - RNA, 19 nt, Homo sapiens
  misc_RNA (1)...(19): siRNA sense strand
caaguucacugucaaacau

SEQ ID NO: 1775063 - RNA, 19 nt, Homo sapiens
  misc_RNA (1)...(19): siRNA sense strand
gcacagaccaacugaacaa

SEQ ID NO: 1775064 - RNA, 19 nt, Homo sapiens
  misc_RNA (1)...(19): siRNA sense strand
caacuggacuuuacugaac

SEQ ID NO: 1775065 - RNA, 19 nt, Homo sapiens
  misc_RNA (1)...(19): siRNA sense strand
ggaggugaacacaaucuua

SEQ ID NO: 1775066 - RNA, 19 nt, Homo sapiens
  misc_RNA (1)...(19): siRNA sense strand
caaugcagauauucagaaa

SEQ ID NO: 1775067 - RNA, 19 nt, Homo sapiens
  misc_RNA (1)...(19): siRNA sense strand
gaagauuucuacuuuccau

SEQ ID NO: 1775068 - RNA, 19 nt, Homo sapiens
  misc_RNA (1)...(19): siRNA sense strand
agaaugcccugauuauguu

SEQ ID NO: 1775069 - RNA, 19 nt, Homo sapiens
  misc_RNA (1)...(19): siRNA sense strand
caagaaaacuuccuuaugg

SEQ ID NO: 1775070 - RNA, 19 nt, Homo sapiens
  misc_RNA (1)...(19): siRNA sense strand
ccacagggccucauacuca

SEQ ID NO: 1775071 - RNA, 19 nt, Homo sapiens
  misc_RNA (1)...(19): siRNA sense strand
uagaggaggugaacacaau

SEQ ID NO: 1775072 - RNA, 19 nt, Homo sapiens
  misc_RNA (1)...(19): siRNA sense strand
gcuaagcaauccaaguuca

SEQ ID NO: 1775073 - RNA, 19 nt, Homo sapiens
  misc_RNA (1)...(19): siRNA sense strand
acgaaacucuggaaauuau

SEQ ID NO: 1775074 - RNA, 19 nt, Homo sapiens
  misc_RNA (1)...(19): siRNA sense strand
acacauacagccaagcuua

SEQ ID NO: 1775075 - RNA, 19 nt, Homo sapiens
  misc_RNA (1)...(19): siRNA sense strand
gcagugaccaugagaaauc

SEQ ID NO: 1775076 - RNA, 19 nt, Homo sapiens
  misc_RNA (1)...(19): siRNA sense strand
gagccuaaauucaccaagu

SEQ ID NO: 1775077 - RNA, 19 nt, Homo sapiens
  misc_RNA (1)...(19): siRNA sense strand
agaauggacucaagaaugg

SEQ ID NO: 1775078 - RNA, 19 nt, Homo sapiens
  misc_RNA (1)...(19): siRNA sense strand
cacaaccacuuccuacuga

SEQ ID NO: 1775079 - RNA, 19 nt, Homo sapiens
  misc_RNA (1)...(19): siRNA sense strand
ugaaaguggauaaggaaua

SEQ ID NO: 1775080 - RNA, 19 nt, Homo sapiens
  misc_RNA (1)...(19): siRNA sense strand
caagaggacauuuacauca

SEQ ID NO: 1775081 - RNA, 19 nt, Homo sapiens
  misc_RNA (1)...(19): siRNA sense strand
ggaaucagacacagacaga

SEQ ID NO: 1775082 - RNA, 19 nt, Homo sapiens
  misc_RNA (1)...(19): siRNA sense strand
ggacguaccagcuguugug

SEQ ID NO: 1775083 - RNA, 19 nt, Homo sapiens
  misc_RNA (1)...(19): siRNA sense strand
ugucaaacaucgacuuuua

SEQ ID NO: 1775084 - RNA, 19 nt, Homo sapiens
  misc_RNA (1)...(19): siRNA sense strand
aaacaaaccacaaccacuu

SEQ ID NO: 1775085 - RNA, 19 nt, Homo sapiens
  misc_RNA (1)...(19): siRNA sense strand
gaguuucucucaucaugug

SEQ ID NO: 1775086 - RNA, 19 nt, Homo sapiens
  misc_RNA (1)...(19): siRNA sense strand
gauggacccuauauugaca

SEQ ID NO: 1775087 - RNA, 19 nt, Homo sapiens
  misc_RNA (1)...(19): siRNA sense strand
uuccauggcucuuaauuau

SEQ ID NO: 1775088 - RNA, 19 nt, Homo sapiens
  misc_RNA (1)...(19): siRNA sense strand
uggaaagaaugcccugauu

SEQ ID NO: 1775089 - RNA, 19 nt, Homo sapiens
  misc_RNA (1)...(19): siRNA sense strand
caagguugaaucacacaua

SEQ ID NO: 1775090 - RNA, 19 nt, Homo sapiens
  misc_RNA (1)...(19): siRNA sense strand
ggauaaggaauaugaagug

SEQ ID NO: 1775091 - RNA, 19 nt, Homo sapiens
  misc_RNA (1)...(19): siRNA sense strand
gcuguuacuuuaauucauc

SEQ ID NO: 1775092 - RNA, 19 nt, Homo sapiens
  misc_RNA (1)...(19): siRNA sense strand
cagcuaagcaauccaaguu

SEQ ID NO: 1775093 - RNA, 19 nt, Homo sapiens
  misc_RNA (1)...(19): siRNA sense strand
gaaauagugcaaccagauc

SEQ ID NO: 1775094 - RNA, 19 nt, Homo sapiens
  misc_RNA (1)...(19): siRNA sense strand
ugaacaaaaucaugccuua

SEQ ID NO: 1775095 - RNA, 19 nt, Homo sapiens
  misc_RNA (1)...(19): siRNA sense strand
ugaaggagcugagucaacu

SEQ ID NO: 1775096 - RNA, 19 nt, Homo sapiens
  misc_RNA (1)...(19): siRNA sense strand
gacccuauauugacaacau

SEQ ID NO: 1775097 - RNA, 19 nt, Homo sapiens
  misc_RNA (1)...(19): siRNA sense strand
ggaaaaugauggacccuau

SEQ ID NO: 1775098 - RNA, 19 nt, Homo sapiens
  misc_RNA (1)...(19): siRNA sense strand
cauugaaaguggauaagga

SEQ ID NO: 1775099 - RNA, 19 nt, Homo sapiens
  misc_RNA (1)...(19): siRNA sense strand
gauggcgacucuggacgua

SEQ ID NO: 1775100 - RNA, 19 nt, Homo sapiens
  misc_RNA (1)...(19): siRNA sense strand
acucuuggguugaauuuau

SEQ ID NO: 1775101 - RNA, 19 nt, Homo sapiens
  misc_RNA (1)...(19): siRNA sense strand
aaggaacacucaagaaugg

SEQ ID NO: 1775102 - RNA, 19 nt, Homo sapiens
  misc_RNA (1)...(19): siRNA sense strand
ggugaaggauggcgacucu

SEQ ID NO: 1775103 - RNA, 19 nt, Homo sapiens
  misc_RNA (1)...(19): siRNA sense strand
gaccaugagaaaucacaua

SEQ ID NO: 1775104 - RNA, 19 nt, Homo sapiens
  misc_RNA (1)...(19): siRNA sense strand
ccaucuggauaccuuauug

SEQ ID NO: 1775105 - RNA, 19 nt, Homo sapiens
  misc_RNA (1)...(19): siRNA sense strand
agacaaauucuucuaagga

SEQ ID NO: 1775106 - RNA, 19 nt, Homo sapiens
  misc_RNA (1)...(19): siRNA sense strand
cuaaacagcaaaggauuaa

SEQ ID NO: 1775107 - RNA, 19 nt, Homo sapiens
  misc_RNA (1)...(19): siRNA sense strand
ucuaaacagcaaaggauua

SEQ ID NO: 1775108 - RNA, 19 nt, Homo sapiens
  misc_RNA (1)...(19): siRNA sense strand
ccaauuuacaugugaagaa

SEQ ID NO: 1775109 - RNA, 19 nt, Homo sapiens
  misc_RNA (1)...(19): siRNA sense strand
aagaaugcccugauuaugu

SEQ ID NO: 1775110 - RNA, 19 nt, Homo sapiens
  misc_RNA (1)...(19): siRNA sense strand
acauuuacaucaccacaga

SEQ ID NO: 1775111 - RNA, 19 nt, Homo sapiens
  misc_RNA (1)...(19): siRNA sense strand
gagccaauuuacaugugaa

SEQ ID NO: 1775112 - RNA, 19 nt, Homo sapiens
  misc_RNA (1)...(19): siRNA sense strand
cagaugagccaauuuacau

SEQ ID NO: 1775113 - RNA, 19 nt, Homo sapiens
  misc_RNA (1)...(19): siRNA sense strand
aaugauggacccuauauug

SEQ ID NO: 1775114 - RNA, 19 nt, Homo sapiens
  misc_RNA (1)...(19): siRNA sense strand
gcagauauccaagugagau

SEQ ID NO: 1775115 - RNA, 19 nt, Homo sapiens
  misc_RNA (1)...(19): siRNA sense strand
guguuucucuguugaugaa

SEQ ID NO: 1775116 - RNA, 19 nt, Homo sapiens
  misc_RNA (1)...(19): siRNA sense strand
gacacagacagacuucuaa

SEQ ID NO: 1775117 - RNA, 19 nt, Homo sapiens
  misc_RNA (1)...(19): siRNA sense strand
caauuuacaugugaagaag

SEQ ID NO: 1775118 - RNA, 19 nt, Homo sapiens
  misc_RNA (1)...(19): siRNA sense strand
gaaauuauggcgaguucag

SEQ ID NO: 1775119 - RNA, 19 nt, Homo sapiens
  misc_RNA (1)...(19): siRNA sense strand
gaaccuaggacccauacag

SEQ ID NO: 1775120 - RNA, 19 nt, Homo sapiens
  misc_RNA (1)...(19): siRNA sense strand
ccaguguacucauugaaag

SEQ ID NO: 1775121 - RNA, 19 nt, Homo sapiens
  misc_RNA (1)...(19): siRNA sense strand
gcccucaacuggacuuuac

SEQ ID NO: 1775122 - RNA, 19 nt, Homo sapiens
  misc_RNA (1)...(19): siRNA sense strand
gaggugaacacaaucuuag

SEQ ID NO: 1775123 - RNA, 19 nt, Homo sapiens
  misc_RNA (1)...(19): siRNA sense strand
gagcacagaccaacugaac

SEQ ID NO: 1775124 - RNA, 19 nt, Homo sapiens
  misc_RNA (1)...(19): siRNA sense strand
caccugagcgagagacuuu

SEQ ID NO: 1775125 - RNA, 19 nt, Homo sapiens
  misc_RNA (1)...(19): siRNA sense strand
gguugaauuuauugagcua

SEQ ID NO: 1775126 - RNA, 19 nt, Homo sapiens
  misc_RNA (1)...(19): siRNA sense strand
ccagaaggaacacucaaga

SEQ ID NO: 1775127 - RNA, 19 nt, Homo sapiens
  misc_RNA (1)...(19): siRNA sense strand
gcccuugccugacaaagag

SEQ ID NO: 1775128 - RNA, 19 nt, Homo sapiens
  misc_RNA (1)...(19): siRNA sense strand
caauccaaguucacuguca

SEQ ID NO: 1775129 - RNA, 19 nt, Homo sapiens
  misc_RNA (1)...(19): siRNA sense strand
acagugaugcuauuuguau

SEQ ID NO: 1775130 - RNA, 19 nt, Homo sapiens
  misc_RNA (1)...(19): siRNA sense strand
acucaagaauggaaagaau

SEQ ID NO: 1775131 - RNA, 19 nt, Homo sapiens
  misc_RNA (1)...(19): siRNA sense strand
agaaggaacacucaagaau

SEQ ID NO: 1775132 - RNA, 19 nt, Homo sapiens
  misc_RNA (1)...(19): siRNA sense strand
aagaauggacucaagaaug

SEQ ID NO: 1775133 - RNA, 19 nt, Homo sapiens
  misc_RNA (1)...(19): siRNA sense strand
agacacagacagacuucua

SEQ ID NO: 1775134 - RNA, 19 nt, Homo sapiens
  misc_RNA (1)...(19): siRNA sense strand
aaacaacgaaacucuggaa

SEQ ID NO: 1775135 - RNA, 19 nt, Homo sapiens
  misc_RNA (1)...(19): siRNA sense strand
gaaaaugauggacccuaua

SEQ ID NO: 1775136 - RNA, 19 nt, Homo sapiens
  misc_RNA (1)...(19): siRNA sense strand
ccacuggacagaugagguu

SEQ ID NO: 1775137 - RNA, 19 nt, Homo sapiens
  misc_RNA (1)...(19): siRNA sense strand
uaccuccauucauauagua

SEQ ID NO: 1775138 - RNA, 19 nt, Homo sapiens
  misc_RNA (1)...(19): siRNA sense strand
gcagguagugugguccuuu

SEQ ID NO: 1775139 - RNA, 19 nt, Homo sapiens
  misc_RNA (1)...(19): siRNA sense strand
ucuuaugccuugaccagaa

SEQ ID NO: 1775140 - RNA, 19 nt, Homo sapiens
  misc_RNA (1)...(19): siRNA sense strand
gcucagccacagagguuaa

SEQ ID NO: 1775141 - RNA, 19 nt, Homo sapiens
  misc_RNA (1)...(19): siRNA sense strand
ucuggagacugauuucaau

SEQ ID NO: 1775142 - RNA, 19 nt, Homo sapiens
  misc_RNA (1)...(19): siRNA sense strand
gcuauaaacccgaauucca

SEQ ID NO: 1775143 - RNA, 19 nt, Homo sapiens
  misc_RNA (1)...(19): siRNA sense strand
gaaugucacugaauugugu

SEQ ID NO: 1775144 - RNA, 19 nt, Homo sapiens
  misc_RNA (1)...(19): siRNA sense strand
ggagauaaagagugaauuu

SEQ ID NO: 1775145 - RNA, 19 nt, Homo sapiens
  misc_RNA (1)...(19): siRNA sense strand
gcaagaacgugugcuacga

SEQ ID NO: 1775146 - RNA, 19 nt, Homo sapiens
  misc_RNA (1)...(19): siRNA sense strand
gaauuugcauccugcugaa

SEQ ID NO: 1775147 - RNA, 19 nt, Homo sapiens
  misc_RNA (1)...(19): siRNA sense strand
ggacaucgaggagaucaaa

SEQ ID NO: 1775148 - RNA, 19 nt, Homo sapiens
  misc_RNA (1)...(19): siRNA sense strand
gugcuacgaucacuacuuc

SEQ ID NO: 1775149 - RNA, 19 nt, Homo sapiens
  misc_RNA (1)...(19): siRNA sense strand
gagaugagcaggccgacuu

SEQ ID NO: 1775150 - RNA, 19 nt, Homo sapiens
  misc_RNA (1)...(19): siRNA sense strand
ucauguacgucuucuaugu

SEQ ID NO: 1775151 - RNA, 19 nt, Homo sapiens
  misc_RNA (1)...(19): siRNA sense strand
gacaugagaagaagaggaa

SEQ ID NO: 1775152 - RNA, 19 nt, Homo sapiens
  misc_RNA (1)...(19): siRNA sense strand
gagaagaagaggaaguuca

SEQ ID NO: 1775153 - RNA, 19 nt, Homo sapiens
  misc_RNA (1)...(19): siRNA sense strand
gaagaggaaguucaucaag

SEQ ID NO: 1775154 - RNA, 19 nt, Homo sapiens
  misc_RNA (1)...(19): siRNA sense strand
gcauuaugauccucguugu

SEQ ID NO: 1775155 - RNA, 19 nt, Homo sapiens
  misc_RNA (1)...(19): siRNA sense strand
uuaaggacaucgaggagau

SEQ ID NO: 1775156 - RNA, 19 nt, Homo sapiens
  misc_RNA (1)...(19): siRNA sense strand
ccaacacuguggacugcuu

SEQ ID NO: 1775157 - RNA, 19 nt, Homo sapiens
  misc_RNA (1)...(19): siRNA sense strand
gucacugaauuguguuauu

SEQ ID NO: 1775158 - RNA, 19 nt, Homo sapiens
  misc_RNA (1)...(19): siRNA sense strand
caaacacuccaccagcauu

SEQ ID NO: 1775159 - RNA, 19 nt, Homo sapiens
  misc_RNA (1)...(19): siRNA sense strand
guacgucuucuaugucaug

SEQ ID NO: 1775160 - RNA, 19 nt, Homo sapiens
  misc_RNA (1)...(19): siRNA sense strand
gcucaccguccucuucauu

SEQ ID NO: 1775161 - RNA, 19 nt, Homo sapiens
  misc_RNA (1)...(19): siRNA sense strand
ggagacaugagaagaagag

SEQ ID NO: 1775162 - RNA, 19 nt, Homo sapiens
  misc_RNA (1)...(19): siRNA sense strand
ccagaagguccgcaucgaa

SEQ ID NO: 1775163 - RNA, 19 nt, Homo sapiens
  misc_RNA (1)...(19): siRNA sense strand
guucaugauugcagugucu

SEQ ID NO: 1775164 - RNA, 19 nt, Homo sapiens
  misc_RNA (1)...(19): siRNA sense strand
cgucuucuaugucauguac

SEQ ID NO: 1775165 - RNA, 19 nt, Homo sapiens
  misc_RNA (1)...(19): siRNA sense strand
ucacaguguucaugauugc

SEQ ID NO: 1775166 - RNA, 19 nt, Homo sapiens
  misc_RNA (1)...(19): siRNA sense strand
caacacuguggacugcuuu

SEQ ID NO: 1775167 - RNA, 19 nt, Homo sapiens
  misc_RNA (1)...(19): siRNA sense strand
ccaccagcauuggaaagau

SEQ ID NO: 1775168 - RNA, 19 nt, Homo sapiens
  misc_RNA (1)...(19): siRNA sense strand
gcugaaugucacugaauug

SEQ ID NO: 1775169 - RNA, 19 nt, Homo sapiens
  misc_RNA (1)...(19): siRNA sense strand
caccagcauuggaaagauc

SEQ ID NO: 1775170 - RNA, 19 nt, Homo sapiens
  misc_RNA (1)...(19): siRNA sense strand
agagugaauuuaaggacau

SEQ ID NO: 1775171 - RNA, 19 nt, Homo sapiens
  misc_RNA (1)...(19): siRNA sense strand
gcugcaagaacgugugcua

SEQ ID NO: 1775172 - RNA, 19 nt, Homo sapiens
  misc_RNA (1)...(19): siRNA sense strand
aagaagaggaaguucauca

SEQ ID NO: 1775173 - RNA, 19 nt, Homo sapiens
  misc_RNA (1)...(19): siRNA sense strand
caagaacgugugcuacgau

SEQ ID NO: 1775174 - RNA, 19 nt, Homo sapiens
  misc_RNA (1)...(19): siRNA sense strand
aaacacuccaccagcauug

SEQ ID NO: 1775175 - RNA, 19 nt, Homo sapiens
  misc_RNA (1)...(19): siRNA sense strand
gaacgugugcuacgaucac

SEQ ID NO: 1775176 - RNA, 19 nt, Homo sapiens
  misc_RNA (1)...(19): siRNA sense strand
ggccuugucccaacacugu

SEQ ID NO: 1775177 - RNA, 19 nt, Homo sapiens
  misc_RNA (1)...(19): siRNA sense strand
gagcaggccgacuuugucu

SEQ ID NO: 1775178 - RNA, 19 nt, Homo sapiens
  misc_RNA (1)...(19): siRNA sense strand
ugcugaaugucacugaauu

SEQ ID NO: 1775179 - RNA, 19 nt, Homo sapiens
  misc_RNA (1)...(19): siRNA sense strand
gauugcagugucuggaauu

SEQ ID NO: 1775180 - RNA, 19 nt, Homo sapiens
  misc_RNA (1)...(19): siRNA sense strand
acuguggacugcuuugugu

SEQ ID NO: 1775181 - RNA, 19 nt, Homo sapiens
  misc_RNA (1)...(19): siRNA sense strand
cuucauguacgucuucuau

SEQ ID NO: 1775182 - RNA, 19 nt, Homo sapiens
  misc_RNA (1)...(19): siRNA sense strand
gaagaagaggaaguucauc

SEQ ID NO: 1775183 - RNA, 19 nt, Homo sapiens
  misc_RNA (1)...(19): siRNA sense strand
ugauugcagugucuggaau

SEQ ID NO: 1775184 - RNA, 19 nt, Homo sapiens
  misc_RNA (1)...(19): siRNA sense strand
cuacacaagcagcaucuuc

SEQ ID NO: 1775185 - RNA, 19 nt, Homo sapiens
  misc_RNA (1)...(19): siRNA sense strand
agaagaagaggaaguucau

SEQ ID NO: 1775186 - RNA, 19 nt, Homo sapiens
  misc_RNA (1)...(19): siRNA sense strand
ucaccguccucuucauuuu

SEQ ID NO: 1775187 - RNA, 19 nt, Homo sapiens
  misc_RNA (1)...(19): siRNA sense strand
agaagaggaaguucaucaa

SEQ ID NO: 1775188 - RNA, 19 nt, Homo sapiens
  misc_RNA (1)...(19): siRNA sense strand
ccggagacaugagaagaag

SEQ ID NO: 1775189 - RNA, 19 nt, Homo sapiens
  misc_RNA (1)...(19): siRNA sense strand
cuucacaguguucaugauu

SEQ ID NO: 1775190 - RNA, 19 nt, Homo sapiens
  misc_RNA (1)...(19): siRNA sense strand
gaacugagacugaguauuc

SEQ ID NO: 1775191 - RNA, 19 nt, Homo sapiens
  misc_RNA (1)...(19): siRNA sense strand
gcagaacacucaagagaug

SEQ ID NO: 1775192 - RNA, 19 nt, Homo sapiens
  misc_RNA (1)...(19): siRNA sense strand
gaaagaaugucaucuacuc

SEQ ID NO: 1775193 - RNA, 19 nt, Homo sapiens
  misc_RNA (1)...(19): siRNA sense strand
caacagccacguccacuua

SEQ ID NO: 1775194 - RNA, 19 nt, Homo sapiens
  misc_RNA (1)...(19): siRNA sense strand
gcuauacccucaucaauca

SEQ ID NO: 1775195 - RNA, 19 nt, Homo sapiens
  misc_RNA (1)...(19): siRNA sense strand
cagaaucuccucucacuuu

SEQ ID NO: 1775196 - RNA, 19 nt, Homo sapiens
  misc_RNA (1)...(19): siRNA sense strand
gaagaguacuaugagaaug

SEQ ID NO: 1775197 - RNA, 19 nt, Homo sapiens
  misc_RNA (1)...(19): siRNA sense strand
cagaggagcugugcuauac

SEQ ID NO: 1775198 - RNA, 19 nt, Homo sapiens
  misc_RNA (1)...(19): siRNA sense strand
gaacuucucaugccucaca

SEQ ID NO: 1775199 - RNA, 19 nt, Homo sapiens
  misc_RNA (1)...(19): siRNA sense strand
cccagaagaugaauaugaa

SEQ ID NO: 1775200 - RNA, 19 nt, Homo sapiens
  misc_RNA (1)...(19): siRNA sense strand
cagcagaacacucaagaga

SEQ ID NO: 1775201 - RNA, 19 nt, Homo sapiens
  misc_RNA (1)...(19): siRNA sense strand
gcugaagaguacuaugaga

SEQ ID NO: 1775202 - RNA, 19 nt, Homo sapiens
  misc_RNA (1)...(19): siRNA sense strand
aaacagagaacauccagau

SEQ ID NO: 1775203 - RNA, 19 nt, Homo sapiens
  misc_RNA (1)...(19): siRNA sense strand
gaguauucacuucuacaua

SEQ ID NO: 1775204 - RNA, 19 nt, Homo sapiens
  misc_RNA (1)...(19): siRNA sense strand
gaggaacugagacugagua

SEQ ID NO: 1775205 - RNA, 19 nt, Homo sapiens
  misc_RNA (1)...(19): siRNA sense strand
gagacugaguauucacuuc

SEQ ID NO: 1775206 - RNA, 19 nt, Homo sapiens
  misc_RNA (1)...(19): siRNA sense strand
ucucaugccucacagaauc

SEQ ID NO: 1775207 - RNA, 19 nt, Homo sapiens
  misc_RNA (1)...(19): siRNA sense strand
gacugaguauucacuucua

SEQ ID NO: 1775208 - RNA, 19 nt, Homo sapiens
  misc_RNA (1)...(19): siRNA sense strand
ugagaauguucccugcaaa

SEQ ID NO: 1775209 - RNA, 19 nt, Homo sapiens
  misc_RNA (1)...(19): siRNA sense strand
guauucacuucuacauaug

SEQ ID NO: 1775210 - RNA, 19 nt, Homo sapiens
  misc_RNA (1)...(19): siRNA sense strand
ucagaggagcugugcuaua

SEQ ID NO: 1775211 - RNA, 19 nt, Homo sapiens
  misc_RNA (1)...(19): siRNA sense strand
cacagaaucuccucucacu

SEQ ID NO: 1775212 - RNA, 19 nt, Homo sapiens
  misc_RNA (1)...(19): siRNA sense strand
gcugagagacccagagagu

SEQ ID NO: 1775213 - RNA, 19 nt, Homo sapiens
  misc_RNA (1)...(19): siRNA sense strand
ugaagaguacuaugagaau

SEQ ID NO: 1775214 - RNA, 19 nt, Homo sapiens
  misc_RNA (1)...(19): siRNA sense strand
agacucaguuuucccauuu

SEQ ID NO: 1775215 - RNA, 19 nt, Homo sapiens
  misc_RNA (1)...(19): siRNA sense strand
gagaauguucccugcaaag

SEQ ID NO: 1775216 - RNA, 19 nt, Homo sapiens
  misc_RNA (1)...(19): siRNA sense strand
gcaacagccacguccacuu

SEQ ID NO: 1775217 - RNA, 19 nt, Homo sapiens
  misc_RNA (1)...(19): siRNA sense strand
aaucaucggguucucugua

SEQ ID NO: 1775218 - RNA, 19 nt, Homo sapiens
  misc_RNA (1)...(19): siRNA sense strand
cuacauaugccuucuacag

SEQ ID NO: 1775219 - RNA, 19 nt, Homo sapiens
  misc_RNA (1)...(19): siRNA sense strand
gcaaagccccaaacagaga

SEQ ID NO: 1775220 - RNA, 19 nt, Homo sapiens
  misc_RNA (1)...(19): siRNA sense strand
agaguacuaugagaauguu

SEQ ID NO: 1775221 - RNA, 19 nt, Homo sapiens
  misc_RNA (1)...(19): siRNA sense strand
agaaucuccucucacuuuc

SEQ ID NO: 1775222 - RNA, 19 nt, Homo sapiens
  misc_RNA (1)...(19): siRNA sense strand
gaugcugggaucaccauau

SEQ ID NO: 1775223 - RNA, 19 nt, Homo sapiens
  misc_RNA (1)...(19): siRNA sense strand
ggaucaccauaucgcugaa

SEQ ID NO: 1775224 - RNA, 19 nt, Homo sapiens
  misc_RNA (1)...(19): siRNA sense strand
cuacucccauccaggacaa

SEQ ID NO: 1775225 - RNA, 19 nt, Homo sapiens
  misc_RNA (1)...(19): siRNA sense strand
cugcugaagaguacuauga

SEQ ID NO: 1775226 - RNA, 19 nt, Homo sapiens
  misc_RNA (1)...(19): siRNA sense strand
gcaagauucccaaaacgaa

SEQ ID NO: 1775227 - RNA, 19 nt, Homo sapiens
  misc_RNA (1)...(19): siRNA sense strand
uacauaugccuucuacaga

SEQ ID NO: 1775228 - RNA, 19 nt, Homo sapiens
  misc_RNA (1)...(19): siRNA sense strand
gcugugcuauacccucauc

SEQ ID NO: 1775229 - RNA, 19 nt, Homo sapiens
  misc_RNA (1)...(19): siRNA sense strand
acucagaggagcugugcua

SEQ ID NO: 1775230 - RNA, 19 nt, Homo sapiens
  misc_RNA (1)...(19): siRNA sense strand
cugaagaguacuaugagaa

SEQ ID NO: 1775231 - RNA, 19 nt, Homo sapiens
  misc_RNA (1)...(19): siRNA sense strand
gagacucaguuuucccauu

SEQ ID NO: 1775232 - RNA, 19 nt, Homo sapiens
  misc_RNA (1)...(19): siRNA sense strand
agaugaauaugaacuucuc

SEQ ID NO: 1775233 - RNA, 19 nt, Homo sapiens
  misc_RNA (1)...(19): siRNA sense strand
aaucuccucucacuuucug

SEQ ID NO: 1775234 - RNA, 19 nt, Homo sapiens
  misc_RNA (1)...(19): siRNA sense strand
gaauguucccugcaaagcu

SEQ ID NO: 1775235 - RNA, 19 nt, Homo sapiens
  misc_RNA (1)...(19): siRNA sense strand
ggcagcagaacacucaaga

SEQ ID NO: 1775236 - RNA, 19 nt, Homo sapiens
  misc_RNA (1)...(19): siRNA sense strand
gaggcaagauucccaaaac

SEQ ID NO: 1775237 - RNA, 19 nt, Homo sapiens
  misc_RNA (1)...(19): siRNA sense strand
acagccacguccacuuaug

SEQ ID NO: 1775238 - RNA, 19 nt, Homo sapiens
  misc_RNA (1)...(19): siRNA sense strand
ccucucacuuucugcaaca

SEQ ID NO: 1775239 - RNA, 19 nt, Homo sapiens
  misc_RNA (1)...(19): siRNA sense strand
ggaacugagacugaguauu

SEQ ID NO: 1775240 - RNA, 19 nt, Homo sapiens
  misc_RNA (1)...(19): siRNA sense strand
augagaauguucccugcaa

SEQ ID NO: 1775241 - RNA, 19 nt, Homo sapiens
  misc_RNA (1)...(19): siRNA sense strand
gugcuauacccucaucaau

SEQ ID NO: 1775242 - RNA, 19 nt, Homo sapiens
  misc_RNA (1)...(19): siRNA sense strand
ccaaaacgaaaaugaaaga

SEQ ID NO: 1775243 - RNA, 19 nt, Homo sapiens
  misc_RNA (1)...(19): siRNA sense strand
gaagaaagcugugaugaag

SEQ ID NO: 1775244 - RNA, 19 nt, Homo sapiens
  misc_RNA (1)...(19): siRNA sense strand
ggaagguucuguagcuaua

SEQ ID NO: 1775245 - RNA, 19 nt, Homo sapiens
  misc_RNA (1)...(19): siRNA sense strand
caaaugugcuuccagauug

SEQ ID NO: 1775246 - RNA, 19 nt, Homo sapiens
  misc_RNA (1)...(19): siRNA sense strand
gagacaaaccaguauauua

SEQ ID NO: 1775247 - RNA, 19 nt, Homo sapiens
  misc_RNA (1)...(19): siRNA sense strand
gaacaggacccuaaggaaa

SEQ ID NO: 1775248 - RNA, 19 nt, Homo sapiens
  misc_RNA (1)...(19): siRNA sense strand
gcagguagauggaggaaug

SEQ ID NO: 1775249 - RNA, 19 nt, Homo sapiens
  misc_RNA (1)...(19): siRNA sense strand
gccaauaucuggguguuua

SEQ ID NO: 1775250 - RNA, 19 nt, Homo sapiens
  misc_RNA (1)...(19): siRNA sense strand
ucacucaguucaccaauaa

SEQ ID NO: 1775251 - RNA, 19 nt, Homo sapiens
  misc_RNA (1)...(19): siRNA sense strand
gcaaguaggacuaugcuuu

SEQ ID NO: 1775252 - RNA, 19 nt, Homo sapiens
  misc_RNA (1)...(19): siRNA sense strand
ggauguuucuuacuaugua

SEQ ID NO: 1775253 - RNA, 19 nt, Homo sapiens
  misc_RNA (1)...(19): siRNA sense strand
caacauucauucuuuggaa

SEQ ID NO: 1775254 - RNA, 19 nt, Homo sapiens
  misc_RNA (1)...(19): siRNA sense strand
gagacaaucuuggaauuau

SEQ ID NO: 1775255 - RNA, 19 nt, Homo sapiens
  misc_RNA (1)...(19): siRNA sense strand
gaauuccacucagucauuu

SEQ ID NO: 1775256 - RNA, 19 nt, Homo sapiens
  misc_RNA (1)...(19): siRNA sense strand
ggaagaaagcugugaugaa

SEQ ID NO: 1775257 - RNA, 19 nt, Homo sapiens
  misc_RNA (1)...(19): siRNA sense strand
cuaaggaaauucuacauuc

SEQ ID NO: 1775258 - RNA, 19 nt, Homo sapiens
  misc_RNA (1)...(19): siRNA sense strand
auaaagaccucagaagaaa

SEQ ID NO: 1775259 - RNA, 19 nt, Homo sapiens
  misc_RNA (1)...(19): siRNA sense strand
ggaauuccacucagucauu

SEQ ID NO: 1775260 - RNA, 19 nt, Homo sapiens
  misc_RNA (1)...(19): siRNA sense strand
agaaagugguauuccauaa

SEQ ID NO: 1775261 - RNA, 19 nt, Homo sapiens
  misc_RNA (1)...(19): siRNA sense strand
gaaucgagacuguggaauu

SEQ ID NO: 1775262 - RNA, 19 nt, Homo sapiens
  misc_RNA (1)...(19): siRNA sense strand
ggaaugggauaaacaacuc

SEQ ID NO: 1775263 - RNA, 19 nt, Homo sapiens
  misc_RNA (1)...(19): siRNA sense strand
gggauaaucuguggacuca

SEQ ID NO: 1775264 - RNA, 19 nt, Homo sapiens
  misc_RNA (1)...(19): siRNA sense strand
ugagaucuauggccuaaug

SEQ ID NO: 1775265 - RNA, 19 nt, Homo sapiens
  misc_RNA (1)...(19): siRNA sense strand
cacaguggcuuacaaacuu

SEQ ID NO: 1775266 - RNA, 19 nt, Homo sapiens
  misc_RNA (1)...(19): siRNA sense strand
gcagagacaaaccaguaua

SEQ ID NO: 1775267 - RNA, 19 nt, Homo sapiens
  misc_RNA (1)...(19): siRNA sense strand
uauaaagaccucagaagaa

SEQ ID NO: 1775268 - RNA, 19 nt, Homo sapiens
  misc_RNA (1)...(19): siRNA sense strand
aaacuuggacagcucaaua

SEQ ID NO: 1775269 - RNA, 19 nt, Homo sapiens
  misc_RNA (1)...(19): siRNA sense strand
ccacuuagcacuuacuuca

SEQ ID NO: 1775270 - RNA, 19 nt, Homo sapiens
  misc_RNA (1)...(19): siRNA sense strand
gauaaucuguggacucacu

SEQ ID NO: 1775271 - RNA, 19 nt, Homo sapiens
  misc_RNA (1)...(19): siRNA sense strand
gaucuauggccuaaugaaa

SEQ ID NO: 1775272 - RNA, 19 nt, Homo sapiens
  misc_RNA (1)...(19): siRNA sense strand
guuauucgcuggcuaagag

SEQ ID NO: 1775273 - RNA, 19 nt, Homo sapiens
  misc_RNA (1)...(19): siRNA sense strand
aaacaagaguucccaagag

SEQ ID NO: 1775274 - RNA, 19 nt, Homo sapiens
  misc_RNA (1)...(19): siRNA sense strand
gaaaacaugugagaaacuu

SEQ ID NO: 1775275 - RNA, 19 nt, Homo sapiens
  misc_RNA (1)...(19): siRNA sense strand
agacaggccuuccacuuag

SEQ ID NO: 1775276 - RNA, 19 nt, Homo sapiens
  misc_RNA (1)...(19): siRNA sense strand
cauuagaagcuguuuguuu

SEQ ID NO: 1775277 - RNA, 19 nt, Homo sapiens
  misc_RNA (1)...(19): siRNA sense strand
ggaacaggacccuaaggaa

SEQ ID NO: 1775278 - RNA, 19 nt, Homo sapiens
  misc_RNA (1)...(19): siRNA sense strand
aagacaggccuuccacuua

SEQ ID NO: 1775279 - RNA, 19 nt, Homo sapiens
  misc_RNA (1)...(19): siRNA sense strand
gaaauucuacauucugucu

SEQ ID NO: 1775280 - RNA, 19 nt, Homo sapiens
  misc_RNA (1)...(19): siRNA sense strand
agaaagcugugaugaaguc

SEQ ID NO: 1775281 - RNA, 19 nt, Homo sapiens
  misc_RNA (1)...(19): siRNA sense strand
auuagaagcuguuuguuuc

SEQ ID NO: 1775282 - RNA, 19 nt, Homo sapiens
  misc_RNA (1)...(19): siRNA sense strand
acaacucaaucuccagaaa

SEQ ID NO: 1775283 - RNA, 19 nt, Homo sapiens
  misc_RNA (1)...(19): siRNA sense strand
uggcuuauuuggaguuuga

SEQ ID NO: 1775284 - RNA, 19 nt, Homo sapiens
  misc_RNA (1)...(19): siRNA sense strand
aaagaccucagaagaaauu

SEQ ID NO: 1775285 - RNA, 19 nt, Homo sapiens
  misc_RNA (1)...(19): siRNA sense strand
aacaagaguucccaagaga

SEQ ID NO: 1775286 - RNA, 19 nt, Homo sapiens
  misc_RNA (1)...(19): siRNA sense strand
caagacaggccuuccacuu

SEQ ID NO: 1775287 - RNA, 19 nt, Homo sapiens
  misc_RNA (1)...(19): siRNA sense strand
cagaaagugguauuccaua

SEQ ID NO: 1775288 - RNA, 19 nt, Homo sapiens
  misc_RNA (1)...(19): siRNA sense strand
ggaaugaccagcaacaaaa

SEQ ID NO: 1775289 - RNA, 19 nt, Homo sapiens
  misc_RNA (1)...(19): siRNA sense strand
acaaaugugcuuccagauu

SEQ ID NO: 1775290 - RNA, 19 nt, Homo sapiens
  misc_RNA (1)...(19): siRNA sense strand
ggacuaugcuuuucaacau

SEQ ID NO: 1775291 - RNA, 19 nt, Homo sapiens
  misc_RNA (1)...(19): siRNA sense strand
gguguggcuugaucuaaga

SEQ ID NO: 1775292 - RNA, 19 nt, Homo sapiens
  misc_RNA (1)...(19): siRNA sense strand
ggaaagugaaauucguuau

SEQ ID NO: 1775293 - RNA, 19 nt, Homo sapiens
  misc_RNA (1)...(19): siRNA sense strand
uuuccaaacucgagagauu

SEQ ID NO: 1775294 - RNA, 19 nt, Homo sapiens
  misc_RNA (1)...(19): siRNA sense strand
gguuauaugcaccuuauug

SEQ ID NO: 1775295 - RNA, 19 nt, Homo sapiens
  misc_RNA (1)...(19): siRNA sense strand
gguguccacuguacagaug

SEQ ID NO: 1775296 - RNA, 19 nt, Homo sapiens
  misc_RNA (1)...(19): siRNA sense strand
acuauugauucauggcuua

SEQ ID NO: 1775297 - RNA, 19 nt, Homo sapiens
  misc_RNA (1)...(19): siRNA sense strand
ggaguucuucugagaucua

SEQ ID NO: 1775298 - RNA, 19 nt, Homo sapiens
  misc_RNA (1)...(19): siRNA sense strand
gcagcuacaagcagacauu

SEQ ID NO: 1775299 - RNA, 19 nt, Homo sapiens
  misc_RNA (1)...(19): siRNA sense strand
guccggaguucuucugaga

SEQ ID NO: 1775300 - RNA, 19 nt, Homo sapiens
  misc_RNA (1)...(19): siRNA sense strand
gaggaaagugaaauucguu

SEQ ID NO: 1775301 - RNA, 19 nt, Homo sapiens
  misc_RNA (1)...(19): siRNA sense strand
agagacaaucuuggaauua

SEQ ID NO: 1775302 - RNA, 19 nt, Homo sapiens
  misc_RNA (1)...(19): siRNA sense strand
gacaaaccaguauauuaug

SEQ ID NO: 1775303 - RNA, 19 nt, Homo sapiens
  misc_RNA (1)...(19): siRNA sense strand
uggcagagacaaaccagua

SEQ ID NO: 1775304 - RNA, 19 nt, Homo sapiens
  misc_RNA (1)...(19): siRNA sense strand
uaauacaggccauaagugu

SEQ ID NO: 1775305 - RNA, 19 nt, Homo sapiens
  misc_RNA (1)...(19): siRNA sense strand
ucugagaucuauggccuaa

SEQ ID NO: 1775306 - RNA, 19 nt, Homo sapiens
  misc_RNA (1)...(19): siRNA sense strand
guauauaccaguagugaag

SEQ ID NO: 1775307 - RNA, 19 nt, Homo sapiens
  misc_RNA (1)...(19): siRNA sense strand
aaucgagacuguggaauuc

SEQ ID NO: 1775308 - RNA, 19 nt, Homo sapiens
  misc_RNA (1)...(19): siRNA sense strand
cuacuucgucccagcauuu

SEQ ID NO: 1775309 - RNA, 19 nt, Homo sapiens
  misc_RNA (1)...(19): siRNA sense strand
gaaggugugccaauaucug

SEQ ID NO: 1775310 - RNA, 19 nt, Homo sapiens
  misc_RNA (1)...(19): siRNA sense strand
ucaauggguuggguuacaa

SEQ ID NO: 1775311 - RNA, 19 nt, Homo sapiens
  misc_RNA (1)...(19): siRNA sense strand
gaccucagaagaaauugaa

SEQ ID NO: 1775312 - RNA, 19 nt, Homo sapiens
  misc_RNA (1)...(19): siRNA sense strand
uuauaaagaccucagaaga

SEQ ID NO: 1775313 - RNA, 19 nt, Homo sapiens
  misc_RNA (1)...(19): siRNA sense strand
gauguaacaaaugcaagua

SEQ ID NO: 1775314 - RNA, 19 nt, Homo sapiens
  misc_RNA (1)...(19): siRNA sense strand
acaggacccuaaggaaauu

SEQ ID NO: 1775315 - RNA, 19 nt, Homo sapiens
  misc_RNA (1)...(19): siRNA sense strand
uauagcuggugcuguuauu

SEQ ID NO: 1775316 - RNA, 19 nt, Homo sapiens
  misc_RNA (1)...(19): siRNA sense strand
gccuuccacuuagcacuua

SEQ ID NO: 1775317 - RNA, 19 nt, Homo sapiens
  misc_RNA (1)...(19): siRNA sense strand
guaauacaggccauaagug

SEQ ID NO: 1775318 - RNA, 19 nt, Homo sapiens
  misc_RNA (1)...(19): siRNA sense strand
caggauguuucuuacuaug

SEQ ID NO: 1775319 - RNA, 19 nt, Homo sapiens
  misc_RNA (1)...(19): siRNA sense strand
acaggauguuucuuacuau

SEQ ID NO: 1775320 - RNA, 19 nt, Homo sapiens
  misc_RNA (1)...(19): siRNA sense strand
guuugaaccucagauuaau

SEQ ID NO: 1775321 - RNA, 19 nt, Homo sapiens
  misc_RNA (1)...(19): siRNA sense strand
gcaacaaaauucuuaugca

SEQ ID NO: 1775322 - RNA, 19 nt, Homo sapiens
  misc_RNA (1)...(19): siRNA sense strand
gagggaaaccacuguaguc

SEQ ID NO: 1775323 - RNA, 19 nt, Homo sapiens
  misc_RNA (1)...(19): siRNA sense strand
gcccagcgcaagagggaua

SEQ ID NO: 1775324 - RNA, 19 nt, Homo sapiens
  misc_RNA (1)...(19): siRNA sense strand
gcuguuauucgcuggcuaa

SEQ ID NO: 1775325 - RNA, 19 nt, Homo sapiens
  misc_RNA (1)...(19): siRNA sense strand
ggccauaaguguguauuuu

SEQ ID NO: 1775326 - RNA, 19 nt, Homo sapiens
  misc_RNA (1)...(19): siRNA sense strand
aaaaggccguugaagaaaa

SEQ ID NO: 1775327 - RNA, 19 nt, Homo sapiens
  misc_RNA (1)...(19): siRNA sense strand
ggaggaaugaccagcaaca

SEQ ID NO: 1775328 - RNA, 19 nt, Homo sapiens
  misc_RNA (1)...(19): siRNA sense strand
caagaguucccaagagaag

SEQ ID NO: 1775329 - RNA, 19 nt, Homo sapiens
  misc_RNA (1)...(19): siRNA sense strand
ucuguggacucacucaguu

SEQ ID NO: 1775330 - RNA, 19 nt, Homo sapiens
  misc_RNA (1)...(19): siRNA sense strand
accaguauauuaugcuuug

SEQ ID NO: 1775331 - RNA, 19 nt, Homo sapiens
  misc_RNA (1)...(19): siRNA sense strand
acaaaugcaaguaggacua

SEQ ID NO: 1775332 - RNA, 19 nt, Homo sapiens
  misc_RNA (1)...(19): siRNA sense strand
ccuaaggaaauucuacauu

SEQ ID NO: 1775333 - RNA, 19 nt, Homo sapiens
  misc_RNA (1)...(19): siRNA sense strand
cagagacaaaccaguauau

SEQ ID NO: 1775334 - RNA, 19 nt, Homo sapiens
  misc_RNA (1)...(19): siRNA sense strand
gcugugguguggcuugauc

SEQ ID NO: 1775335 - RNA, 19 nt, Homo sapiens
  misc_RNA (1)...(19): siRNA sense strand
aagcugugaugaagucaau

SEQ ID NO: 1775336 - RNA, 19 nt, Homo sapiens
  misc_RNA (1)...(19): siRNA sense strand
caaacuuggcagagacaaa

SEQ ID NO: 1775337 - RNA, 19 nt, Homo sapiens
  misc_RNA (1)...(19): siRNA sense strand
caaaugcaaguaggacuau

SEQ ID NO: 1775338 - RNA, 19 nt, Homo sapiens
  misc_RNA (1)...(19): siRNA sense strand
guaacaaaugcaaguagga

SEQ ID NO: 1775339 - RNA, 19 nt, Homo sapiens
  misc_RNA (1)...(19): siRNA sense strand
gaauuauaaagaccucaga

SEQ ID NO: 1775340 - RNA, 19 nt, Homo sapiens
  misc_RNA (1)...(19): siRNA sense strand
uggaaggugugccaauauc

SEQ ID NO: 1775341 - RNA, 19 nt, Homo sapiens
  misc_RNA (1)...(19): siRNA sense strand
guagugaagcccucaaugc

SEQ ID NO: 1775342 - RNA, 19 nt, Homo sapiens
  misc_RNA (1)...(19): siRNA sense strand
gcagaaggagucggcguau

SEQ ID NO: 1775343 - RNA, 19 nt, Homo sapiens
  misc_RNA (1)...(19): siRNA sense strand
ugaaagccauugacauuug

SEQ ID NO: 1775344 - RNA, 19 nt, Homo sapiens
  misc_RNA (1)...(19): siRNA sense strand
gaacgugagcugcaacauu

SEQ ID NO: 1775345 - RNA, 19 nt, Homo sapiens
  misc_RNA (1)...(19): siRNA sense strand
gcagguagcagauggacua

SEQ ID NO: 1775346 - RNA, 19 nt, Homo sapiens
  misc_RNA (1)...(19): siRNA sense strand
gacaacaaauugcuaagga

SEQ ID NO: 1775347 - RNA, 19 nt, Homo sapiens
  misc_RNA (1)...(19): siRNA sense strand
caacagcuuugguuccauu

SEQ ID NO: 1775348 - RNA, 19 nt, Homo sapiens
  misc_RNA (1)...(19): siRNA sense strand
cuggaaagcuuuggauaua

SEQ ID NO: 1775349 - RNA, 19 nt, Homo sapiens
  misc_RNA (1)...(19): siRNA sense strand
ccauggacuugaagaauuu

SEQ ID NO: 1775350 - RNA, 19 nt, Homo sapiens
  misc_RNA (1)...(19): siRNA sense strand
gagcaucucugcccaaggu

SEQ ID NO: 1775351 - RNA, 19 nt, Homo sapiens
  misc_RNA (1)...(19): siRNA sense strand
cuaaggaucucccggaaug

SEQ ID NO: 1775352 - RNA, 19 nt, Homo sapiens
  misc_RNA (1)...(19): siRNA sense strand
gagaaggacuugagauacu

SEQ ID NO: 1775353 - RNA, 19 nt, Homo sapiens
  misc_RNA (1)...(19): siRNA sense strand
aacgugagcugcaacauuu

SEQ ID NO: 1775354 - RNA, 19 nt, Homo sapiens
  misc_RNA (1)...(19): siRNA sense strand
caagguguccuaugugaaa

SEQ ID NO: 1775355 - RNA, 19 nt, Homo sapiens
  misc_RNA (1)...(19): siRNA sense strand
agacaaccauggacuauag

SEQ ID NO: 1775356 - RNA, 19 nt, Homo sapiens
  misc_RNA (1)...(19): siRNA sense strand
ggagaaggccgcuuuaacu

SEQ ID NO: 1775357 - RNA, 19 nt, Homo sapiens
  misc_RNA (1)...(19): siRNA sense strand
ccucggauuuccuggauaa

SEQ ID NO: 1775358 - RNA, 19 nt, Homo sapiens
  misc_RNA (1)...(19): siRNA sense strand
ccaagaagaucgacaaaau

SEQ ID NO: 1775359 - RNA, 19 nt, Homo sapiens
  misc_RNA (1)...(19): siRNA sense strand
gaaagccauugacauuugg

SEQ ID NO: 1775360 - RNA, 19 nt, Homo sapiens
  misc_RNA (1)...(19): siRNA sense strand
ggaauguccucuacagcau

SEQ ID NO: 1775361 - RNA, 19 nt, Homo sapiens
  misc_RNA (1)...(19): siRNA sense strand
gaucaccacagacaacaaa

SEQ ID NO: 1775362 - RNA, 19 nt, Homo sapiens
  misc_RNA (1)...(19): siRNA sense strand
gagaaggccgcuuuaacuu

SEQ ID NO: 1775363 - RNA, 19 nt, Homo sapiens
  misc_RNA (1)...(19): siRNA sense strand
gaaugggaauguccucuac

SEQ ID NO: 1775364 - RNA, 19 nt, Homo sapiens
  misc_RNA (1)...(19): siRNA sense strand
uagaauaugcugccguuaa

SEQ ID NO: 1775365 - RNA, 19 nt, Homo sapiens
  misc_RNA (1)...(19): siRNA sense strand
gagaggacguccacaacca

SEQ ID NO: 1775366 - RNA, 19 nt, Homo sapiens
  misc_RNA (1)...(19): siRNA sense strand
ucaauacucuucgacucua

SEQ ID NO: 1775367 - RNA, 19 nt, Homo sapiens
  misc_RNA (1)...(19): siRNA sense strand
cccauggccuuccucauuu

SEQ ID NO: 1775368 - RNA, 19 nt, Homo sapiens
  misc_RNA (1)...(19): siRNA sense strand
gacaaaauaucccgcauug

SEQ ID NO: 1775369 - RNA, 19 nt, Homo sapiens
  misc_RNA (1)...(19): siRNA sense strand
gguagcagauggacuaacu

SEQ ID NO: 1775370 - RNA, 19 nt, Homo sapiens
  misc_RNA (1)...(19): siRNA sense strand
ggaaugggaauguccucua

SEQ ID NO: 1775371 - RNA, 19 nt, Homo sapiens
  misc_RNA (1)...(19): siRNA sense strand
ugaauacccugacgacucu

SEQ ID NO: 1775372 - RNA, 19 nt, Homo sapiens
  misc_RNA (1)...(19): siRNA sense strand
cccauggacuugaagaauu

SEQ ID NO: 1775373 - RNA, 19 nt, Homo sapiens
  misc_RNA (1)...(19): siRNA sense strand
ggaaagcuuuggauauacg

SEQ ID NO: 1775374 - RNA, 19 nt, Homo sapiens
  misc_RNA (1)...(19): siRNA sense strand
aagagaaggacuugagaua

SEQ ID NO: 1775375 - RNA, 19 nt, Homo sapiens
  misc_RNA (1)...(19): siRNA sense strand
gaaggaagagaaggacuug

SEQ ID NO: 1775376 - RNA, 19 nt, Homo sapiens
  misc_RNA (1)...(19): siRNA sense strand
cuggaaaccugaccuguuc

SEQ ID NO: 1775377 - RNA, 19 nt, Homo sapiens
  misc_RNA (1)...(19): siRNA sense strand
ggaggaagcggagacauca

SEQ ID NO: 1775378 - RNA, 19 nt, Homo sapiens
  misc_RNA (1)...(19): siRNA sense strand
gaagagaaggacuugagau

SEQ ID NO: 1775379 - RNA, 19 nt, Homo sapiens
  misc_RNA (1)...(19): siRNA sense strand
ggaagagaaggacuugaga

SEQ ID NO: 1775380 - RNA, 19 nt, Homo sapiens
  misc_RNA (1)...(19): siRNA sense strand
ugugaaagccauugacauu

SEQ ID NO: 1775381 - RNA, 19 nt, Homo sapiens
  misc_RNA (1)...(19): siRNA sense strand
ggacguccacaaccaguga

SEQ ID NO: 1775382 - RNA, 19 nt, Homo sapiens
  misc_RNA (1)...(19): siRNA sense strand
gagacaaccauggacuaua

SEQ ID NO: 1775383 - RNA, 19 nt, Homo sapiens
  misc_RNA (1)...(19): siRNA sense strand
guagagaggacguccacaa

SEQ ID NO: 1775384 - RNA, 19 nt, Homo sapiens
  misc_RNA (1)...(19): siRNA sense strand
uccaugagaucaccacaga

SEQ ID NO: 1775385 - RNA, 19 nt, Homo sapiens
  misc_RNA (1)...(19): siRNA sense strand
cccaagguguccuauguga

SEQ ID NO: 1775386 - RNA, 19 nt, Homo sapiens
  misc_RNA (1)...(19): siRNA sense strand
gagaaccuccggauaugau

SEQ ID NO: 1775387 - RNA, 19 nt, Homo sapiens
  misc_RNA (1)...(19): siRNA sense strand
caccacagacaacaaauug

SEQ ID NO: 1775388 - RNA, 19 nt, Homo sapiens
  misc_RNA (1)...(19): siRNA sense strand
gaaaccugaccuguucuuu

SEQ ID NO: 1775389 - RNA, 19 nt, Homo sapiens
  misc_RNA (1)...(19): siRNA sense strand
uguguucucagcccuauua

SEQ ID NO: 1775390 - RNA, 19 nt, Homo sapiens
  misc_RNA (1)...(19): siRNA sense strand
ucaugcaacuggaaagcuu

SEQ ID NO: 1775391 - RNA, 19 nt, Homo sapiens
  misc_RNA (1)...(19): siRNA sense strand
caagaagaucgacaaaaua

SEQ ID NO: 1775392 - RNA, 19 nt, Homo sapiens
  misc_RNA (1)...(19): siRNA sense strand
gugaaagccauugacauuu

SEQ ID NO: 1775393 - RNA, 19 nt, Homo sapiens
  misc_RNA (1)...(19): siRNA sense strand
uaaauucaccugcauugag

SEQ ID NO: 1775394 - RNA, 19 nt, Homo sapiens
  misc_RNA (1)...(19): siRNA sense strand
acauuuggauggcaguuug

SEQ ID NO: 1775395 - RNA, 19 nt, Homo sapiens
  misc_RNA (1)...(19): siRNA sense strand
aaaccugaccuguucuuug

SEQ ID NO: 1775396 - RNA, 19 nt, Homo sapiens
  misc_RNA (1)...(19): siRNA sense strand
ucuacuggaucaucuacaa

SEQ ID NO: 1775397 - RNA, 19 nt, Homo sapiens
  misc_RNA (1)...(19): siRNA sense strand
agaauaugcugccguuaac

SEQ ID NO: 1775398 - RNA, 19 nt, Homo sapiens
  misc_RNA (1)...(19): siRNA sense strand
gcaccaagcacuacaacac

SEQ ID NO: 1775399 - RNA, 19 nt, Homo sapiens
  misc_RNA (1)...(19): siRNA sense strand
gauacugcaccaagcacua

SEQ ID NO: 1775400 - RNA, 19 nt, Homo sapiens
  misc_RNA (1)...(19): siRNA sense strand
gccaggaucaggcccaauu

SEQ ID NO: 1775401 - RNA, 19 nt, Homo sapiens
  misc_RNA (1)...(19): siRNA sense strand
caguuugccugcucuuugu

SEQ ID NO: 1775402 - RNA, 19 nt, Homo sapiens
  misc_RNA (1)...(19): siRNA sense strand
uuggauauacgaugaauga

SEQ ID NO: 1775403 - RNA, 19 nt, Homo sapiens
  misc_RNA (1)...(19): siRNA sense strand
gggagccauuguauucuuc

SEQ ID NO: 1775404 - RNA, 19 nt, Homo sapiens
  misc_RNA (1)...(19): siRNA sense strand
ccacugugcucaccaugac

SEQ ID NO: 1775405 - RNA, 19 nt, Homo sapiens
  misc_RNA (1)...(19): siRNA sense strand
ucucauggaucuccuucug

SEQ ID NO: 1775406 - RNA, 19 nt, Homo sapiens
  misc_RNA (1)...(19): siRNA sense strand
acagggagccgugcaggua

SEQ ID NO: 1775407 - RNA, 19 nt, Homo sapiens
  misc_RNA (1)...(19): siRNA sense strand
ggaaaccugaccuguucuu

SEQ ID NO: 1775408 - RNA, 19 nt, Homo sapiens
  misc_RNA (1)...(19): siRNA sense strand
gaucaggcccaauuuuaaa

SEQ ID NO: 1775409 - RNA, 19 nt, Homo sapiens
  misc_RNA (1)...(19): siRNA sense strand
acaacaaauugcuaaggau

SEQ ID NO: 1775410 - RNA, 19 nt, Homo sapiens
  misc_RNA (1)...(19): siRNA sense strand
acagacaacaaauugcuaa

SEQ ID NO: 1775411 - RNA, 19 nt, Homo sapiens
  misc_RNA (1)...(19): siRNA sense strand
acuauagggucaacaucuu

SEQ ID NO: 1775412 - RNA, 19 nt, Homo sapiens
  misc_RNA (1)...(19): siRNA sense strand
cuaugucacccucggauuu

SEQ ID NO: 1775413 - RNA, 19 nt, Homo sapiens
  misc_RNA (1)...(19): siRNA sense strand
caugagaucaccacagaca

SEQ ID NO: 1775414 - RNA, 19 nt, Homo sapiens
  misc_RNA (1)...(19): siRNA sense strand
gauggguuacuaccugauu

SEQ ID NO: 1775415 - RNA, 19 nt, Homo sapiens
  misc_RNA (1)...(19): siRNA sense strand
cgggagccauuguauucuu

SEQ ID NO: 1775416 - RNA, 19 nt, Homo sapiens
  misc_RNA (1)...(19): siRNA sense strand
ggaggaugaagcuggagaa

SEQ ID NO: 1775417 - RNA, 19 nt, Homo sapiens
  misc_RNA (1)...(19): siRNA sense strand
ggaucaggcccaauuuuaa

SEQ ID NO: 1775418 - RNA, 19 nt, Homo sapiens
  misc_RNA (1)...(19): siRNA sense strand
ugcccaagguguccuaugu

SEQ ID NO: 1775419 - RNA, 19 nt, Homo sapiens
  misc_RNA (1)...(19): siRNA sense strand
ucaccacagacaacaaauu

SEQ ID NO: 1775420 - RNA, 19 nt, Homo sapiens
  misc_RNA (1)...(19): siRNA sense strand
gcuggagaaggccgcuuua

SEQ ID NO: 1775421 - RNA, 19 nt, Homo sapiens
  misc_RNA (1)...(19): siRNA sense strand
caacuggaaagcuuuggau

SEQ ID NO: 1775422 - RNA, 19 nt, Homo sapiens
  misc_RNA (1)...(19): siRNA sense strand
aaccugaccuguucuuugc

SEQ ID NO: 1775423 - RNA, 19 nt, Homo sapiens
  misc_RNA (1)...(19): siRNA sense strand
ugaaggaagagaaggacuu

SEQ ID NO: 1775424 - RNA, 19 nt, Homo sapiens
  misc_RNA (1)...(19): siRNA sense strand
ccgccuggccuauaaugaa

SEQ ID NO: 1775425 - RNA, 19 nt, Homo sapiens
  misc_RNA (1)...(19): siRNA sense strand
agaaggacuugagauacug

SEQ ID NO: 1775426 - RNA, 19 nt, Homo sapiens
  misc_RNA (1)...(19): siRNA sense strand
gcaacuggaaagcuuugga

SEQ ID NO: 1775427 - RNA, 19 nt, Homo sapiens
  misc_RNA (1)...(19): siRNA sense strand
cagcuucaauacucuucga

SEQ ID NO: 1775428 - RNA, 19 nt, Homo sapiens
  misc_RNA (1)...(19): siRNA sense strand
ggacuauagggucaacauc

SEQ ID NO: 1775429 - RNA, 19 nt, Homo sapiens
  misc_RNA (1)...(19): siRNA sense strand
gggccaagaagaucgacaa

SEQ ID NO: 1775430 - RNA, 19 nt, Homo sapiens
  misc_RNA (1)...(19): siRNA sense strand
uggagcggcagauggguua

SEQ ID NO: 1775431 - RNA, 19 nt, Homo sapiens
  misc_RNA (1)...(19): siRNA sense strand
ccaggaucaggcccaauuu

SEQ ID NO: 1775432 - RNA, 19 nt, Homo sapiens
  misc_RNA (1)...(19): siRNA sense strand
acucuucgacucuaccuuu

SEQ ID NO: 1775433 - RNA, 19 nt, Homo sapiens
  misc_RNA (1)...(19): siRNA sense strand
cgccuggccuauaaugaau

SEQ ID NO: 1775434 - RNA, 19 nt, Homo sapiens
  misc_RNA (1)...(19): siRNA sense strand
gacuauagggucaacaucu

SEQ ID NO: 1775435 - RNA, 19 nt, Homo sapiens
  misc_RNA (1)...(19): siRNA sense strand
gaugggcccagccugucua

SEQ ID NO: 1775436 - RNA, 19 nt, Homo sapiens
  misc_RNA (1)...(19): siRNA sense strand
ggaagcggagacaucacaa

SEQ ID NO: 1775437 - RNA, 19 nt, Homo sapiens
  misc_RNA (1)...(19): siRNA sense strand
gccuaggcaucaccacugu

SEQ ID NO: 1775438 - RNA, 19 nt, Homo sapiens
  misc_RNA (1)...(19): siRNA sense strand
ggauuuccuggauaagcua

SEQ ID NO: 1775439 - RNA, 19 nt, Homo sapiens
  misc_RNA (1)...(19): siRNA sense strand
ugagacaaccauggacuau

SEQ ID NO: 1775440 - RNA, 19 nt, Homo sapiens
  misc_RNA (1)...(19): siRNA sense strand
ucaacauguucuacuggau

SEQ ID NO: 1775441 - RNA, 19 nt, Homo sapiens
  misc_RNA (1)...(19): siRNA sense strand
ugauucagauguauauucc

SEQ ID NO: 1775442 - RNA, 19 nt, Homo sapiens
  misc_RNA (1)...(19): siRNA sense strand
ccacagacaacaaauugcu

SEQ ID NO: 1775443 - RNA, 19 nt, Homo sapiens
  misc_RNA (1)...(19): siRNA sense strand
ugaaugaagugcguaauua

SEQ ID NO: 1775444 - RNA, 19 nt, Homo sapiens
  misc_RNA (1)...(19): siRNA sense strand
guaauuaccugaguuguga

SEQ ID NO: 1775445 - RNA, 19 nt, Homo sapiens
  misc_RNA (1)...(19): siRNA sense strand
gaaccuggccuauguuaaa

SEQ ID NO: 1775446 - RNA, 19 nt, Homo sapiens
  misc_RNA (1)...(19): siRNA sense strand
gauaugauuucacgucgua

SEQ ID NO: 1775447 - RNA, 19 nt, Homo sapiens
  misc_RNA (1)...(19): siRNA sense strand
gaacugaauugggaugauu

SEQ ID NO: 1775448 - RNA, 19 nt, Homo sapiens
  misc_RNA (1)...(19): siRNA sense strand
gagcaauugucuacuauga

SEQ ID NO: 1775449 - RNA, 19 nt, Homo sapiens
  misc_RNA (1)...(19): siRNA sense strand
gagaguggccuuauuacua

SEQ ID NO: 1775450 - RNA, 19 nt, Homo sapiens
  misc_RNA (1)...(19): siRNA sense strand
cauaaaugcugcugucaaa

SEQ ID NO: 1775451 - RNA, 19 nt, Homo sapiens
  misc_RNA (1)...(19): siRNA sense strand
gaaaugggcuauaaaucuc

SEQ ID NO: 1775452 - RNA, 19 nt, Homo sapiens
  misc_RNA (1)...(19): siRNA sense strand
cuauaaugcuuccaguuua

SEQ ID NO: 1775453 - RNA, 19 nt, Homo sapiens
  misc_RNA (1)...(19): siRNA sense strand
gaucagaacaguuaacaga

SEQ ID NO: 1775454 - RNA, 19 nt, Homo sapiens
  misc_RNA (1)...(19): siRNA sense strand
gaggugaaauaugggauua

SEQ ID NO: 1775455 - RNA, 19 nt, Homo sapiens
  misc_RNA (1)...(19): siRNA sense strand
gaauugggaugauuauaag

SEQ ID NO: 1775456 - RNA, 19 nt, Homo sapiens
  misc_RNA (1)...(19): siRNA sense strand
gaagagaaccucgacagaa

SEQ ID NO: 1775457 - RNA, 19 nt, Homo sapiens
  misc_RNA (1)...(19): siRNA sense strand
gcaguuauguccucagcaa

SEQ ID NO: 1775458 - RNA, 19 nt, Homo sapiens
  misc_RNA (1)...(19): siRNA sense strand
ggaauccguccucuuguua

SEQ ID NO: 1775459 - RNA, 19 nt, Homo sapiens
  misc_RNA (1)...(19): siRNA sense strand
cuauaaaucucgaucagaa

SEQ ID NO: 1775460 - RNA, 19 nt, Homo sapiens
  misc_RNA (1)...(19): siRNA sense strand
gcaggaauuugacgugaga

SEQ ID NO: 1775461 - RNA, 19 nt, Homo sapiens
  misc_RNA (1)...(19): siRNA sense strand
gaaaauacacuccaugaaa

SEQ ID NO: 1775462 - RNA, 19 nt, Homo sapiens
  misc_RNA (1)...(19): siRNA sense strand
aaacagcccuuguagaaag

SEQ ID NO: 1775463 - RNA, 19 nt, Homo sapiens
  misc_RNA (1)...(19): siRNA sense strand
gaguaucaauguccaaaug

SEQ ID NO: 1775464 - RNA, 19 nt, Homo sapiens
  misc_RNA (1)...(19): siRNA sense strand
gcaggaagcaauugccuaa

SEQ ID NO: 1775465 - RNA, 19 nt, Homo sapiens
  misc_RNA (1)...(19): siRNA sense strand
aauaugggauuaaggagua

SEQ ID NO: 1775466 - RNA, 19 nt, Homo sapiens
  misc_RNA (1)...(19): siRNA sense strand
aaaugaaccuggccuaugu

SEQ ID NO: 1775467 - RNA, 19 nt, Homo sapiens
  misc_RNA (1)...(19): siRNA sense strand
gcacugcuguggauaugau

SEQ ID NO: 1775468 - RNA, 19 nt, Homo sapiens
  misc_RNA (1)...(19): siRNA sense strand
aagcagaggugaaauaugg

SEQ ID NO: 1775469 - RNA, 19 nt, Homo sapiens
  misc_RNA (1)...(19): siRNA sense strand
ggcagaagauaccauaaau

SEQ ID NO: 1775470 - RNA, 19 nt, Homo sapiens
  misc_RNA (1)...(19): siRNA sense strand
ccaaauguguuaucaaugc

SEQ ID NO: 1775471 - RNA, 19 nt, Homo sapiens
  misc_RNA (1)...(19): siRNA sense strand
gcaaaacacaucugaauuu

SEQ ID NO: 1775472 - RNA, 19 nt, Homo sapiens
  misc_RNA (1)...(19): siRNA sense strand
cuucagacauugacaggua

SEQ ID NO: 1775473 - RNA, 19 nt, Homo sapiens
  misc_RNA (1)...(19): siRNA sense strand
gaggugcucuugcaacugu

SEQ ID NO: 1775474 - RNA, 19 nt, Homo sapiens
  misc_RNA (1)...(19): siRNA sense strand
ucaugaaguuggauauuga

SEQ ID NO: 1775475 - RNA, 19 nt, Homo sapiens
  misc_RNA (1)...(19): siRNA sense strand
ucaguuugcucauuacaga

SEQ ID NO: 1775476 - RNA, 19 nt, Homo sapiens
  misc_RNA (1)...(19): siRNA sense strand
ucacagggcaggaauuuga

SEQ ID NO: 1775477 - RNA, 19 nt, Homo sapiens
  misc_RNA (1)...(19): siRNA sense strand
uaggagcaauugucuacua

SEQ ID NO: 1775478 - RNA, 19 nt, Homo sapiens
  misc_RNA (1)...(19): siRNA sense strand
cgacagaagaguuccaauu

SEQ ID NO: 1775479 - RNA, 19 nt, Homo sapiens
  misc_RNA (1)...(19): siRNA sense strand
gaaagggacgauucuuguu

SEQ ID NO: 1775480 - RNA, 19 nt, Homo sapiens
  misc_RNA (1)...(19): siRNA sense strand
agaguggccuuauuacuau

SEQ ID NO: 1775481 - RNA, 19 nt, Homo sapiens
  misc_RNA (1)...(19): siRNA sense strand
cagaagcacuaaauugauc

SEQ ID NO: 1775482 - RNA, 19 nt, Homo sapiens
  misc_RNA (1)...(19): siRNA sense strand
gcaggauuauggacuugaa

SEQ ID NO: 1775483 - RNA, 19 nt, Homo sapiens
  misc_RNA (1)...(19): siRNA sense strand
ggaugaaccuugccauugc

SEQ ID NO: 1775484 - RNA, 19 nt, Homo sapiens
  misc_RNA (1)...(19): siRNA sense strand
ucagcuccauugccuauaa

SEQ ID NO: 1775485 - RNA, 19 nt, Homo sapiens
  misc_RNA (1)...(19): siRNA sense strand
uuucucaguuugcucauua

SEQ ID NO: 1775486 - RNA, 19 nt, Homo sapiens
  misc_RNA (1)...(19): siRNA sense strand
agaaggccaucaugaaguu

SEQ ID NO: 1775487 - RNA, 19 nt, Homo sapiens
  misc_RNA (1)...(19): siRNA sense strand
gacagaagaguuccaauuc

SEQ ID NO: 1775488 - RNA, 19 nt, Homo sapiens
  misc_RNA (1)...(19): siRNA sense strand
ccaauuacauggagguagu

SEQ ID NO: 1775489 - RNA, 19 nt, Homo sapiens
  misc_RNA (1)...(19): siRNA sense strand
caagcuguaugauuugguu

SEQ ID NO: 1775490 - RNA, 19 nt, Homo sapiens
  misc_RNA (1)...(19): siRNA sense strand
cagcagaagcacuaaauug

SEQ ID NO: 1775491 - RNA, 19 nt, Homo sapiens
  misc_RNA (1)...(19): siRNA sense strand
ggaccaaguagaacaguug

SEQ ID NO: 1775492 - RNA, 19 nt, Homo sapiens
  misc_RNA (1)...(19): siRNA sense strand
ugaaaugggcuauaaaucu

SEQ ID NO: 1775493 - RNA, 19 nt, Homo sapiens
  misc_RNA (1)...(19): siRNA sense strand
ugaaauaugggauuaagga

SEQ ID NO: 1775494 - RNA, 19 nt, Homo sapiens
  misc_RNA (1)...(19): siRNA sense strand
ggcaaaagguggccuauug

SEQ ID NO: 1775495 - RNA, 19 nt, Homo sapiens
  misc_RNA (1)...(19): siRNA sense strand
gcagaaggccaucaugaag

SEQ ID NO: 1775496 - RNA, 19 nt, Homo sapiens
  misc_RNA (1)...(19): siRNA sense strand
gaaccucgacagaagaguu

SEQ ID NO: 1775497 - RNA, 19 nt, Homo sapiens
  misc_RNA (1)...(19): siRNA sense strand
gcugaugagugcuauucaa

SEQ ID NO: 1775498 - RNA, 19 nt, Homo sapiens
  misc_RNA (1)...(19): siRNA sense strand
gugccaaccugcuagaaau

SEQ ID NO: 1775499 - RNA, 19 nt, Homo sapiens
  misc_RNA (1)...(19): siRNA sense strand
ccuauaaugcuuccaguuu

SEQ ID NO: 1775500 - RNA, 19 nt, Homo sapiens
  misc_RNA (1)...(19): siRNA sense strand
ucagaacaguuaacagauc

SEQ ID NO: 1775501 - RNA, 19 nt, Homo sapiens
  misc_RNA (1)...(19): siRNA sense strand
gcagaagcacuaaauugau

SEQ ID NO: 1775502 - RNA, 19 nt, Homo sapiens
  misc_RNA (1)...(19): siRNA sense strand
gacauugacagguauaaga

SEQ ID NO: 1775503 - RNA, 19 nt, Homo sapiens
  misc_RNA (1)...(19): siRNA sense strand
cuacugauacuccaacuga

SEQ ID NO: 1775504 - RNA, 19 nt, Homo sapiens
  misc_RNA (1)...(19): siRNA sense strand
ggguaggaaucaagcugua

SEQ ID NO: 1775505 - RNA, 19 nt, Homo sapiens
  misc_RNA (1)...(19): siRNA sense strand
gauccaugguggugugaga

SEQ ID NO: 1775506 - RNA, 19 nt, Homo sapiens
  misc_RNA (1)...(19): siRNA sense strand
cagcguguauuagagagua

SEQ ID NO: 1775507 - RNA, 19 nt, Homo sapiens
  misc_RNA (1)...(19): siRNA sense strand
gcaggaacaacuugaaaca

SEQ ID NO: 1775508 - RNA, 19 nt, Homo sapiens
  misc_RNA (1)...(19): siRNA sense strand
gcagaagauaccauaaaug

SEQ ID NO: 1775509 - RNA, 19 nt, Homo sapiens
  misc_RNA (1)...(19): siRNA sense strand
gguggcaguuaccuuacua

SEQ ID NO: 1775510 - RNA, 19 nt, Homo sapiens
  misc_RNA (1)...(19): siRNA sense strand
cagaagaguuccaauucca

SEQ ID NO: 1775511 - RNA, 19 nt, Homo sapiens
  misc_RNA (1)...(19): siRNA sense strand
ccuacugccuucagacauu

SEQ ID NO: 1775512 - RNA, 19 nt, Homo sapiens
  misc_RNA (1)...(19): siRNA sense strand
gaagcaggaacaacuugaa

SEQ ID NO: 1775513 - RNA, 19 nt, Homo sapiens
  misc_RNA (1)...(19): siRNA sense strand
caaaugaaccuggccuaug

SEQ ID NO: 1775514 - RNA, 19 nt, Homo sapiens
  misc_RNA (1)...(19): siRNA sense strand
cagaagaagauaucaacuu

SEQ ID NO: 1775515 - RNA, 19 nt, Homo sapiens
  misc_RNA (1)...(19): siRNA sense strand
aagagaaccucgacagaag

SEQ ID NO: 1775516 - RNA, 19 nt, Homo sapiens
  misc_RNA (1)...(19): siRNA sense strand
ggugaaauaugggauuaag

SEQ ID NO: 1775517 - RNA, 19 nt, Homo sapiens
  misc_RNA (1)...(19): siRNA sense strand
caaaauggaugauaaagac

SEQ ID NO: 1775518 - RNA, 19 nt, Homo sapiens
  misc_RNA (1)...(19): siRNA sense strand
uuuaggacuuucucaguuu

SEQ ID NO: 1775519 - RNA, 19 nt, Homo sapiens
  misc_RNA (1)...(19): siRNA sense strand
ccaaauggaugaaaauaca

SEQ ID NO: 1775520 - RNA, 19 nt, Homo sapiens
  misc_RNA (1)...(19): siRNA sense strand
gcagugaaagggacgauuc

SEQ ID NO: 1775521 - RNA, 19 nt, Homo sapiens
  misc_RNA (1)...(19): siRNA sense strand
gaguugugauguugaagug

SEQ ID NO: 1775522 - RNA, 19 nt, Homo sapiens
  misc_RNA (1)...(19): siRNA sense strand
gauaaagacgcagcagcua

SEQ ID NO: 1775523 - RNA, 19 nt, Homo sapiens
  misc_RNA (1)...(19): siRNA sense strand
gugagagccaaauguguua

SEQ ID NO: 1775524 - RNA, 19 nt, Homo sapiens
  misc_RNA (1)...(19): siRNA sense strand
cgccuggccuuucuaaaug

SEQ ID NO: 1775525 - RNA, 19 nt, Homo sapiens
  misc_RNA (1)...(19): siRNA sense strand
guacucgccuggccuuucu

SEQ ID NO: 1775526 - RNA, 19 nt, Homo sapiens
  misc_RNA (1)...(19): siRNA sense strand
gcagcagaagcacuaaauu

SEQ ID NO: 1775527 - RNA, 19 nt, Homo sapiens
  misc_RNA (1)...(19): siRNA sense strand
cagaagauaccauaaaugc

SEQ ID NO: 1775528 - RNA, 19 nt, Homo sapiens
  misc_RNA (1)...(19): siRNA sense strand
agugagaguggccuuauua

SEQ ID NO: 1775529 - RNA, 19 nt, Homo sapiens
  misc_RNA (1)...(19): siRNA sense strand
ccauuuaucagcuccauug

SEQ ID NO: 1775530 - RNA, 19 nt, Homo sapiens
  misc_RNA (1)...(19): siRNA sense strand
ggaggaggagcaacaggaa

SEQ ID NO: 1775531 - RNA, 19 nt, Homo sapiens
  misc_RNA (1)...(19): siRNA sense strand
ugacagguauaagaagaga

SEQ ID NO: 1775532 - RNA, 19 nt, Homo sapiens
  misc_RNA (1)...(19): siRNA sense strand
gaguggccuuauuacuaua

SEQ ID NO: 1775533 - RNA, 19 nt, Homo sapiens
  misc_RNA (1)...(19): siRNA sense strand
ugaaagggacgauucuugu

SEQ ID NO: 1775534 - RNA, 19 nt, Homo sapiens
  misc_RNA (1)...(19): siRNA sense strand
gauauugagcaguauagga

SEQ ID NO: 1775535 - RNA, 19 nt, Homo sapiens
  misc_RNA (1)...(19): siRNA sense strand
aaaggaaggguaucuggaa

SEQ ID NO: 1775536 - RNA, 19 nt, Homo sapiens
  misc_RNA (1)...(19): siRNA sense strand
ggaacugaauugggaugau

SEQ ID NO: 1775537 - RNA, 19 nt, Homo sapiens
  misc_RNA (1)...(19): siRNA sense strand
gugucagaauuuccauaua

SEQ ID NO: 1775538 - RNA, 19 nt, Homo sapiens
  misc_RNA (1)...(19): siRNA sense strand
gaaugaagugcguaauuac

SEQ ID NO: 1775539 - RNA, 19 nt, Homo sapiens
  misc_RNA (1)...(19): siRNA sense strand
gauacuccaacugauguua

SEQ ID NO: 1775540 - RNA, 19 nt, Homo sapiens
  misc_RNA (1)...(19): siRNA sense strand
gacgaucgcuggcacuacu

SEQ ID NO: 1775541 - RNA, 19 nt, Homo sapiens
  misc_RNA (1)...(19): siRNA sense strand
cagucuaucucccgaaauc

SEQ ID NO: 1775542 - RNA, 19 nt, Homo sapiens
  misc_RNA (1)...(19): siRNA sense strand
gugaaagggacgauucuug

SEQ ID NO: 1775543 - RNA, 19 nt, Homo sapiens
  misc_RNA (1)...(19): siRNA sense strand
gaaacagacuuaaagcuuu

SEQ ID NO: 1775544 - RNA, 19 nt, Homo sapiens
  misc_RNA (1)...(19): siRNA sense strand
gccaagagcuauuugauga

SEQ ID NO: 1775545 - RNA, 19 nt, Homo sapiens
  misc_RNA (1)...(19): siRNA sense strand
gauaagaccaugaguauug

SEQ ID NO: 1775546 - RNA, 19 nt, Homo sapiens
  misc_RNA (1)...(19): siRNA sense strand
gaacuucccuggucgaaca

SEQ ID NO: 1775547 - RNA, 19 nt, Homo sapiens
  misc_RNA (1)...(19): siRNA sense strand
uauugaaccugaaguguua

SEQ ID NO: 1775548 - RNA, 19 nt, Homo sapiens
  misc_RNA (1)...(19): siRNA sense strand
gaggacagauguaccacua

SEQ ID NO: 1775549 - RNA, 19 nt, Homo sapiens
  misc_RNA (1)...(19): siRNA sense strand
gaagacgauucauuccuuu

SEQ ID NO: 1775550 - RNA, 19 nt, Homo sapiens
  misc_RNA (1)...(19): siRNA sense strand
ggacagauguaccacuaug

SEQ ID NO: 1775551 - RNA, 19 nt, Homo sapiens
  misc_RNA (1)...(19): siRNA sense strand
uguggaagcuguaaaguuu

SEQ ID NO: 1775552 - RNA, 19 nt, Homo sapiens
  misc_RNA (1)...(19): siRNA sense strand
ugacuacgcucaacauguu

SEQ ID NO: 1775553 - RNA, 19 nt, Homo sapiens
  misc_RNA (1)...(19): siRNA sense strand
gaaaucaucaccaaucaga

SEQ ID NO: 1775554 - RNA, 19 nt, Homo sapiens
  misc_RNA (1)...(19): siRNA sense strand
ggaaacagacuuaaagcuu

SEQ ID NO: 1775555 - RNA, 19 nt, Homo sapiens
  misc_RNA (1)...(19): siRNA sense strand
gaaaugggcaaaggcaaua

SEQ ID NO: 1775556 - RNA, 19 nt, Homo sapiens
  misc_RNA (1)...(19): siRNA sense strand
caaagcaguuucacucuca

SEQ ID NO: 1775557 - RNA, 19 nt, Homo sapiens
  misc_RNA (1)...(19): siRNA sense strand
caagagcuauuugaugaaa

SEQ ID NO: 1775558 - RNA, 19 nt, Homo sapiens
  misc_RNA (1)...(19): siRNA sense strand
gauguaagcucuccuccau

SEQ ID NO: 1775559 - RNA, 19 nt, Homo sapiens
  misc_RNA (1)...(19): siRNA sense strand
gagaucauauagacaauca

SEQ ID NO: 1775560 - RNA, 19 nt, Homo sapiens
  misc_RNA (1)...(19): siRNA sense strand
gagaugugauggacuucua

SEQ ID NO: 1775561 - RNA, 19 nt, Homo sapiens
  misc_RNA (1)...(19): siRNA sense strand
gaaauuagaaugaccuaca

SEQ ID NO: 1775562 - RNA, 19 nt, Homo sapiens
  misc_RNA (1)...(19): siRNA sense strand
caaaggcaauaccagguuu

SEQ ID NO: 1775563 - RNA, 19 nt, Homo sapiens
  misc_RNA (1)...(19): siRNA sense strand
ggacuccaaagaaucauua

SEQ ID NO: 1775564 - RNA, 19 nt, Homo sapiens
  misc_RNA (1)...(19): siRNA sense strand
gaccaugaguauugaauuc

SEQ ID NO: 1775565 - RNA, 19 nt, Homo sapiens
  misc_RNA (1)...(19): siRNA sense strand
cuccugaucugauuauuaa

SEQ ID NO: 1775566 - RNA, 19 nt, Homo sapiens
  misc_RNA (1)...(19): siRNA sense strand
gaagagccaagagcuauuu

SEQ ID NO: 1775567 - RNA, 19 nt, Homo sapiens
  misc_RNA (1)...(19): siRNA sense strand
ggauguuucuuauggcauu

SEQ ID NO: 1775568 - RNA, 19 nt, Homo sapiens
  misc_RNA (1)...(19): siRNA sense strand
cagcaucccuuucucaaca

SEQ ID NO: 1775569 - RNA, 19 nt, Homo sapiens
  misc_RNA (1)...(19): siRNA sense strand
ccaaucagauaccaaaaua

SEQ ID NO: 1775570 - RNA, 19 nt, Homo sapiens
  misc_RNA (1)...(19): siRNA sense strand
acaggagucucacaagaaa

SEQ ID NO: 1775571 - RNA, 19 nt, Homo sapiens
  misc_RNA (1)...(19): siRNA sense strand
aauaguuccugcaacguua

SEQ ID NO: 1775572 - RNA, 19 nt, Homo sapiens
  misc_RNA (1)...(19): siRNA sense strand
uggaaggacagcacaauua

SEQ ID NO: 1775573 - RNA, 19 nt, Homo sapiens
  misc_RNA (1)...(19): siRNA sense strand
uagaaugaccuacaucaaa

SEQ ID NO: 1775574 - RNA, 19 nt, Homo sapiens
  misc_RNA (1)...(19): siRNA sense strand
gagcuacugugaagguuuc

SEQ ID NO: 1775575 - RNA, 19 nt, Homo sapiens
  misc_RNA (1)...(19): siRNA sense strand
ugacaaaacucuuggauuc

SEQ ID NO: 1775576 - RNA, 19 nt, Homo sapiens
  misc_RNA (1)...(19): siRNA sense strand
gcaguacuccuggauguuu

SEQ ID NO: 1775577 - RNA, 19 nt, Homo sapiens
  misc_RNA (1)...(19): siRNA sense strand
cuacaggagucucacaaga

SEQ ID NO: 1775578 - RNA, 19 nt, Homo sapiens
  misc_RNA (1)...(19): siRNA sense strand
gaugacaacuugacuucuc

SEQ ID NO: 1775579 - RNA, 19 nt, Homo sapiens
  misc_RNA (1)...(19): siRNA sense strand
gauaauggagaucugguuu

SEQ ID NO: 1775580 - RNA, 19 nt, Homo sapiens
  misc_RNA (1)...(19): siRNA sense strand
gggagaagacgauucauuc

SEQ ID NO: 1775581 - RNA, 19 nt, Homo sapiens
  misc_RNA (1)...(19): siRNA sense strand
guaccacuaugacaugaau

SEQ ID NO: 1775582 - RNA, 19 nt, Homo sapiens
  misc_RNA (1)...(19): siRNA sense strand
guauguuuccucugaguua

SEQ ID NO: 1775583 - RNA, 19 nt, Homo sapiens
  misc_RNA (1)...(19): siRNA sense strand
gcauguacgaccaauguaa

SEQ ID NO: 1775584 - RNA, 19 nt, Homo sapiens
  misc_RNA (1)...(19): siRNA sense strand
ggacagcacaauuaccuau

SEQ ID NO: 1775585 - RNA, 19 nt, Homo sapiens
  misc_RNA (1)...(19): siRNA sense strand
agaagacgauucauuccuu

SEQ ID NO: 1775586 - RNA, 19 nt, Homo sapiens
  misc_RNA (1)...(19): siRNA sense strand
gcuccugaucugauuauua

SEQ ID NO: 1775587 - RNA, 19 nt, Homo sapiens
  misc_RNA (1)...(19): siRNA sense strand
gcaaaggcaauaccagguu

SEQ ID NO: 1775588 - RNA, 19 nt, Homo sapiens
  misc_RNA (1)...(19): siRNA sense strand
gaauacagcaucccuuucu

SEQ ID NO: 1775589 - RNA, 19 nt, Homo sapiens
  misc_RNA (1)...(19): siRNA sense strand
agaaugaccuacaucaaag

SEQ ID NO: 1775590 - RNA, 19 nt, Homo sapiens
  misc_RNA (1)...(19): siRNA sense strand
gaaaagccauugucaagag

SEQ ID NO: 1775591 - RNA, 19 nt, Homo sapiens
  misc_RNA (1)...(19): siRNA sense strand
aaacaaaagugaugggaaa

SEQ ID NO: 1775592 - RNA, 19 nt, Homo sapiens
  misc_RNA (1)...(19): siRNA sense strand
aaucaucaccaaucagaua

SEQ ID NO: 1775593 - RNA, 19 nt, Homo sapiens
  misc_RNA (1)...(19): siRNA sense strand
uagcugaaaucaucaccaa

SEQ ID NO: 1775594 - RNA, 19 nt, Homo sapiens
  misc_RNA (1)...(19): siRNA sense strand
acaccuggaugaccaaaug

SEQ ID NO: 1775595 - RNA, 19 nt, Homo sapiens
  misc_RNA (1)...(19): siRNA sense strand
gaguaucucuguaugaaaa

SEQ ID NO: 1775596 - RNA, 19 nt, Homo sapiens
  misc_RNA (1)...(19): siRNA sense strand
cuucagaacagcaacauuu

SEQ ID NO: 1775597 - RNA, 19 nt, Homo sapiens
  misc_RNA (1)...(19): siRNA sense strand
gaaccugaaguguuauaug

SEQ ID NO: 1775598 - RNA, 19 nt, Homo sapiens
  misc_RNA (1)...(19): siRNA sense strand
ggacugcaagccucucauu

SEQ ID NO: 1775599 - RNA, 19 nt, Homo sapiens
  misc_RNA (1)...(19): siRNA sense strand
ggcugucgcuucucaauca

SEQ ID NO: 1775600 - RNA, 19 nt, Homo sapiens
  misc_RNA (1)...(19): siRNA sense strand
gcagccagaucuguccaaa

SEQ ID NO: 1775601 - RNA, 19 nt, Homo sapiens
  misc_RNA (1)...(19): siRNA sense strand
gcagugaaaugggcaaagg

SEQ ID NO: 1775602 - RNA, 19 nt, Homo sapiens
  misc_RNA (1)...(19): siRNA sense strand
caagaaaccucugaaaauc

SEQ ID NO: 1775603 - RNA, 19 nt, Homo sapiens
  misc_RNA (1)...(19): siRNA sense strand
gagaugacaacuugacuuc

SEQ ID NO: 1775604 - RNA, 19 nt, Homo sapiens
  misc_RNA (1)...(19): siRNA sense strand
ggagcaaauauaauuggua

SEQ ID NO: 1775605 - RNA, 19 nt, Homo sapiens
  misc_RNA (1)...(19): siRNA sense strand
caaaagugaugggaaauga

SEQ ID NO: 1775606 - RNA, 19 nt, Homo sapiens
  misc_RNA (1)...(19): siRNA sense strand
gugauggacuucuauaaaa

SEQ ID NO: 1775607 - RNA, 19 nt, Homo sapiens
  misc_RNA (1)...(19): siRNA sense strand
gaaugacucuacccugcau

SEQ ID NO: 1775608 - RNA, 19 nt, Homo sapiens
  misc_RNA (1)...(19): siRNA sense strand
gaagaaagcauugcaaacc

SEQ ID NO: 1775609 - RNA, 19 nt, Homo sapiens
  misc_RNA (1)...(19): siRNA sense strand
cgaccaguguuccagagaa

SEQ ID NO: 1775610 - RNA, 19 nt, Homo sapiens
  misc_RNA (1)...(19): siRNA sense strand
ggaaggacagcacaauuac

SEQ ID NO: 1775611 - RNA, 19 nt, Homo sapiens
  misc_RNA (1)...(19): siRNA sense strand
cagaacagcaacauuugaa

SEQ ID NO: 1775612 - RNA, 19 nt, Homo sapiens
  misc_RNA (1)...(19): siRNA sense strand
gcugaaaucaucaccaauc

SEQ ID NO: 1775613 - RNA, 19 nt, Homo sapiens
  misc_RNA (1)...(19): siRNA sense strand
gaugugauggacuucuaua

SEQ ID NO: 1775614 - RNA, 19 nt, Homo sapiens
  misc_RNA (1)...(19): siRNA sense strand
uauagacaaucaagugcaa

SEQ ID NO: 1775615 - RNA, 19 nt, Homo sapiens
  misc_RNA (1)...(19): siRNA sense strand
ugaaaauccugguaacaaa

SEQ ID NO: 1775616 - RNA, 19 nt, Homo sapiens
  misc_RNA (1)...(19): siRNA sense strand
ucacaagaaaccucugaaa

SEQ ID NO: 1775617 - RNA, 19 nt, Homo sapiens
  misc_RNA (1)...(19): siRNA sense strand
cugcaagccucucauuuua

SEQ ID NO: 1775618 - RNA, 19 nt, Homo sapiens
  misc_RNA (1)...(19): siRNA sense strand
ucagaccuguugauagaug

SEQ ID NO: 1775619 - RNA, 19 nt, Homo sapiens
  misc_RNA (1)...(19): siRNA sense strand
cagagaaggaguuuccaaa

SEQ ID NO: 1775620 - RNA, 19 nt, Homo sapiens
  misc_RNA (1)...(19): siRNA sense strand
ggcuucagguaucuuauga

SEQ ID NO: 1775621 - RNA, 19 nt, Homo sapiens
  misc_RNA (1)...(19): siRNA sense strand
gaucauauagacaaucaag

SEQ ID NO: 1775622 - RNA, 19 nt, Homo sapiens
  misc_RNA (1)...(19): siRNA sense strand
uauggagucuuaacuugug

SEQ ID NO: 1775623 - RNA, 19 nt, Homo sapiens
  misc_RNA (1)...(19): siRNA sense strand
gacacuaaacccaaaauua

SEQ ID NO: 1775624 - RNA, 19 nt, Homo sapiens
  misc_RNA (1)...(19): siRNA sense strand
ugauguaucuucagaacag

SEQ ID NO: 1775625 - RNA, 19 nt, Homo sapiens
  misc_RNA (1)...(19): siRNA sense strand
ggagaugacaacuugacuu

SEQ ID NO: 1775626 - RNA, 19 nt, Homo sapiens
  misc_RNA (1)...(19): siRNA sense strand
uggauaagaccaugaguau

SEQ ID NO: 1775627 - RNA, 19 nt, Homo sapiens
  misc_RNA (1)...(19): siRNA sense strand
ggaacuuacaccuggauga

SEQ ID NO: 1775628 - RNA, 19 nt, Homo sapiens
  misc_RNA (1)...(19): siRNA sense strand
gaauucagcaggccacuac

SEQ ID NO: 1775629 - RNA, 19 nt, Homo sapiens
  misc_RNA (1)...(19): siRNA sense strand
ucaaugggacuguauaugg

SEQ ID NO: 1775630 - RNA, 19 nt, Homo sapiens
  misc_RNA (1)...(19): siRNA sense strand
ucaccaaucagauaccaaa

SEQ ID NO: 1775631 - RNA, 19 nt, Homo sapiens
  misc_RNA (1)...(19): siRNA sense strand
gaucaugacuacgcucaac

SEQ ID NO: 1775632 - RNA, 19 nt, Homo sapiens
  misc_RNA (1)...(19): siRNA sense strand
caacgguggcaaugugaaa

SEQ ID NO: 1775633 - RNA, 19 nt, Homo sapiens
  misc_RNA (1)...(19): siRNA sense strand
ggaagaaagcauugcaaac

SEQ ID NO: 1775634 - RNA, 19 nt, Homo sapiens
  misc_RNA (1)...(19): siRNA sense strand
cugcuucucucuucaguuc

SEQ ID NO: 1775635 - RNA, 19 nt, Homo sapiens
  misc_RNA (1)...(19): siRNA sense strand
ucauauagacaaucaagug

SEQ ID NO: 1775636 - RNA, 19 nt, Homo sapiens
  misc_RNA (1)...(19): siRNA sense strand
gguaauuaagcaagagaaa

SEQ ID NO: 1775637 - RNA, 19 nt, Homo sapiens
  misc_RNA (1)...(19): siRNA sense strand
gguaaagagacgaaugaga

SEQ ID NO: 1775638 - RNA, 19 nt, Homo sapiens
  misc_RNA (1)...(19): siRNA sense strand
gaaugaccuacaucaaaga

SEQ ID NO: 1775639 - RNA, 19 nt, Homo sapiens
  misc_RNA (1)...(19): siRNA sense strand
ggguggagaucauauagac

SEQ ID NO: 1775640 - RNA, 19 nt, Homo sapiens
  misc_RNA (1)...(19): siRNA sense strand
caauaguuccugcaacguu

SEQ ID NO: 1775641 - RNA, 19 nt, Homo sapiens
  misc_RNA (1)...(19): siRNA sense strand
gaaaauccugguaacaaaa

SEQ ID NO: 1775642 - RNA, 19 nt, Homo sapiens
  misc_RNA (1)...(19): siRNA sense strand
guugauagaugaaaacugu

SEQ ID NO: 1775643 - RNA, 19 nt, Homo sapiens
  misc_RNA (1)...(19): siRNA sense strand
gaaguuggcuaaucucaua

SEQ ID NO: 1775644 - RNA, 19 nt, Homo sapiens
  misc_RNA (1)...(19): siRNA sense strand
gagacaggcuggcuuauua

SEQ ID NO: 1775645 - RNA, 19 nt, Homo sapiens
  misc_RNA (1)...(19): siRNA sense strand
ggaaaucucucaaaggaaa

SEQ ID NO: 1775646 - RNA, 19 nt, Homo sapiens
  misc_RNA (1)...(19): siRNA sense strand
ggaaauggcucucuuaaaa

SEQ ID NO: 1775647 - RNA, 19 nt, Homo sapiens
  misc_RNA (1)...(19): siRNA sense strand
guagaaagauggcacauau

SEQ ID NO: 1775648 - RNA, 19 nt, Homo sapiens
  misc_RNA (1)...(19): siRNA sense strand
caacuuacguaacagauaa

SEQ ID NO: 1775649 - RNA, 19 nt, Homo sapiens
  misc_RNA (1)...(19): siRNA sense strand
cgaaguagccgccaaauaa

SEQ ID NO: 1775650 - RNA, 19 nt, Homo sapiens
  misc_RNA (1)...(19): siRNA sense strand
gaacagagccuccuggaau

SEQ ID NO: 1775651 - RNA, 19 nt, Homo sapiens
  misc_RNA (1)...(19): siRNA sense strand
gcucugauguggaauuuaa

SEQ ID NO: 1775652 - RNA, 19 nt, Homo sapiens
  misc_RNA (1)...(19): siRNA sense strand
uaagggagcuuguccuaaa

SEQ ID NO: 1775653 - RNA, 19 nt, Homo sapiens
  misc_RNA (1)...(19): siRNA sense strand
ccacauggaugcucuuauu

SEQ ID NO: 1775654 - RNA, 19 nt, Homo sapiens
  misc_RNA (1)...(19): siRNA sense strand
uaaagaagcuuccagaucu

SEQ ID NO: 1775655 - RNA, 19 nt, Homo sapiens
  misc_RNA (1)...(19): siRNA sense strand
gcagaagggcuauaaagua

SEQ ID NO: 1775656 - RNA, 19 nt, Homo sapiens
  misc_RNA (1)...(19): siRNA sense strand
caaaugcaguuguuaaaga

SEQ ID NO: 1775657 - RNA, 19 nt, Homo sapiens
  misc_RNA (1)...(19): siRNA sense strand
gcaagaagaagauuauuga

SEQ ID NO: 1775658 - RNA, 19 nt, Homo sapiens
  misc_RNA (1)...(19): siRNA sense strand
gaugaagccuuaaauaaag

SEQ ID NO: 1775659 - RNA, 19 nt, Homo sapiens
  misc_RNA (1)...(19): siRNA sense strand
gaauugaaccgaugggaua

SEQ ID NO: 1775660 - RNA, 19 nt, Homo sapiens
  misc_RNA (1)...(19): siRNA sense strand
gaaacuacauacagcaaga

SEQ ID NO: 1775661 - RNA, 19 nt, Homo sapiens
  misc_RNA (1)...(19): siRNA sense strand
gaacuuugaucuugucauc

SEQ ID NO: 1775662 - RNA, 19 nt, Homo sapiens
  misc_RNA (1)...(19): siRNA sense strand
gaagaugaaucagucacua

SEQ ID NO: 1775663 - RNA, 19 nt, Homo sapiens
  misc_RNA (1)...(19): siRNA sense strand
gaaggaacccuacuagaga

SEQ ID NO: 1775664 - RNA, 19 nt, Homo sapiens
  misc_RNA (1)...(19): siRNA sense strand
cgaaagacuggacuuauua

SEQ ID NO: 1775665 - RNA, 19 nt, Homo sapiens
  misc_RNA (1)...(19): siRNA sense strand
gggccaagauggaggguua

SEQ ID NO: 1775666 - RNA, 19 nt, Homo sapiens
  misc_RNA (1)...(19): siRNA sense strand
gcagaugaagccuuaaaua

SEQ ID NO: 1775667 - RNA, 19 nt, Homo sapiens
  misc_RNA (1)...(19): siRNA sense strand
caacuagcauuucaucaga

SEQ ID NO: 1775668 - RNA, 19 nt, Homo sapiens
  misc_RNA (1)...(19): siRNA sense strand
gaauacgaguugaaaucua

SEQ ID NO: 1775669 - RNA, 19 nt, Homo sapiens
  misc_RNA (1)...(19): siRNA sense strand
cagcagggcuauaauguau

SEQ ID NO: 1775670 - RNA, 19 nt, Homo sapiens
  misc_RNA (1)...(19): siRNA sense strand
caagagaauuugagaagau

SEQ ID NO: 1775671 - RNA, 19 nt, Homo sapiens
  misc_RNA (1)...(19): siRNA sense strand
gcagggcuauaauguauga

SEQ ID NO: 1775672 - RNA, 19 nt, Homo sapiens
  misc_RNA (1)...(19): siRNA sense strand
gaaggaagcagugaugaaa

SEQ ID NO: 1775673 - RNA, 19 nt, Homo sapiens
  misc_RNA (1)...(19): siRNA sense strand
gaagagguacugcaacauu

SEQ ID NO: 1775674 - RNA, 19 nt, Homo sapiens
  misc_RNA (1)...(19): siRNA sense strand
cagaugaagccuuaaauaa

SEQ ID NO: 1775675 - RNA, 19 nt, Homo sapiens
  misc_RNA (1)...(19): siRNA sense strand
ggagggauguaucauugaa

SEQ ID NO: 1775676 - RNA, 19 nt, Homo sapiens
  misc_RNA (1)...(19): siRNA sense strand
ucucauaaaugcugaagaa

SEQ ID NO: 1775677 - RNA, 19 nt, Homo sapiens
  misc_RNA (1)...(19): siRNA sense strand
gaaguagccgccaaauaaa

SEQ ID NO: 1775678 - RNA, 19 nt, Homo sapiens
  misc_RNA (1)...(19): siRNA sense strand
gcaagagaauuugagaaga

SEQ ID NO: 1775679 - RNA, 19 nt, Homo sapiens
  misc_RNA (1)...(19): siRNA sense strand
ugauuugacuguagaauug

SEQ ID NO: 1775680 - RNA, 19 nt, Homo sapiens
  misc_RNA (1)...(19): siRNA sense strand
cagaagggcuauaaaguag

SEQ ID NO: 1775681 - RNA, 19 nt, Homo sapiens
  misc_RNA (1)...(19): siRNA sense strand
uaaaguagcacgaguggaa

SEQ ID NO: 1775682 - RNA, 19 nt, Homo sapiens
  misc_RNA (1)...(19): siRNA sense strand
gaacauucauccgcgagaa

SEQ ID NO: 1775683 - RNA, 19 nt, Homo sapiens
  misc_RNA (1)...(19): siRNA sense strand
aggaagcagugaugaaaua

SEQ ID NO: 1775684 - RNA, 19 nt, Homo sapiens
  misc_RNA (1)...(19): siRNA sense strand
aaggaaaucucucaaagga

SEQ ID NO: 1775685 - RNA, 19 nt, Homo sapiens
  misc_RNA (1)...(19): siRNA sense strand
ucgaaagacuggacuuauu

SEQ ID NO: 1775686 - RNA, 19 nt, Homo sapiens
  misc_RNA (1)...(19): siRNA sense strand
uagaagaccucaugguugu

SEQ ID NO: 1775687 - RNA, 19 nt, Homo sapiens
  misc_RNA (1)...(19): siRNA sense strand
gcagugacauuaaacaacu

SEQ ID NO: 1775688 - RNA, 19 nt, Homo sapiens
  misc_RNA (1)...(19): siRNA sense strand
gaguugaaaucuaccaaga

SEQ ID NO: 1775689 - RNA, 19 nt, Homo sapiens
  misc_RNA (1)...(19): siRNA sense strand
ucucagaacuuugaucuug

SEQ ID NO: 1775690 - RNA, 19 nt, Homo sapiens
  misc_RNA (1)...(19): siRNA sense strand
gaacuugcugagacuauaa

SEQ ID NO: 1775691 - RNA, 19 nt, Homo sapiens
  misc_RNA (1)...(19): siRNA sense strand
guaagcggcuccuaaagca

SEQ ID NO: 1775692 - RNA, 19 nt, Homo sapiens
  misc_RNA (1)...(19): siRNA sense strand
ggugugugcuuuguugaua

SEQ ID NO: 1775693 - RNA, 19 nt, Homo sapiens
  misc_RNA (1)...(19): siRNA sense strand
gaggcacgauguagaaaga

SEQ ID NO: 1775694 - RNA, 19 nt, Homo sapiens
  misc_RNA (1)...(19): siRNA sense strand
ucaugaaacuuuagaaugg

SEQ ID NO: 1775695 - RNA, 19 nt, Homo sapiens
  misc_RNA (1)...(19): siRNA sense strand
gaaaagaaguuggcuaauc

SEQ ID NO: 1775696 - RNA, 19 nt, Homo sapiens
  misc_RNA (1)...(19): siRNA sense strand
uagagaggguugauacuug

SEQ ID NO: 1775697 - RNA, 19 nt, Homo sapiens
  misc_RNA (1)...(19): siRNA sense strand
ggaagugguggcagauuaa

SEQ ID NO: 1775698 - RNA, 19 nt, Homo sapiens
  misc_RNA (1)...(19): siRNA sense strand
aaacagcgcaacagaauug

SEQ ID NO: 1775699 - RNA, 19 nt, Homo sapiens
  misc_RNA (1)...(19): siRNA sense strand
ggaaaucaguccguguuca

SEQ ID NO: 1775700 - RNA, 19 nt, Homo sapiens
  misc_RNA (1)...(19): siRNA sense strand
caaagccuaucaacgaaug

SEQ ID NO: 1775701 - RNA, 19 nt, Homo sapiens
  misc_RNA (1)...(19): siRNA sense strand
uuaaagguaugacuucaga

SEQ ID NO: 1775702 - RNA, 19 nt, Homo sapiens
  misc_RNA (1)...(19): siRNA sense strand
cuggaaggauucaaaguaa

SEQ ID NO: 1775703 - RNA, 19 nt, Homo sapiens
  misc_RNA (1)...(19): siRNA sense strand
cagauucccuggugcagaa

SEQ ID NO: 1775704 - RNA, 19 nt, Homo sapiens
  misc_RNA (1)...(19): siRNA sense strand
agaauaaugucaggugaaa

SEQ ID NO: 1775705 - RNA, 19 nt, Homo sapiens
  misc_RNA (1)...(19): siRNA sense strand
ggaaggauucaaaguaaug

SEQ ID NO: 1775706 - RNA, 19 nt, Homo sapiens
  misc_RNA (1)...(19): siRNA sense strand
ggagggagaucuguaggau

SEQ ID NO: 1775707 - RNA, 19 nt, Homo sapiens
  misc_RNA (1)...(19): siRNA sense strand
aggaagugguggcagauua

SEQ ID NO: 1775708 - RNA, 19 nt, Homo sapiens
  misc_RNA (1)...(19): siRNA sense strand
aagaagggcuguaaacgau

SEQ ID NO: 1775709 - RNA, 19 nt, Homo sapiens
  misc_RNA (1)...(19): siRNA sense strand
uggaauaccuagagaaaca

SEQ ID NO: 1775710 - RNA, 19 nt, Homo sapiens
  misc_RNA (1)...(19): siRNA sense strand
uagaugcagugacauuaaa

SEQ ID NO: 1775711 - RNA, 19 nt, Homo sapiens
  misc_RNA (1)...(19): siRNA sense strand
aaacaagcaacuagcauuu

SEQ ID NO: 1775712 - RNA, 19 nt, Homo sapiens
  misc_RNA (1)...(19): siRNA sense strand
cugaagcuguccauaaauu

SEQ ID NO: 1775713 - RNA, 19 nt, Homo sapiens
  misc_RNA (1)...(19): siRNA sense strand
gguggcagauuaagucuca

SEQ ID NO: 1775714 - RNA, 19 nt, Homo sapiens
  misc_RNA (1)...(19): siRNA sense strand
gaagggucauaucagauuc

SEQ ID NO: 1775715 - RNA, 19 nt, Homo sapiens
  misc_RNA (1)...(19): siRNA sense strand
uggcacauauauccaagua

SEQ ID NO: 1775716 - RNA, 19 nt, Homo sapiens
  misc_RNA (1)...(19): siRNA sense strand
agaaagauggcacauauau

SEQ ID NO: 1775717 - RNA, 19 nt, Homo sapiens
  misc_RNA (1)...(19): siRNA sense strand
caaacaagcaacuagcauu

SEQ ID NO: 1775718 - RNA, 19 nt, Homo sapiens
  misc_RNA (1)...(19): siRNA sense strand
ggaaggaagcagugaugaa

SEQ ID NO: 1775719 - RNA, 19 nt, Homo sapiens
  misc_RNA (1)...(19): siRNA sense strand
ccaaggguacacagacuua

SEQ ID NO: 1775720 - RNA, 19 nt, Homo sapiens
  misc_RNA (1)...(19): siRNA sense strand
aagagguacugcaacauuu

SEQ ID NO: 1775721 - RNA, 19 nt, Homo sapiens
  misc_RNA (1)...(19): siRNA sense strand
gaaacugccagcauacuca

SEQ ID NO: 1775722 - RNA, 19 nt, Homo sapiens
  misc_RNA (1)...(19): siRNA sense strand
cgacuguucuauaacuuug

SEQ ID NO: 1775723 - RNA, 19 nt, Homo sapiens
  misc_RNA (1)...(19): siRNA sense strand
gaagggcuguaaacgauac

SEQ ID NO: 1775724 - RNA, 19 nt, Homo sapiens
  misc_RNA (1)...(19): siRNA sense strand
gagaaacagcgcaacagaa

SEQ ID NO: 1775725 - RNA, 19 nt, Homo sapiens
  misc_RNA (1)...(19): siRNA sense strand
aacagagccuccuggaaua

SEQ ID NO: 1775726 - RNA, 19 nt, Homo sapiens
  misc_RNA (1)...(19): siRNA sense strand
ccagacagcagggcuauaa

SEQ ID NO: 1775727 - RNA, 19 nt, Homo sapiens
  misc_RNA (1)...(19): siRNA sense strand
ggaagaagagauggaggua

SEQ ID NO: 1775728 - RNA, 19 nt, Homo sapiens
  misc_RNA (1)...(19): siRNA sense strand
aagugaaacugccagcaua

SEQ ID NO: 1775729 - RNA, 19 nt, Homo sapiens
  misc_RNA (1)...(19): siRNA sense strand
gauagaguguuuacuagac

SEQ ID NO: 1775730 - RNA, 19 nt, Homo sapiens
  misc_RNA (1)...(19): siRNA sense strand
gaaggucguuuuccugauu

SEQ ID NO: 1775731 - RNA, 19 nt, Homo sapiens
  misc_RNA (1)...(19): siRNA sense strand
caaaaucuccgaaguugua

SEQ ID NO: 1775732 - RNA, 19 nt, Homo sapiens
  misc_RNA (1)...(19): siRNA sense strand
cgccauuguucgagauuua

SEQ ID NO: 1775733 - RNA, 19 nt, Homo sapiens
  misc_RNA (1)...(19): siRNA sense strand
gacugagacuccagaaaug

SEQ ID NO: 1775734 - RNA, 19 nt, Homo sapiens
  misc_RNA (1)...(19): siRNA sense strand
gcgaaguagccgccaaaua

SEQ ID NO: 1775735 - RNA, 19 nt, Homo sapiens
  misc_RNA (1)...(19): siRNA sense strand
aaagcuaagugauggcauu

SEQ ID NO: 1775736 - RNA, 19 nt, Homo sapiens
  misc_RNA (1)...(19): siRNA sense strand
guccauaaauugcugacuu

SEQ ID NO: 1775737 - RNA, 19 nt, Homo sapiens
  misc_RNA (1)...(19): siRNA sense strand
gaagaacggagggauguau

SEQ ID NO: 1775738 - RNA, 19 nt, Homo sapiens
  misc_RNA (1)...(19): siRNA sense strand
guugaaaucuaccaagaag

SEQ ID NO: 1775739 - RNA, 19 nt, Homo sapiens
  misc_RNA (1)...(19): siRNA sense strand
gaaacagcgcaacagaauu

SEQ ID NO: 1775740 - RNA, 19 nt, Homo sapiens
  misc_RNA (1)...(19): siRNA sense strand
cuacauacagcaagaagaa

SEQ ID NO: 1775741 - RNA, 19 nt, Homo sapiens
  misc_RNA (1)...(19): siRNA sense strand
cauagaagaccucaugguu

SEQ ID NO: 1775742 - RNA, 19 nt, Homo sapiens
  misc_RNA (1)...(19): siRNA sense strand
caccaaagccuaucaacga

SEQ ID NO: 1775743 - RNA, 19 nt, Homo sapiens
  misc_RNA (1)...(19): siRNA sense strand
ggguuuggcugaagaaauu

SEQ ID NO: 1775744 - RNA, 19 nt, Homo sapiens
  misc_RNA (1)...(19): siRNA sense strand
aaauaaagcuggacuggau

SEQ ID NO: 1775745 - RNA, 19 nt, Homo sapiens
  misc_RNA (1)...(19): siRNA sense strand
ggaagacgaacaucauuga

SEQ ID NO: 1775746 - RNA, 19 nt, Homo sapiens
  misc_RNA (1)...(19): siRNA sense strand
gcucaacgaucucuacaca

SEQ ID NO: 1775747 - RNA, 19 nt, Homo sapiens
  misc_RNA (1)...(19): siRNA sense strand
gcagagaucgccaacaugu

SEQ ID NO: 1775748 - RNA, 19 nt, Homo sapiens
  misc_RNA (1)...(19): siRNA sense strand
caacauuggugucuaugag

SEQ ID NO: 1775749 - RNA, 19 nt, Homo sapiens
  misc_RNA (1)...(19): siRNA sense strand
cauaguggauggcagauuc

SEQ ID NO: 1775750 - RNA, 19 nt, Homo sapiens
  misc_RNA (1)...(19): siRNA sense strand
caaccuggcuguggucuca

SEQ ID NO: 1775751 - RNA, 19 nt, Homo sapiens
  misc_RNA (1)...(19): siRNA sense strand
gaguguauccuccugauga

SEQ ID NO: 1775752 - RNA, 19 nt, Homo sapiens
  misc_RNA (1)...(19): siRNA sense strand
gcagauucguacucaagau

SEQ ID NO: 1775753 - RNA, 19 nt, Homo sapiens
  misc_RNA (1)...(19): siRNA sense strand
cggcagagaucgccaacau

SEQ ID NO: 1775754 - RNA, 19 nt, Homo sapiens
  misc_RNA (1)...(19): siRNA sense strand
gauggcagauucguacuca

SEQ ID NO: 1775755 - RNA, 19 nt, Homo sapiens
  misc_RNA (1)...(19): siRNA sense strand
guacuuuagugacauugug

SEQ ID NO: 1775756 - RNA, 19 nt, Homo sapiens
  misc_RNA (1)...(19): siRNA sense strand
cuaguaaccuggaggaucu

SEQ ID NO: 1775757 - RNA, 19 nt, Homo sapiens
  misc_RNA (1)...(19): siRNA sense strand
gaagucacggaacugcaua

SEQ ID NO: 1775758 - RNA, 19 nt, Homo sapiens
  misc_RNA (1)...(19): siRNA sense strand
ucaacgaucucuacacacu

SEQ ID NO: 1775759 - RNA, 19 nt, Homo sapiens
  misc_RNA (1)...(19): siRNA sense strand
caaaccgccugaccugcaa

SEQ ID NO: 1775760 - RNA, 19 nt, Homo sapiens
  misc_RNA (1)...(19): siRNA sense strand
gggaucagcacauagcuau

SEQ ID NO: 1775761 - RNA, 19 nt, Homo sapiens
  misc_RNA (1)...(19): siRNA sense strand
caccaucucugccaugagu

SEQ ID NO: 1775762 - RNA, 19 nt, Homo sapiens
  misc_RNA (1)...(19): siRNA sense strand
gaagacagaccggcugcuu

SEQ ID NO: 1775763 - RNA, 19 nt, Homo sapiens
  misc_RNA (1)...(19): siRNA sense strand
caucaucaugcaagaagua

SEQ ID NO: 1775764 - RNA, 19 nt, Homo sapiens
  misc_RNA (1)...(19): siRNA sense strand
caucauugguucccacgau

SEQ ID NO: 1775765 - RNA, 19 nt, Homo sapiens
  misc_RNA (1)...(19): siRNA sense strand
gacaggguuuggcugaaga

SEQ ID NO: 1775766 - RNA, 19 nt, Homo sapiens
  misc_RNA (1)...(19): siRNA sense strand
ucuacaagguggagacaau

SEQ ID NO: 1775767 - RNA, 19 nt, Homo sapiens
  misc_RNA (1)...(19): siRNA sense strand
ccuucgaccuguucaagaa

SEQ ID NO: 1775768 - RNA, 19 nt, Homo sapiens
  misc_RNA (1)...(19): siRNA sense strand
gcaucagccugcaggagau

SEQ ID NO: 1775769 - RNA, 19 nt, Homo sapiens
  misc_RNA (1)...(19): siRNA sense strand
gagacaggguuuggcugaa

SEQ ID NO: 1775770 - RNA, 19 nt, Homo sapiens
  misc_RNA (1)...(19): siRNA sense strand
uccaggagcuccggcauga

SEQ ID NO: 1775771 - RNA, 19 nt, Homo sapiens
  misc_RNA (1)...(19): siRNA sense strand
aagcuggacuggauguuca

SEQ ID NO: 1775772 - RNA, 19 nt, Homo sapiens
  misc_RNA (1)...(19): siRNA sense strand
ccaagacggccuucuccaa

SEQ ID NO: 1775773 - RNA, 19 nt, Homo sapiens
  misc_RNA (1)...(19): siRNA sense strand
agagaucgccaacauguca

SEQ ID NO: 1775774 - RNA, 19 nt, Homo sapiens
  misc_RNA (1)...(19): siRNA sense strand
gcaggucuccccacucuuu

SEQ ID NO: 1775775 - RNA, 19 nt, Homo sapiens
  misc_RNA (1)...(19): siRNA sense strand
cuacaagguggagacaaua

SEQ ID NO: 1775776 - RNA, 19 nt, Homo sapiens
  misc_RNA (1)...(19): siRNA sense strand
caguggagcccgaguacuu

SEQ ID NO: 1775777 - RNA, 19 nt, Homo sapiens
  misc_RNA (1)...(19): siRNA sense strand
cagaccggcugcuuacaca

SEQ ID NO: 1775778 - RNA, 19 nt, Homo sapiens
  misc_RNA (1)...(19): siRNA sense strand
caggagcuccggcaugaga

SEQ ID NO: 1775779 - RNA, 19 nt, Homo sapiens
  misc_RNA (1)...(19): siRNA sense strand
aagacagaccggcugcuua

SEQ ID NO: 1775780 - RNA, 19 nt, Homo sapiens
  misc_RNA (1)...(19): siRNA sense strand
uagcuuggccaucaucaug

SEQ ID NO: 1775781 - RNA, 19 nt, Homo sapiens
  misc_RNA (1)...(19): siRNA sense strand
ccuccucgcucagagagaa

SEQ ID NO: 1775782 - RNA, 19 nt, Homo sapiens
  misc_RNA (1)...(19): siRNA sense strand
gcagagcagccggaacuuc

SEQ ID NO: 1775783 - RNA, 19 nt, Homo sapiens
  misc_RNA (1)...(19): siRNA sense strand
caucaugcaagaaguagug

SEQ ID NO: 1775784 - RNA, 19 nt, Homo sapiens
  misc_RNA (1)...(19): siRNA sense strand
gucuuuagcuuggccauca

SEQ ID NO: 1775785 - RNA, 19 nt, Homo sapiens
  misc_RNA (1)...(19): siRNA sense strand
gcucagagagaaauaaagc

SEQ ID NO: 1775786 - RNA, 19 nt, Homo sapiens
  misc_RNA (1)...(19): siRNA sense strand
cuacuucacaugcaaaugg

SEQ ID NO: 1775787 - RNA, 19 nt, Homo sapiens
  misc_RNA (1)...(19): siRNA sense strand
gcagacgcggcuucaacaa

SEQ ID NO: 1775788 - RNA, 19 nt, Homo sapiens
  misc_RNA (1)...(19): siRNA sense strand
ccgcgguacugccuguuug

SEQ ID NO: 1775789 - RNA, 19 nt, Homo sapiens
  misc_RNA (1)...(19): siRNA sense strand
gcgccacugucccucugaa

SEQ ID NO: 1775790 - RNA, 19 nt, Homo sapiens
  misc_RNA (1)...(19): siRNA sense strand
caaccaagacggccuucuc

SEQ ID NO: 1775791 - RNA, 19 nt, Homo sapiens
  misc_RNA (1)...(19): siRNA sense strand
gaccggcugcuuacacaga

SEQ ID NO: 1775792 - RNA, 19 nt, Homo sapiens
  misc_RNA (1)...(19): siRNA sense strand
cgaacaucauugacucgau

SEQ ID NO: 1775793 - RNA, 19 nt, Homo sapiens
  misc_RNA (1)...(19): siRNA sense strand
gcugcccucugaccucaau

SEQ ID NO: 1775794 - RNA, 19 nt, Homo sapiens
  misc_RNA (1)...(19): siRNA sense strand
gugaggcaccggcuacuuc

SEQ ID NO: 1775795 - RNA, 19 nt, Homo sapiens
  misc_RNA (1)...(19): siRNA sense strand
gaucucuacacacucuuug

SEQ ID NO: 1775796 - RNA, 19 nt, Homo sapiens
  misc_RNA (1)...(19): siRNA sense strand
cggaagacgaacaucauug

SEQ ID NO: 1775797 - RNA, 19 nt, Homo sapiens
  misc_RNA (1)...(19): siRNA sense strand
ucaagggaauaagguaucu

SEQ ID NO: 1775798 - RNA, 19 nt, Homo sapiens
  misc_RNA (1)...(19): siRNA sense strand
ggaccuccucgcucagaga

SEQ ID NO: 1775799 - RNA, 19 nt, Homo sapiens
  misc_RNA (1)...(19): siRNA sense strand
agacaggguuuggcugaag

SEQ ID NO: 1775800 - RNA, 19 nt, Homo sapiens
  misc_RNA (1)...(19): siRNA sense strand
cuaugacgcggucuucuug

SEQ ID NO: 1775801 - RNA, 19 nt, Homo sapiens
  misc_RNA (1)...(19): siRNA sense strand
uaucaagggaauaagguau

SEQ ID NO: 1775802 - RNA, 19 nt, Homo sapiens
  misc_RNA (1)...(19): siRNA sense strand
cggcugaagucacggaacu

SEQ ID NO: 1775803 - RNA, 19 nt, Homo sapiens
  misc_RNA (1)...(19): siRNA sense strand
gcauccacgugaacuugag

SEQ ID NO: 1775804 - RNA, 19 nt, Homo sapiens
  misc_RNA (1)...(19): siRNA sense strand
aggcaccugucgaguguau

SEQ ID NO: 1775805 - RNA, 19 nt, Homo sapiens
  misc_RNA (1)...(19): siRNA sense strand
gcauaguggauggcagauu

SEQ ID NO: 1775806 - RNA, 19 nt, Homo sapiens
  misc_RNA (1)...(19): siRNA sense strand
caacaagcccauccccaaa

SEQ ID NO: 1775807 - RNA, 19 nt, Homo sapiens
  misc_RNA (1)...(19): siRNA sense strand
gagugagcccauugagguu

SEQ ID NO: 1775808 - RNA, 19 nt, Homo sapiens
  misc_RNA (1)...(19): siRNA sense strand
agacagaccggcugcuuac

SEQ ID NO: 1775809 - RNA, 19 nt, Homo sapiens
  misc_RNA (1)...(19): siRNA sense strand
ccacaccuucgaccuguuc

SEQ ID NO: 1775810 - RNA, 19 nt, Homo sapiens
  misc_RNA (1)...(19): siRNA sense strand
gcagaggaguucaccgaua

SEQ ID NO: 1775811 - RNA, 19 nt, Homo sapiens
  misc_RNA (1)...(19): siRNA sense strand
caacaaggacggcuacauu

SEQ ID NO: 1775812 - RNA, 19 nt, Homo sapiens
  misc_RNA (1)...(19): siRNA sense strand
acaagaaguucaugacuga

SEQ ID NO: 1775813 - RNA, 19 nt, Homo sapiens
  misc_RNA (1)...(19): siRNA sense strand
gcaacgugauggagggaaa

SEQ ID NO: 1775814 - RNA, 19 nt, Homo sapiens
  misc_RNA (1)...(19): siRNA sense strand
gauacaguguucuccaaga

SEQ ID NO: 1775815 - RNA, 19 nt, Homo sapiens
  misc_RNA (1)...(19): siRNA sense strand
acacgaagccuggaccuua

SEQ ID NO: 1775816 - RNA, 19 nt, Homo sapiens
  misc_RNA (1)...(19): siRNA sense strand
aacagaagcuccgcuggua

SEQ ID NO: 1775817 - RNA, 19 nt, Homo sapiens
  misc_RNA (1)...(19): siRNA sense strand
acauugauuucauggagua

SEQ ID NO: 1775818 - RNA, 19 nt, Homo sapiens
  misc_RNA (1)...(19): siRNA sense strand
acaguguucuccaagauug

SEQ ID NO: 1775819 - RNA, 19 nt, Homo sapiens
  misc_RNA (1)...(19): siRNA sense strand
gcugguacuucaagcucua

SEQ ID NO: 1775820 - RNA, 19 nt, Homo sapiens
  misc_RNA (1)...(19): siRNA sense strand
cagaggaguucaccgauac

SEQ ID NO: 1775821 - RNA, 19 nt, Homo sapiens
  misc_RNA (1)...(19): siRNA sense strand
aaggacggcuacauugauu

SEQ ID NO: 1775822 - RNA, 19 nt, Homo sapiens
  misc_RNA (1)...(19): siRNA sense strand
ggacggcuacauugauuuc

SEQ ID NO: 1775823 - RNA, 19 nt, Homo sapiens
  misc_RNA (1)...(19): siRNA sense strand
gccaguacguggaacagau

SEQ ID NO: 1775824 - RNA, 19 nt, Homo sapiens
  misc_RNA (1)...(19): siRNA sense strand
guucaccgauacaguguuc

SEQ ID NO: 1775825 - RNA, 19 nt, Homo sapiens
  misc_RNA (1)...(19): siRNA sense strand
gauggcaacggcugcauug

SEQ ID NO: 1775826 - RNA, 19 nt, Homo sapiens
  misc_RNA (1)...(19): siRNA sense strand
caaggacggcuacauugau

SEQ ID NO: 1775827 - RNA, 19 nt, Homo sapiens
  misc_RNA (1)...(19): siRNA sense strand
uagagggcguccagaagga

SEQ ID NO: 1775828 - RNA, 19 nt, Homo sapiens
  misc_RNA (1)...(19): siRNA sense strand
acaaggacggcuacauuga

SEQ ID NO: 1775829 - RNA, 19 nt, Homo sapiens
  misc_RNA (1)...(19): siRNA sense strand
cggcuacauugauuucaug

SEQ ID NO: 1775830 - RNA, 19 nt, Homo sapiens
  misc_RNA (1)...(19): siRNA sense strand
ccgauacaguguucuccaa

SEQ ID NO: 1775831 - RNA, 19 nt, Homo sapiens
  misc_RNA (1)...(19): siRNA sense strand
aagcuccgcugguacuuca

SEQ ID NO: 1775832 - RNA, 19 nt, Homo sapiens
  misc_RNA (1)...(19): siRNA sense strand
acuucaagcucuaugaugu

SEQ ID NO: 1775833 - RNA, 19 nt, Homo sapiens
  misc_RNA (1)...(19): siRNA sense strand
auacaguguucuccaagau

SEQ ID NO: 1775834 - RNA, 19 nt, Homo sapiens
  misc_RNA (1)...(19): siRNA sense strand
guacaagaaguucaugacu

SEQ ID NO: 1775835 - RNA, 19 nt, Homo sapiens
  misc_RNA (1)...(19): siRNA sense strand
guacuucaagcucuaugau

SEQ ID NO: 1775836 - RNA, 19 nt, Homo sapiens
  misc_RNA (1)...(19): siRNA sense strand
ucuaugaguuccgccaguu

SEQ ID NO: 1775837 - RNA, 19 nt, Homo sapiens
  misc_RNA (1)...(19): siRNA sense strand
cacgaagccuggaccuuac

SEQ ID NO: 1775838 - RNA, 19 nt, Homo sapiens
  misc_RNA (1)...(19): siRNA sense strand
cuucaagcucuaugaugua

SEQ ID NO: 1775839 - RNA, 19 nt, Homo sapiens
  misc_RNA (1)...(19): siRNA sense strand
gugcgcaggcuccagaaug

SEQ ID NO: 1775840 - RNA, 19 nt, Homo sapiens
  misc_RNA (1)...(19): siRNA sense strand
aacaaggacggcuacauug

SEQ ID NO: 1775841 - RNA, 19 nt, Homo sapiens
  misc_RNA (1)...(19): siRNA sense strand
gccaacucacccucuauga

SEQ ID NO: 1775842 - RNA, 19 nt, Homo sapiens
  misc_RNA (1)...(19): siRNA sense strand
uuauagagggcguccagaa

SEQ ID NO: 1775843 - RNA, 19 nt, Homo sapiens
  misc_RNA (1)...(19): siRNA sense strand
ggccaacucacccucuaug

SEQ ID NO: 1775844 - RNA, 19 nt, Homo sapiens
  misc_RNA (1)...(19): siRNA sense strand
gguacuucaagcucuauga

SEQ ID NO: 1775845 - RNA, 19 nt, Homo sapiens
  misc_RNA (1)...(19): siRNA sense strand
ccaggccauucgcgccauu

SEQ ID NO: 1775846 - RNA, 19 nt, Homo sapiens
  misc_RNA (1)...(19): siRNA sense strand
gaaauuacaugcaaagaug

SEQ ID NO: 1775847 - RNA, 19 nt, Homo sapiens
  misc_RNA (1)...(19): siRNA sense strand
gaggaaauguguuugaaua

SEQ ID NO: 1775848 - RNA, 19 nt, Homo sapiens
  misc_RNA (1)...(19): siRNA sense strand
gaagugauguguuuaaaug

SEQ ID NO: 1775849 - RNA, 19 nt, Homo sapiens
  misc_RNA (1)...(19): siRNA sense strand
gaagugaacugcucaaugg

SEQ ID NO: 1775850 - RNA, 19 nt, Homo sapiens
  misc_RNA (1)...(19): siRNA sense strand
gagaauggguugcucuuaa

SEQ ID NO: 1775851 - RNA, 19 nt, Homo sapiens
  misc_RNA (1)...(19): siRNA sense strand
ggauauagaucucuuggaa

SEQ ID NO: 1775852 - RNA, 19 nt, Homo sapiens
  misc_RNA (1)...(19): siRNA sense strand
gagaguaccuguggagaua

SEQ ID NO: 1775853 - RNA, 19 nt, Homo sapiens
  misc_RNA (1)...(19): siRNA sense strand
gagaagaaguuacguacaa

SEQ ID NO: 1775854 - RNA, 19 nt, Homo sapiens
  misc_RNA (1)...(19): siRNA sense strand
gugaagugguggaauauua

SEQ ID NO: 1775855 - RNA, 19 nt, Homo sapiens
  misc_RNA (1)...(19): siRNA sense strand
gagaagaaauuacaugcaa

SEQ ID NO: 1775856 - RNA, 19 nt, Homo sapiens
  misc_RNA (1)...(19): siRNA sense strand
cgaauaacauguagaaaug

SEQ ID NO: 1775857 - RNA, 19 nt, Homo sapiens
  misc_RNA (1)...(19): siRNA sense strand
gagaacaggugaaucaguu

SEQ ID NO: 1775858 - RNA, 19 nt, Homo sapiens
  misc_RNA (1)...(19): siRNA sense strand
ugaaggagaugaagaaaug

SEQ ID NO: 1775859 - RNA, 19 nt, Homo sapiens
  misc_RNA (1)...(19): siRNA sense strand
gagaguacguuaucaaugu

SEQ ID NO: 1775860 - RNA, 19 nt, Homo sapiens
  misc_RNA (1)...(19): siRNA sense strand
cgagacagaugaguaaaua

SEQ ID NO: 1775861 - RNA, 19 nt, Homo sapiens
  misc_RNA (1)...(19): siRNA sense strand
gcaagaaagaccaguauaa

SEQ ID NO: 1775862 - RNA, 19 nt, Homo sapiens
  misc_RNA (1)...(19): siRNA sense strand
gaaguuacguacaaauguu

SEQ ID NO: 1775863 - RNA, 19 nt, Homo sapiens
  misc_RNA (1)...(19): siRNA sense strand
gggacuaaauugaguuaua

SEQ ID NO: 1775864 - RNA, 19 nt, Homo sapiens
  misc_RNA (1)...(19): siRNA sense strand
gaaaucacguaccagugua

SEQ ID NO: 1775865 - RNA, 19 nt, Homo sapiens
  misc_RNA (1)...(19): siRNA sense strand
gaacacggaaccauuaauu

SEQ ID NO: 1775866 - RNA, 19 nt, Homo sapiens
  misc_RNA (1)...(19): siRNA sense strand
acacagaacuggagaugaa

SEQ ID NO: 1775867 - RNA, 19 nt, Homo sapiens
  misc_RNA (1)...(19): siRNA sense strand
ggacacagaucaauuacgu

SEQ ID NO: 1775868 - RNA, 19 nt, Homo sapiens
  misc_RNA (1)...(19): siRNA sense strand
ggaaauguguuugaauaug

SEQ ID NO: 1775869 - RNA, 19 nt, Homo sapiens
  misc_RNA (1)...(19): siRNA sense strand
gaagaagugauguguuuaa

SEQ ID NO: 1775870 - RNA, 19 nt, Homo sapiens
  misc_RNA (1)...(19): siRNA sense strand
gaagggaccuaauaaaauu

SEQ ID NO: 1775871 - RNA, 19 nt, Homo sapiens
  misc_RNA (1)...(19): siRNA sense strand
gaaauguguuugaauaugg

SEQ ID NO: 1775872 - RNA, 19 nt, Homo sapiens
  misc_RNA (1)...(19): siRNA sense strand
gcacccaggcuaucuauaa

SEQ ID NO: 1775873 - RNA, 19 nt, Homo sapiens
  misc_RNA (1)...(19): siRNA sense strand
gaaaguuuguacaggguaa

SEQ ID NO: 1775874 - RNA, 19 nt, Homo sapiens
  misc_RNA (1)...(19): siRNA sense strand
uaaggagaaugaacgauuu

SEQ ID NO: 1775875 - RNA, 19 nt, Homo sapiens
  misc_RNA (1)...(19): siRNA sense strand
gcaguacgguuuguaugua

SEQ ID NO: 1775876 - RNA, 19 nt, Homo sapiens
  misc_RNA (1)...(19): siRNA sense strand
gcacaugggacuaaauuga

SEQ ID NO: 1775877 - RNA, 19 nt, Homo sapiens
  misc_RNA (1)...(19): siRNA sense strand
caaaguguguggaaauuuc

SEQ ID NO: 1775878 - RNA, 19 nt, Homo sapiens
  misc_RNA (1)...(19): siRNA sense strand
gaagaaggauguguauaag

SEQ ID NO: 1775879 - RNA, 19 nt, Homo sapiens
  misc_RNA (1)...(19): siRNA sense strand
gaaacaucaggaucaauua

SEQ ID NO: 1775880 - RNA, 19 nt, Homo sapiens
  misc_RNA (1)...(19): siRNA sense strand
gaaagagaaugcgaacuuc

SEQ ID NO: 1775881 - RNA, 19 nt, Homo sapiens
  misc_RNA (1)...(19): siRNA sense strand
ucaauuacguguauucaug

SEQ ID NO: 1775882 - RNA, 19 nt, Homo sapiens
  misc_RNA (1)...(19): siRNA sense strand
gaaagaccaguauaaaguu

SEQ ID NO: 1775883 - RNA, 19 nt, Homo sapiens
  misc_RNA (1)...(19): siRNA sense strand
agaaggaauucgaucauaa

SEQ ID NO: 1775884 - RNA, 19 nt, Homo sapiens
  misc_RNA (1)...(19): siRNA sense strand
guauagauauugagaaugg

SEQ ID NO: 1775885 - RNA, 19 nt, Homo sapiens
  misc_RNA (1)...(19): siRNA sense strand
ccacgugcauuaaaucuug

SEQ ID NO: 1775886 - RNA, 19 nt, Homo sapiens
  misc_RNA (1)...(19): siRNA sense strand
gaccaaugauauuccuaua

SEQ ID NO: 1775887 - RNA, 19 nt, Homo sapiens
  misc_RNA (1)...(19): siRNA sense strand
acagugaagugguggaaua

SEQ ID NO: 1775888 - RNA, 19 nt, Homo sapiens
  misc_RNA (1)...(19): siRNA sense strand
caagaaagaccaguauaaa

SEQ ID NO: 1775889 - RNA, 19 nt, Homo sapiens
  misc_RNA (1)...(19): siRNA sense strand
gcucaacccacgugcauua

SEQ ID NO: 1775890 - RNA, 19 nt, Homo sapiens
  misc_RNA (1)...(19): siRNA sense strand
ugacaaccacacugaauua

SEQ ID NO: 1775891 - RNA, 19 nt, Homo sapiens
  misc_RNA (1)...(19): siRNA sense strand
ggauggagccaguaaugua

SEQ ID NO: 1775892 - RNA, 19 nt, Homo sapiens
  misc_RNA (1)...(19): siRNA sense strand
agauauaccugaacuugaa

SEQ ID NO: 1775893 - RNA, 19 nt, Homo sapiens
  misc_RNA (1)...(19): siRNA sense strand
agaagaaggauguguauaa

SEQ ID NO: 1775894 - RNA, 19 nt, Homo sapiens
  misc_RNA (1)...(19): siRNA sense strand
ggacuaaauugaguuauac

SEQ ID NO: 1775895 - RNA, 19 nt, Homo sapiens
  misc_RNA (1)...(19): siRNA sense strand
aaaccaggauuuacaauag

SEQ ID NO: 1775896 - RNA, 19 nt, Homo sapiens
  misc_RNA (1)...(19): siRNA sense strand
uguaauaucccgagaaauu

SEQ ID NO: 1775897 - RNA, 19 nt, Homo sapiens
  misc_RNA (1)...(19): siRNA sense strand
guuaugggcuauuugugua

SEQ ID NO: 1775898 - RNA, 19 nt, Homo sapiens
  misc_RNA (1)...(19): siRNA sense strand
gcaguaccaugccucagaa

SEQ ID NO: 1775899 - RNA, 19 nt, Homo sapiens
  misc_RNA (1)...(19): siRNA sense strand
caaaccaggauuuacaaua

SEQ ID NO: 1775900 - RNA, 19 nt, Homo sapiens
  misc_RNA (1)...(19): siRNA sense strand
ggagagguguugaaauucu

SEQ ID NO: 1775901 - RNA, 19 nt, Homo sapiens
  misc_RNA (1)...(19): siRNA sense strand
gcuccgagauguaccuuga

SEQ ID NO: 1775902 - RNA, 19 nt, Homo sapiens
  misc_RNA (1)...(19): siRNA sense strand
gaguaccuguggagauaua

SEQ ID NO: 1775903 - RNA, 19 nt, Homo sapiens
  misc_RNA (1)...(19): siRNA sense strand
ggguaaaucuauagacguu

SEQ ID NO: 1775904 - RNA, 19 nt, Homo sapiens
  misc_RNA (1)...(19): siRNA sense strand
uaacucaggcuacaagauu

SEQ ID NO: 1775905 - RNA, 19 nt, Homo sapiens
  misc_RNA (1)...(19): siRNA sense strand
gcgaauaacauguagaaau

SEQ ID NO: 1775906 - RNA, 19 nt, Homo sapiens
  misc_RNA (1)...(19): siRNA sense strand
gaggguaacaagcgaauaa

SEQ ID NO: 1775907 - RNA, 19 nt, Homo sapiens
  misc_RNA (1)...(19): siRNA sense strand
uaggagcccuuaugaaaug

SEQ ID NO: 1775908 - RNA, 19 nt, Homo sapiens
  misc_RNA (1)...(19): siRNA sense strand
gagagaagaaggaugugua

SEQ ID NO: 1775909 - RNA, 19 nt, Homo sapiens
  misc_RNA (1)...(19): siRNA sense strand
gauggaagauggcagucaa

SEQ ID NO: 1775910 - RNA, 19 nt, Homo sapiens
  misc_RNA (1)...(19): siRNA sense strand
ggaaggagaagaaauuaca

SEQ ID NO: 1775911 - RNA, 19 nt, Homo sapiens
  misc_RNA (1)...(19): siRNA sense strand
guaaagagcaaguacaauc

SEQ ID NO: 1775912 - RNA, 19 nt, Homo sapiens
  misc_RNA (1)...(19): siRNA sense strand
gaaauucuccugcaaacca

SEQ ID NO: 1775913 - RNA, 19 nt, Homo sapiens
  misc_RNA (1)...(19): siRNA sense strand
caacccacgugcauuaaau

SEQ ID NO: 1775914 - RNA, 19 nt, Homo sapiens
  misc_RNA (1)...(19): siRNA sense strand
cuugaaaccuugugauuau

SEQ ID NO: 1775915 - RNA, 19 nt, Homo sapiens
  misc_RNA (1)...(19): siRNA sense strand
gagaugaaaucacguacca

SEQ ID NO: 1775916 - RNA, 19 nt, Homo sapiens
  misc_RNA (1)...(19): siRNA sense strand
ggagauauaccugaacuug

SEQ ID NO: 1775917 - RNA, 19 nt, Homo sapiens
  misc_RNA (1)...(19): siRNA sense strand
aaagaaggauggauacaca

SEQ ID NO: 1775918 - RNA, 19 nt, Homo sapiens
  misc_RNA (1)...(19): siRNA sense strand
ggcaauagauaaacuuaag

SEQ ID NO: 1775919 - RNA, 19 nt, Homo sapiens
  misc_RNA (1)...(19): siRNA sense strand
gagauuaauuaccgugaau

SEQ ID NO: 1775920 - RNA, 19 nt, Homo sapiens
  misc_RNA (1)...(19): siRNA sense strand
ccaaacagaagcuuuauuc

SEQ ID NO: 1775921 - RNA, 19 nt, Homo sapiens
  misc_RNA (1)...(19): siRNA sense strand
gaaggaauucgaucauaau

SEQ ID NO: 1775922 - RNA, 19 nt, Homo sapiens
  misc_RNA (1)...(19): siRNA sense strand
cuaaugaagggaccuaaua

SEQ ID NO: 1775923 - RNA, 19 nt, Homo sapiens
  misc_RNA (1)...(19): siRNA sense strand
uuggagagguguugaaauu

SEQ ID NO: 1775924 - RNA, 19 nt, Homo sapiens
  misc_RNA (1)...(19): siRNA sense strand
ucacaugguuuaagcugaa

SEQ ID NO: 1775925 - RNA, 19 nt, Homo sapiens
  misc_RNA (1)...(19): siRNA sense strand
ggaggucuauaucaugaga

SEQ ID NO: 1775926 - RNA, 19 nt, Homo sapiens
  misc_RNA (1)...(19): siRNA sense strand
aaauggaucuccuauaucu

SEQ ID NO: 1775927 - RNA, 19 nt, Homo sapiens
  misc_RNA (1)...(19): siRNA sense strand
gugaaguugugaaguguuu

SEQ ID NO: 1775928 - RNA, 19 nt, Homo sapiens
  misc_RNA (1)...(19): siRNA sense strand
gugauuauccagacauuaa

SEQ ID NO: 1775929 - RNA, 19 nt, Homo sapiens
  misc_RNA (1)...(19): siRNA sense strand
gcaaaaugcuuaggagaaa

SEQ ID NO: 1775930 - RNA, 19 nt, Homo sapiens
  misc_RNA (1)...(19): siRNA sense strand
gagggugguuucaggauau

SEQ ID NO: 1775931 - RNA, 19 nt, Homo sapiens
  misc_RNA (1)...(19): siRNA sense strand
caagaaaguuaugcacaug

SEQ ID NO: 1775932 - RNA, 19 nt, Homo sapiens
  misc_RNA (1)...(19): siRNA sense strand
caaccacacugaauuaucg

SEQ ID NO: 1775933 - RNA, 19 nt, Homo sapiens
  misc_RNA (1)...(19): siRNA sense strand
caaaacauguuccaaauca

SEQ ID NO: 1775934 - RNA, 19 nt, Homo sapiens
  misc_RNA (1)...(19): siRNA sense strand
guaaagagaaaccaaagug

SEQ ID NO: 1775935 - RNA, 19 nt, Homo sapiens
  misc_RNA (1)...(19): siRNA sense strand
gugaaucaguugaauuugu

SEQ ID NO: 1775936 - RNA, 19 nt, Homo sapiens
  misc_RNA (1)...(19): siRNA sense strand
ccaccucaaugcaaagauu

SEQ ID NO: 1775937 - RNA, 19 nt, Homo sapiens
  misc_RNA (1)...(19): siRNA sense strand
gauagaacacggaaccauu

SEQ ID NO: 1775938 - RNA, 19 nt, Homo sapiens
  misc_RNA (1)...(19): siRNA sense strand
acagaucaauuacguguau

SEQ ID NO: 1775939 - RNA, 19 nt, Homo sapiens
  misc_RNA (1)...(19): siRNA sense strand
ugaaacaucaggaucaauu

SEQ ID NO: 1775940 - RNA, 19 nt, Homo sapiens
  misc_RNA (1)...(19): siRNA sense strand
ugaaagaggagaugcugua

SEQ ID NO: 1775941 - RNA, 19 nt, Homo sapiens
  misc_RNA (1)...(19): siRNA sense strand
cacaaguacuggcuggaua

SEQ ID NO: 1775942 - RNA, 19 nt, Homo sapiens
  misc_RNA (1)...(19): siRNA sense strand
augaagaagugauguguuu

SEQ ID NO: 1775943 - RNA, 19 nt, Homo sapiens
  misc_RNA (1)...(19): siRNA sense strand
acacuugugcaacauauua

SEQ ID NO: 1775944 - RNA, 19 nt, Homo sapiens
  misc_RNA (1)...(19): siRNA sense strand
gaacaggugaaucaguuga

SEQ ID NO: 1775945 - RNA, 19 nt, Homo sapiens
  misc_RNA (1)...(19): siRNA sense strand
gauggagccaguaauguaa

SEQ ID NO: 1775946 - RNA, 19 nt, Homo sapiens
  misc_RNA (1)...(19): siRNA sense strand
ggaagaagagcaaguaaua

SEQ ID NO: 1775947 - RNA, 19 nt, Homo sapiens
  misc_RNA (1)...(19): siRNA sense strand
gaaacacccuguauccuaa

SEQ ID NO: 1775948 - RNA, 19 nt, Homo sapiens
  misc_RNA (1)...(19): siRNA sense strand
caacaaaccugaggaagaa

SEQ ID NO: 1775949 - RNA, 19 nt, Homo sapiens
  misc_RNA (1)...(19): siRNA sense strand
gauauagccucuagugaaa

SEQ ID NO: 1775950 - RNA, 19 nt, Homo sapiens
  misc_RNA (1)...(19): siRNA sense strand
gcauguaccuguugcagua

SEQ ID NO: 1775951 - RNA, 19 nt, Homo sapiens
  misc_RNA (1)...(19): siRNA sense strand
caagcaggaugaugauuua

SEQ ID NO: 1775952 - RNA, 19 nt, Homo sapiens
  misc_RNA (1)...(19): siRNA sense strand
ugaagaaacucuagaaaca

SEQ ID NO: 1775953 - RNA, 19 nt, Homo sapiens
  misc_RNA (1)...(19): siRNA sense strand
ggacuuuggugacuaauca

SEQ ID NO: 1775954 - RNA, 19 nt, Homo sapiens
  misc_RNA (1)...(19): siRNA sense strand
ggaaacacccuguauccua

SEQ ID NO: 1775955 - RNA, 19 nt, Homo sapiens
  misc_RNA (1)...(19): siRNA sense strand
gcuaccaucucuaugcuua

SEQ ID NO: 1775956 - RNA, 19 nt, Homo sapiens
  misc_RNA (1)...(19): siRNA sense strand
gaagguagaggaagauauu

SEQ ID NO: 1775957 - RNA, 19 nt, Homo sapiens
  misc_RNA (1)...(19): siRNA sense strand
cagcagaaguagaaaguaa

SEQ ID NO: 1775958 - RNA, 19 nt, Homo sapiens
  misc_RNA (1)...(19): siRNA sense strand
gcaggaugaugauuuaaau

SEQ ID NO: 1775959 - RNA, 19 nt, Homo sapiens
  misc_RNA (1)...(19): siRNA sense strand
caacagcaauaauaacaug

SEQ ID NO: 1775960 - RNA, 19 nt, Homo sapiens
  misc_RNA (1)...(19): siRNA sense strand
aaagaugagucugaaguua

SEQ ID NO: 1775961 - RNA, 19 nt, Homo sapiens
  misc_RNA (1)...(19): siRNA sense strand
uaaaugaugucaacagcaa

SEQ ID NO: 1775962 - RNA, 19 nt, Homo sapiens
  misc_RNA (1)...(19): siRNA sense strand
gaaauaacuucuguugauc

SEQ ID NO: 1775963 - RNA, 19 nt, Homo sapiens
  misc_RNA (1)...(19): siRNA sense strand
gaacagaacagcaauacca

SEQ ID NO: 1775964 - RNA, 19 nt, Homo sapiens
  misc_RNA (1)...(19): siRNA sense strand
gcaccaccauccuuucaaa

SEQ ID NO: 1775965 - RNA, 19 nt, Homo sapiens
  misc_RNA (1)...(19): siRNA sense strand
gaugucaacagcaauaaua

SEQ ID NO: 1775966 - RNA, 19 nt, Homo sapiens
  misc_RNA (1)...(19): siRNA sense strand
gaacuggccucugaugauc

SEQ ID NO: 1775967 - RNA, 19 nt, Homo sapiens
  misc_RNA (1)...(19): siRNA sense strand
gaaguuauaucgcaaaaug

SEQ ID NO: 1775968 - RNA, 19 nt, Homo sapiens
  misc_RNA (1)...(19): siRNA sense strand
aaacaucucuccuuccaau

SEQ ID NO: 1775969 - RNA, 19 nt, Homo sapiens
  misc_RNA (1)...(19): siRNA sense strand
cugaugagcugacuucuga

SEQ ID NO: 1775970 - RNA, 19 nt, Homo sapiens
  misc_RNA (1)...(19): siRNA sense strand
gaugaaagaccuucugaga

SEQ ID NO: 1775971 - RNA, 19 nt, Homo sapiens
  misc_RNA (1)...(19): siRNA sense strand
gaucguaccuuugaaccaa

SEQ ID NO: 1775972 - RNA, 19 nt, Homo sapiens
  misc_RNA (1)...(19): siRNA sense strand
caaacaacguuccuucugu

SEQ ID NO: 1775973 - RNA, 19 nt, Homo sapiens
  misc_RNA (1)...(19): siRNA sense strand
cuagugaacuggccucuga

SEQ ID NO: 1775974 - RNA, 19 nt, Homo sapiens
  misc_RNA (1)...(19): siRNA sense strand
gcagugugcuguauuugau

SEQ ID NO: 1775975 - RNA, 19 nt, Homo sapiens
  misc_RNA (1)...(19): siRNA sense strand
gaggcagaauuucaaguaa

SEQ ID NO: 1775976 - RNA, 19 nt, Homo sapiens
  misc_RNA (1)...(19): siRNA sense strand
ggucaaagaagaacuguug

SEQ ID NO: 1775977 - RNA, 19 nt, Homo sapiens
  misc_RNA (1)...(19): siRNA sense strand
gaacuuacuugcuuuucua

SEQ ID NO: 1775978 - RNA, 19 nt, Homo sapiens
  misc_RNA (1)...(19): siRNA sense strand
uagagcaaauucagaguaa

SEQ ID NO: 1775979 - RNA, 19 nt, Homo sapiens
  misc_RNA (1)...(19): siRNA sense strand
uauagccucuagugaaaua

SEQ ID NO: 1775980 - RNA, 19 nt, Homo sapiens
  misc_RNA (1)...(19): siRNA sense strand
uaauauaacuccagaacca

SEQ ID NO: 1775981 - RNA, 19 nt, Homo sapiens
  misc_RNA (1)...(19): siRNA sense strand
agaugagucugaaguuaua

SEQ ID NO: 1775982 - RNA, 19 nt, Homo sapiens
  misc_RNA (1)...(19): siRNA sense strand
gaauguaacaagaggcaua

SEQ ID NO: 1775983 - RNA, 19 nt, Homo sapiens
  misc_RNA (1)...(19): siRNA sense strand
aaacugaugucaagcuguu

SEQ ID NO: 1775984 - RNA, 19 nt, Homo sapiens
  misc_RNA (1)...(19): siRNA sense strand
acaugaagaugaugaaaga

SEQ ID NO: 1775985 - RNA, 19 nt, Homo sapiens
  misc_RNA (1)...(19): siRNA sense strand
gaaauugaccaaggugaaa

SEQ ID NO: 1775986 - RNA, 19 nt, Homo sapiens
  misc_RNA (1)...(19): siRNA sense strand
guacuggccucuggugauu

SEQ ID NO: 1775987 - RNA, 19 nt, Homo sapiens
  misc_RNA (1)...(19): siRNA sense strand
gaaguaaagcagaauggaa

SEQ ID NO: 1775988 - RNA, 19 nt, Homo sapiens
  misc_RNA (1)...(19): siRNA sense strand
gacaauauagaaccaagua

SEQ ID NO: 1775989 - RNA, 19 nt, Homo sapiens
  misc_RNA (1)...(19): siRNA sense strand
gauaagacuuuggcagaau

SEQ ID NO: 1775990 - RNA, 19 nt, Homo sapiens
  misc_RNA (1)...(19): siRNA sense strand
gaagagcaaguaauacaug

SEQ ID NO: 1775991 - RNA, 19 nt, Homo sapiens
  misc_RNA (1)...(19): siRNA sense strand
gcauugaagagauuuguuu

SEQ ID NO: 1775992 - RNA, 19 nt, Homo sapiens
  misc_RNA (1)...(19): siRNA sense strand
ccaacuaccgugaauguaa

SEQ ID NO: 1775993 - RNA, 19 nt, Homo sapiens
  misc_RNA (1)...(19): siRNA sense strand
ggaugaacuuacuugcuuu

SEQ ID NO: 1775994 - RNA, 19 nt, Homo sapiens
  misc_RNA (1)...(19): siRNA sense strand
gaucuuguagaaacgauua

SEQ ID NO: 1775995 - RNA, 19 nt, Homo sapiens
  misc_RNA (1)...(19): siRNA sense strand
caaagaagaacuguugaaa

SEQ ID NO: 1775996 - RNA, 19 nt, Homo sapiens
  misc_RNA (1)...(19): siRNA sense strand
ugaaggaaguaaagcagaa

SEQ ID NO: 1775997 - RNA, 19 nt, Homo sapiens
  misc_RNA (1)...(19): siRNA sense strand
uaacucaggugaccacaag

SEQ ID NO: 1775998 - RNA, 19 nt, Homo sapiens
  misc_RNA (1)...(19): siRNA sense strand
ggaaggaaacacccuguau

SEQ ID NO: 1775999 - RNA, 19 nt, Homo sapiens
  misc_RNA (1)...(19): siRNA sense strand
gaacccauuucuggugauu

SEQ ID NO: 1776000 - RNA, 19 nt, Homo sapiens
  misc_RNA (1)...(19): siRNA sense strand
ccaaguagcaauaaagaug

SEQ ID NO: 1776001 - RNA, 19 nt, Homo sapiens
  misc_RNA (1)...(19): siRNA sense strand
caacagcacacucuauugu

SEQ ID NO: 1776002 - RNA, 19 nt, Homo sapiens
  misc_RNA (1)...(19): siRNA sense strand
gcugcagugugcuguauuu

SEQ ID NO: 1776003 - RNA, 19 nt, Homo sapiens
  misc_RNA (1)...(19): siRNA sense strand
ggaaauugaccaaggugaa

SEQ ID NO: 1776004 - RNA, 19 nt, Homo sapiens
  misc_RNA (1)...(19): siRNA sense strand
ggugaucuauccucuagug

SEQ ID NO: 1776005 - RNA, 19 nt, Homo sapiens
  misc_RNA (1)...(19): siRNA sense strand
gcaguacgagccaaggaua

SEQ ID NO: 1776006 - RNA, 19 nt, Homo sapiens
  misc_RNA (1)...(19): siRNA sense strand
guugauagcuaccaucucu

SEQ ID NO: 1776007 - RNA, 19 nt, Homo sapiens
  misc_RNA (1)...(19): siRNA sense strand
uguaacacaucguccagua

SEQ ID NO: 1776008 - RNA, 19 nt, Homo sapiens
  misc_RNA (1)...(19): siRNA sense strand
gaguggagcuucacaagac

SEQ ID NO: 1776009 - RNA, 19 nt, Homo sapiens
  misc_RNA (1)...(19): siRNA sense strand
gcagaacagaacagcaaua

SEQ ID NO: 1776010 - RNA, 19 nt, Homo sapiens
  misc_RNA (1)...(19): siRNA sense strand
gaaccaaguagcaauaaag

SEQ ID NO: 1776011 - RNA, 19 nt, Homo sapiens
  misc_RNA (1)...(19): siRNA sense strand
gaagagauuuguuuugauc

SEQ ID NO: 1776012 - RNA, 19 nt, Homo sapiens
  misc_RNA (1)...(19): siRNA sense strand
caccacaagugcauacuga

SEQ ID NO: 1776013 - RNA, 19 nt, Homo sapiens
  misc_RNA (1)...(19): siRNA sense strand
ucaaccaucuggcaauguu

SEQ ID NO: 1776014 - RNA, 19 nt, Homo sapiens
  misc_RNA (1)...(19): siRNA sense strand
ggacaacaaaccugaggaa

SEQ ID NO: 1776015 - RNA, 19 nt, Homo sapiens
  misc_RNA (1)...(19): siRNA sense strand
aagaaacucuagaaacaga

SEQ ID NO: 1776016 - RNA, 19 nt, Homo sapiens
  misc_RNA (1)...(19): siRNA sense strand
guacaaggucaaagaagaa

SEQ ID NO: 1776017 - RNA, 19 nt, Homo sapiens
  misc_RNA (1)...(19): siRNA sense strand
gaaaagacaugaacaucca

SEQ ID NO: 1776018 - RNA, 19 nt, Homo sapiens
  misc_RNA (1)...(19): siRNA sense strand
gauccucagucaacagaug

SEQ ID NO: 1776019 - RNA, 19 nt, Homo sapiens
  misc_RNA (1)...(19): siRNA sense strand
gaaggaaacacccuguauc

SEQ ID NO: 1776020 - RNA, 19 nt, Homo sapiens
  misc_RNA (1)...(19): siRNA sense strand
aaggagacauuaaccagaa

SEQ ID NO: 1776021 - RNA, 19 nt, Homo sapiens
  misc_RNA (1)...(19): siRNA sense strand
agaaacagaugauacaacu

SEQ ID NO: 1776022 - RNA, 19 nt, Homo sapiens
  misc_RNA (1)...(19): siRNA sense strand
ugagcugacuucugaauca

SEQ ID NO: 1776023 - RNA, 19 nt, Homo sapiens
  misc_RNA (1)...(19): siRNA sense strand
ccacugauccagccucuga

SEQ ID NO: 1776024 - RNA, 19 nt, Homo sapiens
  misc_RNA (1)...(19): siRNA sense strand
ugauauagccucuagugaa

SEQ ID NO: 1776025 - RNA, 19 nt, Homo sapiens
  misc_RNA (1)...(19): siRNA sense strand
gcaaguaauacaugaagau

SEQ ID NO: 1776026 - RNA, 19 nt, Homo sapiens
  misc_RNA (1)...(19): siRNA sense strand
cauguacucucacccaguu

SEQ ID NO: 1776027 - RNA, 19 nt, Homo sapiens
  misc_RNA (1)...(19): siRNA sense strand
ggacuaacccugggaucaa

SEQ ID NO: 1776028 - RNA, 19 nt, Homo sapiens
  misc_RNA (1)...(19): siRNA sense strand
uacaguaucuucaaccaau

SEQ ID NO: 1776029 - RNA, 19 nt, Homo sapiens
  misc_RNA (1)...(19): siRNA sense strand
gaacuacaggccaagauag

SEQ ID NO: 1776030 - RNA, 19 nt, Homo sapiens
  misc_RNA (1)...(19): siRNA sense strand
gacauuaaccagaaacuuc

SEQ ID NO: 1776031 - RNA, 19 nt, Homo sapiens
  misc_RNA (1)...(19): siRNA sense strand
gucgauauauggaagaaga

SEQ ID NO: 1776032 - RNA, 19 nt, Homo sapiens
  misc_RNA (1)...(19): siRNA sense strand
gaagaacuguugaaaacug

SEQ ID NO: 1776033 - RNA, 19 nt, Homo sapiens
  misc_RNA (1)...(19): siRNA sense strand
ucagaccaccauacacuua

SEQ ID NO: 1776034 - RNA, 19 nt, Homo sapiens
  misc_RNA (1)...(19): siRNA sense strand
gaauucauuucugugcaaa

SEQ ID NO: 1776035 - RNA, 19 nt, Homo sapiens
  misc_RNA (1)...(19): siRNA sense strand
gaugcaaccucuggugaug

SEQ ID NO: 1776036 - RNA, 19 nt, Homo sapiens
  misc_RNA (1)...(19): siRNA sense strand
ggacccaaccucaccuuug

SEQ ID NO: 1776037 - RNA, 19 nt, Homo sapiens
  misc_RNA (1)...(19): siRNA sense strand
caaguggugucauugaucu

SEQ ID NO: 1776038 - RNA, 19 nt, Homo sapiens
  misc_RNA (1)...(19): siRNA sense strand
uguacaaggucaaagaaga

SEQ ID NO: 1776039 - RNA, 19 nt, Homo sapiens
  misc_RNA (1)...(19): siRNA sense strand
gaugauauagccucuagug

SEQ ID NO: 1776040 - RNA, 19 nt, Homo sapiens
  misc_RNA (1)...(19): siRNA sense strand
gcagaaguagaaaguaaug

SEQ ID NO: 1776041 - RNA, 19 nt, Homo sapiens
  misc_RNA (1)...(19): siRNA sense strand
gaaguuagcacgcguucag

SEQ ID NO: 1776042 - RNA, 19 nt, Homo sapiens
  misc_RNA (1)...(19): siRNA sense strand
cacaauggaugaugaagag

SEQ ID NO: 1776043 - RNA, 19 nt, Homo sapiens
  misc_RNA (1)...(19): siRNA sense strand
gaugucaagcuguuaaaug

SEQ ID NO: 1776044 - RNA, 19 nt, Homo sapiens
  misc_RNA (1)...(19): siRNA sense strand
ggcagaauuucaaguaaag

SEQ ID NO: 1776045 - RNA, 19 nt, Homo sapiens
  misc_RNA (1)...(19): siRNA sense strand
agaagaauaugaggcagaa

SEQ ID NO: 1776046 - RNA, 19 nt, Homo sapiens
  misc_RNA (1)...(19): siRNA sense strand
gaagcaggacucucuguua

SEQ ID NO: 1776047 - RNA, 19 nt, Homo sapiens
  misc_RNA (1)...(19): siRNA sense strand
ucuggaagcuggaaacuuu

SEQ ID NO: 1776048 - RNA, 19 nt, Homo sapiens
  misc_RNA (1)...(19): siRNA sense strand
ccucagagcucuucaccaa

SEQ ID NO: 1776049 - RNA, 19 nt, Homo sapiens
  misc_RNA (1)...(19): siRNA sense strand
ccaagaagaacaucaauug

SEQ ID NO: 1776050 - RNA, 19 nt, Homo sapiens
  misc_RNA (1)...(19): siRNA sense strand
gcucuuggcugcccuuaug

SEQ ID NO: 1776051 - RNA, 19 nt, Homo sapiens
  misc_RNA (1)...(19): siRNA sense strand
uagcugaggucaccaagaa

SEQ ID NO: 1776052 - RNA, 19 nt, Homo sapiens
  misc_RNA (1)...(19): siRNA sense strand
gaagggcauucagaaguuu

SEQ ID NO: 1776053 - RNA, 19 nt, Homo sapiens
  misc_RNA (1)...(19): siRNA sense strand
ugauagacaugcuuucuga

SEQ ID NO: 1776054 - RNA, 19 nt, Homo sapiens
  misc_RNA (1)...(19): siRNA sense strand
gcaggacucucuguuauag

SEQ ID NO: 1776055 - RNA, 19 nt, Homo sapiens
  misc_RNA (1)...(19): siRNA sense strand
gucaagcccugaacagaaa

SEQ ID NO: 1776056 - RNA, 19 nt, Homo sapiens
  misc_RNA (1)...(19): siRNA sense strand
ugaccacacugaagucuug

SEQ ID NO: 1776057 - RNA, 19 nt, Homo sapiens
  misc_RNA (1)...(19): siRNA sense strand
caaggaaguagucaucuuu

SEQ ID NO: 1776058 - RNA, 19 nt, Homo sapiens
  misc_RNA (1)...(19): siRNA sense strand
gaaguuuccuggcaucaac

SEQ ID NO: 1776059 - RNA, 19 nt, Homo sapiens
  misc_RNA (1)...(19): siRNA sense strand
gagauggacuacaaaauga

SEQ ID NO: 1776060 - RNA, 19 nt, Homo sapiens
  misc_RNA (1)...(19): siRNA sense strand
aagcaggacucucuguuau

SEQ ID NO: 1776061 - RNA, 19 nt, Homo sapiens
  misc_RNA (1)...(19): siRNA sense strand
ccaaggaaguagucaucuu

SEQ ID NO: 1776062 - RNA, 19 nt, Homo sapiens
  misc_RNA (1)...(19): siRNA sense strand
gcagcgcagucagccaaua

SEQ ID NO: 1776063 - RNA, 19 nt, Homo sapiens
  misc_RNA (1)...(19): siRNA sense strand
ccacugccaugacaccuau

SEQ ID NO: 1776064 - RNA, 19 nt, Homo sapiens
  misc_RNA (1)...(19): siRNA sense strand
gaaaccaccagcuuugugu

SEQ ID NO: 1776065 - RNA, 19 nt, Homo sapiens
  misc_RNA (1)...(19): siRNA sense strand
ggaaguagucaucuuugga

SEQ ID NO: 1776066 - RNA, 19 nt, Homo sapiens
  misc_RNA (1)...(19): siRNA sense strand
gaaacuuggccacagaaga

SEQ ID NO: 1776067 - RNA, 19 nt, Homo sapiens
  misc_RNA (1)...(19): siRNA sense strand
ccucaucuaugggcacuuu

SEQ ID NO: 1776068 - RNA, 19 nt, Homo sapiens
  misc_RNA (1)...(19): siRNA sense strand
cuagagggcuugggcauuc

SEQ ID NO: 1776069 - RNA, 19 nt, Homo sapiens
  misc_RNA (1)...(19): siRNA sense strand
caggaaacuuggccacaga

SEQ ID NO: 1776070 - RNA, 19 nt, Homo sapiens
  misc_RNA (1)...(19): siRNA sense strand
uauagaaaccaccagcuuu

SEQ ID NO: 1776071 - RNA, 19 nt, Homo sapiens
  misc_RNA (1)...(19): siRNA sense strand
gcagucagccaauauuucu

SEQ ID NO: 1776072 - RNA, 19 nt, Homo sapiens
  misc_RNA (1)...(19): siRNA sense strand
gcgcagucagccaauauuu

SEQ ID NO: 1776073 - RNA, 19 nt, Homo sapiens
  misc_RNA (1)...(19): siRNA sense strand
gaagaucuccccagcuaaa

SEQ ID NO: 1776074 - RNA, 19 nt, Homo sapiens
  misc_RNA (1)...(19): siRNA sense strand
ccagaugggugaccacacu

SEQ ID NO: 1776075 - RNA, 19 nt, Homo sapiens
  misc_RNA (1)...(19): siRNA sense strand
caagaagaacaucaauugu

SEQ ID NO: 1776076 - RNA, 19 nt, Homo sapiens
  misc_RNA (1)...(19): siRNA sense strand
aggacucucuguuauagaa

SEQ ID NO: 1776077 - RNA, 19 nt, Homo sapiens
  misc_RNA (1)...(19): siRNA sense strand
caucaauuguuccauagag

SEQ ID NO: 1776078 - RNA, 19 nt, Homo sapiens
  misc_RNA (1)...(19): siRNA sense strand
cguaucuacuccagugaaa

SEQ ID NO: 1776079 - RNA, 19 nt, Homo sapiens
  misc_RNA (1)...(19): siRNA sense strand
gucagcaccucaucuaugg

SEQ ID NO: 1776080 - RNA, 19 nt, Homo sapiens
  misc_RNA (1)...(19): siRNA sense strand
guacgucuccugugcucuu

SEQ ID NO: 1776081 - RNA, 19 nt, Homo sapiens
  misc_RNA (1)...(19): siRNA sense strand
ccagcuuugugucuccuaa

SEQ ID NO: 1776082 - RNA, 19 nt, Homo sapiens
  misc_RNA (1)...(19): siRNA sense strand
ucagagguuugacgcaauc

SEQ ID NO: 1776083 - RNA, 19 nt, Homo sapiens
  misc_RNA (1)...(19): siRNA sense strand
cuggaaacuuuaucuguca

SEQ ID NO: 1776084 - RNA, 19 nt, Homo sapiens
  misc_RNA (1)...(19): siRNA sense strand
ccagggaucaugaaagaca

SEQ ID NO: 1776085 - RNA, 19 nt, Homo sapiens
  misc_RNA (1)...(19): siRNA sense strand
caaagcgggugaaaauugu

SEQ ID NO: 1776086 - RNA, 19 nt, Homo sapiens
  misc_RNA (1)...(19): siRNA sense strand
ugucaagcccugaacagaa

SEQ ID NO: 1776087 - RNA, 19 nt, Homo sapiens
  misc_RNA (1)...(19): siRNA sense strand
gaagcuggaaacuuuaucu

SEQ ID NO: 1776088 - RNA, 19 nt, Homo sapiens
  misc_RNA (1)...(19): siRNA sense strand
aagaauaucguaucuacuc

SEQ ID NO: 1776089 - RNA, 19 nt, Homo sapiens
  misc_RNA (1)...(19): siRNA sense strand
ccaaagcgggugaaaauug

SEQ ID NO: 1776090 - RNA, 19 nt, Homo sapiens
  misc_RNA (1)...(19): siRNA sense strand
ucaccaagaagaacaucaa

SEQ ID NO: 1776091 - RNA, 19 nt, Homo sapiens
  misc_RNA (1)...(19): siRNA sense strand
auagaaaccaccagcuuug

SEQ ID NO: 1776092 - RNA, 19 nt, Homo sapiens
  misc_RNA (1)...(19): siRNA sense strand
ggacucucuguuauagaaa

SEQ ID NO: 1776093 - RNA, 19 nt, Homo sapiens
  misc_RNA (1)...(19): siRNA sense strand
gugugaaucuccagaagcu

SEQ ID NO: 1776094 - RNA, 19 nt, Homo sapiens
  misc_RNA (1)...(19): siRNA sense strand
gauagacaugcuuucugaa

SEQ ID NO: 1776095 - RNA, 19 nt, Homo sapiens
  misc_RNA (1)...(19): siRNA sense strand
aaacuuggccacagaagac

SEQ ID NO: 1776096 - RNA, 19 nt, Homo sapiens
  misc_RNA (1)...(19): siRNA sense strand
cgagauggacuacaaaaug

SEQ ID NO: 1776097 - RNA, 19 nt, Homo sapiens
  misc_RNA (1)...(19): siRNA sense strand
ugucagcaccucaucuaug

SEQ ID NO: 1776098 - RNA, 19 nt, Homo sapiens
  misc_RNA (1)...(19): siRNA sense strand
ugaagcaggacucucuguu

SEQ ID NO: 1776099 - RNA, 19 nt, Homo sapiens
  misc_RNA (1)...(19): siRNA sense strand
gcuagagggcuugggcauu

SEQ ID NO: 1776100 - RNA, 19 nt, Homo sapiens
  misc_RNA (1)...(19): siRNA sense strand
gcugaggucaccaagaagu

SEQ ID NO: 1776101 - RNA, 19 nt, Homo sapiens
  misc_RNA (1)...(19): siRNA sense strand
cagcgcagucagccaauau

SEQ ID NO: 1776102 - RNA, 19 nt, Homo sapiens
  misc_RNA (1)...(19): siRNA sense strand
gaugggugaccacacugaa

SEQ ID NO: 1776103 - RNA, 19 nt, Homo sapiens
  misc_RNA (1)...(19): siRNA sense strand
gggugugaaucuccagaag

SEQ ID NO: 1776104 - RNA, 19 nt, Homo sapiens
  misc_RNA (1)...(19): siRNA sense strand
ggugaaaauuguggaaguu

SEQ ID NO: 1776105 - RNA, 19 nt, Homo sapiens
  misc_RNA (1)...(19): siRNA sense strand
ggaaguugguccccgagau

SEQ ID NO: 1776106 - RNA, 19 nt, Homo sapiens
  misc_RNA (1)...(19): siRNA sense strand
gaucuccccagcuaaagua

SEQ ID NO: 1776107 - RNA, 19 nt, Homo sapiens
  misc_RNA (1)...(19): siRNA sense strand
ggcuaccuguaaacucuga

SEQ ID NO: 1776108 - RNA, 19 nt, Homo sapiens
  misc_RNA (1)...(19): siRNA sense strand
gcccugaccaacaccuuga

SEQ ID NO: 1776109 - RNA, 19 nt, Homo sapiens
  misc_RNA (1)...(19): siRNA sense strand
ucuaugggcacuuuaccaa

SEQ ID NO: 1776110 - RNA, 19 nt, Homo sapiens
  misc_RNA (1)...(19): siRNA sense strand
gaucagauguucuuucaua

SEQ ID NO: 1776111 - RNA, 19 nt, Homo sapiens
  misc_RNA (1)...(19): siRNA sense strand
gcacguauuuggcaauuua

SEQ ID NO: 1776112 - RNA, 19 nt, Homo sapiens
  misc_RNA (1)...(19): siRNA sense strand
gcaaauaugucaucgacua

SEQ ID NO: 1776113 - RNA, 19 nt, Homo sapiens
  misc_RNA (1)...(19): siRNA sense strand
caaagaaaguuccuaagaa

SEQ ID NO: 1776114 - RNA, 19 nt, Homo sapiens
  misc_RNA (1)...(19): siRNA sense strand
ggacagcuuucuauaauga

SEQ ID NO: 1776115 - RNA, 19 nt, Homo sapiens
  misc_RNA (1)...(19): siRNA sense strand
gaaacagugugaagaauug

SEQ ID NO: 1776116 - RNA, 19 nt, Homo sapiens
  misc_RNA (1)...(19): siRNA sense strand
caaaugaucuguucuucuu

SEQ ID NO: 1776117 - RNA, 19 nt, Homo sapiens
  misc_RNA (1)...(19): siRNA sense strand
uaaaggaucagacuuguua

SEQ ID NO: 1776118 - RNA, 19 nt, Homo sapiens
  misc_RNA (1)...(19): siRNA sense strand
gcaagcaccucaucuuaug

SEQ ID NO: 1776119 - RNA, 19 nt, Homo sapiens
  misc_RNA (1)...(19): siRNA sense strand
ggaccaauaucaccaaaga

SEQ ID NO: 1776120 - RNA, 19 nt, Homo sapiens
  misc_RNA (1)...(19): siRNA sense strand
agacauggcuguaaacuau

SEQ ID NO: 1776121 - RNA, 19 nt, Homo sapiens
  misc_RNA (1)...(19): siRNA sense strand
acacaaugcugcucagaua

SEQ ID NO: 1776122 - RNA, 19 nt, Homo sapiens
  misc_RNA (1)...(19): siRNA sense strand
gaaggacagcuuucuauaa

SEQ ID NO: 1776123 - RNA, 19 nt, Homo sapiens
  misc_RNA (1)...(19): siRNA sense strand
uaacaugacucugaaaguu

SEQ ID NO: 1776124 - RNA, 19 nt, Homo sapiens
  misc_RNA (1)...(19): siRNA sense strand
ggaauaaaccaguugauga

SEQ ID NO: 1776125 - RNA, 19 nt, Homo sapiens
  misc_RNA (1)...(19): siRNA sense strand
caacauggauuacagauac

SEQ ID NO: 1776126 - RNA, 19 nt, Homo sapiens
  misc_RNA (1)...(19): siRNA sense strand
gaugggagguuguuagcua

SEQ ID NO: 1776127 - RNA, 19 nt, Homo sapiens
  misc_RNA (1)...(19): siRNA sense strand
ggaagaagaguuugaagaa

SEQ ID NO: 1776128 - RNA, 19 nt, Homo sapiens
  misc_RNA (1)...(19): siRNA sense strand
gcaaggagauuguaagaac

SEQ ID NO: 1776129 - RNA, 19 nt, Homo sapiens
  misc_RNA (1)...(19): siRNA sense strand
gaacaagaaauuccucaaa

SEQ ID NO: 1776130 - RNA, 19 nt, Homo sapiens
  misc_RNA (1)...(19): siRNA sense strand
gaagaaacagugugaagaa

SEQ ID NO: 1776131 - RNA, 19 nt, Homo sapiens
  misc_RNA (1)...(19): siRNA sense strand
gaagugaaauagccacaga

SEQ ID NO: 1776132 - RNA, 19 nt, Homo sapiens
  misc_RNA (1)...(19): siRNA sense strand
caacuugaguacccugaua

SEQ ID NO: 1776133 - RNA, 19 nt, Homo sapiens
  misc_RNA (1)...(19): siRNA sense strand
gcagaaagcaguucagaug

SEQ ID NO: 1776134 - RNA, 19 nt, Homo sapiens
  misc_RNA (1)...(19): siRNA sense strand
gaaggaaaccuaaaguaga

SEQ ID NO: 1776135 - RNA, 19 nt, Homo sapiens
  misc_RNA (1)...(19): siRNA sense strand
gcaagcauguuguguggaa

SEQ ID NO: 1776136 - RNA, 19 nt, Homo sapiens
  misc_RNA (1)...(19): siRNA sense strand
ugauaugccugacguuaua

SEQ ID NO: 1776137 - RNA, 19 nt, Homo sapiens
  misc_RNA (1)...(19): siRNA sense strand
gaaaauaguuggcauaaag

SEQ ID NO: 1776138 - RNA, 19 nt, Homo sapiens
  misc_RNA (1)...(19): siRNA sense strand
gauagcagcuggaaguugu

SEQ ID NO: 1776139 - RNA, 19 nt, Homo sapiens
  misc_RNA (1)...(19): siRNA sense strand
ccaaggacauggcgcagua

SEQ ID NO: 1776140 - RNA, 19 nt, Homo sapiens
  misc_RNA (1)...(19): siRNA sense strand
ggaagcacagaucauauua

SEQ ID NO: 1776141 - RNA, 19 nt, Homo sapiens
  misc_RNA (1)...(19): siRNA sense strand
agaaucuggugaaguauua

SEQ ID NO: 1776142 - RNA, 19 nt, Homo sapiens
  misc_RNA (1)...(19): siRNA sense strand
guaaagaugucagacuuau

SEQ ID NO: 1776143 - RNA, 19 nt, Homo sapiens
  misc_RNA (1)...(19): siRNA sense strand
cgguagaucuccuugaaua

SEQ ID NO: 1776144 - RNA, 19 nt, Homo sapiens
  misc_RNA (1)...(19): siRNA sense strand
gaugaugccuggugguuug

SEQ ID NO: 1776145 - RNA, 19 nt, Homo sapiens
  misc_RNA (1)...(19): siRNA sense strand
caagauagcagaucagaug

SEQ ID NO: 1776146 - RNA, 19 nt, Homo sapiens
  misc_RNA (1)...(19): siRNA sense strand
gcuguaaacuaugagaaua

SEQ ID NO: 1776147 - RNA, 19 nt, Homo sapiens
  misc_RNA (1)...(19): siRNA sense strand
guaauagagcccagucuua

SEQ ID NO: 1776148 - RNA, 19 nt, Homo sapiens
  misc_RNA (1)...(19): siRNA sense strand
ccaggaaccucuucaacuu

SEQ ID NO: 1776149 - RNA, 19 nt, Homo sapiens
  misc_RNA (1)...(19): siRNA sense strand
ggaacaagaacuuaugaaa

SEQ ID NO: 1776150 - RNA, 19 nt, Homo sapiens
  misc_RNA (1)...(19): siRNA sense strand
ccaccugagucaccaguua

SEQ ID NO: 1776151 - RNA, 19 nt, Homo sapiens
  misc_RNA (1)...(19): siRNA sense strand
gaucaaggauuuacagcau

SEQ ID NO: 1776152 - RNA, 19 nt, Homo sapiens
  misc_RNA (1)...(19): siRNA sense strand
ugugaaaucugcuaaauuc

SEQ ID NO: 1776153 - RNA, 19 nt, Homo sapiens
  misc_RNA (1)...(19): siRNA sense strand
gauauugccucagcauuug

SEQ ID NO: 1776154 - RNA, 19 nt, Homo sapiens
  misc_RNA (1)...(19): siRNA sense strand
cgacaugacaauacaguua

SEQ ID NO: 1776155 - RNA, 19 nt, Homo sapiens
  misc_RNA (1)...(19): siRNA sense strand
guuguuagcuaccuuaaga

SEQ ID NO: 1776156 - RNA, 19 nt, Homo sapiens
  misc_RNA (1)...(19): siRNA sense strand
aaagggagaagaagaaaua

SEQ ID NO: 1776157 - RNA, 19 nt, Homo sapiens
  misc_RNA (1)...(19): siRNA sense strand
gugggaaguucgauauaua

SEQ ID NO: 1776158 - RNA, 19 nt, Homo sapiens
  misc_RNA (1)...(19): siRNA sense strand
gacagcagaugcaggaauu

SEQ ID NO: 1776159 - RNA, 19 nt, Homo sapiens
  misc_RNA (1)...(19): siRNA sense strand
gcagauggcacuauuuguu

SEQ ID NO: 1776160 - RNA, 19 nt, Homo sapiens
  misc_RNA (1)...(19): siRNA sense strand
gagauuggcugugggagaa

SEQ ID NO: 1776161 - RNA, 19 nt, Homo sapiens
  misc_RNA (1)...(19): siRNA sense strand
uacaagaucugcauuggaa

SEQ ID NO: 1776162 - RNA, 19 nt, Homo sapiens
  misc_RNA (1)...(19): siRNA sense strand
gcaagccuaucccauguau

SEQ ID NO: 1776163 - RNA, 19 nt, Homo sapiens
  misc_RNA (1)...(19): siRNA sense strand
gagcaaccaucuacuucuu

SEQ ID NO: 1776164 - RNA, 19 nt, Homo sapiens
  misc_RNA (1)...(19): siRNA sense strand
gcgccugucugcuuucuuu

SEQ ID NO: 1776165 - RNA, 19 nt, Homo sapiens
  misc_RNA (1)...(19): siRNA sense strand
uaucagacauggcuguaaa

SEQ ID NO: 1776166 - RNA, 19 nt, Homo sapiens
  misc_RNA (1)...(19): siRNA sense strand
caacggaucuaaguacaau

SEQ ID NO: 1776167 - RNA, 19 nt, Homo sapiens
  misc_RNA (1)...(19): siRNA sense strand
gaugaagaaugugaaagaa

SEQ ID NO: 1776168 - RNA, 19 nt, Homo sapiens
  misc_RNA (1)...(19): siRNA sense strand
gaagcagguaucaguaaua

SEQ ID NO: 1776169 - RNA, 19 nt, Homo sapiens
  misc_RNA (1)...(19): siRNA sense strand
ggaaggaaaccuaaaguag

SEQ ID NO: 1776170 - RNA, 19 nt, Homo sapiens
  misc_RNA (1)...(19): siRNA sense strand
caacacaauuaucguacaa

SEQ ID NO: 1776171 - RNA, 19 nt, Homo sapiens
  misc_RNA (1)...(19): siRNA sense strand
ggacauggcgcaguauuug

SEQ ID NO: 1776172 - RNA, 19 nt, Homo sapiens
  misc_RNA (1)...(19): siRNA sense strand
ugacugaucuucuucuaca

SEQ ID NO: 1776173 - RNA, 19 nt, Homo sapiens
  misc_RNA (1)...(19): siRNA sense strand
auauggagcuuauaccuaa

SEQ ID NO: 1776174 - RNA, 19 nt, Homo sapiens
  misc_RNA (1)...(19): siRNA sense strand
gaauuggaguuucauacug

SEQ ID NO: 1776175 - RNA, 19 nt, Homo sapiens
  misc_RNA (1)...(19): siRNA sense strand
aaaggaagaugaagacaca

SEQ ID NO: 1776176 - RNA, 19 nt, Homo sapiens
  misc_RNA (1)...(19): siRNA sense strand
aaggaaaccuaaaguagaa

SEQ ID NO: 1776177 - RNA, 19 nt, Homo sapiens
  misc_RNA (1)...(19): siRNA sense strand
ccaaagaaaguuccuaaga

SEQ ID NO: 1776178 - RNA, 19 nt, Homo sapiens
  misc_RNA (1)...(19): siRNA sense strand
caagaagaauggagaacug

SEQ ID NO: 1776179 - RNA, 19 nt, Homo sapiens
  misc_RNA (1)...(19): siRNA sense strand
gaugagguauuuguucuug

SEQ ID NO: 1776180 - RNA, 19 nt, Homo sapiens
  misc_RNA (1)...(19): siRNA sense strand
agacggauauuuacugguu

SEQ ID NO: 1776181 - RNA, 19 nt, Homo sapiens
  misc_RNA (1)...(19): siRNA sense strand
caugagaacuagaaaucaa

SEQ ID NO: 1776182 - RNA, 19 nt, Homo sapiens
  misc_RNA (1)...(19): siRNA sense strand
gccagaagauuuagagcaa

SEQ ID NO: 1776183 - RNA, 19 nt, Homo sapiens
  misc_RNA (1)...(19): siRNA sense strand
ucaaaguguuccuggagua

SEQ ID NO: 1776184 - RNA, 19 nt, Homo sapiens
  misc_RNA (1)...(19): siRNA sense strand
cagcaagcaccucaucuua

SEQ ID NO: 1776185 - RNA, 19 nt, Homo sapiens
  misc_RNA (1)...(19): siRNA sense strand
cagaucagauguucuuuca

SEQ ID NO: 1776186 - RNA, 19 nt, Homo sapiens
  misc_RNA (1)...(19): siRNA sense strand
gauagcagaucagauguuc

SEQ ID NO: 1776187 - RNA, 19 nt, Homo sapiens
  misc_RNA (1)...(19): siRNA sense strand
ugacaaaguugacaguauc

SEQ ID NO: 1776188 - RNA, 19 nt, Homo sapiens
  misc_RNA (1)...(19): siRNA sense strand
gcacagaucauauuauucg

SEQ ID NO: 1776189 - RNA, 19 nt, Homo sapiens
  misc_RNA (1)...(19): siRNA sense strand
gaucauauuauucggguuu

SEQ ID NO: 1776190 - RNA, 19 nt, Homo sapiens
  misc_RNA (1)...(19): siRNA sense strand
uagaugauccuauagauga

SEQ ID NO: 1776191 - RNA, 19 nt, Homo sapiens
  misc_RNA (1)...(19): siRNA sense strand
ccaggaaccauucaaguaa

SEQ ID NO: 1776192 - RNA, 19 nt, Homo sapiens
  misc_RNA (1)...(19): siRNA sense strand
ccaauggaguuauguaaag

SEQ ID NO: 1776193 - RNA, 19 nt, Homo sapiens
  misc_RNA (1)...(19): siRNA sense strand
agagaaagaugcugaugug

SEQ ID NO: 1776194 - RNA, 19 nt, Homo sapiens
  misc_RNA (1)...(19): siRNA sense strand
gaagaagaagaaucugaaa

SEQ ID NO: 1776195 - RNA, 19 nt, Homo sapiens
  misc_RNA (1)...(19): siRNA sense strand
gagcaagaccugagacguu

SEQ ID NO: 1776196 - RNA, 19 nt, Homo sapiens
  misc_RNA (1)...(19): siRNA sense strand
caaaugcucuccugauggu

SEQ ID NO: 1776197 - RNA, 19 nt, Homo sapiens
  misc_RNA (1)...(19): siRNA sense strand
gaagaugagguauuuguuc

SEQ ID NO: 1776198 - RNA, 19 nt, Homo sapiens
  misc_RNA (1)...(19): siRNA sense strand
uaaacugacuggcggauca

SEQ ID NO: 1776199 - RNA, 19 nt, Homo sapiens
  misc_RNA (1)...(19): siRNA sense strand
aaggacagcuuucuauaau

SEQ ID NO: 1776200 - RNA, 19 nt, Homo sapiens
  misc_RNA (1)...(19): siRNA sense strand
gcaaccaucuacuucuuca

SEQ ID NO: 1776201 - RNA, 19 nt, Homo sapiens
  misc_RNA (1)...(19): siRNA sense strand
ggaugaagaaugugaaaga

SEQ ID NO: 1776202 - RNA, 19 nt, Homo sapiens
  misc_RNA (1)...(19): siRNA sense strand
cgaaguaguugcugucagu

SEQ ID NO: 1776203 - RNA, 19 nt, Homo sapiens
  misc_RNA (1)...(19): siRNA sense strand
ggacagccaucaaaacuug

SEQ ID NO: 1776204 - RNA, 19 nt, Homo sapiens
  misc_RNA (1)...(19): siRNA sense strand
ucaaguaaauggccaugga

SEQ ID NO: 1776205 - RNA, 19 nt, Homo sapiens
  misc_RNA (1)...(19): siRNA sense strand
cuauaaaccucuugaugga

SEQ ID NO: 1776206 - RNA, 19 nt, Homo sapiens
  misc_RNA (1)...(19): siRNA sense strand
gcacagcaacgcaccaaga

SEQ ID NO: 1776207 - RNA, 19 nt, Homo sapiens
  misc_RNA (1)...(19): siRNA sense strand
ggauuuacagcaugaguuu

SEQ ID NO: 1776208 - RNA, 19 nt, Homo sapiens
  misc_RNA (1)...(19): siRNA sense strand
ggaguuauguaaagauguc

SEQ ID NO: 1776209 - RNA, 19 nt, Homo sapiens
  misc_RNA (1)...(19): siRNA sense strand
gaucggagcucuacuuccu

SEQ ID NO: 1776210 - RNA, 19 nt, Homo sapiens
  misc_RNA (1)...(19): siRNA sense strand
ggacaaauguucucccaaa

SEQ ID NO: 1776211 - RNA, 19 nt, Homo sapiens
  misc_RNA (1)...(19): siRNA sense strand
ggaacacccuggagaauag

SEQ ID NO: 1776212 - RNA, 19 nt, Homo sapiens
  misc_RNA (1)...(19): siRNA sense strand
gcaagaaagugcagacagu

SEQ ID NO: 1776213 - RNA, 19 nt, Homo sapiens
  misc_RNA (1)...(19): siRNA sense strand
gaacuaaagaaaggcauua

SEQ ID NO: 1776214 - RNA, 19 nt, Homo sapiens
  misc_RNA (1)...(19): siRNA sense strand
ggucaaagaacuaaagaaa

SEQ ID NO: 1776215 - RNA, 19 nt, Homo sapiens
  misc_RNA (1)...(19): siRNA sense strand
ucaaagaacuaaagaaagg

SEQ ID NO: 1776216 - RNA, 19 nt, Homo sapiens
  misc_RNA (1)...(19): siRNA sense strand
agaaaggcauuaaguguug

SEQ ID NO: 1776217 - RNA, 19 nt, Homo sapiens
  misc_RNA (1)...(19): siRNA sense strand
caggacaggugacaagaaa

SEQ ID NO: 1776218 - RNA, 19 nt, Homo sapiens
  misc_RNA (1)...(19): siRNA sense strand
guucugaaauccaagugua

SEQ ID NO: 1776219 - RNA, 19 nt, Homo sapiens
  misc_RNA (1)...(19): siRNA sense strand
gaguugagcucuccuuugg

SEQ ID NO: 1776220 - RNA, 19 nt, Homo sapiens
  misc_RNA (1)...(19): siRNA sense strand
gguggaggcucuuccuuug

SEQ ID NO: 1776221 - RNA, 19 nt, Homo sapiens
  misc_RNA (1)...(19): siRNA sense strand
ggacaggugacaagaaaga

SEQ ID NO: 1776222 - RNA, 19 nt, Homo sapiens
  misc_RNA (1)...(19): siRNA sense strand
gaacaucugcguuucuauc

SEQ ID NO: 1776223 - RNA, 19 nt, Homo sapiens
  misc_RNA (1)...(19): siRNA sense strand
gaaaucaugguucugaaau

SEQ ID NO: 1776224 - RNA, 19 nt, Homo sapiens
  misc_RNA (1)...(19): siRNA sense strand
ggaagaugguuucacuauc

SEQ ID NO: 1776225 - RNA, 19 nt, Homo sapiens
  misc_RNA (1)...(19): siRNA sense strand
gaaaggaugccucccaaag

SEQ ID NO: 1776226 - RNA, 19 nt, Homo sapiens
  misc_RNA (1)...(19): siRNA sense strand
gagacagccuggcagagaa

SEQ ID NO: 1776227 - RNA, 19 nt, Homo sapiens
  misc_RNA (1)...(19): siRNA sense strand
gcagagaagccauacuguu

SEQ ID NO: 1776228 - RNA, 19 nt, Homo sapiens
  misc_RNA (1)...(19): siRNA sense strand
ugacccagcuggaugaaau

SEQ ID NO: 1776229 - RNA, 19 nt, Homo sapiens
  misc_RNA (1)...(19): siRNA sense strand
ccacagggcugaguacagu

SEQ ID NO: 1776230 - RNA, 19 nt, Homo sapiens
  misc_RNA (1)...(19): siRNA sense strand
gaaaucggacaucuggaaa

SEQ ID NO: 1776231 - RNA, 19 nt, Homo sapiens
  misc_RNA (1)...(19): siRNA sense strand
ggagaacccagacaacgaa

SEQ ID NO: 1776232 - RNA, 19 nt, Homo sapiens
  misc_RNA (1)...(19): siRNA sense strand
aggaacagcuggaugaaau

SEQ ID NO: 1776233 - RNA, 19 nt, Homo sapiens
  misc_RNA (1)...(19): siRNA sense strand
gacaagaaagaucuaacua

SEQ ID NO: 1776234 - RNA, 19 nt, Homo sapiens
  misc_RNA (1)...(19): siRNA sense strand
cagcuugugucucgaguug

SEQ ID NO: 1776235 - RNA, 19 nt, Homo sapiens
  misc_RNA (1)...(19): siRNA sense strand
gggaggaacaucugcguuu

SEQ ID NO: 1776236 - RNA, 19 nt, Homo sapiens
  misc_RNA (1)...(19): siRNA sense strand
uaaagaaaggcauuaagug

SEQ ID NO: 1776237 - RNA, 19 nt, Homo sapiens
  misc_RNA (1)...(19): siRNA sense strand
ggaggaacaucugcguuuc

SEQ ID NO: 1776238 - RNA, 19 nt, Homo sapiens
  misc_RNA (1)...(19): siRNA sense strand
gguaagcuguccaccaagu

SEQ ID NO: 1776239 - RNA, 19 nt, Homo sapiens
  misc_RNA (1)...(19): siRNA sense strand
gaauaugcuucuggacuca

SEQ ID NO: 1776240 - RNA, 19 nt, Homo sapiens
  misc_RNA (1)...(19): siRNA sense strand
agggucagcucacgaauga

SEQ ID NO: 1776241 - RNA, 19 nt, Homo sapiens
  misc_RNA (1)...(19): siRNA sense strand
aaagaaaggcauuaagugu

SEQ ID NO: 1776242 - RNA, 19 nt, Homo sapiens
  misc_RNA (1)...(19): siRNA sense strand
ccagcuggcuucuaaugau

SEQ ID NO: 1776243 - RNA, 19 nt, Homo sapiens
  misc_RNA (1)...(19): siRNA sense strand
cagagaagccauacuguuc

SEQ ID NO: 1776244 - RNA, 19 nt, Homo sapiens
  misc_RNA (1)...(19): siRNA sense strand
cgaaaucggacaucuggaa

SEQ ID NO: 1776245 - RNA, 19 nt, Homo sapiens
  misc_RNA (1)...(19): siRNA sense strand
agggaacagugccgucuua

SEQ ID NO: 1776246 - RNA, 19 nt, Homo sapiens
  misc_RNA (1)...(19): siRNA sense strand
cagcuggcuucuaaugauu

SEQ ID NO: 1776247 - RNA, 19 nt, Homo sapiens
  misc_RNA (1)...(19): siRNA sense strand
gaagagcagcacucgauca

SEQ ID NO: 1776248 - RNA, 19 nt, Homo sapiens
  misc_RNA (1)...(19): siRNA sense strand
gggaagguccauccucuga

SEQ ID NO: 1776249 - RNA, 19 nt, Homo sapiens
  misc_RNA (1)...(19): siRNA sense strand
ggagaaugagggcaacuug

SEQ ID NO: 1776250 - RNA, 19 nt, Homo sapiens
  misc_RNA (1)...(19): siRNA sense strand
gaacuugaugacagugauu

SEQ ID NO: 1776251 - RNA, 19 nt, Homo sapiens
  misc_RNA (1)...(19): siRNA sense strand
ggaacuugaugacagugau

SEQ ID NO: 1776252 - RNA, 19 nt, Homo sapiens
  misc_RNA (1)...(19): siRNA sense strand
ccaaguguauccagagucu

SEQ ID NO: 1776253 - RNA, 19 nt, Homo sapiens
  misc_RNA (1)...(19): siRNA sense strand
uaauaagccugguggugau

SEQ ID NO: 1776254 - RNA, 19 nt, Homo sapiens
  misc_RNA (1)...(19): siRNA sense strand
gagggaguccuucacaaga

SEQ ID NO: 1776255 - RNA, 19 nt, Homo sapiens
  misc_RNA (1)...(19): siRNA sense strand
cagaagagcagcacucgau

SEQ ID NO: 1776256 - RNA, 19 nt, Homo sapiens
  misc_RNA (1)...(19): siRNA sense strand
ucacaagagugggucauuc

SEQ ID NO: 1776257 - RNA, 19 nt, Homo sapiens
  misc_RNA (1)...(19): siRNA sense strand
cuaaagaaaggcauuaagu

SEQ ID NO: 1776258 - RNA, 19 nt, Homo sapiens
  misc_RNA (1)...(19): siRNA sense strand
aaggaugccucccaaagug

SEQ ID NO: 1776259 - RNA, 19 nt, Homo sapiens
  misc_RNA (1)...(19): siRNA sense strand
guuccacucuuacucugaa

SEQ ID NO: 1776260 - RNA, 19 nt, Homo sapiens
  misc_RNA (1)...(19): siRNA sense strand
gaccaaagagacacaguca

SEQ ID NO: 1776261 - RNA, 19 nt, Homo sapiens
  misc_RNA (1)...(19): siRNA sense strand
gaaggccuagugcguggua

SEQ ID NO: 1776262 - RNA, 19 nt, Homo sapiens
  misc_RNA (1)...(19): siRNA sense strand
ccacagaccccaucaaguu

SEQ ID NO: 1776263 - RNA, 19 nt, Homo sapiens
  misc_RNA (1)...(19): siRNA sense strand
agaagcagguggcagaaag

SEQ ID NO: 1776264 - RNA, 19 nt, Homo sapiens
  misc_RNA (1)...(19): siRNA sense strand
ggagaauagcgaagacuca

SEQ ID NO: 1776265 - RNA, 19 nt, Homo sapiens
  misc_RNA (1)...(19): siRNA sense strand
gaagcagguggcagaaaga

SEQ ID NO: 1776266 - RNA, 19 nt, Homo sapiens
  misc_RNA (1)...(19): siRNA sense strand
agaggaagaugguuucacu

SEQ ID NO: 1776267 - RNA, 19 nt, Homo sapiens
  misc_RNA (1)...(19): siRNA sense strand
cagagggaguccuucacaa

SEQ ID NO: 1776268 - RNA, 19 nt, Homo sapiens
  misc_RNA (1)...(19): siRNA sense strand
ugaaaucaugguucugaaa

SEQ ID NO: 1776269 - RNA, 19 nt, Homo sapiens
  misc_RNA (1)...(19): siRNA sense strand
guucacagguagauuucau

SEQ ID NO: 1776270 - RNA, 19 nt, Homo sapiens
  misc_RNA (1)...(19): siRNA sense strand
gaagagucagcaccauugu

SEQ ID NO: 1776271 - RNA, 19 nt, Homo sapiens
  misc_RNA (1)...(19): siRNA sense strand
ucaguuaccagucgaaauc

SEQ ID NO: 1776272 - RNA, 19 nt, Homo sapiens
  misc_RNA (1)...(19): siRNA sense strand
ccacugaacacacucucaa

SEQ ID NO: 1776273 - RNA, 19 nt, Homo sapiens
  misc_RNA (1)...(19): siRNA sense strand
aggaacaucugcguuucua

SEQ ID NO: 1776274 - RNA, 19 nt, Homo sapiens
  misc_RNA (1)...(19): siRNA sense strand
cagaagagucagcaccauu

SEQ ID NO: 1776275 - RNA, 19 nt, Homo sapiens
  misc_RNA (1)...(19): siRNA sense strand
aagaaaggcauuaaguguu

SEQ ID NO: 1776276 - RNA, 19 nt, Homo sapiens
  misc_RNA (1)...(19): siRNA sense strand
aaaggaacacccuggagaa

SEQ ID NO: 1776277 - RNA, 19 nt, Homo sapiens
  misc_RNA (1)...(19): siRNA sense strand
gcagacagugcagccagua

SEQ ID NO: 1776278 - RNA, 19 nt, Homo sapiens
  misc_RNA (1)...(19): siRNA sense strand
caagagugggucauucaug

SEQ ID NO: 1776279 - RNA, 19 nt, Homo sapiens
  misc_RNA (1)...(19): siRNA sense strand
uggcugagcucggcuucaa

SEQ ID NO: 1776280 - RNA, 19 nt, Homo sapiens
  misc_RNA (1)...(19): siRNA sense strand
agaagagucagcaccauug

SEQ ID NO: 1776281 - RNA, 19 nt, Homo sapiens
  misc_RNA (1)...(19): siRNA sense strand
gaacagcuggaugaaaugg

SEQ ID NO: 1776282 - RNA, 19 nt, Homo sapiens
  misc_RNA (1)...(19): siRNA sense strand
cauccgagcacaccaggaa

SEQ ID NO: 1776283 - RNA, 19 nt, Homo sapiens
  misc_RNA (1)...(19): siRNA sense strand
caggugaccagcacuguga

SEQ ID NO: 1776284 - RNA, 19 nt, Homo sapiens
  misc_RNA (1)...(19): siRNA sense strand
ccaccucuccuccaacaga

SEQ ID NO: 1776285 - RNA, 19 nt, Homo sapiens
  misc_RNA (1)...(19): siRNA sense strand
ggagagggaggaacaucug

SEQ ID NO: 1776286 - RNA, 19 nt, Homo sapiens
  misc_RNA (1)...(19): siRNA sense strand
acaaacaucccgccacauc

SEQ ID NO: 1776287 - RNA, 19 nt, Homo sapiens
  misc_RNA (1)...(19): siRNA sense strand
gagaagcagguggcagaaa

SEQ ID NO: 1776288 - RNA, 19 nt, Homo sapiens
  misc_RNA (1)...(19): siRNA sense strand
cagcugcucucccaagacu

SEQ ID NO: 1776289 - RNA, 19 nt, Homo sapiens
  misc_RNA (1)...(19): siRNA sense strand
gccagugucuucagcaacu

SEQ ID NO: 1776290 - RNA, 19 nt, Homo sapiens
  misc_RNA (1)...(19): siRNA sense strand
aggcacgcaugcugaauau

SEQ ID NO: 1776291 - RNA, 19 nt, Homo sapiens
  misc_RNA (1)...(19): siRNA sense strand
gaggaagaugguuucacua

SEQ ID NO: 1776292 - RNA, 19 nt, Homo sapiens
  misc_RNA (1)...(19): siRNA sense strand
ucacagguagauuucauau

SEQ ID NO: 1776293 - RNA, 19 nt, Homo sapiens
  misc_RNA (1)...(19): siRNA sense strand
caacauuccuuuuacuucu

SEQ ID NO: 1776294 - RNA, 19 nt, Homo sapiens
  misc_RNA (1)...(19): siRNA sense strand
ggaacagcuggaugaaaug

SEQ ID NO: 1776295 - RNA, 19 nt, Homo sapiens
  misc_RNA (1)...(19): siRNA sense strand
uggaggcucuuccuuugau

SEQ ID NO: 1776296 - RNA, 19 nt, Homo sapiens
  misc_RNA (1)...(19): siRNA sense strand
ucagagggccacaaagcaa

SEQ ID NO: 1776297 - RNA, 19 nt, Homo sapiens
  misc_RNA (1)...(19): siRNA sense strand
gggaguccuucacaagagu

SEQ ID NO: 1776298 - RNA, 19 nt, Homo sapiens
  misc_RNA (1)...(19): siRNA sense strand
gagugggucauucaugcua

SEQ ID NO: 1776299 - RNA, 19 nt, Homo sapiens
  misc_RNA (1)...(19): siRNA sense strand
ucaugguucugaaauccaa

SEQ ID NO: 1776300 - RNA, 19 nt, Homo sapiens
  misc_RNA (1)...(19): siRNA sense strand
uaggcacgcaugcugaaua

SEQ ID NO: 1776301 - RNA, 19 nt, Homo sapiens
  misc_RNA (1)...(19): siRNA sense strand
gacaaauguucucccaaaa

SEQ ID NO: 1776302 - RNA, 19 nt, Homo sapiens
  misc_RNA (1)...(19): siRNA sense strand
caaacaucccgccacauca

SEQ ID NO: 1776303 - RNA, 19 nt, Homo sapiens
  misc_RNA (1)...(19): siRNA sense strand
ugauggagcccaaguagag

SEQ ID NO: 1776304 - RNA, 19 nt, Homo sapiens
  misc_RNA (1)...(19): siRNA sense strand
agaggaacuugaugacagu

SEQ ID NO: 1776305 - RNA, 19 nt, Homo sapiens
  misc_RNA (1)...(19): siRNA sense strand
ccuaaggucucugguaaaa

SEQ ID NO: 1776306 - RNA, 19 nt, Homo sapiens
  misc_RNA (1)...(19): siRNA sense strand
aggaacacccuggagaaua

SEQ ID NO: 1776307 - RNA, 19 nt, Homo sapiens
  misc_RNA (1)...(19): siRNA sense strand
aaaucaugguucugaaauc

SEQ ID NO: 1776308 - RNA, 19 nt, Homo sapiens
  misc_RNA (1)...(19): siRNA sense strand
aaaggaugccucccaaagu

SEQ ID NO: 1776309 - RNA, 19 nt, Homo sapiens
  misc_RNA (1)...(19): siRNA sense strand
gagaagccauacuguucac

SEQ ID NO: 1776310 - RNA, 19 nt, Homo sapiens
  misc_RNA (1)...(19): siRNA sense strand
ggacaaauguucucccaaa

SEQ ID NO: 1776311 - RNA, 19 nt, Homo sapiens
  misc_RNA (1)...(19): siRNA sense strand
ggaacacccuggagaauag

SEQ ID NO: 1776312 - RNA, 19 nt, Homo sapiens
  misc_RNA (1)...(19): siRNA sense strand
gcaagaaagugcagacagu

SEQ ID NO: 1776313 - RNA, 19 nt, Homo sapiens
  misc_RNA (1)...(19): siRNA sense strand
gaacuaaagaaaggcauua

SEQ ID NO: 1776314 - RNA, 19 nt, Homo sapiens
  misc_RNA (1)...(19): siRNA sense strand
ggucaaagaacuaaagaaa

SEQ ID NO: 1776315 - RNA, 19 nt, Homo sapiens
  misc_RNA (1)...(19): siRNA sense strand
ucaaagaacuaaagaaagg

SEQ ID NO: 1776316 - RNA, 19 nt, Homo sapiens
  misc_RNA (1)...(19): siRNA sense strand
agaaaggcauuaaguguug

SEQ ID NO: 1776317 - RNA, 19 nt, Homo sapiens
  misc_RNA (1)...(19): siRNA sense strand
caggacaggugacaagaaa

SEQ ID NO: 1776318 - RNA, 19 nt, Homo sapiens
  misc_RNA (1)...(19): siRNA sense strand
gaguugagcucuccuuugg

SEQ ID NO: 1776319 - RNA, 19 nt, Homo sapiens
  misc_RNA (1)...(19): siRNA sense strand
gguggaggcucuuccuuug

SEQ ID NO: 1776320 - RNA, 19 nt, Homo sapiens
  misc_RNA (1)...(19): siRNA sense strand
ggacaggugacaagaaaga

SEQ ID NO: 1776321 - RNA, 19 nt, Homo sapiens
  misc_RNA (1)...(19): siRNA sense strand
gaacaucugcguuucuauc

SEQ ID NO: 1776322 - RNA, 19 nt, Homo sapiens
  misc_RNA (1)...(19): siRNA sense strand
ggaagaugguuucacuauc

SEQ ID NO: 1776323 - RNA, 19 nt, Homo sapiens
  misc_RNA (1)...(19): siRNA sense strand
gaaaggaugccucccaaag

SEQ ID NO: 1776324 - RNA, 19 nt, Homo sapiens
  misc_RNA (1)...(19): siRNA sense strand
gagacagccuggcagagaa

SEQ ID NO: 1776325 - RNA, 19 nt, Homo sapiens
  misc_RNA (1)...(19): siRNA sense strand
gcagagaagccauacuguu

SEQ ID NO: 1776326 - RNA, 19 nt, Homo sapiens
  misc_RNA (1)...(19): siRNA sense strand
ccacagggcugaguacagu

SEQ ID NO: 1776327 - RNA, 19 nt, Homo sapiens
  misc_RNA (1)...(19): siRNA sense strand
gaaaucggacaucuggaaa

SEQ ID NO: 1776328 - RNA, 19 nt, Homo sapiens
  misc_RNA (1)...(19): siRNA sense strand
ggagaacccagacaacgaa

SEQ ID NO: 1776329 - RNA, 19 nt, Homo sapiens
  misc_RNA (1)...(19): siRNA sense strand
gacaagaaagaucuaacua

SEQ ID NO: 1776330 - RNA, 19 nt, Homo sapiens
  misc_RNA (1)...(19): siRNA sense strand
cagcuugugucucgaguug

SEQ ID NO: 1776331 - RNA, 19 nt, Homo sapiens
  misc_RNA (1)...(19): siRNA sense strand
gggaggaacaucugcguuu

SEQ ID NO: 1776332 - RNA, 19 nt, Homo sapiens
  misc_RNA (1)...(19): siRNA sense strand
uaaagaaaggcauuaagug

SEQ ID NO: 1776333 - RNA, 19 nt, Homo sapiens
  misc_RNA (1)...(19): siRNA sense strand
ggaggaacaucugcguuuc

SEQ ID NO: 1776334 - RNA, 19 nt, Homo sapiens
  misc_RNA (1)...(19): siRNA sense strand
gguaagcuguccaccaagu

SEQ ID NO: 1776335 - RNA, 19 nt, Homo sapiens
  misc_RNA (1)...(19): siRNA sense strand
gaauaugcuucuggacuca

SEQ ID NO: 1776336 - RNA, 19 nt, Homo sapiens
  misc_RNA (1)...(19): siRNA sense strand
agggucagcucacgaauga

SEQ ID NO: 1776337 - RNA, 19 nt, Homo sapiens
  misc_RNA (1)...(19): siRNA sense strand
aaagaaaggcauuaagugu

SEQ ID NO: 1776338 - RNA, 19 nt, Homo sapiens
  misc_RNA (1)...(19): siRNA sense strand
cagagaagccauacuguuc

SEQ ID NO: 1776339 - RNA, 19 nt, Homo sapiens
  misc_RNA (1)...(19): siRNA sense strand
cgaaaucggacaucuggaa

SEQ ID NO: 1776340 - RNA, 19 nt, Homo sapiens
  misc_RNA (1)...(19): siRNA sense strand
gaagagcagcacucgauca

SEQ ID NO: 1776341 - RNA, 19 nt, Homo sapiens
  misc_RNA (1)...(19): siRNA sense strand
gggaagguccauccucuga

SEQ ID NO: 1776342 - RNA, 19 nt, Homo sapiens
  misc_RNA (1)...(19): siRNA sense strand
ggagaaugagggcaacuug

SEQ ID NO: 1776343 - RNA, 19 nt, Homo sapiens
  misc_RNA (1)...(19): siRNA sense strand
gaacuugaugacagugauu

SEQ ID NO: 1776344 - RNA, 19 nt, Homo sapiens
  misc_RNA (1)...(19): siRNA sense strand
ggaacuugaugacagugau

SEQ ID NO: 1776345 - RNA, 19 nt, Homo sapiens
  misc_RNA (1)...(19): siRNA sense strand
uaauaagccugguggugau

SEQ ID NO: 1776346 - RNA, 19 nt, Homo sapiens
  misc_RNA (1)...(19): siRNA sense strand
gagggaguccuucacaaga

SEQ ID NO: 1776347 - RNA, 19 nt, Homo sapiens
  misc_RNA (1)...(19): siRNA sense strand
cagaagagcagcacucgau

SEQ ID NO: 1776348 - RNA, 19 nt, Homo sapiens
  misc_RNA (1)...(19): siRNA sense strand
ucacaagagugggucauuc

SEQ ID NO: 1776349 - RNA, 19 nt, Homo sapiens
  misc_RNA (1)...(19): siRNA sense strand
cuaaagaaaggcauuaagu

SEQ ID NO: 1776350 - RNA, 19 nt, Homo sapiens
  misc_RNA (1)...(19): siRNA sense strand
aaggaugccucccaaagug

SEQ ID NO: 1776351 - RNA, 19 nt, Homo sapiens
  misc_RNA (1)...(19): siRNA sense strand
guuccacucuuacucugaa

SEQ ID NO: 1776352 - RNA, 19 nt, Homo sapiens
  misc_RNA (1)...(19): siRNA sense strand
gaccaaagagacacaguca

SEQ ID NO: 1776353 - RNA, 19 nt, Homo sapiens
  misc_RNA (1)...(19): siRNA sense strand
gaaggccuagugcguggua

SEQ ID NO: 1776354 - RNA, 19 nt, Homo sapiens
  misc_RNA (1)...(19): siRNA sense strand
ccacagaccccaucaaguu

SEQ ID NO: 1776355 - RNA, 19 nt, Homo sapiens
  misc_RNA (1)...(19): siRNA sense strand
agaagcagguggcagaaag

SEQ ID NO: 1776356 - RNA, 19 nt, Homo sapiens
  misc_RNA (1)...(19): siRNA sense strand
ggagaauagcgaagacuca

SEQ ID NO: 1776357 - RNA, 19 nt, Homo sapiens
  misc_RNA (1)...(19): siRNA sense strand
gaagcagguggcagaaaga

SEQ ID NO: 1776358 - RNA, 19 nt, Homo sapiens
  misc_RNA (1)...(19): siRNA sense strand
agaggaagaugguuucacu

SEQ ID NO: 1776359 - RNA, 19 nt, Homo sapiens
  misc_RNA (1)...(19): siRNA sense strand
cagagggaguccuucacaa

SEQ ID NO: 1776360 - RNA, 19 nt, Homo sapiens
  misc_RNA (1)...(19): siRNA sense strand
guucacagguagauuucau

SEQ ID NO: 1776361 - RNA, 19 nt, Homo sapiens
  misc_RNA (1)...(19): siRNA sense strand
gaagagucagcaccauugu

SEQ ID NO: 1776362 - RNA, 19 nt, Homo sapiens
  misc_RNA (1)...(19): siRNA sense strand
caugaucgccaacaucuca

SEQ ID NO: 1776363 - RNA, 19 nt, Homo sapiens
  misc_RNA (1)...(19): siRNA sense strand
aggaacaucugcguuucua

SEQ ID NO: 1776364 - RNA, 19 nt, Homo sapiens
  misc_RNA (1)...(19): siRNA sense strand
ccacugaacacacucucaa

SEQ ID NO: 1776365 - RNA, 19 nt, Homo sapiens
  misc_RNA (1)...(19): siRNA sense strand
ucaguuaccagucgaaauc

SEQ ID NO: 1776366 - RNA, 19 nt, Homo sapiens
  misc_RNA (1)...(19): siRNA sense strand
aagaaaggcauuaaguguu

SEQ ID NO: 1776367 - RNA, 19 nt, Homo sapiens
  misc_RNA (1)...(19): siRNA sense strand
aaaggaacacccuggagaa

SEQ ID NO: 1776368 - RNA, 19 nt, Homo sapiens
  misc_RNA (1)...(19): siRNA sense strand
gcagacagugcagccagua

SEQ ID NO: 1776369 - RNA, 19 nt, Homo sapiens
  misc_RNA (1)...(19): siRNA sense strand
cagaagagucagcaccauu

SEQ ID NO: 1776370 - RNA, 19 nt, Homo sapiens
  misc_RNA (1)...(19): siRNA sense strand
caagagugggucauucaug

SEQ ID NO: 1776371 - RNA, 19 nt, Homo sapiens
  misc_RNA (1)...(19): siRNA sense strand
agaagagucagcaccauug

SEQ ID NO: 1776372 - RNA, 19 nt, Homo sapiens
  misc_RNA (1)...(19): siRNA sense strand
caggugaccagcacuguga

SEQ ID NO: 1776373 - RNA, 19 nt, Homo sapiens
  misc_RNA (1)...(19): siRNA sense strand
ccaccucuccuccaacaga

SEQ ID NO: 1776374 - RNA, 19 nt, Homo sapiens
  misc_RNA (1)...(19): siRNA sense strand
ggagagggaggaacaucug

SEQ ID NO: 1776375 - RNA, 19 nt, Homo sapiens
  misc_RNA (1)...(19): siRNA sense strand
acaaacaucccgccacauc

SEQ ID NO: 1776376 - RNA, 19 nt, Homo sapiens
  misc_RNA (1)...(19): siRNA sense strand
gagaagcagguggcagaaa

SEQ ID NO: 1776377 - RNA, 19 nt, Homo sapiens
  misc_RNA (1)...(19): siRNA sense strand
gccagugucuucagcaacu

SEQ ID NO: 1776378 - RNA, 19 nt, Homo sapiens
  misc_RNA (1)...(19): siRNA sense strand
aggcacgcaugcugaauau

SEQ ID NO: 1776379 - RNA, 19 nt, Homo sapiens
  misc_RNA (1)...(19): siRNA sense strand
gaggaagaugguuucacua

SEQ ID NO: 1776380 - RNA, 19 nt, Homo sapiens
  misc_RNA (1)...(19): siRNA sense strand
ucacagguagauuucauau

SEQ ID NO: 1776381 - RNA, 19 nt, Homo sapiens
  misc_RNA (1)...(19): siRNA sense strand
caacauuccuuuuacuucu

SEQ ID NO: 1776382 - RNA, 19 nt, Homo sapiens
  misc_RNA (1)...(19): siRNA sense strand
uggaggcucuuccuuugau

SEQ ID NO: 1776383 - RNA, 19 nt, Homo sapiens
  misc_RNA (1)...(19): siRNA sense strand
ucagagggccacaaagcaa

SEQ ID NO: 1776384 - RNA, 19 nt, Homo sapiens
  misc_RNA (1)...(19): siRNA sense strand
gggaguccuucacaagagu

SEQ ID NO: 1776385 - RNA, 19 nt, Homo sapiens
  misc_RNA (1)...(19): siRNA sense strand
gagugggucauucaugcua

SEQ ID NO: 1776386 - RNA, 19 nt, Homo sapiens
  misc_RNA (1)...(19): siRNA sense strand
uaggcacgcaugcugaaua

SEQ ID NO: 1776387 - RNA, 19 nt, Homo sapiens
  misc_RNA (1)...(19): siRNA sense strand
gacaaauguucucccaaaa

SEQ ID NO: 1776388 - RNA, 19 nt, Homo sapiens
  misc_RNA (1)...(19): siRNA sense strand
caaacaucccgccacauca

SEQ ID NO: 1776389 - RNA, 19 nt, Homo sapiens
  misc_RNA (1)...(19): siRNA sense strand
ccuaaggucucugguaaaa

SEQ ID NO: 1776390 - RNA, 19 nt, Homo sapiens
  misc_RNA (1)...(19): siRNA sense strand
agaggaacuugaugacagu

SEQ ID NO: 1776391 - RNA, 19 nt, Homo sapiens
  misc_RNA (1)...(19): siRNA sense strand
ugauggagcccaaguagag

SEQ ID NO: 1776392 - RNA, 19 nt, Homo sapiens
  misc_RNA (1)...(19): siRNA sense strand
caacagaaguuaaaauacc

SEQ ID NO: 1776393 - RNA, 19 nt, Homo sapiens
  misc_RNA (1)...(19): siRNA sense strand
aaaggaugccucccaaagu

SEQ ID NO: 1776394 - RNA, 19 nt, Homo sapiens
  misc_RNA (1)...(19): siRNA sense strand
gagaagccauacuguucac

SEQ ID NO: 1776395 - RNA, 19 nt, Homo sapiens
  misc_RNA (1)...(19): siRNA sense strand
aggaacacccuggagaaua

SEQ ID NO: 1776396 - RNA, 19 nt, Homo sapiens
  misc_RNA (1)...(19): siRNA sense strand
gagggucagcucacgaaug

SEQ ID NO: 1776397 - RNA, 19 nt, Homo sapiens
  misc_RNA (1)...(19): siRNA sense strand
ggaaacuccucuccaaaac

SEQ ID NO: 1776398 - RNA, 19 nt, Homo sapiens
  misc_RNA (1)...(19): siRNA sense strand
ugguuucacuaucucauug

SEQ ID NO: 1776399 - RNA, 19 nt, Homo sapiens
  misc_RNA (1)...(19): siRNA sense strand
gagaauagcgaagacucau

SEQ ID NO: 1776400 - RNA, 19 nt, Homo sapiens
  misc_RNA (1)...(19): siRNA sense strand
cagagggccacaaagcaaa

SEQ ID NO: 1776401 - RNA, 19 nt, Homo sapiens
  misc_RNA (1)...(19): siRNA sense strand
ugaugacagugauuucagu

SEQ ID NO: 1776402 - RNA, 19 nt, Homo sapiens
  misc_RNA (1)...(19): siRNA sense strand
cgccucuguuccacucuua

SEQ ID NO: 1776403 - RNA, 19 nt, Homo sapiens
  misc_RNA (1)...(19): siRNA sense strand
gcuugugucucgaguugag

SEQ ID NO: 1776404 - RNA, 19 nt, Homo sapiens
  misc_RNA (1)...(19): siRNA sense strand
cucaacaccuugcgcuaug

SEQ ID NO: 1776405 - RNA, 19 nt, Homo sapiens
  misc_RNA (1)...(19): siRNA sense strand
cgaguugagcucuccuuug

SEQ ID NO: 1776406 - RNA, 19 nt, Homo sapiens
  misc_RNA (1)...(19): siRNA sense strand
ccaggacaggugacaagaa

SEQ ID NO: 1776407 - RNA, 19 nt, Homo sapiens
  misc_RNA (1)...(19): siRNA sense strand
aggaagaugguuucacuau

SEQ ID NO: 1776408 - RNA, 19 nt, Homo sapiens
  misc_RNA (1)...(19): siRNA sense strand
agagacagccuggcagaga

SEQ ID NO: 1776409 - RNA, 19 nt, Homo sapiens
  misc_RNA (1)...(19): siRNA sense strand
ugacaagaaagaucuaacu

SEQ ID NO: 1776410 - RNA, 19 nt, Homo sapiens
  misc_RNA (1)...(19): siRNA sense strand
gcagugaaguuguuaaaua

SEQ ID NO: 1776411 - RNA, 19 nt, Homo sapiens
  misc_RNA (1)...(19): siRNA sense strand
ggagaaagguuacuucaaa

SEQ ID NO: 1776412 - RNA, 19 nt, Homo sapiens
  misc_RNA (1)...(19): siRNA sense strand
gaagugcccuguuaaguuu

SEQ ID NO: 1776413 - RNA, 19 nt, Homo sapiens
  misc_RNA (1)...(19): siRNA sense strand
gaaagaagcacaguaauga

SEQ ID NO: 1776414 - RNA, 19 nt, Homo sapiens
  misc_RNA (1)...(19): siRNA sense strand
ugaauuaacuggaagacua

SEQ ID NO: 1776415 - RNA, 19 nt, Homo sapiens
  misc_RNA (1)...(19): siRNA sense strand
uaacgacacuggaaauuug

SEQ ID NO: 1776416 - RNA, 19 nt, Homo sapiens
  misc_RNA (1)...(19): siRNA sense strand
caagugaccuauacucauu

SEQ ID NO: 1776417 - RNA, 19 nt, Homo sapiens
  misc_RNA (1)...(19): siRNA sense strand
ggaagacuaucaaauaauc

SEQ ID NO: 1776418 - RNA, 19 nt, Homo sapiens
  misc_RNA (1)...(19): siRNA sense strand
gaaagaacauuugagaauc

SEQ ID NO: 1776419 - RNA, 19 nt, Homo sapiens
  misc_RNA (1)...(19): siRNA sense strand
gcacaguaaugaaacagaa

SEQ ID NO: 1776420 - RNA, 19 nt, Homo sapiens
  misc_RNA (1)...(19): siRNA sense strand
ggaagugcccuguuaaguu

SEQ ID NO: 1776421 - RNA, 19 nt, Homo sapiens
  misc_RNA (1)...(19): siRNA sense strand
ccaagcauguuaagagauu

SEQ ID NO: 1776422 - RNA, 19 nt, Homo sapiens
  misc_RNA (1)...(19): siRNA sense strand
aaucggaagugcccuguua

SEQ ID NO: 1776423 - RNA, 19 nt, Homo sapiens
  misc_RNA (1)...(19): siRNA sense strand
ucaacaaagucuaaccuaa

SEQ ID NO: 1776424 - RNA, 19 nt, Homo sapiens
  misc_RNA (1)...(19): siRNA sense strand
gcacaagaauuuauuucca

SEQ ID NO: 1776425 - RNA, 19 nt, Homo sapiens
  misc_RNA (1)...(19): siRNA sense strand
gagaaagguuacuucaaau

SEQ ID NO: 1776426 - RNA, 19 nt, Homo sapiens
  misc_RNA (1)...(19): siRNA sense strand
gaaaguuggaaaugugaua

SEQ ID NO: 1776427 - RNA, 19 nt, Homo sapiens
  misc_RNA (1)...(19): siRNA sense strand
caagugcccuuauuguaau

SEQ ID NO: 1776428 - RNA, 19 nt, Homo sapiens
  misc_RNA (1)...(19): siRNA sense strand
caaauaaucaucagugcaa

SEQ ID NO: 1776429 - RNA, 19 nt, Homo sapiens
  misc_RNA (1)...(19): siRNA sense strand
gaaacgucauauagaaugu

SEQ ID NO: 1776430 - RNA, 19 nt, Homo sapiens
  misc_RNA (1)...(19): siRNA sense strand
cagaagaaacacuaaauga

SEQ ID NO: 1776431 - RNA, 19 nt, Homo sapiens
  misc_RNA (1)...(19): siRNA sense strand
ggaggaacauaugauucua

SEQ ID NO: 1776432 - RNA, 19 nt, Homo sapiens
  misc_RNA (1)...(19): siRNA sense strand
caucuaggcuaucauaaag

SEQ ID NO: 1776433 - RNA, 19 nt, Homo sapiens
  misc_RNA (1)...(19): siRNA sense strand
ugaguacucugacauugaa

SEQ ID NO: 1776434 - RNA, 19 nt, Homo sapiens
  misc_RNA (1)...(19): siRNA sense strand
cuggaagacuaucaaauaa

SEQ ID NO: 1776435 - RNA, 19 nt, Homo sapiens
  misc_RNA (1)...(19): siRNA sense strand
gaugaguacucugacauug

SEQ ID NO: 1776436 - RNA, 19 nt, Homo sapiens
  misc_RNA (1)...(19): siRNA sense strand
aagaagaggagaaagguua

SEQ ID NO: 1776437 - RNA, 19 nt, Homo sapiens
  misc_RNA (1)...(19): siRNA sense strand
gaagcacaguaaugaaaca

SEQ ID NO: 1776438 - RNA, 19 nt, Homo sapiens
  misc_RNA (1)...(19): siRNA sense strand
cauauagaauguacucaug

SEQ ID NO: 1776439 - RNA, 19 nt, Homo sapiens
  misc_RNA (1)...(19): siRNA sense strand
ggaaauuugaaacgucaua

SEQ ID NO: 1776440 - RNA, 19 nt, Homo sapiens
  misc_RNA (1)...(19): siRNA sense strand
uuaagaagacuaagaguga

SEQ ID NO: 1776441 - RNA, 19 nt, Homo sapiens
  misc_RNA (1)...(19): siRNA sense strand
ggugaugggucagacaauu

SEQ ID NO: 1776442 - RNA, 19 nt, Homo sapiens
  misc_RNA (1)...(19): siRNA sense strand
acagaaagaagcacaguaa

SEQ ID NO: 1776443 - RNA, 19 nt, Homo sapiens
  misc_RNA (1)...(19): siRNA sense strand
caccagcgcuauucaacaa

SEQ ID NO: 1776444 - RNA, 19 nt, Homo sapiens
  misc_RNA (1)...(19): siRNA sense strand
ggucagacaauuugaauca

SEQ ID NO: 1776445 - RNA, 19 nt, Homo sapiens
  misc_RNA (1)...(19): siRNA sense strand
agagaaagcuuuuaaguuc

SEQ ID NO: 1776446 - RNA, 19 nt, Homo sapiens
  misc_RNA (1)...(19): siRNA sense strand
ccucaccuuuguaguauuu

SEQ ID NO: 1776447 - RNA, 19 nt, Homo sapiens
  misc_RNA (1)...(19): siRNA sense strand
uauauguggucgccaguuu

SEQ ID NO: 1776448 - RNA, 19 nt, Homo sapiens
  misc_RNA (1)...(19): siRNA sense strand
aggaggagaugucagauga

SEQ ID NO: 1776449 - RNA, 19 nt, Homo sapiens
  misc_RNA (1)...(19): siRNA sense strand
cauuauagaugcagugaag

SEQ ID NO: 1776450 - RNA, 19 nt, Homo sapiens
  misc_RNA (1)...(19): siRNA sense strand
guauagacuucacuuacga

SEQ ID NO: 1776451 - RNA, 19 nt, Homo sapiens
  misc_RNA (1)...(19): siRNA sense strand
gaaagguuacuucaaaucu

SEQ ID NO: 1776452 - RNA, 19 nt, Homo sapiens
  misc_RNA (1)...(19): siRNA sense strand
cagugcaaauucuguagua

SEQ ID NO: 1776453 - RNA, 19 nt, Homo sapiens
  misc_RNA (1)...(19): siRNA sense strand
aaacauuuauccgucauga

SEQ ID NO: 1776454 - RNA, 19 nt, Homo sapiens
  misc_RNA (1)...(19): siRNA sense strand
acuggaagacuaucaaaua

SEQ ID NO: 1776455 - RNA, 19 nt, Homo sapiens
  misc_RNA (1)...(19): siRNA sense strand
uagagaaucauuuggcuaa

SEQ ID NO: 1776456 - RNA, 19 nt, Homo sapiens
  misc_RNA (1)...(19): siRNA sense strand
ggcagaagcaaccaucuuu

SEQ ID NO: 1776457 - RNA, 19 nt, Homo sapiens
  misc_RNA (1)...(19): siRNA sense strand
gauucuacauucucaagau

SEQ ID NO: 1776458 - RNA, 19 nt, Homo sapiens
  misc_RNA (1)...(19): siRNA sense strand
gagugaaaguuggaaaugu

SEQ ID NO: 1776459 - RNA, 19 nt, Homo sapiens
  misc_RNA (1)...(19): siRNA sense strand
agacuaagagugaaaguug

SEQ ID NO: 1776460 - RNA, 19 nt, Homo sapiens
  misc_RNA (1)...(19): siRNA sense strand
uaacuccaguggucauuca

SEQ ID NO: 1776461 - RNA, 19 nt, Homo sapiens
  misc_RNA (1)...(19): siRNA sense strand
ucacguaacacauucaguu

SEQ ID NO: 1776462 - RNA, 19 nt, Homo sapiens
  misc_RNA (1)...(19): siRNA sense strand
gaauuaacuggaagacuau

SEQ ID NO: 1776463 - RNA, 19 nt, Homo sapiens
  misc_RNA (1)...(19): siRNA sense strand
gauaugagugcgaugaaug

SEQ ID NO: 1776464 - RNA, 19 nt, Homo sapiens
  misc_RNA (1)...(19): siRNA sense strand
agacuucacuuacgaguac

SEQ ID NO: 1776465 - RNA, 19 nt, Homo sapiens
  misc_RNA (1)...(19): siRNA sense strand
uaagaagacuaagagugaa

SEQ ID NO: 1776466 - RNA, 19 nt, Homo sapiens
  misc_RNA (1)...(19): siRNA sense strand
gcuauucaacaaagucuaa

SEQ ID NO: 1776467 - RNA, 19 nt, Homo sapiens
  misc_RNA (1)...(19): siRNA sense strand
gaggagaugucagaugagu

SEQ ID NO: 1776468 - RNA, 19 nt, Homo sapiens
  misc_RNA (1)...(19): siRNA sense strand
ugaagaagaugagcuagag

SEQ ID NO: 1776469 - RNA, 19 nt, Homo sapiens
  misc_RNA (1)...(19): siRNA sense strand
caaauucuguaguagacau

SEQ ID NO: 1776470 - RNA, 19 nt, Homo sapiens
  misc_RNA (1)...(19): siRNA sense strand
gcauuugcuugaauuucuu

SEQ ID NO: 1776471 - RNA, 19 nt, Homo sapiens
  misc_RNA (1)...(19): siRNA sense strand
caacaaagucuaaccuaac

SEQ ID NO: 1776472 - RNA, 19 nt, Homo sapiens
  misc_RNA (1)...(19): siRNA sense strand
gaacaggaaaguggugaug

SEQ ID NO: 1776473 - RNA, 19 nt, Homo sapiens
  misc_RNA (1)...(19): siRNA sense strand
gaagaagaggagaaagguu

SEQ ID NO: 1776474 - RNA, 19 nt, Homo sapiens
  misc_RNA (1)...(19): siRNA sense strand
uagaugcagugaaguuguu

SEQ ID NO: 1776475 - RNA, 19 nt, Homo sapiens
  misc_RNA (1)...(19): siRNA sense strand
gaaaauggacuugcuuuau

SEQ ID NO: 1776476 - RNA, 19 nt, Homo sapiens
  misc_RNA (1)...(19): siRNA sense strand
agaaagaagcacaguaaug

SEQ ID NO: 1776477 - RNA, 19 nt, Homo sapiens
  misc_RNA (1)...(19): siRNA sense strand
ggagaugucagaugaguac

SEQ ID NO: 1776478 - RNA, 19 nt, Homo sapiens
  misc_RNA (1)...(19): siRNA sense strand
cagcgaugaugaacaggaa

SEQ ID NO: 1776479 - RNA, 19 nt, Homo sapiens
  misc_RNA (1)...(19): siRNA sense strand
ccauaggucccuuuuauua

SEQ ID NO: 1776480 - RNA, 19 nt, Homo sapiens
  misc_RNA (1)...(19): siRNA sense strand
ugaggacccuggaagugaa

SEQ ID NO: 1776481 - RNA, 19 nt, Homo sapiens
  misc_RNA (1)...(19): siRNA sense strand
aagguuacuucaaaucuug

SEQ ID NO: 1776482 - RNA, 19 nt, Homo sapiens
  misc_RNA (1)...(19): siRNA sense strand
gaucagagaaagcuuuuaa

SEQ ID NO: 1776483 - RNA, 19 nt, Homo sapiens
  misc_RNA (1)...(19): siRNA sense strand
gugaauauaaugcugaaga

SEQ ID NO: 1776484 - RNA, 19 nt, Homo sapiens
  misc_RNA (1)...(19): siRNA sense strand
gggcaaaguuuucgucaug

SEQ ID NO: 1776485 - RNA, 19 nt, Homo sapiens
  misc_RNA (1)...(19): siRNA sense strand
ccagaagaaacacuaaaug

SEQ ID NO: 1776486 - RNA, 19 nt, Homo sapiens
  misc_RNA (1)...(19): siRNA sense strand
cgucauggaaguucguaua

SEQ ID NO: 1776487 - RNA, 19 nt, Homo sapiens
  misc_RNA (1)...(19): siRNA sense strand
ccaucuaggcuaucauaaa

SEQ ID NO: 1776488 - RNA, 19 nt, Homo sapiens
  misc_RNA (1)...(19): siRNA sense strand
aagaagcacaguaaugaaa

SEQ ID NO: 1776489 - RNA, 19 nt, Homo sapiens
  misc_RNA (1)...(19): siRNA sense strand
aaagucaucaccagaagaa

SEQ ID NO: 1776490 - RNA, 19 nt, Homo sapiens
  misc_RNA (1)...(19): siRNA sense strand
ugaaacgucauauagaaug

SEQ ID NO: 1776491 - RNA, 19 nt, Homo sapiens
  misc_RNA (1)...(19): siRNA sense strand
gaccacacuuggaggaaca

SEQ ID NO: 1776492 - RNA, 19 nt, Homo sapiens
  misc_RNA (1)...(19): siRNA sense strand
caaagucuaaccuaacugu

SEQ ID NO: 1776493 - RNA, 19 nt, Homo sapiens
  misc_RNA (1)...(19): siRNA sense strand
gaugucagaugaguacucu

SEQ ID NO: 1776494 - RNA, 19 nt, Homo sapiens
  misc_RNA (1)...(19): siRNA sense strand
gaggagaaagguuacuuca

SEQ ID NO: 1776495 - RNA, 19 nt, Homo sapiens
  misc_RNA (1)...(19): siRNA sense strand
ccagaucagagaaagcuuu

SEQ ID NO: 1776496 - RNA, 19 nt, Homo sapiens
  misc_RNA (1)...(19): siRNA sense strand
gucaugaucaccuuacaaa

SEQ ID NO: 1776497 - RNA, 19 nt, Homo sapiens
  misc_RNA (1)...(19): siRNA sense strand
ugagaagcccuuugagugu

SEQ ID NO: 1776498 - RNA, 19 nt, Homo sapiens
  misc_RNA (1)...(19): siRNA sense strand
gcaguguccuaaaugugau

SEQ ID NO: 1776499 - RNA, 19 nt, Homo sapiens
  misc_RNA (1)...(19): siRNA sense strand
gagaaucauuuggcuaaaa

SEQ ID NO: 1776500 - RNA, 19 nt, Homo sapiens
  misc_RNA (1)...(19): siRNA sense strand
gaaaagucaucaccagaag

SEQ ID NO: 1776501 - RNA, 19 nt, Homo sapiens
  misc_RNA (1)...(19): siRNA sense strand
uuuagaggcugcaaaauuu

SEQ ID NO: 1776502 - RNA, 19 nt, Homo sapiens
  misc_RNA (1)...(19): siRNA sense strand
gcuugaauuucuuuacaca

SEQ ID NO: 1776503 - RNA, 19 nt, Homo sapiens
  misc_RNA (1)...(19): siRNA sense strand
guacgagaaagaacuacuu

SEQ ID NO: 1776504 - RNA, 19 nt, Homo sapiens
  misc_RNA (1)...(19): siRNA sense strand
aaauggacuugcuuuaucu

SEQ ID NO: 1776505 - RNA, 19 nt, Homo sapiens
  misc_RNA (1)...(19): siRNA sense strand
ggaaaagucagauagaaau

SEQ ID NO: 1776506 - RNA, 19 nt, Homo sapiens
  misc_RNA (1)...(19): siRNA sense strand
aaucaucagugcaaauucu

SEQ ID NO: 1776507 - RNA, 19 nt, Homo sapiens
  misc_RNA (1)...(19): siRNA sense strand
uaacuggaagacuaucaaa

SEQ ID NO: 1776508 - RNA, 19 nt, Homo sapiens
  misc_RNA (1)...(19): siRNA sense strand
ucuaggcuaucauaaagau

SEQ ID NO: 1776509 - RNA, 19 nt, Homo sapiens
  misc_RNA (1)...(19): siRNA sense strand
uuaaguguaccuauuguga

SEQ ID NO: 1776510 - RNA, 19 nt, Homo sapiens
  misc_RNA (1)...(19): siRNA sense strand
gcagugaaguuguuaaaua

SEQ ID NO: 1776511 - RNA, 19 nt, Homo sapiens
  misc_RNA (1)...(19): siRNA sense strand
gaauguaucugcugaagua

SEQ ID NO: 1776512 - RNA, 19 nt, Homo sapiens
  misc_RNA (1)...(19): siRNA sense strand
ggagaaagguuacuucaaa

SEQ ID NO: 1776513 - RNA, 19 nt, Homo sapiens
  misc_RNA (1)...(19): siRNA sense strand
gaagugcccuguuaaguuu

SEQ ID NO: 1776514 - RNA, 19 nt, Homo sapiens
  misc_RNA (1)...(19): siRNA sense strand
ggaaagacaagcugaaaua

SEQ ID NO: 1776515 - RNA, 19 nt, Homo sapiens
  misc_RNA (1)...(19): siRNA sense strand
gaaagaagcacaguaauga

SEQ ID NO: 1776516 - RNA, 19 nt, Homo sapiens
  misc_RNA (1)...(19): siRNA sense strand
ugaauuaacuggaagacua

SEQ ID NO: 1776517 - RNA, 19 nt, Homo sapiens
  misc_RNA (1)...(19): siRNA sense strand
uaacgacacuggaaauuug

SEQ ID NO: 1776518 - RNA, 19 nt, Homo sapiens
  misc_RNA (1)...(19): siRNA sense strand
caagugaccuauacucauu

SEQ ID NO: 1776519 - RNA, 19 nt, Homo sapiens
  misc_RNA (1)...(19): siRNA sense strand
ggaagacuaucaaauaauc

SEQ ID NO: 1776520 - RNA, 19 nt, Homo sapiens
  misc_RNA (1)...(19): siRNA sense strand
gaaagaacauuugagaauc

SEQ ID NO: 1776521 - RNA, 19 nt, Homo sapiens
  misc_RNA (1)...(19): siRNA sense strand
ugaaguauguguuccagua

SEQ ID NO: 1776522 - RNA, 19 nt, Homo sapiens
  misc_RNA (1)...(19): siRNA sense strand
gcacaguaaugaaacagaa

SEQ ID NO: 1776523 - RNA, 19 nt, Homo sapiens
  misc_RNA (1)...(19): siRNA sense strand
gaacaaaugcuagauccua

SEQ ID NO: 1776524 - RNA, 19 nt, Homo sapiens
  misc_RNA (1)...(19): siRNA sense strand
ccauacaagugucaaauuu

SEQ ID NO: 1776525 - RNA, 19 nt, Homo sapiens
  misc_RNA (1)...(19): siRNA sense strand
gaacauuacugggccuuga

SEQ ID NO: 1776526 - RNA, 19 nt, Homo sapiens
  misc_RNA (1)...(19): siRNA sense strand
ggaagugcccuguuaaguu

SEQ ID NO: 1776527 - RNA, 19 nt, Homo sapiens
  misc_RNA (1)...(19): siRNA sense strand
ccaagacgauguuacagaa

SEQ ID NO: 1776528 - RNA, 19 nt, Homo sapiens
  misc_RNA (1)...(19): siRNA sense strand
ccaagcauguuaagagauu

SEQ ID NO: 1776529 - RNA, 19 nt, Homo sapiens
  misc_RNA (1)...(19): siRNA sense strand
gaaauaaaaucuccugaug

SEQ ID NO: 1776530 - RNA, 19 nt, Homo sapiens
  misc_RNA (1)...(19): siRNA sense strand
aaucggaagugcccuguua

SEQ ID NO: 1776531 - RNA, 19 nt, Homo sapiens
  misc_RNA (1)...(19): siRNA sense strand
ucaacaaagucuaaccuaa

SEQ ID NO: 1776532 - RNA, 19 nt, Homo sapiens
  misc_RNA (1)...(19): siRNA sense strand
gaacaaucuuaucuuggaa

SEQ ID NO: 1776533 - RNA, 19 nt, Homo sapiens
  misc_RNA (1)...(19): siRNA sense strand
gcacaagaauuuauuucca

SEQ ID NO: 1776534 - RNA, 19 nt, Homo sapiens
  misc_RNA (1)...(19): siRNA sense strand
gagaaagguuacuucaaau

SEQ ID NO: 1776535 - RNA, 19 nt, Homo sapiens
  misc_RNA (1)...(19): siRNA sense strand
gaaaguuggaaaugugaua

SEQ ID NO: 1776536 - RNA, 19 nt, Homo sapiens
  misc_RNA (1)...(19): siRNA sense strand
caagugcccuuauuguaau

SEQ ID NO: 1776537 - RNA, 19 nt, Homo sapiens
  misc_RNA (1)...(19): siRNA sense strand
caaaucaagucuggaaaug

SEQ ID NO: 1776538 - RNA, 19 nt, Homo sapiens
  misc_RNA (1)...(19): siRNA sense strand
caaauaaucaucagugcaa

SEQ ID NO: 1776539 - RNA, 19 nt, Homo sapiens
  misc_RNA (1)...(19): siRNA sense strand
aaauauaguucacccaguu

SEQ ID NO: 1776540 - RNA, 19 nt, Homo sapiens
  misc_RNA (1)...(19): siRNA sense strand
ggauuuagcuuuucuggaa

SEQ ID NO: 1776541 - RNA, 19 nt, Homo sapiens
  misc_RNA (1)...(19): siRNA sense strand
gaaacgucauauagaaugu

SEQ ID NO: 1776542 - RNA, 19 nt, Homo sapiens
  misc_RNA (1)...(19): siRNA sense strand
agagaacaaucuuaucuug

SEQ ID NO: 1776543 - RNA, 19 nt, Homo sapiens
  misc_RNA (1)...(19): siRNA sense strand
cagaagaaacacuaaauga

SEQ ID NO: 1776544 - RNA, 19 nt, Homo sapiens
  misc_RNA (1)...(19): siRNA sense strand
ggaggaacauaugauucua

SEQ ID NO: 1776545 - RNA, 19 nt, Homo sapiens
  misc_RNA (1)...(19): siRNA sense strand
ugaguacucugacauugaa

SEQ ID NO: 1776546 - RNA, 19 nt, Homo sapiens
  misc_RNA (1)...(19): siRNA sense strand
caucuaggcuaucauaaag

SEQ ID NO: 1776547 - RNA, 19 nt, Homo sapiens
  misc_RNA (1)...(19): siRNA sense strand
cuggaagacuaucaaauaa

SEQ ID NO: 1776548 - RNA, 19 nt, Homo sapiens
  misc_RNA (1)...(19): siRNA sense strand
agaacaaucuuaucuugga

SEQ ID NO: 1776549 - RNA, 19 nt, Homo sapiens
  misc_RNA (1)...(19): siRNA sense strand
gagcagcggauuuagcuuu

SEQ ID NO: 1776550 - RNA, 19 nt, Homo sapiens
  misc_RNA (1)...(19): siRNA sense strand
caaaacaccugguuauuca

SEQ ID NO: 1776551 - RNA, 19 nt, Homo sapiens
  misc_RNA (1)...(19): siRNA sense strand
aagaagaggagaaagguua

SEQ ID NO: 1776552 - RNA, 19 nt, Homo sapiens
  misc_RNA (1)...(19): siRNA sense strand
gggaucaucucacuguuca

SEQ ID NO: 1776553 - RNA, 19 nt, Homo sapiens
  misc_RNA (1)...(19): siRNA sense strand
gaugaguacucugacauug

SEQ ID NO: 1776554 - RNA, 19 nt, Homo sapiens
  misc_RNA (1)...(19): siRNA sense strand
gaagcacaguaaugaaaca

SEQ ID NO: 1776555 - RNA, 19 nt, Homo sapiens
  misc_RNA (1)...(19): siRNA sense strand
ggagagaaaguguggcaaa

SEQ ID NO: 1776556 - RNA, 19 nt, Homo sapiens
  misc_RNA (1)...(19): siRNA sense strand
cauauagaauguacucaug

SEQ ID NO: 1776557 - RNA, 19 nt, Homo sapiens
  misc_RNA (1)...(19): siRNA sense strand
ggaaauuugaaacgucaua

SEQ ID NO: 1776558 - RNA, 19 nt, Homo sapiens
  misc_RNA (1)...(19): siRNA sense strand
uuaagaagacuaagaguga

SEQ ID NO: 1776559 - RNA, 19 nt, Homo sapiens
  misc_RNA (1)...(19): siRNA sense strand
ggugaugggucagacaauu

SEQ ID NO: 1776560 - RNA, 19 nt, Homo sapiens
  misc_RNA (1)...(19): siRNA sense strand
gcaaaucaagucuggaaau

SEQ ID NO: 1776561 - RNA, 19 nt, Homo sapiens
  misc_RNA (1)...(19): siRNA sense strand
acagaaagaagcacaguaa

SEQ ID NO: 1776562 - RNA, 19 nt, Homo sapiens
  misc_RNA (1)...(19): siRNA sense strand
caccagcgcuauucaacaa

SEQ ID NO: 1776563 - RNA, 19 nt, Homo sapiens
  misc_RNA (1)...(19): siRNA sense strand
ggucagacaauuugaauca

SEQ ID NO: 1776564 - RNA, 19 nt, Homo sapiens
  misc_RNA (1)...(19): siRNA sense strand
agagaaagcuuuuaaguuc

SEQ ID NO: 1776565 - RNA, 19 nt, Homo sapiens
  misc_RNA (1)...(19): siRNA sense strand
gaaguauguguuccaguaa

SEQ ID NO: 1776566 - RNA, 19 nt, Homo sapiens
  misc_RNA (1)...(19): siRNA sense strand
ccucaccuuuguaguauuu

SEQ ID NO: 1776567 - RNA, 19 nt, Homo sapiens
  misc_RNA (1)...(19): siRNA sense strand
uauauguggucgccaguuu

SEQ ID NO: 1776568 - RNA, 19 nt, Homo sapiens
  misc_RNA (1)...(19): siRNA sense strand
aggaggagaugucagauga

SEQ ID NO: 1776569 - RNA, 19 nt, Homo sapiens
  misc_RNA (1)...(19): siRNA sense strand
cauuauagaugcagugaag

SEQ ID NO: 1776570 - RNA, 19 nt, Homo sapiens
  misc_RNA (1)...(19): siRNA sense strand
gaaagguuacuucaaaucu

SEQ ID NO: 1776571 - RNA, 19 nt, Homo sapiens
  misc_RNA (1)...(19): siRNA sense strand
guauagacuucacuuacga

SEQ ID NO: 1776572 - RNA, 19 nt, Homo sapiens
  misc_RNA (1)...(19): siRNA sense strand
cagugcaaauucuguagua

SEQ ID NO: 1776573 - RNA, 19 nt, Homo sapiens
  misc_RNA (1)...(19): siRNA sense strand
aaacauuuauccgucauga

SEQ ID NO: 1776574 - RNA, 19 nt, Homo sapiens
  misc_RNA (1)...(19): siRNA sense strand
gaucaucucacuguucauu

SEQ ID NO: 1776575 - RNA, 19 nt, Homo sapiens
  misc_RNA (1)...(19): siRNA sense strand
acuggaagacuaucaaaua

SEQ ID NO: 1776576 - RNA, 19 nt, Homo sapiens
  misc_RNA (1)...(19): siRNA sense strand
uagagaaucauuuggcuaa

SEQ ID NO: 1776577 - RNA, 19 nt, Homo sapiens
  misc_RNA (1)...(19): siRNA sense strand
ggcagaagcaaccaucuuu

SEQ ID NO: 1776578 - RNA, 19 nt, Homo sapiens
  misc_RNA (1)...(19): siRNA sense strand
gauucuacauucucaagau

SEQ ID NO: 1776579 - RNA, 19 nt, Homo sapiens
  misc_RNA (1)...(19): siRNA sense strand
gagugaaaguuggaaaugu

SEQ ID NO: 1776580 - RNA, 19 nt, Homo sapiens
  misc_RNA (1)...(19): siRNA sense strand
agacuaagagugaaaguug

SEQ ID NO: 1776581 - RNA, 19 nt, Homo sapiens
  misc_RNA (1)...(19): siRNA sense strand
uaacuccaguggucauuca

SEQ ID NO: 1776582 - RNA, 19 nt, Homo sapiens
  misc_RNA (1)...(19): siRNA sense strand
ucacguaacacauucaguu

SEQ ID NO: 1776583 - RNA, 19 nt, Homo sapiens
  misc_RNA (1)...(19): siRNA sense strand
gaauuaacuggaagacuau

SEQ ID NO: 1776584 - RNA, 19 nt, Homo sapiens
  misc_RNA (1)...(19): siRNA sense strand
ugucagcacuguaaugcaa

SEQ ID NO: 1776585 - RNA, 19 nt, Homo sapiens
  misc_RNA (1)...(19): siRNA sense strand
gauaugagugcgaugaaug

SEQ ID NO: 1776586 - RNA, 19 nt, Homo sapiens
  misc_RNA (1)...(19): siRNA sense strand
agacuucacuuacgaguac

SEQ ID NO: 1776587 - RNA, 19 nt, Homo sapiens
  misc_RNA (1)...(19): siRNA sense strand
uaagaagacuaagagugaa

SEQ ID NO: 1776588 - RNA, 19 nt, Homo sapiens
  misc_RNA (1)...(19): siRNA sense strand
gcuauucaacaaagucuaa

SEQ ID NO: 1776589 - RNA, 19 nt, Homo sapiens
  misc_RNA (1)...(19): siRNA sense strand
gaggagaugucagaugagu

SEQ ID NO: 1776590 - RNA, 19 nt, Homo sapiens
  misc_RNA (1)...(19): siRNA sense strand
ugaagaagaugagcuagag

SEQ ID NO: 1776591 - RNA, 19 nt, Homo sapiens
  misc_RNA (1)...(19): siRNA sense strand
caaauucuguaguagacau

SEQ ID NO: 1776592 - RNA, 19 nt, Homo sapiens
  misc_RNA (1)...(19): siRNA sense strand
aagcugaaauaccacauug

SEQ ID NO: 1776593 - RNA, 19 nt, Homo sapiens
  misc_RNA (1)...(19): siRNA sense strand
gcucaucagugugaagaau

SEQ ID NO: 1776594 - RNA, 19 nt, Homo sapiens
  misc_RNA (1)...(19): siRNA sense strand
gcauuugcuugaauuucuu

SEQ ID NO: 1776595 - RNA, 19 nt, Homo sapiens
  misc_RNA (1)...(19): siRNA sense strand
gaagaagaggagaaagguu

SEQ ID NO: 1776596 - RNA, 19 nt, Homo sapiens
  misc_RNA (1)...(19): siRNA sense strand
ggaccagcccaaaguuuau

SEQ ID NO: 1776597 - RNA, 19 nt, Homo sapiens
  misc_RNA (1)...(19): siRNA sense strand
caacaaagucuaaccuaac

SEQ ID NO: 1776598 - RNA, 19 nt, Homo sapiens
  misc_RNA (1)...(19): siRNA sense strand
gaacaggaaaguggugaug

SEQ ID NO: 1776599 - RNA, 19 nt, Homo sapiens
  misc_RNA (1)...(19): siRNA sense strand
uagaugcagugaaguuguu

SEQ ID NO: 1776600 - RNA, 19 nt, Homo sapiens
  misc_RNA (1)...(19): siRNA sense strand
aagacaagcugaaauacca

SEQ ID NO: 1776601 - RNA, 19 nt, Homo sapiens
  misc_RNA (1)...(19): siRNA sense strand
gaaaauggacuugcuuuau

SEQ ID NO: 1776602 - RNA, 19 nt, Homo sapiens
  misc_RNA (1)...(19): siRNA sense strand
agaaagaagcacaguaaug

SEQ ID NO: 1776603 - RNA, 19 nt, Homo sapiens
  misc_RNA (1)...(19): siRNA sense strand
ggagaugucagaugaguac

SEQ ID NO: 1776604 - RNA, 19 nt, Homo sapiens
  misc_RNA (1)...(19): siRNA sense strand
cagcgaugaugaacaggaa

SEQ ID NO: 1776605 - RNA, 19 nt, Homo sapiens
  misc_RNA (1)...(19): siRNA sense strand
ccauaggucccuuuuauua

SEQ ID NO: 1776606 - RNA, 19 nt, Homo sapiens
  misc_RNA (1)...(19): siRNA sense strand
ugaggacccuggaagugaa

SEQ ID NO: 1776607 - RNA, 19 nt, Homo sapiens
  misc_RNA (1)...(19): siRNA sense strand
aaucaagucuggaaaugca

SEQ ID NO: 1776608 - RNA, 19 nt, Homo sapiens
  misc_RNA (1)...(19): siRNA sense strand
gacaaaaucuuucaaacag

SEQ ID NO: 1776609 - RNA, 19 nt, Homo sapiens
  misc_RNA (1)...(19): siRNA sense strand
aagguuacuucaaaucuug

SEQ ID NO: 1776610 - RNA, 19 nt, Homo sapiens
  misc_RNA (1)...(19): siRNA sense strand
gcugagauguucaacuuug

SEQ ID NO: 1776611 - RNA, 19 nt, Homo sapiens
  misc_RNA (1)...(19): siRNA sense strand
guucaacuuuggagaauga

SEQ ID NO: 1776612 - RNA, 19 nt, Homo sapiens
  misc_RNA (1)...(19): siRNA sense strand
ccacaucucccgccuggua

SEQ ID NO: 1776613 - RNA, 19 nt, Homo sapiens
  misc_RNA (1)...(19): siRNA sense strand
aagcugagauguucaacuu

SEQ ID NO: 1776614 - RNA, 19 nt, Homo sapiens
  misc_RNA (1)...(19): siRNA sense strand
gcaaggagcgcaucaucau

SEQ ID NO: 1776615 - RNA, 19 nt, Homo sapiens
  misc_RNA (1)...(19): siRNA sense strand
ggacaucugcggcuacauc

SEQ ID NO: 1776616 - RNA, 19 nt, Homo sapiens
  misc_RNA (1)...(19): siRNA sense strand
ucacggcacgggacaauga

SEQ ID NO: 1776617 - RNA, 19 nt, Homo sapiens
  misc_RNA (1)...(19): siRNA sense strand
gauguucaacuuuggagaa

SEQ ID NO: 1776618 - RNA, 19 nt, Homo sapiens
  misc_RNA (1)...(19): siRNA sense strand
cuacaucaaccgcagcuuu

SEQ ID NO: 1776619 - RNA, 19 nt, Homo sapiens
  misc_RNA (1)...(19): siRNA sense strand
ccuggaggauggaagaaga

SEQ ID NO: 1776620 - RNA, 19 nt, Homo sapiens
  misc_RNA (1)...(19): siRNA sense strand
gaggacaucugcggcuaca

SEQ ID NO: 1776621 - RNA, 19 nt, Homo sapiens
  misc_RNA (1)...(19): siRNA sense strand
cagcagcgcagcaccauca

SEQ ID NO: 1776622 - RNA, 19 nt, Homo sapiens
  misc_RNA (1)...(19): siRNA sense strand
ggaccugaccugccucaag

SEQ ID NO: 1776623 - RNA, 19 nt, Homo sapiens
  misc_RNA (1)...(19): siRNA sense strand
caacuggaaggccaucaug

SEQ ID NO: 1776624 - RNA, 19 nt, Homo sapiens
  misc_RNA (1)...(19): siRNA sense strand
ggagguacucacagacuca

SEQ ID NO: 1776625 - RNA, 19 nt, Homo sapiens
  misc_RNA (1)...(19): siRNA sense strand
gcagaggcccaggacaaug

SEQ ID NO: 1776626 - RNA, 19 nt, Homo sapiens
  misc_RNA (1)...(19): siRNA sense strand
gccuggagguacucacaga

SEQ ID NO: 1776627 - RNA, 19 nt, Homo sapiens
  misc_RNA (1)...(19): siRNA sense strand
ggaagcggcaggugauggu

SEQ ID NO: 1776628 - RNA, 19 nt, Homo sapiens
  misc_RNA (1)...(19): siRNA sense strand
ucgucuggcuggucacauu

SEQ ID NO: 1776629 - RNA, 19 nt, Homo sapiens
  misc_RNA (1)...(19): siRNA sense strand
gguacucacagacucauca

SEQ ID NO: 1776630 - RNA, 19 nt, Homo sapiens
  misc_RNA (1)...(19): siRNA sense strand
caaggagcgcaucaucaug

SEQ ID NO: 1776631 - RNA, 19 nt, Homo sapiens
  misc_RNA (1)...(19): siRNA sense strand
cggcuucgaggacaucaaa

SEQ ID NO: 1776632 - RNA, 19 nt, Homo sapiens
  misc_RNA (1)...(19): siRNA sense strand
ccacgacgcagcagagaac

SEQ ID NO: 1776633 - RNA, 19 nt, Homo sapiens
  misc_RNA (1)...(19): siRNA sense strand
gucaggaguaugagaguga

SEQ ID NO: 1776634 - RNA, 19 nt, Homo sapiens
  misc_RNA (1)...(19): siRNA sense strand
gccugucccugcugcugaa

SEQ ID NO: 1776635 - RNA, 19 nt, Homo sapiens
  misc_RNA (1)...(19): siRNA sense strand
uacaucaaccgcagcuuug

SEQ ID NO: 1776636 - RNA, 19 nt, Homo sapiens
  misc_RNA (1)...(19): siRNA sense strand
gcaacuggaaggccaucau

SEQ ID NO: 1776637 - RNA, 19 nt, Homo sapiens
  misc_RNA (1)...(19): siRNA sense strand
cuucaacggugaggacauc

SEQ ID NO: 1776638 - RNA, 19 nt, Homo sapiens
  misc_RNA (1)...(19): siRNA sense strand
gcagcuuugccuucuggaa

SEQ ID NO: 1776639 - RNA, 19 nt, Homo sapiens
  misc_RNA (1)...(19): siRNA sense strand
gcugagauguucaacuuug

SEQ ID NO: 1776640 - RNA, 19 nt, Homo sapiens
  misc_RNA (1)...(19): siRNA sense strand
guucaacuuuggagaauga

SEQ ID NO: 1776641 - RNA, 19 nt, Homo sapiens
  misc_RNA (1)...(19): siRNA sense strand
ccacaucucccgccuggua

SEQ ID NO: 1776642 - RNA, 19 nt, Homo sapiens
  misc_RNA (1)...(19): siRNA sense strand
aagcugagauguucaacuu

SEQ ID NO: 1776643 - RNA, 19 nt, Homo sapiens
  misc_RNA (1)...(19): siRNA sense strand
gcaaggagcgcaucaucau

SEQ ID NO: 1776644 - RNA, 19 nt, Homo sapiens
  misc_RNA (1)...(19): siRNA sense strand
ggacaucugcggcuacauc

SEQ ID NO: 1776645 - RNA, 19 nt, Homo sapiens
  misc_RNA (1)...(19): siRNA sense strand
ucacggcacgggacaauga

SEQ ID NO: 1776646 - RNA, 19 nt, Homo sapiens
  misc_RNA (1)...(19): siRNA sense strand
gauguucaacuuuggagaa

SEQ ID NO: 1776647 - RNA, 19 nt, Homo sapiens
  misc_RNA (1)...(19): siRNA sense strand
cuacaucaaccgcagcuuu

SEQ ID NO: 1776648 - RNA, 19 nt, Homo sapiens
  misc_RNA (1)...(19): siRNA sense strand
ccuggaggauggaagaaga

SEQ ID NO: 1776649 - RNA, 19 nt, Homo sapiens
  misc_RNA (1)...(19): siRNA sense strand
gaggacaucugcggcuaca

SEQ ID NO: 1776650 - RNA, 19 nt, Homo sapiens
  misc_RNA (1)...(19): siRNA sense strand
cagcagcgcagcaccauca

SEQ ID NO: 1776651 - RNA, 19 nt, Homo sapiens
  misc_RNA (1)...(19): siRNA sense strand
ggaccugaccugccucaag

SEQ ID NO: 1776652 - RNA, 19 nt, Homo sapiens
  misc_RNA (1)...(19): siRNA sense strand
caacuggaaggccaucaug

SEQ ID NO: 1776653 - RNA, 19 nt, Homo sapiens
  misc_RNA (1)...(19): siRNA sense strand
ggagguacucacagacuca

SEQ ID NO: 1776654 - RNA, 19 nt, Homo sapiens
  misc_RNA (1)...(19): siRNA sense strand
gcagaggcccaggacaaug

SEQ ID NO: 1776655 - RNA, 19 nt, Homo sapiens
  misc_RNA (1)...(19): siRNA sense strand
gccuggagguacucacaga

SEQ ID NO: 1776656 - RNA, 19 nt, Homo sapiens
  misc_RNA (1)...(19): siRNA sense strand
ggaagcggcaggugauggu

SEQ ID NO: 1776657 - RNA, 19 nt, Homo sapiens
  misc_RNA (1)...(19): siRNA sense strand
ucgucuggcuggucacauu

SEQ ID NO: 1776658 - RNA, 19 nt, Homo sapiens
  misc_RNA (1)...(19): siRNA sense strand
gguacucacagacucauca

SEQ ID NO: 1776659 - RNA, 19 nt, Homo sapiens
  misc_RNA (1)...(19): siRNA sense strand
caaggagcgcaucaucaug

SEQ ID NO: 1776660 - RNA, 19 nt, Homo sapiens
  misc_RNA (1)...(19): siRNA sense strand
cggcuucgaggacaucaaa

SEQ ID NO: 1776661 - RNA, 19 nt, Homo sapiens
  misc_RNA (1)...(19): siRNA sense strand
ccacgacgcagcagagaac

SEQ ID NO: 1776662 - RNA, 19 nt, Homo sapiens
  misc_RNA (1)...(19): siRNA sense strand
gucaggaguaugagaguga

SEQ ID NO: 1776663 - RNA, 19 nt, Homo sapiens
  misc_RNA (1)...(19): siRNA sense strand
gccugucccugcugcugaa

SEQ ID NO: 1776664 - RNA, 19 nt, Homo sapiens
  misc_RNA (1)...(19): siRNA sense strand
uacaucaaccgcagcuuug

SEQ ID NO: 1776665 - RNA, 19 nt, Homo sapiens
  misc_RNA (1)...(19): siRNA sense strand
gcaacuggaaggccaucau

SEQ ID NO: 1776666 - RNA, 19 nt, Homo sapiens
  misc_RNA (1)...(19): siRNA sense strand
cuucaacggugaggacauc

SEQ ID NO: 1776667 - RNA, 19 nt, Homo sapiens
  misc_RNA (1)...(19): siRNA sense strand
gcagcuuugccuucuggaa

SEQ ID NO: 1776668 - RNA, 19 nt, Homo sapiens
  misc_RNA (1)...(19): siRNA sense strand
ugaauacgcugauauaaga

SEQ ID NO: 1776669 - RNA, 19 nt, Homo sapiens
  misc_RNA (1)...(19): siRNA sense strand
caagaaaccuuccuuccuu

SEQ ID NO: 1776670 - RNA, 19 nt, Homo sapiens
  misc_RNA (1)...(19): siRNA sense strand
gaaagugaauacgcugaua

SEQ ID NO: 1776671 - RNA, 19 nt, Homo sapiens
  misc_RNA (1)...(19): siRNA sense strand
aaaauacucuucccucaaa

SEQ ID NO: 1776672 - RNA, 19 nt, Homo sapiens
  misc_RNA (1)...(19): siRNA sense strand
ugucggaaguggagaaguu

SEQ ID NO: 1776673 - RNA, 19 nt, Homo sapiens
  misc_RNA (1)...(19): siRNA sense strand
caagagagaaagugaauac

SEQ ID NO: 1776674 - RNA, 19 nt, Homo sapiens
  misc_RNA (1)...(19): siRNA sense strand
ggucaaaacugaagaaaac

SEQ ID NO: 1776675 - RNA, 19 nt, Homo sapiens
  misc_RNA (1)...(19): siRNA sense strand
gauauaagaagcaagaaac

SEQ ID NO: 1776676 - RNA, 19 nt, Homo sapiens
  misc_RNA (1)...(19): siRNA sense strand
gcaagagagaaagugaaua

SEQ ID NO: 1776677 - RNA, 19 nt, Homo sapiens
  misc_RNA (1)...(19): siRNA sense strand
gcugauauaagaagcaaga

SEQ ID NO: 1776678 - RNA, 19 nt, Homo sapiens
  misc_RNA (1)...(19): siRNA sense strand
gcaagaaaccuuccuuccu

SEQ ID NO: 1776679 - RNA, 19 nt, Homo sapiens
  misc_RNA (1)...(19): siRNA sense strand
cgauauggcaagagagaaa

SEQ ID NO: 1776680 - RNA, 19 nt, Homo sapiens
  misc_RNA (1)...(19): siRNA sense strand
gugaauacgcugauauaag

SEQ ID NO: 1776681 - RNA, 19 nt, Homo sapiens
  misc_RNA (1)...(19): siRNA sense strand
ggcaagagagaaagugaau

SEQ ID NO: 1776682 - RNA, 19 nt, Homo sapiens
  misc_RNA (1)...(19): siRNA sense strand
aagugaauacgcugauaua

SEQ ID NO: 1776683 - RNA, 19 nt, Homo sapiens
  misc_RNA (1)...(19): siRNA sense strand
gaauacgcugauauaagaa

SEQ ID NO: 1776684 - RNA, 19 nt, Homo sapiens
  misc_RNA (1)...(19): siRNA sense strand
aaagugaauacgcugauau

SEQ ID NO: 1776685 - RNA, 19 nt, Homo sapiens
  misc_RNA (1)...(19): siRNA sense strand
uuccagaugugugucagua

SEQ ID NO: 1776686 - RNA, 19 nt, Homo sapiens
  misc_RNA (1)...(19): siRNA sense strand
gaaguggagaaguuugaca

SEQ ID NO: 1776687 - RNA, 19 nt, Homo sapiens
  misc_RNA (1)...(19): siRNA sense strand
auaagaagcaagaaaccuu

SEQ ID NO: 1776688 - RNA, 19 nt, Homo sapiens
  misc_RNA (1)...(19): siRNA sense strand
ugugcgauauggcaagaga

SEQ ID NO: 1776689 - RNA, 19 nt, Homo sapiens
  misc_RNA (1)...(19): siRNA sense strand
gugauaaaccagacuuguc

SEQ ID NO: 1776690 - RNA, 19 nt, Homo sapiens
  misc_RNA (1)...(19): siRNA sense strand
cggaaguggagaaguuuga

SEQ ID NO: 1776691 - RNA, 19 nt, Homo sapiens
  misc_RNA (1)...(19): siRNA sense strand
uaugugcgauauggcaaga

SEQ ID NO: 1776692 - RNA, 19 nt, Homo sapiens
  misc_RNA (1)...(19): siRNA sense strand
ggaugucacucagccauau

SEQ ID NO: 1776693 - RNA, 19 nt, Homo sapiens
  misc_RNA (1)...(19): siRNA sense strand
gcaaacucauccuuacaca

SEQ ID NO: 1776694 - RNA, 19 nt, Homo sapiens
  misc_RNA (1)...(19): siRNA sense strand
gaaggaaagacuccagugu

SEQ ID NO: 1776695 - RNA, 19 nt, Homo sapiens
  misc_RNA (1)...(19): siRNA sense strand
gaaaauggucuaaaguuga

SEQ ID NO: 1776696 - RNA, 19 nt, Homo sapiens
  misc_RNA (1)...(19): siRNA sense strand
gcgauggcccaguuucuuu

SEQ ID NO: 1776697 - RNA, 19 nt, Homo sapiens
  misc_RNA (1)...(19): siRNA sense strand
caaacgggcagaugcaaug

SEQ ID NO: 1776698 - RNA, 19 nt, Homo sapiens
  misc_RNA (1)...(19): siRNA sense strand
aaaguugacuguggugaug

SEQ ID NO: 1776699 - RNA, 19 nt, Homo sapiens
  misc_RNA (1)...(19): siRNA sense strand
ggacaaacgggcagaugca

SEQ ID NO: 1776700 - RNA, 19 nt, Homo sapiens
  misc_RNA (1)...(19): siRNA sense strand
ugaaaauggucuaaaguug

SEQ ID NO: 1776701 - RNA, 19 nt, Homo sapiens
  misc_RNA (1)...(19): siRNA sense strand
gggaugucacucagccaua

SEQ ID NO: 1776702 - RNA, 19 nt, Homo sapiens
  misc_RNA (1)...(19): siRNA sense strand
cguaacacauggccagaac

SEQ ID NO: 1776703 - RNA, 19 nt, Homo sapiens
  misc_RNA (1)...(19): siRNA sense strand
ccugcaaacucauccuuac

SEQ ID NO: 1776704 - RNA, 19 nt, Homo sapiens
  misc_RNA (1)...(19): siRNA sense strand
uaaaguugacuguggugau

SEQ ID NO: 1776705 - RNA, 19 nt, Homo sapiens
  misc_RNA (1)...(19): siRNA sense strand
gcugcgugaucccguaaca

SEQ ID NO: 1776706 - RNA, 19 nt, Homo sapiens
  misc_RNA (1)...(19): siRNA sense strand
ucagccauaugaaggaaag

SEQ ID NO: 1776707 - RNA, 19 nt, Homo sapiens
  misc_RNA (1)...(19): siRNA sense strand
acagcagcgugacucaaga

SEQ ID NO: 1776708 - RNA, 19 nt, Homo sapiens
  misc_RNA (1)...(19): siRNA sense strand
uaacacauggccagaacag

SEQ ID NO: 1776709 - RNA, 19 nt, Homo sapiens
  misc_RNA (1)...(19): siRNA sense strand
ugacaagaaucgauuugag

SEQ ID NO: 1776710 - RNA, 19 nt, Homo sapiens
  misc_RNA (1)...(19): siRNA sense strand
cgacggcuuugacaagaau

SEQ ID NO: 1776711 - RNA, 19 nt, Homo sapiens
  misc_RNA (1)...(19): siRNA sense strand
caagaaucgauuugaguga

SEQ ID NO: 1776712 - RNA, 19 nt, Homo sapiens
  misc_RNA (1)...(19): siRNA sense strand
gacaagaaucgauuugagu

SEQ ID NO: 1776713 - RNA, 19 nt, Homo sapiens
  misc_RNA (1)...(19): siRNA sense strand
gcacccaggcucucacagu

SEQ ID NO: 1776714 - RNA, 19 nt, Homo sapiens
  misc_RNA (1)...(19): siRNA sense strand
ccacgacggcuuugacaag

SEQ ID NO: 1776715 - RNA, 19 nt, Homo sapiens
  misc_RNA (1)...(19): siRNA sense strand
cacgacggcuuugacaaga

SEQ ID NO: 1776716 - RNA, 19 nt, Homo sapiens
  misc_RNA (1)...(19): siRNA sense strand
gcuuugacaagaaucgauu

SEQ ID NO: 1776717 - RNA, 19 nt, Homo sapiens
  misc_RNA (1)...(19): siRNA sense strand
guccuggccuccuccucaa

SEQ ID NO: 1776718 - RNA, 19 nt, Homo sapiens
  misc_RNA (1)...(19): siRNA sense strand
gcucaguguucucagcuua

SEQ ID NO: 1776719 - RNA, 19 nt, Homo sapiens
  misc_RNA (1)...(19): siRNA sense strand
ggucuuaucggaauaugaa

SEQ ID NO: 1776720 - RNA, 19 nt, Homo sapiens
  misc_RNA (1)...(19): siRNA sense strand
gagaagacacucaggaagu

SEQ ID NO: 1776721 - RNA, 19 nt, Homo sapiens
  misc_RNA (1)...(19): siRNA sense strand
ucaguucugcggcucauua

SEQ ID NO: 1776722 - RNA, 19 nt, Homo sapiens
  misc_RNA (1)...(19): siRNA sense strand
ggaggcaggcucaguguuc

SEQ ID NO: 1776723 - RNA, 19 nt, Homo sapiens
  misc_RNA (1)...(19): siRNA sense strand
agaagacacucaggaaguc

SEQ ID NO: 1776724 - RNA, 19 nt, Homo sapiens
  misc_RNA (1)...(19): siRNA sense strand
ucagccaacagcaguauau

SEQ ID NO: 1776725 - RNA, 19 nt, Homo sapiens
  misc_RNA (1)...(19): siRNA sense strand
gaggcaggcucaguguucu

SEQ ID NO: 1776726 - RNA, 19 nt, Homo sapiens
  misc_RNA (1)...(19): siRNA sense strand
gcuuaucaccagacacuca

SEQ ID NO: 1776727 - RNA, 19 nt, Homo sapiens
  misc_RNA (1)...(19): siRNA sense strand
uaugggucuuaucggaaua

SEQ ID NO: 1776728 - RNA, 19 nt, Homo sapiens
  misc_RNA (1)...(19): siRNA sense strand
uggagaagacacucaggaa

SEQ ID NO: 1776729 - RNA, 19 nt, Homo sapiens
  misc_RNA (1)...(19): siRNA sense strand
guucugcggcucauuaguc

SEQ ID NO: 1776730 - RNA, 19 nt, Homo sapiens
  misc_RNA (1)...(19): siRNA sense strand
guccacagagccugaaugu

SEQ ID NO: 1776731 - RNA, 19 nt, Homo sapiens
  misc_RNA (1)...(19): siRNA sense strand
ucaguguucucagcuuauc

SEQ ID NO: 1776732 - RNA, 19 nt, Homo sapiens
  misc_RNA (1)...(19): siRNA sense strand
auaugggucuuaucggaau

SEQ ID NO: 1776733 - RNA, 19 nt, Homo sapiens
  misc_RNA (1)...(19): siRNA sense strand
gaaguccacagagccugaa

SEQ ID NO: 1776734 - RNA, 19 nt, Homo sapiens
  misc_RNA (1)...(19): siRNA sense strand
cagcuuaucaccagacacu

SEQ ID NO: 1776735 - RNA, 19 nt, Homo sapiens
  misc_RNA (1)...(19): siRNA sense strand
agaaggagcuguucaguaa

SEQ ID NO: 1776736 - RNA, 19 nt, Homo sapiens
  misc_RNA (1)...(19): siRNA sense strand
ggaagaggcucggcucaga

SEQ ID NO: 1776737 - RNA, 19 nt, Homo sapiens
  misc_RNA (1)...(19): siRNA sense strand
gauaugaaguggauugaag

SEQ ID NO: 1776738 - RNA, 19 nt, Homo sapiens
  misc_RNA (1)...(19): siRNA sense strand
ugaaguggauugaagagaa

SEQ ID NO: 1776739 - RNA, 19 nt, Homo sapiens
  misc_RNA (1)...(19): siRNA sense strand
gagaaggagcuguucagua

SEQ ID NO: 1776740 - RNA, 19 nt, Homo sapiens
  misc_RNA (1)...(19): siRNA sense strand
uugcggagcugaugaagaa

SEQ ID NO: 1776741 - RNA, 19 nt, Homo sapiens
  misc_RNA (1)...(19): siRNA sense strand
gaaguggauugaagagaag

SEQ ID NO: 1776742 - RNA, 19 nt, Homo sapiens
  misc_RNA (1)...(19): siRNA sense strand
ggacgcagagcgagaaguu

SEQ ID NO: 1776743 - RNA, 19 nt, Homo sapiens
  misc_RNA (1)...(19): siRNA sense strand
uggaagccaugcuguauga

SEQ ID NO: 1776744 - RNA, 19 nt, Homo sapiens
  misc_RNA (1)...(19): siRNA sense strand
ggauagaggaccuggagaa

SEQ ID NO: 1776745 - RNA, 19 nt, Homo sapiens
  misc_RNA (1)...(19): siRNA sense strand
gcacuguaccggagaaauc

SEQ ID NO: 1776746 - RNA, 19 nt, Homo sapiens
  misc_RNA (1)...(19): siRNA sense strand
acgccaaccugaccaauga

SEQ ID NO: 1776747 - RNA, 19 nt, Homo sapiens
  misc_RNA (1)...(19): siRNA sense strand
gaaaagaucaaacaaaugg

SEQ ID NO: 1776748 - RNA, 19 nt, Homo sapiens
  misc_RNA (1)...(19): siRNA sense strand
ugaagaagcuggacauccu

SEQ ID NO: 1776749 - RNA, 19 nt, Homo sapiens
  misc_RNA (1)...(19): siRNA sense strand
ggcaggauaugaaguggau

SEQ ID NO: 1776750 - RNA, 19 nt, Homo sapiens
  misc_RNA (1)...(19): siRNA sense strand
gaagccaugcuguaugaug

SEQ ID NO: 1776751 - RNA, 19 nt, Homo sapiens
  misc_RNA (1)...(19): siRNA sense strand
ccggagaaaucaagagcuu

SEQ ID NO: 1776752 - RNA, 19 nt, Homo sapiens
  misc_RNA (1)...(19): siRNA sense strand
aaaacgagcugcuggaguu

SEQ ID NO: 1776753 - RNA, 19 nt, Homo sapiens
  misc_RNA (1)...(19): siRNA sense strand
gaagagaagcaggcacugu

SEQ ID NO: 1776754 - RNA, 19 nt, Homo sapiens
  misc_RNA (1)...(19): siRNA sense strand
ggagcaggugguugucaua

SEQ ID NO: 1776755 - RNA, 19 nt, Homo sapiens
  misc_RNA (1)...(19): siRNA sense strand
aagagaagcaggcacugua

SEQ ID NO: 1776756 - RNA, 19 nt, Homo sapiens
  misc_RNA (1)...(19): siRNA sense strand
gagcuggacuaccggaaac

SEQ ID NO: 1776757 - RNA, 19 nt, Homo sapiens
  misc_RNA (1)...(19): siRNA sense strand
gcaggacgccagagaccaa

SEQ ID NO: 1776758 - RNA, 19 nt, Homo sapiens
  misc_RNA (1)...(19): siRNA sense strand
ggagcuggacuaccggaaa

SEQ ID NO: 1776759 - RNA, 19 nt, Homo sapiens
  misc_RNA (1)...(19): siRNA sense strand
guccugaccuuggccgaaa

SEQ ID NO: 1776760 - RNA, 19 nt, Homo sapiens
  misc_RNA (1)...(19): siRNA sense strand
acgcagagcgagaaguuaa

SEQ ID NO: 1776761 - RNA, 19 nt, Homo sapiens
  misc_RNA (1)...(19): siRNA sense strand
gaaggugugacggacauug

SEQ ID NO: 1776762 - RNA, 19 nt, Homo sapiens
  misc_RNA (1)...(19): siRNA sense strand
gcuggaagccaugcuguau

SEQ ID NO: 1776763 - RNA, 19 nt, Homo sapiens
  misc_RNA (1)...(19): siRNA sense strand
aaaaguggcuccagcagau

SEQ ID NO: 1776764 - RNA, 19 nt, Homo sapiens
  misc_RNA (1)...(19): siRNA sense strand
ggaagucacccgccaucag

SEQ ID NO: 1776765 - RNA, 19 nt, Homo sapiens
  misc_RNA (1)...(19): siRNA sense strand
gcagcuacaagccgaagug

SEQ ID NO: 1776766 - RNA, 19 nt, Homo sapiens
  misc_RNA (1)...(19): siRNA sense strand
caggauaugaaguggauug

SEQ ID NO: 1776767 - RNA, 19 nt, Homo sapiens
  misc_RNA (1)...(19): siRNA sense strand
gaggagagggagaggaagu

SEQ ID NO: 1776768 - RNA, 19 nt, Homo sapiens
  misc_RNA (1)...(19): siRNA sense strand
ggaaaagaucaaacaaaug

SEQ ID NO: 1776769 - RNA, 19 nt, Homo sapiens
  misc_RNA (1)...(19): siRNA sense strand
ggauaugaaguggauugaa

SEQ ID NO: 1776770 - RNA, 19 nt, Homo sapiens
  misc_RNA (1)...(19): siRNA sense strand
gauagaggaccuggagaag

SEQ ID NO: 1776771 - RNA, 19 nt, Homo sapiens
  misc_RNA (1)...(19): siRNA sense strand
gcacauccuggagcuggaa

SEQ ID NO: 1776772 - RNA, 19 nt, Homo sapiens
  misc_RNA (1)...(19): siRNA sense strand
guacugcgaggccgaaggu

SEQ ID NO: 1776773 - RNA, 19 nt, Homo sapiens
  misc_RNA (1)...(19): siRNA sense strand
ccgaaggugugacggacau

SEQ ID NO: 1776774 - RNA, 19 nt, Homo sapiens
  misc_RNA (1)...(19): siRNA sense strand
ggagagggagaggaaguca

SEQ ID NO: 1776775 - RNA, 19 nt, Homo sapiens
  misc_RNA (1)...(19): siRNA sense strand
gacgcagagcgagaaguua

SEQ ID NO: 1776776 - RNA, 19 nt, Homo sapiens
  misc_RNA (1)...(19): siRNA sense strand
ggacgaggagcuggacuac

SEQ ID NO: 1776777 - RNA, 19 nt, Homo sapiens
  misc_RNA (1)...(19): siRNA sense strand
agaaggagcuguucaguaa

SEQ ID NO: 1776778 - RNA, 19 nt, Homo sapiens
  misc_RNA (1)...(19): siRNA sense strand
ggaagaggcucggcucaga

SEQ ID NO: 1776779 - RNA, 19 nt, Homo sapiens
  misc_RNA (1)...(19): siRNA sense strand
gauaugaaguggauugaag

SEQ ID NO: 1776780 - RNA, 19 nt, Homo sapiens
  misc_RNA (1)...(19): siRNA sense strand
ugaaguggauugaagagaa

SEQ ID NO: 1776781 - RNA, 19 nt, Homo sapiens
  misc_RNA (1)...(19): siRNA sense strand
gagaaggagcuguucagua

SEQ ID NO: 1776782 - RNA, 19 nt, Homo sapiens
  misc_RNA (1)...(19): siRNA sense strand
uugcggagcugaugaagaa

SEQ ID NO: 1776783 - RNA, 19 nt, Homo sapiens
  misc_RNA (1)...(19): siRNA sense strand
gaaguggauugaagagaag

SEQ ID NO: 1776784 - RNA, 19 nt, Homo sapiens
  misc_RNA (1)...(19): siRNA sense strand
ggacgcagagcgagaaguu

SEQ ID NO: 1776785 - RNA, 19 nt, Homo sapiens
  misc_RNA (1)...(19): siRNA sense strand
uggaagccaugcuguauga

SEQ ID NO: 1776786 - RNA, 19 nt, Homo sapiens
  misc_RNA (1)...(19): siRNA sense strand
ggauagaggaccuggagaa

SEQ ID NO: 1776787 - RNA, 19 nt, Homo sapiens
  misc_RNA (1)...(19): siRNA sense strand
gcacuguaccggagaaauc

SEQ ID NO: 1776788 - RNA, 19 nt, Homo sapiens
  misc_RNA (1)...(19): siRNA sense strand
acgccaaccugaccaauga

SEQ ID NO: 1776789 - RNA, 19 nt, Homo sapiens
  misc_RNA (1)...(19): siRNA sense strand
gaaaagaucaaacaaaugg

SEQ ID NO: 1776790 - RNA, 19 nt, Homo sapiens
  misc_RNA (1)...(19): siRNA sense strand
ugaagaagcuggacauccu

SEQ ID NO: 1776791 - RNA, 19 nt, Homo sapiens
  misc_RNA (1)...(19): siRNA sense strand
ggcaggauaugaaguggau

SEQ ID NO: 1776792 - RNA, 19 nt, Homo sapiens
  misc_RNA (1)...(19): siRNA sense strand
gaagccaugcuguaugaug

SEQ ID NO: 1776793 - RNA, 19 nt, Homo sapiens
  misc_RNA (1)...(19): siRNA sense strand
ccggagaaaucaagagcuu

SEQ ID NO: 1776794 - RNA, 19 nt, Homo sapiens
  misc_RNA (1)...(19): siRNA sense strand
aaaacgagcugcuggaguu

SEQ ID NO: 1776795 - RNA, 19 nt, Homo sapiens
  misc_RNA (1)...(19): siRNA sense strand
gaagagaagcaggcacugu

SEQ ID NO: 1776796 - RNA, 19 nt, Homo sapiens
  misc_RNA (1)...(19): siRNA sense strand
ggagcaggugguugucaua

SEQ ID NO: 1776797 - RNA, 19 nt, Homo sapiens
  misc_RNA (1)...(19): siRNA sense strand
aagagaagcaggcacugua

SEQ ID NO: 1776798 - RNA, 19 nt, Homo sapiens
  misc_RNA (1)...(19): siRNA sense strand
gagcuggacuaccggaaac

SEQ ID NO: 1776799 - RNA, 19 nt, Homo sapiens
  misc_RNA (1)...(19): siRNA sense strand
gcaggacgccagagaccaa

SEQ ID NO: 1776800 - RNA, 19 nt, Homo sapiens
  misc_RNA (1)...(19): siRNA sense strand
ggagcuggacuaccggaaa

SEQ ID NO: 1776801 - RNA, 19 nt, Homo sapiens
  misc_RNA (1)...(19): siRNA sense strand
guccugaccuuggccgaaa

SEQ ID NO: 1776802 - RNA, 19 nt, Homo sapiens
  misc_RNA (1)...(19): siRNA sense strand
acgcagagcgagaaguuaa

SEQ ID NO: 1776803 - RNA, 19 nt, Homo sapiens
  misc_RNA (1)...(19): siRNA sense strand
gaaggugugacggacauug

SEQ ID NO: 1776804 - RNA, 19 nt, Homo sapiens
  misc_RNA (1)...(19): siRNA sense strand
gcuggaagccaugcuguau

SEQ ID NO: 1776805 - RNA, 19 nt, Homo sapiens
  misc_RNA (1)...(19): siRNA sense strand
aaaaguggcuccagcagau

SEQ ID NO: 1776806 - RNA, 19 nt, Homo sapiens
  misc_RNA (1)...(19): siRNA sense strand
ggaagucacccgccaucag

SEQ ID NO: 1776807 - RNA, 19 nt, Homo sapiens
  misc_RNA (1)...(19): siRNA sense strand
gcagcuacaagccgaagug

SEQ ID NO: 1776808 - RNA, 19 nt, Homo sapiens
  misc_RNA (1)...(19): siRNA sense strand
caggauaugaaguggauug

SEQ ID NO: 1776809 - RNA, 19 nt, Homo sapiens
  misc_RNA (1)...(19): siRNA sense strand
gaggagagggagaggaagu

SEQ ID NO: 1776810 - RNA, 19 nt, Homo sapiens
  misc_RNA (1)...(19): siRNA sense strand
ggauaugaaguggauugaa

SEQ ID NO: 1776811 - RNA, 19 nt, Homo sapiens
  misc_RNA (1)...(19): siRNA sense strand
ggaaaagaucaaacaaaug

SEQ ID NO: 1776812 - RNA, 19 nt, Homo sapiens
  misc_RNA (1)...(19): siRNA sense strand
gauagaggaccuggagaag

SEQ ID NO: 1776813 - RNA, 19 nt, Homo sapiens
  misc_RNA (1)...(19): siRNA sense strand
gcacauccuggagcuggaa

SEQ ID NO: 1776814 - RNA, 19 nt, Homo sapiens
  misc_RNA (1)...(19): siRNA sense strand
guacugcgaggccgaaggu

SEQ ID NO: 1776815 - RNA, 19 nt, Homo sapiens
  misc_RNA (1)...(19): siRNA sense strand
ccgaaggugugacggacau

SEQ ID NO: 1776816 - RNA, 19 nt, Homo sapiens
  misc_RNA (1)...(19): siRNA sense strand
ggagagggagaggaaguca

SEQ ID NO: 1776817 - RNA, 19 nt, Homo sapiens
  misc_RNA (1)...(19): siRNA sense strand
gacgcagagcgagaaguua

SEQ ID NO: 1776818 - RNA, 19 nt, Homo sapiens
  misc_RNA (1)...(19): siRNA sense strand
ggacgaggagcuggacuac

SEQ ID NO: 1776819 - RNA, 19 nt, Homo sapiens
  misc_RNA (1)...(19): siRNA sense strand
gaucucagcucacugcaaa

SEQ ID NO: 1776820 - RNA, 19 nt, Homo sapiens
  misc_RNA (1)...(19): siRNA sense strand
ggauggccuauuauuauua

SEQ ID NO: 1776821 - RNA, 19 nt, Homo sapiens
  misc_RNA (1)...(19): siRNA sense strand
cauggauggccuauuauua

SEQ ID NO: 1776822 - RNA, 19 nt, Homo sapiens
  misc_RNA (1)...(19): siRNA sense strand
ccaaagugcugggauuaca

SEQ ID NO: 1776823 - RNA, 19 nt, Homo sapiens
  misc_RNA (1)...(19): siRNA sense strand
uggauggccuauuauuauu

SEQ ID NO: 1776824 - RNA, 19 nt, Homo sapiens
  misc_RNA (1)...(19): siRNA sense strand
ccaccacgcccagcuaauu

SEQ ID NO: 1776825 - RNA, 19 nt, Homo sapiens
  misc_RNA (1)...(19): siRNA sense strand
ucagacugcuugugaacuc

SEQ ID NO: 1776826 - RNA, 19 nt, Homo sapiens
  misc_RNA (1)...(19): siRNA sense strand
uauuagagauggaguuuug

SEQ ID NO: 1776827 - RNA, 19 nt, Homo sapiens
  misc_RNA (1)...(19): siRNA sense strand
caccacgcccagcuaauuu

SEQ ID NO: 1776828 - RNA, 19 nt, Homo sapiens
  misc_RNA (1)...(19): siRNA sense strand
ucucccagguucaaggauu

SEQ ID NO: 1776829 - RNA, 19 nt, Homo sapiens
  misc_RNA (1)...(19): siRNA sense strand
gugcaauggugcgaucuca

SEQ ID NO: 1776830 - RNA, 19 nt, Homo sapiens
  misc_RNA (1)...(19): siRNA sense strand
cuuccaaagugcugggauu

SEQ ID NO: 1776831 - RNA, 19 nt, Homo sapiens
  misc_RNA (1)...(19): siRNA sense strand
auggauggccuauuauuau

SEQ ID NO: 1776832 - RNA, 19 nt, Homo sapiens
  misc_RNA (1)...(19): siRNA sense strand
gagauggaguuuugcucuu

SEQ ID NO: 1776833 - RNA, 19 nt, Homo sapiens
  misc_RNA (1)...(19): siRNA sense strand
ggaaugagcagucaacuaa

SEQ ID NO: 1776834 - RNA, 19 nt, Homo sapiens
  misc_RNA (1)...(19): siRNA sense strand
ggagaagggugaagaggaa

SEQ ID NO: 1776835 - RNA, 19 nt, Homo sapiens
  misc_RNA (1)...(19): siRNA sense strand
gggagauccugcuaaauuu

SEQ ID NO: 1776836 - RNA, 19 nt, Homo sapiens
  misc_RNA (1)...(19): siRNA sense strand
ccacugagcuccaccagau

SEQ ID NO: 1776837 - RNA, 19 nt, Homo sapiens
  misc_RNA (1)...(19): siRNA sense strand
gaaguggaguucaccauca

SEQ ID NO: 1776838 - RNA, 19 nt, Homo sapiens
  misc_RNA (1)...(19): siRNA sense strand
gcaagcagccgaaggaaga

SEQ ID NO: 1776839 - RNA, 19 nt, Homo sapiens
  misc_RNA (1)...(19): siRNA sense strand
gaagagacggucccauuug

SEQ ID NO: 1776840 - RNA, 19 nt, Homo sapiens
  misc_RNA (1)...(19): siRNA sense strand
ggagagggaugagaaggaa

SEQ ID NO: 1776841 - RNA, 19 nt, Homo sapiens
  misc_RNA (1)...(19): siRNA sense strand
ucaacaacaucuccaagaa

SEQ ID NO: 1776842 - RNA, 19 nt, Homo sapiens
  misc_RNA (1)...(19): siRNA sense strand
gcucagugcccgugacaua

SEQ ID NO: 1776843 - RNA, 19 nt, Homo sapiens
  misc_RNA (1)...(19): siRNA sense strand
agaagcagcuccugguuga

SEQ ID NO: 1776844 - RNA, 19 nt, Homo sapiens
  misc_RNA (1)...(19): siRNA sense strand
gcaggacaauugccucuuc

SEQ ID NO: 1776845 - RNA, 19 nt, Homo sapiens
  misc_RNA (1)...(19): siRNA sense strand
gacauucucaccacaauaa

SEQ ID NO: 1776846 - RNA, 19 nt, Homo sapiens
  misc_RNA (1)...(19): siRNA sense strand
ggacaacaguuccauacac

SEQ ID NO: 1776847 - RNA, 19 nt, Homo sapiens
  misc_RNA (1)...(19): siRNA sense strand
gcagauuuaugagcuguau

SEQ ID NO: 1776848 - RNA, 19 nt, Homo sapiens
  misc_RNA (1)...(19): siRNA sense strand
cgggagauccugcuaaauu

SEQ ID NO: 1776849 - RNA, 19 nt, Homo sapiens
  misc_RNA (1)...(19): siRNA sense strand
ggaagaagaggagacagaa

SEQ ID NO: 1776850 - RNA, 19 nt, Homo sapiens
  misc_RNA (1)...(19): siRNA sense strand
gaagaagcagcuccugguu

SEQ ID NO: 1776851 - RNA, 19 nt, Homo sapiens
  misc_RNA (1)...(19): siRNA sense strand
gccgggagauccugcuaaa

SEQ ID NO: 1776852 - RNA, 19 nt, Homo sapiens
  misc_RNA (1)...(19): siRNA sense strand
ccagaccgauguccuguca

SEQ ID NO: 1776853 - RNA, 19 nt, Homo sapiens
  misc_RNA (1)...(19): siRNA sense strand
gggcagagcaagcagaguu

SEQ ID NO: 1776854 - RNA, 19 nt, Homo sapiens
  misc_RNA (1)...(19): siRNA sense strand
gguggugccuggacagaau

SEQ ID NO: 1776855 - RNA, 19 nt, Homo sapiens
  misc_RNA (1)...(19): siRNA sense strand
ugaagagacggucccauuu

SEQ ID NO: 1776856 - RNA, 19 nt, Homo sapiens
  misc_RNA (1)...(19): siRNA sense strand
ggugguggcuccugaagag

SEQ ID NO: 1776857 - RNA, 19 nt, Homo sapiens
  misc_RNA (1)...(19): siRNA sense strand
gcagccaaguccucuagau

SEQ ID NO: 1776858 - RNA, 19 nt, Homo sapiens
  misc_RNA (1)...(19): siRNA sense strand
gagcagaugguggaguuaa

SEQ ID NO: 1776859 - RNA, 19 nt, Homo sapiens
  misc_RNA (1)...(19): siRNA sense strand
gggaugagaaggaagagaa

SEQ ID NO: 1776860 - RNA, 19 nt, Homo sapiens
  misc_RNA (1)...(19): siRNA sense strand
ggaggaagaggaggaagaa

SEQ ID NO: 1776861 - RNA, 19 nt, Homo sapiens
  misc_RNA (1)...(19): siRNA sense strand
gacaacaguuccauacacu

SEQ ID NO: 1776862 - RNA, 19 nt, Homo sapiens
  misc_RNA (1)...(19): siRNA sense strand
gagaaggaagagaaaguga

SEQ ID NO: 1776863 - RNA, 19 nt, Homo sapiens
  misc_RNA (1)...(19): siRNA sense strand
caccaucaccgacaugaaa

SEQ ID NO: 1776864 - RNA, 19 nt, Homo sapiens
  misc_RNA (1)...(19): siRNA sense strand
uaugugcacuucaccucua

SEQ ID NO: 1776865 - RNA, 19 nt, Homo sapiens
  misc_RNA (1)...(19): siRNA sense strand
gagcaagcagaguugaauu

SEQ ID NO: 1776866 - RNA, 19 nt, Homo sapiens
  misc_RNA (1)...(19): siRNA sense strand
gaacaugauccagaacauc

SEQ ID NO: 1776867 - RNA, 19 nt, Homo sapiens
  misc_RNA (1)...(19): siRNA sense strand
gcaagaacaggacgagaag

SEQ ID NO: 1776868 - RNA, 19 nt, Homo sapiens
  misc_RNA (1)...(19): siRNA sense strand
ugaaugucauggugaagga

SEQ ID NO: 1776869 - RNA, 19 nt, Homo sapiens
  misc_RNA (1)...(19): siRNA sense strand
gacaugaaagugaagaaga

SEQ ID NO: 1776870 - RNA, 19 nt, Homo sapiens
  misc_RNA (1)...(19): siRNA sense strand
cuacagugcagaccuggua

SEQ ID NO: 1776871 - RNA, 19 nt, Homo sapiens
  misc_RNA (1)...(19): siRNA sense strand
ggacgugcccauacacauc

SEQ ID NO: 1776872 - RNA, 19 nt, Homo sapiens
  misc_RNA (1)...(19): siRNA sense strand
gagaaggaggccaucagaa

SEQ ID NO: 1776873 - RNA, 19 nt, Homo sapiens
  misc_RNA (1)...(19): siRNA sense strand
ggaagaggaggaagaagag

SEQ ID NO: 1776874 - RNA, 19 nt, Homo sapiens
  misc_RNA (1)...(19): siRNA sense strand
acaauugccucuucuccau

SEQ ID NO: 1776875 - RNA, 19 nt, Homo sapiens
  misc_RNA (1)...(19): siRNA sense strand
ccaagugaccagcggauug

SEQ ID NO: 1776876 - RNA, 19 nt, Homo sapiens
  misc_RNA (1)...(19): siRNA sense strand
caagugaccagcggauuga

SEQ ID NO: 1776877 - RNA, 19 nt, Homo sapiens
  misc_RNA (1)...(19): siRNA sense strand
ucaagaaccagcagucugu

SEQ ID NO: 1776878 - RNA, 19 nt, Homo sapiens
  misc_RNA (1)...(19): siRNA sense strand
aagagacggucccauuugu

SEQ ID NO: 1776879 - RNA, 19 nt, Homo sapiens
  misc_RNA (1)...(19): siRNA sense strand
ggagauccugcuaaauuuc

SEQ ID NO: 1776880 - RNA, 19 nt, Homo sapiens
  misc_RNA (1)...(19): siRNA sense strand
aggaggcgcugcuggagaa

SEQ ID NO: 1776881 - RNA, 19 nt, Homo sapiens
  misc_RNA (1)...(19): siRNA sense strand
cuaaguucauggaccagaa

SEQ ID NO: 1776882 - RNA, 19 nt, Homo sapiens
  misc_RNA (1)...(19): siRNA sense strand
ccgacuacuuucuggcuaa

SEQ ID NO: 1776883 - RNA, 19 nt, Homo sapiens
  misc_RNA (1)...(19): siRNA sense strand
gagauccugcuaaauuuca

SEQ ID NO: 1776884 - RNA, 19 nt, Homo sapiens
  misc_RNA (1)...(19): siRNA sense strand
gagaacaugauccagaaca

SEQ ID NO: 1776885 - RNA, 19 nt, Homo sapiens
  misc_RNA (1)...(19): siRNA sense strand
ggaugagaaggaagagaaa

SEQ ID NO: 1776886 - RNA, 19 nt, Homo sapiens
  misc_RNA (1)...(19): siRNA sense strand
aagaagaggagacagaaga

SEQ ID NO: 1776887 - RNA, 19 nt, Homo sapiens
  misc_RNA (1)...(19): siRNA sense strand
agaggaagaagaagaguug

SEQ ID NO: 1776888 - RNA, 19 nt, Homo sapiens
  misc_RNA (1)...(19): siRNA sense strand
gacacugccucccaucaag

SEQ ID NO: 1776889 - RNA, 19 nt, Homo sapiens
  misc_RNA (1)...(19): siRNA sense strand
ucauaggugugacagugaa

SEQ ID NO: 1776890 - RNA, 19 nt, Homo sapiens
  misc_RNA (1)...(19): siRNA sense strand
gccaaguccucuagauuuu

SEQ ID NO: 1776891 - RNA, 19 nt, Homo sapiens
  misc_RNA (1)...(19): siRNA sense strand
aggaggagauagaggagaa

SEQ ID NO: 1776892 - RNA, 19 nt, Homo sapiens
  misc_RNA (1)...(19): siRNA sense strand
gugaagaggaagaagaaga

SEQ ID NO: 1776893 - RNA, 19 nt, Homo sapiens
  misc_RNA (1)...(19): siRNA sense strand
aaugagcagucaacuaagu

SEQ ID NO: 1776894 - RNA, 19 nt, Homo sapiens
  misc_RNA (1)...(19): siRNA sense strand
cagugaagccggagcagaa

SEQ ID NO: 1776895 - RNA, 19 nt, Homo sapiens
  misc_RNA (1)...(19): siRNA sense strand
gggugaagaggaagaagaa

SEQ ID NO: 1776896 - RNA, 19 nt, Homo sapiens
  misc_RNA (1)...(19): siRNA sense strand
ugaagccggagcagaagua

SEQ ID NO: 1776897 - RNA, 19 nt, Homo sapiens
  misc_RNA (1)...(19): siRNA sense strand
caacaguuccauacacucu

SEQ ID NO: 1776898 - RNA, 19 nt, Homo sapiens
  misc_RNA (1)...(19): siRNA sense strand
cgagaaggaggccaucaga

SEQ ID NO: 1776899 - RNA, 19 nt, Homo sapiens
  misc_RNA (1)...(19): siRNA sense strand
gaaggaggagcaagaacag

SEQ ID NO: 1776900 - RNA, 19 nt, Homo sapiens
  misc_RNA (1)...(19): siRNA sense strand
gacagaagaggaggaguug

SEQ ID NO: 1776901 - RNA, 19 nt, Homo sapiens
  misc_RNA (1)...(19): siRNA sense strand
agacagaagaggaggaguu

SEQ ID NO: 1776902 - RNA, 19 nt, Homo sapiens
  misc_RNA (1)...(19): siRNA sense strand
gaagggugaagaggaagaa

SEQ ID NO: 1776903 - RNA, 19 nt, Homo sapiens
  misc_RNA (1)...(19): siRNA sense strand
agacagaccagagcacuau

SEQ ID NO: 1776904 - RNA, 19 nt, Homo sapiens
  misc_RNA (1)...(19): siRNA sense strand
uggagcaggugccguacuu

SEQ ID NO: 1776905 - RNA, 19 nt, Homo sapiens
  misc_RNA (1)...(19): siRNA sense strand
cagccaaguccucuagauu

SEQ ID NO: 1776906 - RNA, 19 nt, Homo sapiens
  misc_RNA (1)...(19): siRNA sense strand
agaccgauguccugucaca

SEQ ID NO: 1776907 - RNA, 19 nt, Homo sapiens
  misc_RNA (1)...(19): siRNA sense strand
ugaaggaggagcaagaaca

SEQ ID NO: 1776908 - RNA, 19 nt, Homo sapiens
  misc_RNA (1)...(19): siRNA sense strand
gaagaagaggagacagaag

SEQ ID NO: 1776909 - RNA, 19 nt, Homo sapiens
  misc_RNA (1)...(19): siRNA sense strand
ccaugaggcuguggaccaa

SEQ ID NO: 1776910 - RNA, 19 nt, Homo sapiens
  misc_RNA (1)...(19): siRNA sense strand
cugaagagacggucccauu

SEQ ID NO: 1776911 - RNA, 19 nt, Homo sapiens
  misc_RNA (1)...(19): siRNA sense strand
agccaaguccucuagauuu

SEQ ID NO: 1776912 - RNA, 19 nt, Homo sapiens
  misc_RNA (1)...(19): siRNA sense strand
aggagcagaugguggaguu

SEQ ID NO: 1776913 - RNA, 19 nt, Homo sapiens
  misc_RNA (1)...(19): siRNA sense strand
uauccaggguugggaaaga

SEQ ID NO: 1776914 - RNA, 19 nt, Homo sapiens
  misc_RNA (1)...(19): siRNA sense strand
acaugaaagugaagaagag

SEQ ID NO: 1776915 - RNA, 19 nt, Homo sapiens
  misc_RNA (1)...(19): siRNA sense strand
gucugugagucccaugaua

SEQ ID NO: 1776916 - RNA, 19 nt, Homo sapiens
  misc_RNA (1)...(19): siRNA sense strand
uuguggaucuucucaccua

SEQ ID NO: 1776917 - RNA, 19 nt, Homo sapiens
  misc_RNA (1)...(19): siRNA sense strand
agaaggaggccaucagaag

SEQ ID NO: 1776918 - RNA, 19 nt, Homo sapiens
  misc_RNA (1)...(19): siRNA sense strand
gauccugcuaaauuucaua

SEQ ID NO: 1776919 - RNA, 19 nt, Homo sapiens
  misc_RNA (1)...(19): siRNA sense strand
ugacauucucaccacaaua

SEQ ID NO: 1776920 - RNA, 19 nt, Homo sapiens
  misc_RNA (1)...(19): siRNA sense strand
ccaugccaccgacuacuuu

SEQ ID NO: 1776921 - RNA, 19 nt, Homo sapiens
  misc_RNA (1)...(19): siRNA sense strand
caacaacaucuccaagaac

SEQ ID NO: 1776922 - RNA, 19 nt, Homo sapiens
  misc_RNA (1)...(19): siRNA sense strand
cagugcccgugacauauga

SEQ ID NO: 1776923 - RNA, 19 nt, Homo sapiens
  misc_RNA (1)...(19): siRNA sense strand
ggaggaagaagaggagaca

SEQ ID NO: 1776924 - RNA, 19 nt, Homo sapiens
  misc_RNA (1)...(19): siRNA sense strand
gcagagcaagcagaguuga

SEQ ID NO: 1776925 - RNA, 19 nt, Homo sapiens
  misc_RNA (1)...(19): siRNA sense strand
aagacaagaacuuccauga

SEQ ID NO: 1776926 - RNA, 19 nt, Homo sapiens
  misc_RNA (1)...(19): siRNA sense strand
ugucacagguucaggaaaa

SEQ ID NO: 1776927 - RNA, 19 nt, Homo sapiens
  misc_RNA (1)...(19): siRNA sense strand
ccugugaaccugcgaggaa

SEQ ID NO: 1776928 - RNA, 19 nt, Homo sapiens
  misc_RNA (1)...(19): siRNA sense strand
cuaaauuucauagguguga

SEQ ID NO: 1776929 - RNA, 19 nt, Homo sapiens
  misc_RNA (1)...(19): siRNA sense strand
caagcagaguugaauucca

SEQ ID NO: 1776930 - RNA, 19 nt, Homo sapiens
  misc_RNA (1)...(19): siRNA sense strand
gagcccaugccaccgacua

SEQ ID NO: 1776931 - RNA, 19 nt, Homo sapiens
  misc_RNA (1)...(19): siRNA sense strand
uaaguucauggaccagaaa

SEQ ID NO: 1776932 - RNA, 19 nt, Homo sapiens
  misc_RNA (1)...(19): siRNA sense strand
ccugcuaaauuucauaggu

SEQ ID NO: 1776933 - RNA, 19 nt, Homo sapiens
  misc_RNA (1)...(19): siRNA sense strand
ggaaugagcagucaacuaa

SEQ ID NO: 1776934 - RNA, 19 nt, Homo sapiens
  misc_RNA (1)...(19): siRNA sense strand
ggagaagggugaagaggaa

SEQ ID NO: 1776935 - RNA, 19 nt, Homo sapiens
  misc_RNA (1)...(19): siRNA sense strand
gggagauccugcuaaauuu

SEQ ID NO: 1776936 - RNA, 19 nt, Homo sapiens
  misc_RNA (1)...(19): siRNA sense strand
ccacugagcuccaccagau

SEQ ID NO: 1776937 - RNA, 19 nt, Homo sapiens
  misc_RNA (1)...(19): siRNA sense strand
gaaguggaguucaccauca

SEQ ID NO: 1776938 - RNA, 19 nt, Homo sapiens
  misc_RNA (1)...(19): siRNA sense strand
gcaagcagccgaaggaaga

SEQ ID NO: 1776939 - RNA, 19 nt, Homo sapiens
  misc_RNA (1)...(19): siRNA sense strand
gaagagacggucccauuug

SEQ ID NO: 1776940 - RNA, 19 nt, Homo sapiens
  misc_RNA (1)...(19): siRNA sense strand
ggagagggaugagaaggaa

SEQ ID NO: 1776941 - RNA, 19 nt, Homo sapiens
  misc_RNA (1)...(19): siRNA sense strand
ucaacaacaucuccaagaa

SEQ ID NO: 1776942 - RNA, 19 nt, Homo sapiens
  misc_RNA (1)...(19): siRNA sense strand
gcucagugcccgugacaua

SEQ ID NO: 1776943 - RNA, 19 nt, Homo sapiens
  misc_RNA (1)...(19): siRNA sense strand
agaagcagcuccugguuga

SEQ ID NO: 1776944 - RNA, 19 nt, Homo sapiens
  misc_RNA (1)...(19): siRNA sense strand
gcaggacaauugccucuuc

SEQ ID NO: 1776945 - RNA, 19 nt, Homo sapiens
  misc_RNA (1)...(19): siRNA sense strand
gacauucucaccacaauaa

SEQ ID NO: 1776946 - RNA, 19 nt, Homo sapiens
  misc_RNA (1)...(19): siRNA sense strand
ggacaacaguuccauacac

SEQ ID NO: 1776947 - RNA, 19 nt, Homo sapiens
  misc_RNA (1)...(19): siRNA sense strand
gcagauuuaugagcuguau

SEQ ID NO: 1776948 - RNA, 19 nt, Homo sapiens
  misc_RNA (1)...(19): siRNA sense strand
cgggagauccugcuaaauu

SEQ ID NO: 1776949 - RNA, 19 nt, Homo sapiens
  misc_RNA (1)...(19): siRNA sense strand
ggaagaagaggagacagaa

SEQ ID NO: 1776950 - RNA, 19 nt, Homo sapiens
  misc_RNA (1)...(19): siRNA sense strand
gaagaagcagcuccugguu

SEQ ID NO: 1776951 - RNA, 19 nt, Homo sapiens
  misc_RNA (1)...(19): siRNA sense strand
gccgggagauccugcuaaa

SEQ ID NO: 1776952 - RNA, 19 nt, Homo sapiens
  misc_RNA (1)...(19): siRNA sense strand
ccagaccgauguccuguca

SEQ ID NO: 1776953 - RNA, 19 nt, Homo sapiens
  misc_RNA (1)...(19): siRNA sense strand
gggcagagcaagcagaguu

SEQ ID NO: 1776954 - RNA, 19 nt, Homo sapiens
  misc_RNA (1)...(19): siRNA sense strand
gguggugccuggacagaau

SEQ ID NO: 1776955 - RNA, 19 nt, Homo sapiens
  misc_RNA (1)...(19): siRNA sense strand
ugaagagacggucccauuu

SEQ ID NO: 1776956 - RNA, 19 nt, Homo sapiens
  misc_RNA (1)...(19): siRNA sense strand
ggugguggcuccugaagag

SEQ ID NO: 1776957 - RNA, 19 nt, Homo sapiens
  misc_RNA (1)...(19): siRNA sense strand
gcagccaaguccucuagau

SEQ ID NO: 1776958 - RNA, 19 nt, Homo sapiens
  misc_RNA (1)...(19): siRNA sense strand
gagcagaugguggaguuaa

SEQ ID NO: 1776959 - RNA, 19 nt, Homo sapiens
  misc_RNA (1)...(19): siRNA sense strand
gggaugagaaggaagagaa

SEQ ID NO: 1776960 - RNA, 19 nt, Homo sapiens
  misc_RNA (1)...(19): siRNA sense strand
ggaggaagaggaggaagaa

SEQ ID NO: 1776961 - RNA, 19 nt, Homo sapiens
  misc_RNA (1)...(19): siRNA sense strand
gacaacaguuccauacacu

SEQ ID NO: 1776962 - RNA, 19 nt, Homo sapiens
  misc_RNA (1)...(19): siRNA sense strand
gagaaggaagagaaaguga

SEQ ID NO: 1776963 - RNA, 19 nt, Homo sapiens
  misc_RNA (1)...(19): siRNA sense strand
caccaucaccgacaugaaa

SEQ ID NO: 1776964 - RNA, 19 nt, Homo sapiens
  misc_RNA (1)...(19): siRNA sense strand
uaugugcacuucaccucua

SEQ ID NO: 1776965 - RNA, 19 nt, Homo sapiens
  misc_RNA (1)...(19): siRNA sense strand
gagcaagcagaguugaauu

SEQ ID NO: 1776966 - RNA, 19 nt, Homo sapiens
  misc_RNA (1)...(19): siRNA sense strand
gaacaugauccagaacauc

SEQ ID NO: 1776967 - RNA, 19 nt, Homo sapiens
  misc_RNA (1)...(19): siRNA sense strand
gcaagaacaggacgagaag

SEQ ID NO: 1776968 - RNA, 19 nt, Homo sapiens
  misc_RNA (1)...(19): siRNA sense strand
ugaaugucauggugaagga

SEQ ID NO: 1776969 - RNA, 19 nt, Homo sapiens
  misc_RNA (1)...(19): siRNA sense strand
gacaugaaagugaagaaga

SEQ ID NO: 1776970 - RNA, 19 nt, Homo sapiens
  misc_RNA (1)...(19): siRNA sense strand
cuacagugcagaccuggua

SEQ ID NO: 1776971 - RNA, 19 nt, Homo sapiens
  misc_RNA (1)...(19): siRNA sense strand
ggacgugcccauacacauc

SEQ ID NO: 1776972 - RNA, 19 nt, Homo sapiens
  misc_RNA (1)...(19): siRNA sense strand
gagaaggaggccaucagaa

SEQ ID NO: 1776973 - RNA, 19 nt, Homo sapiens
  misc_RNA (1)...(19): siRNA sense strand
ggaagaggaggaagaagag

SEQ ID NO: 1776974 - RNA, 19 nt, Homo sapiens
  misc_RNA (1)...(19): siRNA sense strand
acaauugccucuucuccau

SEQ ID NO: 1776975 - RNA, 19 nt, Homo sapiens
  misc_RNA (1)...(19): siRNA sense strand
ccaagugaccagcggauug

SEQ ID NO: 1776976 - RNA, 19 nt, Homo sapiens
  misc_RNA (1)...(19): siRNA sense strand
caagugaccagcggauuga

SEQ ID NO: 1776977 - RNA, 19 nt, Homo sapiens
  misc_RNA (1)...(19): siRNA sense strand
ucaagaaccagcagucugu

SEQ ID NO: 1776978 - RNA, 19 nt, Homo sapiens
  misc_RNA (1)...(19): siRNA sense strand
aagagacggucccauuugu

SEQ ID NO: 1776979 - RNA, 19 nt, Homo sapiens
  misc_RNA (1)...(19): siRNA sense strand
ggagauccugcuaaauuuc

SEQ ID NO: 1776980 - RNA, 19 nt, Homo sapiens
  misc_RNA (1)...(19): siRNA sense strand
aggaggcgcugcuggagaa

SEQ ID NO: 1776981 - RNA, 19 nt, Homo sapiens
  misc_RNA (1)...(19): siRNA sense strand
cuaaguucauggaccagaa

SEQ ID NO: 1776982 - RNA, 19 nt, Homo sapiens
  misc_RNA (1)...(19): siRNA sense strand
ccgacuacuuucuggcuaa

SEQ ID NO: 1776983 - RNA, 19 nt, Homo sapiens
  misc_RNA (1)...(19): siRNA sense strand
gagauccugcuaaauuuca

SEQ ID NO: 1776984 - RNA, 19 nt, Homo sapiens
  misc_RNA (1)...(19): siRNA sense strand
gagaacaugauccagaaca

SEQ ID NO: 1776985 - RNA, 19 nt, Homo sapiens
  misc_RNA (1)...(19): siRNA sense strand
ggaugagaaggaagagaaa

SEQ ID NO: 1776986 - RNA, 19 nt, Homo sapiens
  misc_RNA (1)...(19): siRNA sense strand
aagaagaggagacagaaga

SEQ ID NO: 1776987 - RNA, 19 nt, Homo sapiens
  misc_RNA (1)...(19): siRNA sense strand
agaggaagaagaagaguug

SEQ ID NO: 1776988 - RNA, 19 nt, Homo sapiens
  misc_RNA (1)...(19): siRNA sense strand
gacacugccucccaucaag

SEQ ID NO: 1776989 - RNA, 19 nt, Homo sapiens
  misc_RNA (1)...(19): siRNA sense strand
ucauaggugugacagugaa

SEQ ID NO: 1776990 - RNA, 19 nt, Homo sapiens
  misc_RNA (1)...(19): siRNA sense strand
gccaaguccucuagauuuu

SEQ ID NO: 1776991 - RNA, 19 nt, Homo sapiens
  misc_RNA (1)...(19): siRNA sense strand
aggaggagauagaggagaa

SEQ ID NO: 1776992 - RNA, 19 nt, Homo sapiens
  misc_RNA (1)...(19): siRNA sense strand
gugaagaggaagaagaaga

SEQ ID NO: 1776993 - RNA, 19 nt, Homo sapiens
  misc_RNA (1)...(19): siRNA sense strand
aaugagcagucaacuaagu

SEQ ID NO: 1776994 - RNA, 19 nt, Homo sapiens
  misc_RNA (1)...(19): siRNA sense strand
cagugaagccggagcagaa

SEQ ID NO: 1776995 - RNA, 19 nt, Homo sapiens
  misc_RNA (1)...(19): siRNA sense strand
gggugaagaggaagaagaa

SEQ ID NO: 1776996 - RNA, 19 nt, Homo sapiens
  misc_RNA (1)...(19): siRNA sense strand
ugaagccggagcagaagua

SEQ ID NO: 1776997 - RNA, 19 nt, Homo sapiens
  misc_RNA (1)...(19): siRNA sense strand
caacaguuccauacacucu

SEQ ID NO: 1776998 - RNA, 19 nt, Homo sapiens
  misc_RNA (1)...(19): siRNA sense strand
cgagaaggaggccaucaga

SEQ ID NO: 1776999 - RNA, 19 nt, Homo sapiens
  misc_RNA (1)...(19): siRNA sense strand
gaaggaggagcaagaacag

SEQ ID NO: 1777000 - RNA, 19 nt, Homo sapiens
  misc_RNA (1)...(19): siRNA sense strand
gacagaagaggaggaguug

SEQ ID NO: 1777001 - RNA, 19 nt, Homo sapiens
  misc_RNA (1)...(19): siRNA sense strand
agacagaagaggaggaguu

SEQ ID NO: 1777002 - RNA, 19 nt, Homo sapiens
  misc_RNA (1)...(19): siRNA sense strand
gaagggugaagaggaagaa

SEQ ID NO: 1777003 - RNA, 19 nt, Homo sapiens
  misc_RNA (1)...(19): siRNA sense strand
agacagaccagagcacuau

SEQ ID NO: 1777004 - RNA, 19 nt, Homo sapiens
  misc_RNA (1)...(19): siRNA sense strand
uggagcaggugccguacuu

SEQ ID NO: 1777005 - RNA, 19 nt, Homo sapiens
  misc_RNA (1)...(19): siRNA sense strand
cagccaaguccucuagauu

SEQ ID NO: 1777006 - RNA, 19 nt, Homo sapiens
  misc_RNA (1)...(19): siRNA sense strand
agaccgauguccugucaca

SEQ ID NO: 1777007 - RNA, 19 nt, Homo sapiens
  misc_RNA (1)...(19): siRNA sense strand
ugaaggaggagcaagaaca

SEQ ID NO: 1777008 - RNA, 19 nt, Homo sapiens
  misc_RNA (1)...(19): siRNA sense strand
gaagaagaggagacagaag

SEQ ID NO: 1777009 - RNA, 19 nt, Homo sapiens
  misc_RNA (1)...(19): siRNA sense strand
ccaugaggcuguggaccaa

SEQ ID NO: 1777010 - RNA, 19 nt, Homo sapiens
  misc_RNA (1)...(19): siRNA sense strand
cugaagagacggucccauu

SEQ ID NO: 1777011 - RNA, 19 nt, Homo sapiens
  misc_RNA (1)...(19): siRNA sense strand
agccaaguccucuagauuu

SEQ ID NO: 1777012 - RNA, 19 nt, Homo sapiens
  misc_RNA (1)...(19): siRNA sense strand
aggagcagaugguggaguu

SEQ ID NO: 1777013 - RNA, 19 nt, Homo sapiens
  misc_RNA (1)...(19): siRNA sense strand
uauccaggguugggaaaga

SEQ ID NO: 1777014 - RNA, 19 nt, Homo sapiens
  misc_RNA (1)...(19): siRNA sense strand
acaugaaagugaagaagag

SEQ ID NO: 1777015 - RNA, 19 nt, Homo sapiens
  misc_RNA (1)...(19): siRNA sense strand
gucugugagucccaugaua

SEQ ID NO: 1777016 - RNA, 19 nt, Homo sapiens
  misc_RNA (1)...(19): siRNA sense strand
uuguggaucuucucaccua

SEQ ID NO: 1777017 - RNA, 19 nt, Homo sapiens
  misc_RNA (1)...(19): siRNA sense strand
agaaggaggccaucagaag

SEQ ID NO: 1777018 - RNA, 19 nt, Homo sapiens
  misc_RNA (1)...(19): siRNA sense strand
gauccugcuaaauuucaua

SEQ ID NO: 1777019 - RNA, 19 nt, Homo sapiens
  misc_RNA (1)...(19): siRNA sense strand
ugacauucucaccacaaua

SEQ ID NO: 1777020 - RNA, 19 nt, Homo sapiens
  misc_RNA (1)...(19): siRNA sense strand
ccaugccaccgacuacuuu

SEQ ID NO: 1777021 - RNA, 19 nt, Homo sapiens
  misc_RNA (1)...(19): siRNA sense strand
caacaacaucuccaagaac

SEQ ID NO: 1777022 - RNA, 19 nt, Homo sapiens
  misc_RNA (1)...(19): siRNA sense strand
cagugcccgugacauauga

SEQ ID NO: 1777023 - RNA, 19 nt, Homo sapiens
  misc_RNA (1)...(19): siRNA sense strand
ggaggaagaagaggagaca

SEQ ID NO: 1777024 - RNA, 19 nt, Homo sapiens
  misc_RNA (1)...(19): siRNA sense strand
gcagagcaagcagaguuga

SEQ ID NO: 1777025 - RNA, 19 nt, Homo sapiens
  misc_RNA (1)...(19): siRNA sense strand
aagacaagaacuuccauga

SEQ ID NO: 1777026 - RNA, 19 nt, Homo sapiens
  misc_RNA (1)...(19): siRNA sense strand
ugucacagguucaggaaaa

SEQ ID NO: 1777027 - RNA, 19 nt, Homo sapiens
  misc_RNA (1)...(19): siRNA sense strand
ccugugaaccugcgaggaa

SEQ ID NO: 1777028 - RNA, 19 nt, Homo sapiens
  misc_RNA (1)...(19): siRNA sense strand
cuaaauuucauagguguga

SEQ ID NO: 1777029 - RNA, 19 nt, Homo sapiens
  misc_RNA (1)...(19): siRNA sense strand
caagcagaguugaauucca

SEQ ID NO: 1777030 - RNA, 19 nt, Homo sapiens
  misc_RNA (1)...(19): siRNA sense strand
gagcccaugccaccgacua

SEQ ID NO: 1777031 - RNA, 19 nt, Homo sapiens
  misc_RNA (1)...(19): siRNA sense strand
uaaguucauggaccagaaa

SEQ ID NO: 1777032 - RNA, 19 nt, Homo sapiens
  misc_RNA (1)...(19): siRNA sense strand
ccugcuaaauuucauaggu

SEQ ID NO: 1777033 - RNA, 19 nt, Homo sapiens
  misc_RNA (1)...(19): siRNA sense strand
aaacagagcugaagagaaa

SEQ ID NO: 1777034 - RNA, 19 nt, Homo sapiens
  misc_RNA (1)...(19): siRNA sense strand
gaacaaagggccucaguau

SEQ ID NO: 1777035 - RNA, 19 nt, Homo sapiens
  misc_RNA (1)...(19): siRNA sense strand
gaaaugaucauacucaaga

SEQ ID NO: 1777036 - RNA, 19 nt, Homo sapiens
  misc_RNA (1)...(19): siRNA sense strand
gcaagacaguuaaaugaug

SEQ ID NO: 1777037 - RNA, 19 nt, Homo sapiens
  misc_RNA (1)...(19): siRNA sense strand
ccagaaagcucaucacagu

SEQ ID NO: 1777038 - RNA, 19 nt, Homo sapiens
  misc_RNA (1)...(19): siRNA sense strand
gcaaagcccuggcccugaa

SEQ ID NO: 1777039 - RNA, 19 nt, Homo sapiens
  misc_RNA (1)...(19): siRNA sense strand
gaaauugaacagcaccuua

SEQ ID NO: 1777040 - RNA, 19 nt, Homo sapiens
  misc_RNA (1)...(19): siRNA sense strand
caauauaacuggauagaag

SEQ ID NO: 1777041 - RNA, 19 nt, Homo sapiens
  misc_RNA (1)...(19): siRNA sense strand
gcuggacucuggauucuuu

SEQ ID NO: 1777042 - RNA, 19 nt, Homo sapiens
  misc_RNA (1)...(19): siRNA sense strand
ccacagccacuuccaaaua

SEQ ID NO: 1777043 - RNA, 19 nt, Homo sapiens
  misc_RNA (1)...(19): siRNA sense strand
gacagaagcugagauggaa

SEQ ID NO: 1777044 - RNA, 19 nt, Homo sapiens
  misc_RNA (1)...(19): siRNA sense strand
caacugaccuugcucaaac

SEQ ID NO: 1777045 - RNA, 19 nt, Homo sapiens
  misc_RNA (1)...(19): siRNA sense strand
caagacaaguuccuucaug

SEQ ID NO: 1777046 - RNA, 19 nt, Homo sapiens
  misc_RNA (1)...(19): siRNA sense strand
ugagggagcuggcaaagug

SEQ ID NO: 1777047 - RNA, 19 nt, Homo sapiens
  misc_RNA (1)...(19): siRNA sense strand
gggcagacuucauguucua

SEQ ID NO: 1777048 - RNA, 19 nt, Homo sapiens
  misc_RNA (1)...(19): siRNA sense strand
gaaagcucaucacagugua

SEQ ID NO: 1777049 - RNA, 19 nt, Homo sapiens
  misc_RNA (1)...(19): siRNA sense strand
gcaucaauauaacuggaua

SEQ ID NO: 1777050 - RNA, 19 nt, Homo sapiens
  misc_RNA (1)...(19): siRNA sense strand
ggagagagugugcaaagaa

SEQ ID NO: 1777051 - RNA, 19 nt, Homo sapiens
  misc_RNA (1)...(19): siRNA sense strand
ggacagaagcugagaugga

SEQ ID NO: 1777052 - RNA, 19 nt, Homo sapiens
  misc_RNA (1)...(19): siRNA sense strand
gaaaucacaccuuaugcaa

SEQ ID NO: 1777053 - RNA, 19 nt, Homo sapiens
  misc_RNA (1)...(19): siRNA sense strand
gcaaugggcagacuucaug

SEQ ID NO: 1777054 - RNA, 19 nt, Homo sapiens
  misc_RNA (1)...(19): siRNA sense strand
gacucaggcuucucuagua

SEQ ID NO: 1777055 - RNA, 19 nt, Homo sapiens
  misc_RNA (1)...(19): siRNA sense strand
gauacuaccugggacagaa

SEQ ID NO: 1777056 - RNA, 19 nt, Homo sapiens
  misc_RNA (1)...(19): siRNA sense strand
ccaaauccgucucucuaga

SEQ ID NO: 1777057 - RNA, 19 nt, Homo sapiens
  misc_RNA (1)...(19): siRNA sense strand
gaucagagccacagcuuag

SEQ ID NO: 1777058 - RNA, 19 nt, Homo sapiens
  misc_RNA (1)...(19): siRNA sense strand
caagggaugguucaaauga

SEQ ID NO: 1777059 - RNA, 19 nt, Homo sapiens
  misc_RNA (1)...(19): siRNA sense strand
gagaacagcaccaggaugu

SEQ ID NO: 1777060 - RNA, 19 nt, Homo sapiens
  misc_RNA (1)...(19): siRNA sense strand
gaagauuccaagcaagaaa

SEQ ID NO: 1777061 - RNA, 19 nt, Homo sapiens
  misc_RNA (1)...(19): siRNA sense strand
ugacaugacuucaggaacu

SEQ ID NO: 1777062 - RNA, 19 nt, Homo sapiens
  misc_RNA (1)...(19): siRNA sense strand
cagaggaacaucuuuagaa

SEQ ID NO: 1777063 - RNA, 19 nt, Homo sapiens
  misc_RNA (1)...(19): siRNA sense strand
ggaacaaagggccucagua

SEQ ID NO: 1777064 - RNA, 19 nt, Homo sapiens
  misc_RNA (1)...(19): siRNA sense strand
gcacuguuucuuuguauga

SEQ ID NO: 1777065 - RNA, 19 nt, Homo sapiens
  misc_RNA (1)...(19): siRNA sense strand
gacaaaagcaagacaguua

SEQ ID NO: 1777066 - RNA, 19 nt, Homo sapiens
  misc_RNA (1)...(19): siRNA sense strand
gaaaaccuuccucuaaaua

SEQ ID NO: 1777067 - RNA, 19 nt, Homo sapiens
  misc_RNA (1)...(19): siRNA sense strand
gucaaggucugguacuuug

SEQ ID NO: 1777068 - RNA, 19 nt, Homo sapiens
  misc_RNA (1)...(19): siRNA sense strand
cagaaaugcaggacaguuu

SEQ ID NO: 1777069 - RNA, 19 nt, Homo sapiens
  misc_RNA (1)...(19): siRNA sense strand
uggcagaguuggaauuuca

SEQ ID NO: 1777070 - RNA, 19 nt, Homo sapiens
  misc_RNA (1)...(19): siRNA sense strand
agaggaacaucuuuagaau

SEQ ID NO: 1777071 - RNA, 19 nt, Homo sapiens
  misc_RNA (1)...(19): siRNA sense strand
guagaaagccaagagauca

SEQ ID NO: 1777072 - RNA, 19 nt, Homo sapiens
  misc_RNA (1)...(19): siRNA sense strand
agaguuggaauuucaguua

SEQ ID NO: 1777073 - RNA, 19 nt, Homo sapiens
  misc_RNA (1)...(19): siRNA sense strand
ucuaguaucugcccaaugg

SEQ ID NO: 1777074 - RNA, 19 nt, Homo sapiens
  misc_RNA (1)...(19): siRNA sense strand
acaaguuccuucauguuga

SEQ ID NO: 1777075 - RNA, 19 nt, Homo sapiens
  misc_RNA (1)...(19): siRNA sense strand
gacaaguuccuucauguug

SEQ ID NO: 1777076 - RNA, 19 nt, Homo sapiens
  misc_RNA (1)...(19): siRNA sense strand
cacagccacuuccaaauau

SEQ ID NO: 1777077 - RNA, 19 nt, Homo sapiens
  misc_RNA (1)...(19): siRNA sense strand
ccagaguccugcugagaau

SEQ ID NO: 1777078 - RNA, 19 nt, Homo sapiens
  misc_RNA (1)...(19): siRNA sense strand
gugcaaagccaccacaaug

SEQ ID NO: 1777079 - RNA, 19 nt, Homo sapiens
  misc_RNA (1)...(19): siRNA sense strand
ggaggaagaguuucugcuu

SEQ ID NO: 1777080 - RNA, 19 nt, Homo sapiens
  misc_RNA (1)...(19): siRNA sense strand
gugaaagacuacaugagau

SEQ ID NO: 1777081 - RNA, 19 nt, Homo sapiens
  misc_RNA (1)...(19): siRNA sense strand
aagcaagacaguuaaauga

SEQ ID NO: 1777082 - RNA, 19 nt, Homo sapiens
  misc_RNA (1)...(19): siRNA sense strand
ggagaaugcccaaggaaag

SEQ ID NO: 1777083 - RNA, 19 nt, Homo sapiens
  misc_RNA (1)...(19): siRNA sense strand
aggaagaguuucugcuuga

SEQ ID NO: 1777084 - RNA, 19 nt, Homo sapiens
  misc_RNA (1)...(19): siRNA sense strand
ugagaucuuugcaucaguu

SEQ ID NO: 1777085 - RNA, 19 nt, Homo sapiens
  misc_RNA (1)...(19): siRNA sense strand
ccgagcaacugcaaacguu

SEQ ID NO: 1777086 - RNA, 19 nt, Homo sapiens
  misc_RNA (1)...(19): siRNA sense strand
ggacaugucagaggaggaa

SEQ ID NO: 1777087 - RNA, 19 nt, Homo sapiens
  misc_RNA (1)...(19): siRNA sense strand
caaccacagcuuacucgua

SEQ ID NO: 1777088 - RNA, 19 nt, Homo sapiens
  misc_RNA (1)...(19): siRNA sense strand
ucacaccaaccacagcuua

SEQ ID NO: 1777089 - RNA, 19 nt, Homo sapiens
  misc_RNA (1)...(19): siRNA sense strand
aaaugacugugaaagacua

SEQ ID NO: 1777090 - RNA, 19 nt, Homo sapiens
  misc_RNA (1)...(19): siRNA sense strand
uaacccacgucacagaaau

SEQ ID NO: 1777091 - RNA, 19 nt, Homo sapiens
  misc_RNA (1)...(19): siRNA sense strand
acaaagggccucaguaucu

SEQ ID NO: 1777092 - RNA, 19 nt, Homo sapiens
  misc_RNA (1)...(19): siRNA sense strand
aagacgauaugccaaaguu

SEQ ID NO: 1777093 - RNA, 19 nt, Homo sapiens
  misc_RNA (1)...(19): siRNA sense strand
gcaaguguaccacaaagca

SEQ ID NO: 1777094 - RNA, 19 nt, Homo sapiens
  misc_RNA (1)...(19): siRNA sense strand
gagaaugcccaaggaaaga

SEQ ID NO: 1777095 - RNA, 19 nt, Homo sapiens
  misc_RNA (1)...(19): siRNA sense strand
caaagggccucaguaucug

SEQ ID NO: 1777096 - RNA, 19 nt, Homo sapiens
  misc_RNA (1)...(19): siRNA sense strand
guagggcgagcaugucuuu

SEQ ID NO: 1777097 - RNA, 19 nt, Homo sapiens
  misc_RNA (1)...(19): siRNA sense strand
gagagagugugcaaagaac

SEQ ID NO: 1777098 - RNA, 19 nt, Homo sapiens
  misc_RNA (1)...(19): siRNA sense strand
ccagccagauuccuugguu

SEQ ID NO: 1777099 - RNA, 19 nt, Homo sapiens
  misc_RNA (1)...(19): siRNA sense strand
caccaaauccgucucucua

SEQ ID NO: 1777100 - RNA, 19 nt, Homo sapiens
  misc_RNA (1)...(19): siRNA sense strand
ccaguuggcugccuucacu

SEQ ID NO: 1777101 - RNA, 19 nt, Homo sapiens
  misc_RNA (1)...(19): siRNA sense strand
ggcagcagguggcagaguu

SEQ ID NO: 1777102 - RNA, 19 nt, Homo sapiens
  misc_RNA (1)...(19): siRNA sense strand
ucaaaugacugugaaagac

SEQ ID NO: 1777103 - RNA, 19 nt, Homo sapiens
  misc_RNA (1)...(19): siRNA sense strand
gggagaaugcccaaggaaa

SEQ ID NO: 1777104 - RNA, 19 nt, Homo sapiens
  misc_RNA (1)...(19): siRNA sense strand
aacaagggaugguucaaau

SEQ ID NO: 1777105 - RNA, 19 nt, Homo sapiens
  misc_RNA (1)...(19): siRNA sense strand
cagcagagccaccugaaca

SEQ ID NO: 1777106 - RNA, 19 nt, Homo sapiens
  misc_RNA (1)...(19): siRNA sense strand
gaaauccuggaccauguga

SEQ ID NO: 1777107 - RNA, 19 nt, Homo sapiens
  misc_RNA (1)...(19): siRNA sense strand
gaacagcaccaggaugucu

SEQ ID NO: 1777108 - RNA, 19 nt, Homo sapiens
  misc_RNA (1)...(19): siRNA sense strand
ccgggaguauuuagaagaa

SEQ ID NO: 1777109 - RNA, 19 nt, Homo sapiens
  misc_RNA (1)...(19): siRNA sense strand
aaaguuuccgggaguauuu

SEQ ID NO: 1777110 - RNA, 19 nt, Homo sapiens
  misc_RNA (1)...(19): siRNA sense strand
aggaacaucuuuagaaugc

SEQ ID NO: 1777111 - RNA, 19 nt, Homo sapiens
  misc_RNA (1)...(19): siRNA sense strand
gcaaagccaccacaaugag

SEQ ID NO: 1777112 - RNA, 19 nt, Homo sapiens
  misc_RNA (1)...(19): siRNA sense strand
uaucugugauggaggaaga

SEQ ID NO: 1777113 - RNA, 19 nt, Homo sapiens
  misc_RNA (1)...(19): siRNA sense strand
guaauccucuugacaugac

SEQ ID NO: 1777114 - RNA, 19 nt, Homo sapiens
  misc_RNA (1)...(19): siRNA sense strand
gaggagagagugugcaaag

SEQ ID NO: 1777115 - RNA, 19 nt, Homo sapiens
  misc_RNA (1)...(19): siRNA sense strand
caaacagagcugaagagaa

SEQ ID NO: 1777116 - RNA, 19 nt, Homo sapiens
  misc_RNA (1)...(19): siRNA sense strand
aaauuguccuguuggagaa

SEQ ID NO: 1777117 - RNA, 19 nt, Homo sapiens
  misc_RNA (1)...(19): siRNA sense strand
agagccaccugaacacuau

SEQ ID NO: 1777118 - RNA, 19 nt, Homo sapiens
  misc_RNA (1)...(19): siRNA sense strand
gaguuggaauuucaguuag

SEQ ID NO: 1777119 - RNA, 19 nt, Homo sapiens
  misc_RNA (1)...(19): siRNA sense strand
ccaggaagcccaguucaug

SEQ ID NO: 1777120 - RNA, 19 nt, Homo sapiens
  misc_RNA (1)...(19): siRNA sense strand
uagaaugcacuguguguga

SEQ ID NO: 1777121 - RNA, 19 nt, Homo sapiens
  misc_RNA (1)...(19): siRNA sense strand
gaggaacaucuuuagaaug

SEQ ID NO: 1777122 - RNA, 19 nt, Homo sapiens
  misc_RNA (1)...(19): siRNA sense strand
aaucacaccuuaugcaacu

SEQ ID NO: 1777123 - RNA, 19 nt, Homo sapiens
  misc_RNA (1)...(19): siRNA sense strand
gaagaagagacugguaauc

SEQ ID NO: 1777124 - RNA, 19 nt, Homo sapiens
  misc_RNA (1)...(19): siRNA sense strand
caacuuguacggucguuuc

SEQ ID NO: 1777125 - RNA, 19 nt, Homo sapiens
  misc_RNA (1)...(19): siRNA sense strand
gcagacuucauguucuaaa

SEQ ID NO: 1777126 - RNA, 19 nt, Homo sapiens
  misc_RNA (1)...(19): siRNA sense strand
uucagaaacucccauccua

SEQ ID NO: 1777127 - RNA, 19 nt, Homo sapiens
  misc_RNA (1)...(19): siRNA sense strand
gacgauaugccaaaguuuc

SEQ ID NO: 1777128 - RNA, 19 nt, Homo sapiens
  misc_RNA (1)...(19): siRNA sense strand
aaagcaagacaguuaaaug

SEQ ID NO: 1777129 - RNA, 19 nt, Homo sapiens
  misc_RNA (1)...(19): siRNA sense strand
ugaccuugcucaaacaucu

SEQ ID NO: 1777130 - RNA, 19 nt, Homo sapiens
  misc_RNA (1)...(19): siRNA sense strand
ugugaaagacuacaugaga

SEQ ID NO: 1777131 - RNA, 19 nt, Homo sapiens
  misc_RNA (1)...(19): siRNA sense strand
gagccacagcuuaguauca

SEQ ID NO: 1777132 - RNA, 19 nt, Homo sapiens
  misc_RNA (1)...(19): siRNA sense strand
ggaaaugaucauacucaag

SEQ ID NO: 1777133 - RNA, 19 nt, Homo sapiens
  misc_RNA (1)...(19): siRNA sense strand
aaacagagcugaagagaaa

SEQ ID NO: 1777134 - RNA, 19 nt, Homo sapiens
  misc_RNA (1)...(19): siRNA sense strand
gaacaaagggccucaguau

SEQ ID NO: 1777135 - RNA, 19 nt, Homo sapiens
  misc_RNA (1)...(19): siRNA sense strand
gaaaugaucauacucaaga

SEQ ID NO: 1777136 - RNA, 19 nt, Homo sapiens
  misc_RNA (1)...(19): siRNA sense strand
gcaagacaguuaaaugaug

SEQ ID NO: 1777137 - RNA, 19 nt, Homo sapiens
  misc_RNA (1)...(19): siRNA sense strand
ccagaaagcucaucacagu

SEQ ID NO: 1777138 - RNA, 19 nt, Homo sapiens
  misc_RNA (1)...(19): siRNA sense strand
gcaaagcccuggcccugaa

SEQ ID NO: 1777139 - RNA, 19 nt, Homo sapiens
  misc_RNA (1)...(19): siRNA sense strand
gaaauugaacagcaccuua

SEQ ID NO: 1777140 - RNA, 19 nt, Homo sapiens
  misc_RNA (1)...(19): siRNA sense strand
caauauaacuggauagaag

SEQ ID NO: 1777141 - RNA, 19 nt, Homo sapiens
  misc_RNA (1)...(19): siRNA sense strand
ccacagccacuuccaaaua

SEQ ID NO: 1777142 - RNA, 19 nt, Homo sapiens
  misc_RNA (1)...(19): siRNA sense strand
gacagaagcugagauggaa

SEQ ID NO: 1777143 - RNA, 19 nt, Homo sapiens
  misc_RNA (1)...(19): siRNA sense strand
caacugaccuugcucaaac

SEQ ID NO: 1777144 - RNA, 19 nt, Homo sapiens
  misc_RNA (1)...(19): siRNA sense strand
caagacaaguuccuucaug

SEQ ID NO: 1777145 - RNA, 19 nt, Homo sapiens
  misc_RNA (1)...(19): siRNA sense strand
ugagggagcuggcaaagug

SEQ ID NO: 1777146 - RNA, 19 nt, Homo sapiens
  misc_RNA (1)...(19): siRNA sense strand
gggcagacuucauguucua

SEQ ID NO: 1777147 - RNA, 19 nt, Homo sapiens
  misc_RNA (1)...(19): siRNA sense strand
gaaagcucaucacagugua

SEQ ID NO: 1777148 - RNA, 19 nt, Homo sapiens
  misc_RNA (1)...(19): siRNA sense strand
gcaucaauauaacuggaua

SEQ ID NO: 1777149 - RNA, 19 nt, Homo sapiens
  misc_RNA (1)...(19): siRNA sense strand
ggagagagugugcaaagaa

SEQ ID NO: 1777150 - RNA, 19 nt, Homo sapiens
  misc_RNA (1)...(19): siRNA sense strand
ggacagaagcugagaugga

SEQ ID NO: 1777151 - RNA, 19 nt, Homo sapiens
  misc_RNA (1)...(19): siRNA sense strand
gaaaucacaccuuaugcaa

SEQ ID NO: 1777152 - RNA, 19 nt, Homo sapiens
  misc_RNA (1)...(19): siRNA sense strand
gcaaugggcagacuucaug

SEQ ID NO: 1777153 - RNA, 19 nt, Homo sapiens
  misc_RNA (1)...(19): siRNA sense strand
gacucaggcuucucuagua

SEQ ID NO: 1777154 - RNA, 19 nt, Homo sapiens
  misc_RNA (1)...(19): siRNA sense strand
gauacuaccugggacagaa

SEQ ID NO: 1777155 - RNA, 19 nt, Homo sapiens
  misc_RNA (1)...(19): siRNA sense strand
ccaaauccgucucucuaga

SEQ ID NO: 1777156 - RNA, 19 nt, Homo sapiens
  misc_RNA (1)...(19): siRNA sense strand
gaucagagccacagcuuag

SEQ ID NO: 1777157 - RNA, 19 nt, Homo sapiens
  misc_RNA (1)...(19): siRNA sense strand
gagaacagcaccaggaugu

SEQ ID NO: 1777158 - RNA, 19 nt, Homo sapiens
  misc_RNA (1)...(19): siRNA sense strand
ugacaugacuucaggaacu

SEQ ID NO: 1777159 - RNA, 19 nt, Homo sapiens
  misc_RNA (1)...(19): siRNA sense strand
cagaggaacaucuuuagaa

SEQ ID NO: 1777160 - RNA, 19 nt, Homo sapiens
  misc_RNA (1)...(19): siRNA sense strand
ggaacaaagggccucagua

SEQ ID NO: 1777161 - RNA, 19 nt, Homo sapiens
  misc_RNA (1)...(19): siRNA sense strand
gucaaggucugguacuuug

SEQ ID NO: 1777162 - RNA, 19 nt, Homo sapiens
  misc_RNA (1)...(19): siRNA sense strand
gacaaaagcaagacaguua

SEQ ID NO: 1777163 - RNA, 19 nt, Homo sapiens
  misc_RNA (1)...(19): siRNA sense strand
gaaaaccuuccucuaaaua

SEQ ID NO: 1777164 - RNA, 19 nt, Homo sapiens
  misc_RNA (1)...(19): siRNA sense strand
cagaaaugcaggacaguuu

SEQ ID NO: 1777165 - RNA, 19 nt, Homo sapiens
  misc_RNA (1)...(19): siRNA sense strand
uggcagaguuggaauuuca

SEQ ID NO: 1777166 - RNA, 19 nt, Homo sapiens
  misc_RNA (1)...(19): siRNA sense strand
agaggaacaucuuuagaau

SEQ ID NO: 1777167 - RNA, 19 nt, Homo sapiens
  misc_RNA (1)...(19): siRNA sense strand
guagaaagccaagagauca

SEQ ID NO: 1777168 - RNA, 19 nt, Homo sapiens
  misc_RNA (1)...(19): siRNA sense strand
agaguuggaauuucaguua

SEQ ID NO: 1777169 - RNA, 19 nt, Homo sapiens
  misc_RNA (1)...(19): siRNA sense strand
ucuaguaucugcccaaugg

SEQ ID NO: 1777170 - RNA, 19 nt, Homo sapiens
  misc_RNA (1)...(19): siRNA sense strand
acaaguuccuucauguuga

SEQ ID NO: 1777171 - RNA, 19 nt, Homo sapiens
  misc_RNA (1)...(19): siRNA sense strand
gacaaguuccuucauguug

SEQ ID NO: 1777172 - RNA, 19 nt, Homo sapiens
  misc_RNA (1)...(19): siRNA sense strand
cacagccacuuccaaauau

SEQ ID NO: 1777173 - RNA, 19 nt, Homo sapiens
  misc_RNA (1)...(19): siRNA sense strand
ccagaguccugcugagaau

SEQ ID NO: 1777174 - RNA, 19 nt, Homo sapiens
  misc_RNA (1)...(19): siRNA sense strand
gugcaaagccaccacaaug

SEQ ID NO: 1777175 - RNA, 19 nt, Homo sapiens
  misc_RNA (1)...(19): siRNA sense strand
ggaggaagaguuucugcuu

SEQ ID NO: 1777176 - RNA, 19 nt, Homo sapiens
  misc_RNA (1)...(19): siRNA sense strand
aggaagaguuucugcuuga

SEQ ID NO: 1777177 - RNA, 19 nt, Homo sapiens
  misc_RNA (1)...(19): siRNA sense strand
aagcaagacaguuaaauga

SEQ ID NO: 1777178 - RNA, 19 nt, Homo sapiens
  misc_RNA (1)...(19): siRNA sense strand
gugaaagacuacaugagau

SEQ ID NO: 1777179 - RNA, 19 nt, Homo sapiens
  misc_RNA (1)...(19): siRNA sense strand
ggagaaugcccaaggaaag

SEQ ID NO: 1777180 - RNA, 19 nt, Homo sapiens
  misc_RNA (1)...(19): siRNA sense strand
aaaugacugugaaagacua

SEQ ID NO: 1777181 - RNA, 19 nt, Homo sapiens
  misc_RNA (1)...(19): siRNA sense strand
ccgagcaacugcaaacguu

SEQ ID NO: 1777182 - RNA, 19 nt, Homo sapiens
  misc_RNA (1)...(19): siRNA sense strand
ggacaugucagaggaggaa

SEQ ID NO: 1777183 - RNA, 19 nt, Homo sapiens
  misc_RNA (1)...(19): siRNA sense strand
ugagaucuuugcaucaguu

SEQ ID NO: 1777184 - RNA, 19 nt, Homo sapiens
  misc_RNA (1)...(19): siRNA sense strand
caaccacagcuuacucgua

SEQ ID NO: 1777185 - RNA, 19 nt, Homo sapiens
  misc_RNA (1)...(19): siRNA sense strand
ucacaccaaccacagcuua

SEQ ID NO: 1777186 - RNA, 19 nt, Homo sapiens
  misc_RNA (1)...(19): siRNA sense strand
uaacccacgucacagaaau

SEQ ID NO: 1777187 - RNA, 19 nt, Homo sapiens
  misc_RNA (1)...(19): siRNA sense strand
acaaagggccucaguaucu

SEQ ID NO: 1777188 - RNA, 19 nt, Homo sapiens
  misc_RNA (1)...(19): siRNA sense strand
aagacgauaugccaaaguu

SEQ ID NO: 1777189 - RNA, 19 nt, Homo sapiens
  misc_RNA (1)...(19): siRNA sense strand
ccagccagauuccuugguu

SEQ ID NO: 1777190 - RNA, 19 nt, Homo sapiens
  misc_RNA (1)...(19): siRNA sense strand
gagaaugcccaaggaaaga

SEQ ID NO: 1777191 - RNA, 19 nt, Homo sapiens
  misc_RNA (1)...(19): siRNA sense strand
caaagggccucaguaucug

SEQ ID NO: 1777192 - RNA, 19 nt, Homo sapiens
  misc_RNA (1)...(19): siRNA sense strand
gcaaguguaccacaaagca

SEQ ID NO: 1777193 - RNA, 19 nt, Homo sapiens
  misc_RNA (1)...(19): siRNA sense strand
guagggcgagcaugucuuu

SEQ ID NO: 1777194 - RNA, 19 nt, Homo sapiens
  misc_RNA (1)...(19): siRNA sense strand
gagagagugugcaaagaac

SEQ ID NO: 1777195 - RNA, 19 nt, Homo sapiens
  misc_RNA (1)...(19): siRNA sense strand
ucaaaugacugugaaagac

SEQ ID NO: 1777196 - RNA, 19 nt, Homo sapiens
  misc_RNA (1)...(19): siRNA sense strand
ccaguuggcugccuucacu

SEQ ID NO: 1777197 - RNA, 19 nt, Homo sapiens
  misc_RNA (1)...(19): siRNA sense strand
ggcagcagguggcagaguu

SEQ ID NO: 1777198 - RNA, 19 nt, Homo sapiens
  misc_RNA (1)...(19): siRNA sense strand
caccaaauccgucucucua

SEQ ID NO: 1777199 - RNA, 19 nt, Homo sapiens
  misc_RNA (1)...(19): siRNA sense strand
gggagaaugcccaaggaaa

SEQ ID NO: 1777200 - RNA, 19 nt, Homo sapiens
  misc_RNA (1)...(19): siRNA sense strand
cagcagagccaccugaaca

SEQ ID NO: 1777201 - RNA, 19 nt, Homo sapiens
  misc_RNA (1)...(19): siRNA sense strand
gaaauccuggaccauguga

SEQ ID NO: 1777202 - RNA, 19 nt, Homo sapiens
  misc_RNA (1)...(19): siRNA sense strand
gaacagcaccaggaugucu

SEQ ID NO: 1777203 - RNA, 19 nt, Homo sapiens
  misc_RNA (1)...(19): siRNA sense strand
ccgggaguauuuagaagaa

SEQ ID NO: 1777204 - RNA, 19 nt, Homo sapiens
  misc_RNA (1)...(19): siRNA sense strand
aaaguuuccgggaguauuu

SEQ ID NO: 1777205 - RNA, 19 nt, Homo sapiens
  misc_RNA (1)...(19): siRNA sense strand
aggaacaucuuuagaaugc

SEQ ID NO: 1777206 - RNA, 19 nt, Homo sapiens
  misc_RNA (1)...(19): siRNA sense strand
gcaaagccaccacaaugag

SEQ ID NO: 1777207 - RNA, 19 nt, Homo sapiens
  misc_RNA (1)...(19): siRNA sense strand
uaucugugauggaggaaga

SEQ ID NO: 1777208 - RNA, 19 nt, Homo sapiens
  misc_RNA (1)...(19): siRNA sense strand
guaauccucuugacaugac

SEQ ID NO: 1777209 - RNA, 19 nt, Homo sapiens
  misc_RNA (1)...(19): siRNA sense strand
gaggagagagugugcaaag

SEQ ID NO: 1777210 - RNA, 19 nt, Homo sapiens
  misc_RNA (1)...(19): siRNA sense strand
caaacagagcugaagagaa

SEQ ID NO: 1777211 - RNA, 19 nt, Homo sapiens
  misc_RNA (1)...(19): siRNA sense strand
aaauuguccuguuggagaa

SEQ ID NO: 1777212 - RNA, 19 nt, Homo sapiens
  misc_RNA (1)...(19): siRNA sense strand
agagccaccugaacacuau

SEQ ID NO: 1777213 - RNA, 19 nt, Homo sapiens
  misc_RNA (1)...(19): siRNA sense strand
gaguuggaauuucaguuag

SEQ ID NO: 1777214 - RNA, 19 nt, Homo sapiens
  misc_RNA (1)...(19): siRNA sense strand
ccaggaagcccaguucaug

SEQ ID NO: 1777215 - RNA, 19 nt, Homo sapiens
  misc_RNA (1)...(19): siRNA sense strand
uagaaugcacuguguguga

SEQ ID NO: 1777216 - RNA, 19 nt, Homo sapiens
  misc_RNA (1)...(19): siRNA sense strand
gaggaacaucuuuagaaug

SEQ ID NO: 1777217 - RNA, 19 nt, Homo sapiens
  misc_RNA (1)...(19): siRNA sense strand
aaucacaccuuaugcaacu

SEQ ID NO: 1777218 - RNA, 19 nt, Homo sapiens
  misc_RNA (1)...(19): siRNA sense strand
gaagaagagacugguaauc

SEQ ID NO: 1777219 - RNA, 19 nt, Homo sapiens
  misc_RNA (1)...(19): siRNA sense strand
caacuuguacggucguuuc

SEQ ID NO: 1777220 - RNA, 19 nt, Homo sapiens
  misc_RNA (1)...(19): siRNA sense strand
gcagacuucauguucuaaa

SEQ ID NO: 1777221 - RNA, 19 nt, Homo sapiens
  misc_RNA (1)...(19): siRNA sense strand
gacgauaugccaaaguuuc

SEQ ID NO: 1777222 - RNA, 19 nt, Homo sapiens
  misc_RNA (1)...(19): siRNA sense strand
aaagcaagacaguuaaaug

SEQ ID NO: 1777223 - RNA, 19 nt, Homo sapiens
  misc_RNA (1)...(19): siRNA sense strand
uucagaaacucccauccua

SEQ ID NO: 1777224 - RNA, 19 nt, Homo sapiens
  misc_RNA (1)...(19): siRNA sense strand
ugaccuugcucaaacaucu

SEQ ID NO: 1777225 - RNA, 19 nt, Homo sapiens
  misc_RNA (1)...(19): siRNA sense strand
ugugaaagacuacaugaga

SEQ ID NO: 1777226 - RNA, 19 nt, Homo sapiens
  misc_RNA (1)...(19): siRNA sense strand
gguagaaagccaagagauc

SEQ ID NO: 1777227 - RNA, 19 nt, Homo sapiens
  misc_RNA (1)...(19): siRNA sense strand
ggaaaugaucauacucaag

SEQ ID NO: 1777228 - RNA, 19 nt, Homo sapiens
  misc_RNA (1)...(19): siRNA sense strand
gagccacagcuuaguauca

SEQ ID NO: 1777229 - RNA, 19 nt, Homo sapiens
  misc_RNA (1)...(19): siRNA sense strand
ucagagccacagcuuagua

SEQ ID NO: 1777230 - RNA, 19 nt, Homo sapiens
  misc_RNA (1)...(19): siRNA sense strand
gccaaaguuuccgggagua

SEQ ID NO: 1777231 - RNA, 19 nt, Homo sapiens
  misc_RNA (1)...(19): siRNA sense strand
gaaagcaaugggcagacuu

SEQ ID NO: 1777232 - RNA, 19 nt, Homo sapiens
  misc_RNA (1)...(19): siRNA sense strand
gcagguggcagaguuggaa

SEQ ID NO: 1777233 - RNA, 19 nt, Homo sapiens
  misc_RNA (1)...(19): siRNA sense strand
aaacagagcugaagagaaa

SEQ ID NO: 1777234 - RNA, 19 nt, Homo sapiens
  misc_RNA (1)...(19): siRNA sense strand
gaacaaagggccucaguau

SEQ ID NO: 1777235 - RNA, 19 nt, Homo sapiens
  misc_RNA (1)...(19): siRNA sense strand
gaaaugaucauacucaaga

SEQ ID NO: 1777236 - RNA, 19 nt, Homo sapiens
  misc_RNA (1)...(19): siRNA sense strand
gcaagacaguuaaaugaug

SEQ ID NO: 1777237 - RNA, 19 nt, Homo sapiens
  misc_RNA (1)...(19): siRNA sense strand
ccagaaagcucaucacagu

SEQ ID NO: 1777238 - RNA, 19 nt, Homo sapiens
  misc_RNA (1)...(19): siRNA sense strand
gcaaagcccuggcccugaa

SEQ ID NO: 1777239 - RNA, 19 nt, Homo sapiens
  misc_RNA (1)...(19): siRNA sense strand
gaaauugaacagcaccuua

SEQ ID NO: 1777240 - RNA, 19 nt, Homo sapiens
  misc_RNA (1)...(19): siRNA sense strand
caauauaacuggauagaag

SEQ ID NO: 1777241 - RNA, 19 nt, Homo sapiens
  misc_RNA (1)...(19): siRNA sense strand
ccacagccacuuccaaaua

SEQ ID NO: 1777242 - RNA, 19 nt, Homo sapiens
  misc_RNA (1)...(19): siRNA sense strand
gacagaagcugagauggaa

SEQ ID NO: 1777243 - RNA, 19 nt, Homo sapiens
  misc_RNA (1)...(19): siRNA sense strand
caacugaccuugcucaaac

SEQ ID NO: 1777244 - RNA, 19 nt, Homo sapiens
  misc_RNA (1)...(19): siRNA sense strand
caagacaaguuccuucaug

SEQ ID NO: 1777245 - RNA, 19 nt, Homo sapiens
  misc_RNA (1)...(19): siRNA sense strand
ugagggagcuggcaaagug

SEQ ID NO: 1777246 - RNA, 19 nt, Homo sapiens
  misc_RNA (1)...(19): siRNA sense strand
gggcagacuucauguucua

SEQ ID NO: 1777247 - RNA, 19 nt, Homo sapiens
  misc_RNA (1)...(19): siRNA sense strand
gaaagcucaucacagugua

SEQ ID NO: 1777248 - RNA, 19 nt, Homo sapiens
  misc_RNA (1)...(19): siRNA sense strand
gcaucaauauaacuggaua

SEQ ID NO: 1777249 - RNA, 19 nt, Homo sapiens
  misc_RNA (1)...(19): siRNA sense strand
ggagagagugugcaaagaa

SEQ ID NO: 1777250 - RNA, 19 nt, Homo sapiens
  misc_RNA (1)...(19): siRNA sense strand
ggacagaagcugagaugga

SEQ ID NO: 1777251 - RNA, 19 nt, Homo sapiens
  misc_RNA (1)...(19): siRNA sense strand
gaaaucacaccuuaugcaa

SEQ ID NO: 1777252 - RNA, 19 nt, Homo sapiens
  misc_RNA (1)...(19): siRNA sense strand
gcaaugggcagacuucaug

SEQ ID NO: 1777253 - RNA, 19 nt, Homo sapiens
  misc_RNA (1)...(19): siRNA sense strand
gacucaggcuucucuagua

SEQ ID NO: 1777254 - RNA, 19 nt, Homo sapiens
  misc_RNA (1)...(19): siRNA sense strand
gauacuaccugggacagaa

SEQ ID NO: 1777255 - RNA, 19 nt, Homo sapiens
  misc_RNA (1)...(19): siRNA sense strand
ccaaauccgucucucuaga

SEQ ID NO: 1777256 - RNA, 19 nt, Homo sapiens
  misc_RNA (1)...(19): siRNA sense strand
gaucagagccacagcuuag

SEQ ID NO: 1777257 - RNA, 19 nt, Homo sapiens
  misc_RNA (1)...(19): siRNA sense strand
gagaacagcaccaggaugu

SEQ ID NO: 1777258 - RNA, 19 nt, Homo sapiens
  misc_RNA (1)...(19): siRNA sense strand
ugacaugacuucaggaacu

SEQ ID NO: 1777259 - RNA, 19 nt, Homo sapiens
  misc_RNA (1)...(19): siRNA sense strand
cagaggaacaucuuuagaa

SEQ ID NO: 1777260 - RNA, 19 nt, Homo sapiens
  misc_RNA (1)...(19): siRNA sense strand
ggaacaaagggccucagua

SEQ ID NO: 1777261 - RNA, 19 nt, Homo sapiens
  misc_RNA (1)...(19): siRNA sense strand
gucaaggucugguacuuug

SEQ ID NO: 1777262 - RNA, 19 nt, Homo sapiens
  misc_RNA (1)...(19): siRNA sense strand
gacaaaagcaagacaguua

SEQ ID NO: 1777263 - RNA, 19 nt, Homo sapiens
  misc_RNA (1)...(19): siRNA sense strand
gaaaaccuuccucuaaaua

SEQ ID NO: 1777264 - RNA, 19 nt, Homo sapiens
  misc_RNA (1)...(19): siRNA sense strand
cagaaaugcaggacaguuu

SEQ ID NO: 1777265 - RNA, 19 nt, Homo sapiens
  misc_RNA (1)...(19): siRNA sense strand
uggcagaguuggaauuuca

SEQ ID NO: 1777266 - RNA, 19 nt, Homo sapiens
  misc_RNA (1)...(19): siRNA sense strand
agaggaacaucuuuagaau

SEQ ID NO: 1777267 - RNA, 19 nt, Homo sapiens
  misc_RNA (1)...(19): siRNA sense strand
guagaaagccaagagauca

SEQ ID NO: 1777268 - RNA, 19 nt, Homo sapiens
  misc_RNA (1)...(19): siRNA sense strand
agaguuggaauuucaguua

SEQ ID NO: 1777269 - RNA, 19 nt, Homo sapiens
  misc_RNA (1)...(19): siRNA sense strand
ucuaguaucugcccaaugg

SEQ ID NO: 1777270 - RNA, 19 nt, Homo sapiens
  misc_RNA (1)...(19): siRNA sense strand
acaaguuccuucauguuga

SEQ ID NO: 1777271 - RNA, 19 nt, Homo sapiens
  misc_RNA (1)...(19): siRNA sense strand
gacaaguuccuucauguug

SEQ ID NO: 1777272 - RNA, 19 nt, Homo sapiens
  misc_RNA (1)...(19): siRNA sense strand
cacagccacuuccaaauau

SEQ ID NO: 1777273 - RNA, 19 nt, Homo sapiens
  misc_RNA (1)...(19): siRNA sense strand
ccagaguccugcugagaau

SEQ ID NO: 1777274 - RNA, 19 nt, Homo sapiens
  misc_RNA (1)...(19): siRNA sense strand
gugcaaagccaccacaaug

SEQ ID NO: 1777275 - RNA, 19 nt, Homo sapiens
  misc_RNA (1)...(19): siRNA sense strand
ggaggaagaguuucugcuu

SEQ ID NO: 1777276 - RNA, 19 nt, Homo sapiens
  misc_RNA (1)...(19): siRNA sense strand
aggaagaguuucugcuuga

SEQ ID NO: 1777277 - RNA, 19 nt, Homo sapiens
  misc_RNA (1)...(19): siRNA sense strand
aagcaagacaguuaaauga

SEQ ID NO: 1777278 - RNA, 19 nt, Homo sapiens
  misc_RNA (1)...(19): siRNA sense strand
gugaaagacuacaugagau

SEQ ID NO: 1777279 - RNA, 19 nt, Homo sapiens
  misc_RNA (1)...(19): siRNA sense strand
ggagaaugcccaaggaaag

SEQ ID NO: 1777280 - RNA, 19 nt, Homo sapiens
  misc_RNA (1)...(19): siRNA sense strand
aaaugacugugaaagacua

SEQ ID NO: 1777281 - RNA, 19 nt, Homo sapiens
  misc_RNA (1)...(19): siRNA sense strand
ccgagcaacugcaaacguu

SEQ ID NO: 1777282 - RNA, 19 nt, Homo sapiens
  misc_RNA (1)...(19): siRNA sense strand
ggacaugucagaggaggaa

SEQ ID NO: 1777283 - RNA, 19 nt, Homo sapiens
  misc_RNA (1)...(19): siRNA sense strand
ugagaucuuugcaucaguu

SEQ ID NO: 1777284 - RNA, 19 nt, Homo sapiens
  misc_RNA (1)...(19): siRNA sense strand
caaccacagcuuacucgua

SEQ ID NO: 1777285 - RNA, 19 nt, Homo sapiens
  misc_RNA (1)...(19): siRNA sense strand
ucacaccaaccacagcuua

SEQ ID NO: 1777286 - RNA, 19 nt, Homo sapiens
  misc_RNA (1)...(19): siRNA sense strand
uaacccacgucacagaaau

SEQ ID NO: 1777287 - RNA, 19 nt, Homo sapiens
  misc_RNA (1)...(19): siRNA sense strand
acaaagggccucaguaucu

SEQ ID NO: 1777288 - RNA, 19 nt, Homo sapiens
  misc_RNA (1)...(19): siRNA sense strand
aagacgauaugccaaaguu

SEQ ID NO: 1777289 - RNA, 19 nt, Homo sapiens
  misc_RNA (1)...(19): siRNA sense strand
ccagccagauuccuugguu

SEQ ID NO: 1777290 - RNA, 19 nt, Homo sapiens
  misc_RNA (1)...(19): siRNA sense strand
gagaaugcccaaggaaaga

SEQ ID NO: 1777291 - RNA, 19 nt, Homo sapiens
  misc_RNA (1)...(19): siRNA sense strand
caaagggccucaguaucug

SEQ ID NO: 1777292 - RNA, 19 nt, Homo sapiens
  misc_RNA (1)...(19): siRNA sense strand
gcaaguguaccacaaagca

SEQ ID NO: 1777293 - RNA, 19 nt, Homo sapiens
  misc_RNA (1)...(19): siRNA sense strand
guagggcgagcaugucuuu

SEQ ID NO: 1777294 - RNA, 19 nt, Homo sapiens
  misc_RNA (1)...(19): siRNA sense strand
gagagagugugcaaagaac

SEQ ID NO: 1777295 - RNA, 19 nt, Homo sapiens
  misc_RNA (1)...(19): siRNA sense strand
ucaaaugacugugaaagac

SEQ ID NO: 1777296 - RNA, 19 nt, Homo sapiens
  misc_RNA (1)...(19): siRNA sense strand
ccaguuggcugccuucacu

SEQ ID NO: 1777297 - RNA, 19 nt, Homo sapiens
  misc_RNA (1)...(19): siRNA sense strand
ggcagcagguggcagaguu

SEQ ID NO: 1777298 - RNA, 19 nt, Homo sapiens
  misc_RNA (1)...(19): siRNA sense strand
caccaaauccgucucucua

SEQ ID NO: 1777299 - RNA, 19 nt, Homo sapiens
  misc_RNA (1)...(19): siRNA sense strand
gggagaaugcccaaggaaa

SEQ ID NO: 1777300 - RNA, 19 nt, Homo sapiens
  misc_RNA (1)...(19): siRNA sense strand
cagcagagccaccugaaca

SEQ ID NO: 1777301 - RNA, 19 nt, Homo sapiens
  misc_RNA (1)...(19): siRNA sense strand
gaaauccuggaccauguga

SEQ ID NO: 1777302 - RNA, 19 nt, Homo sapiens
  misc_RNA (1)...(19): siRNA sense strand
gaacagcaccaggaugucu

SEQ ID NO: 1777303 - RNA, 19 nt, Homo sapiens
  misc_RNA (1)...(19): siRNA sense strand
ccgggaguauuuagaagaa

SEQ ID NO: 1777304 - RNA, 19 nt, Homo sapiens
  misc_RNA (1)...(19): siRNA sense strand
aaaguuuccgggaguauuu

SEQ ID NO: 1777305 - RNA, 19 nt, Homo sapiens
  misc_RNA (1)...(19): siRNA sense strand
aggaacaucuuuagaaugc

SEQ ID NO: 1777306 - RNA, 19 nt, Homo sapiens
  misc_RNA (1)...(19): siRNA sense strand
gcaaagccaccacaaugag

SEQ ID NO: 1777307 - RNA, 19 nt, Homo sapiens
  misc_RNA (1)...(19): siRNA sense strand
uaucugugauggaggaaga

SEQ ID NO: 1777308 - RNA, 19 nt, Homo sapiens
  misc_RNA (1)...(19): siRNA sense strand
guaauccucuugacaugac

SEQ ID NO: 1777309 - RNA, 19 nt, Homo sapiens
  misc_RNA (1)...(19): siRNA sense strand
gaggagagagugugcaaag

SEQ ID NO: 1777310 - RNA, 19 nt, Homo sapiens
  misc_RNA (1)...(19): siRNA sense strand
caaacagagcugaagagaa

SEQ ID NO: 1777311 - RNA, 19 nt, Homo sapiens
  misc_RNA (1)...(19): siRNA sense strand
aaauuguccuguuggagaa

SEQ ID NO: 1777312 - RNA, 19 nt, Homo sapiens
  misc_RNA (1)...(19): siRNA sense strand
agagccaccugaacacuau

SEQ ID NO: 1777313 - RNA, 19 nt, Homo sapiens
  misc_RNA (1)...(19): siRNA sense strand
gaguuggaauuucaguuag

SEQ ID NO: 1777314 - RNA, 19 nt, Homo sapiens
  misc_RNA (1)...(19): siRNA sense strand
ccaggaagcccaguucaug

SEQ ID NO: 1777315 - RNA, 19 nt, Homo sapiens
  misc_RNA (1)...(19): siRNA sense strand
uagaaugcacuguguguga

SEQ ID NO: 1777316 - RNA, 19 nt, Homo sapiens
  misc_RNA (1)...(19): siRNA sense strand
gaggaacaucuuuagaaug

SEQ ID NO: 1777317 - RNA, 19 nt, Homo sapiens
  misc_RNA (1)...(19): siRNA sense strand
aaucacaccuuaugcaacu

SEQ ID NO: 1777318 - RNA, 19 nt, Homo sapiens
  misc_RNA (1)...(19): siRNA sense strand
gaagaagagacugguaauc

SEQ ID NO: 1777319 - RNA, 19 nt, Homo sapiens
  misc_RNA (1)...(19): siRNA sense strand
caacuuguacggucguuuc

SEQ ID NO: 1777320 - RNA, 19 nt, Homo sapiens
  misc_RNA (1)...(19): siRNA sense strand
gcagacuucauguucuaaa

SEQ ID NO: 1777321 - RNA, 19 nt, Homo sapiens
  misc_RNA (1)...(19): siRNA sense strand
gacgauaugccaaaguuuc

SEQ ID NO: 1777322 - RNA, 19 nt, Homo sapiens
  misc_RNA (1)...(19): siRNA sense strand
aaagcaagacaguuaaaug

SEQ ID NO: 1777323 - RNA, 19 nt, Homo sapiens
  misc_RNA (1)...(19): siRNA sense strand
uucagaaacucccauccua

SEQ ID NO: 1777324 - RNA, 19 nt, Homo sapiens
  misc_RNA (1)...(19): siRNA sense strand
ugaccuugcucaaacaucu

SEQ ID NO: 1777325 - RNA, 19 nt, Homo sapiens
  misc_RNA (1)...(19): siRNA sense strand
ugugaaagacuacaugaga

SEQ ID NO: 1777326 - RNA, 19 nt, Homo sapiens
  misc_RNA (1)...(19): siRNA sense strand
gguagaaagccaagagauc

SEQ ID NO: 1777327 - RNA, 19 nt, Homo sapiens
  misc_RNA (1)...(19): siRNA sense strand
ggaaaugaucauacucaag

SEQ ID NO: 1777328 - RNA, 19 nt, Homo sapiens
  misc_RNA (1)...(19): siRNA sense strand
gagccacagcuuaguauca

SEQ ID NO: 1777329 - RNA, 19 nt, Homo sapiens
  misc_RNA (1)...(19): siRNA sense strand
ucagagccacagcuuagua

SEQ ID NO: 1777330 - RNA, 19 nt, Homo sapiens
  misc_RNA (1)...(19): siRNA sense strand
gccaaaguuuccgggagua

SEQ ID NO: 1777331 - RNA, 19 nt, Homo sapiens
  misc_RNA (1)...(19): siRNA sense strand
gaaagcaaugggcagacuu

SEQ ID NO: 1777332 - RNA, 19 nt, Homo sapiens
  misc_RNA (1)...(19): siRNA sense strand
gcagguggcagaguuggaa

SEQ ID NO: 1777333 - RNA, 19 nt, Homo sapiens
  misc_RNA (1)...(19): siRNA sense strand
ggaaguggcaguuauauaa

SEQ ID NO: 1777334 - RNA, 19 nt, Homo sapiens
  misc_RNA (1)...(19): siRNA sense strand
gaaagaaucuggaagaaaa

SEQ ID NO: 1777335 - RNA, 19 nt, Homo sapiens
  misc_RNA (1)...(19): siRNA sense strand
caagacagccuacuucaua

SEQ ID NO: 1777336 - RNA, 19 nt, Homo sapiens
  misc_RNA (1)...(19): siRNA sense strand
gaagaagaguuuauuaugc

SEQ ID NO: 1777337 - RNA, 19 nt, Homo sapiens
  misc_RNA (1)...(19): siRNA sense strand
aaaguugccucuaauguuu

SEQ ID NO: 1777338 - RNA, 19 nt, Homo sapiens
  misc_RNA (1)...(19): siRNA sense strand
guacaaaguugccucuaau

SEQ ID NO: 1777339 - RNA, 19 nt, Homo sapiens
  misc_RNA (1)...(19): siRNA sense strand
ccacuuauuuccauuauag

SEQ ID NO: 1777340 - RNA, 19 nt, Homo sapiens
  misc_RNA (1)...(19): siRNA sense strand
gauggaugcuugcugauug

SEQ ID NO: 1777341 - RNA, 19 nt, Homo sapiens
  misc_RNA (1)...(19): siRNA sense strand
caaaagagccugaaacgua

SEQ ID NO: 1777342 - RNA, 19 nt, Homo sapiens
  misc_RNA (1)...(19): siRNA sense strand
gaagauguagcaagaaguu

SEQ ID NO: 1777343 - RNA, 19 nt, Homo sapiens
  misc_RNA (1)...(19): siRNA sense strand
ucuuggaugugguuuauua

SEQ ID NO: 1777344 - RNA, 19 nt, Homo sapiens
  misc_RNA (1)...(19): siRNA sense strand
gaaacaagacagccuacuu

SEQ ID NO: 1777345 - RNA, 19 nt, Homo sapiens
  misc_RNA (1)...(19): siRNA sense strand
gauacuggcugacuucaag

SEQ ID NO: 1777346 - RNA, 19 nt, Homo sapiens
  misc_RNA (1)...(19): siRNA sense strand
ggaaagaaucuggaagaaa

SEQ ID NO: 1777347 - RNA, 19 nt, Homo sapiens
  misc_RNA (1)...(19): siRNA sense strand
gaccuaugauauugcauuu

SEQ ID NO: 1777348 - RNA, 19 nt, Homo sapiens
  misc_RNA (1)...(19): siRNA sense strand
ucaaguggauuaauaccuu

SEQ ID NO: 1777349 - RNA, 19 nt, Homo sapiens
  misc_RNA (1)...(19): siRNA sense strand
gaaguggcaguuauauaaa

SEQ ID NO: 1777350 - RNA, 19 nt, Homo sapiens
  misc_RNA (1)...(19): siRNA sense strand
caaaguugccucuaauguu

SEQ ID NO: 1777351 - RNA, 19 nt, Homo sapiens
  misc_RNA (1)...(19): siRNA sense strand
gagcaagaccugucacaau

SEQ ID NO: 1777352 - RNA, 19 nt, Homo sapiens
  misc_RNA (1)...(19): siRNA sense strand
uauggaagauguagcaaga

SEQ ID NO: 1777353 - RNA, 19 nt, Homo sapiens
  misc_RNA (1)...(19): siRNA sense strand
gaaaguugcagaacagaca

SEQ ID NO: 1777354 - RNA, 19 nt, Homo sapiens
  misc_RNA (1)...(19): siRNA sense strand
ggacccagaccuaugauau

SEQ ID NO: 1777355 - RNA, 19 nt, Homo sapiens
  misc_RNA (1)...(19): siRNA sense strand
gguaauugguccaucuuuc

SEQ ID NO: 1777356 - RNA, 19 nt, Homo sapiens
  misc_RNA (1)...(19): siRNA sense strand
ggucuuggaugugguuuau

SEQ ID NO: 1777357 - RNA, 19 nt, Homo sapiens
  misc_RNA (1)...(19): siRNA sense strand
ggaugugguuuauuauaca

SEQ ID NO: 1777358 - RNA, 19 nt, Homo sapiens
  misc_RNA (1)...(19): siRNA sense strand
ugugggugcuuuagcuuua

SEQ ID NO: 1777359 - RNA, 19 nt, Homo sapiens
  misc_RNA (1)...(19): siRNA sense strand
uguacaaaguugccucuaa

SEQ ID NO: 1777360 - RNA, 19 nt, Homo sapiens
  misc_RNA (1)...(19): siRNA sense strand
ggccugauguugagcaguu

SEQ ID NO: 1777361 - RNA, 19 nt, Homo sapiens
  misc_RNA (1)...(19): siRNA sense strand
guugcuaccuuaaucauca

SEQ ID NO: 1777362 - RNA, 19 nt, Homo sapiens
  misc_RNA (1)...(19): siRNA sense strand
aaagaaaguugcagaacag

SEQ ID NO: 1777363 - RNA, 19 nt, Homo sapiens
  misc_RNA (1)...(19): siRNA sense strand
cccaauaucuacuuucugu

SEQ ID NO: 1777364 - RNA, 19 nt, Homo sapiens
  misc_RNA (1)...(19): siRNA sense strand
uugcagaacagacauauuu

SEQ ID NO: 1777365 - RNA, 19 nt, Homo sapiens
  misc_RNA (1)...(19): siRNA sense strand
cgaagacugugggaauuga

SEQ ID NO: 1777366 - RNA, 19 nt, Homo sapiens
  misc_RNA (1)...(19): siRNA sense strand
gaguuuauuaugccacuua

SEQ ID NO: 1777367 - RNA, 19 nt, Homo sapiens
  misc_RNA (1)...(19): siRNA sense strand
cgugaaagaagaagaguuu

SEQ ID NO: 1777368 - RNA, 19 nt, Homo sapiens
  misc_RNA (1)...(19): siRNA sense strand
caagaggaaguggcaguua

SEQ ID NO: 1777369 - RNA, 19 nt, Homo sapiens
  misc_RNA (1)...(19): siRNA sense strand
aaacaagacagccuacuuc

SEQ ID NO: 1777370 - RNA, 19 nt, Homo sapiens
  misc_RNA (1)...(19): siRNA sense strand
ccuaugggauauuaauguu

SEQ ID NO: 1777371 - RNA, 19 nt, Homo sapiens
  misc_RNA (1)...(19): siRNA sense strand
gcgcuuggccugauuucaa

SEQ ID NO: 1777372 - RNA, 19 nt, Homo sapiens
  misc_RNA (1)...(19): siRNA sense strand
caagccagcuccaacaacu

SEQ ID NO: 1777373 - RNA, 19 nt, Homo sapiens
  misc_RNA (1)...(19): siRNA sense strand
guucuuugcuggacuugga

SEQ ID NO: 1777374 - RNA, 19 nt, Homo sapiens
  misc_RNA (1)...(19): siRNA sense strand
aaacuacuguggugaaacu

SEQ ID NO: 1777375 - RNA, 19 nt, Homo sapiens
  misc_RNA (1)...(19): siRNA sense strand
aagacagccuacuucauaa

SEQ ID NO: 1777376 - RNA, 19 nt, Homo sapiens
  misc_RNA (1)...(19): siRNA sense strand
agaggaugcugguugaguu

SEQ ID NO: 1777377 - RNA, 19 nt, Homo sapiens
  misc_RNA (1)...(19): siRNA sense strand
ggaugcugguugaguucua

SEQ ID NO: 1777378 - RNA, 19 nt, Homo sapiens
  misc_RNA (1)...(19): siRNA sense strand
aagaggaaguggcaguuau

SEQ ID NO: 1777379 - RNA, 19 nt, Homo sapiens
  misc_RNA (1)...(19): siRNA sense strand
ggccuagccuugugugcaa

SEQ ID NO: 1777380 - RNA, 19 nt, Homo sapiens
  misc_RNA (1)...(19): siRNA sense strand
ggaguccuguacauagaau

SEQ ID NO: 1777381 - RNA, 19 nt, Homo sapiens
  misc_RNA (1)...(19): siRNA sense strand
gcuggaggccugauguuga

SEQ ID NO: 1777382 - RNA, 19 nt, Homo sapiens
  misc_RNA (1)...(19): siRNA sense strand
gccuugcccucuugggaua

SEQ ID NO: 1777383 - RNA, 19 nt, Homo sapiens
  misc_RNA (1)...(19): siRNA sense strand
gacccagaccuaugauauu

SEQ ID NO: 1777384 - RNA, 19 nt, Homo sapiens
  misc_RNA (1)...(19): siRNA sense strand
ggauauuaauguucuuugc

SEQ ID NO: 1777385 - RNA, 19 nt, Homo sapiens
  misc_RNA (1)...(19): siRNA sense strand
gggauccuaggguuucuua

SEQ ID NO: 1777386 - RNA, 19 nt, Homo sapiens
  misc_RNA (1)...(19): siRNA sense strand
ccacagugacacacacaaa

SEQ ID NO: 1777387 - RNA, 19 nt, Homo sapiens
  misc_RNA (1)...(19): siRNA sense strand
cacgaagacugugggaauu

SEQ ID NO: 1777388 - RNA, 19 nt, Homo sapiens
  misc_RNA (1)...(19): siRNA sense strand
guacauagaauggcuggau

SEQ ID NO: 1777389 - RNA, 19 nt, Homo sapiens
  misc_RNA (1)...(19): siRNA sense strand
agaggaaguggcaguuaua

SEQ ID NO: 1777390 - RNA, 19 nt, Homo sapiens
  misc_RNA (1)...(19): siRNA sense strand
uaugacagcaguugguaaa

SEQ ID NO: 1777391 - RNA, 19 nt, Homo sapiens
  misc_RNA (1)...(19): siRNA sense strand
agcaagaccugucacaauc

SEQ ID NO: 1777392 - RNA, 19 nt, Homo sapiens
  misc_RNA (1)...(19): siRNA sense strand
gccacuuauuuccauuaua

SEQ ID NO: 1777393 - RNA, 19 nt, Homo sapiens
  misc_RNA (1)...(19): siRNA sense strand
ggauggaugcuugcugauu

SEQ ID NO: 1777394 - RNA, 19 nt, Homo sapiens
  misc_RNA (1)...(19): siRNA sense strand
acccagaccuaugauauug

SEQ ID NO: 1777395 - RNA, 19 nt, Homo sapiens
  misc_RNA (1)...(19): siRNA sense strand
aaucuucaguggcuucaug

SEQ ID NO: 1777396 - RNA, 19 nt, Homo sapiens
  misc_RNA (1)...(19): siRNA sense strand
gcguuggccuuuucauaua

SEQ ID NO: 1777397 - RNA, 19 nt, Homo sapiens
  misc_RNA (1)...(19): siRNA sense strand
aaaauuagcccaugccuau

SEQ ID NO: 1777398 - RNA, 19 nt, Homo sapiens
  misc_RNA (1)...(19): siRNA sense strand
gaugcugguugaguucuau

SEQ ID NO: 1777399 - RNA, 19 nt, Homo sapiens
  misc_RNA (1)...(19): siRNA sense strand
gaccauuacgugccaguau

SEQ ID NO: 1777400 - RNA, 19 nt, Homo sapiens
  misc_RNA (1)...(19): siRNA sense strand
ccagaccuaugauauugca

SEQ ID NO: 1777401 - RNA, 19 nt, Homo sapiens
  misc_RNA (1)...(19): siRNA sense strand
ccaccuucauuacuuaugg

SEQ ID NO: 1777402 - RNA, 19 nt, Homo sapiens
  misc_RNA (1)...(19): siRNA sense strand
uuuccaccuucauuacuua

SEQ ID NO: 1777403 - RNA, 19 nt, Homo sapiens
  misc_RNA (1)...(19): siRNA sense strand
ugaguucuauggacuggau

SEQ ID NO: 1777404 - RNA, 19 nt, Homo sapiens
  misc_RNA (1)...(19): siRNA sense strand
uggaugugguuuauuauac

SEQ ID NO: 1777405 - RNA, 19 nt, Homo sapiens
  misc_RNA (1)...(19): siRNA sense strand
gaagacugugggaauugaa

SEQ ID NO: 1777406 - RNA, 19 nt, Homo sapiens
  misc_RNA (1)...(19): siRNA sense strand
gauugugggugcuuuagcu

SEQ ID NO: 1777407 - RNA, 19 nt, Homo sapiens
  misc_RNA (1)...(19): siRNA sense strand
ccauuacgugccaguauuu

SEQ ID NO: 1777408 - RNA, 19 nt, Homo sapiens
  misc_RNA (1)...(19): siRNA sense strand
uguuguaggucuuggaugu

SEQ ID NO: 1777409 - RNA, 19 nt, Homo sapiens
  misc_RNA (1)...(19): siRNA sense strand
uuccauaugugaccacgaa

SEQ ID NO: 1777410 - RNA, 19 nt, Homo sapiens
  misc_RNA (1)...(19): siRNA sense strand
uggaagauguagcaagaag

SEQ ID NO: 1777411 - RNA, 19 nt, Homo sapiens
  misc_RNA (1)...(19): siRNA sense strand
gaggaaguggcaguuauau

SEQ ID NO: 1777412 - RNA, 19 nt, Homo sapiens
  misc_RNA (1)...(19): siRNA sense strand
aaaagaaaguugcagaaca

SEQ ID NO: 1777413 - RNA, 19 nt, Homo sapiens
  misc_RNA (1)...(19): siRNA sense strand
aggaaagaaucuggaagaa

SEQ ID NO: 1777414 - RNA, 19 nt, Homo sapiens
  misc_RNA (1)...(19): siRNA sense strand
gcugauugugggugcuuua

SEQ ID NO: 1777415 - RNA, 19 nt, Homo sapiens
  misc_RNA (1)...(19): siRNA sense strand
aaggaaagaaucuggaaga

SEQ ID NO: 1777416 - RNA, 19 nt, Homo sapiens
  misc_RNA (1)...(19): siRNA sense strand
ggagcaagaccugucacaa

SEQ ID NO: 1777417 - RNA, 19 nt, Homo sapiens
  misc_RNA (1)...(19): siRNA sense strand
acccaucguugguugguuu

SEQ ID NO: 1777418 - RNA, 19 nt, Homo sapiens
  misc_RNA (1)...(19): siRNA sense strand
guuuccaccuucauuacuu

SEQ ID NO: 1777419 - RNA, 19 nt, Homo sapiens
  misc_RNA (1)...(19): siRNA sense strand
cugauuguccuuugccuaa

SEQ ID NO: 1777420 - RNA, 19 nt, Homo sapiens
  misc_RNA (1)...(19): siRNA sense strand
aauggugacuggaaacaag

SEQ ID NO: 1777421 - RNA, 19 nt, Homo sapiens
  misc_RNA (1)...(19): siRNA sense strand
acaaaguugccucuaaugu

SEQ ID NO: 1777422 - RNA, 19 nt, Homo sapiens
  misc_RNA (1)...(19): siRNA sense strand
ggauacaugcaacaagcaa

SEQ ID NO: 1777423 - RNA, 19 nt, Homo sapiens
  misc_RNA (1)...(19): siRNA sense strand
gaggguuuccaccuucauu

SEQ ID NO: 1777424 - RNA, 19 nt, Homo sapiens
  misc_RNA (1)...(19): siRNA sense strand
gugaaacuguggcucuuuu

SEQ ID NO: 1777425 - RNA, 19 nt, Homo sapiens
  misc_RNA (1)...(19): siRNA sense strand
gcaagaccugucacaaucu

SEQ ID NO: 1777426 - RNA, 19 nt, Homo sapiens
  misc_RNA (1)...(19): siRNA sense strand
ugcagaggaugcugguuga

SEQ ID NO: 1777427 - RNA, 19 nt, Homo sapiens
  misc_RNA (1)...(19): siRNA sense strand
gguccaucuuuccauaugu

SEQ ID NO: 1777428 - RNA, 19 nt, Homo sapiens
  misc_RNA (1)...(19): siRNA sense strand
ucacauuggcguugcuuuc

SEQ ID NO: 1777429 - RNA, 19 nt, Homo sapiens
  misc_RNA (1)...(19): siRNA sense strand
ucuuuauguugcuaccuua

SEQ ID NO: 1777430 - RNA, 19 nt, Homo sapiens
  misc_RNA (1)...(19): siRNA sense strand
gaaucuggaagaaaacaua

SEQ ID NO: 1777431 - RNA, 19 nt, Homo sapiens
  misc_RNA (1)...(19): siRNA sense strand
cauuauaggcauuaugaca

SEQ ID NO: 1777432 - RNA, 19 nt, Homo sapiens
  misc_RNA (1)...(19): siRNA sense strand
guccaucuuuccauaugug

SEQ ID NO: 1777433 - RNA, 19 nt, Homo sapiens
  misc_RNA (1)...(19): siRNA sense strand
ggaaguggcaguuauauaa

SEQ ID NO: 1777434 - RNA, 19 nt, Homo sapiens
  misc_RNA (1)...(19): siRNA sense strand
gaaagaaucuggaagaaaa

SEQ ID NO: 1777435 - RNA, 19 nt, Homo sapiens
  misc_RNA (1)...(19): siRNA sense strand
caagacagccuacuucaua

SEQ ID NO: 1777436 - RNA, 19 nt, Homo sapiens
  misc_RNA (1)...(19): siRNA sense strand
gaagaagaguuuauuaugc

SEQ ID NO: 1777437 - RNA, 19 nt, Homo sapiens
  misc_RNA (1)...(19): siRNA sense strand
aaaguugccucuaauguuu

SEQ ID NO: 1777438 - RNA, 19 nt, Homo sapiens
  misc_RNA (1)...(19): siRNA sense strand
guacaaaguugccucuaau

SEQ ID NO: 1777439 - RNA, 19 nt, Homo sapiens
  misc_RNA (1)...(19): siRNA sense strand
ccacuuauuuccauuauag

SEQ ID NO: 1777440 - RNA, 19 nt, Homo sapiens
  misc_RNA (1)...(19): siRNA sense strand
gauggaugcuugcugauug

SEQ ID NO: 1777441 - RNA, 19 nt, Homo sapiens
  misc_RNA (1)...(19): siRNA sense strand
caaaagagccugaaacgua

SEQ ID NO: 1777442 - RNA, 19 nt, Homo sapiens
  misc_RNA (1)...(19): siRNA sense strand
gaagauguagcaagaaguu

SEQ ID NO: 1777443 - RNA, 19 nt, Homo sapiens
  misc_RNA (1)...(19): siRNA sense strand
ucuuggaugugguuuauua

SEQ ID NO: 1777444 - RNA, 19 nt, Homo sapiens
  misc_RNA (1)...(19): siRNA sense strand
gaaacaagacagccuacuu

SEQ ID NO: 1777445 - RNA, 19 nt, Homo sapiens
  misc_RNA (1)...(19): siRNA sense strand
gauacuggcugacuucaag

SEQ ID NO: 1777446 - RNA, 19 nt, Homo sapiens
  misc_RNA (1)...(19): siRNA sense strand
ggaaagaaucuggaagaaa

SEQ ID NO: 1777447 - RNA, 19 nt, Homo sapiens
  misc_RNA (1)...(19): siRNA sense strand
gaccuaugauauugcauuu

SEQ ID NO: 1777448 - RNA, 19 nt, Homo sapiens
  misc_RNA (1)...(19): siRNA sense strand
ucaaguggauuaauaccuu

SEQ ID NO: 1777449 - RNA, 19 nt, Homo sapiens
  misc_RNA (1)...(19): siRNA sense strand
gaaguggcaguuauauaaa

SEQ ID NO: 1777450 - RNA, 19 nt, Homo sapiens
  misc_RNA (1)...(19): siRNA sense strand
caaaguugccucuaauguu

SEQ ID NO: 1777451 - RNA, 19 nt, Homo sapiens
  misc_RNA (1)...(19): siRNA sense strand
gagcaagaccugucacaau

SEQ ID NO: 1777452 - RNA, 19 nt, Homo sapiens
  misc_RNA (1)...(19): siRNA sense strand
uauggaagauguagcaaga

SEQ ID NO: 1777453 - RNA, 19 nt, Homo sapiens
  misc_RNA (1)...(19): siRNA sense strand
gaaaguugcagaacagaca

SEQ ID NO: 1777454 - RNA, 19 nt, Homo sapiens
  misc_RNA (1)...(19): siRNA sense strand
ggacccagaccuaugauau

SEQ ID NO: 1777455 - RNA, 19 nt, Homo sapiens
  misc_RNA (1)...(19): siRNA sense strand
gguaauugguccaucuuuc

SEQ ID NO: 1777456 - RNA, 19 nt, Homo sapiens
  misc_RNA (1)...(19): siRNA sense strand
ggucuuggaugugguuuau

SEQ ID NO: 1777457 - RNA, 19 nt, Homo sapiens
  misc_RNA (1)...(19): siRNA sense strand
ggaugugguuuauuauaca

SEQ ID NO: 1777458 - RNA, 19 nt, Homo sapiens
  misc_RNA (1)...(19): siRNA sense strand
ugugggugcuuuagcuuua

SEQ ID NO: 1777459 - RNA, 19 nt, Homo sapiens
  misc_RNA (1)...(19): siRNA sense strand
uguacaaaguugccucuaa

SEQ ID NO: 1777460 - RNA, 19 nt, Homo sapiens
  misc_RNA (1)...(19): siRNA sense strand
ggccugauguugagcaguu

SEQ ID NO: 1777461 - RNA, 19 nt, Homo sapiens
  misc_RNA (1)...(19): siRNA sense strand
guugcuaccuuaaucauca

SEQ ID NO: 1777462 - RNA, 19 nt, Homo sapiens
  misc_RNA (1)...(19): siRNA sense strand
aaagaaaguugcagaacag

SEQ ID NO: 1777463 - RNA, 19 nt, Homo sapiens
  misc_RNA (1)...(19): siRNA sense strand
cccaauaucuacuuucugu

SEQ ID NO: 1777464 - RNA, 19 nt, Homo sapiens
  misc_RNA (1)...(19): siRNA sense strand
uugcagaacagacauauuu

SEQ ID NO: 1777465 - RNA, 19 nt, Homo sapiens
  misc_RNA (1)...(19): siRNA sense strand
cgaagacugugggaauuga

SEQ ID NO: 1777466 - RNA, 19 nt, Homo sapiens
  misc_RNA (1)...(19): siRNA sense strand
gaguuuauuaugccacuua

SEQ ID NO: 1777467 - RNA, 19 nt, Homo sapiens
  misc_RNA (1)...(19): siRNA sense strand
cgugaaagaagaagaguuu

SEQ ID NO: 1777468 - RNA, 19 nt, Homo sapiens
  misc_RNA (1)...(19): siRNA sense strand
caagaggaaguggcaguua

SEQ ID NO: 1777469 - RNA, 19 nt, Homo sapiens
  misc_RNA (1)...(19): siRNA sense strand
aaacaagacagccuacuuc

SEQ ID NO: 1777470 - RNA, 19 nt, Homo sapiens
  misc_RNA (1)...(19): siRNA sense strand
ccuaugggauauuaauguu

SEQ ID NO: 1777471 - RNA, 19 nt, Homo sapiens
  misc_RNA (1)...(19): siRNA sense strand
gcgcuuggccugauuucaa

SEQ ID NO: 1777472 - RNA, 19 nt, Homo sapiens
  misc_RNA (1)...(19): siRNA sense strand
caagccagcuccaacaacu

SEQ ID NO: 1777473 - RNA, 19 nt, Homo sapiens
  misc_RNA (1)...(19): siRNA sense strand
guucuuugcuggacuugga

SEQ ID NO: 1777474 - RNA, 19 nt, Homo sapiens
  misc_RNA (1)...(19): siRNA sense strand
aaacuacuguggugaaacu

SEQ ID NO: 1777475 - RNA, 19 nt, Homo sapiens
  misc_RNA (1)...(19): siRNA sense strand
aagacagccuacuucauaa

SEQ ID NO: 1777476 - RNA, 19 nt, Homo sapiens
  misc_RNA (1)...(19): siRNA sense strand
agaggaugcugguugaguu

SEQ ID NO: 1777477 - RNA, 19 nt, Homo sapiens
  misc_RNA (1)...(19): siRNA sense strand
ggaugcugguugaguucua

SEQ ID NO: 1777478 - RNA, 19 nt, Homo sapiens
  misc_RNA (1)...(19): siRNA sense strand
aagaggaaguggcaguuau

SEQ ID NO: 1777479 - RNA, 19 nt, Homo sapiens
  misc_RNA (1)...(19): siRNA sense strand
ggccuagccuugugugcaa

SEQ ID NO: 1777480 - RNA, 19 nt, Homo sapiens
  misc_RNA (1)...(19): siRNA sense strand
ggaguccuguacauagaau

SEQ ID NO: 1777481 - RNA, 19 nt, Homo sapiens
  misc_RNA (1)...(19): siRNA sense strand
gcuggaggccugauguuga

SEQ ID NO: 1777482 - RNA, 19 nt, Homo sapiens
  misc_RNA (1)...(19): siRNA sense strand
gccuugcccucuugggaua

SEQ ID NO: 1777483 - RNA, 19 nt, Homo sapiens
  misc_RNA (1)...(19): siRNA sense strand
gacccagaccuaugauauu

SEQ ID NO: 1777484 - RNA, 19 nt, Homo sapiens
  misc_RNA (1)...(19): siRNA sense strand
ggauauuaauguucuuugc

SEQ ID NO: 1777485 - RNA, 19 nt, Homo sapiens
  misc_RNA (1)...(19): siRNA sense strand
gggauccuaggguuucuua

SEQ ID NO: 1777486 - RNA, 19 nt, Homo sapiens
  misc_RNA (1)...(19): siRNA sense strand
ccacagugacacacacaaa

SEQ ID NO: 1777487 - RNA, 19 nt, Homo sapiens
  misc_RNA (1)...(19): siRNA sense strand
cacgaagacugugggaauu

SEQ ID NO: 1777488 - RNA, 19 nt, Homo sapiens
  misc_RNA (1)...(19): siRNA sense strand
guacauagaauggcuggau

SEQ ID NO: 1777489 - RNA, 19 nt, Homo sapiens
  misc_RNA (1)...(19): siRNA sense strand
agaggaaguggcaguuaua

SEQ ID NO: 1777490 - RNA, 19 nt, Homo sapiens
  misc_RNA (1)...(19): siRNA sense strand
uaugacagcaguugguaaa

SEQ ID NO: 1777491 - RNA, 19 nt, Homo sapiens
  misc_RNA (1)...(19): siRNA sense strand
agcaagaccugucacaauc

SEQ ID NO: 1777492 - RNA, 19 nt, Homo sapiens
  misc_RNA (1)...(19): siRNA sense strand
gccacuuauuuccauuaua

SEQ ID NO: 1777493 - RNA, 19 nt, Homo sapiens
  misc_RNA (1)...(19): siRNA sense strand
ggauggaugcuugcugauu

SEQ ID NO: 1777494 - RNA, 19 nt, Homo sapiens
  misc_RNA (1)...(19): siRNA sense strand
acccagaccuaugauauug

SEQ ID NO: 1777495 - RNA, 19 nt, Homo sapiens
  misc_RNA (1)...(19): siRNA sense strand
aaucuucaguggcuucaug

SEQ ID NO: 1777496 - RNA, 19 nt, Homo sapiens
  misc_RNA (1)...(19): siRNA sense strand
gcguuggccuuuucauaua

SEQ ID NO: 1777497 - RNA, 19 nt, Homo sapiens
  misc_RNA (1)...(19): siRNA sense strand
aaaauuagcccaugccuau

SEQ ID NO: 1777498 - RNA, 19 nt, Homo sapiens
  misc_RNA (1)...(19): siRNA sense strand
gaugcugguugaguucuau

SEQ ID NO: 1777499 - RNA, 19 nt, Homo sapiens
  misc_RNA (1)...(19): siRNA sense strand
gaccauuacgugccaguau

SEQ ID NO: 1777500 - RNA, 19 nt, Homo sapiens
  misc_RNA (1)...(19): siRNA sense strand
ccagaccuaugauauugca

SEQ ID NO: 1777501 - RNA, 19 nt, Homo sapiens
  misc_RNA (1)...(19): siRNA sense strand
ccaccuucauuacuuaugg

SEQ ID NO: 1777502 - RNA, 19 nt, Homo sapiens
  misc_RNA (1)...(19): siRNA sense strand
uuuccaccuucauuacuua

SEQ ID NO: 1777503 - RNA, 19 nt, Homo sapiens
  misc_RNA (1)...(19): siRNA sense strand
ugaguucuauggacuggau

SEQ ID NO: 1777504 - RNA, 19 nt, Homo sapiens
  misc_RNA (1)...(19): siRNA sense strand
uggaugugguuuauuauac

SEQ ID NO: 1777505 - RNA, 19 nt, Homo sapiens
  misc_RNA (1)...(19): siRNA sense strand
gaagacugugggaauugaa

SEQ ID NO: 1777506 - RNA, 19 nt, Homo sapiens
  misc_RNA (1)...(19): siRNA sense strand
gauugugggugcuuuagcu

SEQ ID NO: 1777507 - RNA, 19 nt, Homo sapiens
  misc_RNA (1)...(19): siRNA sense strand
ccauuacgugccaguauuu

SEQ ID NO: 1777508 - RNA, 19 nt, Homo sapiens
  misc_RNA (1)...(19): siRNA sense strand
uguuguaggucuuggaugu

SEQ ID NO: 1777509 - RNA, 19 nt, Homo sapiens
  misc_RNA (1)...(19): siRNA sense strand
uuccauaugugaccacgaa

SEQ ID NO: 1777510 - RNA, 19 nt, Homo sapiens
  misc_RNA (1)...(19): siRNA sense strand
uggaagauguagcaagaag

SEQ ID NO: 1777511 - RNA, 19 nt, Homo sapiens
  misc_RNA (1)...(19): siRNA sense strand
gaggaaguggcaguuauau

SEQ ID NO: 1777512 - RNA, 19 nt, Homo sapiens
  misc_RNA (1)...(19): siRNA sense strand
aaaagaaaguugcagaaca

SEQ ID NO: 1777513 - RNA, 19 nt, Homo sapiens
  misc_RNA (1)...(19): siRNA sense strand
aggaaagaaucuggaagaa

SEQ ID NO: 1777514 - RNA, 19 nt, Homo sapiens
  misc_RNA (1)...(19): siRNA sense strand
gcugauugugggugcuuua

SEQ ID NO: 1777515 - RNA, 19 nt, Homo sapiens
  misc_RNA (1)...(19): siRNA sense strand
aaggaaagaaucuggaaga

SEQ ID NO: 1777516 - RNA, 19 nt, Homo sapiens
  misc_RNA (1)...(19): siRNA sense strand
ggagcaagaccugucacaa

SEQ ID NO: 1777517 - RNA, 19 nt, Homo sapiens
  misc_RNA (1)...(19): siRNA sense strand
acccaucguugguugguuu

SEQ ID NO: 1777518 - RNA, 19 nt, Homo sapiens
  misc_RNA (1)...(19): siRNA sense strand
guuuccaccuucauuacuu

SEQ ID NO: 1777519 - RNA, 19 nt, Homo sapiens
  misc_RNA (1)...(19): siRNA sense strand
cugauuguccuuugccuaa

SEQ ID NO: 1777520 - RNA, 19 nt, Homo sapiens
  misc_RNA (1)...(19): siRNA sense strand
aauggugacuggaaacaag

SEQ ID NO: 1777521 - RNA, 19 nt, Homo sapiens
  misc_RNA (1)...(19): siRNA sense strand
acaaaguugccucuaaugu

SEQ ID NO: 1777522 - RNA, 19 nt, Homo sapiens
  misc_RNA (1)...(19): siRNA sense strand
ggauacaugcaacaagcaa

SEQ ID NO: 1777523 - RNA, 19 nt, Homo sapiens
  misc_RNA (1)...(19): siRNA sense strand
gaggguuuccaccuucauu

SEQ ID NO: 1777524 - RNA, 19 nt, Homo sapiens
  misc_RNA (1)...(19): siRNA sense strand
gugaaacuguggcucuuuu

SEQ ID NO: 1777525 - RNA, 19 nt, Homo sapiens
  misc_RNA (1)...(19): siRNA sense strand
gcaagaccugucacaaucu

SEQ ID NO: 1777526 - RNA, 19 nt, Homo sapiens
  misc_RNA (1)...(19): siRNA sense strand
ugcagaggaugcugguuga

SEQ ID NO: 1777527 - RNA, 19 nt, Homo sapiens
  misc_RNA (1)...(19): siRNA sense strand
gguccaucuuuccauaugu

SEQ ID NO: 1777528 - RNA, 19 nt, Homo sapiens
  misc_RNA (1)...(19): siRNA sense strand
ucacauuggcguugcuuuc

SEQ ID NO: 1777529 - RNA, 19 nt, Homo sapiens
  misc_RNA (1)...(19): siRNA sense strand
ucuuuauguugcuaccuua

SEQ ID NO: 1777530 - RNA, 19 nt, Homo sapiens
  misc_RNA (1)...(19): siRNA sense strand
gaaucuggaagaaaacaua

SEQ ID NO: 1777531 - RNA, 19 nt, Homo sapiens
  misc_RNA (1)...(19): siRNA sense strand
cauuauaggcauuaugaca

SEQ ID NO: 1777532 - RNA, 19 nt, Homo sapiens
  misc_RNA (1)...(19): siRNA sense strand
guccaucuuuccauaugug

SEQ ID NO: 1777533 - RNA, 19 nt, Homo sapiens
  misc_RNA (1)...(19): siRNA sense strand
gggaugaacuuguccauaa

SEQ ID NO: 1777534 - RNA, 19 nt, Homo sapiens
  misc_RNA (1)...(19): siRNA sense strand
gaagcgcuguguagacuga

SEQ ID NO: 1777535 - RNA, 19 nt, Homo sapiens
  misc_RNA (1)...(19): siRNA sense strand
ggaugaacuuguccauaaa

SEQ ID NO: 1777536 - RNA, 19 nt, Homo sapiens
  misc_RNA (1)...(19): siRNA sense strand
gcagguugcuauuucugaa

SEQ ID NO: 1777537 - RNA, 19 nt, Homo sapiens
  misc_RNA (1)...(19): siRNA sense strand
gaaauuaaggaucgagaau

SEQ ID NO: 1777538 - RNA, 19 nt, Homo sapiens
  misc_RNA (1)...(19): siRNA sense strand
uguguagacugacgauuaa

SEQ ID NO: 1777539 - RNA, 19 nt, Homo sapiens
  misc_RNA (1)...(19): siRNA sense strand
cauaaaugguuugaugaug

SEQ ID NO: 1777540 - RNA, 19 nt, Homo sapiens
  misc_RNA (1)...(19): siRNA sense strand
ucaaucaccuaaacaacag

SEQ ID NO: 1777541 - RNA, 19 nt, Homo sapiens
  misc_RNA (1)...(19): siRNA sense strand
uuaaggaucgagaauuuga

SEQ ID NO: 1777542 - RNA, 19 nt, Homo sapiens
  misc_RNA (1)...(19): siRNA sense strand
agucauugcugaagcuuuc

SEQ ID NO: 1777543 - RNA, 19 nt, Homo sapiens
  misc_RNA (1)...(19): siRNA sense strand
caaagaaauuaaggaucga

SEQ ID NO: 1777544 - RNA, 19 nt, Homo sapiens
  misc_RNA (1)...(19): siRNA sense strand
cuguguagacugacgauua

SEQ ID NO: 1777545 - RNA, 19 nt, Homo sapiens
  misc_RNA (1)...(19): siRNA sense strand
gaugaacuuguccauaaau

SEQ ID NO: 1777546 - RNA, 19 nt, Homo sapiens
  misc_RNA (1)...(19): siRNA sense strand
caccuaaacaacagacuug

SEQ ID NO: 1777547 - RNA, 19 nt, Homo sapiens
  misc_RNA (1)...(19): siRNA sense strand
ugaagucauugcugaagcu

SEQ ID NO: 1777548 - RNA, 19 nt, Homo sapiens
  misc_RNA (1)...(19): siRNA sense strand
gacaguagacguuuucuca

SEQ ID NO: 1777549 - RNA, 19 nt, Homo sapiens
  misc_RNA (1)...(19): siRNA sense strand
agaaauuaaggaucgagaa

SEQ ID NO: 1777550 - RNA, 19 nt, Homo sapiens
  misc_RNA (1)...(19): siRNA sense strand
guagacguuuucucaauca

SEQ ID NO: 1777551 - RNA, 19 nt, Homo sapiens
  misc_RNA (1)...(19): siRNA sense strand
ccuaauaacucuccacuua

SEQ ID NO: 1777552 - RNA, 19 nt, Homo sapiens
  misc_RNA (1)...(19): siRNA sense strand
gggaugaacuuguccauaa

SEQ ID NO: 1777553 - RNA, 19 nt, Homo sapiens
  misc_RNA (1)...(19): siRNA sense strand
gaugaccgcugccuaauaa

SEQ ID NO: 1777554 - RNA, 19 nt, Homo sapiens
  misc_RNA (1)...(19): siRNA sense strand
gaaaacaucucuucucuga

SEQ ID NO: 1777555 - RNA, 19 nt, Homo sapiens
  misc_RNA (1)...(19): siRNA sense strand
gaagaugaccgcugccuaa

SEQ ID NO: 1777556 - RNA, 19 nt, Homo sapiens
  misc_RNA (1)...(19): siRNA sense strand
gaagaagccucguuaugca

SEQ ID NO: 1777557 - RNA, 19 nt, Homo sapiens
  misc_RNA (1)...(19): siRNA sense strand
guacuagcuugaaacauaa

SEQ ID NO: 1777558 - RNA, 19 nt, Homo sapiens
  misc_RNA (1)...(19): siRNA sense strand
gcagaagaauccacuaaca

SEQ ID NO: 1777559 - RNA, 19 nt, Homo sapiens
  misc_RNA (1)...(19): siRNA sense strand
gcaccggauugccuaauaa

SEQ ID NO: 1777560 - RNA, 19 nt, Homo sapiens
  misc_RNA (1)...(19): siRNA sense strand
gaacuaucuuggaccagua

SEQ ID NO: 1777561 - RNA, 19 nt, Homo sapiens
  misc_RNA (1)...(19): siRNA sense strand
aguacuagcuugaaacaua

SEQ ID NO: 1777562 - RNA, 19 nt, Homo sapiens
  misc_RNA (1)...(19): siRNA sense strand
gaaagcguccguuuaauuc

SEQ ID NO: 1777563 - RNA, 19 nt, Homo sapiens
  misc_RNA (1)...(19): siRNA sense strand
gaaagagaguugccagaag

SEQ ID NO: 1777564 - RNA, 19 nt, Homo sapiens
  misc_RNA (1)...(19): siRNA sense strand
ugaagaagcccaugauuau

SEQ ID NO: 1777565 - RNA, 19 nt, Homo sapiens
  misc_RNA (1)...(19): siRNA sense strand
gaagcgcuguguagacuga

SEQ ID NO: 1777566 - RNA, 19 nt, Homo sapiens
  misc_RNA (1)...(19): siRNA sense strand
gaaacagucugcugaucug

SEQ ID NO: 1777567 - RNA, 19 nt, Homo sapiens
  misc_RNA (1)...(19): siRNA sense strand
ccacuuaaaugaccaaucu

SEQ ID NO: 1777568 - RNA, 19 nt, Homo sapiens
  misc_RNA (1)...(19): siRNA sense strand
ggaugaacuuguccauaaa

SEQ ID NO: 1777569 - RNA, 19 nt, Homo sapiens
  misc_RNA (1)...(19): siRNA sense strand
aggaagcggugaugaauuu

SEQ ID NO: 1777570 - RNA, 19 nt, Homo sapiens
  misc_RNA (1)...(19): siRNA sense strand
cugcugaucugcaaucuuu

SEQ ID NO: 1777571 - RNA, 19 nt, Homo sapiens
  misc_RNA (1)...(19): siRNA sense strand
gaaccaagaaucacuaaca

SEQ ID NO: 1777572 - RNA, 19 nt, Homo sapiens
  misc_RNA (1)...(19): siRNA sense strand
ugagugagcucucuuccuu

SEQ ID NO: 1777573 - RNA, 19 nt, Homo sapiens
  misc_RNA (1)...(19): siRNA sense strand
ccaaagacuucugaacaaa

SEQ ID NO: 1777574 - RNA, 19 nt, Homo sapiens
  misc_RNA (1)...(19): siRNA sense strand
gaaggagguucuggaauuc

SEQ ID NO: 1777575 - RNA, 19 nt, Homo sapiens
  misc_RNA (1)...(19): siRNA sense strand
aaacagagcaggcagaaga

SEQ ID NO: 1777576 - RNA, 19 nt, Homo sapiens
  misc_RNA (1)...(19): siRNA sense strand
gcaaagaaagcaccggauu

SEQ ID NO: 1777577 - RNA, 19 nt, Homo sapiens
  misc_RNA (1)...(19): siRNA sense strand
acagaaagcguccguuuaa

SEQ ID NO: 1777578 - RNA, 19 nt, Homo sapiens
  misc_RNA (1)...(19): siRNA sense strand
gcacucagaagaugaagaa

SEQ ID NO: 1777579 - RNA, 19 nt, Homo sapiens
  misc_RNA (1)...(19): siRNA sense strand
cggagaagauaaagauauu

SEQ ID NO: 1777580 - RNA, 19 nt, Homo sapiens
  misc_RNA (1)...(19): siRNA sense strand
caaccuaagucucauuaca

SEQ ID NO: 1777581 - RNA, 19 nt, Homo sapiens
  misc_RNA (1)...(19): siRNA sense strand
cuacaaagaagucaugaaa

SEQ ID NO: 1777582 - RNA, 19 nt, Homo sapiens
  misc_RNA (1)...(19): siRNA sense strand
uugagaaucuugccaguuu

SEQ ID NO: 1777583 - RNA, 19 nt, Homo sapiens
  misc_RNA (1)...(19): siRNA sense strand
gaaaauaugagcuuaggua

SEQ ID NO: 1777584 - RNA, 19 nt, Homo sapiens
  misc_RNA (1)...(19): siRNA sense strand
gcagguugcuauuucugaa

SEQ ID NO: 1777585 - RNA, 19 nt, Homo sapiens
  misc_RNA (1)...(19): siRNA sense strand
caacuguucagacucaaua

SEQ ID NO: 1777586 - RNA, 19 nt, Homo sapiens
  misc_RNA (1)...(19): siRNA sense strand
guacagaaagcguccguuu

SEQ ID NO: 1777587 - RNA, 19 nt, Homo sapiens
  misc_RNA (1)...(19): siRNA sense strand
gaaauuaaggaucgagaau

SEQ ID NO: 1777588 - RNA, 19 nt, Homo sapiens
  misc_RNA (1)...(19): siRNA sense strand
gugcugagguucaauucaa

SEQ ID NO: 1777589 - RNA, 19 nt, Homo sapiens
  misc_RNA (1)...(19): siRNA sense strand
acaagaaccagaaguaauu

SEQ ID NO: 1777590 - RNA, 19 nt, Homo sapiens
  misc_RNA (1)...(19): siRNA sense strand
ccaguggccuugaaagaga

SEQ ID NO: 1777591 - RNA, 19 nt, Homo sapiens
  misc_RNA (1)...(19): siRNA sense strand
gaaggaagcggugaugaau

SEQ ID NO: 1777592 - RNA, 19 nt, Homo sapiens
  misc_RNA (1)...(19): siRNA sense strand
agaaaguacuagcuugaaa

SEQ ID NO: 1777593 - RNA, 19 nt, Homo sapiens
  misc_RNA (1)...(19): siRNA sense strand
ccaagaaucacuaacagaa

SEQ ID NO: 1777594 - RNA, 19 nt, Homo sapiens
  misc_RNA (1)...(19): siRNA sense strand
gaaccugccucugauaguc

SEQ ID NO: 1777595 - RNA, 19 nt, Homo sapiens
  misc_RNA (1)...(19): siRNA sense strand
gauuugcaguucaacauau

SEQ ID NO: 1777596 - RNA, 19 nt, Homo sapiens
  misc_RNA (1)...(19): siRNA sense strand
uaaaccagaugcaacuguu

SEQ ID NO: 1777597 - RNA, 19 nt, Homo sapiens
  misc_RNA (1)...(19): siRNA sense strand
cauucaagcuuuaggagaa

SEQ ID NO: 1777598 - RNA, 19 nt, Homo sapiens
  misc_RNA (1)...(19): siRNA sense strand
uaucacaaguuuccauuca

SEQ ID NO: 1777599 - RNA, 19 nt, Homo sapiens
  misc_RNA (1)...(19): siRNA sense strand
gaaaaucuccucagaacuu

SEQ ID NO: 1777600 - RNA, 19 nt, Homo sapiens
  misc_RNA (1)...(19): siRNA sense strand
uguguagacugacgauuaa

SEQ ID NO: 1777601 - RNA, 19 nt, Homo sapiens
  misc_RNA (1)...(19): siRNA sense strand
cuagagcgcuuucaaaauu

SEQ ID NO: 1777602 - RNA, 19 nt, Homo sapiens
  misc_RNA (1)...(19): siRNA sense strand
cugaagaagcccaugauua

SEQ ID NO: 1777603 - RNA, 19 nt, Homo sapiens
  misc_RNA (1)...(19): siRNA sense strand
gaaauacccgagcaaaaua

SEQ ID NO: 1777604 - RNA, 19 nt, Homo sapiens
  misc_RNA (1)...(19): siRNA sense strand
caaagaaagcaccggauug

SEQ ID NO: 1777605 - RNA, 19 nt, Homo sapiens
  misc_RNA (1)...(19): siRNA sense strand
gcaguggccaugagaaaga

SEQ ID NO: 1777606 - RNA, 19 nt, Homo sapiens
  misc_RNA (1)...(19): siRNA sense strand
agaaagcguccguuuaauu

SEQ ID NO: 1777607 - RNA, 19 nt, Homo sapiens
  misc_RNA (1)...(19): siRNA sense strand
ugagaaacuuggaagacaa

SEQ ID NO: 1777608 - RNA, 19 nt, Homo sapiens
  misc_RNA (1)...(19): siRNA sense strand
uaacagaaaguacuagcuu

SEQ ID NO: 1777609 - RNA, 19 nt, Homo sapiens
  misc_RNA (1)...(19): siRNA sense strand
gaaagaaauacccgagcaa

SEQ ID NO: 1777610 - RNA, 19 nt, Homo sapiens
  misc_RNA (1)...(19): siRNA sense strand
caagaaucacuaacagaaa

SEQ ID NO: 1777611 - RNA, 19 nt, Homo sapiens
  misc_RNA (1)...(19): siRNA sense strand
gauuaucagcuacaaagaa

SEQ ID NO: 1777612 - RNA, 19 nt, Homo sapiens
  misc_RNA (1)...(19): siRNA sense strand
ggaaacagucugcugaucu

SEQ ID NO: 1777613 - RNA, 19 nt, Homo sapiens
  misc_RNA (1)...(19): siRNA sense strand
agacaaagacauaccagaa

SEQ ID NO: 1777614 - RNA, 19 nt, Homo sapiens
  misc_RNA (1)...(19): siRNA sense strand
aaacggagaagauaaagau

SEQ ID NO: 1777615 - RNA, 19 nt, Homo sapiens
  misc_RNA (1)...(19): siRNA sense strand
aacauaagcugagaaacuu

SEQ ID NO: 1777616 - RNA, 19 nt, Homo sapiens
  misc_RNA (1)...(19): siRNA sense strand
gaagcacucagaagaugaa

SEQ ID NO: 1777617 - RNA, 19 nt, Homo sapiens
  misc_RNA (1)...(19): siRNA sense strand
gacaagaaccagaaguaau

SEQ ID NO: 1777618 - RNA, 19 nt, Homo sapiens
  misc_RNA (1)...(19): siRNA sense strand
cauaaaugguuugaugaug

SEQ ID NO: 1777619 - RNA, 19 nt, Homo sapiens
  misc_RNA (1)...(19): siRNA sense strand
gagaaacuuggaagacaaa

SEQ ID NO: 1777620 - RNA, 19 nt, Homo sapiens
  misc_RNA (1)...(19): siRNA sense strand
aaacauaagcugagaaacu

SEQ ID NO: 1777621 - RNA, 19 nt, Homo sapiens
  misc_RNA (1)...(19): siRNA sense strand
uccaaagacuucugaacaa

SEQ ID NO: 1777622 - RNA, 19 nt, Homo sapiens
  misc_RNA (1)...(19): siRNA sense strand
ccacaucuccaaagacuuc

SEQ ID NO: 1777623 - RNA, 19 nt, Homo sapiens
  misc_RNA (1)...(19): siRNA sense strand
caacauaucacaaguuucc

SEQ ID NO: 1777624 - RNA, 19 nt, Homo sapiens
  misc_RNA (1)...(19): siRNA sense strand
aaacuagagcgcuuucaaa

SEQ ID NO: 1777625 - RNA, 19 nt, Homo sapiens
  misc_RNA (1)...(19): siRNA sense strand
ugaaacauaagcugagaaa

SEQ ID NO: 1777626 - RNA, 19 nt, Homo sapiens
  misc_RNA (1)...(19): siRNA sense strand
uauagacaaugcugagaau

SEQ ID NO: 1777627 - RNA, 19 nt, Homo sapiens
  misc_RNA (1)...(19): siRNA sense strand
cuaagucucauuacagaaa

SEQ ID NO: 1777628 - RNA, 19 nt, Homo sapiens
  misc_RNA (1)...(19): siRNA sense strand
ggagaagacaaacagaugu

SEQ ID NO: 1777629 - RNA, 19 nt, Homo sapiens
  misc_RNA (1)...(19): siRNA sense strand
ucacaaguuuccauucaag

SEQ ID NO: 1777630 - RNA, 19 nt, Homo sapiens
  misc_RNA (1)...(19): siRNA sense strand
gaaacggagaagauaaaga

SEQ ID NO: 1777631 - RNA, 19 nt, Homo sapiens
  misc_RNA (1)...(19): siRNA sense strand
cgaaggaagcggugaugaa

SEQ ID NO: 1777632 - RNA, 19 nt, Homo sapiens
  misc_RNA (1)...(19): siRNA sense strand
cuaauaacucuccacuuaa

SEQ ID NO: 1777633 - RNA, 19 nt, Homo sapiens
  misc_RNA (1)...(19): siRNA sense strand
gcuucaagauccucacuca

SEQ ID NO: 1777634 - RNA, 19 nt, Homo sapiens
  misc_RNA (1)...(19): siRNA sense strand
gaagaagcccaugauuauc

SEQ ID NO: 1777635 - RNA, 19 nt, Homo sapiens
  misc_RNA (1)...(19): siRNA sense strand
guaagucugauaaagaaga

SEQ ID NO: 1777636 - RNA, 19 nt, Homo sapiens
  misc_RNA (1)...(19): siRNA sense strand
agaagaauccacuaacaug

SEQ ID NO: 1777637 - RNA, 19 nt, Homo sapiens
  misc_RNA (1)...(19): siRNA sense strand
caauucaacucagacuuca

SEQ ID NO: 1777638 - RNA, 19 nt, Homo sapiens
  misc_RNA (1)...(19): siRNA sense strand
guucagacucaauaaacua

SEQ ID NO: 1777639 - RNA, 19 nt, Homo sapiens
  misc_RNA (1)...(19): siRNA sense strand
gggauccccuuucucaaua

SEQ ID NO: 1777640 - RNA, 19 nt, Homo sapiens
  misc_RNA (1)...(19): siRNA sense strand
gaaacuuggaagacaaaga

SEQ ID NO: 1777641 - RNA, 19 nt, Homo sapiens
  misc_RNA (1)...(19): siRNA sense strand
gaaaguacuagcuugaaac

SEQ ID NO: 1777642 - RNA, 19 nt, Homo sapiens
  misc_RNA (1)...(19): siRNA sense strand
ucacuaacagaaaguacua

SEQ ID NO: 1777643 - RNA, 19 nt, Homo sapiens
  misc_RNA (1)...(19): siRNA sense strand
aagaaucacuaacagaaag

SEQ ID NO: 1777644 - RNA, 19 nt, Homo sapiens
  misc_RNA (1)...(19): siRNA sense strand
gaaaacagagcuucaagau

SEQ ID NO: 1777645 - RNA, 19 nt, Homo sapiens
  misc_RNA (1)...(19): siRNA sense strand
aaccagaaguaauuugaga

SEQ ID NO: 1777646 - RNA, 19 nt, Homo sapiens
  misc_RNA (1)...(19): siRNA sense strand
caagaaccagaaguaauuu

SEQ ID NO: 1777647 - RNA, 19 nt, Homo sapiens
  misc_RNA (1)...(19): siRNA sense strand
caaucugagccaccuguua

SEQ ID NO: 1777648 - RNA, 19 nt, Homo sapiens
  misc_RNA (1)...(19): siRNA sense strand
uaacucuccacuuaaauga

SEQ ID NO: 1777649 - RNA, 19 nt, Homo sapiens
  misc_RNA (1)...(19): siRNA sense strand
uacagaaagcguccguuua

SEQ ID NO: 1777650 - RNA, 19 nt, Homo sapiens
  misc_RNA (1)...(19): siRNA sense strand
cgaagaagccucguuaugc

SEQ ID NO: 1777651 - RNA, 19 nt, Homo sapiens
  misc_RNA (1)...(19): siRNA sense strand
gaauaacucugucaaccua

SEQ ID NO: 1777652 - RNA, 19 nt, Homo sapiens
  misc_RNA (1)...(19): siRNA sense strand
gaagaaaucuaggcagaaa

SEQ ID NO: 1777653 - RNA, 19 nt, Homo sapiens
  misc_RNA (1)...(19): siRNA sense strand
ucacaggcauggccaauua

SEQ ID NO: 1777654 - RNA, 19 nt, Homo sapiens
  misc_RNA (1)...(19): siRNA sense strand
caaggaauauugacguaua

SEQ ID NO: 1777655 - RNA, 19 nt, Homo sapiens
  misc_RNA (1)...(19): siRNA sense strand
gcagaucuaccaccaguua

SEQ ID NO: 1777656 - RNA, 19 nt, Homo sapiens
  misc_RNA (1)...(19): siRNA sense strand
ggacaaauagaagacauua

SEQ ID NO: 1777657 - RNA, 19 nt, Homo sapiens
  misc_RNA (1)...(19): siRNA sense strand
gaaaauggccggugaauug

SEQ ID NO: 1777658 - RNA, 19 nt, Homo sapiens
  misc_RNA (1)...(19): siRNA sense strand
ugaaugaccuacaaaugaa

SEQ ID NO: 1777659 - RNA, 19 nt, Homo sapiens
  misc_RNA (1)...(19): siRNA sense strand
gcugagccauugucaaauu

SEQ ID NO: 1777660 - RNA, 19 nt, Homo sapiens
  misc_RNA (1)...(19): siRNA sense strand
gcaauacccugaucuucug

SEQ ID NO: 1777661 - RNA, 19 nt, Homo sapiens
  misc_RNA (1)...(19): siRNA sense strand
gaaccaccacucugcuuua

SEQ ID NO: 1777662 - RNA, 19 nt, Homo sapiens
  misc_RNA (1)...(19): siRNA sense strand
ugacguauauguacacaga

SEQ ID NO: 1777663 - RNA, 19 nt, Homo sapiens
  misc_RNA (1)...(19): siRNA sense strand
caaagcggcuauagaaaca

SEQ ID NO: 1777664 - RNA, 19 nt, Homo sapiens
  misc_RNA (1)...(19): siRNA sense strand
uagcaaagguguagauauc

SEQ ID NO: 1777665 - RNA, 19 nt, Homo sapiens
  misc_RNA (1)...(19): siRNA sense strand
cgacaaagucaucauguuu

SEQ ID NO: 1777666 - RNA, 19 nt, Homo sapiens
  misc_RNA (1)...(19): siRNA sense strand
ugaaagauccuaugauugu

SEQ ID NO: 1777667 - RNA, 19 nt, Homo sapiens
  misc_RNA (1)...(19): siRNA sense strand
gaaauggacaaauagaaga

SEQ ID NO: 1777668 - RNA, 19 nt, Homo sapiens
  misc_RNA (1)...(19): siRNA sense strand
ggaagaucuuguaguaaug

SEQ ID NO: 1777669 - RNA, 19 nt, Homo sapiens
  misc_RNA (1)...(19): siRNA sense strand
cggaagaucuuguaguaau

SEQ ID NO: 1777670 - RNA, 19 nt, Homo sapiens
  misc_RNA (1)...(19): siRNA sense strand
aggcauaucugcagaauca

SEQ ID NO: 1777671 - RNA, 19 nt, Homo sapiens
  misc_RNA (1)...(19): siRNA sense strand
gaaagauccuaugauuguu

SEQ ID NO: 1777672 - RNA, 19 nt, Homo sapiens
  misc_RNA (1)...(19): siRNA sense strand
guaaauacagugaagcaaa

SEQ ID NO: 1777673 - RNA, 19 nt, Homo sapiens
  misc_RNA (1)...(19): siRNA sense strand
ggacagagcaaaucagagu

SEQ ID NO: 1777674 - RNA, 19 nt, Homo sapiens
  misc_RNA (1)...(19): siRNA sense strand
ggaagagggcggaggcuaa

SEQ ID NO: 1777675 - RNA, 19 nt, Homo sapiens
  misc_RNA (1)...(19): siRNA sense strand
caacuagcacuuucuuauu

SEQ ID NO: 1777676 - RNA, 19 nt, Homo sapiens
  misc_RNA (1)...(19): siRNA sense strand
gcacagagaaacacgauca

SEQ ID NO: 1777677 - RNA, 19 nt, Homo sapiens
  misc_RNA (1)...(19): siRNA sense strand
ggccaaagcggcuauagaa

SEQ ID NO: 1777678 - RNA, 19 nt, Homo sapiens
  misc_RNA (1)...(19): siRNA sense strand
ggaaacauaaagauacuga

SEQ ID NO: 1777679 - RNA, 19 nt, Homo sapiens
  misc_RNA (1)...(19): siRNA sense strand
gcaaagguguagauaucau

SEQ ID NO: 1777680 - RNA, 19 nt, Homo sapiens
  misc_RNA (1)...(19): siRNA sense strand
gugauuaacuggagaaagg

SEQ ID NO: 1777681 - RNA, 19 nt, Homo sapiens
  misc_RNA (1)...(19): siRNA sense strand
gagaaacacgaucaagaaa

SEQ ID NO: 1777682 - RNA, 19 nt, Homo sapiens
  misc_RNA (1)...(19): siRNA sense strand
gcugagcaauacaaguuaa

SEQ ID NO: 1777683 - RNA, 19 nt, Homo sapiens
  misc_RNA (1)...(19): siRNA sense strand
gaaugggccugggaugcua

SEQ ID NO: 1777684 - RNA, 19 nt, Homo sapiens
  misc_RNA (1)...(19): siRNA sense strand
uaagaagcauaaccuacuu

SEQ ID NO: 1777685 - RNA, 19 nt, Homo sapiens
  misc_RNA (1)...(19): siRNA sense strand
cauaacgugugaugacuug

SEQ ID NO: 1777686 - RNA, 19 nt, Homo sapiens
  misc_RNA (1)...(19): siRNA sense strand
acauauugcugaugacuug

SEQ ID NO: 1777687 - RNA, 19 nt, Homo sapiens
  misc_RNA (1)...(19): siRNA sense strand
cuacaaggaauagaucuua

SEQ ID NO: 1777688 - RNA, 19 nt, Homo sapiens
  misc_RNA (1)...(19): siRNA sense strand
ccacucugcuuuaaaauaa

SEQ ID NO: 1777689 - RNA, 19 nt, Homo sapiens
  misc_RNA (1)...(19): siRNA sense strand
caacuuggccagauacugu

SEQ ID NO: 1777690 - RNA, 19 nt, Homo sapiens
  misc_RNA (1)...(19): siRNA sense strand
uccggaagaucuuguagua

SEQ ID NO: 1777691 - RNA, 19 nt, Homo sapiens
  misc_RNA (1)...(19): siRNA sense strand
uggagaagcugagccauug

SEQ ID NO: 1777692 - RNA, 19 nt, Homo sapiens
  misc_RNA (1)...(19): siRNA sense strand
caacuugcagguuuaaaga

SEQ ID NO: 1777693 - RNA, 19 nt, Homo sapiens
  misc_RNA (1)...(19): siRNA sense strand
ggaauagaucuuauaguag

SEQ ID NO: 1777694 - RNA, 19 nt, Homo sapiens
  misc_RNA (1)...(19): siRNA sense strand
cauaucugcagaaucauua

SEQ ID NO: 1777695 - RNA, 19 nt, Homo sapiens
  misc_RNA (1)...(19): siRNA sense strand
ccaauuauucuacaaggaa

SEQ ID NO: 1777696 - RNA, 19 nt, Homo sapiens
  misc_RNA (1)...(19): siRNA sense strand
cuacaacauucgacaaaca

SEQ ID NO: 1777697 - RNA, 19 nt, Homo sapiens
  misc_RNA (1)...(19): siRNA sense strand
ucaaauugggaucgcauua

SEQ ID NO: 1777698 - RNA, 19 nt, Homo sapiens
  misc_RNA (1)...(19): siRNA sense strand
agagaaacacgaucaagaa

SEQ ID NO: 1777699 - RNA, 19 nt, Homo sapiens
  misc_RNA (1)...(19): siRNA sense strand
cugaaugaccuacaaauga

SEQ ID NO: 1777700 - RNA, 19 nt, Homo sapiens
  misc_RNA (1)...(19): siRNA sense strand
ucuaaugccuggguuuauu

SEQ ID NO: 1777701 - RNA, 19 nt, Homo sapiens
  misc_RNA (1)...(19): siRNA sense strand
guaaagccaacgccaauuc

SEQ ID NO: 1777702 - RNA, 19 nt, Homo sapiens
  misc_RNA (1)...(19): siRNA sense strand
cccgaggucuugaucuuaa

SEQ ID NO: 1777703 - RNA, 19 nt, Homo sapiens
  misc_RNA (1)...(19): siRNA sense strand
ucaacuagcacuuucuuau

SEQ ID NO: 1777704 - RNA, 19 nt, Homo sapiens
  misc_RNA (1)...(19): siRNA sense strand
caacgccaauucagucaca

SEQ ID NO: 1777705 - RNA, 19 nt, Homo sapiens
  misc_RNA (1)...(19): siRNA sense strand
caagcugcaugucugaaau

SEQ ID NO: 1777706 - RNA, 19 nt, Homo sapiens
  misc_RNA (1)...(19): siRNA sense strand
aagaaaaccuggacaaaga

SEQ ID NO: 1777707 - RNA, 19 nt, Homo sapiens
  misc_RNA (1)...(19): siRNA sense strand
gagcaguagaggacuuuaa

SEQ ID NO: 1777708 - RNA, 19 nt, Homo sapiens
  misc_RNA (1)...(19): siRNA sense strand
caacauaacgugugaugac

SEQ ID NO: 1777709 - RNA, 19 nt, Homo sapiens
  misc_RNA (1)...(19): siRNA sense strand
gaaaugcaggugauuaacu

SEQ ID NO: 1777710 - RNA, 19 nt, Homo sapiens
  misc_RNA (1)...(19): siRNA sense strand
auagggaaaugaaagcaaa

SEQ ID NO: 1777711 - RNA, 19 nt, Homo sapiens
  misc_RNA (1)...(19): siRNA sense strand
gcauaucugcagaaucauu

SEQ ID NO: 1777712 - RNA, 19 nt, Homo sapiens
  misc_RNA (1)...(19): siRNA sense strand
caacaagcugcaugucuga

SEQ ID NO: 1777713 - RNA, 19 nt, Homo sapiens
  misc_RNA (1)...(19): siRNA sense strand
aagcugagccauugucaaa

SEQ ID NO: 1777714 - RNA, 19 nt, Homo sapiens
  misc_RNA (1)...(19): siRNA sense strand
ggaagaaaucuaggcagaa

SEQ ID NO: 1777715 - RNA, 19 nt, Homo sapiens
  misc_RNA (1)...(19): siRNA sense strand
gacaaagacgcaaggaguu

SEQ ID NO: 1777716 - RNA, 19 nt, Homo sapiens
  misc_RNA (1)...(19): siRNA sense strand
gaaacacgaucaagaaaac

SEQ ID NO: 1777717 - RNA, 19 nt, Homo sapiens
  misc_RNA (1)...(19): siRNA sense strand
cagagaaacacgaucaaga

SEQ ID NO: 1777718 - RNA, 19 nt, Homo sapiens
  misc_RNA (1)...(19): siRNA sense strand
ccaccacucugcuuuaaaa

SEQ ID NO: 1777719 - RNA, 19 nt, Homo sapiens
  misc_RNA (1)...(19): siRNA sense strand
guacgucaacuagcacuuu

SEQ ID NO: 1777720 - RNA, 19 nt, Homo sapiens
  misc_RNA (1)...(19): siRNA sense strand
gaggcugaaugaccuacaa

SEQ ID NO: 1777721 - RNA, 19 nt, Homo sapiens
  misc_RNA (1)...(19): siRNA sense strand
gcauauauggugguagaaa

SEQ ID NO: 1777722 - RNA, 19 nt, Homo sapiens
  misc_RNA (1)...(19): siRNA sense strand
cauaauaaggguagggauu

SEQ ID NO: 1777723 - RNA, 19 nt, Homo sapiens
  misc_RNA (1)...(19): siRNA sense strand
gaagcaaaagucagaauuu

SEQ ID NO: 1777724 - RNA, 19 nt, Homo sapiens
  misc_RNA (1)...(19): siRNA sense strand
caaaagaggcacagagaaa

SEQ ID NO: 1777725 - RNA, 19 nt, Homo sapiens
  misc_RNA (1)...(19): siRNA sense strand
gaaucuaguggcuguaaau

SEQ ID NO: 1777726 - RNA, 19 nt, Homo sapiens
  misc_RNA (1)...(19): siRNA sense strand
caacauucgacaaacacua

SEQ ID NO: 1777727 - RNA, 19 nt, Homo sapiens
  misc_RNA (1)...(19): siRNA sense strand
gaagagggcggaggcuaau

SEQ ID NO: 1777728 - RNA, 19 nt, Homo sapiens
  misc_RNA (1)...(19): siRNA sense strand
gucuugaucuuaaugaugu

SEQ ID NO: 1777729 - RNA, 19 nt, Homo sapiens
  misc_RNA (1)...(19): siRNA sense strand
caaggcauaucugcagaau

SEQ ID NO: 1777730 - RNA, 19 nt, Homo sapiens
  misc_RNA (1)...(19): siRNA sense strand
cccaagaauucguagagaa

SEQ ID NO: 1777731 - RNA, 19 nt, Homo sapiens
  misc_RNA (1)...(19): siRNA sense strand
gguuauagaugaggcagau

SEQ ID NO: 1777732 - RNA, 19 nt, Homo sapiens
  misc_RNA (1)...(19): siRNA sense strand
caaggaauagaucuuauag

SEQ ID NO: 1777733 - RNA, 19 nt, Homo sapiens
  misc_RNA (1)...(19): siRNA sense strand
aaaugcaggugauuaacug

SEQ ID NO: 1777734 - RNA, 19 nt, Homo sapiens
  misc_RNA (1)...(19): siRNA sense strand
ggaaaacauuguccuaucu

SEQ ID NO: 1777735 - RNA, 19 nt, Homo sapiens
  misc_RNA (1)...(19): siRNA sense strand
cccaaggaauauugacgua

SEQ ID NO: 1777736 - RNA, 19 nt, Homo sapiens
  misc_RNA (1)...(19): siRNA sense strand
aagcggaaacauaaagaua

SEQ ID NO: 1777737 - RNA, 19 nt, Homo sapiens
  misc_RNA (1)...(19): siRNA sense strand
gcugaaugaccuacaaaug

SEQ ID NO: 1777738 - RNA, 19 nt, Homo sapiens
  misc_RNA (1)...(19): siRNA sense strand
ggcggaggcuaauccaaga

SEQ ID NO: 1777739 - RNA, 19 nt, Homo sapiens
  misc_RNA (1)...(19): siRNA sense strand
acaagaaagcuacaacuca

SEQ ID NO: 1777740 - RNA, 19 nt, Homo sapiens
  misc_RNA (1)...(19): siRNA sense strand
gcggaaacauaaagauacu

SEQ ID NO: 1777741 - RNA, 19 nt, Homo sapiens
  misc_RNA (1)...(19): siRNA sense strand
caacgacaaagucaucaug

SEQ ID NO: 1777742 - RNA, 19 nt, Homo sapiens
  misc_RNA (1)...(19): siRNA sense strand
ccuacuugguuauagauga

SEQ ID NO: 1777743 - RNA, 19 nt, Homo sapiens
  misc_RNA (1)...(19): siRNA sense strand
caaagguguagauaucauu

SEQ ID NO: 1777744 - RNA, 19 nt, Homo sapiens
  misc_RNA (1)...(19): siRNA sense strand
uagaagacauuagcaaagg

SEQ ID NO: 1777745 - RNA, 19 nt, Homo sapiens
  misc_RNA (1)...(19): siRNA sense strand
cagaaauggacaaauagaa

SEQ ID NO: 1777746 - RNA, 19 nt, Homo sapiens
  misc_RNA (1)...(19): siRNA sense strand
uaucuaaugccuggguuua

SEQ ID NO: 1777747 - RNA, 19 nt, Homo sapiens
  misc_RNA (1)...(19): siRNA sense strand
uuacauagaauccaaagca

SEQ ID NO: 1777748 - RNA, 19 nt, Homo sapiens
  misc_RNA (1)...(19): siRNA sense strand
gagcaauacaaguuaaauc

SEQ ID NO: 1777749 - RNA, 19 nt, Homo sapiens
  misc_RNA (1)...(19): siRNA sense strand
aguaauggcugagcaauac

SEQ ID NO: 1777750 - RNA, 19 nt, Homo sapiens
  misc_RNA (1)...(19): siRNA sense strand
uugcauauauggugguaga

SEQ ID NO: 1777751 - RNA, 19 nt, Homo sapiens
  misc_RNA (1)...(19): siRNA sense strand
gaauaacucugucaaccua

SEQ ID NO: 1777752 - RNA, 19 nt, Homo sapiens
  misc_RNA (1)...(19): siRNA sense strand
gaagaaaucuaggcagaaa

SEQ ID NO: 1777753 - RNA, 19 nt, Homo sapiens
  misc_RNA (1)...(19): siRNA sense strand
ucacaggcauggccaauua

SEQ ID NO: 1777754 - RNA, 19 nt, Homo sapiens
  misc_RNA (1)...(19): siRNA sense strand
caaggaauauugacguaua

SEQ ID NO: 1777755 - RNA, 19 nt, Homo sapiens
  misc_RNA (1)...(19): siRNA sense strand
gcagaucuaccaccaguua

SEQ ID NO: 1777756 - RNA, 19 nt, Homo sapiens
  misc_RNA (1)...(19): siRNA sense strand
ggacaaauagaagacauua

SEQ ID NO: 1777757 - RNA, 19 nt, Homo sapiens
  misc_RNA (1)...(19): siRNA sense strand
gaaaauggccggugaauug

SEQ ID NO: 1777758 - RNA, 19 nt, Homo sapiens
  misc_RNA (1)...(19): siRNA sense strand
ugaaugaccuacaaaugaa

SEQ ID NO: 1777759 - RNA, 19 nt, Homo sapiens
  misc_RNA (1)...(19): siRNA sense strand
gcugagccauugucaaauu

SEQ ID NO: 1777760 - RNA, 19 nt, Homo sapiens
  misc_RNA (1)...(19): siRNA sense strand
gcaauacccugaucuucug

SEQ ID NO: 1777761 - RNA, 19 nt, Homo sapiens
  misc_RNA (1)...(19): siRNA sense strand
gaaccaccacucugcuuua

SEQ ID NO: 1777762 - RNA, 19 nt, Homo sapiens
  misc_RNA (1)...(19): siRNA sense strand
ugacguauauguacacaga

SEQ ID NO: 1777763 - RNA, 19 nt, Homo sapiens
  misc_RNA (1)...(19): siRNA sense strand
caaagcggcuauagaaaca

SEQ ID NO: 1777764 - RNA, 19 nt, Homo sapiens
  misc_RNA (1)...(19): siRNA sense strand
uagcaaagguguagauauc

SEQ ID NO: 1777765 - RNA, 19 nt, Homo sapiens
  misc_RNA (1)...(19): siRNA sense strand
cgacaaagucaucauguuu

SEQ ID NO: 1777766 - RNA, 19 nt, Homo sapiens
  misc_RNA (1)...(19): siRNA sense strand
ugaaagauccuaugauugu

SEQ ID NO: 1777767 - RNA, 19 nt, Homo sapiens
  misc_RNA (1)...(19): siRNA sense strand
gaaauggacaaauagaaga

SEQ ID NO: 1777768 - RNA, 19 nt, Homo sapiens
  misc_RNA (1)...(19): siRNA sense strand
ggaagaucuuguaguaaug

SEQ ID NO: 1777769 - RNA, 19 nt, Homo sapiens
  misc_RNA (1)...(19): siRNA sense strand
cggaagaucuuguaguaau

SEQ ID NO: 1777770 - RNA, 19 nt, Homo sapiens
  misc_RNA (1)...(19): siRNA sense strand
aggcauaucugcagaauca

SEQ ID NO: 1777771 - RNA, 19 nt, Homo sapiens
  misc_RNA (1)...(19): siRNA sense strand
gaaagauccuaugauuguu

SEQ ID NO: 1777772 - RNA, 19 nt, Homo sapiens
  misc_RNA (1)...(19): siRNA sense strand
guaaauacagugaagcaaa

SEQ ID NO: 1777773 - RNA, 19 nt, Homo sapiens
  misc_RNA (1)...(19): siRNA sense strand
ggacagagcaaaucagagu

SEQ ID NO: 1777774 - RNA, 19 nt, Homo sapiens
  misc_RNA (1)...(19): siRNA sense strand
ggaagagggcggaggcuaa

SEQ ID NO: 1777775 - RNA, 19 nt, Homo sapiens
  misc_RNA (1)...(19): siRNA sense strand
caacuagcacuuucuuauu

SEQ ID NO: 1777776 - RNA, 19 nt, Homo sapiens
  misc_RNA (1)...(19): siRNA sense strand
gcacagagaaacacgauca

SEQ ID NO: 1777777 - RNA, 19 nt, Homo sapiens
  misc_RNA (1)...(19): siRNA sense strand
ggccaaagcggcuauagaa

SEQ ID NO: 1777778 - RNA, 19 nt, Homo sapiens
  misc_RNA (1)...(19): siRNA sense strand
ggaaacauaaagauacuga

SEQ ID NO: 1777779 - RNA, 19 nt, Homo sapiens
  misc_RNA (1)...(19): siRNA sense strand
gcaaagguguagauaucau

SEQ ID NO: 1777780 - RNA, 19 nt, Homo sapiens
  misc_RNA (1)...(19): siRNA sense strand
gugauuaacuggagaaagg

SEQ ID NO: 1777781 - RNA, 19 nt, Homo sapiens
  misc_RNA (1)...(19): siRNA sense strand
gagaaacacgaucaagaaa

SEQ ID NO: 1777782 - RNA, 19 nt, Homo sapiens
  misc_RNA (1)...(19): siRNA sense strand
gcugagcaauacaaguuaa

SEQ ID NO: 1777783 - RNA, 19 nt, Homo sapiens
  misc_RNA (1)...(19): siRNA sense strand
gaaugggccugggaugcua

SEQ ID NO: 1777784 - RNA, 19 nt, Homo sapiens
  misc_RNA (1)...(19): siRNA sense strand
uaagaagcauaaccuacuu

SEQ ID NO: 1777785 - RNA, 19 nt, Homo sapiens
  misc_RNA (1)...(19): siRNA sense strand
cauaacgugugaugacuug

SEQ ID NO: 1777786 - RNA, 19 nt, Homo sapiens
  misc_RNA (1)...(19): siRNA sense strand
acauauugcugaugacuug

SEQ ID NO: 1777787 - RNA, 19 nt, Homo sapiens
  misc_RNA (1)...(19): siRNA sense strand
cuacaaggaauagaucuua

SEQ ID NO: 1777788 - RNA, 19 nt, Homo sapiens
  misc_RNA (1)...(19): siRNA sense strand
ccacucugcuuuaaaauaa

SEQ ID NO: 1777789 - RNA, 19 nt, Homo sapiens
  misc_RNA (1)...(19): siRNA sense strand
caacuuggccagauacugu

SEQ ID NO: 1777790 - RNA, 19 nt, Homo sapiens
  misc_RNA (1)...(19): siRNA sense strand
uccggaagaucuuguagua

SEQ ID NO: 1777791 - RNA, 19 nt, Homo sapiens
  misc_RNA (1)...(19): siRNA sense strand
uggagaagcugagccauug

SEQ ID NO: 1777792 - RNA, 19 nt, Homo sapiens
  misc_RNA (1)...(19): siRNA sense strand
caacuugcagguuuaaaga

SEQ ID NO: 1777793 - RNA, 19 nt, Homo sapiens
  misc_RNA (1)...(19): siRNA sense strand
ggaauagaucuuauaguag

SEQ ID NO: 1777794 - RNA, 19 nt, Homo sapiens
  misc_RNA (1)...(19): siRNA sense strand
cauaucugcagaaucauua

SEQ ID NO: 1777795 - RNA, 19 nt, Homo sapiens
  misc_RNA (1)...(19): siRNA sense strand
cuacaacauucgacaaaca

SEQ ID NO: 1777796 - RNA, 19 nt, Homo sapiens
  misc_RNA (1)...(19): siRNA sense strand
ccaauuauucuacaaggaa

SEQ ID NO: 1777797 - RNA, 19 nt, Homo sapiens
  misc_RNA (1)...(19): siRNA sense strand
ucaaauugggaucgcauua

SEQ ID NO: 1777798 - RNA, 19 nt, Homo sapiens
  misc_RNA (1)...(19): siRNA sense strand
agagaaacacgaucaagaa

SEQ ID NO: 1777799 - RNA, 19 nt, Homo sapiens
  misc_RNA (1)...(19): siRNA sense strand
cugaaugaccuacaaauga

SEQ ID NO: 1777800 - RNA, 19 nt, Homo sapiens
  misc_RNA (1)...(19): siRNA sense strand
ucuaaugccuggguuuauu

SEQ ID NO: 1777801 - RNA, 19 nt, Homo sapiens
  misc_RNA (1)...(19): siRNA sense strand
guaaagccaacgccaauuc

SEQ ID NO: 1777802 - RNA, 19 nt, Homo sapiens
  misc_RNA (1)...(19): siRNA sense strand
cccgaggucuugaucuuaa

SEQ ID NO: 1777803 - RNA, 19 nt, Homo sapiens
  misc_RNA (1)...(19): siRNA sense strand
ucaacuagcacuuucuuau

SEQ ID NO: 1777804 - RNA, 19 nt, Homo sapiens
  misc_RNA (1)...(19): siRNA sense strand
caacgccaauucagucaca

SEQ ID NO: 1777805 - RNA, 19 nt, Homo sapiens
  misc_RNA (1)...(19): siRNA sense strand
caagcugcaugucugaaau

SEQ ID NO: 1777806 - RNA, 19 nt, Homo sapiens
  misc_RNA (1)...(19): siRNA sense strand
aagaaaaccuggacaaaga

SEQ ID NO: 1777807 - RNA, 19 nt, Homo sapiens
  misc_RNA (1)...(19): siRNA sense strand
gagcaguagaggacuuuaa

SEQ ID NO: 1777808 - RNA, 19 nt, Homo sapiens
  misc_RNA (1)...(19): siRNA sense strand
caacauaacgugugaugac

SEQ ID NO: 1777809 - RNA, 19 nt, Homo sapiens
  misc_RNA (1)...(19): siRNA sense strand
gaaaugcaggugauuaacu

SEQ ID NO: 1777810 - RNA, 19 nt, Homo sapiens
  misc_RNA (1)...(19): siRNA sense strand
auagggaaaugaaagcaaa

SEQ ID NO: 1777811 - RNA, 19 nt, Homo sapiens
  misc_RNA (1)...(19): siRNA sense strand
gcauaucugcagaaucauu

SEQ ID NO: 1777812 - RNA, 19 nt, Homo sapiens
  misc_RNA (1)...(19): siRNA sense strand
caacaagcugcaugucuga

SEQ ID NO: 1777813 - RNA, 19 nt, Homo sapiens
  misc_RNA (1)...(19): siRNA sense strand
aagcugagccauugucaaa

SEQ ID NO: 1777814 - RNA, 19 nt, Homo sapiens
  misc_RNA (1)...(19): siRNA sense strand
ggaagaaaucuaggcagaa

SEQ ID NO: 1777815 - RNA, 19 nt, Homo sapiens
  misc_RNA (1)...(19): siRNA sense strand
gacaaagacgcaaggaguu

SEQ ID NO: 1777816 - RNA, 19 nt, Homo sapiens
  misc_RNA (1)...(19): siRNA sense strand
gaaacacgaucaagaaaac

SEQ ID NO: 1777817 - RNA, 19 nt, Homo sapiens
  misc_RNA (1)...(19): siRNA sense strand
cagagaaacacgaucaaga

SEQ ID NO: 1777818 - RNA, 19 nt, Homo sapiens
  misc_RNA (1)...(19): siRNA sense strand
ccaccacucugcuuuaaaa

SEQ ID NO: 1777819 - RNA, 19 nt, Homo sapiens
  misc_RNA (1)...(19): siRNA sense strand
guacgucaacuagcacuuu

SEQ ID NO: 1777820 - RNA, 19 nt, Homo sapiens
  misc_RNA (1)...(19): siRNA sense strand
gaggcugaaugaccuacaa

SEQ ID NO: 1777821 - RNA, 19 nt, Homo sapiens
  misc_RNA (1)...(19): siRNA sense strand
gcauauauggugguagaaa

SEQ ID NO: 1777822 - RNA, 19 nt, Homo sapiens
  misc_RNA (1)...(19): siRNA sense strand
cauaauaaggguagggauu

SEQ ID NO: 1777823 - RNA, 19 nt, Homo sapiens
  misc_RNA (1)...(19): siRNA sense strand
gaagcaaaagucagaauuu

SEQ ID NO: 1777824 - RNA, 19 nt, Homo sapiens
  misc_RNA (1)...(19): siRNA sense strand
caaaagaggcacagagaaa

SEQ ID NO: 1777825 - RNA, 19 nt, Homo sapiens
  misc_RNA (1)...(19): siRNA sense strand
gaaucuaguggcuguaaau

SEQ ID NO: 1777826 - RNA, 19 nt, Homo sapiens
  misc_RNA (1)...(19): siRNA sense strand
caacauucgacaaacacua

SEQ ID NO: 1777827 - RNA, 19 nt, Homo sapiens
  misc_RNA (1)...(19): siRNA sense strand
gaagagggcggaggcuaau

SEQ ID NO: 1777828 - RNA, 19 nt, Homo sapiens
  misc_RNA (1)...(19): siRNA sense strand
gucuugaucuuaaugaugu

SEQ ID NO: 1777829 - RNA, 19 nt, Homo sapiens
  misc_RNA (1)...(19): siRNA sense strand
caaggcauaucugcagaau

SEQ ID NO: 1777830 - RNA, 19 nt, Homo sapiens
  misc_RNA (1)...(19): siRNA sense strand
cccaagaauucguagagaa

SEQ ID NO: 1777831 - RNA, 19 nt, Homo sapiens
  misc_RNA (1)...(19): siRNA sense strand
gguuauagaugaggcagau

SEQ ID NO: 1777832 - RNA, 19 nt, Homo sapiens
  misc_RNA (1)...(19): siRNA sense strand
caaggaauagaucuuauag

SEQ ID NO: 1777833 - RNA, 19 nt, Homo sapiens
  misc_RNA (1)...(19): siRNA sense strand
aaaugcaggugauuaacug

SEQ ID NO: 1777834 - RNA, 19 nt, Homo sapiens
  misc_RNA (1)...(19): siRNA sense strand
ggaaaacauuguccuaucu

SEQ ID NO: 1777835 - RNA, 19 nt, Homo sapiens
  misc_RNA (1)...(19): siRNA sense strand
cccaaggaauauugacgua

SEQ ID NO: 1777836 - RNA, 19 nt, Homo sapiens
  misc_RNA (1)...(19): siRNA sense strand
aagcggaaacauaaagaua

SEQ ID NO: 1777837 - RNA, 19 nt, Homo sapiens
  misc_RNA (1)...(19): siRNA sense strand
gcugaaugaccuacaaaug

SEQ ID NO: 1777838 - RNA, 19 nt, Homo sapiens
  misc_RNA (1)...(19): siRNA sense strand
ggcggaggcuaauccaaga

SEQ ID NO: 1777839 - RNA, 19 nt, Homo sapiens
  misc_RNA (1)...(19): siRNA sense strand
acaagaaagcuacaacuca

SEQ ID NO: 1777840 - RNA, 19 nt, Homo sapiens
  misc_RNA (1)...(19): siRNA sense strand
gcggaaacauaaagauacu

SEQ ID NO: 1777841 - RNA, 19 nt, Homo sapiens
  misc_RNA (1)...(19): siRNA sense strand
caacgacaaagucaucaug

SEQ ID NO: 1777842 - RNA, 19 nt, Homo sapiens
  misc_RNA (1)...(19): siRNA sense strand
ccuacuugguuauagauga

SEQ ID NO: 1777843 - RNA, 19 nt, Homo sapiens
  misc_RNA (1)...(19): siRNA sense strand
caaagguguagauaucauu

SEQ ID NO: 1777844 - RNA, 19 nt, Homo sapiens
  misc_RNA (1)...(19): siRNA sense strand
uagaagacauuagcaaagg

SEQ ID NO: 1777845 - RNA, 19 nt, Homo sapiens
  misc_RNA (1)...(19): siRNA sense strand
cagaaauggacaaauagaa

SEQ ID NO: 1777846 - RNA, 19 nt, Homo sapiens
  misc_RNA (1)...(19): siRNA sense strand
uaucuaaugccuggguuua

SEQ ID NO: 1777847 - RNA, 19 nt, Homo sapiens
  misc_RNA (1)...(19): siRNA sense strand
uuacauagaauccaaagca

SEQ ID NO: 1777848 - RNA, 19 nt, Homo sapiens
  misc_RNA (1)...(19): siRNA sense strand
gagcaauacaaguuaaauc

SEQ ID NO: 1777849 - RNA, 19 nt, Homo sapiens
  misc_RNA (1)...(19): siRNA sense strand
aguaauggcugagcaauac

SEQ ID NO: 1777850 - RNA, 19 nt, Homo sapiens
  misc_RNA (1)...(19): siRNA sense strand
uugcauauauggugguaga

SEQ ID NO: 1777851 - RNA, 19 nt, Homo sapiens
  misc_RNA (1)...(19): siRNA sense strand
ggaggagugagaaauguua

SEQ ID NO: 1777852 - RNA, 19 nt, Homo sapiens
  misc_RNA (1)...(19): siRNA sense strand
ucucagagcugcuguccaa

SEQ ID NO: 1777853 - RNA, 19 nt, Homo sapiens
  misc_RNA (1)...(19): siRNA sense strand
ggagugagcaauucaacuu

SEQ ID NO: 1777854 - RNA, 19 nt, Homo sapiens
  misc_RNA (1)...(19): siRNA sense strand
ugagaaauguuaguguuga

SEQ ID NO: 1777855 - RNA, 19 nt, Homo sapiens
  misc_RNA (1)...(19): siRNA sense strand
ucucggagcugcuguccaa

SEQ ID NO: 1777856 - RNA, 19 nt, Homo sapiens
  misc_RNA (1)...(19): siRNA sense strand
ucucggagcugcuguccaa

SEQ ID NO: 1777857 - RNA, 19 nt, Homo sapiens
  misc_RNA (1)...(19): siRNA sense strand
gcaggcagaccaaggaguu

SEQ ID NO: 1777858 - RNA, 19 nt, Homo sapiens
  misc_RNA (1)...(19): siRNA sense strand
ccaaggaguucaucuucuc

SEQ ID NO: 1777859 - RNA, 19 nt, Homo sapiens
  misc_RNA (1)...(19): siRNA sense strand
ccaaggaguucaucuucuc

SEQ ID NO: 1777860 - RNA, 19 nt, Homo sapiens
  misc_RNA (1)...(19): siRNA sense strand
ggaccaaggaguucaucuu

SEQ ID NO: 1777861 - RNA, 19 nt, Homo sapiens
  misc_RNA (1)...(19): siRNA sense strand
gaacgagaagacacucaug

SEQ ID NO: 1777862 - RNA, 19 nt, Homo sapiens
  misc_RNA (1)...(19): siRNA sense strand
gaccaaggaguucaucuuc

SEQ ID NO: 1777863 - RNA, 19 nt, Homo sapiens
  misc_RNA (1)...(19): siRNA sense strand
gaccaaggaguucaucuuc

SEQ ID NO: 1777864 - RNA, 19 nt, Homo sapiens
  misc_RNA (1)...(19): siRNA sense strand
ccaagaccaccaugcauau

SEQ ID NO: 1777865 - RNA, 19 nt, Homo sapiens
  misc_RNA (1)...(19): siRNA sense strand
guugagacaagaaacguaa

SEQ ID NO: 1777866 - RNA, 19 nt, Homo sapiens
  misc_RNA (1)...(19): siRNA sense strand
agugagaaauguuaguguu

SEQ ID NO: 1777867 - RNA, 19 nt, Homo sapiens
  misc_RNA (1)...(19): siRNA sense strand
gcgacgagaugcugcuucu

SEQ ID NO: 1777868 - RNA, 19 nt, Homo sapiens
  misc_RNA (1)...(19): siRNA sense strand
cccaagaccaccaugcaua

SEQ ID NO: 1777869 - RNA, 19 nt, Homo sapiens
  misc_RNA (1)...(19): siRNA sense strand
gagaaauguuaguguugag

SEQ ID NO: 1777870 - RNA, 19 nt, Homo sapiens
  misc_RNA (1)...(19): siRNA sense strand
gaucuacaaugugcaugca

SEQ ID NO: 1777871 - RNA, 19 nt, Homo sapiens
  misc_RNA (1)...(19): siRNA sense strand
ggaggagucggcagaguag

SEQ ID NO: 1777872 - RNA, 19 nt, Homo sapiens
  misc_RNA (1)...(19): siRNA sense strand
gcaaggcugaggagaaugg

SEQ ID NO: 1777873 - RNA, 19 nt, Homo sapiens
  misc_RNA (1)...(19): siRNA sense strand
ggagugagaaauguuagug

SEQ ID NO: 1777874 - RNA, 19 nt, Homo sapiens
  misc_RNA (1)...(19): siRNA sense strand
guggaggagugagaaaugu

SEQ ID NO: 1777875 - RNA, 19 nt, Homo sapiens
  misc_RNA (1)...(19): siRNA sense strand
gagacucgcgugggaagaa

SEQ ID NO: 1777876 - RNA, 19 nt, Homo sapiens
  misc_RNA (1)...(19): siRNA sense strand
gugagaaauguuaguguug

SEQ ID NO: 1777877 - RNA, 19 nt, Homo sapiens
  misc_RNA (1)...(19): siRNA sense strand
gugagcaauucaacuugug

SEQ ID NO: 1777878 - RNA, 19 nt, Homo sapiens
  misc_RNA (1)...(19): siRNA sense strand
aaauggaaaccacccagaa

SEQ ID NO: 1777879 - RNA, 19 nt, Homo sapiens
  misc_RNA (1)...(19): siRNA sense strand
ggaacgagaagacacucau

SEQ ID NO: 1777880 - RNA, 19 nt, Homo sapiens
  misc_RNA (1)...(19): siRNA sense strand
cuacauggccauugucaac

SEQ ID NO: 1777881 - RNA, 19 nt, Homo sapiens
  misc_RNA (1)...(19): siRNA sense strand
uggaggagucggcagagua

SEQ ID NO: 1777882 - RNA, 19 nt, Homo sapiens
  misc_RNA (1)...(19): siRNA sense strand
cauaucaugaucuacaaug

SEQ ID NO: 1777883 - RNA, 19 nt, Homo sapiens
  misc_RNA (1)...(19): siRNA sense strand
gagugagcaauucaacuug

SEQ ID NO: 1777884 - RNA, 19 nt, Homo sapiens
  misc_RNA (1)...(19): siRNA sense strand
agacucgcgugggaagaaa

SEQ ID NO: 1777885 - RNA, 19 nt, Homo sapiens
  misc_RNA (1)...(19): siRNA sense strand
aaauguuaguguugagaca

SEQ ID NO: 1777886 - RNA, 19 nt, Homo sapiens
  misc_RNA (1)...(19): siRNA sense strand
agaaccugguggacuccua

SEQ ID NO: 1777887 - RNA, 19 nt, Homo sapiens
  misc_RNA (1)...(19): siRNA sense strand
agugagcaauucaacuugu

SEQ ID NO: 1777888 - RNA, 19 nt, Homo sapiens
  misc_RNA (1)...(19): siRNA sense strand
uaucaugaucuacaaugug

SEQ ID NO: 1777889 - RNA, 19 nt, Homo sapiens
  misc_RNA (1)...(19): siRNA sense strand
acuccuacauggccauugu

SEQ ID NO: 1777890 - RNA, 19 nt, Homo sapiens
  misc_RNA (1)...(19): siRNA sense strand
gcauaucaugaucuacaau

SEQ ID NO: 1777891 - RNA, 19 nt, Homo sapiens
  misc_RNA (1)...(19): siRNA sense strand
uggcuggagugagcaauuc

SEQ ID NO: 1777892 - RNA, 19 nt, Homo sapiens
  misc_RNA (1)...(19): siRNA sense strand
gcacggacauccacaccuu

SEQ ID NO: 1777893 - RNA, 19 nt, Homo sapiens
  misc_RNA (1)...(19): siRNA sense strand
ucccagagcuucaaagugu

SEQ ID NO: 1777894 - RNA, 19 nt, Homo sapiens
  misc_RNA (1)...(19): siRNA sense strand
ccacagcaagcaagucuuu

SEQ ID NO: 1777895 - RNA, 19 nt, Homo sapiens
  misc_RNA (1)...(19): siRNA sense strand
cgggaucccuggagacguu

SEQ ID NO: 1777896 - RNA, 19 nt, Homo sapiens
  misc_RNA (1)...(19): siRNA sense strand
uggacgugcugguguguaa

SEQ ID NO: 1777897 - RNA, 19 nt, Homo sapiens
  misc_RNA (1)...(19): siRNA sense strand
ggaaguguucggcgacguu

SEQ ID NO: 1777898 - RNA, 19 nt, Homo sapiens
  misc_RNA (1)...(19): siRNA sense strand
gagcgugggaggauugaug

SEQ ID NO: 1777899 - RNA, 19 nt, Homo sapiens
  misc_RNA (1)...(19): siRNA sense strand
gcgagagucuggcgguucu

SEQ ID NO: 1777900 - RNA, 19 nt, Homo sapiens
  misc_RNA (1)...(19): siRNA sense strand
ccucugugcuggacgugaa

SEQ ID NO: 1777901 - RNA, 19 nt, Homo sapiens
  misc_RNA (1)...(19): siRNA sense strand
gccuuucaaugacguuuau

SEQ ID NO: 1777902 - RNA, 19 nt, Homo sapiens
  misc_RNA (1)...(19): siRNA sense strand
ggacguaagggacucaaaa

SEQ ID NO: 1777903 - RNA, 19 nt, Homo sapiens
  misc_RNA (1)...(19): siRNA sense strand
gcuggacgugaauguagua

SEQ ID NO: 1777904 - RNA, 19 nt, Homo sapiens
  misc_RNA (1)...(19): siRNA sense strand
ccagagcuucaaaguguau

SEQ ID NO: 1777905 - RNA, 19 nt, Homo sapiens
  misc_RNA (1)...(19): siRNA sense strand
ugagggaccugaaaacaca

SEQ ID NO: 1777906 - RNA, 19 nt, Homo sapiens
  misc_RNA (1)...(19): siRNA sense strand
cccagagcuucaaagugua

SEQ ID NO: 1777907 - RNA, 19 nt, Homo sapiens
  misc_RNA (1)...(19): siRNA sense strand
ggccguacgucuggcuuca

SEQ ID NO: 1777908 - RNA, 19 nt, Homo sapiens
  misc_RNA (1)...(19): siRNA sense strand
acaccgccuucauggagaa

SEQ ID NO: 1777909 - RNA, 19 nt, Homo sapiens
  misc_RNA (1)...(19): siRNA sense strand
ucaaaguguaugccacguu

SEQ ID NO: 1777910 - RNA, 19 nt, Homo sapiens
  misc_RNA (1)...(19): siRNA sense strand
gugcuggacgugaauguag

SEQ ID NO: 1777911 - RNA, 19 nt, Homo sapiens
  misc_RNA (1)...(19): siRNA sense strand
gccaacgacuacucuguuu

SEQ ID NO: 1777912 - RNA, 19 nt, Homo sapiens
  misc_RNA (1)...(19): siRNA sense strand
gccgcuaccuguaauaaga

SEQ ID NO: 1777913 - RNA, 19 nt, Homo sapiens
  misc_RNA (1)...(19): siRNA sense strand
gaggcuacaacucggauua

SEQ ID NO: 1777914 - RNA, 19 nt, Homo sapiens
  misc_RNA (1)...(19): siRNA sense strand
gcgcuucgccuguccaguu

SEQ ID NO: 1777915 - RNA, 19 nt, Homo sapiens
  misc_RNA (1)...(19): siRNA sense strand
guaguggguuccagucucu

SEQ ID NO: 1777916 - RNA, 19 nt, Homo sapiens
  misc_RNA (1)...(19): siRNA sense strand
guuccagucucucaagcuu

SEQ ID NO: 1777917 - RNA, 19 nt, Homo sapiens
  misc_RNA (1)...(19): siRNA sense strand
ccgcaacggccuagaguga

SEQ ID NO: 1777918 - RNA, 19 nt, Homo sapiens
  misc_RNA (1)...(19): siRNA sense strand
gcagcgaccaccucagcaa

SEQ ID NO: 1777919 - RNA, 19 nt, Homo sapiens
  misc_RNA (1)...(19): siRNA sense strand
gcaagacuucgcaccucaa

SEQ ID NO: 1777920 - RNA, 19 nt, Homo sapiens
  misc_RNA (1)...(19): siRNA sense strand
aaacgcuccucguccucuu

SEQ ID NO: 1777921 - RNA, 19 nt, Homo sapiens
  misc_RNA (1)...(19): siRNA sense strand
gcgaccaccucagcaagca

SEQ ID NO: 1777922 - RNA, 19 nt, Homo sapiens
  misc_RNA (1)...(19): siRNA sense strand
cgacuccucuggccaugcu

SEQ ID NO: 1777923 - RNA, 19 nt, Homo sapiens
  misc_RNA (1)...(19): siRNA sense strand
ggcaagguguacggcaaga

SEQ ID NO: 1777924 - RNA, 19 nt, Homo sapiens
  misc_RNA (1)...(19): siRNA sense strand
gcuugccgcuaccuguaau

SEQ ID NO: 1777925 - RNA, 19 nt, Homo sapiens
  misc_RNA (1)...(19): siRNA sense strand
cgcuaccuguaauaagaua

SEQ ID NO: 1777926 - RNA, 19 nt, Homo sapiens
  misc_RNA (1)...(19): siRNA sense strand
ccucauggacggcuucaag

SEQ ID NO: 1777927 - RNA, 19 nt, Homo sapiens
  misc_RNA (1)...(19): siRNA sense strand
gccaacgacuacucuguuu

SEQ ID NO: 1777928 - RNA, 19 nt, Homo sapiens
  misc_RNA (1)...(19): siRNA sense strand
gccgcuaccuguaauaaga

SEQ ID NO: 1777929 - RNA, 19 nt, Homo sapiens
  misc_RNA (1)...(19): siRNA sense strand
gaggcuacaacucggauua

SEQ ID NO: 1777930 - RNA, 19 nt, Homo sapiens
  misc_RNA (1)...(19): siRNA sense strand
gcgcuucgccuguccaguu

SEQ ID NO: 1777931 - RNA, 19 nt, Homo sapiens
  misc_RNA (1)...(19): siRNA sense strand
guaguggguuccagucucu

SEQ ID NO: 1777932 - RNA, 19 nt, Homo sapiens
  misc_RNA (1)...(19): siRNA sense strand
guuccagucucucaagcuu

SEQ ID NO: 1777933 - RNA, 19 nt, Homo sapiens
  misc_RNA (1)...(19): siRNA sense strand
ccgcaacggccuagaguga

SEQ ID NO: 1777934 - RNA, 19 nt, Homo sapiens
  misc_RNA (1)...(19): siRNA sense strand
gcagcgaccaccucagcaa

SEQ ID NO: 1777935 - RNA, 19 nt, Homo sapiens
  misc_RNA (1)...(19): siRNA sense strand
gcaagacuucgcaccucaa

SEQ ID NO: 1777936 - RNA, 19 nt, Homo sapiens
  misc_RNA (1)...(19): siRNA sense strand
aaacgcuccucguccucuu

SEQ ID NO: 1777937 - RNA, 19 nt, Homo sapiens
  misc_RNA (1)...(19): siRNA sense strand
gcgaccaccucagcaagca

SEQ ID NO: 1777938 - RNA, 19 nt, Homo sapiens
  misc_RNA (1)...(19): siRNA sense strand
ggcaagguguacggcaaga

SEQ ID NO: 1777939 - RNA, 19 nt, Homo sapiens
  misc_RNA (1)...(19): siRNA sense strand
gcuugccgcuaccuguaau

SEQ ID NO: 1777940 - RNA, 19 nt, Homo sapiens
  misc_RNA (1)...(19): siRNA sense strand
cgcuaccuguaauaagaua

SEQ ID NO: 1777941 - RNA, 19 nt, Homo sapiens
  misc_RNA (1)...(19): siRNA sense strand
ccucauggacggcuucaag

SEQ ID NO: 1777942 - RNA, 19 nt, Homo sapiens
  misc_RNA (1)...(19): siRNA sense strand
gccaacgacuacucuguuu

SEQ ID NO: 1777943 - RNA, 19 nt, Homo sapiens
  misc_RNA (1)...(19): siRNA sense strand
gccgcuaccuguaauaaga

SEQ ID NO: 1777944 - RNA, 19 nt, Homo sapiens
  misc_RNA (1)...(19): siRNA sense strand
gaggcuacaacucggauua

SEQ ID NO: 1777945 - RNA, 19 nt, Homo sapiens
  misc_RNA (1)...(19): siRNA sense strand
gcgcuucgccuguccaguu

SEQ ID NO: 1777946 - RNA, 19 nt, Homo sapiens
  misc_RNA (1)...(19): siRNA sense strand
guaguggguuccagucucu

SEQ ID NO: 1777947 - RNA, 19 nt, Homo sapiens
  misc_RNA (1)...(19): siRNA sense strand
guuccagucucucaagcuu

SEQ ID NO: 1777948 - RNA, 19 nt, Homo sapiens
  misc_RNA (1)...(19): siRNA sense strand
ccgcaacggccuagaguga

SEQ ID NO: 1777949 - RNA, 19 nt, Homo sapiens
  misc_RNA (1)...(19): siRNA sense strand
gcagcgaccaccucagcaa

SEQ ID NO: 1777950 - RNA, 19 nt, Homo sapiens
  misc_RNA (1)...(19): siRNA sense strand
gcaagacuucgcaccucaa

SEQ ID NO: 1777951 - RNA, 19 nt, Homo sapiens
  misc_RNA (1)...(19): siRNA sense strand
aaacgcuccucguccucuu

SEQ ID NO: 1777952 - RNA, 19 nt, Homo sapiens
  misc_RNA (1)...(19): siRNA sense strand
gcgaccaccucagcaagca

SEQ ID NO: 1777953 - RNA, 19 nt, Homo sapiens
  misc_RNA (1)...(19): siRNA sense strand
cgacuccucuggccaugcu

SEQ ID NO: 1777954 - RNA, 19 nt, Homo sapiens
  misc_RNA (1)...(19): siRNA sense strand
ggcaagguguacggcaaga

SEQ ID NO: 1777955 - RNA, 19 nt, Homo sapiens
  misc_RNA (1)...(19): siRNA sense strand
gcuugccgcuaccuguaau

SEQ ID NO: 1777956 - RNA, 19 nt, Homo sapiens
  misc_RNA (1)...(19): siRNA sense strand
cgcuaccuguaauaagaua

SEQ ID NO: 1777957 - RNA, 19 nt, Homo sapiens
  misc_RNA (1)...(19): siRNA sense strand
ccucauggacggcuucaag

SEQ ID NO: 1777958 - RNA, 19 nt, Homo sapiens
  misc_RNA (1)...(19): siRNA sense strand
gccaacgacuacucuguuu

SEQ ID NO: 1777959 - RNA, 19 nt, Homo sapiens
  misc_RNA (1)...(19): siRNA sense strand
gccgcuaccuguaauaaga

SEQ ID NO: 1777960 - RNA, 19 nt, Homo sapiens
  misc_RNA (1)...(19): siRNA sense strand
gaggcuacaacucggauua

SEQ ID NO: 1777961 - RNA, 19 nt, Homo sapiens
  misc_RNA (1)...(19): siRNA sense strand
gcgcuucgccuguccaguu

SEQ ID NO: 1777962 - RNA, 19 nt, Homo sapiens
  misc_RNA (1)...(19): siRNA sense strand
guaguggguuccagucucu

SEQ ID NO: 1777963 - RNA, 19 nt, Homo sapiens
  misc_RNA (1)...(19): siRNA sense strand
guuccagucucucaagcuu

SEQ ID NO: 1777964 - RNA, 19 nt, Homo sapiens
  misc_RNA (1)...(19): siRNA sense strand
ccgcaacggccuagaguga

SEQ ID NO: 1777965 - RNA, 19 nt, Homo sapiens
  misc_RNA (1)...(19): siRNA sense strand
gcagcgaccaccucagcaa

SEQ ID NO: 1777966 - RNA, 19 nt, Homo sapiens
  misc_RNA (1)...(19): siRNA sense strand
gcaagacuucgcaccucaa

SEQ ID NO: 1777967 - RNA, 19 nt, Homo sapiens
  misc_RNA (1)...(19): siRNA sense strand
aaacgcuccucguccucuu

SEQ ID NO: 1777968 - RNA, 19 nt, Homo sapiens
  misc_RNA (1)...(19): siRNA sense strand
gcgaccaccucagcaagca

SEQ ID NO: 1777969 - RNA, 19 nt, Homo sapiens
  misc_RNA (1)...(19): siRNA sense strand
cgacuccucuggccaugcu

SEQ ID NO: 1777970 - RNA, 19 nt, Homo sapiens
  misc_RNA (1)...(19): siRNA sense strand
ggcaagguguacggcaaga

SEQ ID NO: 1777971 - RNA, 19 nt, Homo sapiens
  misc_RNA (1)...(19): siRNA sense strand
gcuugccgcuaccuguaau

SEQ ID NO: 1777972 - RNA, 19 nt, Homo sapiens
  misc_RNA (1)...(19): siRNA sense strand
cgcuaccuguaauaagaua

SEQ ID NO: 1777973 - RNA, 19 nt, Homo sapiens
  misc_RNA (1)...(19): siRNA sense strand
ccucauggacggcuucaag

SEQ ID NO: 1777974 - RNA, 19 nt, Homo sapiens
  misc_RNA (1)...(19): siRNA sense strand
gaucagaccuuaucaagca

SEQ ID NO: 1777975 - RNA, 19 nt, Homo sapiens
  misc_RNA (1)...(19): siRNA sense strand
gggcacagcuuucgccaaa

SEQ ID NO: 1777976 - RNA, 19 nt, Homo sapiens
  misc_RNA (1)...(19): siRNA sense strand
ggccagaagucacaccuua

SEQ ID NO: 1777977 - RNA, 19 nt, Homo sapiens
  misc_RNA (1)...(19): siRNA sense strand
ccaagaugcucuagugaaa

SEQ ID NO: 1777978 - RNA, 19 nt, Homo sapiens
  misc_RNA (1)...(19): siRNA sense strand
ggagagaagcccugcauuu

SEQ ID NO: 1777979 - RNA, 19 nt, Homo sapiens
  misc_RNA (1)...(19): siRNA sense strand
gggcgacacuucagguaua

SEQ ID NO: 1777980 - RNA, 19 nt, Homo sapiens
  misc_RNA (1)...(19): siRNA sense strand
gaacagagaaggaggaaca

SEQ ID NO: 1777981 - RNA, 19 nt, Homo sapiens
  misc_RNA (1)...(19): siRNA sense strand
ggaggugacuuccaacuag

SEQ ID NO: 1777982 - RNA, 19 nt, Homo sapiens
  misc_RNA (1)...(19): siRNA sense strand
ggagaggcccuuuguaugu

SEQ ID NO: 1777983 - RNA, 19 nt, Homo sapiens
  misc_RNA (1)...(19): siRNA sense strand
gaaggucacccucaucaga

SEQ ID NO: 1777984 - RNA, 19 nt, Homo sapiens
  misc_RNA (1)...(19): siRNA sense strand
gagagaagcccugcauuug

SEQ ID NO: 1777985 - RNA, 19 nt, Homo sapiens
  misc_RNA (1)...(19): siRNA sense strand
gcuccaagaugcucuagug

SEQ ID NO: 1777986 - RNA, 19 nt, Homo sapiens
  misc_RNA (1)...(19): siRNA sense strand
gaaggccucccucuccaua

SEQ ID NO: 1777987 - RNA, 19 nt, Homo sapiens
  misc_RNA (1)...(19): siRNA sense strand
ggacgcacuuggaggagaa

SEQ ID NO: 1777988 - RNA, 19 nt, Homo sapiens
  misc_RNA (1)...(19): siRNA sense strand
gcucgcagcuccucagaca

SEQ ID NO: 1777989 - RNA, 19 nt, Homo sapiens
  misc_RNA (1)...(19): siRNA sense strand
gaacaucuucuggaccuuu

SEQ ID NO: 1777990 - RNA, 19 nt, Homo sapiens
  misc_RNA (1)...(19): siRNA sense strand
agucacaccuuaucucuga

SEQ ID NO: 1777991 - RNA, 19 nt, Homo sapiens
  misc_RNA (1)...(19): siRNA sense strand
cauccucucucacuaauca

SEQ ID NO: 1777992 - RNA, 19 nt, Homo sapiens
  misc_RNA (1)...(19): siRNA sense strand
cccgacagcucauuaagaa

SEQ ID NO: 1777993 - RNA, 19 nt, Homo sapiens
  misc_RNA (1)...(19): siRNA sense strand
agagaagccuuaugucugu

SEQ ID NO: 1777994 - RNA, 19 nt, Homo sapiens
  misc_RNA (1)...(19): siRNA sense strand
gaaggucacccucauugga

SEQ ID NO: 1777995 - RNA, 19 nt, Homo sapiens
  misc_RNA (1)...(19): siRNA sense strand
acacagaucuucccaagcu

SEQ ID NO: 1777996 - RNA, 19 nt, Homo sapiens
  misc_RNA (1)...(19): siRNA sense strand
gggcgugcauuuggcuuua

SEQ ID NO: 1777997 - RNA, 19 nt, Homo sapiens
  misc_RNA (1)...(19): siRNA sense strand
gagcagacacuucagaauc

SEQ ID NO: 1777998 - RNA, 19 nt, Homo sapiens
  misc_RNA (1)...(19): siRNA sense strand
agaaagaggccaagcagaa

SEQ ID NO: 1777999 - RNA, 19 nt, Homo sapiens
  misc_RNA (1)...(19): siRNA sense strand
ugccagagaucagaccuua

SEQ ID NO: 1778000 - RNA, 19 nt, Homo sapiens
  misc_RNA (1)...(19): siRNA sense strand
agucauacguggaaacuau

SEQ ID NO: 1778001 - RNA, 19 nt, Homo sapiens
  misc_RNA (1)...(19): siRNA sense strand
gaaagaggccaagcagaau

SEQ ID NO: 1778002 - RNA, 19 nt, Homo sapiens
  misc_RNA (1)...(19): siRNA sense strand
ggagagaggagaacgaaca

SEQ ID NO: 1778003 - RNA, 19 nt, Homo sapiens
  misc_RNA (1)...(19): siRNA sense strand
gggcguggcuuuggucaga

SEQ ID NO: 1778004 - RNA, 19 nt, Homo sapiens
  misc_RNA (1)...(19): siRNA sense strand
cagaaggaguggaagcuau

SEQ ID NO: 1778005 - RNA, 19 nt, Homo sapiens
  misc_RNA (1)...(19): siRNA sense strand
caucaugugugcccugaau

SEQ ID NO: 1778006 - RNA, 19 nt, Homo sapiens
  misc_RNA (1)...(19): siRNA sense strand
ggagagaagccuuaugucu

SEQ ID NO: 1778007 - RNA, 19 nt, Homo sapiens
  misc_RNA (1)...(19): siRNA sense strand
aggaggagcuuuacguaga

SEQ ID NO: 1778008 - RNA, 19 nt, Homo sapiens
  misc_RNA (1)...(19): siRNA sense strand
gaggugacuuccaacuaga

SEQ ID NO: 1778009 - RNA, 19 nt, Homo sapiens
  misc_RNA (1)...(19): siRNA sense strand
ggagaagccauaccugugu

SEQ ID NO: 1778010 - RNA, 19 nt, Homo sapiens
  misc_RNA (1)...(19): siRNA sense strand
caccuuaucucugaccaaa

SEQ ID NO: 1778011 - RNA, 19 nt, Homo sapiens
  misc_RNA (1)...(19): siRNA sense strand
gcccaaaggaugagucuug

SEQ ID NO: 1778012 - RNA, 19 nt, Homo sapiens
  misc_RNA (1)...(19): siRNA sense strand
gaggagaacgaacaucuuc

SEQ ID NO: 1778013 - RNA, 19 nt, Homo sapiens
  misc_RNA (1)...(19): siRNA sense strand
gggaggugaugcuggagaa

SEQ ID NO: 1778014 - RNA, 19 nt, Homo sapiens
  misc_RNA (1)...(19): siRNA sense strand
ggucagacacaauguugaa

SEQ ID NO: 1778015 - RNA, 19 nt, Homo sapiens
  misc_RNA (1)...(19): siRNA sense strand
acaucaaggugacccagua

SEQ ID NO: 1778016 - RNA, 19 nt, Homo sapiens
  misc_RNA (1)...(19): siRNA sense strand
gagaucagaccuuaucaag

SEQ ID NO: 1778017 - RNA, 19 nt, Homo sapiens
  misc_RNA (1)...(19): siRNA sense strand
gagugugggcgucgguuua

SEQ ID NO: 1778018 - RNA, 19 nt, Homo sapiens
  misc_RNA (1)...(19): siRNA sense strand
gaagucacaccuuaucucu

SEQ ID NO: 1778019 - RNA, 19 nt, Homo sapiens
  misc_RNA (1)...(19): siRNA sense strand
gacagcucauuaagaaaga

SEQ ID NO: 1778020 - RNA, 19 nt, Homo sapiens
  misc_RNA (1)...(19): siRNA sense strand
cagaauuccagccaaguuu

SEQ ID NO: 1778021 - RNA, 19 nt, Homo sapiens
  misc_RNA (1)...(19): siRNA sense strand
acucagaggaggagcuuua

SEQ ID NO: 1778022 - RNA, 19 nt, Homo sapiens
  misc_RNA (1)...(19): siRNA sense strand
cagaaggucacccucauug

SEQ ID NO: 1778023 - RNA, 19 nt, Homo sapiens
  misc_RNA (1)...(19): siRNA sense strand
gagaggcccuuuguauguc

SEQ ID NO: 1778024 - RNA, 19 nt, Homo sapiens
  misc_RNA (1)...(19): siRNA sense strand
gggagaggcccuuuguaug

SEQ ID NO: 1778025 - RNA, 19 nt, Homo sapiens
  misc_RNA (1)...(19): siRNA sense strand
ccagagaucagaccuuauc

SEQ ID NO: 1778026 - RNA, 19 nt, Homo sapiens
  misc_RNA (1)...(19): siRNA sense strand
gaaaguggagagacagaag

SEQ ID NO: 1778027 - RNA, 19 nt, Homo sapiens
  misc_RNA (1)...(19): siRNA sense strand
gagaggagaacgaacaucu

SEQ ID NO: 1778028 - RNA, 19 nt, Homo sapiens
  misc_RNA (1)...(19): siRNA sense strand
caggagagaagccuuaugu

SEQ ID NO: 1778029 - RNA, 19 nt, Homo sapiens
  misc_RNA (1)...(19): siRNA sense strand
aguggaagcuauugaguuc

SEQ ID NO: 1778030 - RNA, 19 nt, Homo sapiens
  misc_RNA (1)...(19): siRNA sense strand
gaaugugggcgacacuuca

SEQ ID NO: 1778031 - RNA, 19 nt, Homo sapiens
  misc_RNA (1)...(19): siRNA sense strand
cgacagcucauuaagaaag

SEQ ID NO: 1778032 - RNA, 19 nt, Homo sapiens
  misc_RNA (1)...(19): siRNA sense strand
cgacaucagcggacccauu

SEQ ID NO: 1778033 - RNA, 19 nt, Homo sapiens
  misc_RNA (1)...(19): siRNA sense strand
ccaacuagaagcuccaaga

SEQ ID NO: 1778034 - RNA, 19 nt, Homo sapiens
  misc_RNA (1)...(19): siRNA sense strand
gacaucagcggacccauuc

SEQ ID NO: 1778035 - RNA, 19 nt, Homo sapiens
  misc_RNA (1)...(19): siRNA sense strand
cagcagucacuccuccuua

SEQ ID NO: 1778036 - RNA, 19 nt, Homo sapiens
  misc_RNA (1)...(19): siRNA sense strand
ucacuaaucacaagaggau

SEQ ID NO: 1778037 - RNA, 19 nt, Homo sapiens
  misc_RNA (1)...(19): siRNA sense strand
uauacauccucucucacua

SEQ ID NO: 1778038 - RNA, 19 nt, Homo sapiens
  misc_RNA (1)...(19): siRNA sense strand
gaguggaagcuauugaguu

SEQ ID NO: 1778039 - RNA, 19 nt, Homo sapiens
  misc_RNA (1)...(19): siRNA sense strand
caacuagaagcuccaagau

SEQ ID NO: 1778040 - RNA, 19 nt, Homo sapiens
  misc_RNA (1)...(19): siRNA sense strand
caagugugggcgugcauuu

SEQ ID NO: 1778041 - RNA, 19 nt, Homo sapiens
  misc_RNA (1)...(19): siRNA sense strand
gguagaagggaacagagaa

SEQ ID NO: 1778042 - RNA, 19 nt, Homo sapiens
  misc_RNA (1)...(19): siRNA sense strand
ggaaugugggcgacacuuc

SEQ ID NO: 1778043 - RNA, 19 nt, Homo sapiens
  misc_RNA (1)...(19): siRNA sense strand
guccagagccuagaacaga

SEQ ID NO: 1778044 - RNA, 19 nt, Homo sapiens
  misc_RNA (1)...(19): siRNA sense strand
ucaaggugacccaguagaa

SEQ ID NO: 1778045 - RNA, 19 nt, Homo sapiens
  misc_RNA (1)...(19): siRNA sense strand
ggaggagcuuuacguagac

SEQ ID NO: 1778046 - RNA, 19 nt, Homo sapiens
  misc_RNA (1)...(19): siRNA sense strand
gagcagucauacguggaaa

SEQ ID NO: 1778047 - RNA, 19 nt, Homo sapiens
  misc_RNA (1)...(19): siRNA sense strand
ggagcagucauacguggaa

SEQ ID NO: 1778048 - RNA, 19 nt, Homo sapiens
  misc_RNA (1)...(19): siRNA sense strand
gagaaaguggagagacaga

SEQ ID NO: 1778049 - RNA, 19 nt, Homo sapiens
  misc_RNA (1)...(19): siRNA sense strand
caggguguguggacaagga

SEQ ID NO: 1778050 - RNA, 19 nt, Homo sapiens
  misc_RNA (1)...(19): siRNA sense strand
cagaaggucacccucauca

SEQ ID NO: 1778051 - RNA, 19 nt, Homo sapiens
  misc_RNA (1)...(19): siRNA sense strand
gaaggaguggaagcuauug

SEQ ID NO: 1778052 - RNA, 19 nt, Homo sapiens
  misc_RNA (1)...(19): siRNA sense strand
aaagaggccaagcagaauu

SEQ ID NO: 1778053 - RNA, 19 nt, Homo sapiens
  misc_RNA (1)...(19): siRNA sense strand
ggagcagacacuucagaau

SEQ ID NO: 1778054 - RNA, 19 nt, Homo sapiens
  misc_RNA (1)...(19): siRNA sense strand
gccagaaggucacccucau

SEQ ID NO: 1778055 - RNA, 19 nt, Homo sapiens
  misc_RNA (1)...(19): siRNA sense strand
auacauccucucucacuaa

SEQ ID NO: 1778056 - RNA, 19 nt, Homo sapiens
  misc_RNA (1)...(19): siRNA sense strand
cagacaauaugcgcuaagu

SEQ ID NO: 1778057 - RNA, 19 nt, Homo sapiens
  misc_RNA (1)...(19): siRNA sense strand
ggagugugggcguggcuuu

SEQ ID NO: 1778058 - RNA, 19 nt, Homo sapiens
  misc_RNA (1)...(19): siRNA sense strand
gcccugcauuugcgaugaa

SEQ ID NO: 1778059 - RNA, 19 nt, Homo sapiens
  misc_RNA (1)...(19): siRNA sense strand
ccagaagucacaccuuauc

SEQ ID NO: 1778060 - RNA, 19 nt, Homo sapiens
  misc_RNA (1)...(19): siRNA sense strand
ggagugugggcgaggcuuu

SEQ ID NO: 1778061 - RNA, 19 nt, Homo sapiens
  misc_RNA (1)...(19): siRNA sense strand
gggagcagacacuucagaa

SEQ ID NO: 1778062 - RNA, 19 nt, Homo sapiens
  misc_RNA (1)...(19): siRNA sense strand
gcucagaggacccuguaca

SEQ ID NO: 1778063 - RNA, 19 nt, Homo sapiens
  misc_RNA (1)...(19): siRNA sense strand
ugcaggaggugacuuccaa

SEQ ID NO: 1778064 - RNA, 19 nt, Homo sapiens
  misc_RNA (1)...(19): siRNA sense strand
gaagcuccaagaugcucua

SEQ ID NO: 1778065 - RNA, 19 nt, Homo sapiens
  misc_RNA (1)...(19): siRNA sense strand
gagugugggcguggcuuua

SEQ ID NO: 1778066 - RNA, 19 nt, Homo sapiens
  misc_RNA (1)...(19): siRNA sense strand
ccagaaggucacccucauu

SEQ ID NO: 1778067 - RNA, 19 nt, Homo sapiens
  misc_RNA (1)...(19): siRNA sense strand
gaccuucgccuggcccaaa

SEQ ID NO: 1778068 - RNA, 19 nt, Homo sapiens
  misc_RNA (1)...(19): siRNA sense strand
caaggugacccaguagaau

SEQ ID NO: 1778069 - RNA, 19 nt, Homo sapiens
  misc_RNA (1)...(19): siRNA sense strand
aacuauagacugggacuua

SEQ ID NO: 1778070 - RNA, 19 nt, Homo sapiens
  misc_RNA (1)...(19): siRNA sense strand
agauagcccuccuucuaca

SEQ ID NO: 1778071 - RNA, 19 nt, Homo sapiens
  misc_RNA (1)...(19): siRNA sense strand
gcaccagagcucacacaca

SEQ ID NO: 1778072 - RNA, 19 nt, Homo sapiens
  misc_RNA (1)...(19): siRNA sense strand
uggaagcuauugaguucug

SEQ ID NO: 1778073 - RNA, 19 nt, Homo sapiens
  misc_RNA (1)...(19): siRNA sense strand
agaggaggagcuuuacgua

SEQ ID NO: 1778074 - RNA, 19 nt, Homo sapiens
  misc_RNA (1)...(19): siRNA sense strand
gaucagaccuuaucaagca

SEQ ID NO: 1778075 - RNA, 19 nt, Homo sapiens
  misc_RNA (1)...(19): siRNA sense strand
gggcacagcuuucgccaaa

SEQ ID NO: 1778076 - RNA, 19 nt, Homo sapiens
  misc_RNA (1)...(19): siRNA sense strand
ggccagaagucacaccuua

SEQ ID NO: 1778077 - RNA, 19 nt, Homo sapiens
  misc_RNA (1)...(19): siRNA sense strand
ccaagaugcucuagugaaa

SEQ ID NO: 1778078 - RNA, 19 nt, Homo sapiens
  misc_RNA (1)...(19): siRNA sense strand
ggagagaagcccugcauuu

SEQ ID NO: 1778079 - RNA, 19 nt, Homo sapiens
  misc_RNA (1)...(19): siRNA sense strand
gggcgacacuucagguaua

SEQ ID NO: 1778080 - RNA, 19 nt, Homo sapiens
  misc_RNA (1)...(19): siRNA sense strand
gaacagagaaggaggaaca

SEQ ID NO: 1778081 - RNA, 19 nt, Homo sapiens
  misc_RNA (1)...(19): siRNA sense strand
ggaggugacuuccaacuag

SEQ ID NO: 1778082 - RNA, 19 nt, Homo sapiens
  misc_RNA (1)...(19): siRNA sense strand
ggagaggcccuuuguaugu

SEQ ID NO: 1778083 - RNA, 19 nt, Homo sapiens
  misc_RNA (1)...(19): siRNA sense strand
gaaggucacccucaucaga

SEQ ID NO: 1778084 - RNA, 19 nt, Homo sapiens
  misc_RNA (1)...(19): siRNA sense strand
gagagaagcccugcauuug

SEQ ID NO: 1778085 - RNA, 19 nt, Homo sapiens
  misc_RNA (1)...(19): siRNA sense strand
gcuccaagaugcucuagug

SEQ ID NO: 1778086 - RNA, 19 nt, Homo sapiens
  misc_RNA (1)...(19): siRNA sense strand
gaaggccucccucuccaua

SEQ ID NO: 1778087 - RNA, 19 nt, Homo sapiens
  misc_RNA (1)...(19): siRNA sense strand
ggacgcacuuggaggagaa

SEQ ID NO: 1778088 - RNA, 19 nt, Homo sapiens
  misc_RNA (1)...(19): siRNA sense strand
gcucgcagcuccucagaca

SEQ ID NO: 1778089 - RNA, 19 nt, Homo sapiens
  misc_RNA (1)...(19): siRNA sense strand
gaacaucuucuggaccuuu

SEQ ID NO: 1778090 - RNA, 19 nt, Homo sapiens
  misc_RNA (1)...(19): siRNA sense strand
agucacaccuuaucucuga

SEQ ID NO: 1778091 - RNA, 19 nt, Homo sapiens
  misc_RNA (1)...(19): siRNA sense strand
cauccucucucacuaauca

SEQ ID NO: 1778092 - RNA, 19 nt, Homo sapiens
  misc_RNA (1)...(19): siRNA sense strand
cccgacagcucauuaagaa

SEQ ID NO: 1778093 - RNA, 19 nt, Homo sapiens
  misc_RNA (1)...(19): siRNA sense strand
agagaagccuuaugucugu

SEQ ID NO: 1778094 - RNA, 19 nt, Homo sapiens
  misc_RNA (1)...(19): siRNA sense strand
gaaggucacccucauugga

SEQ ID NO: 1778095 - RNA, 19 nt, Homo sapiens
  misc_RNA (1)...(19): siRNA sense strand
acacagaucuucccaagcu

SEQ ID NO: 1778096 - RNA, 19 nt, Homo sapiens
  misc_RNA (1)...(19): siRNA sense strand
gggcgugcauuuggcuuua

SEQ ID NO: 1778097 - RNA, 19 nt, Homo sapiens
  misc_RNA (1)...(19): siRNA sense strand
gagcagacacuucagaauc

SEQ ID NO: 1778098 - RNA, 19 nt, Homo sapiens
  misc_RNA (1)...(19): siRNA sense strand
agaaagaggccaagcagaa

SEQ ID NO: 1778099 - RNA, 19 nt, Homo sapiens
  misc_RNA (1)...(19): siRNA sense strand
ugccagagaucagaccuua

SEQ ID NO: 1778100 - RNA, 19 nt, Homo sapiens
  misc_RNA (1)...(19): siRNA sense strand
agucauacguggaaacuau

SEQ ID NO: 1778101 - RNA, 19 nt, Homo sapiens
  misc_RNA (1)...(19): siRNA sense strand
gaaagaggccaagcagaau

SEQ ID NO: 1778102 - RNA, 19 nt, Homo sapiens
  misc_RNA (1)...(19): siRNA sense strand
ggagagaggagaacgaaca

SEQ ID NO: 1778103 - RNA, 19 nt, Homo sapiens
  misc_RNA (1)...(19): siRNA sense strand
gggcguggcuuuggucaga

SEQ ID NO: 1778104 - RNA, 19 nt, Homo sapiens
  misc_RNA (1)...(19): siRNA sense strand
cagaaggaguggaagcuau

SEQ ID NO: 1778105 - RNA, 19 nt, Homo sapiens
  misc_RNA (1)...(19): siRNA sense strand
caucaugugugcccugaau

SEQ ID NO: 1778106 - RNA, 19 nt, Homo sapiens
  misc_RNA (1)...(19): siRNA sense strand
ggagagaagccuuaugucu

SEQ ID NO: 1778107 - RNA, 19 nt, Homo sapiens
  misc_RNA (1)...(19): siRNA sense strand
aggaggagcuuuacguaga

SEQ ID NO: 1778108 - RNA, 19 nt, Homo sapiens
  misc_RNA (1)...(19): siRNA sense strand
gaggugacuuccaacuaga

SEQ ID NO: 1778109 - RNA, 19 nt, Homo sapiens
  misc_RNA (1)...(19): siRNA sense strand
ggagaagccauaccugugu

SEQ ID NO: 1778110 - RNA, 19 nt, Homo sapiens
  misc_RNA (1)...(19): siRNA sense strand
caccuuaucucugaccaaa

SEQ ID NO: 1778111 - RNA, 19 nt, Homo sapiens
  misc_RNA (1)...(19): siRNA sense strand
gcccaaaggaugagucuug

SEQ ID NO: 1778112 - RNA, 19 nt, Homo sapiens
  misc_RNA (1)...(19): siRNA sense strand
gaggagaacgaacaucuuc

SEQ ID NO: 1778113 - RNA, 19 nt, Homo sapiens
  misc_RNA (1)...(19): siRNA sense strand
gggaggugaugcuggagaa

SEQ ID NO: 1778114 - RNA, 19 nt, Homo sapiens
  misc_RNA (1)...(19): siRNA sense strand
ggucagacacaauguugaa

SEQ ID NO: 1778115 - RNA, 19 nt, Homo sapiens
  misc_RNA (1)...(19): siRNA sense strand
acaucaaggugacccagua

SEQ ID NO: 1778116 - RNA, 19 nt, Homo sapiens
  misc_RNA (1)...(19): siRNA sense strand
gagaucagaccuuaucaag

SEQ ID NO: 1778117 - RNA, 19 nt, Homo sapiens
  misc_RNA (1)...(19): siRNA sense strand
gagugugggcgucgguuua

SEQ ID NO: 1778118 - RNA, 19 nt, Homo sapiens
  misc_RNA (1)...(19): siRNA sense strand
gaagucacaccuuaucucu

SEQ ID NO: 1778119 - RNA, 19 nt, Homo sapiens
  misc_RNA (1)...(19): siRNA sense strand
gacagcucauuaagaaaga

SEQ ID NO: 1778120 - RNA, 19 nt, Homo sapiens
  misc_RNA (1)...(19): siRNA sense strand
cagaauuccagccaaguuu

SEQ ID NO: 1778121 - RNA, 19 nt, Homo sapiens
  misc_RNA (1)...(19): siRNA sense strand
acucagaggaggagcuuua

SEQ ID NO: 1778122 - RNA, 19 nt, Homo sapiens
  misc_RNA (1)...(19): siRNA sense strand
cagaaggucacccucauug

SEQ ID NO: 1778123 - RNA, 19 nt, Homo sapiens
  misc_RNA (1)...(19): siRNA sense strand
gagaggcccuuuguauguc

SEQ ID NO: 1778124 - RNA, 19 nt, Homo sapiens
  misc_RNA (1)...(19): siRNA sense strand
gggagaggcccuuuguaug

SEQ ID NO: 1778125 - RNA, 19 nt, Homo sapiens
  misc_RNA (1)...(19): siRNA sense strand
ccagagaucagaccuuauc

SEQ ID NO: 1778126 - RNA, 19 nt, Homo sapiens
  misc_RNA (1)...(19): siRNA sense strand
gaaaguggagagacagaag

SEQ ID NO: 1778127 - RNA, 19 nt, Homo sapiens
  misc_RNA (1)...(19): siRNA sense strand
gagaggagaacgaacaucu

SEQ ID NO: 1778128 - RNA, 19 nt, Homo sapiens
  misc_RNA (1)...(19): siRNA sense strand
aguggaagcuauugaguuc

SEQ ID NO: 1778129 - RNA, 19 nt, Homo sapiens
  misc_RNA (1)...(19): siRNA sense strand
caggagagaagccuuaugu

SEQ ID NO: 1778130 - RNA, 19 nt, Homo sapiens
  misc_RNA (1)...(19): siRNA sense strand
gaaugugggcgacacuuca

SEQ ID NO: 1778131 - RNA, 19 nt, Homo sapiens
  misc_RNA (1)...(19): siRNA sense strand
cgacagcucauuaagaaag

SEQ ID NO: 1778132 - RNA, 19 nt, Homo sapiens
  misc_RNA (1)...(19): siRNA sense strand
cgacaucagcggacccauu

SEQ ID NO: 1778133 - RNA, 19 nt, Homo sapiens
  misc_RNA (1)...(19): siRNA sense strand
ccaacuagaagcuccaaga

SEQ ID NO: 1778134 - RNA, 19 nt, Homo sapiens
  misc_RNA (1)...(19): siRNA sense strand
gacaucagcggacccauuc

SEQ ID NO: 1778135 - RNA, 19 nt, Homo sapiens
  misc_RNA (1)...(19): siRNA sense strand
cagcagucacuccuccuua

SEQ ID NO: 1778136 - RNA, 19 nt, Homo sapiens
  misc_RNA (1)...(19): siRNA sense strand
ucacuaaucacaagaggau

SEQ ID NO: 1778137 - RNA, 19 nt, Homo sapiens
  misc_RNA (1)...(19): siRNA sense strand
uauacauccucucucacua

SEQ ID NO: 1778138 - RNA, 19 nt, Homo sapiens
  misc_RNA (1)...(19): siRNA sense strand
gaguggaagcuauugaguu

SEQ ID NO: 1778139 - RNA, 19 nt, Homo sapiens
  misc_RNA (1)...(19): siRNA sense strand
caacuagaagcuccaagau

SEQ ID NO: 1778140 - RNA, 19 nt, Homo sapiens
  misc_RNA (1)...(19): siRNA sense strand
caagugugggcgugcauuu

SEQ ID NO: 1778141 - RNA, 19 nt, Homo sapiens
  misc_RNA (1)...(19): siRNA sense strand
gguagaagggaacagagaa

SEQ ID NO: 1778142 - RNA, 19 nt, Homo sapiens
  misc_RNA (1)...(19): siRNA sense strand
guccagagccuagaacaga

SEQ ID NO: 1778143 - RNA, 19 nt, Homo sapiens
  misc_RNA (1)...(19): siRNA sense strand
ggaaugugggcgacacuuc

SEQ ID NO: 1778144 - RNA, 19 nt, Homo sapiens
  misc_RNA (1)...(19): siRNA sense strand
ucaaggugacccaguagaa

SEQ ID NO: 1778145 - RNA, 19 nt, Homo sapiens
  misc_RNA (1)...(19): siRNA sense strand
ggaggagcuuuacguagac

SEQ ID NO: 1778146 - RNA, 19 nt, Homo sapiens
  misc_RNA (1)...(19): siRNA sense strand
gagcagucauacguggaaa

SEQ ID NO: 1778147 - RNA, 19 nt, Homo sapiens
  misc_RNA (1)...(19): siRNA sense strand
ggagcagucauacguggaa

SEQ ID NO: 1778148 - RNA, 19 nt, Homo sapiens
  misc_RNA (1)...(19): siRNA sense strand
gagaaaguggagagacaga

SEQ ID NO: 1778149 - RNA, 19 nt, Homo sapiens
  misc_RNA (1)...(19): siRNA sense strand
gaaggaguggaagcuauug

SEQ ID NO: 1778150 - RNA, 19 nt, Homo sapiens
  misc_RNA (1)...(19): siRNA sense strand
caggguguguggacaagga

SEQ ID NO: 1778151 - RNA, 19 nt, Homo sapiens
  misc_RNA (1)...(19): siRNA sense strand
cagaaggucacccucauca

SEQ ID NO: 1778152 - RNA, 19 nt, Homo sapiens
  misc_RNA (1)...(19): siRNA sense strand
aaagaggccaagcagaauu

SEQ ID NO: 1778153 - RNA, 19 nt, Homo sapiens
  misc_RNA (1)...(19): siRNA sense strand
ggagcagacacuucagaau

SEQ ID NO: 1778154 - RNA, 19 nt, Homo sapiens
  misc_RNA (1)...(19): siRNA sense strand
gccagaaggucacccucau

SEQ ID NO: 1778155 - RNA, 19 nt, Homo sapiens
  misc_RNA (1)...(19): siRNA sense strand
auacauccucucucacuaa

SEQ ID NO: 1778156 - RNA, 19 nt, Homo sapiens
  misc_RNA (1)...(19): siRNA sense strand
caaccaggaaggaggcauu

SEQ ID NO: 1778157 - RNA, 19 nt, Homo sapiens
  misc_RNA (1)...(19): siRNA sense strand
cagacaauaugcgcuaagu

SEQ ID NO: 1778158 - RNA, 19 nt, Homo sapiens
  misc_RNA (1)...(19): siRNA sense strand
ggagugugggcguggcuuu

SEQ ID NO: 1778159 - RNA, 19 nt, Homo sapiens
  misc_RNA (1)...(19): siRNA sense strand
gcccugcauuugcgaugaa

SEQ ID NO: 1778160 - RNA, 19 nt, Homo sapiens
  misc_RNA (1)...(19): siRNA sense strand
ccagaagucacaccuuauc

SEQ ID NO: 1778161 - RNA, 19 nt, Homo sapiens
  misc_RNA (1)...(19): siRNA sense strand
ggagugugggcgaggcuuu

SEQ ID NO: 1778162 - RNA, 19 nt, Homo sapiens
  misc_RNA (1)...(19): siRNA sense strand
gcucagaggacccuguaca

SEQ ID NO: 1778163 - RNA, 19 nt, Homo sapiens
  misc_RNA (1)...(19): siRNA sense strand
gggagcagacacuucagaa

SEQ ID NO: 1778164 - RNA, 19 nt, Homo sapiens
  misc_RNA (1)...(19): siRNA sense strand
ugcaggaggugacuuccaa

SEQ ID NO: 1778165 - RNA, 19 nt, Homo sapiens
  misc_RNA (1)...(19): siRNA sense strand
gaagcuccaagaugcucua

SEQ ID NO: 1778166 - RNA, 19 nt, Homo sapiens
  misc_RNA (1)...(19): siRNA sense strand
gagugugggcguggcuuua

SEQ ID NO: 1778167 - RNA, 19 nt, Homo sapiens
  misc_RNA (1)...(19): siRNA sense strand
ccagaaggucacccucauu

SEQ ID NO: 1778168 - RNA, 19 nt, Homo sapiens
  misc_RNA (1)...(19): siRNA sense strand
gaccuucgccuggcccaaa

SEQ ID NO: 1778169 - RNA, 19 nt, Homo sapiens
  misc_RNA (1)...(19): siRNA sense strand
caaggugacccaguagaau

SEQ ID NO: 1778170 - RNA, 19 nt, Homo sapiens
  misc_RNA (1)...(19): siRNA sense strand
aacuauagacugggacuua

SEQ ID NO: 1778171 - RNA, 19 nt, Homo sapiens
  misc_RNA (1)...(19): siRNA sense strand
agauagcccuccuucuaca

SEQ ID NO: 1778172 - RNA, 19 nt, Homo sapiens
  misc_RNA (1)...(19): siRNA sense strand
gcaccagagcucacacaca

SEQ ID NO: 1778173 - RNA, 19 nt, Homo sapiens
  misc_RNA (1)...(19): siRNA sense strand
agaggaggagcuuuacgua

SEQ ID NO: 1778174 - RNA, 19 nt, Homo sapiens
  misc_RNA (1)...(19): siRNA sense strand
caagguagcuguagccaua

SEQ ID NO: 1778175 - RNA, 19 nt, Homo sapiens
  misc_RNA (1)...(19): siRNA sense strand
gaacuuauaugccacaauc

SEQ ID NO: 1778176 - RNA, 19 nt, Homo sapiens
  misc_RNA (1)...(19): siRNA sense strand
ccaagaaacuggagacauu

SEQ ID NO: 1778177 - RNA, 19 nt, Homo sapiens
  misc_RNA (1)...(19): siRNA sense strand
gaugaagacugggauauaa

SEQ ID NO: 1778178 - RNA, 19 nt, Homo sapiens
  misc_RNA (1)...(19): siRNA sense strand
ggagaaugguggcuuguuu

SEQ ID NO: 1778179 - RNA, 19 nt, Homo sapiens
  misc_RNA (1)...(19): siRNA sense strand
gaaggaaacagaauucauu

SEQ ID NO: 1778180 - RNA, 19 nt, Homo sapiens
  misc_RNA (1)...(19): siRNA sense strand
uaugauggguggaggauua

SEQ ID NO: 1778181 - RNA, 19 nt, Homo sapiens
  misc_RNA (1)...(19): siRNA sense strand
gacaaacucuacaaacuga

SEQ ID NO: 1778182 - RNA, 19 nt, Homo sapiens
  misc_RNA (1)...(19): siRNA sense strand
gaauagauguuguggucaa

SEQ ID NO: 1778183 - RNA, 19 nt, Homo sapiens
  misc_RNA (1)...(19): siRNA sense strand
ggaagaagaucugugacuu

SEQ ID NO: 1778184 - RNA, 19 nt, Homo sapiens
  misc_RNA (1)...(19): siRNA sense strand
guauuugaguggcauauaa

SEQ ID NO: 1778185 - RNA, 19 nt, Homo sapiens
  misc_RNA (1)...(19): siRNA sense strand
ggucaacaaugcuggaauu

SEQ ID NO: 1778186 - RNA, 19 nt, Homo sapiens
  misc_RNA (1)...(19): siRNA sense strand
acacauugauccuaacuuu

SEQ ID NO: 1778187 - RNA, 19 nt, Homo sapiens
  misc_RNA (1)...(19): siRNA sense strand
gaagaagaucugugacuuu

SEQ ID NO: 1778188 - RNA, 19 nt, Homo sapiens
  misc_RNA (1)...(19): siRNA sense strand
caacaaugcuggaauucug

SEQ ID NO: 1778189 - RNA, 19 nt, Homo sapiens
  misc_RNA (1)...(19): siRNA sense strand
caacuaugauucaguggaa

SEQ ID NO: 1778190 - RNA, 19 nt, Homo sapiens
  misc_RNA (1)...(19): siRNA sense strand
gaaagaggagcguuaguug

SEQ ID NO: 1778191 - RNA, 19 nt, Homo sapiens
  misc_RNA (1)...(19): siRNA sense strand
gaaaagcaguggccaacua

SEQ ID NO: 1778192 - RNA, 19 nt, Homo sapiens
  misc_RNA (1)...(19): siRNA sense strand
gaaaagugguucuggaaaa

SEQ ID NO: 1778193 - RNA, 19 nt, Homo sapiens
  misc_RNA (1)...(19): siRNA sense strand
agacagcccuggaugcuuu

SEQ ID NO: 1778194 - RNA, 19 nt, Homo sapiens
  misc_RNA (1)...(19): siRNA sense strand
aggaauauauggcaacuuu

SEQ ID NO: 1778195 - RNA, 19 nt, Homo sapiens
  misc_RNA (1)...(19): siRNA sense strand
cagaguaccuuuguauuug

SEQ ID NO: 1778196 - RNA, 19 nt, Homo sapiens
  misc_RNA (1)...(19): siRNA sense strand
gaagaucugugacuuugag

SEQ ID NO: 1778197 - RNA, 19 nt, Homo sapiens
  misc_RNA (1)...(19): siRNA sense strand
ugaaggaaguucugauuuc

SEQ ID NO: 1778198 - RNA, 19 nt, Homo sapiens
  misc_RNA (1)...(19): siRNA sense strand
gaagaaaguaaaugcugua

SEQ ID NO: 1778199 - RNA, 19 nt, Homo sapiens
  misc_RNA (1)...(19): siRNA sense strand
gaaggaaggaaacagaauu

SEQ ID NO: 1778200 - RNA, 19 nt, Homo sapiens
  misc_RNA (1)...(19): siRNA sense strand
gauaccaccucucuuaauc

SEQ ID NO: 1778201 - RNA, 19 nt, Homo sapiens
  misc_RNA (1)...(19): siRNA sense strand
gagagaagguugugaagac

SEQ ID NO: 1778202 - RNA, 19 nt, Homo sapiens
  misc_RNA (1)...(19): siRNA sense strand
ggccugagguggugaagaa

SEQ ID NO: 1778203 - RNA, 19 nt, Homo sapiens
  misc_RNA (1)...(19): siRNA sense strand
acagauaccaccucucuua

SEQ ID NO: 1778204 - RNA, 19 nt, Homo sapiens
  misc_RNA (1)...(19): siRNA sense strand
gggaacacaugaagaaaca

SEQ ID NO: 1778205 - RNA, 19 nt, Homo sapiens
  misc_RNA (1)...(19): siRNA sense strand
guucugauuucuccuguuu

SEQ ID NO: 1778206 - RNA, 19 nt, Homo sapiens
  misc_RNA (1)...(19): siRNA sense strand
guaacaccauugcuccuaa

SEQ ID NO: 1778207 - RNA, 19 nt, Homo sapiens
  misc_RNA (1)...(19): siRNA sense strand
gauaaaggauccgguguag

SEQ ID NO: 1778208 - RNA, 19 nt, Homo sapiens
  misc_RNA (1)...(19): siRNA sense strand
gaacuggaagcuauuaugu

SEQ ID NO: 1778209 - RNA, 19 nt, Homo sapiens
  misc_RNA (1)...(19): siRNA sense strand
gccagaaacucccuccauu

SEQ ID NO: 1778210 - RNA, 19 nt, Homo sapiens
  misc_RNA (1)...(19): siRNA sense strand
ggagcaggauggauuggaa

SEQ ID NO: 1778211 - RNA, 19 nt, Homo sapiens
  misc_RNA (1)...(19): siRNA sense strand
caacaaucauacuuucaga

SEQ ID NO: 1778212 - RNA, 19 nt, Homo sapiens
  misc_RNA (1)...(19): siRNA sense strand
aaacugagauguggaagga

SEQ ID NO: 1778213 - RNA, 19 nt, Homo sapiens
  misc_RNA (1)...(19): siRNA sense strand
gaaggaaguucugauuucu

SEQ ID NO: 1778214 - RNA, 19 nt, Homo sapiens
  misc_RNA (1)...(19): siRNA sense strand
gauauaauccacagaguuc

SEQ ID NO: 1778215 - RNA, 19 nt, Homo sapiens
  misc_RNA (1)...(19): siRNA sense strand
gcgggaagcuucagaguac

SEQ ID NO: 1778216 - RNA, 19 nt, Homo sapiens
  misc_RNA (1)...(19): siRNA sense strand
uaaaggauccgguguagug

SEQ ID NO: 1778217 - RNA, 19 nt, Homo sapiens
  misc_RNA (1)...(19): siRNA sense strand
ggacaaacucuacaaacug

SEQ ID NO: 1778218 - RNA, 19 nt, Homo sapiens
  misc_RNA (1)...(19): siRNA sense strand
ucagaguaccuuuguauuu

SEQ ID NO: 1778219 - RNA, 19 nt, Homo sapiens
  misc_RNA (1)...(19): siRNA sense strand
gaacacaugaagaaacaga

SEQ ID NO: 1778220 - RNA, 19 nt, Homo sapiens
  misc_RNA (1)...(19): siRNA sense strand
gccagaaacuucagaugau

SEQ ID NO: 1778221 - RNA, 19 nt, Homo sapiens
  misc_RNA (1)...(19): siRNA sense strand
gagcaguacuuagaguuau

SEQ ID NO: 1778222 - RNA, 19 nt, Homo sapiens
  misc_RNA (1)...(19): siRNA sense strand
ugauaagguuguugaagaa

SEQ ID NO: 1778223 - RNA, 19 nt, Homo sapiens
  misc_RNA (1)...(19): siRNA sense strand
ccagaaacuucagaugauu

SEQ ID NO: 1778224 - RNA, 19 nt, Homo sapiens
  misc_RNA (1)...(19): siRNA sense strand
uuacagcaguuugcagaua

SEQ ID NO: 1778225 - RNA, 19 nt, Homo sapiens
  misc_RNA (1)...(19): siRNA sense strand
gcagaaauuccuggacuuu

SEQ ID NO: 1778226 - RNA, 19 nt, Homo sapiens
  misc_RNA (1)...(19): siRNA sense strand
uaucauaggucagaaaucu

SEQ ID NO: 1778227 - RNA, 19 nt, Homo sapiens
  misc_RNA (1)...(19): siRNA sense strand
aagaagaucugugacuuug

SEQ ID NO: 1778228 - RNA, 19 nt, Homo sapiens
  misc_RNA (1)...(19): siRNA sense strand
gauccuaacuuugcuaguc

SEQ ID NO: 1778229 - RNA, 19 nt, Homo sapiens
  misc_RNA (1)...(19): siRNA sense strand
gcuguagccauaccuaaua

SEQ ID NO: 1778230 - RNA, 19 nt, Homo sapiens
  misc_RNA (1)...(19): siRNA sense strand
uucaucagcuucaggaaua

SEQ ID NO: 1778231 - RNA, 19 nt, Homo sapiens
  misc_RNA (1)...(19): siRNA sense strand
cugauaagguuguugaaga

SEQ ID NO: 1778232 - RNA, 19 nt, Homo sapiens
  misc_RNA (1)...(19): siRNA sense strand
auacggaacuggaagcuau

SEQ ID NO: 1778233 - RNA, 19 nt, Homo sapiens
  misc_RNA (1)...(19): siRNA sense strand
aaacagaaguauggaagga

SEQ ID NO: 1778234 - RNA, 19 nt, Homo sapiens
  misc_RNA (1)...(19): siRNA sense strand
ggaaucccuuacacauuga

SEQ ID NO: 1778235 - RNA, 19 nt, Homo sapiens
  misc_RNA (1)...(19): siRNA sense strand
ccagaaacucccuccauuu

SEQ ID NO: 1778236 - RNA, 19 nt, Homo sapiens
  misc_RNA (1)...(19): siRNA sense strand
ggagagcaguacuuagagu

SEQ ID NO: 1778237 - RNA, 19 nt, Homo sapiens
  misc_RNA (1)...(19): siRNA sense strand
uugcugauguccuagauaa

SEQ ID NO: 1778238 - RNA, 19 nt, Homo sapiens
  misc_RNA (1)...(19): siRNA sense strand
ucaguucucucucuuucuu

SEQ ID NO: 1778239 - RNA, 19 nt, Homo sapiens
  misc_RNA (1)...(19): siRNA sense strand
acagaaguauggaaggauu

SEQ ID NO: 1778240 - RNA, 19 nt, Homo sapiens
  misc_RNA (1)...(19): siRNA sense strand
uacagcaguuugcagauaa

SEQ ID NO: 1778241 - RNA, 19 nt, Homo sapiens
  misc_RNA (1)...(19): siRNA sense strand
ggaugucuauucuuauucu

SEQ ID NO: 1778242 - RNA, 19 nt, Homo sapiens
  misc_RNA (1)...(19): siRNA sense strand
acuggaagcuauuauguau

SEQ ID NO: 1778243 - RNA, 19 nt, Homo sapiens
  misc_RNA (1)...(19): siRNA sense strand
ccagcaagccucagaguau

SEQ ID NO: 1778244 - RNA, 19 nt, Homo sapiens
  misc_RNA (1)...(19): siRNA sense strand
uuauagugcugcaaaguug

SEQ ID NO: 1778245 - RNA, 19 nt, Homo sapiens
  misc_RNA (1)...(19): siRNA sense strand
ggaagaaggagagaagguu

SEQ ID NO: 1778246 - RNA, 19 nt, Homo sapiens
  misc_RNA (1)...(19): siRNA sense strand
gaauauauggcaacuuugg

SEQ ID NO: 1778247 - RNA, 19 nt, Homo sapiens
  misc_RNA (1)...(19): siRNA sense strand
gaaggaggaguuucagcaa

SEQ ID NO: 1778248 - RNA, 19 nt, Homo sapiens
  misc_RNA (1)...(19): siRNA sense strand
gguggaggauuagcagaaa

SEQ ID NO: 1778249 - RNA, 19 nt, Homo sapiens
  misc_RNA (1)...(19): siRNA sense strand
ggaguuucagcaaaucaua

SEQ ID NO: 1778250 - RNA, 19 nt, Homo sapiens
  misc_RNA (1)...(19): siRNA sense strand
gagcguuaguuguugugaa

SEQ ID NO: 1778251 - RNA, 19 nt, Homo sapiens
  misc_RNA (1)...(19): siRNA sense strand
aaaccaagguccaagaaac

SEQ ID NO: 1778252 - RNA, 19 nt, Homo sapiens
  misc_RNA (1)...(19): siRNA sense strand
ccuaauagaccuccugaug

SEQ ID NO: 1778253 - RNA, 19 nt, Homo sapiens
  misc_RNA (1)...(19): siRNA sense strand
gauccgguguagugauuau

SEQ ID NO: 1778254 - RNA, 19 nt, Homo sapiens
  misc_RNA (1)...(19): siRNA sense strand
ggaguuaucauaggucaga

SEQ ID NO: 1778255 - RNA, 19 nt, Homo sapiens
  misc_RNA (1)...(19): siRNA sense strand
ccaauuauagugcugcaaa

SEQ ID NO: 1778256 - RNA, 19 nt, Homo sapiens
  misc_RNA (1)...(19): siRNA sense strand
ggaaggauuauuaugacuu

SEQ ID NO: 1778257 - RNA, 19 nt, Homo sapiens
  misc_RNA (1)...(19): siRNA sense strand
ugaagaaacagaaguaugg

SEQ ID NO: 1778258 - RNA, 19 nt, Homo sapiens
  misc_RNA (1)...(19): siRNA sense strand
gacaagcccauauuacaug

SEQ ID NO: 1778259 - RNA, 19 nt, Homo sapiens
  misc_RNA (1)...(19): siRNA sense strand
uaauagaccuccugaugcu

SEQ ID NO: 1778260 - RNA, 19 nt, Homo sapiens
  misc_RNA (1)...(19): siRNA sense strand
gcaggaaaauuaaaaugug

SEQ ID NO: 1778261 - RNA, 19 nt, Homo sapiens
  misc_RNA (1)...(19): siRNA sense strand
gccugaagaucuuguggaa

SEQ ID NO: 1778262 - RNA, 19 nt, Homo sapiens
  misc_RNA (1)...(19): siRNA sense strand
ggaacuggaagcuauuaug

SEQ ID NO: 1778263 - RNA, 19 nt, Homo sapiens
  misc_RNA (1)...(19): siRNA sense strand
uuaaucaggcugcuuugua

SEQ ID NO: 1778264 - RNA, 19 nt, Homo sapiens
  misc_RNA (1)...(19): siRNA sense strand
caaagucaagguagcugua

SEQ ID NO: 1778265 - RNA, 19 nt, Homo sapiens
  misc_RNA (1)...(19): siRNA sense strand
ggagugggagcgucaauca

SEQ ID NO: 1778266 - RNA, 19 nt, Homo sapiens
  misc_RNA (1)...(19): siRNA sense strand
agacaguuaugccugaaga

SEQ ID NO: 1778267 - RNA, 19 nt, Homo sapiens
  misc_RNA (1)...(19): siRNA sense strand
gggcuaaguggacuauuga

SEQ ID NO: 1778268 - RNA, 19 nt, Homo sapiens
  misc_RNA (1)...(19): siRNA sense strand
ggaaggaaggaaacagaau

SEQ ID NO: 1778269 - RNA, 19 nt, Homo sapiens
  misc_RNA (1)...(19): siRNA sense strand
gcaguggccaacuaugauu

SEQ ID NO: 1778270 - RNA, 19 nt, Homo sapiens
  misc_RNA (1)...(19): siRNA sense strand
aaccaaaggcggaaauauu

SEQ ID NO: 1778271 - RNA, 19 nt, Homo sapiens
  misc_RNA (1)...(19): siRNA sense strand
agaguaccuuuguauuuga

SEQ ID NO: 1778272 - RNA, 19 nt, Homo sapiens
  misc_RNA (1)...(19): siRNA sense strand
ccuuacacauugauccuaa

SEQ ID NO: 1778273 - RNA, 19 nt, Homo sapiens
  misc_RNA (1)...(19): siRNA sense strand
uaaucaggcugcuuuguac

SEQ ID NO: 1778274 - RNA, 19 nt, Homo sapiens
  misc_RNA (1)...(19): siRNA sense strand
gaagguggauugcaacaaa

SEQ ID NO: 1778275 - RNA, 19 nt, Homo sapiens
  misc_RNA (1)...(19): siRNA sense strand
aggaggagcugaagaauuu

SEQ ID NO: 1778276 - RNA, 19 nt, Homo sapiens
  misc_RNA (1)...(19): siRNA sense strand
gaacagaaggucuuuacuu

SEQ ID NO: 1778277 - RNA, 19 nt, Homo sapiens
  misc_RNA (1)...(19): siRNA sense strand
gauauccgcuggaacuuug

SEQ ID NO: 1778278 - RNA, 19 nt, Homo sapiens
  misc_RNA (1)...(19): siRNA sense strand
ggaacaaacucagaaauac

SEQ ID NO: 1778279 - RNA, 19 nt, Homo sapiens
  misc_RNA (1)...(19): siRNA sense strand
gcaagcacguccuguuugu

SEQ ID NO: 1778280 - RNA, 19 nt, Homo sapiens
  misc_RNA (1)...(19): siRNA sense strand
gcuggaacuuugagaaauu

SEQ ID NO: 1778281 - RNA, 19 nt, Homo sapiens
  misc_RNA (1)...(19): siRNA sense strand
aacagaaggucuuuacuuu

SEQ ID NO: 1778282 - RNA, 19 nt, Homo sapiens
  misc_RNA (1)...(19): siRNA sense strand
uaacaggcaccaucuauga

SEQ ID NO: 1778283 - RNA, 19 nt, Homo sapiens
  misc_RNA (1)...(19): siRNA sense strand
agucagacauccuggagua

SEQ ID NO: 1778284 - RNA, 19 nt, Homo sapiens
  misc_RNA (1)...(19): siRNA sense strand
gcaguucaauacccacuag

SEQ ID NO: 1778285 - RNA, 19 nt, Homo sapiens
  misc_RNA (1)...(19): siRNA sense strand
gaacaaacucagaaauacu

SEQ ID NO: 1778286 - RNA, 19 nt, Homo sapiens
  misc_RNA (1)...(19): siRNA sense strand
aggaacaaacucagaaaua

SEQ ID NO: 1778287 - RNA, 19 nt, Homo sapiens
  misc_RNA (1)...(19): siRNA sense strand
ggucuuuacuuuccugaag

SEQ ID NO: 1778288 - RNA, 19 nt, Homo sapiens
  misc_RNA (1)...(19): siRNA sense strand
uggaguaccuaaagcaguu

SEQ ID NO: 1778289 - RNA, 19 nt, Homo sapiens
  misc_RNA (1)...(19): siRNA sense strand
ccuccgaccucugaucuuu

SEQ ID NO: 1778290 - RNA, 19 nt, Homo sapiens
  misc_RNA (1)...(19): siRNA sense strand
gguaacaggcaccaucuau

SEQ ID NO: 1778291 - RNA, 19 nt, Homo sapiens
  misc_RNA (1)...(19): siRNA sense strand
gaagaauuuuggugucauu

SEQ ID NO: 1778292 - RNA, 19 nt, Homo sapiens
  misc_RNA (1)...(19): siRNA sense strand
gaaauacuucuuggucuca

SEQ ID NO: 1778293 - RNA, 19 nt, Homo sapiens
  misc_RNA (1)...(19): siRNA sense strand
cagaaggucuuuacuuucc

SEQ ID NO: 1778294 - RNA, 19 nt, Homo sapiens
  misc_RNA (1)...(19): siRNA sense strand
gcgaggaguacauccaauu

SEQ ID NO: 1778295 - RNA, 19 nt, Homo sapiens
  misc_RNA (1)...(19): siRNA sense strand
auaggaagguggauugcaa

SEQ ID NO: 1778296 - RNA, 19 nt, Homo sapiens
  misc_RNA (1)...(19): siRNA sense strand
caggcaccaucuaugagua

SEQ ID NO: 1778297 - RNA, 19 nt, Homo sapiens
  misc_RNA (1)...(19): siRNA sense strand
guuuccagcucuuugagaa

SEQ ID NO: 1778298 - RNA, 19 nt, Homo sapiens
  misc_RNA (1)...(19): siRNA sense strand
gaaaggggaugugaaugga

SEQ ID NO: 1778299 - RNA, 19 nt, Homo sapiens
  misc_RNA (1)...(19): siRNA sense strand
aaguauguguguccaggua

SEQ ID NO: 1778300 - RNA, 19 nt, Homo sapiens
  misc_RNA (1)...(19): siRNA sense strand
uaccuaaagcaguucaaua

SEQ ID NO: 1778301 - RNA, 19 nt, Homo sapiens
  misc_RNA (1)...(19): siRNA sense strand
guaacaggcaccaucuaug

SEQ ID NO: 1778302 - RNA, 19 nt, Homo sapiens
  misc_RNA (1)...(19): siRNA sense strand
aggaguacauccaauucaa

SEQ ID NO: 1778303 - RNA, 19 nt, Homo sapiens
  misc_RNA (1)...(19): siRNA sense strand
gaggaguacauccaauuca

SEQ ID NO: 1778304 - RNA, 19 nt, Homo sapiens
  misc_RNA (1)...(19): siRNA sense strand
caggaggagcugaagaauu

SEQ ID NO: 1778305 - RNA, 19 nt, Homo sapiens
  misc_RNA (1)...(19): siRNA sense strand
aaacaagaaccaggaacaa

SEQ ID NO: 1778306 - RNA, 19 nt, Homo sapiens
  misc_RNA (1)...(19): siRNA sense strand
ucagcacagucaagucaga

SEQ ID NO: 1778307 - RNA, 19 nt, Homo sapiens
  misc_RNA (1)...(19): siRNA sense strand
cuggaacuuugagaaauuu

SEQ ID NO: 1778308 - RNA, 19 nt, Homo sapiens
  misc_RNA (1)...(19): siRNA sense strand
gcacguccuguuugucaau

SEQ ID NO: 1778309 - RNA, 19 nt, Homo sapiens
  misc_RNA (1)...(19): siRNA sense strand
ccaggaacaaacucagaaa

SEQ ID NO: 1778310 - RNA, 19 nt, Homo sapiens
  misc_RNA (1)...(19): siRNA sense strand
ggcaagcacguccuguuug

SEQ ID NO: 1778311 - RNA, 19 nt, Homo sapiens
  misc_RNA (1)...(19): siRNA sense strand
caugauauccgcuggaacu

SEQ ID NO: 1778312 - RNA, 19 nt, Homo sapiens
  misc_RNA (1)...(19): siRNA sense strand
uuacuuuccugaagaacuc

SEQ ID NO: 1778313 - RNA, 19 nt, Homo sapiens
  misc_RNA (1)...(19): siRNA sense strand
ccuccugucuuguccuguu

SEQ ID NO: 1778314 - RNA, 19 nt, Homo sapiens
  misc_RNA (1)...(19): siRNA sense strand
ggaguacauccaauucaag

SEQ ID NO: 1778315 - RNA, 19 nt, Homo sapiens
  misc_RNA (1)...(19): siRNA sense strand
uacaggaggagcugaagaa

SEQ ID NO: 1778316 - RNA, 19 nt, Homo sapiens
  misc_RNA (1)...(19): siRNA sense strand
gagucccugucaugcauug

SEQ ID NO: 1778317 - RNA, 19 nt, Homo sapiens
  misc_RNA (1)...(19): siRNA sense strand
caagaaccaggaacaaacu

SEQ ID NO: 1778318 - RNA, 19 nt, Homo sapiens
  misc_RNA (1)...(19): siRNA sense strand
gaauuuuggugucauugug

SEQ ID NO: 1778319 - RNA, 19 nt, Homo sapiens
  misc_RNA (1)...(19): siRNA sense strand
ccaguuuccagcucuuuga

SEQ ID NO: 1778320 - RNA, 19 nt, Homo sapiens
  misc_RNA (1)...(19): siRNA sense strand
ccgcuggaacuuugagaaa

SEQ ID NO: 1778321 - RNA, 19 nt, Homo sapiens
  misc_RNA (1)...(19): siRNA sense strand
ggaagguggauugcaacaa

SEQ ID NO: 1778322 - RNA, 19 nt, Homo sapiens
  misc_RNA (1)...(19): siRNA sense strand
cgaggaguacauccaauuc

SEQ ID NO: 1778323 - RNA, 19 nt, Homo sapiens
  misc_RNA (1)...(19): siRNA sense strand
guauguguguccagguagu

SEQ ID NO: 1778324 - RNA, 19 nt, Homo sapiens
  misc_RNA (1)...(19): siRNA sense strand
ugaacugaaugcacuacag

SEQ ID NO: 1778325 - RNA, 19 nt, Homo sapiens
  misc_RNA (1)...(19): siRNA sense strand
aggcaagcacguccuguuu

SEQ ID NO: 1778326 - RNA, 19 nt, Homo sapiens
  misc_RNA (1)...(19): siRNA sense strand
acagaaggucuuuacuuuc

SEQ ID NO: 1778327 - RNA, 19 nt, Homo sapiens
  misc_RNA (1)...(19): siRNA sense strand
cgauggagucccugucaug

SEQ ID NO: 1778328 - RNA, 19 nt, Homo sapiens
  misc_RNA (1)...(19): siRNA sense strand
aagcacguccuguuuguca

SEQ ID NO: 1778329 - RNA, 19 nt, Homo sapiens
  misc_RNA (1)...(19): siRNA sense strand
gcacagucaagucagacau

SEQ ID NO: 1778330 - RNA, 19 nt, Homo sapiens
  misc_RNA (1)...(19): siRNA sense strand
uggagucccugucaugcau

SEQ ID NO: 1778331 - RNA, 19 nt, Homo sapiens
  misc_RNA (1)...(19): siRNA sense strand
ugauauccgcuggaacuuu

SEQ ID NO: 1778332 - RNA, 19 nt, Homo sapiens
  misc_RNA (1)...(19): siRNA sense strand
acaagaaccaggaacaaac

SEQ ID NO: 1778333 - RNA, 19 nt, Homo sapiens
  misc_RNA (1)...(19): siRNA sense strand
aacaagaaccaggaacaaa

SEQ ID NO: 1778334 - RNA, 19 nt, Homo sapiens
  misc_RNA (1)...(19): siRNA sense strand
guaccuaaagcaguucaau

SEQ ID NO: 1778335 - RNA, 19 nt, Homo sapiens
  misc_RNA (1)...(19): siRNA sense strand
caggaacaaacucagaaau

SEQ ID NO: 1778336 - RNA, 19 nt, Homo sapiens
  misc_RNA (1)...(19): siRNA sense strand
gcucaucaagccaacucuu

SEQ ID NO: 1778337 - RNA, 19 nt, Homo sapiens
  misc_RNA (1)...(19): siRNA sense strand
ggcgaggaguacauccaau

SEQ ID NO: 1778338 - RNA, 19 nt, Homo sapiens
  misc_RNA (1)...(19): siRNA sense strand
caacaaacuuccucaauug

SEQ ID NO: 1778339 - RNA, 19 nt, Homo sapiens
  misc_RNA (1)...(19): siRNA sense strand
ucacauaucugaagaguau

SEQ ID NO: 1778340 - RNA, 19 nt, Homo sapiens
  misc_RNA (1)...(19): siRNA sense strand
ugaaagaacuuccagauca

SEQ ID NO: 1778341 - RNA, 19 nt, Homo sapiens
  misc_RNA (1)...(19): siRNA sense strand
ggaaagcuaucacauaucu

SEQ ID NO: 1778342 - RNA, 19 nt, Homo sapiens
  misc_RNA (1)...(19): siRNA sense strand
ccaacaaacuuccucaauu

SEQ ID NO: 1778343 - RNA, 19 nt, Homo sapiens
  misc_RNA (1)...(19): siRNA sense strand
gaguauggcuuucuucuuc

SEQ ID NO: 1778344 - RNA, 19 nt, Homo sapiens
  misc_RNA (1)...(19): siRNA sense strand
gaaagaacuuccagaucau

SEQ ID NO: 1778345 - RNA, 19 nt, Homo sapiens
  misc_RNA (1)...(19): siRNA sense strand
caaacuuccucaauugauu

SEQ ID NO: 1778346 - RNA, 19 nt, Homo sapiens
  misc_RNA (1)...(19): siRNA sense strand
gaacuuccagaucauuaua

SEQ ID NO: 1778347 - RNA, 19 nt, Homo sapiens
  misc_RNA (1)...(19): siRNA sense strand
gauggaaauugccaacaaa

SEQ ID NO: 1778348 - RNA, 19 nt, Homo sapiens
  misc_RNA (1)...(19): siRNA sense strand
ggauggaaauugccaacaa

SEQ ID NO: 1778349 - RNA, 19 nt, Homo sapiens
  misc_RNA (1)...(19): siRNA sense strand
ggaaauugccaacaaacuu

SEQ ID NO: 1778350 - RNA, 19 nt, Homo sapiens
  misc_RNA (1)...(19): siRNA sense strand
gaagacagcagugccauug

SEQ ID NO: 1778351 - RNA, 19 nt, Homo sapiens
  misc_RNA (1)...(19): siRNA sense strand
gaaauugccaacaaacuuc

SEQ ID NO: 1778352 - RNA, 19 nt, Homo sapiens
  misc_RNA (1)...(19): siRNA sense strand
gaaucuugcccuuccauuu

SEQ ID NO: 1778353 - RNA, 19 nt, Homo sapiens
  misc_RNA (1)...(19): siRNA sense strand
uuggaaagcuaucacauau

SEQ ID NO: 1778354 - RNA, 19 nt, Homo sapiens
  misc_RNA (1)...(19): siRNA sense strand
gcuaucacauaucugaaga

SEQ ID NO: 1778355 - RNA, 19 nt, Homo sapiens
  misc_RNA (1)...(19): siRNA sense strand
gcagugccauugucuuugg

SEQ ID NO: 1778356 - RNA, 19 nt, Homo sapiens
  misc_RNA (1)...(19): siRNA sense strand
cagcagugccauugucuuu

SEQ ID NO: 1778357 - RNA, 19 nt, Homo sapiens
  misc_RNA (1)...(19): siRNA sense strand
gauugaugcucaccagcuu

SEQ ID NO: 1778358 - RNA, 19 nt, Homo sapiens
  misc_RNA (1)...(19): siRNA sense strand
aaagcuaucacauaucuga

SEQ ID NO: 1778359 - RNA, 19 nt, Homo sapiens
  misc_RNA (1)...(19): siRNA sense strand
aagaacuuccagaucauua

SEQ ID NO: 1778360 - RNA, 19 nt, Homo sapiens
  misc_RNA (1)...(19): siRNA sense strand
aaucuugcccuuccauuug

SEQ ID NO: 1778361 - RNA, 19 nt, Homo sapiens
  misc_RNA (1)...(19): siRNA sense strand
uauaggccuuggauggaaa

SEQ ID NO: 1778362 - RNA, 19 nt, Homo sapiens
  misc_RNA (1)...(19): siRNA sense strand
uaucacauaucugaagagu

SEQ ID NO: 1778363 - RNA, 19 nt, Homo sapiens
  misc_RNA (1)...(19): siRNA sense strand
aagcucauguggacaagau

SEQ ID NO: 1778364 - RNA, 19 nt, Homo sapiens
  misc_RNA (1)...(19): siRNA sense strand
ggccuuggauggaaauugc

SEQ ID NO: 1778365 - RNA, 19 nt, Homo sapiens
  misc_RNA (1)...(19): siRNA sense strand
gccaacaaacuuccucaau

SEQ ID NO: 1778366 - RNA, 19 nt, Homo sapiens
  misc_RNA (1)...(19): siRNA sense strand
cagacuuggugcugacgaa

SEQ ID NO: 1778367 - RNA, 19 nt, Homo sapiens
  misc_RNA (1)...(19): siRNA sense strand
uuauaggccuuggauggaa

SEQ ID NO: 1778368 - RNA, 19 nt, Homo sapiens
  misc_RNA (1)...(19): siRNA sense strand
uuuggaaagcuaucacaua

SEQ ID NO: 1778369 - RNA, 19 nt, Homo sapiens
  misc_RNA (1)...(19): siRNA sense strand
gcuuucuucuuccagauuc

SEQ ID NO: 1778370 - RNA, 19 nt, Homo sapiens
  misc_RNA (1)...(19): siRNA sense strand
aaagaacuuccagaucauu

SEQ ID NO: 1778371 - RNA, 19 nt, Homo sapiens
  misc_RNA (1)...(19): siRNA sense strand
gugccauugucuuuggaaa

SEQ ID NO: 1778372 - RNA, 19 nt, Homo sapiens
  misc_RNA (1)...(19): siRNA sense strand
gucgaagucuccaggaacu

SEQ ID NO: 1778373 - RNA, 19 nt, Homo sapiens
  misc_RNA (1)...(19): siRNA sense strand
ugaagacagcagugccauu

SEQ ID NO: 1778374 - RNA, 19 nt, Homo sapiens
  misc_RNA (1)...(19): siRNA sense strand
caacaaacuuccucaauug

SEQ ID NO: 1778375 - RNA, 19 nt, Homo sapiens
  misc_RNA (1)...(19): siRNA sense strand
ucacauaucugaagaguau

SEQ ID NO: 1778376 - RNA, 19 nt, Homo sapiens
  misc_RNA (1)...(19): siRNA sense strand
guuaugagcuuucuuaaga

SEQ ID NO: 1778377 - RNA, 19 nt, Homo sapiens
  misc_RNA (1)...(19): siRNA sense strand
ugaaagaacuuccagauca

SEQ ID NO: 1778378 - RNA, 19 nt, Homo sapiens
  misc_RNA (1)...(19): siRNA sense strand
ggaaagcuaucacauaucu

SEQ ID NO: 1778379 - RNA, 19 nt, Homo sapiens
  misc_RNA (1)...(19): siRNA sense strand
ccaacaaacuuccucaauu

SEQ ID NO: 1778380 - RNA, 19 nt, Homo sapiens
  misc_RNA (1)...(19): siRNA sense strand
ggagagagccugcaugguu

SEQ ID NO: 1778381 - RNA, 19 nt, Homo sapiens
  misc_RNA (1)...(19): siRNA sense strand
gagagagccugcaugguuu

SEQ ID NO: 1778382 - RNA, 19 nt, Homo sapiens
  misc_RNA (1)...(19): siRNA sense strand
gcaguuaugagcuuucuua

SEQ ID NO: 1778383 - RNA, 19 nt, Homo sapiens
  misc_RNA (1)...(19): siRNA sense strand
gaguauggcuuucuucuuc

SEQ ID NO: 1778384 - RNA, 19 nt, Homo sapiens
  misc_RNA (1)...(19): siRNA sense strand
gaaagaacuuccagaucau

SEQ ID NO: 1778385 - RNA, 19 nt, Homo sapiens
  misc_RNA (1)...(19): siRNA sense strand
gauaaaggcucuuguucag

SEQ ID NO: 1778386 - RNA, 19 nt, Homo sapiens
  misc_RNA (1)...(19): siRNA sense strand
caaacuuccucaauugauu

SEQ ID NO: 1778387 - RNA, 19 nt, Homo sapiens
  misc_RNA (1)...(19): siRNA sense strand
gaacuuccagaucauuaua

SEQ ID NO: 1778388 - RNA, 19 nt, Homo sapiens
  misc_RNA (1)...(19): siRNA sense strand
gauggaaauugccaacaaa

SEQ ID NO: 1778389 - RNA, 19 nt, Homo sapiens
  misc_RNA (1)...(19): siRNA sense strand
ggauggaaauugccaacaa

SEQ ID NO: 1778390 - RNA, 19 nt, Homo sapiens
  misc_RNA (1)...(19): siRNA sense strand
gauaagaccuuggagucaa

SEQ ID NO: 1778391 - RNA, 19 nt, Homo sapiens
  misc_RNA (1)...(19): siRNA sense strand
cugcagggcugauguauga

SEQ ID NO: 1778392 - RNA, 19 nt, Homo sapiens
  misc_RNA (1)...(19): siRNA sense strand
ggaaauugccaacaaacuu

SEQ ID NO: 1778393 - RNA, 19 nt, Homo sapiens
  misc_RNA (1)...(19): siRNA sense strand
gaaccgcaguuaugagcuu

SEQ ID NO: 1778394 - RNA, 19 nt, Homo sapiens
  misc_RNA (1)...(19): siRNA sense strand
gaagacagcagugccauug

SEQ ID NO: 1778395 - RNA, 19 nt, Homo sapiens
  misc_RNA (1)...(19): siRNA sense strand
gaaagacaacccagcaaug

SEQ ID NO: 1778396 - RNA, 19 nt, Homo sapiens
  misc_RNA (1)...(19): siRNA sense strand
gaaauugccaacaaacuuc

SEQ ID NO: 1778397 - RNA, 19 nt, Homo sapiens
  misc_RNA (1)...(19): siRNA sense strand
ccauaaggccuucauagaa

SEQ ID NO: 1778398 - RNA, 19 nt, Homo sapiens
  misc_RNA (1)...(19): siRNA sense strand
gaaucuugcccuuccauuu

SEQ ID NO: 1778399 - RNA, 19 nt, Homo sapiens
  misc_RNA (1)...(19): siRNA sense strand
gcugauguaugaaggaguu

SEQ ID NO: 1778400 - RNA, 19 nt, Homo sapiens
  misc_RNA (1)...(19): siRNA sense strand
ggauaaaggcucuuguuca

SEQ ID NO: 1778401 - RNA, 19 nt, Homo sapiens
  misc_RNA (1)...(19): siRNA sense strand
ggacaucaccaaaaccuua

SEQ ID NO: 1778402 - RNA, 19 nt, Homo sapiens
  misc_RNA (1)...(19): siRNA sense strand
uuggaaagcuaucacauau

SEQ ID NO: 1778403 - RNA, 19 nt, Homo sapiens
  misc_RNA (1)...(19): siRNA sense strand
ggaaagacaacccagcaau

SEQ ID NO: 1778404 - RNA, 19 nt, Homo sapiens
  misc_RNA (1)...(19): siRNA sense strand
gcagugccauugucuuugg

SEQ ID NO: 1778405 - RNA, 19 nt, Homo sapiens
  misc_RNA (1)...(19): siRNA sense strand
gcuaucacauaucugaaga

SEQ ID NO: 1778406 - RNA, 19 nt, Homo sapiens
  misc_RNA (1)...(19): siRNA sense strand
ugaaggaguuucccaagag

SEQ ID NO: 1778407 - RNA, 19 nt, Homo sapiens
  misc_RNA (1)...(19): siRNA sense strand
gaugaguucuuaggcauuc

SEQ ID NO: 1778408 - RNA, 19 nt, Homo sapiens
  misc_RNA (1)...(19): siRNA sense strand
cagcagugccauugucuuu

SEQ ID NO: 1778409 - RNA, 19 nt, Homo sapiens
  misc_RNA (1)...(19): siRNA sense strand
ggccacgaaugcuaucuug

SEQ ID NO: 1778410 - RNA, 19 nt, Homo sapiens
  misc_RNA (1)...(19): siRNA sense strand
gauugaugcucaccagcuu

SEQ ID NO: 1778411 - RNA, 19 nt, Homo sapiens
  misc_RNA (1)...(19): siRNA sense strand
uuaagagugucagggauaa

SEQ ID NO: 1778412 - RNA, 19 nt, Homo sapiens
  misc_RNA (1)...(19): siRNA sense strand
ugacugcuuugguagagaa

SEQ ID NO: 1778413 - RNA, 19 nt, Homo sapiens
  misc_RNA (1)...(19): siRNA sense strand
aaagcuaucacauaucuga

SEQ ID NO: 1778414 - RNA, 19 nt, Homo sapiens
  misc_RNA (1)...(19): siRNA sense strand
gagccugcaugguuuuaua

SEQ ID NO: 1778415 - RNA, 19 nt, Homo sapiens
  misc_RNA (1)...(19): siRNA sense strand
acuggugacugcuuuggua

SEQ ID NO: 1778416 - RNA, 19 nt, Homo sapiens
  misc_RNA (1)...(19): siRNA sense strand
gaagcagugccugggauaa

SEQ ID NO: 1778417 - RNA, 19 nt, Homo sapiens
  misc_RNA (1)...(19): siRNA sense strand
cauagaagacauccacuca

SEQ ID NO: 1778418 - RNA, 19 nt, Homo sapiens
  misc_RNA (1)...(19): siRNA sense strand
ggauaagaccuuggaguca

SEQ ID NO: 1778419 - RNA, 19 nt, Homo sapiens
  misc_RNA (1)...(19): siRNA sense strand
caaagcaugggaagccaaa

SEQ ID NO: 1778420 - RNA, 19 nt, Homo sapiens
  misc_RNA (1)...(19): siRNA sense strand
cccaagagccccugaaaua

SEQ ID NO: 1778421 - RNA, 19 nt, Homo sapiens
  misc_RNA (1)...(19): siRNA sense strand
uguacagaaugagggauua

SEQ ID NO: 1778422 - RNA, 19 nt, Homo sapiens
  misc_RNA (1)...(19): siRNA sense strand
gggauaaaggcucuuguuc

SEQ ID NO: 1778423 - RNA, 19 nt, Homo sapiens
  misc_RNA (1)...(19): siRNA sense strand
gguggaaccgcaguuauga

SEQ ID NO: 1778424 - RNA, 19 nt, Homo sapiens
  misc_RNA (1)...(19): siRNA sense strand
aaucuugcccuuccauuug

SEQ ID NO: 1778425 - RNA, 19 nt, Homo sapiens
  misc_RNA (1)...(19): siRNA sense strand
aagaacuuccagaucauua

SEQ ID NO: 1778426 - RNA, 19 nt, Homo sapiens
  misc_RNA (1)...(19): siRNA sense strand
ugccuuugaugaguucuua

SEQ ID NO: 1778427 - RNA, 19 nt, Homo sapiens
  misc_RNA (1)...(19): siRNA sense strand
cacagugcuucaugccuuu

SEQ ID NO: 1778428 - RNA, 19 nt, Homo sapiens
  misc_RNA (1)...(19): siRNA sense strand
guucaggccacgaaugcua

SEQ ID NO: 1778429 - RNA, 19 nt, Homo sapiens
  misc_RNA (1)...(19): siRNA sense strand
uauaggccuuggauggaaa

SEQ ID NO: 1778430 - RNA, 19 nt, Homo sapiens
  misc_RNA (1)...(19): siRNA sense strand
ugagcuuucuuaagagugu

SEQ ID NO: 1778431 - RNA, 19 nt, Homo sapiens
  misc_RNA (1)...(19): siRNA sense strand
aagcucauguggacaagau

SEQ ID NO: 1778432 - RNA, 19 nt, Homo sapiens
  misc_RNA (1)...(19): siRNA sense strand
cuuaagagugucagggaua

SEQ ID NO: 1778433 - RNA, 19 nt, Homo sapiens
  misc_RNA (1)...(19): siRNA sense strand
ggccuuggauggaaauugc

SEQ ID NO: 1778434 - RNA, 19 nt, Homo sapiens
  misc_RNA (1)...(19): siRNA sense strand
ccacgaaugcuaucuugca

SEQ ID NO: 1778435 - RNA, 19 nt, Homo sapiens
  misc_RNA (1)...(19): siRNA sense strand
uaucacauaucugaagagu

SEQ ID NO: 1778436 - RNA, 19 nt, Homo sapiens
  misc_RNA (1)...(19): siRNA sense strand
gccaacaaacuuccucaau

SEQ ID NO: 1778437 - RNA, 19 nt, Homo sapiens
  misc_RNA (1)...(19): siRNA sense strand
gaaccuggagaccaucauc

SEQ ID NO: 1778438 - RNA, 19 nt, Homo sapiens
  misc_RNA (1)...(19): siRNA sense strand
cagacuuggugcugacgaa

SEQ ID NO: 1778439 - RNA, 19 nt, Homo sapiens
  misc_RNA (1)...(19): siRNA sense strand
cagaaugagggauuacaug

SEQ ID NO: 1778440 - RNA, 19 nt, Homo sapiens
  misc_RNA (1)...(19): siRNA sense strand
caccaaauaccucaucaca

SEQ ID NO: 1778441 - RNA, 19 nt, Homo sapiens
  misc_RNA (1)...(19): siRNA sense strand
uuauaggccuuggauggaa

SEQ ID NO: 1778442 - RNA, 19 nt, Homo sapiens
  misc_RNA (1)...(19): siRNA sense strand
uuuggaaagcuaucacaua

SEQ ID NO: 1778443 - RNA, 19 nt, Homo sapiens
  misc_RNA (1)...(19): siRNA sense strand
uaugagcuuucuuaagagu

SEQ ID NO: 1778444 - RNA, 19 nt, Homo sapiens
  misc_RNA (1)...(19): siRNA sense strand
uuauacuggugacugcuuu

SEQ ID NO: 1778445 - RNA, 19 nt, Homo sapiens
  misc_RNA (1)...(19): siRNA sense strand
cagcuuauaaccagugugu

SEQ ID NO: 1778446 - RNA, 19 nt, Homo sapiens
  misc_RNA (1)...(19): siRNA sense strand
gacauccacucagcaccuu

SEQ ID NO: 1778447 - RNA, 19 nt, Homo sapiens
  misc_RNA (1)...(19): siRNA sense strand
cccauaaggccuucauaga

SEQ ID NO: 1778448 - RNA, 19 nt, Homo sapiens
  misc_RNA (1)...(19): siRNA sense strand
gcuuucuucuuccagauuc

SEQ ID NO: 1778449 - RNA, 19 nt, Homo sapiens
  misc_RNA (1)...(19): siRNA sense strand
augaaggaguuucccaaga

SEQ ID NO: 1778450 - RNA, 19 nt, Homo sapiens
  misc_RNA (1)...(19): siRNA sense strand
gaccuuggagucaauccuu

SEQ ID NO: 1778451 - RNA, 19 nt, Homo sapiens
  misc_RNA (1)...(19): siRNA sense strand
auaagaccuuggagucaau

SEQ ID NO: 1778452 - RNA, 19 nt, Homo sapiens
  misc_RNA (1)...(19): siRNA sense strand
ggugacugcuuugguagag

SEQ ID NO: 1778453 - RNA, 19 nt, Homo sapiens
  misc_RNA (1)...(19): siRNA sense strand
aaagaacuuccagaucauu

SEQ ID NO: 1778454 - RNA, 19 nt, Homo sapiens
  misc_RNA (1)...(19): siRNA sense strand
gugccauugucuuuggaaa

SEQ ID NO: 1778455 - RNA, 19 nt, Homo sapiens
  misc_RNA (1)...(19): siRNA sense strand
cgucauagcaaggaaagug

SEQ ID NO: 1778456 - RNA, 19 nt, Homo sapiens
  misc_RNA (1)...(19): siRNA sense strand
agaagcagugccugggaua

SEQ ID NO: 1778457 - RNA, 19 nt, Homo sapiens
  misc_RNA (1)...(19): siRNA sense strand
acagguggaaccgcaguua

SEQ ID NO: 1778458 - RNA, 19 nt, Homo sapiens
  misc_RNA (1)...(19): siRNA sense strand
aagcagugccugggauaaa

SEQ ID NO: 1778459 - RNA, 19 nt, Homo sapiens
  misc_RNA (1)...(19): siRNA sense strand
cagcugcagccaaggcaaa

SEQ ID NO: 1778460 - RNA, 19 nt, Homo sapiens
  misc_RNA (1)...(19): siRNA sense strand
gcagggcugauguaugaag

SEQ ID NO: 1778461 - RNA, 19 nt, Homo sapiens
  misc_RNA (1)...(19): siRNA sense strand
gucgaagucuccaggaacu

SEQ ID NO: 1778462 - RNA, 19 nt, Homo sapiens
  misc_RNA (1)...(19): siRNA sense strand
acaugccuccuucccauaa

SEQ ID NO: 1778463 - RNA, 19 nt, Homo sapiens
  misc_RNA (1)...(19): siRNA sense strand
ugaagacagcagugccauu

SEQ ID NO: 1778464 - RNA, 19 nt, Homo sapiens
  misc_RNA (1)...(19): siRNA sense strand
gaucauggcuacacuaucu

SEQ ID NO: 1778465 - RNA, 19 nt, Homo sapiens
  misc_RNA (1)...(19): siRNA sense strand
gaacguggccaauuaucuu

SEQ ID NO: 1778466 - RNA, 19 nt, Homo sapiens
  misc_RNA (1)...(19): siRNA sense strand
ugcagaacguggccaauua

SEQ ID NO: 1778467 - RNA, 19 nt, Homo sapiens
  misc_RNA (1)...(19): siRNA sense strand
gcgcucaucucgcucacuu

SEQ ID NO: 1778468 - RNA, 19 nt, Homo sapiens
  misc_RNA (1)...(19): siRNA sense strand
ccaucgcgcuggacaggua

SEQ ID NO: 1778469 - RNA, 19 nt, Homo sapiens
  misc_RNA (1)...(19): siRNA sense strand
caucguggcucuuguucug

SEQ ID NO: 1778470 - RNA, 19 nt, Homo sapiens
  misc_RNA (1)...(19): siRNA sense strand
caagaagagugugaaugga

SEQ ID NO: 1778471 - RNA, 19 nt, Homo sapiens
  misc_RNA (1)...(19): siRNA sense strand
gcagaacguggccaauuau

SEQ ID NO: 1778472 - RNA, 19 nt, Homo sapiens
  misc_RNA (1)...(19): siRNA sense strand
ccaagaagagugugaaugg

SEQ ID NO: 1778473 - RNA, 19 nt, Homo sapiens
  misc_RNA (1)...(19): siRNA sense strand
ccacaugcccacccuguug

SEQ ID NO: 1778474 - RNA, 19 nt, Homo sapiens
  misc_RNA (1)...(19): siRNA sense strand
uaacuucugccgccaguga

SEQ ID NO: 1778475 - RNA, 19 nt, Homo sapiens
  misc_RNA (1)...(19): siRNA sense strand
cgagagaggaagacaguga

SEQ ID NO: 1778476 - RNA, 19 nt, Homo sapiens
  misc_RNA (1)...(19): siRNA sense strand
gcguuuaagaagaucauua

SEQ ID NO: 1778477 - RNA, 19 nt, Homo sapiens
  misc_RNA (1)...(19): siRNA sense strand
cacuaucuauuccaccuuu

SEQ ID NO: 1778478 - RNA, 19 nt, Homo sapiens
  misc_RNA (1)...(19): siRNA sense strand
cuuauuggcuuccucaucu

SEQ ID NO: 1778479 - RNA, 19 nt, Homo sapiens
  misc_RNA (1)...(19): siRNA sense strand
acgcauacuucaacaagga

SEQ ID NO: 1778480 - RNA, 19 nt, Homo sapiens
  misc_RNA (1)...(19): siRNA sense strand
ucaauuggcugggcuacuc

SEQ ID NO: 1778481 - RNA, 19 nt, Homo sapiens
  misc_RNA (1)...(19): siRNA sense strand
gagagaggaagacagugaa

SEQ ID NO: 1778482 - RNA, 19 nt, Homo sapiens
  misc_RNA (1)...(19): siRNA sense strand
ucgcucacuuggcuuauug

SEQ ID NO: 1778483 - RNA, 19 nt, Homo sapiens
  misc_RNA (1)...(19): siRNA sense strand
cuuuggagcuuucuacauc

SEQ ID NO: 1778484 - RNA, 19 nt, Homo sapiens
  misc_RNA (1)...(19): siRNA sense strand
ugaagacgcugggcaucau

SEQ ID NO: 1778485 - RNA, 19 nt, Homo sapiens
  misc_RNA (1)...(19): siRNA sense strand
uacuccaacucucugcuua

SEQ ID NO: 1778486 - RNA, 19 nt, Homo sapiens
  misc_RNA (1)...(19): siRNA sense strand
cguggccaauuaucuuauu

SEQ ID NO: 1778487 - RNA, 19 nt, Homo sapiens
  misc_RNA (1)...(19): siRNA sense strand
gaagaucauuaaguguaac

SEQ ID NO: 1778488 - RNA, 19 nt, Homo sapiens
  misc_RNA (1)...(19): siRNA sense strand
gagaggaagacagugaaga

SEQ ID NO: 1778489 - RNA, 19 nt, Homo sapiens
  misc_RNA (1)...(19): siRNA sense strand
gacagguacugggccauca

SEQ ID NO: 1778490 - RNA, 19 nt, Homo sapiens
  misc_RNA (1)...(19): siRNA sense strand
gggcaacaacaccacauca

SEQ ID NO: 1778491 - RNA, 19 nt, Homo sapiens
  misc_RNA (1)...(19): siRNA sense strand
cgagagcagcugccacaug

SEQ ID NO: 1778492 - RNA, 19 nt, Homo sapiens
  misc_RNA (1)...(19): siRNA sense strand
gcucaugcugguucucuau

SEQ ID NO: 1778493 - RNA, 19 nt, Homo sapiens
  misc_RNA (1)...(19): siRNA sense strand
caacaaggacuuucaaaac

SEQ ID NO: 1778494 - RNA, 19 nt, Homo sapiens
  misc_RNA (1)...(19): siRNA sense strand
gguaaccugcgaccuguuc

SEQ ID NO: 1778495 - RNA, 19 nt, Homo sapiens
  misc_RNA (1)...(19): siRNA sense strand
gaccgucagcuaccaagug

SEQ ID NO: 1778496 - RNA, 19 nt, Homo sapiens
  misc_RNA (1)...(19): siRNA sense strand
caaggaucauggcuacacu

SEQ ID NO: 1778497 - RNA, 19 nt, Homo sapiens
  misc_RNA (1)...(19): siRNA sense strand
caucaugggcaccuucauc

SEQ ID NO: 1778498 - RNA, 19 nt, Homo sapiens
  misc_RNA (1)...(19): siRNA sense strand
gcaaggaucauggcuacac

SEQ ID NO: 1778499 - RNA, 19 nt, Homo sapiens
  misc_RNA (1)...(19): siRNA sense strand
accgucagcuaccaaguga

SEQ ID NO: 1778500 - RNA, 19 nt, Homo sapiens
  misc_RNA (1)...(19): siRNA sense strand
ucgacuacgugaacaagag

SEQ ID NO: 1778501 - RNA, 19 nt, Homo sapiens
  misc_RNA (1)...(19): siRNA sense strand
gcaccauuagcaaggauca

SEQ ID NO: 1778502 - RNA, 19 nt, Homo sapiens
  misc_RNA (1)...(19): siRNA sense strand
gugaagacgcugggcauca

SEQ ID NO: 1778503 - RNA, 19 nt, Homo sapiens
  misc_RNA (1)...(19): siRNA sense strand
gcugggcacgcucaucuuc

SEQ ID NO: 1778504 - RNA, 19 nt, Homo sapiens
  misc_RNA (1)...(19): siRNA sense strand
gaagacgcugggcaucauc

SEQ ID NO: 1778505 - RNA, 19 nt, Homo sapiens
  misc_RNA (1)...(19): siRNA sense strand
gagagaaacuugcaucaga

SEQ ID NO: 1778506 - RNA, 19 nt, Homo sapiens
  misc_RNA (1)...(19): siRNA sense strand
gaaaugaccuugcccuucu

SEQ ID NO: 1778507 - RNA, 19 nt, Homo sapiens
  misc_RNA (1)...(19): siRNA sense strand
ccuaaguucucaacaguua

SEQ ID NO: 1778508 - RNA, 19 nt, Homo sapiens
  misc_RNA (1)...(19): siRNA sense strand
gaaacuugcaucagaaauu

SEQ ID NO: 1778509 - RNA, 19 nt, Homo sapiens
  misc_RNA (1)...(19): siRNA sense strand
cagaaggccuugucaucua

SEQ ID NO: 1778510 - RNA, 19 nt, Homo sapiens
  misc_RNA (1)...(19): siRNA sense strand
gauggucuguggcuauaaa

SEQ ID NO: 1778511 - RNA, 19 nt, Homo sapiens
  misc_RNA (1)...(19): siRNA sense strand
gggauggucuguggcuaua

SEQ ID NO: 1778512 - RNA, 19 nt, Homo sapiens
  misc_RNA (1)...(19): siRNA sense strand
gagaucggagugucuauaa

SEQ ID NO: 1778513 - RNA, 19 nt, Homo sapiens
  misc_RNA (1)...(19): siRNA sense strand
gaucggagugucuauaaug

SEQ ID NO: 1778514 - RNA, 19 nt, Homo sapiens
  misc_RNA (1)...(19): siRNA sense strand
ccucaaacauccagccuau

SEQ ID NO: 1778515 - RNA, 19 nt, Homo sapiens
  misc_RNA (1)...(19): siRNA sense strand
cggagugucuauaaugaaa

SEQ ID NO: 1778516 - RNA, 19 nt, Homo sapiens
  misc_RNA (1)...(19): siRNA sense strand
aaacuugcaucagaaauuc

SEQ ID NO: 1778517 - RNA, 19 nt, Homo sapiens
  misc_RNA (1)...(19): siRNA sense strand
agagaaacuugcaucagaa

SEQ ID NO: 1778518 - RNA, 19 nt, Homo sapiens
  misc_RNA (1)...(19): siRNA sense strand
gcuccaacauccugugaau

SEQ ID NO: 1778519 - RNA, 19 nt, Homo sapiens
  misc_RNA (1)...(19): siRNA sense strand
gcuaugaggaauguaauaa

SEQ ID NO: 1778520 - RNA, 19 nt, Homo sapiens
  misc_RNA (1)...(19): siRNA sense strand
ggagaucggagugucuaua

SEQ ID NO: 1778521 - RNA, 19 nt, Homo sapiens
  misc_RNA (1)...(19): siRNA sense strand
uccaacauccugugaauuu

SEQ ID NO: 1778522 - RNA, 19 nt, Homo sapiens
  misc_RNA (1)...(19): siRNA sense strand
gagaaacuugcaucagaaa

SEQ ID NO: 1778523 - RNA, 19 nt, Homo sapiens
  misc_RNA (1)...(19): siRNA sense strand
ccgcuuggccugugaauau

SEQ ID NO: 1778524 - RNA, 19 nt, Homo sapiens
  misc_RNA (1)...(19): siRNA sense strand
gaacaaggaaaggauucuu

SEQ ID NO: 1778525 - RNA, 19 nt, Homo sapiens
  misc_RNA (1)...(19): siRNA sense strand
ccauuacagugucaagaug

SEQ ID NO: 1778526 - RNA, 19 nt, Homo sapiens
  misc_RNA (1)...(19): siRNA sense strand
gugaauauaaugacacaug

SEQ ID NO: 1778527 - RNA, 19 nt, Homo sapiens
  misc_RNA (1)...(19): siRNA sense strand
ggucuguggcuauaaagaa

SEQ ID NO: 1778528 - RNA, 19 nt, Homo sapiens
  misc_RNA (1)...(19): siRNA sense strand
caagugugguggucucagu

SEQ ID NO: 1778529 - RNA, 19 nt, Homo sapiens
  misc_RNA (1)...(19): siRNA sense strand
uucaggauguggaccaaua

SEQ ID NO: 1778530 - RNA, 19 nt, Homo sapiens
  misc_RNA (1)...(19): siRNA sense strand
caacauccugugaauuuua

SEQ ID NO: 1778531 - RNA, 19 nt, Homo sapiens
  misc_RNA (1)...(19): siRNA sense strand
ugacacauggguccaggua

SEQ ID NO: 1778532 - RNA, 19 nt, Homo sapiens
  misc_RNA (1)...(19): siRNA sense strand
uaaagaacaaggaaaggau

SEQ ID NO: 1778533 - RNA, 19 nt, Homo sapiens
  misc_RNA (1)...(19): siRNA sense strand
ucaaacauccagccuaucu

SEQ ID NO: 1778534 - RNA, 19 nt, Homo sapiens
  misc_RNA (1)...(19): siRNA sense strand
gcaucccucaggagaauuu

SEQ ID NO: 1778535 - RNA, 19 nt, Homo sapiens
  misc_RNA (1)...(19): siRNA sense strand
aggaaaggauucuugucaa

SEQ ID NO: 1778536 - RNA, 19 nt, Homo sapiens
  misc_RNA (1)...(19): siRNA sense strand
gcuauaaagaacaaggaaa

SEQ ID NO: 1778537 - RNA, 19 nt, Homo sapiens
  misc_RNA (1)...(19): siRNA sense strand
ccagaacgagagaaacuug

SEQ ID NO: 1778538 - RNA, 19 nt, Homo sapiens
  misc_RNA (1)...(19): siRNA sense strand
aaagaacaaggaaaggauu

SEQ ID NO: 1778539 - RNA, 19 nt, Homo sapiens
  misc_RNA (1)...(19): siRNA sense strand
gguggucucaguccaaaga

SEQ ID NO: 1778540 - RNA, 19 nt, Homo sapiens
  misc_RNA (1)...(19): siRNA sense strand
caugugcuaugaggaaugu

SEQ ID NO: 1778541 - RNA, 19 nt, Homo sapiens
  misc_RNA (1)...(19): siRNA sense strand
gugguggucucaguccaaa

SEQ ID NO: 1778542 - RNA, 19 nt, Homo sapiens
  misc_RNA (1)...(19): siRNA sense strand
aaggaaaggauucuuguca

SEQ ID NO: 1778543 - RNA, 19 nt, Homo sapiens
  misc_RNA (1)...(19): siRNA sense strand
ucucaacaguuacaaccau

SEQ ID NO: 1778544 - RNA, 19 nt, Homo sapiens
  misc_RNA (1)...(19): siRNA sense strand
gagcuuuuguccacccuaa

SEQ ID NO: 1778545 - RNA, 19 nt, Homo sapiens
  misc_RNA (1)...(19): siRNA sense strand
gaacgagagaaacuugcau

SEQ ID NO: 1778546 - RNA, 19 nt, Homo sapiens
  misc_RNA (1)...(19): siRNA sense strand
ucaaucuguuuacguccuu

SEQ ID NO: 1778547 - RNA, 19 nt, Homo sapiens
  misc_RNA (1)...(19): siRNA sense strand
cugcaucccucaggagaau

SEQ ID NO: 1778548 - RNA, 19 nt, Homo sapiens
  misc_RNA (1)...(19): siRNA sense strand
cuauaaagaacaaggaaag

SEQ ID NO: 1778549 - RNA, 19 nt, Homo sapiens
  misc_RNA (1)...(19): siRNA sense strand
acaguuacaaccauucgaa

SEQ ID NO: 1778550 - RNA, 19 nt, Homo sapiens
  misc_RNA (1)...(19): siRNA sense strand
agaaggccuugucaucuac

SEQ ID NO: 1778551 - RNA, 19 nt, Homo sapiens
  misc_RNA (1)...(19): siRNA sense strand
cgcuuggccugugaauaua

SEQ ID NO: 1778552 - RNA, 19 nt, Homo sapiens
  misc_RNA (1)...(19): siRNA sense strand
uaaguucucaacaguuaca

SEQ ID NO: 1778553 - RNA, 19 nt, Homo sapiens
  misc_RNA (1)...(19): siRNA sense strand
gcuuggccugugaauauaa

SEQ ID NO: 1778554 - RNA, 19 nt, Homo sapiens
  misc_RNA (1)...(19): siRNA sense strand
uacagaaggccuugucauc

SEQ ID NO: 1778555 - RNA, 19 nt, Homo sapiens
  misc_RNA (1)...(19): siRNA sense strand
gaccaaaggcaggcacauc

SEQ ID NO: 1778556 - RNA, 19 nt, Homo sapiens
  misc_RNA (1)...(19): siRNA sense strand
cucaacaguuacaaccauu

SEQ ID NO: 1778557 - RNA, 19 nt, Homo sapiens
  misc_RNA (1)...(19): siRNA sense strand
uuuccagccguuuccauua

SEQ ID NO: 1778558 - RNA, 19 nt, Homo sapiens
  misc_RNA (1)...(19): siRNA sense strand
gcacucagcuccaugucua

SEQ ID NO: 1778559 - RNA, 19 nt, Homo sapiens
  misc_RNA (1)...(19): siRNA sense strand
gaagacggccugugagaua

SEQ ID NO: 1778560 - RNA, 19 nt, Homo sapiens
  misc_RNA (1)...(19): siRNA sense strand
gcaacucgcuggaucuuug

SEQ ID NO: 1778561 - RNA, 19 nt, Homo sapiens
  misc_RNA (1)...(19): siRNA sense strand
gcaggugucucgucagaaa

SEQ ID NO: 1778562 - RNA, 19 nt, Homo sapiens
  misc_RNA (1)...(19): siRNA sense strand
gcacugcccuucucucaga

SEQ ID NO: 1778563 - RNA, 19 nt, Homo sapiens
  misc_RNA (1)...(19): siRNA sense strand
gcugaagggugaugugaaa

SEQ ID NO: 1778564 - RNA, 19 nt, Homo sapiens
  misc_RNA (1)...(19): siRNA sense strand
ucaaugcccucaaccauga

SEQ ID NO: 1778565 - RNA, 19 nt, Homo sapiens
  misc_RNA (1)...(19): siRNA sense strand
guaccaggaugcucuuuga

SEQ ID NO: 1778566 - RNA, 19 nt, Homo sapiens
  misc_RNA (1)...(19): siRNA sense strand
gggcaacccugaugucuca

SEQ ID NO: 1778567 - RNA, 19 nt, Homo sapiens
  misc_RNA (1)...(19): siRNA sense strand
ggaaggcgauggcagaagu

SEQ ID NO: 1778568 - RNA, 19 nt, Homo sapiens
  misc_RNA (1)...(19): siRNA sense strand
gcaaagagaacaccaacga

SEQ ID NO: 1778569 - RNA, 19 nt, Homo sapiens
  misc_RNA (1)...(19): siRNA sense strand
gggaggagauccaaagcaa

SEQ ID NO: 1778570 - RNA, 19 nt, Homo sapiens
  misc_RNA (1)...(19): siRNA sense strand
gcagagaccacccugaaga

SEQ ID NO: 1778571 - RNA, 19 nt, Homo sapiens
  misc_RNA (1)...(19): siRNA sense strand
caaggcugcuggacauuga

SEQ ID NO: 1778572 - RNA, 19 nt, Homo sapiens
  misc_RNA (1)...(19): siRNA sense strand
acaacuggcucaggacaua

SEQ ID NO: 1778573 - RNA, 19 nt, Homo sapiens
  misc_RNA (1)...(19): siRNA sense strand
gaacacaguccucaugucu

SEQ ID NO: 1778574 - RNA, 19 nt, Homo sapiens
  misc_RNA (1)...(19): siRNA sense strand
ccagaaagguguccaagac

SEQ ID NO: 1778575 - RNA, 19 nt, Homo sapiens
  misc_RNA (1)...(19): siRNA sense strand
gaacuggaggccacuguga

SEQ ID NO: 1778576 - RNA, 19 nt, Homo sapiens
  misc_RNA (1)...(19): siRNA sense strand
ggaaagacagacagacaga

SEQ ID NO: 1778577 - RNA, 19 nt, Homo sapiens
  misc_RNA (1)...(19): siRNA sense strand
ccagggagcucacaacacu

SEQ ID NO: 1778578 - RNA, 19 nt, Homo sapiens
  misc_RNA (1)...(19): siRNA sense strand
cagcccagcuuacaacaug

SEQ ID NO: 1778579 - RNA, 19 nt, Homo sapiens
  misc_RNA (1)...(19): siRNA sense strand
gggcaggugucucgucaga

SEQ ID NO: 1778580 - RNA, 19 nt, Homo sapiens
  misc_RNA (1)...(19): siRNA sense strand
ccaggacggucuucggaaa

SEQ ID NO: 1778581 - RNA, 19 nt, Homo sapiens
  misc_RNA (1)...(19): siRNA sense strand
gagacuggaugccauugga

SEQ ID NO: 1778582 - RNA, 19 nt, Homo sapiens
  misc_RNA (1)...(19): siRNA sense strand
ggauggcagucuugggaaa

SEQ ID NO: 1778583 - RNA, 19 nt, Homo sapiens
  misc_RNA (1)...(19): siRNA sense strand
gggcaucuauccagugaca

SEQ ID NO: 1778584 - RNA, 19 nt, Homo sapiens
  misc_RNA (1)...(19): siRNA sense strand
acacaguccucaugucuuc

SEQ ID NO: 1778585 - RNA, 19 nt, Homo sapiens
  misc_RNA (1)...(19): siRNA sense strand
ggagacaucaagagaguau

SEQ ID NO: 1778586 - RNA, 19 nt, Homo sapiens
  misc_RNA (1)...(19): siRNA sense strand
gaacuucccaggaucaucu

SEQ ID NO: 1778587 - RNA, 19 nt, Homo sapiens
  misc_RNA (1)...(19): siRNA sense strand
guucgagacuugcccaaug

SEQ ID NO: 1778588 - RNA, 19 nt, Homo sapiens
  misc_RNA (1)...(19): siRNA sense strand
gaaagaagaagggaagagu

SEQ ID NO: 1778589 - RNA, 19 nt, Homo sapiens
  misc_RNA (1)...(19): siRNA sense strand
ucuagagacucccagcuuu

SEQ ID NO: 1778590 - RNA, 19 nt, Homo sapiens
  misc_RNA (1)...(19): siRNA sense strand
gcaaagaaaccagaaagag

SEQ ID NO: 1778591 - RNA, 19 nt, Homo sapiens
  misc_RNA (1)...(19): siRNA sense strand
gcagugggaauauugaaga

SEQ ID NO: 1778592 - RNA, 19 nt, Homo sapiens
  misc_RNA (1)...(19): siRNA sense strand
gaaagggauggcagucuug

SEQ ID NO: 1778593 - RNA, 19 nt, Homo sapiens
  misc_RNA (1)...(19): siRNA sense strand
caggugaacuucccaggau

SEQ ID NO: 1778594 - RNA, 19 nt, Homo sapiens
  misc_RNA (1)...(19): siRNA sense strand
caggagacaucaagagagu

SEQ ID NO: 1778595 - RNA, 19 nt, Homo sapiens
  misc_RNA (1)...(19): siRNA sense strand
gaucccaccucaccacagu

SEQ ID NO: 1778596 - RNA, 19 nt, Homo sapiens
  misc_RNA (1)...(19): siRNA sense strand
agaaagggauggcagucuu

SEQ ID NO: 1778597 - RNA, 19 nt, Homo sapiens
  misc_RNA (1)...(19): siRNA sense strand
gagaagaaggaacugauuc

SEQ ID NO: 1778598 - RNA, 19 nt, Homo sapiens
  misc_RNA (1)...(19): siRNA sense strand
ccagagggaugagcuaaag

SEQ ID NO: 1778599 - RNA, 19 nt, Homo sapiens
  misc_RNA (1)...(19): siRNA sense strand
ggaacacaguccucauguc

SEQ ID NO: 1778600 - RNA, 19 nt, Homo sapiens
  misc_RNA (1)...(19): siRNA sense strand
cuagagacucccagcuuua

SEQ ID NO: 1778601 - RNA, 19 nt, Homo sapiens
  misc_RNA (1)...(19): siRNA sense strand
caacauuuaucuccaucca

SEQ ID NO: 1778602 - RNA, 19 nt, Homo sapiens
  misc_RNA (1)...(19): siRNA sense strand
caacgaggugagagagaua

SEQ ID NO: 1778603 - RNA, 19 nt, Homo sapiens
  misc_RNA (1)...(19): siRNA sense strand
gagagcaucauccauguuc

SEQ ID NO: 1778604 - RNA, 19 nt, Homo sapiens
  misc_RNA (1)...(19): siRNA sense strand
ggaacgacagaaagaagaa

SEQ ID NO: 1778605 - RNA, 19 nt, Homo sapiens
  misc_RNA (1)...(19): siRNA sense strand
gaaguggucccuggugaug

SEQ ID NO: 1778606 - RNA, 19 nt, Homo sapiens
  misc_RNA (1)...(19): siRNA sense strand
ccaagugggucaccuacag

SEQ ID NO: 1778607 - RNA, 19 nt, Homo sapiens
  misc_RNA (1)...(19): siRNA sense strand
agacaucaagagaguauuu

SEQ ID NO: 1778608 - RNA, 19 nt, Homo sapiens
  misc_RNA (1)...(19): siRNA sense strand
ugaagaggcugugcacaag

SEQ ID NO: 1778609 - RNA, 19 nt, Homo sapiens
  misc_RNA (1)...(19): siRNA sense strand
gcagauagucggaggugau

SEQ ID NO: 1778610 - RNA, 19 nt, Homo sapiens
  misc_RNA (1)...(19): siRNA sense strand
gcaccagcccaauugcaaa

SEQ ID NO: 1778611 - RNA, 19 nt, Homo sapiens
  misc_RNA (1)...(19): siRNA sense strand
ugagaaccgugacugaaca

SEQ ID NO: 1778612 - RNA, 19 nt, Homo sapiens
  misc_RNA (1)...(19): siRNA sense strand
cccuaaaccugcacaccua

SEQ ID NO: 1778613 - RNA, 19 nt, Homo sapiens
  misc_RNA (1)...(19): siRNA sense strand
ccacagugcccacaagauc

SEQ ID NO: 1778614 - RNA, 19 nt, Homo sapiens
  misc_RNA (1)...(19): siRNA sense strand
gccucuaucucccagcuuu

SEQ ID NO: 1778615 - RNA, 19 nt, Homo sapiens
  misc_RNA (1)...(19): siRNA sense strand
ggcuacagguggauguuug

SEQ ID NO: 1778616 - RNA, 19 nt, Homo sapiens
  misc_RNA (1)...(19): siRNA sense strand
aaacugcagucaagaacca

SEQ ID NO: 1778617 - RNA, 19 nt, Homo sapiens
  misc_RNA (1)...(19): siRNA sense strand
gcaaggcugcuggacauug

SEQ ID NO: 1778618 - RNA, 19 nt, Homo sapiens
  misc_RNA (1)...(19): siRNA sense strand
cagccaagguucccacuac

SEQ ID NO: 1778619 - RNA, 19 nt, Homo sapiens
  misc_RNA (1)...(19): siRNA sense strand
uuggccagcugcauagaua

SEQ ID NO: 1778620 - RNA, 19 nt, Homo sapiens
  misc_RNA (1)...(19): siRNA sense strand
ugcaugcgcuggaucuuug

SEQ ID NO: 1778621 - RNA, 19 nt, Homo sapiens
  misc_RNA (1)...(19): siRNA sense strand
cugacagucugcaaagaaa

SEQ ID NO: 1778622 - RNA, 19 nt, Homo sapiens
  misc_RNA (1)...(19): siRNA sense strand
ccaacgaggugagagagau

SEQ ID NO: 1778623 - RNA, 19 nt, Homo sapiens
  misc_RNA (1)...(19): siRNA sense strand
gcaggaagacagucacucu

SEQ ID NO: 1778624 - RNA, 19 nt, Homo sapiens
  misc_RNA (1)...(19): siRNA sense strand
gcaggaacgacagaaagaa

SEQ ID NO: 1778625 - RNA, 19 nt, Homo sapiens
  misc_RNA (1)...(19): siRNA sense strand
gcagcaggaacgacagaaa

SEQ ID NO: 1778626 - RNA, 19 nt, Homo sapiens
  misc_RNA (1)...(19): siRNA sense strand
ggccaccucccgcaaguuu

SEQ ID NO: 1778627 - RNA, 19 nt, Homo sapiens
  misc_RNA (1)...(19): siRNA sense strand
uaacuagcaaggccucuga

SEQ ID NO: 1778628 - RNA, 19 nt, Homo sapiens
  misc_RNA (1)...(19): siRNA sense strand
ccaggcagcagugggaaua

SEQ ID NO: 1778629 - RNA, 19 nt, Homo sapiens
  misc_RNA (1)...(19): siRNA sense strand
ggugguuguucgagacuug

SEQ ID NO: 1778630 - RNA, 19 nt, Homo sapiens
  misc_RNA (1)...(19): siRNA sense strand
gcagagaagaaggaacuga

SEQ ID NO: 1778631 - RNA, 19 nt, Homo sapiens
  misc_RNA (1)...(19): siRNA sense strand
gcagcagcagcaucuguuu

SEQ ID NO: 1778632 - RNA, 19 nt, Homo sapiens
  misc_RNA (1)...(19): siRNA sense strand
ccacaaggaagccucuaga

SEQ ID NO: 1778633 - RNA, 19 nt, Homo sapiens
  misc_RNA (1)...(19): siRNA sense strand
acacugaggcccagaguca

SEQ ID NO: 1778634 - RNA, 19 nt, Homo sapiens
  misc_RNA (1)...(19): siRNA sense strand
uggcaaggcugcuggacau

SEQ ID NO: 1778635 - RNA, 19 nt, Homo sapiens
  misc_RNA (1)...(19): siRNA sense strand
gcccugaccucuguuagca

SEQ ID NO: 1778636 - RNA, 19 nt, Homo sapiens
  misc_RNA (1)...(19): siRNA sense strand
gagcugaagggugauguga

SEQ ID NO: 1778637 - RNA, 19 nt, Homo sapiens
  misc_RNA (1)...(19): siRNA sense strand
acaaggaagccucuagaga

SEQ ID NO: 1778638 - RNA, 19 nt, Homo sapiens
  misc_RNA (1)...(19): siRNA sense strand
ugcaagcccuggagaagga

SEQ ID NO: 1778639 - RNA, 19 nt, Homo sapiens
  misc_RNA (1)...(19): siRNA sense strand
ugaguggccugcacagucu

SEQ ID NO: 1778640 - RNA, 19 nt, Homo sapiens
  misc_RNA (1)...(19): siRNA sense strand
ugacagggcaagccaagga

SEQ ID NO: 1778641 - RNA, 19 nt, Homo sapiens
  misc_RNA (1)...(19): siRNA sense strand
caacugagagcaucaucca

SEQ ID NO: 1778642 - RNA, 19 nt, Homo sapiens
  misc_RNA (1)...(19): siRNA sense strand
ggaauccuucuccaaguuc

SEQ ID NO: 1778643 - RNA, 19 nt, Homo sapiens
  misc_RNA (1)...(19): siRNA sense strand
uagagacucccagcuuuaa

SEQ ID NO: 1778644 - RNA, 19 nt, Homo sapiens
  misc_RNA (1)...(19): siRNA sense strand
caagucaagaucagaaauc

SEQ ID NO: 1778645 - RNA, 19 nt, Homo sapiens
  misc_RNA (1)...(19): siRNA sense strand
caggagagcagcccaugga

SEQ ID NO: 1778646 - RNA, 19 nt, Homo sapiens
  misc_RNA (1)...(19): siRNA sense strand
caucagcagcggcaagcua

SEQ ID NO: 1778647 - RNA, 19 nt, Homo sapiens
  misc_RNA (1)...(19): siRNA sense strand
gugggaauauugaagacau

SEQ ID NO: 1778648 - RNA, 19 nt, Homo sapiens
  misc_RNA (1)...(19): siRNA sense strand
gcagcagugggaauauuga

SEQ ID NO: 1778649 - RNA, 19 nt, Homo sapiens
  misc_RNA (1)...(19): siRNA sense strand
gggcacccuuauauacgaa

SEQ ID NO: 1778650 - RNA, 19 nt, Homo sapiens
  misc_RNA (1)...(19): siRNA sense strand
cggguucuguccacaaguu

SEQ ID NO: 1778651 - RNA, 19 nt, Homo sapiens
  misc_RNA (1)...(19): siRNA sense strand
agacuugcccaaugaguga

SEQ ID NO: 1778652 - RNA, 19 nt, Homo sapiens
  misc_RNA (1)...(19): siRNA sense strand
gauagucggaggugaugug

SEQ ID NO: 1778653 - RNA, 19 nt, Homo sapiens
  misc_RNA (1)...(19): siRNA sense strand
aaagaguguucuggagcua

SEQ ID NO: 1778654 - RNA, 19 nt, Homo sapiens
  misc_RNA (1)...(19): siRNA sense strand
acccugagcuccgcaagaa

SEQ ID NO: 1778655 - RNA, 19 nt, Homo sapiens
  misc_RNA (1)...(19): siRNA sense strand
gagcagcccauggaagguu

SEQ ID NO: 1778656 - RNA, 19 nt, Homo sapiens
  misc_RNA (1)...(19): siRNA sense strand
ucagaaggagccacgacua

SEQ ID NO: 1778657 - RNA, 19 nt, Homo sapiens
  misc_RNA (1)...(19): siRNA sense strand
ccaccucccgcaaguuuga

SEQ ID NO: 1778658 - RNA, 19 nt, Homo sapiens
  misc_RNA (1)...(19): siRNA sense strand
gcacucagcuccaugucua

SEQ ID NO: 1778659 - RNA, 19 nt, Homo sapiens
  misc_RNA (1)...(19): siRNA sense strand
gaagacggccugugagaua

SEQ ID NO: 1778660 - RNA, 19 nt, Homo sapiens
  misc_RNA (1)...(19): siRNA sense strand
gcaacucgcuggaucuuug

SEQ ID NO: 1778661 - RNA, 19 nt, Homo sapiens
  misc_RNA (1)...(19): siRNA sense strand
gcaggugucucgucagaaa

SEQ ID NO: 1778662 - RNA, 19 nt, Homo sapiens
  misc_RNA (1)...(19): siRNA sense strand
gcacugcccuucucucaga

SEQ ID NO: 1778663 - RNA, 19 nt, Homo sapiens
  misc_RNA (1)...(19): siRNA sense strand
gcugaagggugaugugaaa

SEQ ID NO: 1778664 - RNA, 19 nt, Homo sapiens
  misc_RNA (1)...(19): siRNA sense strand
ucaaugcccucaaccauga

SEQ ID NO: 1778665 - RNA, 19 nt, Homo sapiens
  misc_RNA (1)...(19): siRNA sense strand
guaccaggaugcucuuuga

SEQ ID NO: 1778666 - RNA, 19 nt, Homo sapiens
  misc_RNA (1)...(19): siRNA sense strand
gggcaacccugaugucuca

SEQ ID NO: 1778667 - RNA, 19 nt, Homo sapiens
  misc_RNA (1)...(19): siRNA sense strand
ggaaggcgauggcagaagu

SEQ ID NO: 1778668 - RNA, 19 nt, Homo sapiens
  misc_RNA (1)...(19): siRNA sense strand
gcaaagagaacaccaacga

SEQ ID NO: 1778669 - RNA, 19 nt, Homo sapiens
  misc_RNA (1)...(19): siRNA sense strand
gggaggagauccaaagcaa

SEQ ID NO: 1778670 - RNA, 19 nt, Homo sapiens
  misc_RNA (1)...(19): siRNA sense strand
gcagagaccacccugaaga

SEQ ID NO: 1778671 - RNA, 19 nt, Homo sapiens
  misc_RNA (1)...(19): siRNA sense strand
caaggcugcuggacauuga

SEQ ID NO: 1778672 - RNA, 19 nt, Homo sapiens
  misc_RNA (1)...(19): siRNA sense strand
acaacuggcucaggacaua

SEQ ID NO: 1778673 - RNA, 19 nt, Homo sapiens
  misc_RNA (1)...(19): siRNA sense strand
gaacacaguccucaugucu

SEQ ID NO: 1778674 - RNA, 19 nt, Homo sapiens
  misc_RNA (1)...(19): siRNA sense strand
ccagaaagguguccaagac

SEQ ID NO: 1778675 - RNA, 19 nt, Homo sapiens
  misc_RNA (1)...(19): siRNA sense strand
gaacuggaggccacuguga

SEQ ID NO: 1778676 - RNA, 19 nt, Homo sapiens
  misc_RNA (1)...(19): siRNA sense strand
ggaaagacagacagacaga

SEQ ID NO: 1778677 - RNA, 19 nt, Homo sapiens
  misc_RNA (1)...(19): siRNA sense strand
ccagggagcucacaacacu

SEQ ID NO: 1778678 - RNA, 19 nt, Homo sapiens
  misc_RNA (1)...(19): siRNA sense strand
cagcccagcuuacaacaug

SEQ ID NO: 1778679 - RNA, 19 nt, Homo sapiens
  misc_RNA (1)...(19): siRNA sense strand
gggcaggugucucgucaga

SEQ ID NO: 1778680 - RNA, 19 nt, Homo sapiens
  misc_RNA (1)...(19): siRNA sense strand
ccaggacggucuucggaaa

SEQ ID NO: 1778681 - RNA, 19 nt, Homo sapiens
  misc_RNA (1)...(19): siRNA sense strand
gagacuggaugccauugga

SEQ ID NO: 1778682 - RNA, 19 nt, Homo sapiens
  misc_RNA (1)...(19): siRNA sense strand
ggauggcagucuugggaaa

SEQ ID NO: 1778683 - RNA, 19 nt, Homo sapiens
  misc_RNA (1)...(19): siRNA sense strand
gggcaucuauccagugaca

SEQ ID NO: 1778684 - RNA, 19 nt, Homo sapiens
  misc_RNA (1)...(19): siRNA sense strand
acacaguccucaugucuuc

SEQ ID NO: 1778685 - RNA, 19 nt, Homo sapiens
  misc_RNA (1)...(19): siRNA sense strand
ggagacaucaagagaguau

SEQ ID NO: 1778686 - RNA, 19 nt, Homo sapiens
  misc_RNA (1)...(19): siRNA sense strand
gaacuucccaggaucaucu

SEQ ID NO: 1778687 - RNA, 19 nt, Homo sapiens
  misc_RNA (1)...(19): siRNA sense strand
guucgagacuugcccaaug

SEQ ID NO: 1778688 - RNA, 19 nt, Homo sapiens
  misc_RNA (1)...(19): siRNA sense strand
gaaagaagaagggaagagu

SEQ ID NO: 1778689 - RNA, 19 nt, Homo sapiens
  misc_RNA (1)...(19): siRNA sense strand
ucuagagacucccagcuuu

SEQ ID NO: 1778690 - RNA, 19 nt, Homo sapiens
  misc_RNA (1)...(19): siRNA sense strand
gcaaagaaaccagaaagag

SEQ ID NO: 1778691 - RNA, 19 nt, Homo sapiens
  misc_RNA (1)...(19): siRNA sense strand
gcagugggaauauugaaga

SEQ ID NO: 1778692 - RNA, 19 nt, Homo sapiens
  misc_RNA (1)...(19): siRNA sense strand
gaaagggauggcagucuug

SEQ ID NO: 1778693 - RNA, 19 nt, Homo sapiens
  misc_RNA (1)...(19): siRNA sense strand
caggugaacuucccaggau

SEQ ID NO: 1778694 - RNA, 19 nt, Homo sapiens
  misc_RNA (1)...(19): siRNA sense strand
caggagacaucaagagagu

SEQ ID NO: 1778695 - RNA, 19 nt, Homo sapiens
  misc_RNA (1)...(19): siRNA sense strand
gaucccaccucaccacagu

SEQ ID NO: 1778696 - RNA, 19 nt, Homo sapiens
  misc_RNA (1)...(19): siRNA sense strand
agaaagggauggcagucuu

SEQ ID NO: 1778697 - RNA, 19 nt, Homo sapiens
  misc_RNA (1)...(19): siRNA sense strand
gagaagaaggaacugauuc

SEQ ID NO: 1778698 - RNA, 19 nt, Homo sapiens
  misc_RNA (1)...(19): siRNA sense strand
ccagagggaugagcuaaag

SEQ ID NO: 1778699 - RNA, 19 nt, Homo sapiens
  misc_RNA (1)...(19): siRNA sense strand
ggaacacaguccucauguc

SEQ ID NO: 1778700 - RNA, 19 nt, Homo sapiens
  misc_RNA (1)...(19): siRNA sense strand
cuagagacucccagcuuua

SEQ ID NO: 1778701 - RNA, 19 nt, Homo sapiens
  misc_RNA (1)...(19): siRNA sense strand
caacauuuaucuccaucca

SEQ ID NO: 1778702 - RNA, 19 nt, Homo sapiens
  misc_RNA (1)...(19): siRNA sense strand
caacgaggugagagagaua

SEQ ID NO: 1778703 - RNA, 19 nt, Homo sapiens
  misc_RNA (1)...(19): siRNA sense strand
gagagcaucauccauguuc

SEQ ID NO: 1778704 - RNA, 19 nt, Homo sapiens
  misc_RNA (1)...(19): siRNA sense strand
ggaacgacagaaagaagaa

SEQ ID NO: 1778705 - RNA, 19 nt, Homo sapiens
  misc_RNA (1)...(19): siRNA sense strand
gaaguggucccuggugaug

SEQ ID NO: 1778706 - RNA, 19 nt, Homo sapiens
  misc_RNA (1)...(19): siRNA sense strand
ccaagugggucaccuacag

SEQ ID NO: 1778707 - RNA, 19 nt, Homo sapiens
  misc_RNA (1)...(19): siRNA sense strand
agacaucaagagaguauuu

SEQ ID NO: 1778708 - RNA, 19 nt, Homo sapiens
  misc_RNA (1)...(19): siRNA sense strand
ugaagaggcugugcacaag

SEQ ID NO: 1778709 - RNA, 19 nt, Homo sapiens
  misc_RNA (1)...(19): siRNA sense strand
gcagauagucggaggugau

SEQ ID NO: 1778710 - RNA, 19 nt, Homo sapiens
  misc_RNA (1)...(19): siRNA sense strand
gcaccagcccaauugcaaa

SEQ ID NO: 1778711 - RNA, 19 nt, Homo sapiens
  misc_RNA (1)...(19): siRNA sense strand
ugagaaccgugacugaaca

SEQ ID NO: 1778712 - RNA, 19 nt, Homo sapiens
  misc_RNA (1)...(19): siRNA sense strand
cccuaaaccugcacaccua

SEQ ID NO: 1778713 - RNA, 19 nt, Homo sapiens
  misc_RNA (1)...(19): siRNA sense strand
ccacagugcccacaagauc

SEQ ID NO: 1778714 - RNA, 19 nt, Homo sapiens
  misc_RNA (1)...(19): siRNA sense strand
gccucuaucucccagcuuu

SEQ ID NO: 1778715 - RNA, 19 nt, Homo sapiens
  misc_RNA (1)...(19): siRNA sense strand
ggcuacagguggauguuug

SEQ ID NO: 1778716 - RNA, 19 nt, Homo sapiens
  misc_RNA (1)...(19): siRNA sense strand
aaacugcagucaagaacca

SEQ ID NO: 1778717 - RNA, 19 nt, Homo sapiens
  misc_RNA (1)...(19): siRNA sense strand
gcaaggcugcuggacauug

SEQ ID NO: 1778718 - RNA, 19 nt, Homo sapiens
  misc_RNA (1)...(19): siRNA sense strand
cagccaagguucccacuac

SEQ ID NO: 1778719 - RNA, 19 nt, Homo sapiens
  misc_RNA (1)...(19): siRNA sense strand
uuggccagcugcauagaua

SEQ ID NO: 1778720 - RNA, 19 nt, Homo sapiens
  misc_RNA (1)...(19): siRNA sense strand
ugcaugcgcuggaucuuug

SEQ ID NO: 1778721 - RNA, 19 nt, Homo sapiens
  misc_RNA (1)...(19): siRNA sense strand
cugacagucugcaaagaaa

SEQ ID NO: 1778722 - RNA, 19 nt, Homo sapiens
  misc_RNA (1)...(19): siRNA sense strand
ccaacgaggugagagagau

SEQ ID NO: 1778723 - RNA, 19 nt, Homo sapiens
  misc_RNA (1)...(19): siRNA sense strand
gcaggaagacagucacucu

SEQ ID NO: 1778724 - RNA, 19 nt, Homo sapiens
  misc_RNA (1)...(19): siRNA sense strand
gcaggaacgacagaaagaa

SEQ ID NO: 1778725 - RNA, 19 nt, Homo sapiens
  misc_RNA (1)...(19): siRNA sense strand
gcagcaggaacgacagaaa

SEQ ID NO: 1778726 - RNA, 19 nt, Homo sapiens
  misc_RNA (1)...(19): siRNA sense strand
ggccaccucccgcaaguuu

SEQ ID NO: 1778727 - RNA, 19 nt, Homo sapiens
  misc_RNA (1)...(19): siRNA sense strand
uaacuagcaaggccucuga

SEQ ID NO: 1778728 - RNA, 19 nt, Homo sapiens
  misc_RNA (1)...(19): siRNA sense strand
ccaggcagcagugggaaua

SEQ ID NO: 1778729 - RNA, 19 nt, Homo sapiens
  misc_RNA (1)...(19): siRNA sense strand
ggugguuguucgagacuug

SEQ ID NO: 1778730 - RNA, 19 nt, Homo sapiens
  misc_RNA (1)...(19): siRNA sense strand
gcagagaagaaggaacuga

SEQ ID NO: 1778731 - RNA, 19 nt, Homo sapiens
  misc_RNA (1)...(19): siRNA sense strand
gcagcagcagcaucuguuu

SEQ ID NO: 1778732 - RNA, 19 nt, Homo sapiens
  misc_RNA (1)...(19): siRNA sense strand
ccacaaggaagccucuaga

SEQ ID NO: 1778733 - RNA, 19 nt, Homo sapiens
  misc_RNA (1)...(19): siRNA sense strand
acacugaggcccagaguca

SEQ ID NO: 1778734 - RNA, 19 nt, Homo sapiens
  misc_RNA (1)...(19): siRNA sense strand
uggcaaggcugcuggacau

SEQ ID NO: 1778735 - RNA, 19 nt, Homo sapiens
  misc_RNA (1)...(19): siRNA sense strand
gcccugaccucuguuagca

SEQ ID NO: 1778736 - RNA, 19 nt, Homo sapiens
  misc_RNA (1)...(19): siRNA sense strand
gagcugaagggugauguga

SEQ ID NO: 1778737 - RNA, 19 nt, Homo sapiens
  misc_RNA (1)...(19): siRNA sense strand
acaaggaagccucuagaga

SEQ ID NO: 1778738 - RNA, 19 nt, Homo sapiens
  misc_RNA (1)...(19): siRNA sense strand
ugcaagcccuggagaagga

SEQ ID NO: 1778739 - RNA, 19 nt, Homo sapiens
  misc_RNA (1)...(19): siRNA sense strand
ugaguggccugcacagucu

SEQ ID NO: 1778740 - RNA, 19 nt, Homo sapiens
  misc_RNA (1)...(19): siRNA sense strand
ugacagggcaagccaagga

SEQ ID NO: 1778741 - RNA, 19 nt, Homo sapiens
  misc_RNA (1)...(19): siRNA sense strand
caacugagagcaucaucca

SEQ ID NO: 1778742 - RNA, 19 nt, Homo sapiens
  misc_RNA (1)...(19): siRNA sense strand
ggaauccuucuccaaguuc

SEQ ID NO: 1778743 - RNA, 19 nt, Homo sapiens
  misc_RNA (1)...(19): siRNA sense strand
uagagacucccagcuuuaa

SEQ ID NO: 1778744 - RNA, 19 nt, Homo sapiens
  misc_RNA (1)...(19): siRNA sense strand
caagucaagaucagaaauc

SEQ ID NO: 1778745 - RNA, 19 nt, Homo sapiens
  misc_RNA (1)...(19): siRNA sense strand
caggagagcagcccaugga

SEQ ID NO: 1778746 - RNA, 19 nt, Homo sapiens
  misc_RNA (1)...(19): siRNA sense strand
caucagcagcggcaagcua

SEQ ID NO: 1778747 - RNA, 19 nt, Homo sapiens
  misc_RNA (1)...(19): siRNA sense strand
gugggaauauugaagacau

SEQ ID NO: 1778748 - RNA, 19 nt, Homo sapiens
  misc_RNA (1)...(19): siRNA sense strand
gcagcagugggaauauuga

SEQ ID NO: 1778749 - RNA, 19 nt, Homo sapiens
  misc_RNA (1)...(19): siRNA sense strand
gggcacccuuauauacgaa

SEQ ID NO: 1778750 - RNA, 19 nt, Homo sapiens
  misc_RNA (1)...(19): siRNA sense strand
cggguucuguccacaaguu

SEQ ID NO: 1778751 - RNA, 19 nt, Homo sapiens
  misc_RNA (1)...(19): siRNA sense strand
agacuugcccaaugaguga

SEQ ID NO: 1778752 - RNA, 19 nt, Homo sapiens
  misc_RNA (1)...(19): siRNA sense strand
gauagucggaggugaugug

SEQ ID NO: 1778753 - RNA, 19 nt, Homo sapiens
  misc_RNA (1)...(19): siRNA sense strand
aaagaguguucuggagcua

SEQ ID NO: 1778754 - RNA, 19 nt, Homo sapiens
  misc_RNA (1)...(19): siRNA sense strand
acccugagcuccgcaagaa

SEQ ID NO: 1778755 - RNA, 19 nt, Homo sapiens
  misc_RNA (1)...(19): siRNA sense strand
gagcagcccauggaagguu

SEQ ID NO: 1778756 - RNA, 19 nt, Homo sapiens
  misc_RNA (1)...(19): siRNA sense strand
ucagaaggagccacgacua

SEQ ID NO: 1778757 - RNA, 19 nt, Homo sapiens
  misc_RNA (1)...(19): siRNA sense strand
ccaccucccgcaaguuuga

SEQ ID NO: 1778758 - RNA, 19 nt, Homo sapiens
  misc_RNA (1)...(19): siRNA sense strand
gggaagagcuuguccuuua

SEQ ID NO: 1778759 - RNA, 19 nt, Homo sapiens
  misc_RNA (1)...(19): siRNA sense strand
ggaagaagcuggcauauuc

SEQ ID NO: 1778760 - RNA, 19 nt, Homo sapiens
  misc_RNA (1)...(19): siRNA sense strand
ggaagagcuuguccuuuaa

SEQ ID NO: 1778761 - RNA, 19 nt, Homo sapiens
  misc_RNA (1)...(19): siRNA sense strand
gcagauaugcuccucauug

SEQ ID NO: 1778762 - RNA, 19 nt, Homo sapiens
  misc_RNA (1)...(19): siRNA sense strand
gggccaagauccacuguga

SEQ ID NO: 1778763 - RNA, 19 nt, Homo sapiens
  misc_RNA (1)...(19): siRNA sense strand
ugaaugcccucacccagaa

SEQ ID NO: 1778764 - RNA, 19 nt, Homo sapiens
  misc_RNA (1)...(19): siRNA sense strand
gacuuaaaccugagagaua

SEQ ID NO: 1778765 - RNA, 19 nt, Homo sapiens
  misc_RNA (1)...(19): siRNA sense strand
cauaaaagcugaucguuuc

SEQ ID NO: 1778766 - RNA, 19 nt, Homo sapiens
  misc_RNA (1)...(19): siRNA sense strand
ggaguacaauggcgagauc

SEQ ID NO: 1778767 - RNA, 19 nt, Homo sapiens
  misc_RNA (1)...(19): siRNA sense strand
ugaaugccguggacaauag

SEQ ID NO: 1778768 - RNA, 19 nt, Homo sapiens
  misc_RNA (1)...(19): siRNA sense strand
gaacacugcccuucaucug

SEQ ID NO: 1778769 - RNA, 19 nt, Homo sapiens
  misc_RNA (1)...(19): siRNA sense strand
ggcaggacauagcagauau

SEQ ID NO: 1778770 - RNA, 19 nt, Homo sapiens
  misc_RNA (1)...(19): siRNA sense strand
gcugaucguuucuacagau

SEQ ID NO: 1778771 - RNA, 19 nt, Homo sapiens
  misc_RNA (1)...(19): siRNA sense strand
acuuaaaccugagagauaa

SEQ ID NO: 1778772 - RNA, 19 nt, Homo sapiens
  misc_RNA (1)...(19): siRNA sense strand
uggaggaccuggaggaugu

SEQ ID NO: 1778773 - RNA, 19 nt, Homo sapiens
  misc_RNA (1)...(19): siRNA sense strand
gccaagauccacugugaga

SEQ ID NO: 1778774 - RNA, 19 nt, Homo sapiens
  misc_RNA (1)...(19): siRNA sense strand
ggacaggcaccaggagcua

SEQ ID NO: 1778775 - RNA, 19 nt, Homo sapiens
  misc_RNA (1)...(19): siRNA sense strand
gcaggaccaucggcaggaa

SEQ ID NO: 1778776 - RNA, 19 nt, Homo sapiens
  misc_RNA (1)...(19): siRNA sense strand
uaagcugccuucacuaugc

SEQ ID NO: 1778777 - RNA, 19 nt, Homo sapiens
  misc_RNA (1)...(19): siRNA sense strand
gcauauuccugggaguuca

SEQ ID NO: 1778778 - RNA, 19 nt, Homo sapiens
  misc_RNA (1)...(19): siRNA sense strand
gugaaugccguggacaaua

SEQ ID NO: 1778779 - RNA, 19 nt, Homo sapiens
  misc_RNA (1)...(19): siRNA sense strand
cagauaugcuccucauugc

SEQ ID NO: 1778780 - RNA, 19 nt, Homo sapiens
  misc_RNA (1)...(19): siRNA sense strand
gugcuggcguucauaaugg

SEQ ID NO: 1778781 - RNA, 19 nt, Homo sapiens
  misc_RNA (1)...(19): siRNA sense strand
ugagagauaagcagggaaa

SEQ ID NO: 1778782 - RNA, 19 nt, Homo sapiens
  misc_RNA (1)...(19): siRNA sense strand
gaagagcuuguccuuuaag

SEQ ID NO: 1778783 - RNA, 19 nt, Homo sapiens
  misc_RNA (1)...(19): siRNA sense strand
ugguggacaugaucauaaa

SEQ ID NO: 1778784 - RNA, 19 nt, Homo sapiens
  misc_RNA (1)...(19): siRNA sense strand
gaucccacccugacugugu

SEQ ID NO: 1778785 - RNA, 19 nt, Homo sapiens
  misc_RNA (1)...(19): siRNA sense strand
aaccuaagcugccuucacu

SEQ ID NO: 1778786 - RNA, 19 nt, Homo sapiens
  misc_RNA (1)...(19): siRNA sense strand
gcuggaugcucuggacuuc

SEQ ID NO: 1778787 - RNA, 19 nt, Homo sapiens
  misc_RNA (1)...(19): siRNA sense strand
uuacgaauccuccagaucu

SEQ ID NO: 1778788 - RNA, 19 nt, Homo sapiens
  misc_RNA (1)...(19): siRNA sense strand
guacaauggcgagaucuca

SEQ ID NO: 1778789 - RNA, 19 nt, Homo sapiens
  misc_RNA (1)...(19): siRNA sense strand
ccuaagcugccuucacuau

SEQ ID NO: 1778790 - RNA, 19 nt, Homo sapiens
  misc_RNA (1)...(19): siRNA sense strand
ggaacacugcccuucaucu

SEQ ID NO: 1778791 - RNA, 19 nt, Homo sapiens
  misc_RNA (1)...(19): siRNA sense strand
gaaugcgcuucuccugucu

SEQ ID NO: 1778792 - RNA, 19 nt, Homo sapiens
  misc_RNA (1)...(19): siRNA sense strand
gcagcgacuuguggacauc

SEQ ID NO: 1778793 - RNA, 19 nt, Homo sapiens
  misc_RNA (1)...(19): siRNA sense strand
uggcaggacauagcagaua

SEQ ID NO: 1778794 - RNA, 19 nt, Homo sapiens
  misc_RNA (1)...(19): siRNA sense strand
gcugggagcaccgugaaug

SEQ ID NO: 1778795 - RNA, 19 nt, Homo sapiens
  misc_RNA (1)...(19): siRNA sense strand
ugccucagccucccgagua

SEQ ID NO: 1778796 - RNA, 19 nt, Homo sapiens
  misc_RNA (1)...(19): siRNA sense strand
uggaagaagcuggcauauu

SEQ ID NO: 1778797 - RNA, 19 nt, Homo sapiens
  misc_RNA (1)...(19): siRNA sense strand
ggagcagaaugcggaaggu

SEQ ID NO: 1778798 - RNA, 19 nt, Homo sapiens
  misc_RNA (1)...(19): siRNA sense strand
cuggcuggcuggaguacaa

SEQ ID NO: 1778799 - RNA, 19 nt, Homo sapiens
  misc_RNA (1)...(19): siRNA sense strand
uacgaauccuccagaucuu

SEQ ID NO: 1778800 - RNA, 19 nt, Homo sapiens
  misc_RNA (1)...(19): siRNA sense strand
cuccagaucuugguaaacu

SEQ ID NO: 1778801 - RNA, 19 nt, Homo sapiens
  misc_RNA (1)...(19): siRNA sense strand
ugacuuaaaccugagagau

SEQ ID NO: 1778802 - RNA, 19 nt, Homo sapiens
  misc_RNA (1)...(19): siRNA sense strand
ccagaucuugguaaacuca

SEQ ID NO: 1778803 - RNA, 19 nt, Homo sapiens
  misc_RNA (1)...(19): siRNA sense strand
ggucugacugcccugcauu

SEQ ID NO: 1778804 - RNA, 19 nt, Homo sapiens
  misc_RNA (1)...(19): siRNA sense strand
ggagaaagcguggaucaaa

SEQ ID NO: 1778805 - RNA, 19 nt, Homo sapiens
  misc_RNA (1)...(19): siRNA sense strand
gaaacuccgugcagcaagu

SEQ ID NO: 1778806 - RNA, 19 nt, Homo sapiens
  misc_RNA (1)...(19): siRNA sense strand
gacuagcaguugacacaaa

SEQ ID NO: 1778807 - RNA, 19 nt, Homo sapiens
  misc_RNA (1)...(19): siRNA sense strand
gcaguugacacaaacagaa

SEQ ID NO: 1778808 - RNA, 19 nt, Homo sapiens
  misc_RNA (1)...(19): siRNA sense strand
aagaaaccgucgacucuga

SEQ ID NO: 1778809 - RNA, 19 nt, Homo sapiens
  misc_RNA (1)...(19): siRNA sense strand
gagaaagcguggaucaaaa

SEQ ID NO: 1778810 - RNA, 19 nt, Homo sapiens
  misc_RNA (1)...(19): siRNA sense strand
cgaaagagccaacggaaac

SEQ ID NO: 1778811 - RNA, 19 nt, Homo sapiens
  misc_RNA (1)...(19): siRNA sense strand
ccaagaaaccgucgacucu

SEQ ID NO: 1778812 - RNA, 19 nt, Homo sapiens
  misc_RNA (1)...(19): siRNA sense strand
cagcacgacuagcaguuga

SEQ ID NO: 1778813 - RNA, 19 nt, Homo sapiens
  misc_RNA (1)...(19): siRNA sense strand
gcaacucaguggagagaac

SEQ ID NO: 1778814 - RNA, 19 nt, Homo sapiens
  misc_RNA (1)...(19): siRNA sense strand
gcgaaagagccaacggaaa

SEQ ID NO: 1778815 - RNA, 19 nt, Homo sapiens
  misc_RNA (1)...(19): siRNA sense strand
gagaaacuccgugcagcaa

SEQ ID NO: 1778816 - RNA, 19 nt, Homo sapiens
  misc_RNA (1)...(19): siRNA sense strand
gaucaaaaccagcaacuca

SEQ ID NO: 1778817 - RNA, 19 nt, Homo sapiens
  misc_RNA (1)...(19): siRNA sense strand
gaaaccgucgacucugaga

SEQ ID NO: 1778818 - RNA, 19 nt, Homo sapiens
  misc_RNA (1)...(19): siRNA sense strand
gcaccgagacgaggaaacu

SEQ ID NO: 1778819 - RNA, 19 nt, Homo sapiens
  misc_RNA (1)...(19): siRNA sense strand
caguugacacaaacagaaa

SEQ ID NO: 1778820 - RNA, 19 nt, Homo sapiens
  misc_RNA (1)...(19): siRNA sense strand
cagcaacucaguggagaga

SEQ ID NO: 1778821 - RNA, 19 nt, Homo sapiens
  misc_RNA (1)...(19): siRNA sense strand
aaccgucgacucugagaaa

SEQ ID NO: 1778822 - RNA, 19 nt, Homo sapiens
  misc_RNA (1)...(19): siRNA sense strand
gggagaaagcguggaucaa

SEQ ID NO: 1778823 - RNA, 19 nt, Homo sapiens
  misc_RNA (1)...(19): siRNA sense strand
cgaaucaccuacucuuuga

SEQ ID NO: 1778824 - RNA, 19 nt, Homo sapiens
  misc_RNA (1)...(19): siRNA sense strand
gagcagcaauuuccgaauc

SEQ ID NO: 1778825 - RNA, 19 nt, Homo sapiens
  misc_RNA (1)...(19): siRNA sense strand
gaagaggggugauggcuuu

SEQ ID NO: 1778826 - RNA, 19 nt, Homo sapiens
  misc_RNA (1)...(19): siRNA sense strand
gaccuacuguggccucuga

SEQ ID NO: 1778827 - RNA, 19 nt, Homo sapiens
  misc_RNA (1)...(19): siRNA sense strand
ggagacugguccauuccaa

SEQ ID NO: 1778828 - RNA, 19 nt, Homo sapiens
  misc_RNA (1)...(19): siRNA sense strand
gacaagaggguccugauuc

SEQ ID NO: 1778829 - RNA, 19 nt, Homo sapiens
  misc_RNA (1)...(19): siRNA sense strand
gaacuucgcgcuggacaag

SEQ ID NO: 1778830 - RNA, 19 nt, Homo sapiens
  misc_RNA (1)...(19): siRNA sense strand
gccaucuccuuacagaauu

SEQ ID NO: 1778831 - RNA, 19 nt, Homo sapiens
  misc_RNA (1)...(19): siRNA sense strand
cuccggagcugccuuuguu

SEQ ID NO: 1778832 - RNA, 19 nt, Homo sapiens
  misc_RNA (1)...(19): siRNA sense strand
gcaauuuccgaaucaccua

SEQ ID NO: 1778833 - RNA, 19 nt, Homo sapiens
  misc_RNA (1)...(19): siRNA sense strand
ggccaucuccuuacagaau

SEQ ID NO: 1778834 - RNA, 19 nt, Homo sapiens
  misc_RNA (1)...(19): siRNA sense strand
gcuauagccuucgguacau

SEQ ID NO: 1778835 - RNA, 19 nt, Homo sapiens
  misc_RNA (1)...(19): siRNA sense strand
ccgaaucaccuacucuuug

SEQ ID NO: 1778836 - RNA, 19 nt, Homo sapiens
  misc_RNA (1)...(19): siRNA sense strand
gagccuggagcagcaauuu

SEQ ID NO: 1778837 - RNA, 19 nt, Homo sapiens
  misc_RNA (1)...(19): siRNA sense strand
uguggccucugaagcuaua

SEQ ID NO: 1778838 - RNA, 19 nt, Homo sapiens
  misc_RNA (1)...(19): siRNA sense strand
acaagaggguccugauucg

SEQ ID NO: 1778839 - RNA, 19 nt, Homo sapiens
  misc_RNA (1)...(19): siRNA sense strand
cagcccagauucccacucu

SEQ ID NO: 1778840 - RNA, 19 nt, Homo sapiens
  misc_RNA (1)...(19): siRNA sense strand
gugauggcuuugugaacga

SEQ ID NO: 1778841 - RNA, 19 nt, Homo sapiens
  misc_RNA (1)...(19): siRNA sense strand
gaguuugagguguuuguga

SEQ ID NO: 1778842 - RNA, 19 nt, Homo sapiens
  misc_RNA (1)...(19): siRNA sense strand
ucgguacauucuacugaaa

SEQ ID NO: 1778843 - RNA, 19 nt, Homo sapiens
  misc_RNA (1)...(19): siRNA sense strand
aguuugagguguuugugaa

SEQ ID NO: 1778844 - RNA, 19 nt, Homo sapiens
  misc_RNA (1)...(19): siRNA sense strand
agacugguccauuccaaga

SEQ ID NO: 1778845 - RNA, 19 nt, Homo sapiens
  misc_RNA (1)...(19): siRNA sense strand
ccaucuccuuacagaauug

SEQ ID NO: 1778846 - RNA, 19 nt, Homo sapiens
  misc_RNA (1)...(19): siRNA sense strand
ucgaugaggaaaucaagaa

SEQ ID NO: 1778847 - RNA, 19 nt, Homo sapiens
  misc_RNA (1)...(19): siRNA sense strand
cguuaucgaugaggaaauc

SEQ ID NO: 1778848 - RNA, 19 nt, Homo sapiens
  misc_RNA (1)...(19): siRNA sense strand
agaauuguacggaaaccuu

SEQ ID NO: 1778849 - RNA, 19 nt, Homo sapiens
  misc_RNA (1)...(19): siRNA sense strand
cgucggccaucuccuuaca

SEQ ID NO: 1778850 - RNA, 19 nt, Homo sapiens
  misc_RNA (1)...(19): siRNA sense strand
acgggagacugguccauuc

SEQ ID NO: 1778851 - RNA, 19 nt, Homo sapiens
  misc_RNA (1)...(19): siRNA sense strand
cgaugaggaaaucaagaaa

SEQ ID NO: 1778852 - RNA, 19 nt, Homo sapiens
  misc_RNA (1)...(19): siRNA sense strand
ucggccaucuccuuacaga

SEQ ID NO: 1778853 - RNA, 19 nt, Homo sapiens
  misc_RNA (1)...(19): siRNA sense strand
gagcguuaucgaugaggaa

SEQ ID NO: 1778854 - RNA, 19 nt, Homo sapiens
  misc_RNA (1)...(19): siRNA sense strand
cagaaaauugugagcguua

SEQ ID NO: 1778855 - RNA, 19 nt, Homo sapiens
  misc_RNA (1)...(19): siRNA sense strand
cuauagccuucgguacauu

SEQ ID NO: 1778856 - RNA, 19 nt, Homo sapiens
  misc_RNA (1)...(19): siRNA sense strand
gcaagacgcugaggagguu

SEQ ID NO: 1778857 - RNA, 19 nt, Homo sapiens
  misc_RNA (1)...(19): siRNA sense strand
gcgacgaccucucugauga

SEQ ID NO: 1778858 - RNA, 19 nt, Homo sapiens
  misc_RNA (1)...(19): siRNA sense strand
gcgaaggaguggaguuuga

SEQ ID NO: 1778859 - RNA, 19 nt, Homo sapiens
  misc_RNA (1)...(19): siRNA sense strand
gauuacaacugccgcaaga

SEQ ID NO: 1778860 - RNA, 19 nt, Homo sapiens
  misc_RNA (1)...(19): siRNA sense strand
gcacguggcgcaacuacaa

SEQ ID NO: 1778861 - RNA, 19 nt, Homo sapiens
  misc_RNA (1)...(19): siRNA sense strand
ccaccacccuggauuacaa

SEQ ID NO: 1778862 - RNA, 19 nt, Homo sapiens
  misc_RNA (1)...(19): siRNA sense strand
cgaccucucugaugaaugc

SEQ ID NO: 1778863 - RNA, 19 nt, Homo sapiens
  misc_RNA (1)...(19): siRNA sense strand
gcugugcgcugaggcuuug

SEQ ID NO: 1778864 - RNA, 19 nt, Homo sapiens
  misc_RNA (1)...(19): siRNA sense strand
gccagacggucaccugugu

SEQ ID NO: 1778865 - RNA, 19 nt, Homo sapiens
  misc_RNA (1)...(19): siRNA sense strand
caccaaaggaaguaaggua

SEQ ID NO: 1778866 - RNA, 19 nt, Homo sapiens
  misc_RNA (1)...(19): siRNA sense strand
acaccaccacccuggauua

SEQ ID NO: 1778867 - RNA, 19 nt, Homo sapiens
  misc_RNA (1)...(19): siRNA sense strand
gcagcgacgaccucucuga

SEQ ID NO: 1778868 - RNA, 19 nt, Homo sapiens
  misc_RNA (1)...(19): siRNA sense strand
gacgaccucucugaugaau

SEQ ID NO: 1778869 - RNA, 19 nt, Homo sapiens
  misc_RNA (1)...(19): siRNA sense strand
cccacccgcuuccucagua

SEQ ID NO: 1778870 - RNA, 19 nt, Homo sapiens
  misc_RNA (1)...(19): siRNA sense strand
caaaggaaguaagguacac

SEQ ID NO: 1778871 - RNA, 19 nt, Homo sapiens
  misc_RNA (1)...(19): siRNA sense strand
ucaguaccaccaucgugua

SEQ ID NO: 1778872 - RNA, 19 nt, Homo sapiens
  misc_RNA (1)...(19): siRNA sense strand
ccaaaggaaguaagguaca

SEQ ID NO: 1778873 - RNA, 19 nt, Homo sapiens
  misc_RNA (1)...(19): siRNA sense strand
cgacgaccucucugaugaa

SEQ ID NO: 1778874 - RNA, 19 nt, Homo sapiens
  misc_RNA (1)...(19): siRNA sense strand
gcaccugucuucccugauu

SEQ ID NO: 1778875 - RNA, 19 nt, Homo sapiens
  misc_RNA (1)...(19): siRNA sense strand
gggaaggccuuuaauacuu

SEQ ID NO: 1778876 - RNA, 19 nt, Homo sapiens
  misc_RNA (1)...(19): siRNA sense strand
caaagugcccagcucauua

SEQ ID NO: 1778877 - RNA, 19 nt, Homo sapiens
  misc_RNA (1)...(19): siRNA sense strand
gagagaaacccuauacaug

SEQ ID NO: 1778878 - RNA, 19 nt, Homo sapiens
  misc_RNA (1)...(19): siRNA sense strand
gaucaccagcgaauucaua

SEQ ID NO: 1778879 - RNA, 19 nt, Homo sapiens
  misc_RNA (1)...(19): siRNA sense strand
gcccauucuucucuuguua

SEQ ID NO: 1778880 - RNA, 19 nt, Homo sapiens
  misc_RNA (1)...(19): siRNA sense strand
gagaaaaguuccaugaaug

SEQ ID NO: 1778881 - RNA, 19 nt, Homo sapiens
  misc_RNA (1)...(19): siRNA sense strand
ucucagcucuuauagauca

SEQ ID NO: 1778882 - RNA, 19 nt, Homo sapiens
  misc_RNA (1)...(19): siRNA sense strand
gauugaacauuggagaauu

SEQ ID NO: 1778883 - RNA, 19 nt, Homo sapiens
  misc_RNA (1)...(19): siRNA sense strand
ggagagaaacccuauacau

SEQ ID NO: 1778884 - RNA, 19 nt, Homo sapiens
  misc_RNA (1)...(19): siRNA sense strand
gcaaggaauuuggaaaguc

SEQ ID NO: 1778885 - RNA, 19 nt, Homo sapiens
  misc_RNA (1)...(19): siRNA sense strand
gaacauuggagaauucaca

SEQ ID NO: 1778886 - RNA, 19 nt, Homo sapiens
  misc_RNA (1)...(19): siRNA sense strand
ugucucagcucuuauagau

SEQ ID NO: 1778887 - RNA, 19 nt, Homo sapiens
  misc_RNA (1)...(19): siRNA sense strand
gagaaaagccguaugaaug

SEQ ID NO: 1778888 - RNA, 19 nt, Homo sapiens
  misc_RNA (1)...(19): siRNA sense strand
gcgcacucuucccuuguua

SEQ ID NO: 1778889 - RNA, 19 nt, Homo sapiens
  misc_RNA (1)...(19): siRNA sense strand
uguagaauguguaauggaa

SEQ ID NO: 1778890 - RNA, 19 nt, Homo sapiens
  misc_RNA (1)...(19): siRNA sense strand
gaaaagccguaugaaugua

SEQ ID NO: 1778891 - RNA, 19 nt, Homo sapiens
  misc_RNA (1)...(19): siRNA sense strand
gaacacacaguggagagaa

SEQ ID NO: 1778892 - RNA, 19 nt, Homo sapiens
  misc_RNA (1)...(19): siRNA sense strand
cagcaucagacuacacaua

SEQ ID NO: 1778893 - RNA, 19 nt, Homo sapiens
  misc_RNA (1)...(19): siRNA sense strand
gcgaauucauaguggagaa

SEQ ID NO: 1778894 - RNA, 19 nt, Homo sapiens
  misc_RNA (1)...(19): siRNA sense strand
guaguaaguguaagaaauc

SEQ ID NO: 1778895 - RNA, 19 nt, Homo sapiens
  misc_RNA (1)...(19): siRNA sense strand
acucgacacuguagaaugu

SEQ ID NO: 1778896 - RNA, 19 nt, Homo sapiens
  misc_RNA (1)...(19): siRNA sense strand
gugcccagcucauuagaca

SEQ ID NO: 1778897 - RNA, 19 nt, Homo sapiens
  misc_RNA (1)...(19): siRNA sense strand
aauacuuccuccacacuuu

SEQ ID NO: 1778898 - RNA, 19 nt, Homo sapiens
  misc_RNA (1)...(19): siRNA sense strand
gagaacacacaguggagaa

SEQ ID NO: 1778899 - RNA, 19 nt, Homo sapiens
  misc_RNA (1)...(19): siRNA sense strand
ucacacagcaucagacuac

SEQ ID NO: 1778900 - RNA, 19 nt, Homo sapiens
  misc_RNA (1)...(19): siRNA sense strand
gaauguaaggaguguggaa

SEQ ID NO: 1778901 - RNA, 19 nt, Homo sapiens
  misc_RNA (1)...(19): siRNA sense strand
acucuucccuuguuacuca

SEQ ID NO: 1778902 - RNA, 19 nt, Homo sapiens
  misc_RNA (1)...(19): siRNA sense strand
ucaaagugcccagcucauu

SEQ ID NO: 1778903 - RNA, 19 nt, Homo sapiens
  misc_RNA (1)...(19): siRNA sense strand
ugucuucccugauugaaca

SEQ ID NO: 1778904 - RNA, 19 nt, Homo sapiens
  misc_RNA (1)...(19): siRNA sense strand
cugcacaggagaauucaua

SEQ ID NO: 1778905 - RNA, 19 nt, Homo sapiens
  misc_RNA (1)...(19): siRNA sense strand
ucaccuuacucgacacugu

SEQ ID NO: 1778906 - RNA, 19 nt, Homo sapiens
  misc_RNA (1)...(19): siRNA sense strand
gcucauuagacaucagaaa

SEQ ID NO: 1778907 - RNA, 19 nt, Homo sapiens
  misc_RNA (1)...(19): siRNA sense strand
ccguauaaaugcaaggaau

SEQ ID NO: 1778908 - RNA, 19 nt, Homo sapiens
  misc_RNA (1)...(19): siRNA sense strand
agccgugucucagcucuua

SEQ ID NO: 1778909 - RNA, 19 nt, Homo sapiens
  misc_RNA (1)...(19): siRNA sense strand
auucuucucuuguuacuca

SEQ ID NO: 1778910 - RNA, 19 nt, Homo sapiens
  misc_RNA (1)...(19): siRNA sense strand
gagaauucacacuggagaa

SEQ ID NO: 1778911 - RNA, 19 nt, Homo sapiens
  misc_RNA (1)...(19): siRNA sense strand
ugugggaaggccuuuaaua

SEQ ID NO: 1778912 - RNA, 19 nt, Homo sapiens
  misc_RNA (1)...(19): siRNA sense strand
ggagaaaagccguaugaau

SEQ ID NO: 1778913 - RNA, 19 nt, Homo sapiens
  misc_RNA (1)...(19): siRNA sense strand
guagaauguguaauggaaa

SEQ ID NO: 1778914 - RNA, 19 nt, Homo sapiens
  misc_RNA (1)...(19): siRNA sense strand
gaaugcaaggaauuuggaa

SEQ ID NO: 1778915 - RNA, 19 nt, Homo sapiens
  misc_RNA (1)...(19): siRNA sense strand
guaugaauguaaggagugu

SEQ ID NO: 1778916 - RNA, 19 nt, Homo sapiens
  misc_RNA (1)...(19): siRNA sense strand
gaauuuggaaaguccuuca

SEQ ID NO: 1778917 - RNA, 19 nt, Homo sapiens
  misc_RNA (1)...(19): siRNA sense strand
gugggaaggccuuuaauac

SEQ ID NO: 1778918 - RNA, 19 nt, Homo sapiens
  misc_RNA (1)...(19): siRNA sense strand
agacuacacauacgagaga

SEQ ID NO: 1778919 - RNA, 19 nt, Homo sapiens
  misc_RNA (1)...(19): siRNA sense strand
guauaaaugcaaggaaugu

SEQ ID NO: 1778920 - RNA, 19 nt, Homo sapiens
  misc_RNA (1)...(19): siRNA sense strand
agagaaaaguuccaugaau

SEQ ID NO: 1778921 - RNA, 19 nt, Homo sapiens
  misc_RNA (1)...(19): siRNA sense strand
cuucucuuguuacucauaa

SEQ ID NO: 1778922 - RNA, 19 nt, Homo sapiens
  misc_RNA (1)...(19): siRNA sense strand
gaaugcagugaauguggaa

SEQ ID NO: 1778923 - RNA, 19 nt, Homo sapiens
  misc_RNA (1)...(19): siRNA sense strand
gaguguaguaaguguaaga

SEQ ID NO: 1778924 - RNA, 19 nt, Homo sapiens
  misc_RNA (1)...(19): siRNA sense strand
gaacacacaguggagaaaa

SEQ ID NO: 1778925 - RNA, 19 nt, Homo sapiens
  misc_RNA (1)...(19): siRNA sense strand
ccacacuuugucaacauaa

SEQ ID NO: 1778926 - RNA, 19 nt, Homo sapiens
  misc_RNA (1)...(19): siRNA sense strand
ccuuguuacucauaagaga

SEQ ID NO: 1778927 - RNA, 19 nt, Homo sapiens
  misc_RNA (1)...(19): siRNA sense strand
caccagcgaauucauagug

SEQ ID NO: 1778928 - RNA, 19 nt, Homo sapiens
  misc_RNA (1)...(19): siRNA sense strand
uccacacuuugucaacaua

SEQ ID NO: 1778929 - RNA, 19 nt, Homo sapiens
  misc_RNA (1)...(19): siRNA sense strand
ccaugaaugcagugaaugu

SEQ ID NO: 1778930 - RNA, 19 nt, Homo sapiens
  misc_RNA (1)...(19): siRNA sense strand
agaauucacacuggagaaa

SEQ ID NO: 1778931 - RNA, 19 nt, Homo sapiens
  misc_RNA (1)...(19): siRNA sense strand
gcccagcucauuagacauc

SEQ ID NO: 1778932 - RNA, 19 nt, Homo sapiens
  misc_RNA (1)...(19): siRNA sense strand
caucagacuacacauacga

SEQ ID NO: 1778933 - RNA, 19 nt, Homo sapiens
  misc_RNA (1)...(19): siRNA sense strand
caaugcgggaaguccuuua

SEQ ID NO: 1778934 - RNA, 19 nt, Homo sapiens
  misc_RNA (1)...(19): siRNA sense strand
ccuaugaaugcaaggaauu

SEQ ID NO: 1778935 - RNA, 19 nt, Homo sapiens
  misc_RNA (1)...(19): siRNA sense strand
gcacaggagaauucauacu

SEQ ID NO: 1778936 - RNA, 19 nt, Homo sapiens
  misc_RNA (1)...(19): siRNA sense strand
cacaggagaauucauacug

SEQ ID NO: 1778937 - RNA, 19 nt, Homo sapiens
  misc_RNA (1)...(19): siRNA sense strand
auagaucaccagcgaauuc

SEQ ID NO: 1778938 - RNA, 19 nt, Homo sapiens
  misc_RNA (1)...(19): siRNA sense strand
cugcagcucucaccuuacu

SEQ ID NO: 1778939 - RNA, 19 nt, Homo sapiens
  misc_RNA (1)...(19): siRNA sense strand
aacacacaguggagagaaa

SEQ ID NO: 1778940 - RNA, 19 nt, Homo sapiens
  misc_RNA (1)...(19): siRNA sense strand
aaagugcccagcucauuag

SEQ ID NO: 1778941 - RNA, 19 nt, Homo sapiens
  misc_RNA (1)...(19): siRNA sense strand
caccuuacucgacacugua

SEQ ID NO: 1778942 - RNA, 19 nt, Homo sapiens
  misc_RNA (1)...(19): siRNA sense strand
ugaaugcaaggaauuugga

SEQ ID NO: 1778943 - RNA, 19 nt, Homo sapiens
  misc_RNA (1)...(19): siRNA sense strand
cuaugaaugcaaggaauuu

SEQ ID NO: 1778944 - RNA, 19 nt, Homo sapiens
  misc_RNA (1)...(19): siRNA sense strand
gacuacacauacgagagaa

SEQ ID NO: 1778945 - RNA, 19 nt, Homo sapiens
  misc_RNA (1)...(19): siRNA sense strand
cacuguagaauguguaaug

SEQ ID NO: 1778946 - RNA, 19 nt, Homo sapiens
  misc_RNA (1)...(19): siRNA sense strand
ccugugggaaggccuuuaa

SEQ ID NO: 1778947 - RNA, 19 nt, Homo sapiens
  misc_RNA (1)...(19): siRNA sense strand
gcacucuucccuuguuacu

SEQ ID NO: 1778948 - RNA, 19 nt, Homo sapiens
  misc_RNA (1)...(19): siRNA sense strand
uuccaugaaugcagugaau

SEQ ID NO: 1778949 - RNA, 19 nt, Homo sapiens
  misc_RNA (1)...(19): siRNA sense strand
gagagaaaaguuccaugaa

SEQ ID NO: 1778950 - RNA, 19 nt, Homo sapiens
  misc_RNA (1)...(19): siRNA sense strand
auugaacauuggagaauuc

SEQ ID NO: 1778951 - RNA, 19 nt, Homo sapiens
  misc_RNA (1)...(19): siRNA sense strand
cuaugaguguaguaagugu

SEQ ID NO: 1778952 - RNA, 19 nt, Homo sapiens
  misc_RNA (1)...(19): siRNA sense strand
ccacuucuaugccaaaucu

SEQ ID NO: 1778953 - RNA, 19 nt, Homo sapiens
  misc_RNA (1)...(19): siRNA sense strand
gaaccguggucugcuggaa

SEQ ID NO: 1778954 - RNA, 19 nt, Homo sapiens
  misc_RNA (1)...(19): siRNA sense strand
ggaucaaggccacguguug

SEQ ID NO: 1778955 - RNA, 19 nt, Homo sapiens
  misc_RNA (1)...(19): siRNA sense strand
gaucaaggccacguguugu

SEQ ID NO: 1778956 - RNA, 19 nt, Homo sapiens
  misc_RNA (1)...(19): siRNA sense strand
ggacacaccucacuacaaa

SEQ ID NO: 1778957 - RNA, 19 nt, Homo sapiens
  misc_RNA (1)...(19): siRNA sense strand
aaacagggcugaagaggaa

SEQ ID NO: 1778958 - RNA, 19 nt, Homo sapiens
  misc_RNA (1)...(19): siRNA sense strand
ccaauaaccugcugauaga

SEQ ID NO: 1778959 - RNA, 19 nt, Homo sapiens
  misc_RNA (1)...(19): siRNA sense strand
ggacuuugcugaggaguug

SEQ ID NO: 1778960 - RNA, 19 nt, Homo sapiens
  misc_RNA (1)...(19): siRNA sense strand
ggaggaggauggagaagug

SEQ ID NO: 1778961 - RNA, 19 nt, Homo sapiens
  misc_RNA (1)...(19): siRNA sense strand
gagggaagauggcugaauc

SEQ ID NO: 1778962 - RNA, 19 nt, Homo sapiens
  misc_RNA (1)...(19): siRNA sense strand
ggaacgauaucccugagau

SEQ ID NO: 1778963 - RNA, 19 nt, Homo sapiens
  misc_RNA (1)...(19): siRNA sense strand
gggagaaccugcucaaguc

SEQ ID NO: 1778964 - RNA, 19 nt, Homo sapiens
  misc_RNA (1)...(19): siRNA sense strand
gaccgcguccucucuauua

SEQ ID NO: 1778965 - RNA, 19 nt, Homo sapiens
  misc_RNA (1)...(19): siRNA sense strand
gaaccucucugagcugauc

SEQ ID NO: 1778966 - RNA, 19 nt, Homo sapiens
  misc_RNA (1)...(19): siRNA sense strand
ugacuaagcugaccaaccu

SEQ ID NO: 1778967 - RNA, 19 nt, Homo sapiens
  misc_RNA (1)...(19): siRNA sense strand
ggacgacgagggcauauuc

SEQ ID NO: 1778968 - RNA, 19 nt, Homo sapiens
  misc_RNA (1)...(19): siRNA sense strand
gcaaggacacaccucacua

SEQ ID NO: 1778969 - RNA, 19 nt, Homo sapiens
  misc_RNA (1)...(19): siRNA sense strand
aagcagcuauccauccuaa

SEQ ID NO: 1778970 - RNA, 19 nt, Homo sapiens
  misc_RNA (1)...(19): siRNA sense strand
ggagauccgucugccaaga

SEQ ID NO: 1778971 - RNA, 19 nt, Homo sapiens
  misc_RNA (1)...(19): siRNA sense strand
gcacugaggaggaggacaa

SEQ ID NO: 1778972 - RNA, 19 nt, Homo sapiens
  misc_RNA (1)...(19): siRNA sense strand
gccaauaaccugcugauag

SEQ ID NO: 1778973 - RNA, 19 nt, Homo sapiens
  misc_RNA (1)...(19): siRNA sense strand
ggaacagccuggagagcau

SEQ ID NO: 1778974 - RNA, 19 nt, Homo sapiens
  misc_RNA (1)...(19): siRNA sense strand
ccagcgagcucaaggugau

SEQ ID NO: 1778975 - RNA, 19 nt, Homo sapiens
  misc_RNA (1)...(19): siRNA sense strand
ugaagacucucgcccaucu

SEQ ID NO: 1778976 - RNA, 19 nt, Homo sapiens
  misc_RNA (1)...(19): siRNA sense strand
ggaggaagacgccgaagag

SEQ ID NO: 1778977 - RNA, 19 nt, Homo sapiens
  misc_RNA (1)...(19): siRNA sense strand
ggaggaagccagaaaacua

SEQ ID NO: 1778978 - RNA, 19 nt, Homo sapiens
  misc_RNA (1)...(19): siRNA sense strand
cagcgucccugucauuucu

SEQ ID NO: 1778979 - RNA, 19 nt, Homo sapiens
  misc_RNA (1)...(19): siRNA sense strand
ccagaaaacuacagcagaa

SEQ ID NO: 1778980 - RNA, 19 nt, Homo sapiens
  misc_RNA (1)...(19): siRNA sense strand
ggaaccgccugcagagucu

SEQ ID NO: 1778981 - RNA, 19 nt, Homo sapiens
  misc_RNA (1)...(19): siRNA sense strand
gcagcuauccauccuaaag

SEQ ID NO: 1778982 - RNA, 19 nt, Homo sapiens
  misc_RNA (1)...(19): siRNA sense strand
gcaggaggaggauggagaa

SEQ ID NO: 1778983 - RNA, 19 nt, Homo sapiens
  misc_RNA (1)...(19): siRNA sense strand
gcaccaagaagcagucagu

SEQ ID NO: 1778984 - RNA, 19 nt, Homo sapiens
  misc_RNA (1)...(19): siRNA sense strand
agaaguggcucuggugcuu

SEQ ID NO: 1778985 - RNA, 19 nt, Homo sapiens
  misc_RNA (1)...(19): siRNA sense strand
ucacccaccucaaucucaa

SEQ ID NO: 1778986 - RNA, 19 nt, Homo sapiens
  misc_RNA (1)...(19): siRNA sense strand
ugacugaggccaggcauga

SEQ ID NO: 1778987 - RNA, 19 nt, Homo sapiens
  misc_RNA (1)...(19): siRNA sense strand
gaagaugcaggaggaggaa

SEQ ID NO: 1778988 - RNA, 19 nt, Homo sapiens
  misc_RNA (1)...(19): siRNA sense strand
gagcucaaggugaugaaga

SEQ ID NO: 1778989 - RNA, 19 nt, Homo sapiens
  misc_RNA (1)...(19): siRNA sense strand
ggaagaggaggaggaggaa

SEQ ID NO: 1778990 - RNA, 19 nt, Homo sapiens
  misc_RNA (1)...(19): siRNA sense strand
cgagguggccaacuucaug

SEQ ID NO: 1778991 - RNA, 19 nt, Homo sapiens
  misc_RNA (1)...(19): siRNA sense strand
ggccugggcaucagcauug

SEQ ID NO: 1778992 - RNA, 19 nt, Homo sapiens
  misc_RNA (1)...(19): siRNA sense strand
cguuugaccaggccaauaa

SEQ ID NO: 1778993 - RNA, 19 nt, Homo sapiens
  misc_RNA (1)...(19): siRNA sense strand
ggcuggugcugcucacuga

SEQ ID NO: 1778994 - RNA, 19 nt, Homo sapiens
  misc_RNA (1)...(19): siRNA sense strand
gaacgauaucccugagauc

SEQ ID NO: 1778995 - RNA, 19 nt, Homo sapiens
  misc_RNA (1)...(19): siRNA sense strand
gacgagggcauauucaucu

SEQ ID NO: 1778996 - RNA, 19 nt, Homo sapiens
  misc_RNA (1)...(19): siRNA sense strand
ggaguugaggucccuggaa

SEQ ID NO: 1778997 - RNA, 19 nt, Homo sapiens
  misc_RNA (1)...(19): siRNA sense strand
ccagcccucugccacauuc

SEQ ID NO: 1778998 - RNA, 19 nt, Homo sapiens
  misc_RNA (1)...(19): siRNA sense strand
gggaggcaacgaucuggaa

SEQ ID NO: 1778999 - RNA, 19 nt, Homo sapiens
  misc_RNA (1)...(19): siRNA sense strand
caccaucgcccugcuguug

SEQ ID NO: 1779000 - RNA, 19 nt, Homo sapiens
  misc_RNA (1)...(19): siRNA sense strand
gcuauccauccuaaaggua

SEQ ID NO: 1779001 - RNA, 19 nt, Homo sapiens
  misc_RNA (1)...(19): siRNA sense strand
gaagcagcuauccauccua

SEQ ID NO: 1779002 - RNA, 19 nt, Homo sapiens
  misc_RNA (1)...(19): siRNA sense strand
cugcaaggcucuggagauc

SEQ ID NO: 1779003 - RNA, 19 nt, Homo sapiens
  misc_RNA (1)...(19): siRNA sense strand
gggagcggcagaaguacuu

SEQ ID NO: 1779004 - RNA, 19 nt, Homo sapiens
  misc_RNA (1)...(19): siRNA sense strand
gacgagggcaucuucaucu

SEQ ID NO: 1779005 - RNA, 19 nt, Homo sapiens
  misc_RNA (1)...(19): siRNA sense strand
ggaugccacgcaccaagaa

SEQ ID NO: 1779006 - RNA, 19 nt, Homo sapiens
  misc_RNA (1)...(19): siRNA sense strand
gaccgcauccuggcaguga

SEQ ID NO: 1779007 - RNA, 19 nt, Homo sapiens
  misc_RNA (1)...(19): siRNA sense strand
gacgugucccggaacgaua

SEQ ID NO: 1779008 - RNA, 19 nt, Homo sapiens
  misc_RNA (1)...(19): siRNA sense strand
gggaggaagacgccgaaga

SEQ ID NO: 1779009 - RNA, 19 nt, Homo sapiens
  misc_RNA (1)...(19): siRNA sense strand
gcugacgaccugcggaaga

SEQ ID NO: 1779010 - RNA, 19 nt, Homo sapiens
  misc_RNA (1)...(19): siRNA sense strand
cgcguccucucuauuaaug

SEQ ID NO: 1779011 - RNA, 19 nt, Homo sapiens
  misc_RNA (1)...(19): siRNA sense strand
gcgaccgcguccucucuau

SEQ ID NO: 1779012 - RNA, 19 nt, Homo sapiens
  misc_RNA (1)...(19): siRNA sense strand
uggcucaccuggcccugaa

SEQ ID NO: 1779013 - RNA, 19 nt, Homo sapiens
  misc_RNA (1)...(19): siRNA sense strand
ugaagcagcuauccauccu

SEQ ID NO: 1779014 - RNA, 19 nt, Homo sapiens
  misc_RNA (1)...(19): siRNA sense strand
gggaugccacgcaccaaga

SEQ ID NO: 1779015 - RNA, 19 nt, Homo sapiens
  misc_RNA (1)...(19): siRNA sense strand
cguccucucuauuaaugga

SEQ ID NO: 1779016 - RNA, 19 nt, Homo sapiens
  misc_RNA (1)...(19): siRNA sense strand
cgacgagggcauauucauc

SEQ ID NO: 1779017 - RNA, 19 nt, Homo sapiens
  misc_RNA (1)...(19): siRNA sense strand
gaagaggaggaggaggaaa

SEQ ID NO: 1779018 - RNA, 19 nt, Homo sapiens
  misc_RNA (1)...(19): siRNA sense strand
caaggacacaccucacuac

SEQ ID NO: 1779019 - RNA, 19 nt, Homo sapiens
  misc_RNA (1)...(19): siRNA sense strand
aggcaacgaucuggaagug

SEQ ID NO: 1779020 - RNA, 19 nt, Homo sapiens
  misc_RNA (1)...(19): siRNA sense strand
gagaacgcggucaccauca

SEQ ID NO: 1779021 - RNA, 19 nt, Homo sapiens
  misc_RNA (1)...(19): siRNA sense strand
uccuaaagguagaccagaa

SEQ ID NO: 1779022 - RNA, 19 nt, Homo sapiens
  misc_RNA (1)...(19): siRNA sense strand
uccgggagcggcagaagua

SEQ ID NO: 1779023 - RNA, 19 nt, Homo sapiens
  misc_RNA (1)...(19): siRNA sense strand
ggagggaagauggcugaau

SEQ ID NO: 1779024 - RNA, 19 nt, Homo sapiens
  misc_RNA (1)...(19): siRNA sense strand
ccaucgcccugcuguugga

SEQ ID NO: 1779025 - RNA, 19 nt, Homo sapiens
  misc_RNA (1)...(19): siRNA sense strand
cgggagaaccugcucaagu

SEQ ID NO: 1779026 - RNA, 19 nt, Homo sapiens
  misc_RNA (1)...(19): siRNA sense strand
caucuucgucucccgcauu

SEQ ID NO: 1779027 - RNA, 19 nt, Homo sapiens
  misc_RNA (1)...(19): siRNA sense strand
ggaggaggaggaggaggaa

SEQ ID NO: 1779028 - RNA, 19 nt, Homo sapiens
  misc_RNA (1)...(19): siRNA sense strand
gcugugggcccugaagaug

SEQ ID NO: 1779029 - RNA, 19 nt, Homo sapiens
  misc_RNA (1)...(19): siRNA sense strand
aggaggaacaggaggauga

SEQ ID NO: 1779030 - RNA, 19 nt, Homo sapiens
  misc_RNA (1)...(19): siRNA sense strand
gcagaagagagcgcagaug

SEQ ID NO: 1779031 - RNA, 19 nt, Homo sapiens
  misc_RNA (1)...(19): siRNA sense strand
ggccaauaaccugcugaua

SEQ ID NO: 1779032 - RNA, 19 nt, Homo sapiens
  misc_RNA (1)...(19): siRNA sense strand
cggcaucggucagcugaag

SEQ ID NO: 1779033 - RNA, 19 nt, Homo sapiens
  misc_RNA (1)...(19): siRNA sense strand
caccuggcccugaaugaug

SEQ ID NO: 1779034 - RNA, 19 nt, Homo sapiens
  misc_RNA (1)...(19): siRNA sense strand
ugucauuucuggucaagcu

SEQ ID NO: 1779035 - RNA, 19 nt, Homo sapiens
  misc_RNA (1)...(19): siRNA sense strand
ugaggacgcugaggaagcu

SEQ ID NO: 1779036 - RNA, 19 nt, Homo sapiens
  misc_RNA (1)...(19): siRNA sense strand
cccuguggcuggcagagaa

SEQ ID NO: 1779037 - RNA, 19 nt, Homo sapiens
  misc_RNA (1)...(19): siRNA sense strand
aggaagaggccagcacuga

SEQ ID NO: 1779038 - RNA, 19 nt, Homo sapiens
  misc_RNA (1)...(19): siRNA sense strand
ugugggcccugaagaugug

SEQ ID NO: 1779039 - RNA, 19 nt, Homo sapiens
  misc_RNA (1)...(19): siRNA sense strand
ggagggcagccaggaugaa

SEQ ID NO: 1779040 - RNA, 19 nt, Homo sapiens
  misc_RNA (1)...(19): siRNA sense strand
gcaucuucaucuccaaggu

SEQ ID NO: 1779041 - RNA, 19 nt, Homo sapiens
  misc_RNA (1)...(19): siRNA sense strand
cggagagcaucaaguucug

SEQ ID NO: 1779042 - RNA, 19 nt, Homo sapiens
  misc_RNA (1)...(19): siRNA sense strand
ucacggagaaccugcugau

SEQ ID NO: 1779043 - RNA, 19 nt, Homo sapiens
  misc_RNA (1)...(19): siRNA sense strand
gagcggcagaaguacuuug

SEQ ID NO: 1779044 - RNA, 19 nt, Homo sapiens
  misc_RNA (1)...(19): siRNA sense strand
cgaccgcguccucucuauu

SEQ ID NO: 1779045 - RNA, 19 nt, Homo sapiens
  misc_RNA (1)...(19): siRNA sense strand
agucuggccugagugaaga

SEQ ID NO: 1779046 - RNA, 19 nt, Homo sapiens
  misc_RNA (1)...(19): siRNA sense strand
ggacacaccucacuacaaa

SEQ ID NO: 1779047 - RNA, 19 nt, Homo sapiens
  misc_RNA (1)...(19): siRNA sense strand
aaacagggcugaagaggaa

SEQ ID NO: 1779048 - RNA, 19 nt, Homo sapiens
  misc_RNA (1)...(19): siRNA sense strand
ccaauaaccugcugauaga

SEQ ID NO: 1779049 - RNA, 19 nt, Homo sapiens
  misc_RNA (1)...(19): siRNA sense strand
ggacuuugcugaggaguug

SEQ ID NO: 1779050 - RNA, 19 nt, Homo sapiens
  misc_RNA (1)...(19): siRNA sense strand
ggaggaggauggagaagug

SEQ ID NO: 1779051 - RNA, 19 nt, Homo sapiens
  misc_RNA (1)...(19): siRNA sense strand
gagggaagauggcugaauc

SEQ ID NO: 1779052 - RNA, 19 nt, Homo sapiens
  misc_RNA (1)...(19): siRNA sense strand
ggaacgauaucccugagau

SEQ ID NO: 1779053 - RNA, 19 nt, Homo sapiens
  misc_RNA (1)...(19): siRNA sense strand
gggagaaccugcucaaguc

SEQ ID NO: 1779054 - RNA, 19 nt, Homo sapiens
  misc_RNA (1)...(19): siRNA sense strand
gaccgcguccucucuauua

SEQ ID NO: 1779055 - RNA, 19 nt, Homo sapiens
  misc_RNA (1)...(19): siRNA sense strand
gaaccucucugagcugauc

SEQ ID NO: 1779056 - RNA, 19 nt, Homo sapiens
  misc_RNA (1)...(19): siRNA sense strand
ugacuaagcugaccaaccu

SEQ ID NO: 1779057 - RNA, 19 nt, Homo sapiens
  misc_RNA (1)...(19): siRNA sense strand
ggacgacgagggcauauuc

SEQ ID NO: 1779058 - RNA, 19 nt, Homo sapiens
  misc_RNA (1)...(19): siRNA sense strand
gcaaggacacaccucacua

SEQ ID NO: 1779059 - RNA, 19 nt, Homo sapiens
  misc_RNA (1)...(19): siRNA sense strand
aagcagcuauccauccuaa

SEQ ID NO: 1779060 - RNA, 19 nt, Homo sapiens
  misc_RNA (1)...(19): siRNA sense strand
ggagauccgucugccaaga

SEQ ID NO: 1779061 - RNA, 19 nt, Homo sapiens
  misc_RNA (1)...(19): siRNA sense strand
gcacugaggaggaggacaa

SEQ ID NO: 1779062 - RNA, 19 nt, Homo sapiens
  misc_RNA (1)...(19): siRNA sense strand
gccaauaaccugcugauag

SEQ ID NO: 1779063 - RNA, 19 nt, Homo sapiens
  misc_RNA (1)...(19): siRNA sense strand
ggaacagccuggagagcau

SEQ ID NO: 1779064 - RNA, 19 nt, Homo sapiens
  misc_RNA (1)...(19): siRNA sense strand
ccagcgagcucaaggugau

SEQ ID NO: 1779065 - RNA, 19 nt, Homo sapiens
  misc_RNA (1)...(19): siRNA sense strand
ugaagacucucgcccaucu

SEQ ID NO: 1779066 - RNA, 19 nt, Homo sapiens
  misc_RNA (1)...(19): siRNA sense strand
ggaggaagacgccgaagag

SEQ ID NO: 1779067 - RNA, 19 nt, Homo sapiens
  misc_RNA (1)...(19): siRNA sense strand
ggaggaagccagaaaacua

SEQ ID NO: 1779068 - RNA, 19 nt, Homo sapiens
  misc_RNA (1)...(19): siRNA sense strand
cagcgucccugucauuucu

SEQ ID NO: 1779069 - RNA, 19 nt, Homo sapiens
  misc_RNA (1)...(19): siRNA sense strand
ccagaaaacuacagcagaa

SEQ ID NO: 1779070 - RNA, 19 nt, Homo sapiens
  misc_RNA (1)...(19): siRNA sense strand
ggaaccgccugcagagucu

SEQ ID NO: 1779071 - RNA, 19 nt, Homo sapiens
  misc_RNA (1)...(19): siRNA sense strand
gcagcuauccauccuaaag

SEQ ID NO: 1779072 - RNA, 19 nt, Homo sapiens
  misc_RNA (1)...(19): siRNA sense strand
gcaggaggaggauggagaa

SEQ ID NO: 1779073 - RNA, 19 nt, Homo sapiens
  misc_RNA (1)...(19): siRNA sense strand
gcaccaagaagcagucagu

SEQ ID NO: 1779074 - RNA, 19 nt, Homo sapiens
  misc_RNA (1)...(19): siRNA sense strand
agaaguggcucuggugcuu

SEQ ID NO: 1779075 - RNA, 19 nt, Homo sapiens
  misc_RNA (1)...(19): siRNA sense strand
ucacccaccucaaucucaa

SEQ ID NO: 1779076 - RNA, 19 nt, Homo sapiens
  misc_RNA (1)...(19): siRNA sense strand
ugacugaggccaggcauga

SEQ ID NO: 1779077 - RNA, 19 nt, Homo sapiens
  misc_RNA (1)...(19): siRNA sense strand
gaagaugcaggaggaggaa

SEQ ID NO: 1779078 - RNA, 19 nt, Homo sapiens
  misc_RNA (1)...(19): siRNA sense strand
gagcucaaggugaugaaga

SEQ ID NO: 1779079 - RNA, 19 nt, Homo sapiens
  misc_RNA (1)...(19): siRNA sense strand
ggaagaggaggaggaggaa

SEQ ID NO: 1779080 - RNA, 19 nt, Homo sapiens
  misc_RNA (1)...(19): siRNA sense strand
cgagguggccaacuucaug

SEQ ID NO: 1779081 - RNA, 19 nt, Homo sapiens
  misc_RNA (1)...(19): siRNA sense strand
ggccugggcaucagcauug

SEQ ID NO: 1779082 - RNA, 19 nt, Homo sapiens
  misc_RNA (1)...(19): siRNA sense strand
cguuugaccaggccaauaa

SEQ ID NO: 1779083 - RNA, 19 nt, Homo sapiens
  misc_RNA (1)...(19): siRNA sense strand
ggcuggugcugcucacuga

SEQ ID NO: 1779084 - RNA, 19 nt, Homo sapiens
  misc_RNA (1)...(19): siRNA sense strand
gaacgauaucccugagauc

SEQ ID NO: 1779085 - RNA, 19 nt, Homo sapiens
  misc_RNA (1)...(19): siRNA sense strand
gacgagggcauauucaucu

SEQ ID NO: 1779086 - RNA, 19 nt, Homo sapiens
  misc_RNA (1)...(19): siRNA sense strand
ggaguugaggucccuggaa

SEQ ID NO: 1779087 - RNA, 19 nt, Homo sapiens
  misc_RNA (1)...(19): siRNA sense strand
ccagcccucugccacauuc

SEQ ID NO: 1779088 - RNA, 19 nt, Homo sapiens
  misc_RNA (1)...(19): siRNA sense strand
gggaggcaacgaucuggaa

SEQ ID NO: 1779089 - RNA, 19 nt, Homo sapiens
  misc_RNA (1)...(19): siRNA sense strand
caccaucgcccugcuguug

SEQ ID NO: 1779090 - RNA, 19 nt, Homo sapiens
  misc_RNA (1)...(19): siRNA sense strand
gcuauccauccuaaaggua

SEQ ID NO: 1779091 - RNA, 19 nt, Homo sapiens
  misc_RNA (1)...(19): siRNA sense strand
gaagcagcuauccauccua

SEQ ID NO: 1779092 - RNA, 19 nt, Homo sapiens
  misc_RNA (1)...(19): siRNA sense strand
cugcaaggcucuggagauc

SEQ ID NO: 1779093 - RNA, 19 nt, Homo sapiens
  misc_RNA (1)...(19): siRNA sense strand
gggagcggcagaaguacuu

SEQ ID NO: 1779094 - RNA, 19 nt, Homo sapiens
  misc_RNA (1)...(19): siRNA sense strand
gacgagggcaucuucaucu

SEQ ID NO: 1779095 - RNA, 19 nt, Homo sapiens
  misc_RNA (1)...(19): siRNA sense strand
ggaugccacgcaccaagaa

SEQ ID NO: 1779096 - RNA, 19 nt, Homo sapiens
  misc_RNA (1)...(19): siRNA sense strand
gaccgcauccuggcaguga

SEQ ID NO: 1779097 - RNA, 19 nt, Homo sapiens
  misc_RNA (1)...(19): siRNA sense strand
gacgugucccggaacgaua

SEQ ID NO: 1779098 - RNA, 19 nt, Homo sapiens
  misc_RNA (1)...(19): siRNA sense strand
gggaggaagacgccgaaga

SEQ ID NO: 1779099 - RNA, 19 nt, Homo sapiens
  misc_RNA (1)...(19): siRNA sense strand
gcugacgaccugcggaaga

SEQ ID NO: 1779100 - RNA, 19 nt, Homo sapiens
  misc_RNA (1)...(19): siRNA sense strand
cgcguccucucuauuaaug

SEQ ID NO: 1779101 - RNA, 19 nt, Homo sapiens
  misc_RNA (1)...(19): siRNA sense strand
gcgaccgcguccucucuau

SEQ ID NO: 1779102 - RNA, 19 nt, Homo sapiens
  misc_RNA (1)...(19): siRNA sense strand
uggcucaccuggcccugaa

SEQ ID NO: 1779103 - RNA, 19 nt, Homo sapiens
  misc_RNA (1)...(19): siRNA sense strand
ugaagcagcuauccauccu

SEQ ID NO: 1779104 - RNA, 19 nt, Homo sapiens
  misc_RNA (1)...(19): siRNA sense strand
gggaugccacgcaccaaga

SEQ ID NO: 1779105 - RNA, 19 nt, Homo sapiens
  misc_RNA (1)...(19): siRNA sense strand
cguccucucuauuaaugga

SEQ ID NO: 1779106 - RNA, 19 nt, Homo sapiens
  misc_RNA (1)...(19): siRNA sense strand
cgacgagggcauauucauc

SEQ ID NO: 1779107 - RNA, 19 nt, Homo sapiens
  misc_RNA (1)...(19): siRNA sense strand
gaagaggaggaggaggaaa

SEQ ID NO: 1779108 - RNA, 19 nt, Homo sapiens
  misc_RNA (1)...(19): siRNA sense strand
caaggacacaccucacuac

SEQ ID NO: 1779109 - RNA, 19 nt, Homo sapiens
  misc_RNA (1)...(19): siRNA sense strand
aggcaacgaucuggaagug

SEQ ID NO: 1779110 - RNA, 19 nt, Homo sapiens
  misc_RNA (1)...(19): siRNA sense strand
gagaacgcggucaccauca

SEQ ID NO: 1779111 - RNA, 19 nt, Homo sapiens
  misc_RNA (1)...(19): siRNA sense strand
uccuaaagguagaccagaa

SEQ ID NO: 1779112 - RNA, 19 nt, Homo sapiens
  misc_RNA (1)...(19): siRNA sense strand
uccgggagcggcagaagua

SEQ ID NO: 1779113 - RNA, 19 nt, Homo sapiens
  misc_RNA (1)...(19): siRNA sense strand
ggagggaagauggcugaau

SEQ ID NO: 1779114 - RNA, 19 nt, Homo sapiens
  misc_RNA (1)...(19): siRNA sense strand
ccaucgcccugcuguugga

SEQ ID NO: 1779115 - RNA, 19 nt, Homo sapiens
  misc_RNA (1)...(19): siRNA sense strand
cgggagaaccugcucaagu

SEQ ID NO: 1779116 - RNA, 19 nt, Homo sapiens
  misc_RNA (1)...(19): siRNA sense strand
caucuucgucucccgcauu

SEQ ID NO: 1779117 - RNA, 19 nt, Homo sapiens
  misc_RNA (1)...(19): siRNA sense strand
ggaggaggaggaggaggaa

SEQ ID NO: 1779118 - RNA, 19 nt, Homo sapiens
  misc_RNA (1)...(19): siRNA sense strand
gcugugggcccugaagaug

SEQ ID NO: 1779119 - RNA, 19 nt, Homo sapiens
  misc_RNA (1)...(19): siRNA sense strand
aggaggaacaggaggauga

SEQ ID NO: 1779120 - RNA, 19 nt, Homo sapiens
  misc_RNA (1)...(19): siRNA sense strand
gcagaagagagcgcagaug

SEQ ID NO: 1779121 - RNA, 19 nt, Homo sapiens
  misc_RNA (1)...(19): siRNA sense strand
ggccaauaaccugcugaua

SEQ ID NO: 1779122 - RNA, 19 nt, Homo sapiens
  misc_RNA (1)...(19): siRNA sense strand
cggcaucggucagcugaag

SEQ ID NO: 1779123 - RNA, 19 nt, Homo sapiens
  misc_RNA (1)...(19): siRNA sense strand
caccuggcccugaaugaug

SEQ ID NO: 1779124 - RNA, 19 nt, Homo sapiens
  misc_RNA (1)...(19): siRNA sense strand
ugucauuucuggucaagcu

SEQ ID NO: 1779125 - RNA, 19 nt, Homo sapiens
  misc_RNA (1)...(19): siRNA sense strand
ugaggacgcugaggaagcu

SEQ ID NO: 1779126 - RNA, 19 nt, Homo sapiens
  misc_RNA (1)...(19): siRNA sense strand
cccuguggcuggcagagaa

SEQ ID NO: 1779127 - RNA, 19 nt, Homo sapiens
  misc_RNA (1)...(19): siRNA sense strand
aggaagaggccagcacuga

SEQ ID NO: 1779128 - RNA, 19 nt, Homo sapiens
  misc_RNA (1)...(19): siRNA sense strand
ugugggcccugaagaugug

SEQ ID NO: 1779129 - RNA, 19 nt, Homo sapiens
  misc_RNA (1)...(19): siRNA sense strand
ggagggcagccaggaugaa

SEQ ID NO: 1779130 - RNA, 19 nt, Homo sapiens
  misc_RNA (1)...(19): siRNA sense strand
gcaucuucaucuccaaggu

SEQ ID NO: 1779131 - RNA, 19 nt, Homo sapiens
  misc_RNA (1)...(19): siRNA sense strand
cggagagcaucaaguucug

SEQ ID NO: 1779132 - RNA, 19 nt, Homo sapiens
  misc_RNA (1)...(19): siRNA sense strand
ucacggagaaccugcugau

SEQ ID NO: 1779133 - RNA, 19 nt, Homo sapiens
  misc_RNA (1)...(19): siRNA sense strand
gagcggcagaaguacuuug

SEQ ID NO: 1779134 - RNA, 19 nt, Homo sapiens
  misc_RNA (1)...(19): siRNA sense strand
cgaccgcguccucucuauu

SEQ ID NO: 1779135 - RNA, 19 nt, Homo sapiens
  misc_RNA (1)...(19): siRNA sense strand
agucuggccugagugaaga

SEQ ID NO: 1779136 - RNA, 19 nt, Homo sapiens
  misc_RNA (1)...(19): siRNA sense strand
gaacacaucccuaaaccau

SEQ ID NO: 1779137 - RNA, 19 nt, Homo sapiens
  misc_RNA (1)...(19): siRNA sense strand
ccuaaaccauagucuaauu

SEQ ID NO: 1779138 - RNA, 19 nt, Homo sapiens
  misc_RNA (1)...(19): siRNA sense strand
gggcagugguucccgguuu

SEQ ID NO: 1779139 - RNA, 19 nt, Homo sapiens
  misc_RNA (1)...(19): siRNA sense strand
acacaucccuaaaccauag

SEQ ID NO: 1779140 - RNA, 19 nt, Homo sapiens
  misc_RNA (1)...(19): siRNA sense strand
acacugggcugggcacuug

SEQ ID NO: 1779141 - RNA, 19 nt, Homo sapiens
  misc_RNA (1)...(19): siRNA sense strand
gugugagucugaccaacaa

SEQ ID NO: 1779142 - RNA, 19 nt, Homo sapiens
  misc_RNA (1)...(19): siRNA sense strand
ggcagugguucccgguuug

SEQ ID NO: 1779143 - RNA, 19 nt, Homo sapiens
  misc_RNA (1)...(19): siRNA sense strand
ucccuaaaccauagucuaa

SEQ ID NO: 1779144 - RNA, 19 nt, Homo sapiens
  misc_RNA (1)...(19): siRNA sense strand
gggaguguguucucauggu

SEQ ID NO: 1779145 - RNA, 19 nt, Homo sapiens
  misc_RNA (1)...(19): siRNA sense strand
agaauccagugucuguguu

SEQ ID NO: 1779146 - RNA, 19 nt, Homo sapiens
  misc_RNA (1)...(19): siRNA sense strand
gcguaucgcugugcauggu

SEQ ID NO: 1779147 - RNA, 19 nt, Homo sapiens
  misc_RNA (1)...(19): siRNA sense strand
gaugaugcccaggaacaug

SEQ ID NO: 1779148 - RNA, 19 nt, Homo sapiens
  misc_RNA (1)...(19): siRNA sense strand
ggugugagucugaccaaca

SEQ ID NO: 1779149 - RNA, 19 nt, Homo sapiens
  misc_RNA (1)...(19): siRNA sense strand
gugaacacaucccuaaacc

SEQ ID NO: 1779150 - RNA, 19 nt, Homo sapiens
  misc_RNA (1)...(19): siRNA sense strand
gaauccagugucuguguuc

SEQ ID NO: 1779151 - RNA, 19 nt, Homo sapiens
  misc_RNA (1)...(19): siRNA sense strand
cgucuauguugguugugaa

SEQ ID NO: 1779152 - RNA, 19 nt, Homo sapiens
  misc_RNA (1)...(19): siRNA sense strand
ccucagcuucucuggauga

SEQ ID NO: 1779153 - RNA, 19 nt, Homo sapiens
  misc_RNA (1)...(19): siRNA sense strand
guaguucaugugagcagaa

SEQ ID NO: 1779154 - RNA, 19 nt, Homo sapiens
  misc_RNA (1)...(19): siRNA sense strand
gaaggaaaguuuaguguuu

SEQ ID NO: 1779155 - RNA, 19 nt, Homo sapiens
  misc_RNA (1)...(19): siRNA sense strand
gaaagcagauucuccaaug

SEQ ID NO: 1779156 - RNA, 19 nt, Homo sapiens
  misc_RNA (1)...(19): siRNA sense strand
caaagaagguuuaaguugu

SEQ ID NO: 1779157 - RNA, 19 nt, Homo sapiens
  misc_RNA (1)...(19): siRNA sense strand
ggagaagcuucccaacaua

SEQ ID NO: 1779158 - RNA, 19 nt, Homo sapiens
  misc_RNA (1)...(19): siRNA sense strand
gaaauggaaugugcaggua

SEQ ID NO: 1779159 - RNA, 19 nt, Homo sapiens
  misc_RNA (1)...(19): siRNA sense strand
gcagaaagaagacggauaa

SEQ ID NO: 1779160 - RNA, 19 nt, Homo sapiens
  misc_RNA (1)...(19): siRNA sense strand
ugacauggaugcagaaaga

SEQ ID NO: 1779161 - RNA, 19 nt, Homo sapiens
  misc_RNA (1)...(19): siRNA sense strand
acaccaaaguggccaauua

SEQ ID NO: 1779162 - RNA, 19 nt, Homo sapiens
  misc_RNA (1)...(19): siRNA sense strand
ggauuucgcugaugugguu

SEQ ID NO: 1779163 - RNA, 19 nt, Homo sapiens
  misc_RNA (1)...(19): siRNA sense strand
gugaugaacuguguuguaa

SEQ ID NO: 1779164 - RNA, 19 nt, Homo sapiens
  misc_RNA (1)...(19): siRNA sense strand
ugacaucgcuuugauugaa

SEQ ID NO: 1779165 - RNA, 19 nt, Homo sapiens
  misc_RNA (1)...(19): siRNA sense strand
ucgcugaugugguuuguua

SEQ ID NO: 1779166 - RNA, 19 nt, Homo sapiens
  misc_RNA (1)...(19): siRNA sense strand
ugucugaucucucuauaaa

SEQ ID NO: 1779167 - RNA, 19 nt, Homo sapiens
  misc_RNA (1)...(19): siRNA sense strand
ccaaaguggccaauuauuu

SEQ ID NO: 1779168 - RNA, 19 nt, Homo sapiens
  misc_RNA (1)...(19): siRNA sense strand
gaccuuaaacguauaguaa

SEQ ID NO: 1779169 - RNA, 19 nt, Homo sapiens
  misc_RNA (1)...(19): siRNA sense strand
ccaacaaugugacuuaugu

SEQ ID NO: 1779170 - RNA, 19 nt, Homo sapiens
  misc_RNA (1)...(19): siRNA sense strand
gggaauaguugaaguaaaa

SEQ ID NO: 1779171 - RNA, 19 nt, Homo sapiens
  misc_RNA (1)...(19): siRNA sense strand
gaugaacuguguuguaaag

SEQ ID NO: 1779172 - RNA, 19 nt, Homo sapiens
  misc_RNA (1)...(19): siRNA sense strand
caaggucacuuauacaucu

SEQ ID NO: 1779173 - RNA, 19 nt, Homo sapiens
  misc_RNA (1)...(19): siRNA sense strand
gaauacguggauagaauua

SEQ ID NO: 1779174 - RNA, 19 nt, Homo sapiens
  misc_RNA (1)...(19): siRNA sense strand
ccaaagugaugaacugugu

SEQ ID NO: 1779175 - RNA, 19 nt, Homo sapiens
  misc_RNA (1)...(19): siRNA sense strand
gaaagaagacggauaaaau

SEQ ID NO: 1779176 - RNA, 19 nt, Homo sapiens
  misc_RNA (1)...(19): siRNA sense strand
cauggcagguggcaauuaa

SEQ ID NO: 1779177 - RNA, 19 nt, Homo sapiens
  misc_RNA (1)...(19): siRNA sense strand
ggaccaagauaagacaaug

SEQ ID NO: 1779178 - RNA, 19 nt, Homo sapiens
  misc_RNA (1)...(19): siRNA sense strand
aaugauacaugcaucguuu

SEQ ID NO: 1779179 - RNA, 19 nt, Homo sapiens
  misc_RNA (1)...(19): siRNA sense strand
ccaacauacugucaacaaa

SEQ ID NO: 1779180 - RNA, 19 nt, Homo sapiens
  misc_RNA (1)...(19): siRNA sense strand
gagggcaccuguguuugua

SEQ ID NO: 1779181 - RNA, 19 nt, Homo sapiens
  misc_RNA (1)...(19): siRNA sense strand
gcauggaaauacagauuca

SEQ ID NO: 1779182 - RNA, 19 nt, Homo sapiens
  misc_RNA (1)...(19): siRNA sense strand
ucaaagaagguuuaaguug

SEQ ID NO: 1779183 - RNA, 19 nt, Homo sapiens
  misc_RNA (1)...(19): siRNA sense strand
guaauugaauacguggaua

SEQ ID NO: 1779184 - RNA, 19 nt, Homo sapiens
  misc_RNA (1)...(19): siRNA sense strand
gaacuguguuguaaagcau

SEQ ID NO: 1779185 - RNA, 19 nt, Homo sapiens
  misc_RNA (1)...(19): siRNA sense strand
aagaggaucugguggagaa

SEQ ID NO: 1779186 - RNA, 19 nt, Homo sapiens
  misc_RNA (1)...(19): siRNA sense strand
gaaagccugugaugguauc

SEQ ID NO: 1779187 - RNA, 19 nt, Homo sapiens
  misc_RNA (1)...(19): siRNA sense strand
gaugaaagccugugauggu

SEQ ID NO: 1779188 - RNA, 19 nt, Homo sapiens
  misc_RNA (1)...(19): siRNA sense strand
uaaguugucugaucucucu

SEQ ID NO: 1779189 - RNA, 19 nt, Homo sapiens
  misc_RNA (1)...(19): siRNA sense strand
ccaaauauggacaacagua

SEQ ID NO: 1779190 - RNA, 19 nt, Homo sapiens
  misc_RNA (1)...(19): siRNA sense strand
gaagaacuauggguuacca

SEQ ID NO: 1779191 - RNA, 19 nt, Homo sapiens
  misc_RNA (1)...(19): siRNA sense strand
gaagacggauaaaaucauu

SEQ ID NO: 1779192 - RNA, 19 nt, Homo sapiens
  misc_RNA (1)...(19): siRNA sense strand
gagaagaacuauggguuac

SEQ ID NO: 1779193 - RNA, 19 nt, Homo sapiens
  misc_RNA (1)...(19): siRNA sense strand
gcagguacauaugaugguu

SEQ ID NO: 1779194 - RNA, 19 nt, Homo sapiens
  misc_RNA (1)...(19): siRNA sense strand
gggcaccuguguuuguaaa

SEQ ID NO: 1779195 - RNA, 19 nt, Homo sapiens
  misc_RNA (1)...(19): siRNA sense strand
aaaagcagcuggagcauga

SEQ ID NO: 1779196 - RNA, 19 nt, Homo sapiens
  misc_RNA (1)...(19): siRNA sense strand
gauacucaaagaagguuua

SEQ ID NO: 1779197 - RNA, 19 nt, Homo sapiens
  misc_RNA (1)...(19): siRNA sense strand
agagaagaacuauggguua

SEQ ID NO: 1779198 - RNA, 19 nt, Homo sapiens
  misc_RNA (1)...(19): siRNA sense strand
gcugaugugguuuguuaua

SEQ ID NO: 1779199 - RNA, 19 nt, Homo sapiens
  misc_RNA (1)...(19): siRNA sense strand
caagauaagacaauguuca

SEQ ID NO: 1779200 - RNA, 19 nt, Homo sapiens
  misc_RNA (1)...(19): siRNA sense strand
guaggaaggccuuuuauuu

SEQ ID NO: 1779201 - RNA, 19 nt, Homo sapiens
  misc_RNA (1)...(19): siRNA sense strand
aaagaagguuuaaguuguc

SEQ ID NO: 1779202 - RNA, 19 nt, Homo sapiens
  misc_RNA (1)...(19): siRNA sense strand
caaaguggccaauuauuuu

SEQ ID NO: 1779203 - RNA, 19 nt, Homo sapiens
  misc_RNA (1)...(19): siRNA sense strand
gaagguuuaaguugucuga

SEQ ID NO: 1779204 - RNA, 19 nt, Homo sapiens
  misc_RNA (1)...(19): siRNA sense strand
gacaucgcuuugauugaaa

SEQ ID NO: 1779205 - RNA, 19 nt, Homo sapiens
  misc_RNA (1)...(19): siRNA sense strand
aggagaagcuucccaacau

SEQ ID NO: 1779206 - RNA, 19 nt, Homo sapiens
  misc_RNA (1)...(19): siRNA sense strand
gagguggacugcauuacag

SEQ ID NO: 1779207 - RNA, 19 nt, Homo sapiens
  misc_RNA (1)...(19): siRNA sense strand
uugaauacguggauagaau

SEQ ID NO: 1779208 - RNA, 19 nt, Homo sapiens
  misc_RNA (1)...(19): siRNA sense strand
gagggaauaguugaaguaa

SEQ ID NO: 1779209 - RNA, 19 nt, Homo sapiens
  misc_RNA (1)...(19): siRNA sense strand
agacaauguucauaugcaa

SEQ ID NO: 1779210 - RNA, 19 nt, Homo sapiens
  misc_RNA (1)...(19): siRNA sense strand
acucaccucuccugcgaua

SEQ ID NO: 1779211 - RNA, 19 nt, Homo sapiens
  misc_RNA (1)...(19): siRNA sense strand
ucaacaaggugcugauacu

SEQ ID NO: 1779212 - RNA, 19 nt, Homo sapiens
  misc_RNA (1)...(19): siRNA sense strand
uuucugugcuuccacuuaa

SEQ ID NO: 1779213 - RNA, 19 nt, Homo sapiens
  misc_RNA (1)...(19): siRNA sense strand
acucaucguuaccaaauau

SEQ ID NO: 1779214 - RNA, 19 nt, Homo sapiens
  misc_RNA (1)...(19): siRNA sense strand
acaaggugcugauacucaa

SEQ ID NO: 1779215 - RNA, 19 nt, Homo sapiens
  misc_RNA (1)...(19): siRNA sense strand
caaaggcuuccauugcaaa

SEQ ID NO: 1779216 - RNA, 19 nt, Homo sapiens
  misc_RNA (1)...(19): siRNA sense strand
ucacuuauacaucucaaga

SEQ ID NO: 1779217 - RNA, 19 nt, Homo sapiens
  misc_RNA (1)...(19): siRNA sense strand
gcucuaaguuuuacggaaa

SEQ ID NO: 1779218 - RNA, 19 nt, Homo sapiens
  misc_RNA (1)...(19): siRNA sense strand
aaacucaucguuaccaaau

SEQ ID NO: 1779219 - RNA, 19 nt, Homo sapiens
  misc_RNA (1)...(19): siRNA sense strand
uaucagugcccaaagaaug

SEQ ID NO: 1779220 - RNA, 19 nt, Homo sapiens
  misc_RNA (1)...(19): siRNA sense strand
guauggaugccaacaaugu

SEQ ID NO: 1779221 - RNA, 19 nt, Homo sapiens
  misc_RNA (1)...(19): siRNA sense strand
agaccaaagugaugaacug

SEQ ID NO: 1779222 - RNA, 19 nt, Homo sapiens
  misc_RNA (1)...(19): siRNA sense strand
gguuuaaguugucugaucu

SEQ ID NO: 1779223 - RNA, 19 nt, Homo sapiens
  misc_RNA (1)...(19): siRNA sense strand
uuauacaucucaagaggau

SEQ ID NO: 1779224 - RNA, 19 nt, Homo sapiens
  misc_RNA (1)...(19): siRNA sense strand
cgaaggaaaguuuaguguu

SEQ ID NO: 1779225 - RNA, 19 nt, Homo sapiens
  misc_RNA (1)...(19): siRNA sense strand
ucaccucuccugcgauaaa

SEQ ID NO: 1779226 - RNA, 19 nt, Homo sapiens
  misc_RNA (1)...(19): siRNA sense strand
ggaaaacuguggaaaacca

SEQ ID NO: 1779227 - RNA, 19 nt, Homo sapiens
  misc_RNA (1)...(19): siRNA sense strand
uuuguaaacuaccguauca

SEQ ID NO: 1779228 - RNA, 19 nt, Homo sapiens
  misc_RNA (1)...(19): siRNA sense strand
ucgcuuugauugaaaugaa

SEQ ID NO: 1779229 - RNA, 19 nt, Homo sapiens
  misc_RNA (1)...(19): siRNA sense strand
ugaauacguggauagaauu

SEQ ID NO: 1779230 - RNA, 19 nt, Homo sapiens
  misc_RNA (1)...(19): siRNA sense strand
gcucaagaagaaacagaaa

SEQ ID NO: 1779231 - RNA, 19 nt, Homo sapiens
  misc_RNA (1)...(19): siRNA sense strand
ggugagguggacugcauua

SEQ ID NO: 1779232 - RNA, 19 nt, Homo sapiens
  misc_RNA (1)...(19): siRNA sense strand
ugaacuguguuguaaagca

SEQ ID NO: 1779233 - RNA, 19 nt, Homo sapiens
  misc_RNA (1)...(19): siRNA sense strand
gaggauuagagaccaguuu

SEQ ID NO: 1779234 - RNA, 19 nt, Homo sapiens
  misc_RNA (1)...(19): siRNA sense strand
guugucugaucucucuaua

SEQ ID NO: 1779235 - RNA, 19 nt, Homo sapiens
  misc_RNA (1)...(19): siRNA sense strand
gcaaggucacuuauacauc

SEQ ID NO: 1779236 - RNA, 19 nt, Homo sapiens
  misc_RNA (1)...(19): siRNA sense strand
caaauauggacaacaguag

SEQ ID NO: 1779237 - RNA, 19 nt, Homo sapiens
  misc_RNA (1)...(19): siRNA sense strand
uaccaaauauggacaacag

SEQ ID NO: 1779238 - RNA, 19 nt, Homo sapiens
  misc_RNA (1)...(19): siRNA sense strand
gcauugagggcaccugugu

SEQ ID NO: 1779239 - RNA, 19 nt, Homo sapiens
  misc_RNA (1)...(19): siRNA sense strand
gcaacuaacaggagaagcu

SEQ ID NO: 1779240 - RNA, 19 nt, Homo sapiens
  misc_RNA (1)...(19): siRNA sense strand
gcagguggcaauuaaggau

SEQ ID NO: 1779241 - RNA, 19 nt, Homo sapiens
  misc_RNA (1)...(19): siRNA sense strand
uuaaauaacggaacaugca

SEQ ID NO: 1779242 - RNA, 19 nt, Homo sapiens
  misc_RNA (1)...(19): siRNA sense strand
gugcuuccacuuaagguuu

SEQ ID NO: 1779243 - RNA, 19 nt, Homo sapiens
  misc_RNA (1)...(19): siRNA sense strand
ccaguaaaacucaucguua

SEQ ID NO: 1779244 - RNA, 19 nt, Homo sapiens
  misc_RNA (1)...(19): siRNA sense strand
augaaagccugugauggua

SEQ ID NO: 1779245 - RNA, 19 nt, Homo sapiens
  misc_RNA (1)...(19): siRNA sense strand
gagaccaguuuggcugaau

SEQ ID NO: 1779246 - RNA, 19 nt, Homo sapiens
  misc_RNA (1)...(19): siRNA sense strand
caacauacugucaacaaaa

SEQ ID NO: 1779247 - RNA, 19 nt, Homo sapiens
  misc_RNA (1)...(19): siRNA sense strand
caccaaaguggccaauuau

SEQ ID NO: 1779248 - RNA, 19 nt, Homo sapiens
  misc_RNA (1)...(19): siRNA sense strand
aaagauaacgaaagagucu

SEQ ID NO: 1779249 - RNA, 19 nt, Homo sapiens
  misc_RNA (1)...(19): siRNA sense strand
aauauggacaacaguagua

SEQ ID NO: 1779250 - RNA, 19 nt, Homo sapiens
  misc_RNA (1)...(19): siRNA sense strand
gaggaaagcgagcacaacu

SEQ ID NO: 1779251 - RNA, 19 nt, Homo sapiens
  misc_RNA (1)...(19): siRNA sense strand
ccguaucagugcccaaaga

SEQ ID NO: 1779252 - RNA, 19 nt, Homo sapiens
  misc_RNA (1)...(19): siRNA sense strand
caauggaugacuucuuuca

SEQ ID NO: 1779253 - RNA, 19 nt, Homo sapiens
  misc_RNA (1)...(19): siRNA sense strand
caacguggccugccuugac

SEQ ID NO: 1779254 - RNA, 19 nt, Homo sapiens
  misc_RNA (1)...(19): siRNA sense strand
ggaaagacauuugccauuu

SEQ ID NO: 1779255 - RNA, 19 nt, Homo sapiens
  misc_RNA (1)...(19): siRNA sense strand
gaaauccgacuuuacaaua

SEQ ID NO: 1779256 - RNA, 19 nt, Homo sapiens
  misc_RNA (1)...(19): siRNA sense strand
gaaagccagugaagaagaa

SEQ ID NO: 1779257 - RNA, 19 nt, Homo sapiens
  misc_RNA (1)...(19): siRNA sense strand
gaaauuucauggugacaga

SEQ ID NO: 1779258 - RNA, 19 nt, Homo sapiens
  misc_RNA (1)...(19): siRNA sense strand
gaccauacuuccguuguua

SEQ ID NO: 1779259 - RNA, 19 nt, Homo sapiens
  misc_RNA (1)...(19): siRNA sense strand
uaaacaagcuuaccaagag

SEQ ID NO: 1779260 - RNA, 19 nt, Homo sapiens
  misc_RNA (1)...(19): siRNA sense strand
guagaaagccagugaagaa

SEQ ID NO: 1779261 - RNA, 19 nt, Homo sapiens
  misc_RNA (1)...(19): siRNA sense strand
ccaaugacguggacuucua

SEQ ID NO: 1779262 - RNA, 19 nt, Homo sapiens
  misc_RNA (1)...(19): siRNA sense strand
gaagagacaagaauacaga

SEQ ID NO: 1779263 - RNA, 19 nt, Homo sapiens
  misc_RNA (1)...(19): siRNA sense strand
ccaagagacuaaagaguga

SEQ ID NO: 1779264 - RNA, 19 nt, Homo sapiens
  misc_RNA (1)...(19): siRNA sense strand
aggcaagucucauugaaua

SEQ ID NO: 1779265 - RNA, 19 nt, Homo sapiens
  misc_RNA (1)...(19): siRNA sense strand
gcaaugaugcucccgauga

SEQ ID NO: 1779266 - RNA, 19 nt, Homo sapiens
  misc_RNA (1)...(19): siRNA sense strand
aaagagagcagagcaguua

SEQ ID NO: 1779267 - RNA, 19 nt, Homo sapiens
  misc_RNA (1)...(19): siRNA sense strand
gaugaagaagcuacaauaa

SEQ ID NO: 1779268 - RNA, 19 nt, Homo sapiens
  misc_RNA (1)...(19): siRNA sense strand
ggacaaaacagcaugguua

SEQ ID NO: 1779269 - RNA, 19 nt, Homo sapiens
  misc_RNA (1)...(19): siRNA sense strand
ggagaaaagugguauauca

SEQ ID NO: 1779270 - RNA, 19 nt, Homo sapiens
  misc_RNA (1)...(19): siRNA sense strand
gaaagacauuugccauuuu

SEQ ID NO: 1779271 - RNA, 19 nt, Homo sapiens
  misc_RNA (1)...(19): siRNA sense strand
ggaccauacuuccguuguu

SEQ ID NO: 1779272 - RNA, 19 nt, Homo sapiens
  misc_RNA (1)...(19): siRNA sense strand
ugaagaagagacaagaaua

SEQ ID NO: 1779273 - RNA, 19 nt, Homo sapiens
  misc_RNA (1)...(19): siRNA sense strand
gaagaagcuacaauaauuc

SEQ ID NO: 1779274 - RNA, 19 nt, Homo sapiens
  misc_RNA (1)...(19): siRNA sense strand
uggaaacccucagaagaua

SEQ ID NO: 1779275 - RNA, 19 nt, Homo sapiens
  misc_RNA (1)...(19): siRNA sense strand
gauuugggaauuccuaaua

SEQ ID NO: 1779276 - RNA, 19 nt, Homo sapiens
  misc_RNA (1)...(19): siRNA sense strand
ggaaaagcauuacaugaug

SEQ ID NO: 1779277 - RNA, 19 nt, Homo sapiens
  misc_RNA (1)...(19): siRNA sense strand
gaaaagcauuacaugauga

SEQ ID NO: 1779278 - RNA, 19 nt, Homo sapiens
  misc_RNA (1)...(19): siRNA sense strand
gaagaagagacaagaauac

SEQ ID NO: 1779279 - RNA, 19 nt, Homo sapiens
  misc_RNA (1)...(19): siRNA sense strand
uguggaugaugauacauua

SEQ ID NO: 1779280 - RNA, 19 nt, Homo sapiens
  misc_RNA (1)...(19): siRNA sense strand
caagucucauugaauacua

SEQ ID NO: 1779281 - RNA, 19 nt, Homo sapiens
  misc_RNA (1)...(19): siRNA sense strand
ucagcuggcuaaacaagaa

SEQ ID NO: 1779282 - RNA, 19 nt, Homo sapiens
  misc_RNA (1)...(19): siRNA sense strand
gcacuugcuuagcuguuau

SEQ ID NO: 1779283 - RNA, 19 nt, Homo sapiens
  misc_RNA (1)...(19): siRNA sense strand
ggaauuccuaauacagaua

SEQ ID NO: 1779284 - RNA, 19 nt, Homo sapiens
  misc_RNA (1)...(19): siRNA sense strand
caagcagucucaggauuug

SEQ ID NO: 1779285 - RNA, 19 nt, Homo sapiens
  misc_RNA (1)...(19): siRNA sense strand
gaagauaugaccccucuaa

SEQ ID NO: 1779286 - RNA, 19 nt, Homo sapiens
  misc_RNA (1)...(19): siRNA sense strand
ccaggcaagucucauugaa

SEQ ID NO: 1779287 - RNA, 19 nt, Homo sapiens
  misc_RNA (1)...(19): siRNA sense strand
ugaugaagaagcuacaaua

SEQ ID NO: 1779288 - RNA, 19 nt, Homo sapiens
  misc_RNA (1)...(19): siRNA sense strand
aaacaagcuuaccaagaga

SEQ ID NO: 1779289 - RNA, 19 nt, Homo sapiens
  misc_RNA (1)...(19): siRNA sense strand
ucaagcagucucaggauuu

SEQ ID NO: 1779290 - RNA, 19 nt, Homo sapiens
  misc_RNA (1)...(19): siRNA sense strand
gggaauuccuaauacagau

SEQ ID NO: 1779291 - RNA, 19 nt, Homo sapiens
  misc_RNA (1)...(19): siRNA sense strand
cuaccacauuccauucuuu

SEQ ID NO: 1779292 - RNA, 19 nt, Homo sapiens
  misc_RNA (1)...(19): siRNA sense strand
gaaacccucagaagauaug

SEQ ID NO: 1779293 - RNA, 19 nt, Homo sapiens
  misc_RNA (1)...(19): siRNA sense strand
cagcaugguuagucauugu

SEQ ID NO: 1779294 - RNA, 19 nt, Homo sapiens
  misc_RNA (1)...(19): siRNA sense strand
caaugaugcucccgaugau

SEQ ID NO: 1779295 - RNA, 19 nt, Homo sapiens
  misc_RNA (1)...(19): siRNA sense strand
aaagugguauaucaaggaa

SEQ ID NO: 1779296 - RNA, 19 nt, Homo sapiens
  misc_RNA (1)...(19): siRNA sense strand
aacaugagauugcccucua

SEQ ID NO: 1779297 - RNA, 19 nt, Homo sapiens
  misc_RNA (1)...(19): siRNA sense strand
acacagcccucucuuccau

SEQ ID NO: 1779298 - RNA, 19 nt, Homo sapiens
  misc_RNA (1)...(19): siRNA sense strand
gauaugguccugggaaugu

SEQ ID NO: 1779299 - RNA, 19 nt, Homo sapiens
  misc_RNA (1)...(19): siRNA sense strand
gcacugguggcuacagcua

SEQ ID NO: 1779300 - RNA, 19 nt, Homo sapiens
  misc_RNA (1)...(19): siRNA sense strand
gacauagacuuaaaaggaa

SEQ ID NO: 1779301 - RNA, 19 nt, Homo sapiens
  misc_RNA (1)...(19): siRNA sense strand
agcauuacaugaugaagaa

SEQ ID NO: 1779302 - RNA, 19 nt, Homo sapiens
  misc_RNA (1)...(19): siRNA sense strand
caaagaaagaggucaagca

SEQ ID NO: 1779303 - RNA, 19 nt, Homo sapiens
  misc_RNA (1)...(19): siRNA sense strand
gucaagcagucucaggauu

SEQ ID NO: 1779304 - RNA, 19 nt, Homo sapiens
  misc_RNA (1)...(19): siRNA sense strand
gcagaaauucaucuuggau

SEQ ID NO: 1779305 - RNA, 19 nt, Homo sapiens
  misc_RNA (1)...(19): siRNA sense strand
ggcugggccuuaaguauuc

SEQ ID NO: 1779306 - RNA, 19 nt, Homo sapiens
  misc_RNA (1)...(19): siRNA sense strand
aagagugaauccuugaaau

SEQ ID NO: 1779307 - RNA, 19 nt, Homo sapiens
  misc_RNA (1)...(19): siRNA sense strand
gcuaccacauuccauucuu

SEQ ID NO: 1779308 - RNA, 19 nt, Homo sapiens
  misc_RNA (1)...(19): siRNA sense strand
ggaaacccucagaagauau

SEQ ID NO: 1779309 - RNA, 19 nt, Homo sapiens
  misc_RNA (1)...(19): siRNA sense strand
ugacauagacuuaaaagga

SEQ ID NO: 1779310 - RNA, 19 nt, Homo sapiens
  misc_RNA (1)...(19): siRNA sense strand
uugcuuagcuguuaugacu

SEQ ID NO: 1779311 - RNA, 19 nt, Homo sapiens
  misc_RNA (1)...(19): siRNA sense strand
aagcuuaccaagagacuaa

SEQ ID NO: 1779312 - RNA, 19 nt, Homo sapiens
  misc_RNA (1)...(19): siRNA sense strand
gauagaggucauuguggaa

SEQ ID NO: 1779313 - RNA, 19 nt, Homo sapiens
  misc_RNA (1)...(19): siRNA sense strand
gagccaggcaagucucauu

SEQ ID NO: 1779314 - RNA, 19 nt, Homo sapiens
  misc_RNA (1)...(19): siRNA sense strand
gugaagaagaaggauauuu

SEQ ID NO: 1779315 - RNA, 19 nt, Homo sapiens
  misc_RNA (1)...(19): siRNA sense strand
ugacguggacuucuacugu

SEQ ID NO: 1779316 - RNA, 19 nt, Homo sapiens
  misc_RNA (1)...(19): siRNA sense strand
aaauccgacuuuacaauag

SEQ ID NO: 1779317 - RNA, 19 nt, Homo sapiens
  misc_RNA (1)...(19): siRNA sense strand
aaagagugaauccuugaaa

SEQ ID NO: 1779318 - RNA, 19 nt, Homo sapiens
  misc_RNA (1)...(19): siRNA sense strand
caaagagagcagagcaguu

SEQ ID NO: 1779319 - RNA, 19 nt, Homo sapiens
  misc_RNA (1)...(19): siRNA sense strand
cagaaauucaucuuggauu

SEQ ID NO: 1779320 - RNA, 19 nt, Homo sapiens
  misc_RNA (1)...(19): siRNA sense strand
gaggaggaauggucuucag

SEQ ID NO: 1779321 - RNA, 19 nt, Homo sapiens
  misc_RNA (1)...(19): siRNA sense strand
cauuguggaugaugauaca

SEQ ID NO: 1779322 - RNA, 19 nt, Homo sapiens
  misc_RNA (1)...(19): siRNA sense strand
ccagugaagaagaaggaua

SEQ ID NO: 1779323 - RNA, 19 nt, Homo sapiens
  misc_RNA (1)...(19): siRNA sense strand
ugaaauccgacuuuacaau

SEQ ID NO: 1779324 - RNA, 19 nt, Homo sapiens
  misc_RNA (1)...(19): siRNA sense strand
gcuacaauaauucaccauu

SEQ ID NO: 1779325 - RNA, 19 nt, Homo sapiens
  misc_RNA (1)...(19): siRNA sense strand
gauaugaccccucuaagga

SEQ ID NO: 1779326 - RNA, 19 nt, Homo sapiens
  misc_RNA (1)...(19): siRNA sense strand
gugaagaagagacaagaau

SEQ ID NO: 1779327 - RNA, 19 nt, Homo sapiens
  misc_RNA (1)...(19): siRNA sense strand
cuaaagagugaauccuuga

SEQ ID NO: 1779328 - RNA, 19 nt, Homo sapiens
  misc_RNA (1)...(19): siRNA sense strand
ccaguguccuccuccuuca

SEQ ID NO: 1779329 - RNA, 19 nt, Homo sapiens
  misc_RNA (1)...(19): siRNA sense strand
aauccgacuuuacaauaga

SEQ ID NO: 1779330 - RNA, 19 nt, Homo sapiens
  misc_RNA (1)...(19): siRNA sense strand
cugaagauacaaagaaaga

SEQ ID NO: 1779331 - RNA, 19 nt, Homo sapiens
  misc_RNA (1)...(19): siRNA sense strand
agacuucucgccaguaaau

SEQ ID NO: 1779332 - RNA, 19 nt, Homo sapiens
  misc_RNA (1)...(19): siRNA sense strand
gacuaaagagugaauccuu

SEQ ID NO: 1779333 - RNA, 19 nt, Homo sapiens
  misc_RNA (1)...(19): siRNA sense strand
uucaucagcuggcuaaaca

SEQ ID NO: 1779334 - RNA, 19 nt, Homo sapiens
  misc_RNA (1)...(19): siRNA sense strand
acagauagaggucauugug

SEQ ID NO: 1779335 - RNA, 19 nt, Homo sapiens
  misc_RNA (1)...(19): siRNA sense strand
uaauacagauagaggucau

SEQ ID NO: 1779336 - RNA, 19 nt, Homo sapiens
  misc_RNA (1)...(19): siRNA sense strand
ugagauugcccucuacauc

SEQ ID NO: 1779337 - RNA, 19 nt, Homo sapiens
  misc_RNA (1)...(19): siRNA sense strand
cauccagagucaaaguaau

SEQ ID NO: 1779338 - RNA, 19 nt, Homo sapiens
  misc_RNA (1)...(19): siRNA sense strand
gagaagccgucaggagacu

SEQ ID NO: 1779339 - RNA, 19 nt, Homo sapiens
  misc_RNA (1)...(19): siRNA sense strand
guccugggaaugugcuuua

SEQ ID NO: 1779340 - RNA, 19 nt, Homo sapiens
  misc_RNA (1)...(19): siRNA sense strand
gaauuccuaauacagauag

SEQ ID NO: 1779341 - RNA, 19 nt, Homo sapiens
  misc_RNA (1)...(19): siRNA sense strand
cugggaaugugcuuuagug

SEQ ID NO: 1779342 - RNA, 19 nt, Homo sapiens
  misc_RNA (1)...(19): siRNA sense strand
gggaaaagcauuacaugau

SEQ ID NO: 1779343 - RNA, 19 nt, Homo sapiens
  misc_RNA (1)...(19): siRNA sense strand
ucuccaggcuccagcacuu

SEQ ID NO: 1779344 - RNA, 19 nt, Homo sapiens
  misc_RNA (1)...(19): siRNA sense strand
uggaaagacauuugccauu

SEQ ID NO: 1779345 - RNA, 19 nt, Homo sapiens
  misc_RNA (1)...(19): siRNA sense strand
cauggugacagaauaccua

SEQ ID NO: 1779346 - RNA, 19 nt, Homo sapiens
  misc_RNA (1)...(19): siRNA sense strand
cagugaagaagaaggauau

SEQ ID NO: 1779347 - RNA, 19 nt, Homo sapiens
  misc_RNA (1)...(19): siRNA sense strand
agaaagccagugaagaaga

SEQ ID NO: 1779348 - RNA, 19 nt, Homo sapiens
  misc_RNA (1)...(19): siRNA sense strand
uaaagagugaauccuugaa

SEQ ID NO: 1779349 - RNA, 19 nt, Homo sapiens
  misc_RNA (1)...(19): siRNA sense strand
gaaaauuccauuccuacug

SEQ ID NO: 1779350 - RNA, 19 nt, Homo sapiens
  misc_RNA (1)...(19): siRNA sense strand
gccaguaaaugucgaugcu

SEQ ID NO: 1779351 - RNA, 19 nt, Homo sapiens
  misc_RNA (1)...(19): siRNA sense strand
gaauggucuucagcagaga

SEQ ID NO: 1779352 - RNA, 19 nt, Homo sapiens
  misc_RNA (1)...(19): siRNA sense strand
aaagacauuugccauuuug

SEQ ID NO: 1779353 - RNA, 19 nt, Homo sapiens
  misc_RNA (1)...(19): siRNA sense strand
aaaauuccauuccuacugu

SEQ ID NO: 1779354 - RNA, 19 nt, Homo sapiens
  misc_RNA (1)...(19): siRNA sense strand
ggaaagacauuugccauuu

SEQ ID NO: 1779355 - RNA, 19 nt, Homo sapiens
  misc_RNA (1)...(19): siRNA sense strand
gaaauccgacuuuacaaua

SEQ ID NO: 1779356 - RNA, 19 nt, Homo sapiens
  misc_RNA (1)...(19): siRNA sense strand
gaaagccagugaagaagaa

SEQ ID NO: 1779357 - RNA, 19 nt, Homo sapiens
  misc_RNA (1)...(19): siRNA sense strand
gaaauuucauggugacaga

SEQ ID NO: 1779358 - RNA, 19 nt, Homo sapiens
  misc_RNA (1)...(19): siRNA sense strand
gaccauacuuccguuguua

SEQ ID NO: 1779359 - RNA, 19 nt, Homo sapiens
  misc_RNA (1)...(19): siRNA sense strand
uaaacaagcuuaccaagag

SEQ ID NO: 1779360 - RNA, 19 nt, Homo sapiens
  misc_RNA (1)...(19): siRNA sense strand
guagaaagccagugaagaa

SEQ ID NO: 1779361 - RNA, 19 nt, Homo sapiens
  misc_RNA (1)...(19): siRNA sense strand
ccaaugacguggacuucua

SEQ ID NO: 1779362 - RNA, 19 nt, Homo sapiens
  misc_RNA (1)...(19): siRNA sense strand
gaagagacaagaauacaga

SEQ ID NO: 1779363 - RNA, 19 nt, Homo sapiens
  misc_RNA (1)...(19): siRNA sense strand
ccaagagacuaaagaguga

SEQ ID NO: 1779364 - RNA, 19 nt, Homo sapiens
  misc_RNA (1)...(19): siRNA sense strand
aggcaagucucauugaaua

SEQ ID NO: 1779365 - RNA, 19 nt, Homo sapiens
  misc_RNA (1)...(19): siRNA sense strand
gcaaugaugcucccgauga

SEQ ID NO: 1779366 - RNA, 19 nt, Homo sapiens
  misc_RNA (1)...(19): siRNA sense strand
aaagagagcagagcaguua

SEQ ID NO: 1779367 - RNA, 19 nt, Homo sapiens
  misc_RNA (1)...(19): siRNA sense strand
gaugaagaagcuacaauaa

SEQ ID NO: 1779368 - RNA, 19 nt, Homo sapiens
  misc_RNA (1)...(19): siRNA sense strand
ggacaaaacagcaugguua

SEQ ID NO: 1779369 - RNA, 19 nt, Homo sapiens
  misc_RNA (1)...(19): siRNA sense strand
ggagaaaagugguauauca

SEQ ID NO: 1779370 - RNA, 19 nt, Homo sapiens
  misc_RNA (1)...(19): siRNA sense strand
gaagcuggcauccguauau

SEQ ID NO: 1779371 - RNA, 19 nt, Homo sapiens
  misc_RNA (1)...(19): siRNA sense strand
gaaagacauuugccauuuu

SEQ ID NO: 1779372 - RNA, 19 nt, Homo sapiens
  misc_RNA (1)...(19): siRNA sense strand
guucugcucuggccuacua

SEQ ID NO: 1779373 - RNA, 19 nt, Homo sapiens
  misc_RNA (1)...(19): siRNA sense strand
ggaccauacuuccguuguu

SEQ ID NO: 1779374 - RNA, 19 nt, Homo sapiens
  misc_RNA (1)...(19): siRNA sense strand
ugaagaagagacaagaaua

SEQ ID NO: 1779375 - RNA, 19 nt, Homo sapiens
  misc_RNA (1)...(19): siRNA sense strand
gaagaagcuacaauaauuc

SEQ ID NO: 1779376 - RNA, 19 nt, Homo sapiens
  misc_RNA (1)...(19): siRNA sense strand
uggaaacccucagaagaua

SEQ ID NO: 1779377 - RNA, 19 nt, Homo sapiens
  misc_RNA (1)...(19): siRNA sense strand
gauuugggaauuccuaaua

SEQ ID NO: 1779378 - RNA, 19 nt, Homo sapiens
  misc_RNA (1)...(19): siRNA sense strand
ggaaaagcauuacaugaug

SEQ ID NO: 1779379 - RNA, 19 nt, Homo sapiens
  misc_RNA (1)...(19): siRNA sense strand
gaaaagcauuacaugauga

SEQ ID NO: 1779380 - RNA, 19 nt, Homo sapiens
  misc_RNA (1)...(19): siRNA sense strand
gaagaagagacaagaauac

SEQ ID NO: 1779381 - RNA, 19 nt, Homo sapiens
  misc_RNA (1)...(19): siRNA sense strand
uguggaugaugauacauua

SEQ ID NO: 1779382 - RNA, 19 nt, Homo sapiens
  misc_RNA (1)...(19): siRNA sense strand
caagucucauugaauacua

SEQ ID NO: 1779383 - RNA, 19 nt, Homo sapiens
  misc_RNA (1)...(19): siRNA sense strand
ucagcuggcuaaacaagaa

SEQ ID NO: 1779384 - RNA, 19 nt, Homo sapiens
  misc_RNA (1)...(19): siRNA sense strand
gcacuugcuuagcuguuau

SEQ ID NO: 1779385 - RNA, 19 nt, Homo sapiens
  misc_RNA (1)...(19): siRNA sense strand
ggaauuccuaauacagaua

SEQ ID NO: 1779386 - RNA, 19 nt, Homo sapiens
  misc_RNA (1)...(19): siRNA sense strand
caagcagucucaggauuug

SEQ ID NO: 1779387 - RNA, 19 nt, Homo sapiens
  misc_RNA (1)...(19): siRNA sense strand
ggaaaagagucuccaguuc

SEQ ID NO: 1779388 - RNA, 19 nt, Homo sapiens
  misc_RNA (1)...(19): siRNA sense strand
gaagauaugaccccucuaa

SEQ ID NO: 1779389 - RNA, 19 nt, Homo sapiens
  misc_RNA (1)...(19): siRNA sense strand
gcucuggccuacuaacugu

SEQ ID NO: 1779390 - RNA, 19 nt, Homo sapiens
  misc_RNA (1)...(19): siRNA sense strand
ccaggcaagucucauugaa

SEQ ID NO: 1779391 - RNA, 19 nt, Homo sapiens
  misc_RNA (1)...(19): siRNA sense strand
ugaugaagaagcuacaaua

SEQ ID NO: 1779392 - RNA, 19 nt, Homo sapiens
  misc_RNA (1)...(19): siRNA sense strand
aaacaagcuuaccaagaga

SEQ ID NO: 1779393 - RNA, 19 nt, Homo sapiens
  misc_RNA (1)...(19): siRNA sense strand
ucaagcagucucaggauuu

SEQ ID NO: 1779394 - RNA, 19 nt, Homo sapiens
  misc_RNA (1)...(19): siRNA sense strand
gggaauuccuaauacagau

SEQ ID NO: 1779395 - RNA, 19 nt, Homo sapiens
  misc_RNA (1)...(19): siRNA sense strand
cuaccacauuccauucuuu

SEQ ID NO: 1779396 - RNA, 19 nt, Homo sapiens
  misc_RNA (1)...(19): siRNA sense strand
gaaacccucagaagauaug

SEQ ID NO: 1779397 - RNA, 19 nt, Homo sapiens
  misc_RNA (1)...(19): siRNA sense strand
aaagugguauaucaaggaa

SEQ ID NO: 1779398 - RNA, 19 nt, Homo sapiens
  misc_RNA (1)...(19): siRNA sense strand
caaugaugcucccgaugau

SEQ ID NO: 1779399 - RNA, 19 nt, Homo sapiens
  misc_RNA (1)...(19): siRNA sense strand
cagcaugguuagucauugu

SEQ ID NO: 1779400 - RNA, 19 nt, Homo sapiens
  misc_RNA (1)...(19): siRNA sense strand
aacaugagauugcccucua

SEQ ID NO: 1779401 - RNA, 19 nt, Homo sapiens
  misc_RNA (1)...(19): siRNA sense strand
acacagcccucucuuccau

SEQ ID NO: 1779402 - RNA, 19 nt, Homo sapiens
  misc_RNA (1)...(19): siRNA sense strand
gauaugguccugggaaugu

SEQ ID NO: 1779403 - RNA, 19 nt, Homo sapiens
  misc_RNA (1)...(19): siRNA sense strand
gcacugguggcuacagcua

SEQ ID NO: 1779404 - RNA, 19 nt, Homo sapiens
  misc_RNA (1)...(19): siRNA sense strand
gacauagacuuaaaaggaa

SEQ ID NO: 1779405 - RNA, 19 nt, Homo sapiens
  misc_RNA (1)...(19): siRNA sense strand
agcauuacaugaugaagaa

SEQ ID NO: 1779406 - RNA, 19 nt, Homo sapiens
  misc_RNA (1)...(19): siRNA sense strand
caaagaaagaggucaagca

SEQ ID NO: 1779407 - RNA, 19 nt, Homo sapiens
  misc_RNA (1)...(19): siRNA sense strand
gucaagcagucucaggauu

SEQ ID NO: 1779408 - RNA, 19 nt, Homo sapiens
  misc_RNA (1)...(19): siRNA sense strand
gcagaaauucaucuuggau

SEQ ID NO: 1779409 - RNA, 19 nt, Homo sapiens
  misc_RNA (1)...(19): siRNA sense strand
ggcugggccuuaaguauuc

SEQ ID NO: 1779410 - RNA, 19 nt, Homo sapiens
  misc_RNA (1)...(19): siRNA sense strand
aagagugaauccuugaaau

SEQ ID NO: 1779411 - RNA, 19 nt, Homo sapiens
  misc_RNA (1)...(19): siRNA sense strand
ccacugagagaacaacaug

SEQ ID NO: 1779412 - RNA, 19 nt, Homo sapiens
  misc_RNA (1)...(19): siRNA sense strand
gcuaccacauuccauucuu

SEQ ID NO: 1779413 - RNA, 19 nt, Homo sapiens
  misc_RNA (1)...(19): siRNA sense strand
ggaaacccucagaagauau

SEQ ID NO: 1779414 - RNA, 19 nt, Homo sapiens
  misc_RNA (1)...(19): siRNA sense strand
ugacauagacuuaaaagga

SEQ ID NO: 1779415 - RNA, 19 nt, Homo sapiens
  misc_RNA (1)...(19): siRNA sense strand
uugcuuagcuguuaugacu

SEQ ID NO: 1779416 - RNA, 19 nt, Homo sapiens
  misc_RNA (1)...(19): siRNA sense strand
aagcuuaccaagagacuaa

SEQ ID NO: 1779417 - RNA, 19 nt, Homo sapiens
  misc_RNA (1)...(19): siRNA sense strand
gauagaggucauuguggaa

SEQ ID NO: 1779418 - RNA, 19 nt, Homo sapiens
  misc_RNA (1)...(19): siRNA sense strand
gagccaggcaagucucauu

SEQ ID NO: 1779419 - RNA, 19 nt, Homo sapiens
  misc_RNA (1)...(19): siRNA sense strand
gugaagaagaaggauauuu

SEQ ID NO: 1779420 - RNA, 19 nt, Homo sapiens
  misc_RNA (1)...(19): siRNA sense strand
ugacguggacuucuacugu

SEQ ID NO: 1779421 - RNA, 19 nt, Homo sapiens
  misc_RNA (1)...(19): siRNA sense strand
aaauccgacuuuacaauag

SEQ ID NO: 1779422 - RNA, 19 nt, Homo sapiens
  misc_RNA (1)...(19): siRNA sense strand
aaagagugaauccuugaaa

SEQ ID NO: 1779423 - RNA, 19 nt, Homo sapiens
  misc_RNA (1)...(19): siRNA sense strand
caaagagagcagagcaguu

SEQ ID NO: 1779424 - RNA, 19 nt, Homo sapiens
  misc_RNA (1)...(19): siRNA sense strand
cagaaauucaucuuggauu

SEQ ID NO: 1779425 - RNA, 19 nt, Homo sapiens
  misc_RNA (1)...(19): siRNA sense strand
gaggaggaauggucuucag

SEQ ID NO: 1779426 - RNA, 19 nt, Homo sapiens
  misc_RNA (1)...(19): siRNA sense strand
cauuguggaugaugauaca

SEQ ID NO: 1779427 - RNA, 19 nt, Homo sapiens
  misc_RNA (1)...(19): siRNA sense strand
ccagugaagaagaaggaua

SEQ ID NO: 1779428 - RNA, 19 nt, Homo sapiens
  misc_RNA (1)...(19): siRNA sense strand
ugaaauccgacuuuacaau

SEQ ID NO: 1779429 - RNA, 19 nt, Homo sapiens
  misc_RNA (1)...(19): siRNA sense strand
gcuacaauaauucaccauu

SEQ ID NO: 1779430 - RNA, 19 nt, Homo sapiens
  misc_RNA (1)...(19): siRNA sense strand
gauaugaccccucuaagga

SEQ ID NO: 1779431 - RNA, 19 nt, Homo sapiens
  misc_RNA (1)...(19): siRNA sense strand
gugaagaagagacaagaau

SEQ ID NO: 1779432 - RNA, 19 nt, Homo sapiens
  misc_RNA (1)...(19): siRNA sense strand
cuaaagagugaauccuuga

SEQ ID NO: 1779433 - RNA, 19 nt, Homo sapiens
  misc_RNA (1)...(19): siRNA sense strand
aauccgacuuuacaauaga

SEQ ID NO: 1779434 - RNA, 19 nt, Homo sapiens
  misc_RNA (1)...(19): siRNA sense strand
ccaguguccuccuccuuca

SEQ ID NO: 1779435 - RNA, 19 nt, Homo sapiens
  misc_RNA (1)...(19): siRNA sense strand
cugaagauacaaagaaaga

SEQ ID NO: 1779436 - RNA, 19 nt, Homo sapiens
  misc_RNA (1)...(19): siRNA sense strand
gaaaagagucuccaguucu

SEQ ID NO: 1779437 - RNA, 19 nt, Homo sapiens
  misc_RNA (1)...(19): siRNA sense strand
agacuucucgccaguaaau

SEQ ID NO: 1779438 - RNA, 19 nt, Homo sapiens
  misc_RNA (1)...(19): siRNA sense strand
gacuaaagagugaauccuu

SEQ ID NO: 1779439 - RNA, 19 nt, Homo sapiens
  misc_RNA (1)...(19): siRNA sense strand
uucaucagcuggcuaaaca

SEQ ID NO: 1779440 - RNA, 19 nt, Homo sapiens
  misc_RNA (1)...(19): siRNA sense strand
acagauagaggucauugug

SEQ ID NO: 1779441 - RNA, 19 nt, Homo sapiens
  misc_RNA (1)...(19): siRNA sense strand
uaauacagauagaggucau

SEQ ID NO: 1779442 - RNA, 19 nt, Homo sapiens
  misc_RNA (1)...(19): siRNA sense strand
cauccagagucaaaguaau

SEQ ID NO: 1779443 - RNA, 19 nt, Homo sapiens
  misc_RNA (1)...(19): siRNA sense strand
ugagauugcccucuacauc

SEQ ID NO: 1779444 - RNA, 19 nt, Homo sapiens
  misc_RNA (1)...(19): siRNA sense strand
gagaagccgucaggagacu

SEQ ID NO: 1779445 - RNA, 19 nt, Homo sapiens
  misc_RNA (1)...(19): siRNA sense strand
guccugggaaugugcuuua

SEQ ID NO: 1779446 - RNA, 19 nt, Homo sapiens
  misc_RNA (1)...(19): siRNA sense strand
gaauuccuaauacagauag

SEQ ID NO: 1779447 - RNA, 19 nt, Homo sapiens
  misc_RNA (1)...(19): siRNA sense strand
cugggaaugugcuuuagug

SEQ ID NO: 1779448 - RNA, 19 nt, Homo sapiens
  misc_RNA (1)...(19): siRNA sense strand
uaaagagugaauccuugaa

SEQ ID NO: 1779449 - RNA, 19 nt, Homo sapiens
  misc_RNA (1)...(19): siRNA sense strand
ucuccaggcuccagcacuu

SEQ ID NO: 1779450 - RNA, 19 nt, Homo sapiens
  misc_RNA (1)...(19): siRNA sense strand
uggaaagacauuugccauu

SEQ ID NO: 1779451 - RNA, 19 nt, Homo sapiens
  misc_RNA (1)...(19): siRNA sense strand
cauggugacagaauaccua

SEQ ID NO: 1779452 - RNA, 19 nt, Homo sapiens
  misc_RNA (1)...(19): siRNA sense strand
cagugaagaagaaggauau

SEQ ID NO: 1779453 - RNA, 19 nt, Homo sapiens
  misc_RNA (1)...(19): siRNA sense strand
agaaagccagugaagaaga

SEQ ID NO: 1779454 - RNA, 19 nt, Homo sapiens
  misc_RNA (1)...(19): siRNA sense strand
gaucugagcuggaauaacu

SEQ ID NO: 1779455 - RNA, 19 nt, Homo sapiens
  misc_RNA (1)...(19): siRNA sense strand
gcaaugacaucggcaauga

SEQ ID NO: 1779456 - RNA, 19 nt, Homo sapiens
  misc_RNA (1)...(19): siRNA sense strand
ggaagacaauugcaucaug

SEQ ID NO: 1779457 - RNA, 19 nt, Homo sapiens
  misc_RNA (1)...(19): siRNA sense strand
ccaauucucugauguagga

SEQ ID NO: 1779458 - RNA, 19 nt, Homo sapiens
  misc_RNA (1)...(19): siRNA sense strand
uaccaaggcuauugcuaua

SEQ ID NO: 1779459 - RNA, 19 nt, Homo sapiens
  misc_RNA (1)...(19): siRNA sense strand
gaaggggccuccaaaauca

SEQ ID NO: 1779460 - RNA, 19 nt, Homo sapiens
  misc_RNA (1)...(19): siRNA sense strand
caaccaauucucugaugua

SEQ ID NO: 1779461 - RNA, 19 nt, Homo sapiens
  misc_RNA (1)...(19): siRNA sense strand
guaccaaggcuauugcuau

SEQ ID NO: 1779462 - RNA, 19 nt, Homo sapiens
  misc_RNA (1)...(19): siRNA sense strand
gcuguggccuugugcaaug

SEQ ID NO: 1779463 - RNA, 19 nt, Homo sapiens
  misc_RNA (1)...(19): siRNA sense strand
gccaagcccugucgaccaa

SEQ ID NO: 1779464 - RNA, 19 nt, Homo sapiens
  misc_RNA (1)...(19): siRNA sense strand
aaugaaagccucagaguuc

SEQ ID NO: 1779465 - RNA, 19 nt, Homo sapiens
  misc_RNA (1)...(19): siRNA sense strand
uccaggagaugaauauuuc

SEQ ID NO: 1779466 - RNA, 19 nt, Homo sapiens
  misc_RNA (1)...(19): siRNA sense strand
caacaaucaccuugguuug

SEQ ID NO: 1779467 - RNA, 19 nt, Homo sapiens
  misc_RNA (1)...(19): siRNA sense strand
ggauaucgguggcaaugac

SEQ ID NO: 1779468 - RNA, 19 nt, Homo sapiens
  misc_RNA (1)...(19): siRNA sense strand
gggccagaaucaucucaga

SEQ ID NO: 1779469 - RNA, 19 nt, Homo sapiens
  misc_RNA (1)...(19): siRNA sense strand
caaugaaagccucagaguu

SEQ ID NO: 1779470 - RNA, 19 nt, Homo sapiens
  misc_RNA (1)...(19): siRNA sense strand
caagcccugucgaccaauu

SEQ ID NO: 1779471 - RNA, 19 nt, Homo sapiens
  misc_RNA (1)...(19): siRNA sense strand
cuauagcccugguguccaa

SEQ ID NO: 1779472 - RNA, 19 nt, Homo sapiens
  misc_RNA (1)...(19): siRNA sense strand
cacaaccaauucucugaug

SEQ ID NO: 1779473 - RNA, 19 nt, Homo sapiens
  misc_RNA (1)...(19): siRNA sense strand
ggaucucagucacaaccaa

SEQ ID NO: 1779474 - RNA, 19 nt, Homo sapiens
  misc_RNA (1)...(19): siRNA sense strand
acaaucaccuugguuugga

SEQ ID NO: 1779475 - RNA, 19 nt, Homo sapiens
  misc_RNA (1)...(19): siRNA sense strand
gagaugaauauuuccaaca

SEQ ID NO: 1779476 - RNA, 19 nt, Homo sapiens
  misc_RNA (1)...(19): siRNA sense strand
guggagaugcuacaagaga

SEQ ID NO: 1779477 - RNA, 19 nt, Homo sapiens
  misc_RNA (1)...(19): siRNA sense strand
ugguggagaugcuacaaga

SEQ ID NO: 1779478 - RNA, 19 nt, Homo sapiens
  misc_RNA (1)...(19): siRNA sense strand
gaaacaguucuucuaucug

SEQ ID NO: 1779479 - RNA, 19 nt, Homo sapiens
  misc_RNA (1)...(19): siRNA sense strand
uggagaugcuacaagagaa

SEQ ID NO: 1779480 - RNA, 19 nt, Homo sapiens
  misc_RNA (1)...(19): siRNA sense strand
caggaaaugacuucaagga

SEQ ID NO: 1779481 - RNA, 19 nt, Homo sapiens
  misc_RNA (1)...(19): siRNA sense strand
gugccugucuccuacuuca

SEQ ID NO: 1779482 - RNA, 19 nt, Homo sapiens
  misc_RNA (1)...(19): siRNA sense strand
ugccuggucuaccuggaua

SEQ ID NO: 1779483 - RNA, 19 nt, Homo sapiens
  misc_RNA (1)...(19): siRNA sense strand
aacuggagcuggaagacaa

SEQ ID NO: 1779484 - RNA, 19 nt, Homo sapiens
  misc_RNA (1)...(19): siRNA sense strand
ccaaugaaagccucagagu

SEQ ID NO: 1779485 - RNA, 19 nt, Homo sapiens
  misc_RNA (1)...(19): siRNA sense strand
acaaccaauucucugaugu

SEQ ID NO: 1779486 - RNA, 19 nt, Homo sapiens
  misc_RNA (1)...(19): siRNA sense strand
gagcuguggccuugugcaa

SEQ ID NO: 1779487 - RNA, 19 nt, Homo sapiens
  misc_RNA (1)...(19): siRNA sense strand
cuacuucauucggaacaug

SEQ ID NO: 1779488 - RNA, 19 nt, Homo sapiens
  misc_RNA (1)...(19): siRNA sense strand
gaucucagucacaaccaau

SEQ ID NO: 1779489 - RNA, 19 nt, Homo sapiens
  misc_RNA (1)...(19): siRNA sense strand
ucuggagccuugagcuuuc

SEQ ID NO: 1779490 - RNA, 19 nt, Homo sapiens
  misc_RNA (1)...(19): siRNA sense strand
cacuggaucugagcuggaa

SEQ ID NO: 1779491 - RNA, 19 nt, Homo sapiens
  misc_RNA (1)...(19): siRNA sense strand
gccugucuccuacuucauu

SEQ ID NO: 1779492 - RNA, 19 nt, Homo sapiens
  misc_RNA (1)...(19): siRNA sense strand
guguagugccugucuccua

SEQ ID NO: 1779493 - RNA, 19 nt, Homo sapiens
  misc_RNA (1)...(19): siRNA sense strand
ccaaacuggagcuggaaga

SEQ ID NO: 1779494 - RNA, 19 nt, Homo sapiens
  misc_RNA (1)...(19): siRNA sense strand
caaugacaucggcaaugaa

SEQ ID NO: 1779495 - RNA, 19 nt, Homo sapiens
  misc_RNA (1)...(19): siRNA sense strand
gguaccaaggcuauugcua

SEQ ID NO: 1779496 - RNA, 19 nt, Homo sapiens
  misc_RNA (1)...(19): siRNA sense strand
gaagaaagaccacaaauua

SEQ ID NO: 1779497 - RNA, 19 nt, Homo sapiens
  misc_RNA (1)...(19): siRNA sense strand
gaacaaaugugcacucuuu

SEQ ID NO: 1779498 - RNA, 19 nt, Homo sapiens
  misc_RNA (1)...(19): siRNA sense strand
aaacaaagcuuucaucauc

SEQ ID NO: 1779499 - RNA, 19 nt, Homo sapiens
  misc_RNA (1)...(19): siRNA sense strand
gcacaaagcagucaucauu

SEQ ID NO: 1779500 - RNA, 19 nt, Homo sapiens
  misc_RNA (1)...(19): siRNA sense strand
gaacaugggugauauggau

SEQ ID NO: 1779501 - RNA, 19 nt, Homo sapiens
  misc_RNA (1)...(19): siRNA sense strand
gcaagaauguguuagagaa

SEQ ID NO: 1779502 - RNA, 19 nt, Homo sapiens
  misc_RNA (1)...(19): siRNA sense strand
gugcagaacuggaauauga

SEQ ID NO: 1779503 - RNA, 19 nt, Homo sapiens
  misc_RNA (1)...(19): siRNA sense strand
gaacaaagacuacaaaugc

SEQ ID NO: 1779504 - RNA, 19 nt, Homo sapiens
  misc_RNA (1)...(19): siRNA sense strand
ggaaagaccuggagcaaac

SEQ ID NO: 1779505 - RNA, 19 nt, Homo sapiens
  misc_RNA (1)...(19): siRNA sense strand
caacacaucucgccagaau

SEQ ID NO: 1779506 - RNA, 19 nt, Homo sapiens
  misc_RNA (1)...(19): siRNA sense strand
gagaaacuaucauaucuuc

SEQ ID NO: 1779507 - RNA, 19 nt, Homo sapiens
  misc_RNA (1)...(19): siRNA sense strand
uaucaaaucugaaggaaga

SEQ ID NO: 1779508 - RNA, 19 nt, Homo sapiens
  misc_RNA (1)...(19): siRNA sense strand
ggaaguauauugagauugg

SEQ ID NO: 1779509 - RNA, 19 nt, Homo sapiens
  misc_RNA (1)...(19): siRNA sense strand
gaucaucugcucuggauua

SEQ ID NO: 1779510 - RNA, 19 nt, Homo sapiens
  misc_RNA (1)...(19): siRNA sense strand
aaaguaaggucguugcuaa

SEQ ID NO: 1779511 - RNA, 19 nt, Homo sapiens
  misc_RNA (1)...(19): siRNA sense strand
acaagaaucugaugaauag

SEQ ID NO: 1779512 - RNA, 19 nt, Homo sapiens
  misc_RNA (1)...(19): siRNA sense strand
gagagaaacuaucauaucu

SEQ ID NO: 1779513 - RNA, 19 nt, Homo sapiens
  misc_RNA (1)...(19): siRNA sense strand
aaacacaucuuuccuguca

SEQ ID NO: 1779514 - RNA, 19 nt, Homo sapiens
  misc_RNA (1)...(19): siRNA sense strand
gaagguaccucuggacaug

SEQ ID NO: 1779515 - RNA, 19 nt, Homo sapiens
  misc_RNA (1)...(19): siRNA sense strand
gaggguggcugcugagaaa

SEQ ID NO: 1779516 - RNA, 19 nt, Homo sapiens
  misc_RNA (1)...(19): siRNA sense strand
ccaaggagcugccucacuu

SEQ ID NO: 1779517 - RNA, 19 nt, Homo sapiens
  misc_RNA (1)...(19): siRNA sense strand
caacgagucugaauauauc

SEQ ID NO: 1779518 - RNA, 19 nt, Homo sapiens
  misc_RNA (1)...(19): siRNA sense strand
cagagcagcugguaucaaa

SEQ ID NO: 1779519 - RNA, 19 nt, Homo sapiens
  misc_RNA (1)...(19): siRNA sense strand
caaaggagauggcacauac

SEQ ID NO: 1779520 - RNA, 19 nt, Homo sapiens
  misc_RNA (1)...(19): siRNA sense strand
cgucggagcucuacacaaa

SEQ ID NO: 1779521 - RNA, 19 nt, Homo sapiens
  misc_RNA (1)...(19): siRNA sense strand
gaacacugccucaccaauu

SEQ ID NO: 1779522 - RNA, 19 nt, Homo sapiens
  misc_RNA (1)...(19): siRNA sense strand
ggagagcuguggcugguuu

SEQ ID NO: 1779523 - RNA, 19 nt, Homo sapiens
  misc_RNA (1)...(19): siRNA sense strand
gcacaagcauacauugguu

SEQ ID NO: 1779524 - RNA, 19 nt, Homo sapiens
  misc_RNA (1)...(19): siRNA sense strand
agaaugagcuaaaugaguu

SEQ ID NO: 1779525 - RNA, 19 nt, Homo sapiens
  misc_RNA (1)...(19): siRNA sense strand
agaaagaugugcugaguga

SEQ ID NO: 1779526 - RNA, 19 nt, Homo sapiens
  misc_RNA (1)...(19): siRNA sense strand
gaaaggauuuggaauacca

SEQ ID NO: 1779527 - RNA, 19 nt, Homo sapiens
  misc_RNA (1)...(19): siRNA sense strand
ccacauaucuuugcaguag

SEQ ID NO: 1779528 - RNA, 19 nt, Homo sapiens
  misc_RNA (1)...(19): siRNA sense strand
augaacagcugccuauuua

SEQ ID NO: 1779529 - RNA, 19 nt, Homo sapiens
  misc_RNA (1)...(19): siRNA sense strand
gaacagcugccuauuuaug

SEQ ID NO: 1779530 - RNA, 19 nt, Homo sapiens
  misc_RNA (1)...(19): siRNA sense strand
caauuugauuccaggauua

SEQ ID NO: 1779531 - RNA, 19 nt, Homo sapiens
  misc_RNA (1)...(19): siRNA sense strand
caauaugcaugucuucaaa

SEQ ID NO: 1779532 - RNA, 19 nt, Homo sapiens
  misc_RNA (1)...(19): siRNA sense strand
gcaaauggccagagaugaa

SEQ ID NO: 1779533 - RNA, 19 nt, Homo sapiens
  misc_RNA (1)...(19): siRNA sense strand
ggaaaugcagauaacuuua

SEQ ID NO: 1779534 - RNA, 19 nt, Homo sapiens
  misc_RNA (1)...(19): siRNA sense strand
aaugacagauuccacaaua

SEQ ID NO: 1779535 - RNA, 19 nt, Homo sapiens
  misc_RNA (1)...(19): siRNA sense strand
gaaacuaaccaaucuggaa

SEQ ID NO: 1779536 - RNA, 19 nt, Homo sapiens
  misc_RNA (1)...(19): siRNA sense strand
cauggacacucauagauuu

SEQ ID NO: 1779537 - RNA, 19 nt, Homo sapiens
  misc_RNA (1)...(19): siRNA sense strand
caaguggccuaucuagaaa

SEQ ID NO: 1779538 - RNA, 19 nt, Homo sapiens
  misc_RNA (1)...(19): siRNA sense strand
gacaagaaucugaugaaua

SEQ ID NO: 1779539 - RNA, 19 nt, Homo sapiens
  misc_RNA (1)...(19): siRNA sense strand
gcaacgagucugaauauau

SEQ ID NO: 1779540 - RNA, 19 nt, Homo sapiens
  misc_RNA (1)...(19): siRNA sense strand
cagaaacuauggagaagaa

SEQ ID NO: 1779541 - RNA, 19 nt, Homo sapiens
  misc_RNA (1)...(19): siRNA sense strand
gcaaacucguucagagaaa

SEQ ID NO: 1779542 - RNA, 19 nt, Homo sapiens
  misc_RNA (1)...(19): siRNA sense strand
agaaauagguaucgcaaga

SEQ ID NO: 1779543 - RNA, 19 nt, Homo sapiens
  misc_RNA (1)...(19): siRNA sense strand
ggccagagaugaacgaaau

SEQ ID NO: 1779544 - RNA, 19 nt, Homo sapiens
  misc_RNA (1)...(19): siRNA sense strand
gcauauauccuguucaugu

SEQ ID NO: 1779545 - RNA, 19 nt, Homo sapiens
  misc_RNA (1)...(19): siRNA sense strand
ccaauaggcuccuggaauc

SEQ ID NO: 1779546 - RNA, 19 nt, Homo sapiens
  misc_RNA (1)...(19): siRNA sense strand
gcagaaagaugugcugagu

SEQ ID NO: 1779547 - RNA, 19 nt, Homo sapiens
  misc_RNA (1)...(19): siRNA sense strand
caaauuccauggacacuca

SEQ ID NO: 1779548 - RNA, 19 nt, Homo sapiens
  misc_RNA (1)...(19): siRNA sense strand
gcaaaguuaccugaauuua

SEQ ID NO: 1779549 - RNA, 19 nt, Homo sapiens
  misc_RNA (1)...(19): siRNA sense strand
cagcaaaguuaccugaauu

SEQ ID NO: 1779550 - RNA, 19 nt, Homo sapiens
  misc_RNA (1)...(19): siRNA sense strand
gaggagagaaacuaucaua

SEQ ID NO: 1779551 - RNA, 19 nt, Homo sapiens
  misc_RNA (1)...(19): siRNA sense strand
ggacagaggaaccaaguga

SEQ ID NO: 1779552 - RNA, 19 nt, Homo sapiens
  misc_RNA (1)...(19): siRNA sense strand
uaaccaaucuggaaggaau

SEQ ID NO: 1779553 - RNA, 19 nt, Homo sapiens
  misc_RNA (1)...(19): siRNA sense strand
gaacauccuucagccaaug

SEQ ID NO: 1779554 - RNA, 19 nt, Homo sapiens
  misc_RNA (1)...(19): siRNA sense strand
gagaagagggcuuuaugaa

SEQ ID NO: 1779555 - RNA, 19 nt, Homo sapiens
  misc_RNA (1)...(19): siRNA sense strand
gaagaagaaagaccacaaa

SEQ ID NO: 1779556 - RNA, 19 nt, Homo sapiens
  misc_RNA (1)...(19): siRNA sense strand
gaacucgaccuuaaugaug

SEQ ID NO: 1779557 - RNA, 19 nt, Homo sapiens
  misc_RNA (1)...(19): siRNA sense strand
gcuagacauuuacggauuu

SEQ ID NO: 1779558 - RNA, 19 nt, Homo sapiens
  misc_RNA (1)...(19): siRNA sense strand
gacaugucauuguuccuua

SEQ ID NO: 1779559 - RNA, 19 nt, Homo sapiens
  misc_RNA (1)...(19): siRNA sense strand
gcagaucgauacaaacaag

SEQ ID NO: 1779560 - RNA, 19 nt, Homo sapiens
  misc_RNA (1)...(19): siRNA sense strand
aaacagcacucuuuuauug

SEQ ID NO: 1779561 - RNA, 19 nt, Homo sapiens
  misc_RNA (1)...(19): siRNA sense strand
ccagaacuauuucaagaug

SEQ ID NO: 1779562 - RNA, 19 nt, Homo sapiens
  misc_RNA (1)...(19): siRNA sense strand
gaaccucucugcaucuucu

SEQ ID NO: 1779563 - RNA, 19 nt, Homo sapiens
  misc_RNA (1)...(19): siRNA sense strand
gaagccauuuguucuaugu

SEQ ID NO: 1779564 - RNA, 19 nt, Homo sapiens
  misc_RNA (1)...(19): siRNA sense strand
gagaagaaguuaguagaag

SEQ ID NO: 1779565 - RNA, 19 nt, Homo sapiens
  misc_RNA (1)...(19): siRNA sense strand
cgcaggagguacaagauua

SEQ ID NO: 1779566 - RNA, 19 nt, Homo sapiens
  misc_RNA (1)...(19): siRNA sense strand
gaugcuaccagaacuauuu

SEQ ID NO: 1779567 - RNA, 19 nt, Homo sapiens
  misc_RNA (1)...(19): siRNA sense strand
gcaagaagaauauaugaag

SEQ ID NO: 1779568 - RNA, 19 nt, Homo sapiens
  misc_RNA (1)...(19): siRNA sense strand
ggagagaaacuaucauauc

SEQ ID NO: 1779569 - RNA, 19 nt, Homo sapiens
  misc_RNA (1)...(19): siRNA sense strand
gaauuuguauacuccaguu

SEQ ID NO: 1779570 - RNA, 19 nt, Homo sapiens
  misc_RNA (1)...(19): siRNA sense strand
ucaaguggccuaucuagaa

SEQ ID NO: 1779571 - RNA, 19 nt, Homo sapiens
  misc_RNA (1)...(19): siRNA sense strand
caaauuggagcaagaagaa

SEQ ID NO: 1779572 - RNA, 19 nt, Homo sapiens
  misc_RNA (1)...(19): siRNA sense strand
gaagaggaagcgaaaguug

SEQ ID NO: 1779573 - RNA, 19 nt, Homo sapiens
  misc_RNA (1)...(19): siRNA sense strand
cuauuguucuucagucuua

SEQ ID NO: 1779574 - RNA, 19 nt, Homo sapiens
  misc_RNA (1)...(19): siRNA sense strand
ugacauacuuguuggugaa

SEQ ID NO: 1779575 - RNA, 19 nt, Homo sapiens
  misc_RNA (1)...(19): siRNA sense strand
gcuggaacaugaaacgauu

SEQ ID NO: 1779576 - RNA, 19 nt, Homo sapiens
  misc_RNA (1)...(19): siRNA sense strand
ggagaagagggcuuuauga

SEQ ID NO: 1779577 - RNA, 19 nt, Homo sapiens
  misc_RNA (1)...(19): siRNA sense strand
gucaagaacuagaaucaga

SEQ ID NO: 1779578 - RNA, 19 nt, Homo sapiens
  misc_RNA (1)...(19): siRNA sense strand
gaagagaugacccuuaugg

SEQ ID NO: 1779579 - RNA, 19 nt, Homo sapiens
  misc_RNA (1)...(19): siRNA sense strand
gaagaaguuaguagaagaa

SEQ ID NO: 1779580 - RNA, 19 nt, Homo sapiens
  misc_RNA (1)...(19): siRNA sense strand
ggaaggaaaggauuuggaa

SEQ ID NO: 1779581 - RNA, 19 nt, Homo sapiens
  misc_RNA (1)...(19): siRNA sense strand
uagacgagcugccacuauu

SEQ ID NO: 1779582 - RNA, 19 nt, Homo sapiens
  misc_RNA (1)...(19): siRNA sense strand
uaccagaacuauuucaaga

SEQ ID NO: 1779583 - RNA, 19 nt, Homo sapiens
  misc_RNA (1)...(19): siRNA sense strand
gugccaauaugagaacuua

SEQ ID NO: 1779584 - RNA, 19 nt, Homo sapiens
  misc_RNA (1)...(19): siRNA sense strand
agaguccgcuuuauugauu

SEQ ID NO: 1779585 - RNA, 19 nt, Homo sapiens
  misc_RNA (1)...(19): siRNA sense strand
gaaaacagaugaugaugca

SEQ ID NO: 1779586 - RNA, 19 nt, Homo sapiens
  misc_RNA (1)...(19): siRNA sense strand
ggagaagaaguuaguagaa

SEQ ID NO: 1779587 - RNA, 19 nt, Homo sapiens
  misc_RNA (1)...(19): siRNA sense strand
cagcugguaucaaaucuga

SEQ ID NO: 1779588 - RNA, 19 nt, Homo sapiens
  misc_RNA (1)...(19): siRNA sense strand
aagcaaacaugcaagaaug

SEQ ID NO: 1779589 - RNA, 19 nt, Homo sapiens
  misc_RNA (1)...(19): siRNA sense strand
uagugaaucucaucaaaug

SEQ ID NO: 1779590 - RNA, 19 nt, Homo sapiens
  misc_RNA (1)...(19): siRNA sense strand
ggucagaacaugggugaua

SEQ ID NO: 1779591 - RNA, 19 nt, Homo sapiens
  misc_RNA (1)...(19): siRNA sense strand
gcagaacaaagacuacaaa

SEQ ID NO: 1779592 - RNA, 19 nt, Homo sapiens
  misc_RNA (1)...(19): siRNA sense strand
aaacuuggauuugauggaa

SEQ ID NO: 1779593 - RNA, 19 nt, Homo sapiens
  misc_RNA (1)...(19): siRNA sense strand
gaagaggagccaugagaau

SEQ ID NO: 1779594 - RNA, 19 nt, Homo sapiens
  misc_RNA (1)...(19): siRNA sense strand
gaugaaaggcugagauauc

SEQ ID NO: 1779595 - RNA, 19 nt, Homo sapiens
  misc_RNA (1)...(19): siRNA sense strand
ucaacuaagugaagaggaa

SEQ ID NO: 1779596 - RNA, 19 nt, Homo sapiens
  misc_RNA (1)...(19): siRNA sense strand
caagacagcugcuaauaaa

SEQ ID NO: 1779597 - RNA, 19 nt, Homo sapiens
  misc_RNA (1)...(19): siRNA sense strand
cgagauagcuuggcacuuu

SEQ ID NO: 1779598 - RNA, 19 nt, Homo sapiens
  misc_RNA (1)...(19): siRNA sense strand
ggagcaagcuacuauuauu

SEQ ID NO: 1779599 - RNA, 19 nt, Homo sapiens
  misc_RNA (1)...(19): siRNA sense strand
guacuuggauagacuuaua

SEQ ID NO: 1779600 - RNA, 19 nt, Homo sapiens
  misc_RNA (1)...(19): siRNA sense strand
gaagugcuuugucaucuaa

SEQ ID NO: 1779601 - RNA, 19 nt, Homo sapiens
  misc_RNA (1)...(19): siRNA sense strand
guacagaaguuauuugcaa

SEQ ID NO: 1779602 - RNA, 19 nt, Homo sapiens
  misc_RNA (1)...(19): siRNA sense strand
uaucggaacuggaauauga

SEQ ID NO: 1779603 - RNA, 19 nt, Homo sapiens
  misc_RNA (1)...(19): siRNA sense strand
gaaagaagaccuaaauauc

SEQ ID NO: 1779604 - RNA, 19 nt, Homo sapiens
  misc_RNA (1)...(19): siRNA sense strand
ggaaguaaguccaaucaca

SEQ ID NO: 1779605 - RNA, 19 nt, Homo sapiens
  misc_RNA (1)...(19): siRNA sense strand
ugaaauagcacaugcagua

SEQ ID NO: 1779606 - RNA, 19 nt, Homo sapiens
  misc_RNA (1)...(19): siRNA sense strand
cauaagagcuauuaggaau

SEQ ID NO: 1779607 - RNA, 19 nt, Homo sapiens
  misc_RNA (1)...(19): siRNA sense strand
caaauggaguucguugaua

SEQ ID NO: 1779608 - RNA, 19 nt, Homo sapiens
  misc_RNA (1)...(19): siRNA sense strand
gcaaauaccauuaacauac

SEQ ID NO: 1779609 - RNA, 19 nt, Homo sapiens
  misc_RNA (1)...(19): siRNA sense strand
gaaggaaguaguuaaagaa

SEQ ID NO: 1779610 - RNA, 19 nt, Homo sapiens
  misc_RNA (1)...(19): siRNA sense strand
caagaugccagaaugguua

SEQ ID NO: 1779611 - RNA, 19 nt, Homo sapiens
  misc_RNA (1)...(19): siRNA sense strand
aaggaaauuuggaggauua

SEQ ID NO: 1779612 - RNA, 19 nt, Homo sapiens
  misc_RNA (1)...(19): siRNA sense strand
gcaaauguacuguauggaa

SEQ ID NO: 1779613 - RNA, 19 nt, Homo sapiens
  misc_RNA (1)...(19): siRNA sense strand
ggaaggagcaagcuacuau

SEQ ID NO: 1779614 - RNA, 19 nt, Homo sapiens
  misc_RNA (1)...(19): siRNA sense strand
uuagagagauguguaauug

SEQ ID NO: 1779615 - RNA, 19 nt, Homo sapiens
  misc_RNA (1)...(19): siRNA sense strand
ucaauuggguuauucaugu

SEQ ID NO: 1779616 - RNA, 19 nt, Homo sapiens
  misc_RNA (1)...(19): siRNA sense strand
gagaaagaagaccuaaaua

SEQ ID NO: 1779617 - RNA, 19 nt, Homo sapiens
  misc_RNA (1)...(19): siRNA sense strand
gcaaucgaguugaguacuu

SEQ ID NO: 1779618 - RNA, 19 nt, Homo sapiens
  misc_RNA (1)...(19): siRNA sense strand
caaauguacuguauggaau

SEQ ID NO: 1779619 - RNA, 19 nt, Homo sapiens
  misc_RNA (1)...(19): siRNA sense strand
aagcauggauggaagaauu

SEQ ID NO: 1779620 - RNA, 19 nt, Homo sapiens
  misc_RNA (1)...(19): siRNA sense strand
ggaaagagcaguucagacu

SEQ ID NO: 1779621 - RNA, 19 nt, Homo sapiens
  misc_RNA (1)...(19): siRNA sense strand
caagaaggaaguaguuaaa

SEQ ID NO: 1779622 - RNA, 19 nt, Homo sapiens
  misc_RNA (1)...(19): siRNA sense strand
agaaggaaguaguuaaaga

SEQ ID NO: 1779623 - RNA, 19 nt, Homo sapiens
  misc_RNA (1)...(19): siRNA sense strand
ugagaaagaugcccgauac

SEQ ID NO: 1779624 - RNA, 19 nt, Homo sapiens
  misc_RNA (1)...(19): siRNA sense strand
gagcaaauaccauuaacau

SEQ ID NO: 1779625 - RNA, 19 nt, Homo sapiens
  misc_RNA (1)...(19): siRNA sense strand
ucaagacagcugcuaauaa

SEQ ID NO: 1779626 - RNA, 19 nt, Homo sapiens
  misc_RNA (1)...(19): siRNA sense strand
gccaguggauacagucuaa

SEQ ID NO: 1779627 - RNA, 19 nt, Homo sapiens
  misc_RNA (1)...(19): siRNA sense strand
ggcaggcacuuccuccuaa

SEQ ID NO: 1779628 - RNA, 19 nt, Homo sapiens
  misc_RNA (1)...(19): siRNA sense strand
auaccuggcuguuaaagaa

SEQ ID NO: 1779629 - RNA, 19 nt, Homo sapiens
  misc_RNA (1)...(19): siRNA sense strand
ggccgaagcugacaaaauu

SEQ ID NO: 1779630 - RNA, 19 nt, Homo sapiens
  misc_RNA (1)...(19): siRNA sense strand
cagcaaauguacuguaugg

SEQ ID NO: 1779631 - RNA, 19 nt, Homo sapiens
  misc_RNA (1)...(19): siRNA sense strand
ccauuaacauacauaguug

SEQ ID NO: 1779632 - RNA, 19 nt, Homo sapiens
  misc_RNA (1)...(19): siRNA sense strand
guuccucucuuguugauga

SEQ ID NO: 1779633 - RNA, 19 nt, Homo sapiens
  misc_RNA (1)...(19): siRNA sense strand
uaacaagaaggaaguaguu

SEQ ID NO: 1779634 - RNA, 19 nt, Homo sapiens
  misc_RNA (1)...(19): siRNA sense strand
gcaaauggaguucguugau

SEQ ID NO: 1779635 - RNA, 19 nt, Homo sapiens
  misc_RNA (1)...(19): siRNA sense strand
cccgauaccuggcuguuaa

SEQ ID NO: 1779636 - RNA, 19 nt, Homo sapiens
  misc_RNA (1)...(19): siRNA sense strand
guaaggaaauuuggaggau

SEQ ID NO: 1779637 - RNA, 19 nt, Homo sapiens
  misc_RNA (1)...(19): siRNA sense strand
gaaaagaacgggcaguuga

SEQ ID NO: 1779638 - RNA, 19 nt, Homo sapiens
  misc_RNA (1)...(19): siRNA sense strand
cgaguugaguacuuggaua

SEQ ID NO: 1779639 - RNA, 19 nt, Homo sapiens
  misc_RNA (1)...(19): siRNA sense strand
uuaauucacugucuaacug

SEQ ID NO: 1779640 - RNA, 19 nt, Homo sapiens
  misc_RNA (1)...(19): siRNA sense strand
gacccucgauuacuauuca

SEQ ID NO: 1779641 - RNA, 19 nt, Homo sapiens
  misc_RNA (1)...(19): siRNA sense strand
cuaaauugcaggaguauau

SEQ ID NO: 1779642 - RNA, 19 nt, Homo sapiens
  misc_RNA (1)...(19): siRNA sense strand
gagcaagcuacuauuauug

SEQ ID NO: 1779643 - RNA, 19 nt, Homo sapiens
  misc_RNA (1)...(19): siRNA sense strand
acaggaggccucucaagua

SEQ ID NO: 1779644 - RNA, 19 nt, Homo sapiens
  misc_RNA (1)...(19): siRNA sense strand
gaugauucuuaaaccagua

SEQ ID NO: 1779645 - RNA, 19 nt, Homo sapiens
  misc_RNA (1)...(19): siRNA sense strand
caaguacaaguuaaccaua

SEQ ID NO: 1779646 - RNA, 19 nt, Homo sapiens
  misc_RNA (1)...(19): siRNA sense strand
uggcaugguucauuuguug

SEQ ID NO: 1779647 - RNA, 19 nt, Homo sapiens
  misc_RNA (1)...(19): siRNA sense strand
ucagaucaauuggguuauu

SEQ ID NO: 1779648 - RNA, 19 nt, Homo sapiens
  misc_RNA (1)...(19): siRNA sense strand
gaaagagcaguucagacuu

SEQ ID NO: 1779649 - RNA, 19 nt, Homo sapiens
  misc_RNA (1)...(19): siRNA sense strand
uaaccgauauucaucaacu

SEQ ID NO: 1779650 - RNA, 19 nt, Homo sapiens
  misc_RNA (1)...(19): siRNA sense strand
gcacgaagcauuuucuuga

SEQ ID NO: 1779651 - RNA, 19 nt, Homo sapiens
  misc_RNA (1)...(19): siRNA sense strand
gaagcuauuccuugguuug

SEQ ID NO: 1779652 - RNA, 19 nt, Homo sapiens
  misc_RNA (1)...(19): siRNA sense strand
uggauacucuuccuauuca

SEQ ID NO: 1779653 - RNA, 19 nt, Homo sapiens
  misc_RNA (1)...(19): siRNA sense strand
aaacucagcacgaagcauu

SEQ ID NO: 1779654 - RNA, 19 nt, Homo sapiens
  misc_RNA (1)...(19): siRNA sense strand
cgauuacuauucaaacuca

SEQ ID NO: 1779655 - RNA, 19 nt, Homo sapiens
  misc_RNA (1)...(19): siRNA sense strand
aaauggaguucguugauag

SEQ ID NO: 1779656 - RNA, 19 nt, Homo sapiens
  misc_RNA (1)...(19): siRNA sense strand
ucucagaucaauuggguua

SEQ ID NO: 1779657 - RNA, 19 nt, Homo sapiens
  misc_RNA (1)...(19): siRNA sense strand
uaaggaaauuuggaggauu

SEQ ID NO: 1779658 - RNA, 19 nt, Homo sapiens
  misc_RNA (1)...(19): siRNA sense strand
agagaaagaagaccuaaau

SEQ ID NO: 1779659 - RNA, 19 nt, Homo sapiens
  misc_RNA (1)...(19): siRNA sense strand
agagagauguguaauuguc

SEQ ID NO: 1779660 - RNA, 19 nt, Homo sapiens
  misc_RNA (1)...(19): siRNA sense strand
gcaaaggcuugugcagaca

SEQ ID NO: 1779661 - RNA, 19 nt, Homo sapiens
  misc_RNA (1)...(19): siRNA sense strand
ugucaucaaguacaaguua

SEQ ID NO: 1779662 - RNA, 19 nt, Homo sapiens
  misc_RNA (1)...(19): siRNA sense strand
gaaggagcaagcuacuauu

SEQ ID NO: 1779663 - RNA, 19 nt, Homo sapiens
  misc_RNA (1)...(19): siRNA sense strand
cgauuuaauucacugucua

SEQ ID NO: 1779664 - RNA, 19 nt, Homo sapiens
  misc_RNA (1)...(19): siRNA sense strand
gcacuuccuccuaacaaga

SEQ ID NO: 1779665 - RNA, 19 nt, Homo sapiens
  misc_RNA (1)...(19): siRNA sense strand
ugaagaaucagagaaagaa

SEQ ID NO: 1779666 - RNA, 19 nt, Homo sapiens
  misc_RNA (1)...(19): siRNA sense strand
uugcaggaguauauguuua

SEQ ID NO: 1779667 - RNA, 19 nt, Homo sapiens
  misc_RNA (1)...(19): siRNA sense strand
guggauacagucuaaauug

SEQ ID NO: 1779668 - RNA, 19 nt, Homo sapiens
  misc_RNA (1)...(19): siRNA sense strand
gaacaggaggccucucaag

SEQ ID NO: 1779669 - RNA, 19 nt, Homo sapiens
  misc_RNA (1)...(19): siRNA sense strand
gaacuggaauaugaagcau

SEQ ID NO: 1779670 - RNA, 19 nt, Homo sapiens
  misc_RNA (1)...(19): siRNA sense strand
agaagugcuuugucaucua

SEQ ID NO: 1779671 - RNA, 19 nt, Homo sapiens
  misc_RNA (1)...(19): siRNA sense strand
gcaggaguauauguuuaau

SEQ ID NO: 1779672 - RNA, 19 nt, Homo sapiens
  misc_RNA (1)...(19): siRNA sense strand
ggaggccucucaaguacca

SEQ ID NO: 1779673 - RNA, 19 nt, Homo sapiens
  misc_RNA (1)...(19): siRNA sense strand
agucuaaauugcaggagua

SEQ ID NO: 1779674 - RNA, 19 nt, Homo sapiens
  misc_RNA (1)...(19): siRNA sense strand
ccauacuucuccacgguuu

SEQ ID NO: 1779675 - RNA, 19 nt, Homo sapiens
  misc_RNA (1)...(19): siRNA sense strand
uccagacccucgauuacua

SEQ ID NO: 1779676 - RNA, 19 nt, Homo sapiens
  misc_RNA (1)...(19): siRNA sense strand
caaucgaguugaguacuug

SEQ ID NO: 1779677 - RNA, 19 nt, Homo sapiens
  misc_RNA (1)...(19): siRNA sense strand
cagaaugguuaucuacaca

SEQ ID NO: 1779678 - RNA, 19 nt, Homo sapiens
  misc_RNA (1)...(19): siRNA sense strand
aaggagcaagcuacuauua

SEQ ID NO: 1779679 - RNA, 19 nt, Homo sapiens
  misc_RNA (1)...(19): siRNA sense strand
cagaaguuauuugcaauca

SEQ ID NO: 1779680 - RNA, 19 nt, Homo sapiens
  misc_RNA (1)...(19): siRNA sense strand
uuaaaccaguacagaaguu

SEQ ID NO: 1779681 - RNA, 19 nt, Homo sapiens
  misc_RNA (1)...(19): siRNA sense strand
gggcugucaucaaguacaa

SEQ ID NO: 1779682 - RNA, 19 nt, Homo sapiens
  misc_RNA (1)...(19): siRNA sense strand
aaaggcuugugcagacaua

SEQ ID NO: 1779683 - RNA, 19 nt, Homo sapiens
  misc_RNA (1)...(19): siRNA sense strand
agaaaaggcuggcaugguu

SEQ ID NO: 1779684 - RNA, 19 nt, Homo sapiens
  misc_RNA (1)...(19): siRNA sense strand
gcauggauggaagaauuua

SEQ ID NO: 1779685 - RNA, 19 nt, Homo sapiens
  misc_RNA (1)...(19): siRNA sense strand
caggaggccucucaaguac

SEQ ID NO: 1779686 - RNA, 19 nt, Homo sapiens
  misc_RNA (1)...(19): siRNA sense strand
gagcuucaucuguggauug

SEQ ID NO: 1779687 - RNA, 19 nt, Homo sapiens
  misc_RNA (1)...(19): siRNA sense strand
acaagaaggaaguaguuaa

SEQ ID NO: 1779688 - RNA, 19 nt, Homo sapiens
  misc_RNA (1)...(19): siRNA sense strand
cauguuuucuuccgauuua

SEQ ID NO: 1779689 - RNA, 19 nt, Homo sapiens
  misc_RNA (1)...(19): siRNA sense strand
gauacucuuccuauucaaa

SEQ ID NO: 1779690 - RNA, 19 nt, Homo sapiens
  misc_RNA (1)...(19): siRNA sense strand
aagagccaguucaguguuu

SEQ ID NO: 1779691 - RNA, 19 nt, Homo sapiens
  misc_RNA (1)...(19): siRNA sense strand
gaaauuuggaggauuacca

SEQ ID NO: 1779692 - RNA, 19 nt, Homo sapiens
  misc_RNA (1)...(19): siRNA sense strand
gucaucaaguacaaguuaa

SEQ ID NO: 1779693 - RNA, 19 nt, Homo sapiens
  misc_RNA (1)...(19): siRNA sense strand
cuaaauaucacgaagaaac

SEQ ID NO: 1779694 - RNA, 19 nt, Homo sapiens
  misc_RNA (1)...(19): siRNA sense strand
aggcuggcaugguucauuu

SEQ ID NO: 1779695 - RNA, 19 nt, Homo sapiens
  misc_RNA (1)...(19): siRNA sense strand
aauagcacaugcaguacuu

SEQ ID NO: 1779696 - RNA, 19 nt, Homo sapiens
  misc_RNA (1)...(19): siRNA sense strand
caagaaggcugcuuaaaug

SEQ ID NO: 1779697 - RNA, 19 nt, Homo sapiens
  misc_RNA (1)...(19): siRNA sense strand
ccaagaaggucauuuccaa

SEQ ID NO: 1779698 - RNA, 19 nt, Homo sapiens
  misc_RNA (1)...(19): siRNA sense strand
caaggaauaugacagauca

SEQ ID NO: 1779699 - RNA, 19 nt, Homo sapiens
  misc_RNA (1)...(19): siRNA sense strand
gcacugguaacccugauua

SEQ ID NO: 1779700 - RNA, 19 nt, Homo sapiens
  misc_RNA (1)...(19): siRNA sense strand
ggagggagauguggcuuga

SEQ ID NO: 1779701 - RNA, 19 nt, Homo sapiens
  misc_RNA (1)...(19): siRNA sense strand
gaaccucccauucccagua

SEQ ID NO: 1779702 - RNA, 19 nt, Homo sapiens
  misc_RNA (1)...(19): siRNA sense strand
ggucaucaguccugcuuau

SEQ ID NO: 1779703 - RNA, 19 nt, Homo sapiens
  misc_RNA (1)...(19): siRNA sense strand
agacagcucuugcccuuuc

SEQ ID NO: 1779704 - RNA, 19 nt, Homo sapiens
  misc_RNA (1)...(19): siRNA sense strand
acaagaaggcugcuuaaau

SEQ ID NO: 1779705 - RNA, 19 nt, Homo sapiens
  misc_RNA (1)...(19): siRNA sense strand
caguguauuucucuacuuu

SEQ ID NO: 1779706 - RNA, 19 nt, Homo sapiens
  misc_RNA (1)...(19): siRNA sense strand
gaagggcccaggauccaaa

SEQ ID NO: 1779707 - RNA, 19 nt, Homo sapiens
  misc_RNA (1)...(19): siRNA sense strand
ugggugaaguuuacaagaa

SEQ ID NO: 1779708 - RNA, 19 nt, Homo sapiens
  misc_RNA (1)...(19): siRNA sense strand
gcccauuucacccucauua

SEQ ID NO: 1779709 - RNA, 19 nt, Homo sapiens
  misc_RNA (1)...(19): siRNA sense strand
caagaaggucauuuccaaa

SEQ ID NO: 1779710 - RNA, 19 nt, Homo sapiens
  misc_RNA (1)...(19): siRNA sense strand
cugcuuaucugaccaacug

SEQ ID NO: 1779711 - RNA, 19 nt, Homo sapiens
  misc_RNA (1)...(19): siRNA sense strand
uaugacagaucaccaggau

SEQ ID NO: 1779712 - RNA, 19 nt, Homo sapiens
  misc_RNA (1)...(19): siRNA sense strand
uaacccugauuaaccagaa

SEQ ID NO: 1779713 - RNA, 19 nt, Homo sapiens
  misc_RNA (1)...(19): siRNA sense strand
caucaguccugcuuaucug

SEQ ID NO: 1779714 - RNA, 19 nt, Homo sapiens
  misc_RNA (1)...(19): siRNA sense strand
gggugaaguuuacaagaag

SEQ ID NO: 1779715 - RNA, 19 nt, Homo sapiens
  misc_RNA (1)...(19): siRNA sense strand
ccaccaagaaggucauuuc

SEQ ID NO: 1779716 - RNA, 19 nt, Homo sapiens
  misc_RNA (1)...(19): siRNA sense strand
ccuuugaccuucccgcuau

SEQ ID NO: 1779717 - RNA, 19 nt, Homo sapiens
  misc_RNA (1)...(19): siRNA sense strand
ccaugcaucccaagccuuu

SEQ ID NO: 1779718 - RNA, 19 nt, Homo sapiens
  misc_RNA (1)...(19): siRNA sense strand
uuacaagaaggcugcuuaa

SEQ ID NO: 1779719 - RNA, 19 nt, Homo sapiens
  misc_RNA (1)...(19): siRNA sense strand
ucaguguauuucucuacuu

SEQ ID NO: 1779720 - RNA, 19 nt, Homo sapiens
  misc_RNA (1)...(19): siRNA sense strand
uaaccagaaccucccauuc

SEQ ID NO: 1779721 - RNA, 19 nt, Homo sapiens
  misc_RNA (1)...(19): siRNA sense strand
guguauuucucuacuuucu

SEQ ID NO: 1779722 - RNA, 19 nt, Homo sapiens
  misc_RNA (1)...(19): siRNA sense strand
cuauggaagugcacuggau

SEQ ID NO: 1779723 - RNA, 19 nt, Homo sapiens
  misc_RNA (1)...(19): siRNA sense strand
uuuacaagaaggcugcuua

SEQ ID NO: 1779724 - RNA, 19 nt, Homo sapiens
  misc_RNA (1)...(19): siRNA sense strand
ccaaggaauaugacagauc

SEQ ID NO: 1779725 - RNA, 19 nt, Homo sapiens
  misc_RNA (1)...(19): siRNA sense strand
ggaagggcccaggauccaa

SEQ ID NO: 1779726 - RNA, 19 nt, Homo sapiens
  misc_RNA (1)...(19): siRNA sense strand
aaaccaacauccaaaaugg

SEQ ID NO: 1779727 - RNA, 19 nt, Homo sapiens
  misc_RNA (1)...(19): siRNA sense strand
uauccagcccuaacccaaa

SEQ ID NO: 1779728 - RNA, 19 nt, Homo sapiens
  misc_RNA (1)...(19): siRNA sense strand
gaauauacgucacgagaaa

SEQ ID NO: 1779729 - RNA, 19 nt, Homo sapiens
  misc_RNA (1)...(19): siRNA sense strand
ugacaagaccuacauguua

SEQ ID NO: 1779730 - RNA, 19 nt, Homo sapiens
  misc_RNA (1)...(19): siRNA sense strand
guaaacaacuaccaaggaa

SEQ ID NO: 1779731 - RNA, 19 nt, Homo sapiens
  misc_RNA (1)...(19): siRNA sense strand
gaaaugauguuuggagaca

SEQ ID NO: 1779732 - RNA, 19 nt, Homo sapiens
  misc_RNA (1)...(19): siRNA sense strand
ggaccuauacaacagauua

SEQ ID NO: 1779733 - RNA, 19 nt, Homo sapiens
  misc_RNA (1)...(19): siRNA sense strand
cagaaagaauugauccuaa

SEQ ID NO: 1779734 - RNA, 19 nt, Homo sapiens
  misc_RNA (1)...(19): siRNA sense strand
cacggaaccuaaugaaaua

SEQ ID NO: 1779735 - RNA, 19 nt, Homo sapiens
  misc_RNA (1)...(19): siRNA sense strand
acacgagacuuuaccauga

SEQ ID NO: 1779736 - RNA, 19 nt, Homo sapiens
  misc_RNA (1)...(19): siRNA sense strand
cuaaugaaauaucccagua

SEQ ID NO: 1779737 - RNA, 19 nt, Homo sapiens
  misc_RNA (1)...(19): siRNA sense strand
caacagaucauauagauac

SEQ ID NO: 1779738 - RNA, 19 nt, Homo sapiens
  misc_RNA (1)...(19): siRNA sense strand
ccagagaacagauuaaguu

SEQ ID NO: 1779739 - RNA, 19 nt, Homo sapiens
  misc_RNA (1)...(19): siRNA sense strand
ggaagcaguuugugagaag

SEQ ID NO: 1779740 - RNA, 19 nt, Homo sapiens
  misc_RNA (1)...(19): siRNA sense strand
gcugaagaguggcaagaaa

SEQ ID NO: 1779741 - RNA, 19 nt, Homo sapiens
  misc_RNA (1)...(19): siRNA sense strand
cggcggauguggagaaauu

SEQ ID NO: 1779742 - RNA, 19 nt, Homo sapiens
  misc_RNA (1)...(19): siRNA sense strand
aguaaugccuucuagcuuu

SEQ ID NO: 1779743 - RNA, 19 nt, Homo sapiens
  misc_RNA (1)...(19): siRNA sense strand
gacaagaccuacauguuac

SEQ ID NO: 1779744 - RNA, 19 nt, Homo sapiens
  misc_RNA (1)...(19): siRNA sense strand
ccauaugauuggaccuaua

SEQ ID NO: 1779745 - RNA, 19 nt, Homo sapiens
  misc_RNA (1)...(19): siRNA sense strand
ucacggaaccuaaugaaau

SEQ ID NO: 1779746 - RNA, 19 nt, Homo sapiens
  misc_RNA (1)...(19): siRNA sense strand
gcaugggucuggcuuugga

SEQ ID NO: 1779747 - RNA, 19 nt, Homo sapiens
  misc_RNA (1)...(19): siRNA sense strand
uaaaggaagcaguuuguga

SEQ ID NO: 1779748 - RNA, 19 nt, Homo sapiens
  misc_RNA (1)...(19): siRNA sense strand
uaaaguggccugugcugaa

SEQ ID NO: 1779749 - RNA, 19 nt, Homo sapiens
  misc_RNA (1)...(19): siRNA sense strand
guuaagauguguaaacaac

SEQ ID NO: 1779750 - RNA, 19 nt, Homo sapiens
  misc_RNA (1)...(19): siRNA sense strand
gaaccuuacuuggagaauc

SEQ ID NO: 1779751 - RNA, 19 nt, Homo sapiens
  misc_RNA (1)...(19): siRNA sense strand
gaaagccagagaacagauu

SEQ ID NO: 1779752 - RNA, 19 nt, Homo sapiens
  misc_RNA (1)...(19): siRNA sense strand
ugaaugacacgagacuuua

SEQ ID NO: 1779753 - RNA, 19 nt, Homo sapiens
  misc_RNA (1)...(19): siRNA sense strand
ggagaaauuagccgaugaa

SEQ ID NO: 1779754 - RNA, 19 nt, Homo sapiens
  misc_RNA (1)...(19): siRNA sense strand
cuacagaugcguuaagaug

SEQ ID NO: 1779755 - RNA, 19 nt, Homo sapiens
  misc_RNA (1)...(19): siRNA sense strand
aaacaacuaccaaggaaug

SEQ ID NO: 1779756 - RNA, 19 nt, Homo sapiens
  misc_RNA (1)...(19): siRNA sense strand
cagaucauauagauacaga

SEQ ID NO: 1779757 - RNA, 19 nt, Homo sapiens
  misc_RNA (1)...(19): siRNA sense strand
gaacacuccaaagagguua

SEQ ID NO: 1779758 - RNA, 19 nt, Homo sapiens
  misc_RNA (1)...(19): siRNA sense strand
gcguuaagauguguaaaca

SEQ ID NO: 1779759 - RNA, 19 nt, Homo sapiens
  misc_RNA (1)...(19): siRNA sense strand
gaagcuaauauuuccagaa

SEQ ID NO: 1779760 - RNA, 19 nt, Homo sapiens
  misc_RNA (1)...(19): siRNA sense strand
cagcaugggucuggcuuug

SEQ ID NO: 1779761 - RNA, 19 nt, Homo sapiens
  misc_RNA (1)...(19): siRNA sense strand
ccagaaagaauugauccua

SEQ ID NO: 1779762 - RNA, 19 nt, Homo sapiens
  misc_RNA (1)...(19): siRNA sense strand
gugagaagcuaauauuucc

SEQ ID NO: 1779763 - RNA, 19 nt, Homo sapiens
  misc_RNA (1)...(19): siRNA sense strand
aaaguacacaaguggaaua

SEQ ID NO: 1779764 - RNA, 19 nt, Homo sapiens
  misc_RNA (1)...(19): siRNA sense strand
gggucuggcuuuggaauug

SEQ ID NO: 1779765 - RNA, 19 nt, Homo sapiens
  misc_RNA (1)...(19): siRNA sense strand
caauaaaggaagcaguuug

SEQ ID NO: 1779766 - RNA, 19 nt, Homo sapiens
  misc_RNA (1)...(19): siRNA sense strand
gugcuuaucagaaugaaug

SEQ ID NO: 1779767 - RNA, 19 nt, Homo sapiens
  misc_RNA (1)...(19): siRNA sense strand
cagagaacagauuaaguuu

SEQ ID NO: 1779768 - RNA, 19 nt, Homo sapiens
  misc_RNA (1)...(19): siRNA sense strand
guaccuacaacagaucaua

SEQ ID NO: 1779769 - RNA, 19 nt, Homo sapiens
  misc_RNA (1)...(19): siRNA sense strand
gauuggaccuauacaacag

SEQ ID NO: 1779770 - RNA, 19 nt, Homo sapiens
  misc_RNA (1)...(19): siRNA sense strand
acagaugcguuaagaugug

SEQ ID NO: 1779771 - RNA, 19 nt, Homo sapiens
  misc_RNA (1)...(19): siRNA sense strand
ccaagacccacaucaugaa

SEQ ID NO: 1779772 - RNA, 19 nt, Homo sapiens
  misc_RNA (1)...(19): siRNA sense strand
ggagacaacguuuuaagaa

SEQ ID NO: 1779773 - RNA, 19 nt, Homo sapiens
  misc_RNA (1)...(19): siRNA sense strand
ggucuggcuuuggaauuga

SEQ ID NO: 1779774 - RNA, 19 nt, Homo sapiens
  misc_RNA (1)...(19): siRNA sense strand
agaaagaauugauccuaac

SEQ ID NO: 1779775 - RNA, 19 nt, Homo sapiens
  misc_RNA (1)...(19): siRNA sense strand
ugaguucaaugcuacagau

SEQ ID NO: 1779776 - RNA, 19 nt, Homo sapiens
  misc_RNA (1)...(19): siRNA sense strand
gagacaacguuuuaagaau

SEQ ID NO: 1779777 - RNA, 19 nt, Homo sapiens
  misc_RNA (1)...(19): siRNA sense strand
gccgaugaauuacauaugc

SEQ ID NO: 1779778 - RNA, 19 nt, Homo sapiens
  misc_RNA (1)...(19): siRNA sense strand
gaguaaugccuucuagcuu

SEQ ID NO: 1779779 - RNA, 19 nt, Homo sapiens
  misc_RNA (1)...(19): siRNA sense strand
ugccaucucucccugaaau

SEQ ID NO: 1779780 - RNA, 19 nt, Homo sapiens
  misc_RNA (1)...(19): siRNA sense strand
aaagccagagaacagauua

SEQ ID NO: 1779781 - RNA, 19 nt, Homo sapiens
  misc_RNA (1)...(19): siRNA sense strand
cuacaacagaucauauaga

SEQ ID NO: 1779782 - RNA, 19 nt, Homo sapiens
  misc_RNA (1)...(19): siRNA sense strand
ccaauaaaggaagcaguuu

SEQ ID NO: 1779783 - RNA, 19 nt, Homo sapiens
  misc_RNA (1)...(19): siRNA sense strand
cuacauguuacgagaauau

SEQ ID NO: 1779784 - RNA, 19 nt, Homo sapiens
  misc_RNA (1)...(19): siRNA sense strand
uggagaaauuagccgauga

SEQ ID NO: 1779785 - RNA, 19 nt, Homo sapiens
  misc_RNA (1)...(19): siRNA sense strand
uaacccagcagacucacaa

SEQ ID NO: 1779786 - RNA, 19 nt, Homo sapiens
  misc_RNA (1)...(19): siRNA sense strand
guaaugccuucuagcuuuu

SEQ ID NO: 1779787 - RNA, 19 nt, Homo sapiens
  misc_RNA (1)...(19): siRNA sense strand
guuucaagccugaguguga

SEQ ID NO: 1779788 - RNA, 19 nt, Homo sapiens
  misc_RNA (1)...(19): siRNA sense strand
ccaaggaaugcuuaaagug

SEQ ID NO: 1779789 - RNA, 19 nt, Homo sapiens
  misc_RNA (1)...(19): siRNA sense strand
ugaauuacauaugccaucu

SEQ ID NO: 1779790 - RNA, 19 nt, Homo sapiens
  misc_RNA (1)...(19): siRNA sense strand
cuccaaagagguuauuaaa

SEQ ID NO: 1779791 - RNA, 19 nt, Homo sapiens
  misc_RNA (1)...(19): siRNA sense strand
caacuaccaaggaaugcuu

SEQ ID NO: 1779792 - RNA, 19 nt, Homo sapiens
  misc_RNA (1)...(19): siRNA sense strand
ugugagaagcuaauauuuc

SEQ ID NO: 1779793 - RNA, 19 nt, Homo sapiens
  misc_RNA (1)...(19): siRNA sense strand
uccaagacccacaucauga

SEQ ID NO: 1779794 - RNA, 19 nt, Homo sapiens
  misc_RNA (1)...(19): siRNA sense strand
guccaagacccacaucaug

SEQ ID NO: 1779795 - RNA, 19 nt, Homo sapiens
  misc_RNA (1)...(19): siRNA sense strand
caaugcuacagaugcguua

SEQ ID NO: 1779796 - RNA, 19 nt, Homo sapiens
  misc_RNA (1)...(19): siRNA sense strand
cagagcagccaccgggauu

SEQ ID NO: 1779797 - RNA, 19 nt, Homo sapiens
  misc_RNA (1)...(19): siRNA sense strand
uguaaacaacuaccaagga

SEQ ID NO: 1779798 - RNA, 19 nt, Homo sapiens
  misc_RNA (1)...(19): siRNA sense strand
aauaaaggaagcaguuugu

SEQ ID NO: 1779799 - RNA, 19 nt, Homo sapiens
  misc_RNA (1)...(19): siRNA sense strand
gaaugacacgagacuuuac

SEQ ID NO: 1779800 - RNA, 19 nt, Homo sapiens
  misc_RNA (1)...(19): siRNA sense strand
gaaugaaugacacgagacu

SEQ ID NO: 1779801 - RNA, 19 nt, Homo sapiens
  misc_RNA (1)...(19): siRNA sense strand
aaaguggccugugcugaag

SEQ ID NO: 1779802 - RNA, 19 nt, Homo sapiens
  misc_RNA (1)...(19): siRNA sense strand
gagcagccaccgggauuuc

SEQ ID NO: 1779803 - RNA, 19 nt, Homo sapiens
  misc_RNA (1)...(19): siRNA sense strand
uaugccaucucucccugaa

SEQ ID NO: 1779804 - RNA, 19 nt, Homo sapiens
  misc_RNA (1)...(19): siRNA sense strand
ggaaccuaaugaaauaucc

SEQ ID NO: 1779805 - RNA, 19 nt, Homo sapiens
  misc_RNA (1)...(19): siRNA sense strand
agacccacaucaugaaguc

SEQ ID NO: 1779806 - RNA, 19 nt, Homo sapiens
  misc_RNA (1)...(19): siRNA sense strand
accaaggaaugcuuaaagu

SEQ ID NO: 1779807 - RNA, 19 nt, Homo sapiens
  misc_RNA (1)...(19): siRNA sense strand
gcaguuugugagaagcuaa

SEQ ID NO: 1779808 - RNA, 19 nt, Homo sapiens
  misc_RNA (1)...(19): siRNA sense strand
gauguuuggagacaacguu

SEQ ID NO: 1779809 - RNA, 19 nt, Homo sapiens
  misc_RNA (1)...(19): siRNA sense strand
agccugagugugaagauua

SEQ ID NO: 1779810 - RNA, 19 nt, Homo sapiens
  misc_RNA (1)...(19): siRNA sense strand
gaagaguggcaagaaagca

SEQ ID NO: 1779811 - RNA, 19 nt, Homo sapiens
  misc_RNA (1)...(19): siRNA sense strand
ucccugaaaugauguuugg

SEQ ID NO: 1779812 - RNA, 19 nt, Homo sapiens
  misc_RNA (1)...(19): siRNA sense strand
augaaugacacgagacuuu

SEQ ID NO: 1779813 - RNA, 19 nt, Homo sapiens
  misc_RNA (1)...(19): siRNA sense strand
aaccuuacuuggagaaucu

SEQ ID NO: 1779814 - RNA, 19 nt, Homo sapiens
  misc_RNA (1)...(19): siRNA sense strand
ugaacacuccaaagagguu

SEQ ID NO: 1779815 - RNA, 19 nt, Homo sapiens
  misc_RNA (1)...(19): siRNA sense strand
gaugcguuaagauguguaa

SEQ ID NO: 1779816 - RNA, 19 nt, Homo sapiens
  misc_RNA (1)...(19): siRNA sense strand
gaaagaauugauccuaacc

SEQ ID NO: 1779817 - RNA, 19 nt, Homo sapiens
  misc_RNA (1)...(19): siRNA sense strand
aggaagcaguuugugagaa

SEQ ID NO: 1779818 - RNA, 19 nt, Homo sapiens
  misc_RNA (1)...(19): siRNA sense strand
gagugugaagauuagagua

SEQ ID NO: 1779819 - RNA, 19 nt, Homo sapiens
  misc_RNA (1)...(19): siRNA sense strand
gaccuauacaacagauuau

SEQ ID NO: 1779820 - RNA, 19 nt, Homo sapiens
  misc_RNA (1)...(19): siRNA sense strand
agacaacguuuuaagaauc

SEQ ID NO: 1779821 - RNA, 19 nt, Homo sapiens
  misc_RNA (1)...(19): siRNA sense strand
cauaugauuggaccuauac

SEQ ID NO: 1779822 - RNA, 19 nt, Homo sapiens
  misc_RNA (1)...(19): siRNA sense strand
agaauauacgucacgagaa

SEQ ID NO: 1779823 - RNA, 19 nt, Homo sapiens
  misc_RNA (1)...(19): siRNA sense strand
gcugacaagaccuacaugu

SEQ ID NO: 1779824 - RNA, 19 nt, Homo sapiens
  misc_RNA (1)...(19): siRNA sense strand
agugugaagauuagaguaa

SEQ ID NO: 1779825 - RNA, 19 nt, Homo sapiens
  misc_RNA (1)...(19): siRNA sense strand
cagaugcguuaagaugugu

SEQ ID NO: 1779826 - RNA, 19 nt, Homo sapiens
  misc_RNA (1)...(19): siRNA sense strand
ugauuggaccuauacaaca

SEQ ID NO: 1779827 - RNA, 19 nt, Homo sapiens
  misc_RNA (1)...(19): siRNA sense strand
gccugagugugaagauuag

SEQ ID NO: 1779828 - RNA, 19 nt, Homo sapiens
  misc_RNA (1)...(19): siRNA sense strand
ucacggugcaggucagcua

SEQ ID NO: 1779829 - RNA, 19 nt, Homo sapiens
  misc_RNA (1)...(19): siRNA sense strand
cgucagcaccauccaagug

SEQ ID NO: 1779830 - RNA, 19 nt, Homo sapiens
  misc_RNA (1)...(19): siRNA sense strand
ggagggaacuagccuaagu

SEQ ID NO: 1779831 - RNA, 19 nt, Homo sapiens
  misc_RNA (1)...(19): siRNA sense strand
caggagggaacuagccuaa

SEQ ID NO: 1779832 - RNA, 19 nt, Homo sapiens
  misc_RNA (1)...(19): siRNA sense strand
agaagacgacggcggagaa

SEQ ID NO: 1779833 - RNA, 19 nt, Homo sapiens
  misc_RNA (1)...(19): siRNA sense strand
ucacggugcaggucagcua

SEQ ID NO: 1779834 - RNA, 19 nt, Homo sapiens
  misc_RNA (1)...(19): siRNA sense strand
gagggaacuagccuaagug

SEQ ID NO: 1779835 - RNA, 19 nt, Homo sapiens
  misc_RNA (1)...(19): siRNA sense strand
cgucagcaccauccaagug

SEQ ID NO: 1779836 - RNA, 19 nt, Homo sapiens
  misc_RNA (1)...(19): siRNA sense strand
gaagacgacggcggagaag

SEQ ID NO: 1779837 - RNA, 19 nt, Homo sapiens
  misc_RNA (1)...(19): siRNA sense strand
gcaagcaacucuaccuuua

SEQ ID NO: 1779838 - RNA, 19 nt, Homo sapiens
  misc_RNA (1)...(19): siRNA sense strand
ggaagaaauugucaacaua

SEQ ID NO: 1779839 - RNA, 19 nt, Homo sapiens
  misc_RNA (1)...(19): siRNA sense strand
gaaguuauccucucaaauu

SEQ ID NO: 1779840 - RNA, 19 nt, Homo sapiens
  misc_RNA (1)...(19): siRNA sense strand
cgaaagcccuguaauugua

SEQ ID NO: 1779841 - RNA, 19 nt, Homo sapiens
  misc_RNA (1)...(19): siRNA sense strand
gaagucaacugauuaauac

SEQ ID NO: 1779842 - RNA, 19 nt, Homo sapiens
  misc_RNA (1)...(19): siRNA sense strand
gaacagggaauguggguua

SEQ ID NO: 1779843 - RNA, 19 nt, Homo sapiens
  misc_RNA (1)...(19): siRNA sense strand
gcaaauguauuggcuguaa

SEQ ID NO: 1779844 - RNA, 19 nt, Homo sapiens
  misc_RNA (1)...(19): siRNA sense strand
ggaagucaacugauuaaua

SEQ ID NO: 1779845 - RNA, 19 nt, Homo sapiens
  misc_RNA (1)...(19): siRNA sense strand
gaagcaaguuucauuaugu

SEQ ID NO: 1779846 - RNA, 19 nt, Homo sapiens
  misc_RNA (1)...(19): siRNA sense strand
ggaagacauugaugcauuu

SEQ ID NO: 1779847 - RNA, 19 nt, Homo sapiens
  misc_RNA (1)...(19): siRNA sense strand
caauccaacuucacaaaua

SEQ ID NO: 1779848 - RNA, 19 nt, Homo sapiens
  misc_RNA (1)...(19): siRNA sense strand
ggacacugguauaacuuua

SEQ ID NO: 1779849 - RNA, 19 nt, Homo sapiens
  misc_RNA (1)...(19): siRNA sense strand
gucaggagaugcuaaguua

SEQ ID NO: 1779850 - RNA, 19 nt, Homo sapiens
  misc_RNA (1)...(19): siRNA sense strand
caacacagacaccaaauaa

SEQ ID NO: 1779851 - RNA, 19 nt, Homo sapiens
  misc_RNA (1)...(19): siRNA sense strand
ggaagcaaguuucauuaug

SEQ ID NO: 1779852 - RNA, 19 nt, Homo sapiens
  misc_RNA (1)...(19): siRNA sense strand
agacagaacuggaagaaau

SEQ ID NO: 1779853 - RNA, 19 nt, Homo sapiens
  misc_RNA (1)...(19): siRNA sense strand
gaagaaagcccggaaagga

SEQ ID NO: 1779854 - RNA, 19 nt, Homo sapiens
  misc_RNA (1)...(19): siRNA sense strand
gcagugaauaccacaauua

SEQ ID NO: 1779855 - RNA, 19 nt, Homo sapiens
  misc_RNA (1)...(19): siRNA sense strand
gaaauuguauugugauugc

SEQ ID NO: 1779856 - RNA, 19 nt, Homo sapiens
  misc_RNA (1)...(19): siRNA sense strand
gaaauaauggacacuggua

SEQ ID NO: 1779857 - RNA, 19 nt, Homo sapiens
  misc_RNA (1)...(19): siRNA sense strand
gaaaggagggagaaucuga

SEQ ID NO: 1779858 - RNA, 19 nt, Homo sapiens
  misc_RNA (1)...(19): siRNA sense strand
uguauuggcuguaagaauu

SEQ ID NO: 1779859 - RNA, 19 nt, Homo sapiens
  misc_RNA (1)...(19): siRNA sense strand
caaagccagugguuguuaa

SEQ ID NO: 1779860 - RNA, 19 nt, Homo sapiens
  misc_RNA (1)...(19): siRNA sense strand
ggaugauacuugaggaauu

SEQ ID NO: 1779861 - RNA, 19 nt, Homo sapiens
  misc_RNA (1)...(19): siRNA sense strand
gugaauaccacaauuacua

SEQ ID NO: 1779862 - RNA, 19 nt, Homo sapiens
  misc_RNA (1)...(19): siRNA sense strand
uaacuuuaguggaugauga

SEQ ID NO: 1779863 - RNA, 19 nt, Homo sapiens
  misc_RNA (1)...(19): siRNA sense strand
caacugcaauuguacuaau

SEQ ID NO: 1779864 - RNA, 19 nt, Homo sapiens
  misc_RNA (1)...(19): siRNA sense strand
gcaaagccagugguuguua

SEQ ID NO: 1779865 - RNA, 19 nt, Homo sapiens
  misc_RNA (1)...(19): siRNA sense strand
ucacgaagcugaucuuugc

SEQ ID NO: 1779866 - RNA, 19 nt, Homo sapiens
  misc_RNA (1)...(19): siRNA sense strand
caaaggguguaauugcaaa

SEQ ID NO: 1779867 - RNA, 19 nt, Homo sapiens
  misc_RNA (1)...(19): siRNA sense strand
uaaccacacuaaccaaguu

SEQ ID NO: 1779868 - RNA, 19 nt, Homo sapiens
  misc_RNA (1)...(19): siRNA sense strand
gaugauacuugaggaauuc

SEQ ID NO: 1779869 - RNA, 19 nt, Homo sapiens
  misc_RNA (1)...(19): siRNA sense strand
uaaaguaguuaccauugga

SEQ ID NO: 1779870 - RNA, 19 nt, Homo sapiens
  misc_RNA (1)...(19): siRNA sense strand
uaaccaaguugcagugaau

SEQ ID NO: 1779871 - RNA, 19 nt, Homo sapiens
  misc_RNA (1)...(19): siRNA sense strand
caucacaguuuaagacaau

SEQ ID NO: 1779872 - RNA, 19 nt, Homo sapiens
  misc_RNA (1)...(19): siRNA sense strand
caaauaaggcagugaaauc

SEQ ID NO: 1779873 - RNA, 19 nt, Homo sapiens
  misc_RNA (1)...(19): siRNA sense strand
caucaaagaccauaacaau

SEQ ID NO: 1779874 - RNA, 19 nt, Homo sapiens
  misc_RNA (1)...(19): siRNA sense strand
gcagcaaauuaaaguaguu

SEQ ID NO: 1779875 - RNA, 19 nt, Homo sapiens
  misc_RNA (1)...(19): siRNA sense strand
caguacagauugcuaagaa

SEQ ID NO: 1779876 - RNA, 19 nt, Homo sapiens
  misc_RNA (1)...(19): siRNA sense strand
cauuauguccgacuuguua

SEQ ID NO: 1779877 - RNA, 19 nt, Homo sapiens
  misc_RNA (1)...(19): siRNA sense strand
ggugaaaccugucauuggu

SEQ ID NO: 1779878 - RNA, 19 nt, Homo sapiens
  misc_RNA (1)...(19): siRNA sense strand
aaacuacugugaaugcuau

SEQ ID NO: 1779879 - RNA, 19 nt, Homo sapiens
  misc_RNA (1)...(19): siRNA sense strand
caaucacaguguacaguaa

SEQ ID NO: 1779880 - RNA, 19 nt, Homo sapiens
  misc_RNA (1)...(19): siRNA sense strand
cagaagccuuuaagccuaa

SEQ ID NO: 1779881 - RNA, 19 nt, Homo sapiens
  misc_RNA (1)...(19): siRNA sense strand
ccaggaagucaacugauua

SEQ ID NO: 1779882 - RNA, 19 nt, Homo sapiens
  misc_RNA (1)...(19): siRNA sense strand
caacucagcccucuguguu

SEQ ID NO: 1779883 - RNA, 19 nt, Homo sapiens
  misc_RNA (1)...(19): siRNA sense strand
caucaacucugcaggaaag

SEQ ID NO: 1779884 - RNA, 19 nt, Homo sapiens
  misc_RNA (1)...(19): siRNA sense strand
cuacagcagucuucauaug

SEQ ID NO: 1779885 - RNA, 19 nt, Homo sapiens
  misc_RNA (1)...(19): siRNA sense strand
caaagaccauaacaauauc

SEQ ID NO: 1779886 - RNA, 19 nt, Homo sapiens
  misc_RNA (1)...(19): siRNA sense strand
ugaaagugguguuauugga

SEQ ID NO: 1779887 - RNA, 19 nt, Homo sapiens
  misc_RNA (1)...(19): siRNA sense strand
aaauagccaucucaccuuu

SEQ ID NO: 1779888 - RNA, 19 nt, Homo sapiens
  misc_RNA (1)...(19): siRNA sense strand
ggaugucaguuccaauugu

SEQ ID NO: 1779889 - RNA, 19 nt, Homo sapiens
  misc_RNA (1)...(19): siRNA sense strand
ggaauucggacgauguuug

SEQ ID NO: 1779890 - RNA, 19 nt, Homo sapiens
  misc_RNA (1)...(19): siRNA sense strand
caacaccagcuuuaaauag

SEQ ID NO: 1779891 - RNA, 19 nt, Homo sapiens
  misc_RNA (1)...(19): siRNA sense strand
acagcagucuucauaugua

SEQ ID NO: 1779892 - RNA, 19 nt, Homo sapiens
  misc_RNA (1)...(19): siRNA sense strand
guuacagacccaacaguua

SEQ ID NO: 1779893 - RNA, 19 nt, Homo sapiens
  misc_RNA (1)...(19): siRNA sense strand
gaauucggacgauguuuga

SEQ ID NO: 1779894 - RNA, 19 nt, Homo sapiens
  misc_RNA (1)...(19): siRNA sense strand
gcugaagccacauguaauu

SEQ ID NO: 1779895 - RNA, 19 nt, Homo sapiens
  misc_RNA (1)...(19): siRNA sense strand
acaacaauuuggaacauga

SEQ ID NO: 1779896 - RNA, 19 nt, Homo sapiens
  misc_RNA (1)...(19): siRNA sense strand
uuacagacccaacaguuaa

SEQ ID NO: 1779897 - RNA, 19 nt, Homo sapiens
  misc_RNA (1)...(19): siRNA sense strand
gaaauccagaagccuuuaa

SEQ ID NO: 1779898 - RNA, 19 nt, Homo sapiens
  misc_RNA (1)...(19): siRNA sense strand
guuauccucucaaauuuca

SEQ ID NO: 1779899 - RNA, 19 nt, Homo sapiens
  misc_RNA (1)...(19): siRNA sense strand
uauugaggcuguuauuguu

SEQ ID NO: 1779900 - RNA, 19 nt, Homo sapiens
  misc_RNA (1)...(19): siRNA sense strand
aggaagacauugaugcauu

SEQ ID NO: 1779901 - RNA, 19 nt, Homo sapiens
  misc_RNA (1)...(19): siRNA sense strand
gaaaggaaaggagggagaa

SEQ ID NO: 1779902 - RNA, 19 nt, Homo sapiens
  misc_RNA (1)...(19): siRNA sense strand
ccacaccacugccacagau

SEQ ID NO: 1779903 - RNA, 19 nt, Homo sapiens
  misc_RNA (1)...(19): siRNA sense strand
uaaaccagauggacagaag

SEQ ID NO: 1779904 - RNA, 19 nt, Homo sapiens
  misc_RNA (1)...(19): siRNA sense strand
guauaacuuuaguggauga

SEQ ID NO: 1779905 - RNA, 19 nt, Homo sapiens
  misc_RNA (1)...(19): siRNA sense strand
ccaacaccagcuuuaaaua

SEQ ID NO: 1779906 - RNA, 19 nt, Homo sapiens
  misc_RNA (1)...(19): siRNA sense strand
gcacaucacaguuuaagac

SEQ ID NO: 1779907 - RNA, 19 nt, Homo sapiens
  misc_RNA (1)...(19): siRNA sense strand
gaaagugguguuauuggau

SEQ ID NO: 1779908 - RNA, 19 nt, Homo sapiens
  misc_RNA (1)...(19): siRNA sense strand
uggaagaaauugucaacau

SEQ ID NO: 1779909 - RNA, 19 nt, Homo sapiens
  misc_RNA (1)...(19): siRNA sense strand
gaacuggaagaaauuguca

SEQ ID NO: 1779910 - RNA, 19 nt, Homo sapiens
  misc_RNA (1)...(19): siRNA sense strand
uagcugaagccacauguaa

SEQ ID NO: 1779911 - RNA, 19 nt, Homo sapiens
  misc_RNA (1)...(19): siRNA sense strand
ccacagcaacggcuuauca

SEQ ID NO: 1779912 - RNA, 19 nt, Homo sapiens
  misc_RNA (1)...(19): siRNA sense strand
gugcagaccaucacuguug

SEQ ID NO: 1779913 - RNA, 19 nt, Homo sapiens
  misc_RNA (1)...(19): siRNA sense strand
cgaagcugaucuuugcaaa

SEQ ID NO: 1779914 - RNA, 19 nt, Homo sapiens
  misc_RNA (1)...(19): siRNA sense strand
aaacaguacagauugcuaa

SEQ ID NO: 1779915 - RNA, 19 nt, Homo sapiens
  misc_RNA (1)...(19): siRNA sense strand
gacaucugaucuuaaacuu

SEQ ID NO: 1779916 - RNA, 19 nt, Homo sapiens
  misc_RNA (1)...(19): siRNA sense strand
cggaacggaugauacuuga

SEQ ID NO: 1779917 - RNA, 19 nt, Homo sapiens
  misc_RNA (1)...(19): siRNA sense strand
ccagauggacagaaguuaa

SEQ ID NO: 1779918 - RNA, 19 nt, Homo sapiens
  misc_RNA (1)...(19): siRNA sense strand
ggagacagaacuggaagaa

SEQ ID NO: 1779919 - RNA, 19 nt, Homo sapiens
  misc_RNA (1)...(19): siRNA sense strand
agacgaaguuauccucuca

SEQ ID NO: 1779920 - RNA, 19 nt, Homo sapiens
  misc_RNA (1)...(19): siRNA sense strand
ggaaaggaagacauugaug

SEQ ID NO: 1779921 - RNA, 19 nt, Homo sapiens
  misc_RNA (1)...(19): siRNA sense strand
gaccauaacaauaucugaa

SEQ ID NO: 1779922 - RNA, 19 nt, Homo sapiens
  misc_RNA (1)...(19): siRNA sense strand
guauugaggcuguuauugu

SEQ ID NO: 1779923 - RNA, 19 nt, Homo sapiens
  misc_RNA (1)...(19): siRNA sense strand
gcagaugcagcugaaguaa

SEQ ID NO: 1779924 - RNA, 19 nt, Homo sapiens
  misc_RNA (1)...(19): siRNA sense strand
cccaggaagucaacugauu

SEQ ID NO: 1779925 - RNA, 19 nt, Homo sapiens
  misc_RNA (1)...(19): siRNA sense strand
ccaaucacaguguacagua

SEQ ID NO: 1779926 - RNA, 19 nt, Homo sapiens
  misc_RNA (1)...(19): siRNA sense strand
gacagaacuggaagaaauu

SEQ ID NO: 1779927 - RNA, 19 nt, Homo sapiens
  misc_RNA (1)...(19): siRNA sense strand
gaaucugaucgacgucaua

SEQ ID NO: 1779928 - RNA, 19 nt, Homo sapiens
  misc_RNA (1)...(19): siRNA sense strand
gauggacagaaguuaauuu

SEQ ID NO: 1779929 - RNA, 19 nt, Homo sapiens
  misc_RNA (1)...(19): siRNA sense strand
gcggaugucaguuccaauu

SEQ ID NO: 1779930 - RNA, 19 nt, Homo sapiens
  misc_RNA (1)...(19): siRNA sense strand
gacgauguuugaugagugu

SEQ ID NO: 1779931 - RNA, 19 nt, Homo sapiens
  misc_RNA (1)...(19): siRNA sense strand
caaauuucagacuugcuua

SEQ ID NO: 1779932 - RNA, 19 nt, Homo sapiens
  misc_RNA (1)...(19): siRNA sense strand
caacaaacagcagccaaga

SEQ ID NO: 1779933 - RNA, 19 nt, Homo sapiens
  misc_RNA (1)...(19): siRNA sense strand
aaacgaucaggaugucuua

SEQ ID NO: 1779934 - RNA, 19 nt, Homo sapiens
  misc_RNA (1)...(19): siRNA sense strand
ucacuguguuugaaauugu

SEQ ID NO: 1779935 - RNA, 19 nt, Homo sapiens
  misc_RNA (1)...(19): siRNA sense strand
cagcagucuucauauguau

SEQ ID NO: 1779936 - RNA, 19 nt, Homo sapiens
  misc_RNA (1)...(19): siRNA sense strand
gaugucaguuccaauuguc

SEQ ID NO: 1779937 - RNA, 19 nt, Homo sapiens
  misc_RNA (1)...(19): siRNA sense strand
gcaagcaacucuaccuuua

SEQ ID NO: 1779938 - RNA, 19 nt, Homo sapiens
  misc_RNA (1)...(19): siRNA sense strand
ggaagaaauugucaacaua

SEQ ID NO: 1779939 - RNA, 19 nt, Homo sapiens
  misc_RNA (1)...(19): siRNA sense strand
gaaguuauccucucaaauu

SEQ ID NO: 1779940 - RNA, 19 nt, Homo sapiens
  misc_RNA (1)...(19): siRNA sense strand
cgaaagcccuguaauugua

SEQ ID NO: 1779941 - RNA, 19 nt, Homo sapiens
  misc_RNA (1)...(19): siRNA sense strand
gaagucaacugauuaauac

SEQ ID NO: 1779942 - RNA, 19 nt, Homo sapiens
  misc_RNA (1)...(19): siRNA sense strand
gaacagggaauguggguua

SEQ ID NO: 1779943 - RNA, 19 nt, Homo sapiens
  misc_RNA (1)...(19): siRNA sense strand
gcaaauguauuggcuguaa

SEQ ID NO: 1779944 - RNA, 19 nt, Homo sapiens
  misc_RNA (1)...(19): siRNA sense strand
ggaagucaacugauuaaua

SEQ ID NO: 1779945 - RNA, 19 nt, Homo sapiens
  misc_RNA (1)...(19): siRNA sense strand
gaagcaaguuucauuaugu

SEQ ID NO: 1779946 - RNA, 19 nt, Homo sapiens
  misc_RNA (1)...(19): siRNA sense strand
ggaagacauugaugcauuu

SEQ ID NO: 1779947 - RNA, 19 nt, Homo sapiens
  misc_RNA (1)...(19): siRNA sense strand
caauccaacuucacaaaua

SEQ ID NO: 1779948 - RNA, 19 nt, Homo sapiens
  misc_RNA (1)...(19): siRNA sense strand
ggacacugguauaacuuua

SEQ ID NO: 1779949 - RNA, 19 nt, Homo sapiens
  misc_RNA (1)...(19): siRNA sense strand
gucaggagaugcuaaguua

SEQ ID NO: 1779950 - RNA, 19 nt, Homo sapiens
  misc_RNA (1)...(19): siRNA sense strand
caacacagacaccaaauaa

SEQ ID NO: 1779951 - RNA, 19 nt, Homo sapiens
  misc_RNA (1)...(19): siRNA sense strand
ggaagcaaguuucauuaug

SEQ ID NO: 1779952 - RNA, 19 nt, Homo sapiens
  misc_RNA (1)...(19): siRNA sense strand
agacagaacuggaagaaau

SEQ ID NO: 1779953 - RNA, 19 nt, Homo sapiens
  misc_RNA (1)...(19): siRNA sense strand
gaagaaagcccggaaagga

SEQ ID NO: 1779954 - RNA, 19 nt, Homo sapiens
  misc_RNA (1)...(19): siRNA sense strand
gcagugaauaccacaauua

SEQ ID NO: 1779955 - RNA, 19 nt, Homo sapiens
  misc_RNA (1)...(19): siRNA sense strand
gaaauuguauugugauugc

SEQ ID NO: 1779956 - RNA, 19 nt, Homo sapiens
  misc_RNA (1)...(19): siRNA sense strand
gaaauaauggacacuggua

SEQ ID NO: 1779957 - RNA, 19 nt, Homo sapiens
  misc_RNA (1)...(19): siRNA sense strand
gaaaggagggagaaucuga

SEQ ID NO: 1779958 - RNA, 19 nt, Homo sapiens
  misc_RNA (1)...(19): siRNA sense strand
uguauuggcuguaagaauu

SEQ ID NO: 1779959 - RNA, 19 nt, Homo sapiens
  misc_RNA (1)...(19): siRNA sense strand
caaagccagugguuguuaa

SEQ ID NO: 1779960 - RNA, 19 nt, Homo sapiens
  misc_RNA (1)...(19): siRNA sense strand
ggaugauacuugaggaauu

SEQ ID NO: 1779961 - RNA, 19 nt, Homo sapiens
  misc_RNA (1)...(19): siRNA sense strand
gugaauaccacaauuacua

SEQ ID NO: 1779962 - RNA, 19 nt, Homo sapiens
  misc_RNA (1)...(19): siRNA sense strand
uaacuuuaguggaugauga

SEQ ID NO: 1779963 - RNA, 19 nt, Homo sapiens
  misc_RNA (1)...(19): siRNA sense strand
caacugcaauuguacuaau

SEQ ID NO: 1779964 - RNA, 19 nt, Homo sapiens
  misc_RNA (1)...(19): siRNA sense strand
gcaaagccagugguuguua

SEQ ID NO: 1779965 - RNA, 19 nt, Homo sapiens
  misc_RNA (1)...(19): siRNA sense strand
ucacgaagcugaucuuugc

SEQ ID NO: 1779966 - RNA, 19 nt, Homo sapiens
  misc_RNA (1)...(19): siRNA sense strand
caaaggguguaauugcaaa

SEQ ID NO: 1779967 - RNA, 19 nt, Homo sapiens
  misc_RNA (1)...(19): siRNA sense strand
uaaccacacuaaccaaguu

SEQ ID NO: 1779968 - RNA, 19 nt, Homo sapiens
  misc_RNA (1)...(19): siRNA sense strand
gaugauacuugaggaauuc

SEQ ID NO: 1779969 - RNA, 19 nt, Homo sapiens
  misc_RNA (1)...(19): siRNA sense strand
uaaaguaguuaccauugga

SEQ ID NO: 1779970 - RNA, 19 nt, Homo sapiens
  misc_RNA (1)...(19): siRNA sense strand
uaaccaaguugcagugaau

SEQ ID NO: 1779971 - RNA, 19 nt, Homo sapiens
  misc_RNA (1)...(19): siRNA sense strand
caucacaguuuaagacaau

SEQ ID NO: 1779972 - RNA, 19 nt, Homo sapiens
  misc_RNA (1)...(19): siRNA sense strand
caaauaaggcagugaaauc

SEQ ID NO: 1779973 - RNA, 19 nt, Homo sapiens
  misc_RNA (1)...(19): siRNA sense strand
caucaaagaccauaacaau

SEQ ID NO: 1779974 - RNA, 19 nt, Homo sapiens
  misc_RNA (1)...(19): siRNA sense strand
gcagcaaauuaaaguaguu

SEQ ID NO: 1779975 - RNA, 19 nt, Homo sapiens
  misc_RNA (1)...(19): siRNA sense strand
caguacagauugcuaagaa

SEQ ID NO: 1779976 - RNA, 19 nt, Homo sapiens
  misc_RNA (1)...(19): siRNA sense strand
cauuauguccgacuuguua

SEQ ID NO: 1779977 - RNA, 19 nt, Homo sapiens
  misc_RNA (1)...(19): siRNA sense strand
ggugaaaccugucauuggu

SEQ ID NO: 1779978 - RNA, 19 nt, Homo sapiens
  misc_RNA (1)...(19): siRNA sense strand
aaacuacugugaaugcuau

SEQ ID NO: 1779979 - RNA, 19 nt, Homo sapiens
  misc_RNA (1)...(19): siRNA sense strand
caaucacaguguacaguaa

SEQ ID NO: 1779980 - RNA, 19 nt, Homo sapiens
  misc_RNA (1)...(19): siRNA sense strand
cagaagccuuuaagccuaa

SEQ ID NO: 1779981 - RNA, 19 nt, Homo sapiens
  misc_RNA (1)...(19): siRNA sense strand
ccaggaagucaacugauua

SEQ ID NO: 1779982 - RNA, 19 nt, Homo sapiens
  misc_RNA (1)...(19): siRNA sense strand
caacucagcccucuguguu

SEQ ID NO: 1779983 - RNA, 19 nt, Homo sapiens
  misc_RNA (1)...(19): siRNA sense strand
caucaacucugcaggaaag

SEQ ID NO: 1779984 - RNA, 19 nt, Homo sapiens
  misc_RNA (1)...(19): siRNA sense strand
cuacagcagucuucauaug

SEQ ID NO: 1779985 - RNA, 19 nt, Homo sapiens
  misc_RNA (1)...(19): siRNA sense strand
caaagaccauaacaauauc

SEQ ID NO: 1779986 - RNA, 19 nt, Homo sapiens
  misc_RNA (1)...(19): siRNA sense strand
ugaaagugguguuauugga

SEQ ID NO: 1779987 - RNA, 19 nt, Homo sapiens
  misc_RNA (1)...(19): siRNA sense strand
aaauagccaucucaccuuu

SEQ ID NO: 1779988 - RNA, 19 nt, Homo sapiens
  misc_RNA (1)...(19): siRNA sense strand
ggaugucaguuccaauugu

SEQ ID NO: 1779989 - RNA, 19 nt, Homo sapiens
  misc_RNA (1)...(19): siRNA sense strand
ggaauucggacgauguuug

SEQ ID NO: 1779990 - RNA, 19 nt, Homo sapiens
  misc_RNA (1)...(19): siRNA sense strand
caacaccagcuuuaaauag

SEQ ID NO: 1779991 - RNA, 19 nt, Homo sapiens
  misc_RNA (1)...(19): siRNA sense strand
acagcagucuucauaugua

SEQ ID NO: 1779992 - RNA, 19 nt, Homo sapiens
  misc_RNA (1)...(19): siRNA sense strand
guuacagacccaacaguua

SEQ ID NO: 1779993 - RNA, 19 nt, Homo sapiens
  misc_RNA (1)...(19): siRNA sense strand
gaauucggacgauguuuga

SEQ ID NO: 1779994 - RNA, 19 nt, Homo sapiens
  misc_RNA (1)...(19): siRNA sense strand
gcugaagccacauguaauu

SEQ ID NO: 1779995 - RNA, 19 nt, Homo sapiens
  misc_RNA (1)...(19): siRNA sense strand
acaacaauuuggaacauga

SEQ ID NO: 1779996 - RNA, 19 nt, Homo sapiens
  misc_RNA (1)...(19): siRNA sense strand
uuacagacccaacaguuaa

SEQ ID NO: 1779997 - RNA, 19 nt, Homo sapiens
  misc_RNA (1)...(19): siRNA sense strand
gaaauccagaagccuuuaa

SEQ ID NO: 1779998 - RNA, 19 nt, Homo sapiens
  misc_RNA (1)...(19): siRNA sense strand
guuauccucucaaauuuca

SEQ ID NO: 1779999 - RNA, 19 nt, Homo sapiens
  misc_RNA (1)...(19): siRNA sense strand
uauugaggcuguuauuguu

SEQ ID NO: 1780000 - RNA, 19 nt, Homo sapiens
  misc_RNA (1)...(19): siRNA sense strand
aggaagacauugaugcauu

SEQ ID NO: 1780001 - RNA, 19 nt, Homo sapiens
  misc_RNA (1)...(19): siRNA sense strand
gaaaggaaaggagggagaa

SEQ ID NO: 1780002 - RNA, 19 nt, Homo sapiens
  misc_RNA (1)...(19): siRNA sense strand
ccacaccacugccacagau

SEQ ID NO: 1780003 - RNA, 19 nt, Homo sapiens
  misc_RNA (1)...(19): siRNA sense strand
uaaaccagauggacagaag

SEQ ID NO: 1780004 - RNA, 19 nt, Homo sapiens
  misc_RNA (1)...(19): siRNA sense strand
guauaacuuuaguggauga

SEQ ID NO: 1780005 - RNA, 19 nt, Homo sapiens
  misc_RNA (1)...(19): siRNA sense strand
ccaacaccagcuuuaaaua

SEQ ID NO: 1780006 - RNA, 19 nt, Homo sapiens
  misc_RNA (1)...(19): siRNA sense strand
gcacaucacaguuuaagac

SEQ ID NO: 1780007 - RNA, 19 nt, Homo sapiens
  misc_RNA (1)...(19): siRNA sense strand
gaaagugguguuauuggau

SEQ ID NO: 1780008 - RNA, 19 nt, Homo sapiens
  misc_RNA (1)...(19): siRNA sense strand
uggaagaaauugucaacau

SEQ ID NO: 1780009 - RNA, 19 nt, Homo sapiens
  misc_RNA (1)...(19): siRNA sense strand
gaacuggaagaaauuguca

SEQ ID NO: 1780010 - RNA, 19 nt, Homo sapiens
  misc_RNA (1)...(19): siRNA sense strand
uagcugaagccacauguaa

SEQ ID NO: 1780011 - RNA, 19 nt, Homo sapiens
  misc_RNA (1)...(19): siRNA sense strand
ccacagcaacggcuuauca

SEQ ID NO: 1780012 - RNA, 19 nt, Homo sapiens
  misc_RNA (1)...(19): siRNA sense strand
gugcagaccaucacuguug

SEQ ID NO: 1780013 - RNA, 19 nt, Homo sapiens
  misc_RNA (1)...(19): siRNA sense strand
cgaagcugaucuuugcaaa

SEQ ID NO: 1780014 - RNA, 19 nt, Homo sapiens
  misc_RNA (1)...(19): siRNA sense strand
aaacaguacagauugcuaa

SEQ ID NO: 1780015 - RNA, 19 nt, Homo sapiens
  misc_RNA (1)...(19): siRNA sense strand
gacaucugaucuuaaacuu

SEQ ID NO: 1780016 - RNA, 19 nt, Homo sapiens
  misc_RNA (1)...(19): siRNA sense strand
cggaacggaugauacuuga

SEQ ID NO: 1780017 - RNA, 19 nt, Homo sapiens
  misc_RNA (1)...(19): siRNA sense strand
ccagauggacagaaguuaa

SEQ ID NO: 1780018 - RNA, 19 nt, Homo sapiens
  misc_RNA (1)...(19): siRNA sense strand
ggagacagaacuggaagaa

SEQ ID NO: 1780019 - RNA, 19 nt, Homo sapiens
  misc_RNA (1)...(19): siRNA sense strand
agacgaaguuauccucuca

SEQ ID NO: 1780020 - RNA, 19 nt, Homo sapiens
  misc_RNA (1)...(19): siRNA sense strand
ggaaaggaagacauugaug

SEQ ID NO: 1780021 - RNA, 19 nt, Homo sapiens
  misc_RNA (1)...(19): siRNA sense strand
gaccauaacaauaucugaa

SEQ ID NO: 1780022 - RNA, 19 nt, Homo sapiens
  misc_RNA (1)...(19): siRNA sense strand
guauugaggcuguuauugu

SEQ ID NO: 1780023 - RNA, 19 nt, Homo sapiens
  misc_RNA (1)...(19): siRNA sense strand
gcagaugcagcugaaguaa

SEQ ID NO: 1780024 - RNA, 19 nt, Homo sapiens
  misc_RNA (1)...(19): siRNA sense strand
cccaggaagucaacugauu

SEQ ID NO: 1780025 - RNA, 19 nt, Homo sapiens
  misc_RNA (1)...(19): siRNA sense strand
ccaaucacaguguacagua

SEQ ID NO: 1780026 - RNA, 19 nt, Homo sapiens
  misc_RNA (1)...(19): siRNA sense strand
gacagaacuggaagaaauu

SEQ ID NO: 1780027 - RNA, 19 nt, Homo sapiens
  misc_RNA (1)...(19): siRNA sense strand
gaaucugaucgacgucaua

SEQ ID NO: 1780028 - RNA, 19 nt, Homo sapiens
  misc_RNA (1)...(19): siRNA sense strand
gauggacagaaguuaauuu

SEQ ID NO: 1780029 - RNA, 19 nt, Homo sapiens
  misc_RNA (1)...(19): siRNA sense strand
gcggaugucaguuccaauu

SEQ ID NO: 1780030 - RNA, 19 nt, Homo sapiens
  misc_RNA (1)...(19): siRNA sense strand
gacgauguuugaugagugu

SEQ ID NO: 1780031 - RNA, 19 nt, Homo sapiens
  misc_RNA (1)...(19): siRNA sense strand
caaauuucagacuugcuua

SEQ ID NO: 1780032 - RNA, 19 nt, Homo sapiens
  misc_RNA (1)...(19): siRNA sense strand
caacaaacagcagccaaga

SEQ ID NO: 1780033 - RNA, 19 nt, Homo sapiens
  misc_RNA (1)...(19): siRNA sense strand
aaacgaucaggaugucuua

SEQ ID NO: 1780034 - RNA, 19 nt, Homo sapiens
  misc_RNA (1)...(19): siRNA sense strand
ucacuguguuugaaauugu

SEQ ID NO: 1780035 - RNA, 19 nt, Homo sapiens
  misc_RNA (1)...(19): siRNA sense strand
cagcagucuucauauguau

SEQ ID NO: 1780036 - RNA, 19 nt, Homo sapiens
  misc_RNA (1)...(19): siRNA sense strand
gaugucaguuccaauuguc

SEQ ID NO: 1780037 - RNA, 19 nt, Homo sapiens
  misc_RNA (1)...(19): siRNA sense strand
gaacagagcuggaugacua

SEQ ID NO: 1780038 - RNA, 19 nt, Homo sapiens
  misc_RNA (1)...(19): siRNA sense strand
ggaagaacaugaacucaaa

SEQ ID NO: 1780039 - RNA, 19 nt, Homo sapiens
  misc_RNA (1)...(19): siRNA sense strand
ggaugacuauggccaauuu

SEQ ID NO: 1780040 - RNA, 19 nt, Homo sapiens
  misc_RNA (1)...(19): siRNA sense strand
gaacaugaacucaaagaug

SEQ ID NO: 1780041 - RNA, 19 nt, Homo sapiens
  misc_RNA (1)...(19): siRNA sense strand
ggaagagguugaugauuuc

SEQ ID NO: 1780042 - RNA, 19 nt, Homo sapiens
  misc_RNA (1)...(19): siRNA sense strand
ggagauggaucggaugaaa

SEQ ID NO: 1780043 - RNA, 19 nt, Homo sapiens
  misc_RNA (1)...(19): siRNA sense strand
aggaagagguugaugauuu

SEQ ID NO: 1780044 - RNA, 19 nt, Homo sapiens
  misc_RNA (1)...(19): siRNA sense strand
gaggaaagccgaagagaug

SEQ ID NO: 1780045 - RNA, 19 nt, Homo sapiens
  misc_RNA (1)...(19): siRNA sense strand
gcaagaaagagaaacguaa

SEQ ID NO: 1780046 - RNA, 19 nt, Homo sapiens
  misc_RNA (1)...(19): siRNA sense strand
acgcugagcucuaugauga

SEQ ID NO: 1780047 - RNA, 19 nt, Homo sapiens
  misc_RNA (1)...(19): siRNA sense strand
uccagaagauacuaacuua

SEQ ID NO: 1780048 - RNA, 19 nt, Homo sapiens
  misc_RNA (1)...(19): siRNA sense strand
gagaaggaguaaagguuga

SEQ ID NO: 1780049 - RNA, 19 nt, Homo sapiens
  misc_RNA (1)...(19): siRNA sense strand
gaaggaagaauaugauaca

SEQ ID NO: 1780050 - RNA, 19 nt, Homo sapiens
  misc_RNA (1)...(19): siRNA sense strand
uuaaacagcgcaacaagua

SEQ ID NO: 1780051 - RNA, 19 nt, Homo sapiens
  misc_RNA (1)...(19): siRNA sense strand
aacaugaacucaaagauga

SEQ ID NO: 1780052 - RNA, 19 nt, Homo sapiens
  misc_RNA (1)...(19): siRNA sense strand
gaacuagaaucuguguuag

SEQ ID NO: 1780053 - RNA, 19 nt, Homo sapiens
  misc_RNA (1)...(19): siRNA sense strand
gaaaugguggccuugcuaa

SEQ ID NO: 1780054 - RNA, 19 nt, Homo sapiens
  misc_RNA (1)...(19): siRNA sense strand
ucaagacagugccaaagaa

SEQ ID NO: 1780055 - RNA, 19 nt, Homo sapiens
  misc_RNA (1)...(19): siRNA sense strand
caaggaaagagaagaauga

SEQ ID NO: 1780056 - RNA, 19 nt, Homo sapiens
  misc_RNA (1)...(19): siRNA sense strand
acaaaucguucaagacaga

SEQ ID NO: 1780057 - RNA, 19 nt, Homo sapiens
  misc_RNA (1)...(19): siRNA sense strand
agaacuagaaucuguguua

SEQ ID NO: 1780058 - RNA, 19 nt, Homo sapiens
  misc_RNA (1)...(19): siRNA sense strand
ggaaagaaaaccaaagaua

SEQ ID NO: 1780059 - RNA, 19 nt, Homo sapiens
  misc_RNA (1)...(19): siRNA sense strand
gaaggaguuuggagaugga

SEQ ID NO: 1780060 - RNA, 19 nt, Homo sapiens
  misc_RNA (1)...(19): siRNA sense strand
ucacagagaucauuaaacc

SEQ ID NO: 1780061 - RNA, 19 nt, Homo sapiens
  misc_RNA (1)...(19): siRNA sense strand
gagaaggaguuuggagaug

SEQ ID NO: 1780062 - RNA, 19 nt, Homo sapiens
  misc_RNA (1)...(19): siRNA sense strand
caagaaagagaaacguaaa

SEQ ID NO: 1780063 - RNA, 19 nt, Homo sapiens
  misc_RNA (1)...(19): siRNA sense strand
ggccacaggucaugcaaga

SEQ ID NO: 1780064 - RNA, 19 nt, Homo sapiens
  misc_RNA (1)...(19): siRNA sense strand
aaauggaccuggagaagga

SEQ ID NO: 1780065 - RNA, 19 nt, Homo sapiens
  misc_RNA (1)...(19): siRNA sense strand
ggaaaugguggccuugcua

SEQ ID NO: 1780066 - RNA, 19 nt, Homo sapiens
  misc_RNA (1)...(19): siRNA sense strand
gcugguagcuuucauucgu

SEQ ID NO: 1780067 - RNA, 19 nt, Homo sapiens
  misc_RNA (1)...(19): siRNA sense strand
caaagaagcaucgggaaau

SEQ ID NO: 1780068 - RNA, 19 nt, Homo sapiens
  misc_RNA (1)...(19): siRNA sense strand
cgaggacgcugagcucuau

SEQ ID NO: 1780069 - RNA, 19 nt, Homo sapiens
  misc_RNA (1)...(19): siRNA sense strand
ugacaaaucguucaagaca

SEQ ID NO: 1780070 - RNA, 19 nt, Homo sapiens
  misc_RNA (1)...(19): siRNA sense strand
caagagcaccuucaucauc

SEQ ID NO: 1780071 - RNA, 19 nt, Homo sapiens
  misc_RNA (1)...(19): siRNA sense strand
cagaguaccugcugaacca

SEQ ID NO: 1780072 - RNA, 19 nt, Homo sapiens
  misc_RNA (1)...(19): siRNA sense strand
ggacaaagcaaggaaagag

SEQ ID NO: 1780073 - RNA, 19 nt, Homo sapiens
  misc_RNA (1)...(19): siRNA sense strand
aggaagaacuagaaucugu

SEQ ID NO: 1780074 - RNA, 19 nt, Homo sapiens
  misc_RNA (1)...(19): siRNA sense strand
caaggaagaacuagaaucu

SEQ ID NO: 1780075 - RNA, 19 nt, Homo sapiens
  misc_RNA (1)...(19): siRNA sense strand
ugaaauggaagaacaugaa

SEQ ID NO: 1780076 - RNA, 19 nt, Homo sapiens
  misc_RNA (1)...(19): siRNA sense strand
gcaaggaaagagaagaaug

SEQ ID NO: 1780077 - RNA, 19 nt, Homo sapiens
  misc_RNA (1)...(19): siRNA sense strand
aaagaagcaucgggaaaug

SEQ ID NO: 1780078 - RNA, 19 nt, Homo sapiens
  misc_RNA (1)...(19): siRNA sense strand
agacagugccaaagaauug

SEQ ID NO: 1780079 - RNA, 19 nt, Homo sapiens
  misc_RNA (1)...(19): siRNA sense strand
ggaggaagaagaaaauuuu

SEQ ID NO: 1780080 - RNA, 19 nt, Homo sapiens
  misc_RNA (1)...(19): siRNA sense strand
caacaaguagucaaagcaa

SEQ ID NO: 1780081 - RNA, 19 nt, Homo sapiens
  misc_RNA (1)...(19): siRNA sense strand
gaagaacuagaaucugugu

SEQ ID NO: 1780082 - RNA, 19 nt, Homo sapiens
  misc_RNA (1)...(19): siRNA sense strand
gaaaauccauuagaugaca

SEQ ID NO: 1780083 - RNA, 19 nt, Homo sapiens
  misc_RNA (1)...(19): siRNA sense strand
ggaugaaaaugaaauggaa

SEQ ID NO: 1780084 - RNA, 19 nt, Homo sapiens
  misc_RNA (1)...(19): siRNA sense strand
gaagaugcaccaaaacaaa

SEQ ID NO: 1780085 - RNA, 19 nt, Homo sapiens
  misc_RNA (1)...(19): siRNA sense strand
uugaugauuucccaacuuu

SEQ ID NO: 1780086 - RNA, 19 nt, Homo sapiens
  misc_RNA (1)...(19): siRNA sense strand
gcucuaugaugaccuuuac

SEQ ID NO: 1780087 - RNA, 19 nt, Homo sapiens
  misc_RNA (1)...(19): siRNA sense strand
uguacaaccugccauagug

SEQ ID NO: 1780088 - RNA, 19 nt, Homo sapiens
  misc_RNA (1)...(19): siRNA sense strand
aaagguugauccagaagau

SEQ ID NO: 1780089 - RNA, 19 nt, Homo sapiens
  misc_RNA (1)...(19): siRNA sense strand
ucaaagaagcaucgggaaa

SEQ ID NO: 1780090 - RNA, 19 nt, Homo sapiens
  misc_RNA (1)...(19): siRNA sense strand
gaaagagaagaaugagcuu

SEQ ID NO: 1780091 - RNA, 19 nt, Homo sapiens
  misc_RNA (1)...(19): siRNA sense strand
guucuuaucagcuguacaa

SEQ ID NO: 1780092 - RNA, 19 nt, Homo sapiens
  misc_RNA (1)...(19): siRNA sense strand
gcugaaccacaaacaauga

SEQ ID NO: 1780093 - RNA, 19 nt, Homo sapiens
  misc_RNA (1)...(19): siRNA sense strand
gaagauaguccccaggaaa

SEQ ID NO: 1780094 - RNA, 19 nt, Homo sapiens
  misc_RNA (1)...(19): siRNA sense strand
ggaggaugguaaagacagu

SEQ ID NO: 1780095 - RNA, 19 nt, Homo sapiens
  misc_RNA (1)...(19): siRNA sense strand
guacaaccugccauaguga

SEQ ID NO: 1780096 - RNA, 19 nt, Homo sapiens
  misc_RNA (1)...(19): siRNA sense strand
acaaugaguguucuuauca

SEQ ID NO: 1780097 - RNA, 19 nt, Homo sapiens
  misc_RNA (1)...(19): siRNA sense strand
aguaaagguugauccagaa

SEQ ID NO: 1780098 - RNA, 19 nt, Homo sapiens
  misc_RNA (1)...(19): siRNA sense strand
cauggaaggaagaauauga

SEQ ID NO: 1780099 - RNA, 19 nt, Homo sapiens
  misc_RNA (1)...(19): siRNA sense strand
caugaagaaucacgagaag

SEQ ID NO: 1780100 - RNA, 19 nt, Homo sapiens
  misc_RNA (1)...(19): siRNA sense strand
ggaaggaagaauaugauac

SEQ ID NO: 1780101 - RNA, 19 nt, Homo sapiens
  misc_RNA (1)...(19): siRNA sense strand
gcagagaaggcgaggaaag

SEQ ID NO: 1780102 - RNA, 19 nt, Homo sapiens
  misc_RNA (1)...(19): siRNA sense strand
guagucaaagcaagaaaga

SEQ ID NO: 1780103 - RNA, 19 nt, Homo sapiens
  misc_RNA (1)...(19): siRNA sense strand
gcaacaaguagucaaagca

SEQ ID NO: 1780104 - RNA, 19 nt, Homo sapiens
  misc_RNA (1)...(19): siRNA sense strand
aaccugccauagugaauuu

SEQ ID NO: 1780105 - RNA, 19 nt, Homo sapiens
  misc_RNA (1)...(19): siRNA sense strand
ugaagaaucacgagaaguc

SEQ ID NO: 1780106 - RNA, 19 nt, Homo sapiens
  misc_RNA (1)...(19): siRNA sense strand
ugugacaaaucguucaaga

SEQ ID NO: 1780107 - RNA, 19 nt, Homo sapiens
  misc_RNA (1)...(19): siRNA sense strand
gaaaaggccaugaagaauc

SEQ ID NO: 1780108 - RNA, 19 nt, Homo sapiens
  misc_RNA (1)...(19): siRNA sense strand
ucaaagcaagaaagagaaa

SEQ ID NO: 1780109 - RNA, 19 nt, Homo sapiens
  misc_RNA (1)...(19): siRNA sense strand
caaagaauuggaagauagu

SEQ ID NO: 1780110 - RNA, 19 nt, Homo sapiens
  misc_RNA (1)...(19): siRNA sense strand
caagacagugccaaagaau

SEQ ID NO: 1780111 - RNA, 19 nt, Homo sapiens
  misc_RNA (1)...(19): siRNA sense strand
uccauuagaugacaauucu

SEQ ID NO: 1780112 - RNA, 19 nt, Homo sapiens
  misc_RNA (1)...(19): siRNA sense strand
gaagaaucacgagaaguca

SEQ ID NO: 1780113 - RNA, 19 nt, Homo sapiens
  misc_RNA (1)...(19): siRNA sense strand
gacaaagcaaggaaagaga

SEQ ID NO: 1780114 - RNA, 19 nt, Homo sapiens
  misc_RNA (1)...(19): siRNA sense strand
gcaccuucaucaucgucuu

SEQ ID NO: 1780115 - RNA, 19 nt, Homo sapiens
  misc_RNA (1)...(19): siRNA sense strand
ccagaagauacuaacuuaa

SEQ ID NO: 1780116 - RNA, 19 nt, Homo sapiens
  misc_RNA (1)...(19): siRNA sense strand
cauuagaugacaauucuga

SEQ ID NO: 1780117 - RNA, 19 nt, Homo sapiens
  misc_RNA (1)...(19): siRNA sense strand
aagaugaggaggaugguaa

SEQ ID NO: 1780118 - RNA, 19 nt, Homo sapiens
  misc_RNA (1)...(19): siRNA sense strand
cagaaaaggccaugaagaa

SEQ ID NO: 1780119 - RNA, 19 nt, Homo sapiens
  misc_RNA (1)...(19): siRNA sense strand
gcaagagcaccuucaucau

SEQ ID NO: 1780120 - RNA, 19 nt, Homo sapiens
  misc_RNA (1)...(19): siRNA sense strand
guaaauggaccuggagaag

SEQ ID NO: 1780121 - RNA, 19 nt, Homo sapiens
  misc_RNA (1)...(19): siRNA sense strand
gaaaacuuguggaagaaca

SEQ ID NO: 1780122 - RNA, 19 nt, Homo sapiens
  misc_RNA (1)...(19): siRNA sense strand
ggaagaaauggaagaugca

SEQ ID NO: 1780123 - RNA, 19 nt, Homo sapiens
  misc_RNA (1)...(19): siRNA sense strand
ccaugaagaaucacgagaa

SEQ ID NO: 1780124 - RNA, 19 nt, Homo sapiens
  misc_RNA (1)...(19): siRNA sense strand
ugaggaggaugguaaagac

SEQ ID NO: 1780125 - RNA, 19 nt, Homo sapiens
  misc_RNA (1)...(19): siRNA sense strand
aaaaggccaugaagaauca

SEQ ID NO: 1780126 - RNA, 19 nt, Homo sapiens
  misc_RNA (1)...(19): siRNA sense strand
agucaaagcaagaaagaga

SEQ ID NO: 1780127 - RNA, 19 nt, Homo sapiens
  misc_RNA (1)...(19): siRNA sense strand
caaccugccauagugaauu

SEQ ID NO: 1780128 - RNA, 19 nt, Homo sapiens
  misc_RNA (1)...(19): siRNA sense strand
uagaggaagagguugauga

SEQ ID NO: 1780129 - RNA, 19 nt, Homo sapiens
  misc_RNA (1)...(19): siRNA sense strand
uugcauggaaggaagaaua

SEQ ID NO: 1780130 - RNA, 19 nt, Homo sapiens
  misc_RNA (1)...(19): siRNA sense strand
agaugacaauucugaggaa

SEQ ID NO: 1780131 - RNA, 19 nt, Homo sapiens
  misc_RNA (1)...(19): siRNA sense strand
gaaauggaagaacaugaac

SEQ ID NO: 1780132 - RNA, 19 nt, Homo sapiens
  misc_RNA (1)...(19): siRNA sense strand
acaaguagucaaagcaaga

SEQ ID NO: 1780133 - RNA, 19 nt, Homo sapiens
  misc_RNA (1)...(19): siRNA sense strand
cauagugaauuuccaucuc

SEQ ID NO: 1780134 - RNA, 19 nt, Homo sapiens
  misc_RNA (1)...(19): siRNA sense strand
uaaaccaugugaugaucca

SEQ ID NO: 1780135 - RNA, 19 nt, Homo sapiens
  misc_RNA (1)...(19): siRNA sense strand
gcuggaggaggaagaagaa

SEQ ID NO: 1780136 - RNA, 19 nt, Homo sapiens
  misc_RNA (1)...(19): siRNA sense strand
acaaagcaaggaaagagaa

SEQ ID NO: 1780137 - RNA, 19 nt, Homo sapiens
  misc_RNA (1)...(19): siRNA sense strand
gaacagagcuggaugacua

SEQ ID NO: 1780138 - RNA, 19 nt, Homo sapiens
  misc_RNA (1)...(19): siRNA sense strand
ggaagaacaugaacucaaa

SEQ ID NO: 1780139 - RNA, 19 nt, Homo sapiens
  misc_RNA (1)...(19): siRNA sense strand
ggaugacuauggccaauuu

SEQ ID NO: 1780140 - RNA, 19 nt, Homo sapiens
  misc_RNA (1)...(19): siRNA sense strand
gaacaugaacucaaagaug

SEQ ID NO: 1780141 - RNA, 19 nt, Homo sapiens
  misc_RNA (1)...(19): siRNA sense strand
ggaagagguugaugauuuc

SEQ ID NO: 1780142 - RNA, 19 nt, Homo sapiens
  misc_RNA (1)...(19): siRNA sense strand
ggagauggaucggaugaaa

SEQ ID NO: 1780143 - RNA, 19 nt, Homo sapiens
  misc_RNA (1)...(19): siRNA sense strand
aggaagagguugaugauuu

SEQ ID NO: 1780144 - RNA, 19 nt, Homo sapiens
  misc_RNA (1)...(19): siRNA sense strand
gaggaaagccgaagagaug

SEQ ID NO: 1780145 - RNA, 19 nt, Homo sapiens
  misc_RNA (1)...(19): siRNA sense strand
gcaagaaagagaaacguaa

SEQ ID NO: 1780146 - RNA, 19 nt, Homo sapiens
  misc_RNA (1)...(19): siRNA sense strand
acgcugagcucuaugauga

SEQ ID NO: 1780147 - RNA, 19 nt, Homo sapiens
  misc_RNA (1)...(19): siRNA sense strand
uccagaagauacuaacuua

SEQ ID NO: 1780148 - RNA, 19 nt, Homo sapiens
  misc_RNA (1)...(19): siRNA sense strand
gagaaggaguaaagguuga

SEQ ID NO: 1780149 - RNA, 19 nt, Homo sapiens
  misc_RNA (1)...(19): siRNA sense strand
gaaggaagaauaugauaca

SEQ ID NO: 1780150 - RNA, 19 nt, Homo sapiens
  misc_RNA (1)...(19): siRNA sense strand
uuaaacagcgcaacaagua

SEQ ID NO: 1780151 - RNA, 19 nt, Homo sapiens
  misc_RNA (1)...(19): siRNA sense strand
gaacuagaaucuguguuag

SEQ ID NO: 1780152 - RNA, 19 nt, Homo sapiens
  misc_RNA (1)...(19): siRNA sense strand
aacaugaacucaaagauga

SEQ ID NO: 1780153 - RNA, 19 nt, Homo sapiens
  misc_RNA (1)...(19): siRNA sense strand
gaaaugguggccuugcuaa

SEQ ID NO: 1780154 - RNA, 19 nt, Homo sapiens
  misc_RNA (1)...(19): siRNA sense strand
ucaagacagugccaaagaa

SEQ ID NO: 1780155 - RNA, 19 nt, Homo sapiens
  misc_RNA (1)...(19): siRNA sense strand
caaggaaagagaagaauga

SEQ ID NO: 1780156 - RNA, 19 nt, Homo sapiens
  misc_RNA (1)...(19): siRNA sense strand
acaaaucguucaagacaga

SEQ ID NO: 1780157 - RNA, 19 nt, Homo sapiens
  misc_RNA (1)...(19): siRNA sense strand
agaacuagaaucuguguua

SEQ ID NO: 1780158 - RNA, 19 nt, Homo sapiens
  misc_RNA (1)...(19): siRNA sense strand
ggaaagaaaaccaaagaua

SEQ ID NO: 1780159 - RNA, 19 nt, Homo sapiens
  misc_RNA (1)...(19): siRNA sense strand
gaaggaguuuggagaugga

SEQ ID NO: 1780160 - RNA, 19 nt, Homo sapiens
  misc_RNA (1)...(19): siRNA sense strand
ucacagagaucauuaaacc

SEQ ID NO: 1780161 - RNA, 19 nt, Homo sapiens
  misc_RNA (1)...(19): siRNA sense strand
gagaaggaguuuggagaug

SEQ ID NO: 1780162 - RNA, 19 nt, Homo sapiens
  misc_RNA (1)...(19): siRNA sense strand
caagaaagagaaacguaaa

SEQ ID NO: 1780163 - RNA, 19 nt, Homo sapiens
  misc_RNA (1)...(19): siRNA sense strand
ggccacaggucaugcaaga

SEQ ID NO: 1780164 - RNA, 19 nt, Homo sapiens
  misc_RNA (1)...(19): siRNA sense strand
aaauggaccuggagaagga

SEQ ID NO: 1780165 - RNA, 19 nt, Homo sapiens
  misc_RNA (1)...(19): siRNA sense strand
ugaaaugauugccaaggaa

SEQ ID NO: 1780166 - RNA, 19 nt, Homo sapiens
  misc_RNA (1)...(19): siRNA sense strand
ggaaaugguggccuugcua

SEQ ID NO: 1780167 - RNA, 19 nt, Homo sapiens
  misc_RNA (1)...(19): siRNA sense strand
gcugguagcuuucauucgu

SEQ ID NO: 1780168 - RNA, 19 nt, Homo sapiens
  misc_RNA (1)...(19): siRNA sense strand
caaagaagcaucgggaaau

SEQ ID NO: 1780169 - RNA, 19 nt, Homo sapiens
  misc_RNA (1)...(19): siRNA sense strand
cgaggacgcugagcucuau

SEQ ID NO: 1780170 - RNA, 19 nt, Homo sapiens
  misc_RNA (1)...(19): siRNA sense strand
ugacaaaucguucaagaca

SEQ ID NO: 1780171 - RNA, 19 nt, Homo sapiens
  misc_RNA (1)...(19): siRNA sense strand
caagagcaccuucaucauc

SEQ ID NO: 1780172 - RNA, 19 nt, Homo sapiens
  misc_RNA (1)...(19): siRNA sense strand
cagaguaccugcugaacca

SEQ ID NO: 1780173 - RNA, 19 nt, Homo sapiens
  misc_RNA (1)...(19): siRNA sense strand
ggacaaagcaaggaaagag

SEQ ID NO: 1780174 - RNA, 19 nt, Homo sapiens
  misc_RNA (1)...(19): siRNA sense strand
caaggaagaacuagaaucu

SEQ ID NO: 1780175 - RNA, 19 nt, Homo sapiens
  misc_RNA (1)...(19): siRNA sense strand
aggaagaacuagaaucugu

SEQ ID NO: 1780176 - RNA, 19 nt, Homo sapiens
  misc_RNA (1)...(19): siRNA sense strand
ugaaauggaagaacaugaa

SEQ ID NO: 1780177 - RNA, 19 nt, Homo sapiens
  misc_RNA (1)...(19): siRNA sense strand
gcaaggaaagagaagaaug

SEQ ID NO: 1780178 - RNA, 19 nt, Homo sapiens
  misc_RNA (1)...(19): siRNA sense strand
aaagaagcaucgggaaaug

SEQ ID NO: 1780179 - RNA, 19 nt, Homo sapiens
  misc_RNA (1)...(19): siRNA sense strand
agacagugccaaagaauug

SEQ ID NO: 1780180 - RNA, 19 nt, Homo sapiens
  misc_RNA (1)...(19): siRNA sense strand
gaagaacuagaaucugugu

SEQ ID NO: 1780181 - RNA, 19 nt, Homo sapiens
  misc_RNA (1)...(19): siRNA sense strand
caacaaguagucaaagcaa

SEQ ID NO: 1780182 - RNA, 19 nt, Homo sapiens
  misc_RNA (1)...(19): siRNA sense strand
ggaggaagaagaaaauuuu

SEQ ID NO: 1780183 - RNA, 19 nt, Homo sapiens
  misc_RNA (1)...(19): siRNA sense strand
gaaaauccauuagaugaca

SEQ ID NO: 1780184 - RNA, 19 nt, Homo sapiens
  misc_RNA (1)...(19): siRNA sense strand
ggaugaaaaugaaauggaa

SEQ ID NO: 1780185 - RNA, 19 nt, Homo sapiens
  misc_RNA (1)...(19): siRNA sense strand
uugaugauuucccaacuuu

SEQ ID NO: 1780186 - RNA, 19 nt, Homo sapiens
  misc_RNA (1)...(19): siRNA sense strand
gaagaugcaccaaaacaaa

SEQ ID NO: 1780187 - RNA, 19 nt, Homo sapiens
  misc_RNA (1)...(19): siRNA sense strand
gcucuaugaugaccuuuac

SEQ ID NO: 1780188 - RNA, 19 nt, Homo sapiens
  misc_RNA (1)...(19): siRNA sense strand
uguacaaccugccauagug

SEQ ID NO: 1780189 - RNA, 19 nt, Homo sapiens
  misc_RNA (1)...(19): siRNA sense strand
aaagguugauccagaagau

SEQ ID NO: 1780190 - RNA, 19 nt, Homo sapiens
  misc_RNA (1)...(19): siRNA sense strand
ucaaagaagcaucgggaaa

SEQ ID NO: 1780191 - RNA, 19 nt, Homo sapiens
  misc_RNA (1)...(19): siRNA sense strand
gaaagagaagaaugagcuu

SEQ ID NO: 1780192 - RNA, 19 nt, Homo sapiens
  misc_RNA (1)...(19): siRNA sense strand
guucuuaucagcuguacaa

SEQ ID NO: 1780193 - RNA, 19 nt, Homo sapiens
  misc_RNA (1)...(19): siRNA sense strand
gcugaaccacaaacaauga

SEQ ID NO: 1780194 - RNA, 19 nt, Homo sapiens
  misc_RNA (1)...(19): siRNA sense strand
gaagauaguccccaggaaa

SEQ ID NO: 1780195 - RNA, 19 nt, Homo sapiens
  misc_RNA (1)...(19): siRNA sense strand
ggaggaugguaaagacagu

SEQ ID NO: 1780196 - RNA, 19 nt, Homo sapiens
  misc_RNA (1)...(19): siRNA sense strand
guacaaccugccauaguga

SEQ ID NO: 1780197 - RNA, 19 nt, Homo sapiens
  misc_RNA (1)...(19): siRNA sense strand
acaaugaguguucuuauca

SEQ ID NO: 1780198 - RNA, 19 nt, Homo sapiens
  misc_RNA (1)...(19): siRNA sense strand
aguaaagguugauccagaa

SEQ ID NO: 1780199 - RNA, 19 nt, Homo sapiens
  misc_RNA (1)...(19): siRNA sense strand
cauggaaggaagaauauga

SEQ ID NO: 1780200 - RNA, 19 nt, Homo sapiens
  misc_RNA (1)...(19): siRNA sense strand
caugaagaaucacgagaag

SEQ ID NO: 1780201 - RNA, 19 nt, Homo sapiens
  misc_RNA (1)...(19): siRNA sense strand
ggaaggaagaauaugauac

SEQ ID NO: 1780202 - RNA, 19 nt, Homo sapiens
  misc_RNA (1)...(19): siRNA sense strand
gcagagaaggcgaggaaag

SEQ ID NO: 1780203 - RNA, 19 nt, Homo sapiens
  misc_RNA (1)...(19): siRNA sense strand
guagucaaagcaagaaaga

SEQ ID NO: 1780204 - RNA, 19 nt, Homo sapiens
  misc_RNA (1)...(19): siRNA sense strand
gcaacaaguagucaaagca

SEQ ID NO: 1780205 - RNA, 19 nt, Homo sapiens
  misc_RNA (1)...(19): siRNA sense strand
aaccugccauagugaauuu

SEQ ID NO: 1780206 - RNA, 19 nt, Homo sapiens
  misc_RNA (1)...(19): siRNA sense strand
ugaagaaucacgagaaguc

SEQ ID NO: 1780207 - RNA, 19 nt, Homo sapiens
  misc_RNA (1)...(19): siRNA sense strand
ugugacaaaucguucaaga

SEQ ID NO: 1780208 - RNA, 19 nt, Homo sapiens
  misc_RNA (1)...(19): siRNA sense strand
gaaaaggccaugaagaauc

SEQ ID NO: 1780209 - RNA, 19 nt, Homo sapiens
  misc_RNA (1)...(19): siRNA sense strand
ucaaagcaagaaagagaaa

SEQ ID NO: 1780210 - RNA, 19 nt, Homo sapiens
  misc_RNA (1)...(19): siRNA sense strand
caaagaauuggaagauagu

SEQ ID NO: 1780211 - RNA, 19 nt, Homo sapiens
  misc_RNA (1)...(19): siRNA sense strand
caagacagugccaaagaau

SEQ ID NO: 1780212 - RNA, 19 nt, Homo sapiens
  misc_RNA (1)...(19): siRNA sense strand
uccauuagaugacaauucu

SEQ ID NO: 1780213 - RNA, 19 nt, Homo sapiens
  misc_RNA (1)...(19): siRNA sense strand
gaagaaucacgagaaguca

SEQ ID NO: 1780214 - RNA, 19 nt, Homo sapiens
  misc_RNA (1)...(19): siRNA sense strand
gacaaagcaaggaaagaga

SEQ ID NO: 1780215 - RNA, 19 nt, Homo sapiens
  misc_RNA (1)...(19): siRNA sense strand
gcaccuucaucaucgucuu

SEQ ID NO: 1780216 - RNA, 19 nt, Homo sapiens
  misc_RNA (1)...(19): siRNA sense strand
ccagaagauacuaacuuaa

SEQ ID NO: 1780217 - RNA, 19 nt, Homo sapiens
  misc_RNA (1)...(19): siRNA sense strand
cauuagaugacaauucuga

SEQ ID NO: 1780218 - RNA, 19 nt, Homo sapiens
  misc_RNA (1)...(19): siRNA sense strand
aagaugaggaggaugguaa

SEQ ID NO: 1780219 - RNA, 19 nt, Homo sapiens
  misc_RNA (1)...(19): siRNA sense strand
cagaaaaggccaugaagaa

SEQ ID NO: 1780220 - RNA, 19 nt, Homo sapiens
  misc_RNA (1)...(19): siRNA sense strand
gcaagagcaccuucaucau

SEQ ID NO: 1780221 - RNA, 19 nt, Homo sapiens
  misc_RNA (1)...(19): siRNA sense strand
guaaauggaccuggagaag

SEQ ID NO: 1780222 - RNA, 19 nt, Homo sapiens
  misc_RNA (1)...(19): siRNA sense strand
gaaaacuuguggaagaaca

SEQ ID NO: 1780223 - RNA, 19 nt, Homo sapiens
  misc_RNA (1)...(19): siRNA sense strand
ggaagaaauggaagaugca

SEQ ID NO: 1780224 - RNA, 19 nt, Homo sapiens
  misc_RNA (1)...(19): siRNA sense strand
ccaugaagaaucacgagaa

SEQ ID NO: 1780225 - RNA, 19 nt, Homo sapiens
  misc_RNA (1)...(19): siRNA sense strand
ugaggaggaugguaaagac

SEQ ID NO: 1780226 - RNA, 19 nt, Homo sapiens
  misc_RNA (1)...(19): siRNA sense strand
uugaaaugauugccaagga

SEQ ID NO: 1780227 - RNA, 19 nt, Homo sapiens
  misc_RNA (1)...(19): siRNA sense strand
agucaaagcaagaaagaga

SEQ ID NO: 1780228 - RNA, 19 nt, Homo sapiens
  misc_RNA (1)...(19): siRNA sense strand
uugcauggaaggaagaaua

SEQ ID NO: 1780229 - RNA, 19 nt, Homo sapiens
  misc_RNA (1)...(19): siRNA sense strand
caaccugccauagugaauu

SEQ ID NO: 1780230 - RNA, 19 nt, Homo sapiens
  misc_RNA (1)...(19): siRNA sense strand
agaugacaauucugaggaa

SEQ ID NO: 1780231 - RNA, 19 nt, Homo sapiens
  misc_RNA (1)...(19): siRNA sense strand
aaaaggccaugaagaauca

SEQ ID NO: 1780232 - RNA, 19 nt, Homo sapiens
  misc_RNA (1)...(19): siRNA sense strand
uagaggaagagguugauga

SEQ ID NO: 1780233 - RNA, 19 nt, Homo sapiens
  misc_RNA (1)...(19): siRNA sense strand
uaaaccaugugaugaucca

SEQ ID NO: 1780234 - RNA, 19 nt, Homo sapiens
  misc_RNA (1)...(19): siRNA sense strand
acaaguagucaaagcaaga

SEQ ID NO: 1780235 - RNA, 19 nt, Homo sapiens
  misc_RNA (1)...(19): siRNA sense strand
cauagugaauuuccaucuc

SEQ ID NO: 1780236 - RNA, 19 nt, Homo sapiens
  misc_RNA (1)...(19): siRNA sense strand
acaaagcaaggaaagagaa

SEQ ID NO: 1780237 - RNA, 19 nt, Homo sapiens
  misc_RNA (1)...(19): siRNA sense strand
ggaagaaccugaaacaaau

SEQ ID NO: 1780238 - RNA, 19 nt, Homo sapiens
  misc_RNA (1)...(19): siRNA sense strand
gaaguauucugauguuuca

SEQ ID NO: 1780239 - RNA, 19 nt, Homo sapiens
  misc_RNA (1)...(19): siRNA sense strand
gaacgauccuaacuacuuc

SEQ ID NO: 1780240 - RNA, 19 nt, Homo sapiens
  misc_RNA (1)...(19): siRNA sense strand
gaacagaaccuggaagaac

SEQ ID NO: 1780241 - RNA, 19 nt, Homo sapiens
  misc_RNA (1)...(19): siRNA sense strand
uggaagaaccugaaacaaa

SEQ ID NO: 1780242 - RNA, 19 nt, Homo sapiens
  misc_RNA (1)...(19): siRNA sense strand
ggccagcccuucccacaau

SEQ ID NO: 1780243 - RNA, 19 nt, Homo sapiens
  misc_RNA (1)...(19): siRNA sense strand
caaauccucgcuucugaaa

SEQ ID NO: 1780244 - RNA, 19 nt, Homo sapiens
  misc_RNA (1)...(19): siRNA sense strand
ugaacgauccuaacuacuu

SEQ ID NO: 1780245 - RNA, 19 nt, Homo sapiens
  misc_RNA (1)...(19): siRNA sense strand
gaaccuggaagaaccugaa

SEQ ID NO: 1780246 - RNA, 19 nt, Homo sapiens
  misc_RNA (1)...(19): siRNA sense strand
uaagccagcuaagaaguau

SEQ ID NO: 1780247 - RNA, 19 nt, Homo sapiens
  misc_RNA (1)...(19): siRNA sense strand
uuaaggaucccaacuuugu

SEQ ID NO: 1780248 - RNA, 19 nt, Homo sapiens
  misc_RNA (1)...(19): siRNA sense strand
cgcaguagcuggcaagaag

SEQ ID NO: 1780249 - RNA, 19 nt, Homo sapiens
  misc_RNA (1)...(19): siRNA sense strand
aacaaauccucgcuucuga

SEQ ID NO: 1780250 - RNA, 19 nt, Homo sapiens
  misc_RNA (1)...(19): siRNA sense strand
gaagccaugagugagaaua

SEQ ID NO: 1780251 - RNA, 19 nt, Homo sapiens
  misc_RNA (1)...(19): siRNA sense strand
gaagaaccugaaacaaauc

SEQ ID NO: 1780252 - RNA, 19 nt, Homo sapiens
  misc_RNA (1)...(19): siRNA sense strand
caacugaacgauccuaacu

SEQ ID NO: 1780253 - RNA, 19 nt, Homo sapiens
  misc_RNA (1)...(19): siRNA sense strand
aaacaaauccucgcuucug

SEQ ID NO: 1780254 - RNA, 19 nt, Homo sapiens
  misc_RNA (1)...(19): siRNA sense strand
auuuaaggaucccaacuuu

SEQ ID NO: 1780255 - RNA, 19 nt, Homo sapiens
  misc_RNA (1)...(19): siRNA sense strand
gaaacaaauccucgcuucu

SEQ ID NO: 1780256 - RNA, 19 nt, Homo sapiens
  misc_RNA (1)...(19): siRNA sense strand
gaauaguccggaacagcaa

SEQ ID NO: 1780257 - RNA, 19 nt, Homo sapiens
  misc_RNA (1)...(19): siRNA sense strand
aauccucgcuucugaaagg

SEQ ID NO: 1780258 - RNA, 19 nt, Homo sapiens
  misc_RNA (1)...(19): siRNA sense strand
uuaagccagcuaagaagua

SEQ ID NO: 1780259 - RNA, 19 nt, Homo sapiens
  misc_RNA (1)...(19): siRNA sense strand
ccuuuaagccagcuaagaa

SEQ ID NO: 1780260 - RNA, 19 nt, Homo sapiens
  misc_RNA (1)...(19): siRNA sense strand
aauggugcccucugaguuu

SEQ ID NO: 1780261 - RNA, 19 nt, Homo sapiens
  misc_RNA (1)...(19): siRNA sense strand
ggcuauggcgccaguaaga

SEQ ID NO: 1780262 - RNA, 19 nt, Homo sapiens
  misc_RNA (1)...(19): siRNA sense strand
acugaacgauccuaacuac

SEQ ID NO: 1780263 - RNA, 19 nt, Homo sapiens
  misc_RNA (1)...(19): siRNA sense strand
uggaagccaugagugagaa

SEQ ID NO: 1780264 - RNA, 19 nt, Homo sapiens
  misc_RNA (1)...(19): siRNA sense strand
aagaacagaaccuggaaga

SEQ ID NO: 1780265 - RNA, 19 nt, Homo sapiens
  misc_RNA (1)...(19): siRNA sense strand
gcaguagcuggcaagaaga

SEQ ID NO: 1780266 - RNA, 19 nt, Homo sapiens
  misc_RNA (1)...(19): siRNA sense strand
cauuuaaggaucccaacuu

SEQ ID NO: 1780267 - RNA, 19 nt, Homo sapiens
  misc_RNA (1)...(19): siRNA sense strand
gcuauggcgccaguaagaa

SEQ ID NO: 1780268 - RNA, 19 nt, Homo sapiens
  misc_RNA (1)...(19): siRNA sense strand
guccggaacagcaagaaga

SEQ ID NO: 1780269 - RNA, 19 nt, Homo sapiens
  misc_RNA (1)...(19): siRNA sense strand
gcuccuccauccuuuaagc

SEQ ID NO: 1780270 - RNA, 19 nt, Homo sapiens
  misc_RNA (1)...(19): siRNA sense strand
aaauggugcccucugaguu

SEQ ID NO: 1780271 - RNA, 19 nt, Homo sapiens
  misc_RNA (1)...(19): siRNA sense strand
agccaugagugagaauaaa

SEQ ID NO: 1780272 - RNA, 19 nt, Homo sapiens
  misc_RNA (1)...(19): siRNA sense strand
auggugcccucugaguuua

SEQ ID NO: 1780273 - RNA, 19 nt, Homo sapiens
  misc_RNA (1)...(19): siRNA sense strand
acaaauccucgcuucugaa

SEQ ID NO: 1780274 - RNA, 19 nt, Homo sapiens
  misc_RNA (1)...(19): siRNA sense strand
agaagaacagaaccuggaa

SEQ ID NO: 1780275 - RNA, 19 nt, Homo sapiens
  misc_RNA (1)...(19): siRNA sense strand
ggaagaaccugaaacaaau

SEQ ID NO: 1780276 - RNA, 19 nt, Homo sapiens
  misc_RNA (1)...(19): siRNA sense strand
gaaguauucugauguuuca

SEQ ID NO: 1780277 - RNA, 19 nt, Homo sapiens
  misc_RNA (1)...(19): siRNA sense strand
gaacgauccuaacuacuuc

SEQ ID NO: 1780278 - RNA, 19 nt, Homo sapiens
  misc_RNA (1)...(19): siRNA sense strand
gaacagaaccuggaagaac

SEQ ID NO: 1780279 - RNA, 19 nt, Homo sapiens
  misc_RNA (1)...(19): siRNA sense strand
uggaagaaccugaaacaaa

SEQ ID NO: 1780280 - RNA, 19 nt, Homo sapiens
  misc_RNA (1)...(19): siRNA sense strand
ggccagcccuucccacaau

SEQ ID NO: 1780281 - RNA, 19 nt, Homo sapiens
  misc_RNA (1)...(19): siRNA sense strand
caaauccucgcuucugaaa

SEQ ID NO: 1780282 - RNA, 19 nt, Homo sapiens
  misc_RNA (1)...(19): siRNA sense strand
ugaacgauccuaacuacuu

SEQ ID NO: 1780283 - RNA, 19 nt, Homo sapiens
  misc_RNA (1)...(19): siRNA sense strand
gaaccuggaagaaccugaa

SEQ ID NO: 1780284 - RNA, 19 nt, Homo sapiens
  misc_RNA (1)...(19): siRNA sense strand
uaagccagcuaagaaguau

SEQ ID NO: 1780285 - RNA, 19 nt, Homo sapiens
  misc_RNA (1)...(19): siRNA sense strand
uuaaggaucccaacuuugu

SEQ ID NO: 1780286 - RNA, 19 nt, Homo sapiens
  misc_RNA (1)...(19): siRNA sense strand
cgcaguagcuggcaagaag

SEQ ID NO: 1780287 - RNA, 19 nt, Homo sapiens
  misc_RNA (1)...(19): siRNA sense strand
aacaaauccucgcuucuga

SEQ ID NO: 1780288 - RNA, 19 nt, Homo sapiens
  misc_RNA (1)...(19): siRNA sense strand
gaagccaugagugagaaua

SEQ ID NO: 1780289 - RNA, 19 nt, Homo sapiens
  misc_RNA (1)...(19): siRNA sense strand
gaagaaccugaaacaaauc

SEQ ID NO: 1780290 - RNA, 19 nt, Homo sapiens
  misc_RNA (1)...(19): siRNA sense strand
caacugaacgauccuaacu

SEQ ID NO: 1780291 - RNA, 19 nt, Homo sapiens
  misc_RNA (1)...(19): siRNA sense strand
aaacaaauccucgcuucug

SEQ ID NO: 1780292 - RNA, 19 nt, Homo sapiens
  misc_RNA (1)...(19): siRNA sense strand
auuuaaggaucccaacuuu

SEQ ID NO: 1780293 - RNA, 19 nt, Homo sapiens
  misc_RNA (1)...(19): siRNA sense strand
gaaacaaauccucgcuucu

SEQ ID NO: 1780294 - RNA, 19 nt, Homo sapiens
  misc_RNA (1)...(19): siRNA sense strand
gaauaguccggaacagcaa

SEQ ID NO: 1780295 - RNA, 19 nt, Homo sapiens
  misc_RNA (1)...(19): siRNA sense strand
aauccucgcuucugaaagg

SEQ ID NO: 1780296 - RNA, 19 nt, Homo sapiens
  misc_RNA (1)...(19): siRNA sense strand
uuaagccagcuaagaagua

SEQ ID NO: 1780297 - RNA, 19 nt, Homo sapiens
  misc_RNA (1)...(19): siRNA sense strand
ccuuuaagccagcuaagaa

SEQ ID NO: 1780298 - RNA, 19 nt, Homo sapiens
  misc_RNA (1)...(19): siRNA sense strand
aauggugcccucugaguuu

SEQ ID NO: 1780299 - RNA, 19 nt, Homo sapiens
  misc_RNA (1)...(19): siRNA sense strand
ggcuauggcgccaguaaga

SEQ ID NO: 1780300 - RNA, 19 nt, Homo sapiens
  misc_RNA (1)...(19): siRNA sense strand
acugaacgauccuaacuac

SEQ ID NO: 1780301 - RNA, 19 nt, Homo sapiens
  misc_RNA (1)...(19): siRNA sense strand
uggaagccaugagugagaa

SEQ ID NO: 1780302 - RNA, 19 nt, Homo sapiens
  misc_RNA (1)...(19): siRNA sense strand
aagaacagaaccuggaaga

SEQ ID NO: 1780303 - RNA, 19 nt, Homo sapiens
  misc_RNA (1)...(19): siRNA sense strand
gcaguagcuggcaagaaga

SEQ ID NO: 1780304 - RNA, 19 nt, Homo sapiens
  misc_RNA (1)...(19): siRNA sense strand
cauuuaaggaucccaacuu

SEQ ID NO: 1780305 - RNA, 19 nt, Homo sapiens
  misc_RNA (1)...(19): siRNA sense strand
gcuauggcgccaguaagaa

SEQ ID NO: 1780306 - RNA, 19 nt, Homo sapiens
  misc_RNA (1)...(19): siRNA sense strand
guccggaacagcaagaaga

SEQ ID NO: 1780307 - RNA, 19 nt, Homo sapiens
  misc_RNA (1)...(19): siRNA sense strand
gcuccuccauccuuuaagc

SEQ ID NO: 1780308 - RNA, 19 nt, Homo sapiens
  misc_RNA (1)...(19): siRNA sense strand
aaauggugcccucugaguu

SEQ ID NO: 1780309 - RNA, 19 nt, Homo sapiens
  misc_RNA (1)...(19): siRNA sense strand
agccaugagugagaauaaa

SEQ ID NO: 1780310 - RNA, 19 nt, Homo sapiens
  misc_RNA (1)...(19): siRNA sense strand
auggugcccucugaguuua

SEQ ID NO: 1780311 - RNA, 19 nt, Homo sapiens
  misc_RNA (1)...(19): siRNA sense strand
acaaauccucgcuucugaa

SEQ ID NO: 1780312 - RNA, 19 nt, Homo sapiens
  misc_RNA (1)...(19): siRNA sense strand
agaagaacagaaccuggaa

SEQ ID NO: 1780313 - RNA, 19 nt, Homo sapiens
  misc_RNA (1)...(19): siRNA sense strand
gguuagggcucauguuaua

SEQ ID NO: 1780314 - RNA, 19 nt, Homo sapiens
  misc_RNA (1)...(19): siRNA sense strand
ugaaacugaugccacauuu

SEQ ID NO: 1780315 - RNA, 19 nt, Homo sapiens
  misc_RNA (1)...(19): siRNA sense strand
caauggaagucacaggaaa

SEQ ID NO: 1780316 - RNA, 19 nt, Homo sapiens
  misc_RNA (1)...(19): siRNA sense strand
gccacgacgucaccuauaa

SEQ ID NO: 1780317 - RNA, 19 nt, Homo sapiens
  misc_RNA (1)...(19): siRNA sense strand
gaagucacaggaaacagua

SEQ ID NO: 1780318 - RNA, 19 nt, Homo sapiens
  misc_RNA (1)...(19): siRNA sense strand
cgacgucaccuauaaauca

SEQ ID NO: 1780319 - RNA, 19 nt, Homo sapiens
  misc_RNA (1)...(19): siRNA sense strand
gcagagacuccgagcauga

SEQ ID NO: 1780320 - RNA, 19 nt, Homo sapiens
  misc_RNA (1)...(19): siRNA sense strand
ggucugcacuucuuguugu

SEQ ID NO: 1780321 - RNA, 19 nt, Homo sapiens
  misc_RNA (1)...(19): siRNA sense strand
ggaaacaguaucucaguca

SEQ ID NO: 1780322 - RNA, 19 nt, Homo sapiens
  misc_RNA (1)...(19): siRNA sense strand
ugaaagacauuaucuaccu

SEQ ID NO: 1780323 - RNA, 19 nt, Homo sapiens
  misc_RNA (1)...(19): siRNA sense strand
gugguuagggcucauguua

SEQ ID NO: 1780324 - RNA, 19 nt, Homo sapiens
  misc_RNA (1)...(19): siRNA sense strand
gcuggcggauugucugaaa

SEQ ID NO: 1780325 - RNA, 19 nt, Homo sapiens
  misc_RNA (1)...(19): siRNA sense strand
cacaaggucugcacuucuu

SEQ ID NO: 1780326 - RNA, 19 nt, Homo sapiens
  misc_RNA (1)...(19): siRNA sense strand
gugaaggaaauaucuguaa

SEQ ID NO: 1780327 - RNA, 19 nt, Homo sapiens
  misc_RNA (1)...(19): siRNA sense strand
ccugguggauuuaaauguu

SEQ ID NO: 1780328 - RNA, 19 nt, Homo sapiens
  misc_RNA (1)...(19): siRNA sense strand
ggaagucacaggaaacagu

SEQ ID NO: 1780329 - RNA, 19 nt, Homo sapiens
  misc_RNA (1)...(19): siRNA sense strand
aaaggcagcagacaauuau

SEQ ID NO: 1780330 - RNA, 19 nt, Homo sapiens
  misc_RNA (1)...(19): siRNA sense strand
gaaacugaugccacauuug

SEQ ID NO: 1780331 - RNA, 19 nt, Homo sapiens
  misc_RNA (1)...(19): siRNA sense strand
gaaggaaauaucuguaacu

SEQ ID NO: 1780332 - RNA, 19 nt, Homo sapiens
  misc_RNA (1)...(19): siRNA sense strand
gagaccagauacugcuaca

SEQ ID NO: 1780333 - RNA, 19 nt, Homo sapiens
  misc_RNA (1)...(19): siRNA sense strand
gcacccacgcuguauguca

SEQ ID NO: 1780334 - RNA, 19 nt, Homo sapiens
  misc_RNA (1)...(19): siRNA sense strand
gcacacaauggaagucaca

SEQ ID NO: 1780335 - RNA, 19 nt, Homo sapiens
  misc_RNA (1)...(19): siRNA sense strand
ugaaggaaauaucuguaac

SEQ ID NO: 1780336 - RNA, 19 nt, Homo sapiens
  misc_RNA (1)...(19): siRNA sense strand
cuauaaaucagacaaaugg

SEQ ID NO: 1780337 - RNA, 19 nt, Homo sapiens
  misc_RNA (1)...(19): siRNA sense strand
ccacgacgucaccuauaaa

SEQ ID NO: 1780338 - RNA, 19 nt, Homo sapiens
  misc_RNA (1)...(19): siRNA sense strand
cugguggauuuaaauguuu

SEQ ID NO: 1780339 - RNA, 19 nt, Homo sapiens
  misc_RNA (1)...(19): siRNA sense strand
gugauaguguccugcuugu

SEQ ID NO: 1780340 - RNA, 19 nt, Homo sapiens
  misc_RNA (1)...(19): siRNA sense strand
gccacaaggucugcacuuc

SEQ ID NO: 1780341 - RNA, 19 nt, Homo sapiens
  misc_RNA (1)...(19): siRNA sense strand
gaccagauacugcuacacu

SEQ ID NO: 1780342 - RNA, 19 nt, Homo sapiens
  misc_RNA (1)...(19): siRNA sense strand
ccagauacugcuacacuca

SEQ ID NO: 1780343 - RNA, 19 nt, Homo sapiens
  misc_RNA (1)...(19): siRNA sense strand
acacucagcacacaaugga

SEQ ID NO: 1780344 - RNA, 19 nt, Homo sapiens
  misc_RNA (1)...(19): siRNA sense strand
aaaaggcagcagacaauua

SEQ ID NO: 1780345 - RNA, 19 nt, Homo sapiens
  misc_RNA (1)...(19): siRNA sense strand
aaacugaugccacauuugc

SEQ ID NO: 1780346 - RNA, 19 nt, Homo sapiens
  misc_RNA (1)...(19): siRNA sense strand
gagagaccagauacugcua

SEQ ID NO: 1780347 - RNA, 19 nt, Homo sapiens
  misc_RNA (1)...(19): siRNA sense strand
ugagccugcuggcggauug

SEQ ID NO: 1780348 - RNA, 19 nt, Homo sapiens
  misc_RNA (1)...(19): siRNA sense strand
gggcacccacgcuguaugu

SEQ ID NO: 1780349 - RNA, 19 nt, Homo sapiens
  misc_RNA (1)...(19): siRNA sense strand
gaaaaggcagcagacaauu

SEQ ID NO: 1780350 - RNA, 19 nt, Homo sapiens
  misc_RNA (1)...(19): siRNA sense strand
ccuauaaaucagacaaaug

SEQ ID NO: 1780351 - RNA, 19 nt, Homo sapiens
  misc_RNA (1)...(19): siRNA sense strand
caguaucucagucaccaaa

SEQ ID NO: 1780352 - RNA, 19 nt, Homo sapiens
  misc_RNA (1)...(19): siRNA sense strand
gacgucaccuauaaaucag

SEQ ID NO: 1780353 - RNA, 19 nt, Homo sapiens
  misc_RNA (1)...(19): siRNA sense strand
ccacaaggucugcacuucu

SEQ ID NO: 1780354 - RNA, 19 nt, Homo sapiens
  misc_RNA (1)...(19): siRNA sense strand
gcuacacucagcacacaau

SEQ ID NO: 1780355 - RNA, 19 nt, Homo sapiens
  misc_RNA (1)...(19): siRNA sense strand
ccacugccccgaaaugaaa

SEQ ID NO: 1780356 - RNA, 19 nt, Homo sapiens
  misc_RNA (1)...(19): siRNA sense strand
cagugaaagacauuaucua

SEQ ID NO: 1780357 - RNA, 19 nt, Homo sapiens
  misc_RNA (1)...(19): siRNA sense strand
aggcagcagacaauuauga

SEQ ID NO: 1780358 - RNA, 19 nt, Homo sapiens
  misc_RNA (1)...(19): siRNA sense strand
caggaaacaguaucucagu

SEQ ID NO: 1780359 - RNA, 19 nt, Homo sapiens
  misc_RNA (1)...(19): siRNA sense strand
cagagacuccgagcaugaa

SEQ ID NO: 1780360 - RNA, 19 nt, Homo sapiens
  misc_RNA (1)...(19): siRNA sense strand
cugcacuucuuguugugaa

SEQ ID NO: 1780361 - RNA, 19 nt, Homo sapiens
  misc_RNA (1)...(19): siRNA sense strand
acaauggaagucacaggaa

SEQ ID NO: 1780362 - RNA, 19 nt, Homo sapiens
  misc_RNA (1)...(19): siRNA sense strand
gaacugauccgaagcucau

SEQ ID NO: 1780363 - RNA, 19 nt, Homo sapiens
  misc_RNA (1)...(19): siRNA sense strand
gggcaagaguggugguuga

SEQ ID NO: 1780364 - RNA, 19 nt, Homo sapiens
  misc_RNA (1)...(19): siRNA sense strand
gaagcucauuucaaguguu

SEQ ID NO: 1780365 - RNA, 19 nt, Homo sapiens
  misc_RNA (1)...(19): siRNA sense strand
ggucaucuuucucuaucaa

SEQ ID NO: 1780366 - RNA, 19 nt, Homo sapiens
  misc_RNA (1)...(19): siRNA sense strand
uagcuuggccuucgugaaa

SEQ ID NO: 1780367 - RNA, 19 nt, Homo sapiens
  misc_RNA (1)...(19): siRNA sense strand
ggacuucagccaagaacug

SEQ ID NO: 1780368 - RNA, 19 nt, Homo sapiens
  misc_RNA (1)...(19): siRNA sense strand
cggauuccaauacaaauuu

SEQ ID NO: 1780369 - RNA, 19 nt, Homo sapiens
  misc_RNA (1)...(19): siRNA sense strand
gauccgaagcucauuucaa

SEQ ID NO: 1780370 - RNA, 19 nt, Homo sapiens
  misc_RNA (1)...(19): siRNA sense strand
aagcucauuucaaguguug

SEQ ID NO: 1780371 - RNA, 19 nt, Homo sapiens
  misc_RNA (1)...(19): siRNA sense strand
gcuccggauuccaauacaa

SEQ ID NO: 1780372 - RNA, 19 nt, Homo sapiens
  misc_RNA (1)...(19): siRNA sense strand
cgaagcucauuucaagugu

SEQ ID NO: 1780373 - RNA, 19 nt, Homo sapiens
  misc_RNA (1)...(19): siRNA sense strand
caccgaagggucagaauuc

SEQ ID NO: 1780374 - RNA, 19 nt, Homo sapiens
  misc_RNA (1)...(19): siRNA sense strand
cgacgacaggguauuugaa

SEQ ID NO: 1780375 - RNA, 19 nt, Homo sapiens
  misc_RNA (1)...(19): siRNA sense strand
ccgaagcucauuucaagug

SEQ ID NO: 1780376 - RNA, 19 nt, Homo sapiens
  misc_RNA (1)...(19): siRNA sense strand
ucaccgaagggucagaauu

SEQ ID NO: 1780377 - RNA, 19 nt, Homo sapiens
  misc_RNA (1)...(19): siRNA sense strand
auccgaagcucauuucaag

SEQ ID NO: 1780378 - RNA, 19 nt, Homo sapiens
  misc_RNA (1)...(19): siRNA sense strand
gcuccugugggucaucuuu

SEQ ID NO: 1780379 - RNA, 19 nt, Homo sapiens
  misc_RNA (1)...(19): siRNA sense strand
gaugcuccggauuccaaua

SEQ ID NO: 1780380 - RNA, 19 nt, Homo sapiens
  misc_RNA (1)...(19): siRNA sense strand
ugggucaucuuucucuauc

SEQ ID NO: 1780381 - RNA, 19 nt, Homo sapiens
  misc_RNA (1)...(19): siRNA sense strand
gaacugauccgaagcucau

SEQ ID NO: 1780382 - RNA, 19 nt, Homo sapiens
  misc_RNA (1)...(19): siRNA sense strand
gggcaagaguggugguuga

SEQ ID NO: 1780383 - RNA, 19 nt, Homo sapiens
  misc_RNA (1)...(19): siRNA sense strand
gaagcucauuucaaguguu

SEQ ID NO: 1780384 - RNA, 19 nt, Homo sapiens
  misc_RNA (1)...(19): siRNA sense strand
ggucaucuuucucuaucaa

SEQ ID NO: 1780385 - RNA, 19 nt, Homo sapiens
  misc_RNA (1)...(19): siRNA sense strand
uagcuuggccuucgugaaa

SEQ ID NO: 1780386 - RNA, 19 nt, Homo sapiens
  misc_RNA (1)...(19): siRNA sense strand
ggacuucagccaagaacug

SEQ ID NO: 1780387 - RNA, 19 nt, Homo sapiens
  misc_RNA (1)...(19): siRNA sense strand
cggauuccaauacaaauuu

SEQ ID NO: 1780388 - RNA, 19 nt, Homo sapiens
  misc_RNA (1)...(19): siRNA sense strand
gauccgaagcucauuucaa

SEQ ID NO: 1780389 - RNA, 19 nt, Homo sapiens
  misc_RNA (1)...(19): siRNA sense strand
aagcucauuucaaguguug

SEQ ID NO: 1780390 - RNA, 19 nt, Homo sapiens
  misc_RNA (1)...(19): siRNA sense strand
gcuccggauuccaauacaa

SEQ ID NO: 1780391 - RNA, 19 nt, Homo sapiens
  misc_RNA (1)...(19): siRNA sense strand
cgaagcucauuucaagugu

SEQ ID NO: 1780392 - RNA, 19 nt, Homo sapiens
  misc_RNA (1)...(19): siRNA sense strand
caccgaagggucagaauuc

SEQ ID NO: 1780393 - RNA, 19 nt, Homo sapiens
  misc_RNA (1)...(19): siRNA sense strand
cgacgacaggguauuugaa

SEQ ID NO: 1780394 - RNA, 19 nt, Homo sapiens
  misc_RNA (1)...(19): siRNA sense strand
ccgaagcucauuucaagug

SEQ ID NO: 1780395 - RNA, 19 nt, Homo sapiens
  misc_RNA (1)...(19): siRNA sense strand
ucaccgaagggucagaauu

SEQ ID NO: 1780396 - RNA, 19 nt, Homo sapiens
  misc_RNA (1)...(19): siRNA sense strand
auccgaagcucauuucaag

SEQ ID NO: 1780397 - RNA, 19 nt, Homo sapiens
  misc_RNA (1)...(19): siRNA sense strand
gcuccugugggucaucuuu

SEQ ID NO: 1780398 - RNA, 19 nt, Homo sapiens
  misc_RNA (1)...(19): siRNA sense strand
gaugcuccggauuccaaua

SEQ ID NO: 1780399 - RNA, 19 nt, Homo sapiens
  misc_RNA (1)...(19): siRNA sense strand
ugggucaucuuucucuauc

SEQ ID NO: 1780400 - RNA, 19 nt, Homo sapiens
  misc_RNA (1)...(19): siRNA sense strand
gaagucagaugggauugaa

SEQ ID NO: 1780401 - RNA, 19 nt, Homo sapiens
  misc_RNA (1)...(19): siRNA sense strand
gaacaagacccggacauuc

SEQ ID NO: 1780402 - RNA, 19 nt, Homo sapiens
  misc_RNA (1)...(19): siRNA sense strand
ggaacaagacccggacauu

SEQ ID NO: 1780403 - RNA, 19 nt, Homo sapiens
  misc_RNA (1)...(19): siRNA sense strand
cagaugggauugaaaggau

SEQ ID NO: 1780404 - RNA, 19 nt, Homo sapiens
  misc_RNA (1)...(19): siRNA sense strand
uagaaugggugaggaaugu

SEQ ID NO: 1780405 - RNA, 19 nt, Homo sapiens
  misc_RNA (1)...(19): siRNA sense strand
ggccuucucugcuguguca

SEQ ID NO: 1780406 - RNA, 19 nt, Homo sapiens
  misc_RNA (1)...(19): siRNA sense strand
ccacaguccugggaaguca

SEQ ID NO: 1780407 - RNA, 19 nt, Homo sapiens
  misc_RNA (1)...(19): siRNA sense strand
gaaccugccuauauuuuag

SEQ ID NO: 1780408 - RNA, 19 nt, Homo sapiens
  misc_RNA (1)...(19): siRNA sense strand
ggaaccugccuauauuuua

SEQ ID NO: 1780409 - RNA, 19 nt, Homo sapiens
  misc_RNA (1)...(19): siRNA sense strand
ggugaggaauguguuagug

SEQ ID NO: 1780410 - RNA, 19 nt, Homo sapiens
  misc_RNA (1)...(19): siRNA sense strand
gagucccacuggucuagaa

SEQ ID NO: 1780411 - RNA, 19 nt, Homo sapiens
  misc_RNA (1)...(19): siRNA sense strand
cagccagggugaccacaga

SEQ ID NO: 1780412 - RNA, 19 nt, Homo sapiens
  misc_RNA (1)...(19): siRNA sense strand
ggaagucagaugggauuga

SEQ ID NO: 1780413 - RNA, 19 nt, Homo sapiens
  misc_RNA (1)...(19): siRNA sense strand
ggacauuccaggccacagu

SEQ ID NO: 1780414 - RNA, 19 nt, Homo sapiens
  misc_RNA (1)...(19): siRNA sense strand
ccacccaccucuggucugu

SEQ ID NO: 1780415 - RNA, 19 nt, Homo sapiens
  misc_RNA (1)...(19): siRNA sense strand
ggaaguggcgagggucuca

SEQ ID NO: 1780416 - RNA, 19 nt, Homo sapiens
  misc_RNA (1)...(19): siRNA sense strand
gaaugggugaggaaugugu

SEQ ID NO: 1780417 - RNA, 19 nt, Homo sapiens
  misc_RNA (1)...(19): siRNA sense strand
gagacgguccagacaggaa

SEQ ID NO: 1780418 - RNA, 19 nt, Homo sapiens
  misc_RNA (1)...(19): siRNA sense strand
ggauugaaaggaucuucug

SEQ ID NO: 1780419 - RNA, 19 nt, Homo sapiens
  misc_RNA (1)...(19): siRNA sense strand
gcuccuuccugcuucucuu

SEQ ID NO: 1780420 - RNA, 19 nt, Homo sapiens
  misc_RNA (1)...(19): siRNA sense strand
gguccagacaggaacaaga

SEQ ID NO: 1780421 - RNA, 19 nt, Homo sapiens
  misc_RNA (1)...(19): siRNA sense strand
ccucuggucugugccacuu

SEQ ID NO: 1780422 - RNA, 19 nt, Homo sapiens
  misc_RNA (1)...(19): siRNA sense strand
ggucugugccacuuugauc

SEQ ID NO: 1780423 - RNA, 19 nt, Homo sapiens
  misc_RNA (1)...(19): siRNA sense strand
acagaaaggacugcaggaa

SEQ ID NO: 1780424 - RNA, 19 nt, Homo sapiens
  misc_RNA (1)...(19): siRNA sense strand
ucagaugggauugaaagga

SEQ ID NO: 1780425 - RNA, 19 nt, Homo sapiens
  misc_RNA (1)...(19): siRNA sense strand
ucuggucugugccacuuug

SEQ ID NO: 1780426 - RNA, 19 nt, Homo sapiens
  misc_RNA (1)...(19): siRNA sense strand
gaagucagaugggauugaa

SEQ ID NO: 1780427 - RNA, 19 nt, Homo sapiens
  misc_RNA (1)...(19): siRNA sense strand
gaacaagacccggacauuc

SEQ ID NO: 1780428 - RNA, 19 nt, Homo sapiens
  misc_RNA (1)...(19): siRNA sense strand
ggaacaagacccggacauu

SEQ ID NO: 1780429 - RNA, 19 nt, Homo sapiens
  misc_RNA (1)...(19): siRNA sense strand
cagaugggauugaaaggau

SEQ ID NO: 1780430 - RNA, 19 nt, Homo sapiens
  misc_RNA (1)...(19): siRNA sense strand
uagaaugggugaggaaugu

SEQ ID NO: 1780431 - RNA, 19 nt, Homo sapiens
  misc_RNA (1)...(19): siRNA sense strand
ggccuucucugcuguguca

SEQ ID NO: 1780432 - RNA, 19 nt, Homo sapiens
  misc_RNA (1)...(19): siRNA sense strand
ccacaguccugggaaguca

SEQ ID NO: 1780433 - RNA, 19 nt, Homo sapiens
  misc_RNA (1)...(19): siRNA sense strand
gaaccugccuauauuuuag

SEQ ID NO: 1780434 - RNA, 19 nt, Homo sapiens
  misc_RNA (1)...(19): siRNA sense strand
ggaaccugccuauauuuua

SEQ ID NO: 1780435 - RNA, 19 nt, Homo sapiens
  misc_RNA (1)...(19): siRNA sense strand
ggugaggaauguguuagug

SEQ ID NO: 1780436 - RNA, 19 nt, Homo sapiens
  misc_RNA (1)...(19): siRNA sense strand
gagucccacuggucuagaa

SEQ ID NO: 1780437 - RNA, 19 nt, Homo sapiens
  misc_RNA (1)...(19): siRNA sense strand
cagccagggugaccacaga

SEQ ID NO: 1780438 - RNA, 19 nt, Homo sapiens
  misc_RNA (1)...(19): siRNA sense strand
ggaagucagaugggauuga

SEQ ID NO: 1780439 - RNA, 19 nt, Homo sapiens
  misc_RNA (1)...(19): siRNA sense strand
ggacauuccaggccacagu

SEQ ID NO: 1780440 - RNA, 19 nt, Homo sapiens
  misc_RNA (1)...(19): siRNA sense strand
ccacccaccucuggucugu

SEQ ID NO: 1780441 - RNA, 19 nt, Homo sapiens
  misc_RNA (1)...(19): siRNA sense strand
ggaaguggcgagggucuca

SEQ ID NO: 1780442 - RNA, 19 nt, Homo sapiens
  misc_RNA (1)...(19): siRNA sense strand
gaaugggugaggaaugugu

SEQ ID NO: 1780443 - RNA, 19 nt, Homo sapiens
  misc_RNA (1)...(19): siRNA sense strand
gagacgguccagacaggaa

SEQ ID NO: 1780444 - RNA, 19 nt, Homo sapiens
  misc_RNA (1)...(19): siRNA sense strand
ggauugaaaggaucuucug

SEQ ID NO: 1780445 - RNA, 19 nt, Homo sapiens
  misc_RNA (1)...(19): siRNA sense strand
gcuccuuccugcuucucuu

SEQ ID NO: 1780446 - RNA, 19 nt, Homo sapiens
  misc_RNA (1)...(19): siRNA sense strand
gguccagacaggaacaaga

SEQ ID NO: 1780447 - RNA, 19 nt, Homo sapiens
  misc_RNA (1)...(19): siRNA sense strand
ccucuggucugugccacuu

SEQ ID NO: 1780448 - RNA, 19 nt, Homo sapiens
  misc_RNA (1)...(19): siRNA sense strand
ggucugugccacuuugauc

SEQ ID NO: 1780449 - RNA, 19 nt, Homo sapiens
  misc_RNA (1)...(19): siRNA sense strand
acagaaaggacugcaggaa

SEQ ID NO: 1780450 - RNA, 19 nt, Homo sapiens
  misc_RNA (1)...(19): siRNA sense strand
ucagaugggauugaaagga

SEQ ID NO: 1780451 - RNA, 19 nt, Homo sapiens
  misc_RNA (1)...(19): siRNA sense strand
ucuggucugugccacuuug

SEQ ID NO: 1780452 - RNA, 19 nt, Homo sapiens
  misc_RNA (1)...(19): siRNA sense strand
gaagagaucuaaguauguu

SEQ ID NO: 1780453 - RNA, 19 nt, Homo sapiens
  misc_RNA (1)...(19): siRNA sense strand
gcgcgaagauugagcagua

SEQ ID NO: 1780454 - RNA, 19 nt, Homo sapiens
  misc_RNA (1)...(19): siRNA sense strand
gcaagcagcugacccacaa

SEQ ID NO: 1780455 - RNA, 19 nt, Homo sapiens
  misc_RNA (1)...(19): siRNA sense strand
ggucacaacuguaggaaga

SEQ ID NO: 1780456 - RNA, 19 nt, Homo sapiens
  misc_RNA (1)...(19): siRNA sense strand
gggcagcacucguggauug

SEQ ID NO: 1780457 - RNA, 19 nt, Homo sapiens
  misc_RNA (1)...(19): siRNA sense strand
gagccaaacuucccugaga

SEQ ID NO: 1780458 - RNA, 19 nt, Homo sapiens
  misc_RNA (1)...(19): siRNA sense strand
aagaggauguggucaguua

SEQ ID NO: 1780459 - RNA, 19 nt, Homo sapiens
  misc_RNA (1)...(19): siRNA sense strand
gaaaguacaucgacaucca

SEQ ID NO: 1780460 - RNA, 19 nt, Homo sapiens
  misc_RNA (1)...(19): siRNA sense strand
gagcacauccgccaguaua

SEQ ID NO: 1780461 - RNA, 19 nt, Homo sapiens
  misc_RNA (1)...(19): siRNA sense strand
ccgagaaguuugucaagua

SEQ ID NO: 1780462 - RNA, 19 nt, Homo sapiens
  misc_RNA (1)...(19): siRNA sense strand
ggaccucucugaguauaaa

SEQ ID NO: 1780463 - RNA, 19 nt, Homo sapiens
  misc_RNA (1)...(19): siRNA sense strand
gcacagacaccaccauguu

SEQ ID NO: 1780464 - RNA, 19 nt, Homo sapiens
  misc_RNA (1)...(19): siRNA sense strand
ugaagacgcuggagaagug

SEQ ID NO: 1780465 - RNA, 19 nt, Homo sapiens
  misc_RNA (1)...(19): siRNA sense strand
gagaagaucccugugauga

SEQ ID NO: 1780466 - RNA, 19 nt, Homo sapiens
  misc_RNA (1)...(19): siRNA sense strand
uaauugccaucaacaagua

SEQ ID NO: 1780467 - RNA, 19 nt, Homo sapiens
  misc_RNA (1)...(19): siRNA sense strand
ggacggguguguacuuugu

SEQ ID NO: 1780468 - RNA, 19 nt, Homo sapiens
  misc_RNA (1)...(19): siRNA sense strand
gcacaagaccacccagauu

SEQ ID NO: 1780469 - RNA, 19 nt, Homo sapiens
  misc_RNA (1)...(19): siRNA sense strand
gaccagugcugcaucauca

SEQ ID NO: 1780470 - RNA, 19 nt, Homo sapiens
  misc_RNA (1)...(19): siRNA sense strand
gcaguacuuuguagacuau

SEQ ID NO: 1780471 - RNA, 19 nt, Homo sapiens
  misc_RNA (1)...(19): siRNA sense strand
aaaccaagaucuuucugaa

SEQ ID NO: 1780472 - RNA, 19 nt, Homo sapiens
  misc_RNA (1)...(19): siRNA sense strand
caacgcacaucaagccuau

SEQ ID NO: 1780473 - RNA, 19 nt, Homo sapiens
  misc_RNA (1)...(19): siRNA sense strand
cggaagagaucuaaguaug

SEQ ID NO: 1780474 - RNA, 19 nt, Homo sapiens
  misc_RNA (1)...(19): siRNA sense strand
gcaagaagacguacaagag

SEQ ID NO: 1780475 - RNA, 19 nt, Homo sapiens
  misc_RNA (1)...(19): siRNA sense strand
ggacaugauugccaacaag

SEQ ID NO: 1780476 - RNA, 19 nt, Homo sapiens
  misc_RNA (1)...(19): siRNA sense strand
ugaagcagcugaccgacaa

SEQ ID NO: 1780477 - RNA, 19 nt, Homo sapiens
  misc_RNA (1)...(19): siRNA sense strand
guauaaauuugccaaguuc

SEQ ID NO: 1780478 - RNA, 19 nt, Homo sapiens
  misc_RNA (1)...(19): siRNA sense strand
ccaagaagccaaucauguu

SEQ ID NO: 1780479 - RNA, 19 nt, Homo sapiens
  misc_RNA (1)...(19): siRNA sense strand
ggccauggguaacugcaua

SEQ ID NO: 1780480 - RNA, 19 nt, Homo sapiens
  misc_RNA (1)...(19): siRNA sense strand
ggacaaccacgcacuccua

SEQ ID NO: 1780481 - RNA, 19 nt, Homo sapiens
  misc_RNA (1)...(19): siRNA sense strand
gcaucaacuucgccaauga

SEQ ID NO: 1780482 - RNA, 19 nt, Homo sapiens
  misc_RNA (1)...(19): siRNA sense strand
cugaugagcugccugacua

SEQ ID NO: 1780483 - RNA, 19 nt, Homo sapiens
  misc_RNA (1)...(19): siRNA sense strand
gaacugaugcccagaaggu

SEQ ID NO: 1780484 - RNA, 19 nt, Homo sapiens
  misc_RNA (1)...(19): siRNA sense strand
gcugacaacugcuacuuca

SEQ ID NO: 1780485 - RNA, 19 nt, Homo sapiens
  misc_RNA (1)...(19): siRNA sense strand
ucacugggcugcucugauc

SEQ ID NO: 1780486 - RNA, 19 nt, Homo sapiens
  misc_RNA (1)...(19): siRNA sense strand
gccaugagccugucaauca

SEQ ID NO: 1780487 - RNA, 19 nt, Homo sapiens
  misc_RNA (1)...(19): siRNA sense strand
gacuauggcucugagauga

SEQ ID NO: 1780488 - RNA, 19 nt, Homo sapiens
  misc_RNA (1)...(19): siRNA sense strand
gagcuguccuucccagaga

SEQ ID NO: 1780489 - RNA, 19 nt, Homo sapiens
  misc_RNA (1)...(19): siRNA sense strand
caagaucaacgcagcaauu

SEQ ID NO: 1780490 - RNA, 19 nt, Homo sapiens
  misc_RNA (1)...(19): siRNA sense strand
gaggagcgccugagaagga

SEQ ID NO: 1780491 - RNA, 19 nt, Homo sapiens
  misc_RNA (1)...(19): siRNA sense strand
gcaucaagcccaaugaguu

SEQ ID NO: 1780492 - RNA, 19 nt, Homo sapiens
  misc_RNA (1)...(19): siRNA sense strand
ccaagaccauccgcaauga

SEQ ID NO: 1780493 - RNA, 19 nt, Homo sapiens
  misc_RNA (1)...(19): siRNA sense strand
ccugagauccuccuaauug

SEQ ID NO: 1780494 - RNA, 19 nt, Homo sapiens
  misc_RNA (1)...(19): siRNA sense strand
ggauucagccucuuuguca

SEQ ID NO: 1780495 - RNA, 19 nt, Homo sapiens
  misc_RNA (1)...(19): siRNA sense strand
ucaagaagcccaugcuguu

SEQ ID NO: 1780496 - RNA, 19 nt, Homo sapiens
  misc_RNA (1)...(19): siRNA sense strand
gaucaacgcagcaauuuac

SEQ ID NO: 1780497 - RNA, 19 nt, Homo sapiens
  misc_RNA (1)...(19): siRNA sense strand
gaacaucaucucccucauc

SEQ ID NO: 1780498 - RNA, 19 nt, Homo sapiens
  misc_RNA (1)...(19): siRNA sense strand
ggaagagaucuaaguaugu

SEQ ID NO: 1780499 - RNA, 19 nt, Homo sapiens
  misc_RNA (1)...(19): siRNA sense strand
caaagcugauccugcaguu

SEQ ID NO: 1780500 - RNA, 19 nt, Homo sapiens
  misc_RNA (1)...(19): siRNA sense strand
ucaccaagaucuccaacug

SEQ ID NO: 1780501 - RNA, 19 nt, Homo sapiens
  misc_RNA (1)...(19): siRNA sense strand
ucauugcugugcucaagua

SEQ ID NO: 1780502 - RNA, 19 nt, Homo sapiens
  misc_RNA (1)...(19): siRNA sense strand
guaacugcauaaccuguga

SEQ ID NO: 1780503 - RNA, 19 nt, Homo sapiens
  misc_RNA (1)...(19): siRNA sense strand
caccucaucuacacguaua

SEQ ID NO: 1780504 - RNA, 19 nt, Homo sapiens
  misc_RNA (1)...(19): siRNA sense strand
cacaagaccacccagauuu

SEQ ID NO: 1780505 - RNA, 19 nt, Homo sapiens
  misc_RNA (1)...(19): siRNA sense strand
ccaggcaccuaguggcuuu

SEQ ID NO: 1780506 - RNA, 19 nt, Homo sapiens
  misc_RNA (1)...(19): siRNA sense strand
gaacgcaacgcacaucaag

SEQ ID NO: 1780507 - RNA, 19 nt, Homo sapiens
  misc_RNA (1)...(19): siRNA sense strand
cagaggaggugaccaagag

SEQ ID NO: 1780508 - RNA, 19 nt, Homo sapiens
  misc_RNA (1)...(19): siRNA sense strand
uggaugaccuccugacuuc

SEQ ID NO: 1780509 - RNA, 19 nt, Homo sapiens
  misc_RNA (1)...(19): siRNA sense strand
gauuccaucuuccacuauu

SEQ ID NO: 1780510 - RNA, 19 nt, Homo sapiens
  misc_RNA (1)...(19): siRNA sense strand
ucaaguacaugggcgacua

SEQ ID NO: 1780511 - RNA, 19 nt, Homo sapiens
  misc_RNA (1)...(19): siRNA sense strand
caaagaggauguggucagu

SEQ ID NO: 1780512 - RNA, 19 nt, Homo sapiens
  misc_RNA (1)...(19): siRNA sense strand
ccaccaaccucaucuacca

SEQ ID NO: 1780513 - RNA, 19 nt, Homo sapiens
  misc_RNA (1)...(19): siRNA sense strand
caacugcuacuucaacaug

SEQ ID NO: 1780514 - RNA, 19 nt, Homo sapiens
  misc_RNA (1)...(19): siRNA sense strand
uaccagguguucuucauga

SEQ ID NO: 1780515 - RNA, 19 nt, Homo sapiens
  misc_RNA (1)...(19): siRNA sense strand
ggaauugugcccucacuca

SEQ ID NO: 1780516 - RNA, 19 nt, Homo sapiens
  misc_RNA (1)...(19): siRNA sense strand
gcaccaaggccaaggacuu

SEQ ID NO: 1780517 - RNA, 19 nt, Homo sapiens
  misc_RNA (1)...(19): siRNA sense strand
guacaucgacauccacuuc

SEQ ID NO: 1780518 - RNA, 19 nt, Homo sapiens
  misc_RNA (1)...(19): siRNA sense strand
guaugaggcacgcacauuu

SEQ ID NO: 1780519 - RNA, 19 nt, Homo sapiens
  misc_RNA (1)...(19): siRNA sense strand
ugacuuuguucgacacuug

SEQ ID NO: 1780520 - RNA, 19 nt, Homo sapiens
  misc_RNA (1)...(19): siRNA sense strand
caagaagccaaucauguug

SEQ ID NO: 1780521 - RNA, 19 nt, Homo sapiens
  misc_RNA (1)...(19): siRNA sense strand
ccaacaagcccaugaacau

SEQ ID NO: 1780522 - RNA, 19 nt, Homo sapiens
  misc_RNA (1)...(19): siRNA sense strand
caagggagaccucaucauc

SEQ ID NO: 1780523 - RNA, 19 nt, Homo sapiens
  misc_RNA (1)...(19): siRNA sense strand
uuaugaagccuacaaauuc

SEQ ID NO: 1780524 - RNA, 19 nt, Homo sapiens
  misc_RNA (1)...(19): siRNA sense strand
gaguauaaauuugccaagu

SEQ ID NO: 1780525 - RNA, 19 nt, Homo sapiens
  misc_RNA (1)...(19): siRNA sense strand
gugaggaucagaagaagaa

SEQ ID NO: 1780526 - RNA, 19 nt, Homo sapiens
  misc_RNA (1)...(19): siRNA sense strand
cuccugacuuccuacauua

SEQ ID NO: 1780527 - RNA, 19 nt, Homo sapiens
  misc_RNA (1)...(19): siRNA sense strand
ccuccugacuuccuacauu

SEQ ID NO: 1780528 - RNA, 19 nt, Homo sapiens
  misc_RNA (1)...(19): siRNA sense strand
acucaucccuucaccaaga

SEQ ID NO: 1780529 - RNA, 19 nt, Homo sapiens
  misc_RNA (1)...(19): siRNA sense strand
ucaaacagccacugcucua

SEQ ID NO: 1780530 - RNA, 19 nt, Homo sapiens
  misc_RNA (1)...(19): siRNA sense strand
ugggcaaccugcaguauga

SEQ ID NO: 1780531 - RNA, 19 nt, Homo sapiens
  misc_RNA (1)...(19): siRNA sense strand
gccaguauaccaacaagaa

SEQ ID NO: 1780532 - RNA, 19 nt, Homo sapiens
  misc_RNA (1)...(19): siRNA sense strand
ugacagacuggauaaagaa

SEQ ID NO: 1780533 - RNA, 19 nt, Homo sapiens
  misc_RNA (1)...(19): siRNA sense strand
ccaccaggcugcuccucaa

SEQ ID NO: 1780534 - RNA, 19 nt, Homo sapiens
  misc_RNA (1)...(19): siRNA sense strand
ugacgaggccuucgaagug

SEQ ID NO: 1780535 - RNA, 19 nt, Homo sapiens
  misc_RNA (1)...(19): siRNA sense strand
cagaagaagagcaguguga

SEQ ID NO: 1780536 - RNA, 19 nt, Homo sapiens
  misc_RNA (1)...(19): siRNA sense strand
gugagaagaucccugugau

SEQ ID NO: 1780537 - RNA, 19 nt, Homo sapiens
  misc_RNA (1)...(19): siRNA sense strand
gaagaacuacgggcugaug

SEQ ID NO: 1780538 - RNA, 19 nt, Homo sapiens
  misc_RNA (1)...(19): siRNA sense strand
ugacuucuucuuugacuuu

SEQ ID NO: 1780539 - RNA, 19 nt, Homo sapiens
  misc_RNA (1)...(19): siRNA sense strand
gaaggacgaggcauaugug

SEQ ID NO: 1780540 - RNA, 19 nt, Homo sapiens
  misc_RNA (1)...(19): siRNA sense strand
gagaacugaugcccagaag

SEQ ID NO: 1780541 - RNA, 19 nt, Homo sapiens
  misc_RNA (1)...(19): siRNA sense strand
gacaacugcuacuucaaca

SEQ ID NO: 1780542 - RNA, 19 nt, Homo sapiens
  misc_RNA (1)...(19): siRNA sense strand
ccgauuccaucuuccacua

SEQ ID NO: 1780543 - RNA, 19 nt, Homo sapiens
  misc_RNA (1)...(19): siRNA sense strand
ccuacacgcuggaggaguu

SEQ ID NO: 1780544 - RNA, 19 nt, Homo sapiens
  misc_RNA (1)...(19): siRNA sense strand
gcgagcaggucaugaacuc

SEQ ID NO: 1780545 - RNA, 19 nt, Homo sapiens
  misc_RNA (1)...(19): siRNA sense strand
ccucuacauugcccuguuu

SEQ ID NO: 1780546 - RNA, 19 nt, Homo sapiens
  misc_RNA (1)...(19): siRNA sense strand
gcucaacgccaacuacauc

SEQ ID NO: 1780547 - RNA, 19 nt, Homo sapiens
  misc_RNA (1)...(19): siRNA sense strand
cacagacaccaccauguua

SEQ ID NO: 1780548 - RNA, 19 nt, Homo sapiens
  misc_RNA (1)...(19): siRNA sense strand
gaggcacgcacauuugaaa

SEQ ID NO: 1780549 - RNA, 19 nt, Homo sapiens
  misc_RNA (1)...(19): siRNA sense strand
ugagugaggaucagaagaa

SEQ ID NO: 1780550 - RNA, 19 nt, Homo sapiens
  misc_RNA (1)...(19): siRNA sense strand
ggaagacggagagcacaaa

SEQ ID NO: 1780551 - RNA, 19 nt, Homo sapiens
  misc_RNA (1)...(19): siRNA sense strand
ucacagccaugagcaaaca

SEQ ID NO: 1780552 - RNA, 19 nt, Homo sapiens
  misc_RNA (1)...(19): siRNA sense strand
gaaagaagcccaaggaaua

SEQ ID NO: 1780553 - RNA, 19 nt, Homo sapiens
  misc_RNA (1)...(19): siRNA sense strand
caaggaagcuggauaugua

SEQ ID NO: 1780554 - RNA, 19 nt, Homo sapiens
  misc_RNA (1)...(19): siRNA sense strand
caacugagcuggagcauuc

SEQ ID NO: 1780555 - RNA, 19 nt, Homo sapiens
  misc_RNA (1)...(19): siRNA sense strand
gaagaugcauuuguaugua

SEQ ID NO: 1780556 - RNA, 19 nt, Homo sapiens
  misc_RNA (1)...(19): siRNA sense strand
cagcaaagcagcuaacuua

SEQ ID NO: 1780557 - RNA, 19 nt, Homo sapiens
  misc_RNA (1)...(19): siRNA sense strand
ggaauaccaugcuuucuuc

SEQ ID NO: 1780558 - RNA, 19 nt, Homo sapiens
  misc_RNA (1)...(19): siRNA sense strand
gcagaaagguauguagcua

SEQ ID NO: 1780559 - RNA, 19 nt, Homo sapiens
  misc_RNA (1)...(19): siRNA sense strand
gcagaccuguuuacggaua

SEQ ID NO: 1780560 - RNA, 19 nt, Homo sapiens
  misc_RNA (1)...(19): siRNA sense strand
cugaagagcuugccauuug

SEQ ID NO: 1780561 - RNA, 19 nt, Homo sapiens
  misc_RNA (1)...(19): siRNA sense strand
guaaucacaugagcauaua

SEQ ID NO: 1780562 - RNA, 19 nt, Homo sapiens
  misc_RNA (1)...(19): siRNA sense strand
gaggaggaauucugcauug

SEQ ID NO: 1780563 - RNA, 19 nt, Homo sapiens
  misc_RNA (1)...(19): siRNA sense strand
ucucuaagcuccuuccaaa

SEQ ID NO: 1780564 - RNA, 19 nt, Homo sapiens
  misc_RNA (1)...(19): siRNA sense strand
ggcacaaacucgguacuua

SEQ ID NO: 1780565 - RNA, 19 nt, Homo sapiens
  misc_RNA (1)...(19): siRNA sense strand
caaaacaaguggaagauuu

SEQ ID NO: 1780566 - RNA, 19 nt, Homo sapiens
  misc_RNA (1)...(19): siRNA sense strand
cggaagagcccaaaucaaa

SEQ ID NO: 1780567 - RNA, 19 nt, Homo sapiens
  misc_RNA (1)...(19): siRNA sense strand
ggaagcaucuggcacaaac

SEQ ID NO: 1780568 - RNA, 19 nt, Homo sapiens
  misc_RNA (1)...(19): siRNA sense strand
acacggaugugcccuauau

SEQ ID NO: 1780569 - RNA, 19 nt, Homo sapiens
  misc_RNA (1)...(19): siRNA sense strand
acacugagcccaauccuaa

SEQ ID NO: 1780570 - RNA, 19 nt, Homo sapiens
  misc_RNA (1)...(19): siRNA sense strand
caaggaauaucagaaugaa

SEQ ID NO: 1780571 - RNA, 19 nt, Homo sapiens
  misc_RNA (1)...(19): siRNA sense strand
gaagaugcuuauuucaaca

SEQ ID NO: 1780572 - RNA, 19 nt, Homo sapiens
  misc_RNA (1)...(19): siRNA sense strand
gcaagaucaugcacuuuca

SEQ ID NO: 1780573 - RNA, 19 nt, Homo sapiens
  misc_RNA (1)...(19): siRNA sense strand
ucauaaagcagaccuguuu

SEQ ID NO: 1780574 - RNA, 19 nt, Homo sapiens
  misc_RNA (1)...(19): siRNA sense strand
ggaagaugcauuuguaugu

SEQ ID NO: 1780575 - RNA, 19 nt, Homo sapiens
  misc_RNA (1)...(19): siRNA sense strand
acaguuagaugaagaagau

SEQ ID NO: 1780576 - RNA, 19 nt, Homo sapiens
  misc_RNA (1)...(19): siRNA sense strand
gagaguaggaggaggaauu

SEQ ID NO: 1780577 - RNA, 19 nt, Homo sapiens
  misc_RNA (1)...(19): siRNA sense strand
caauguaggucuagaagag

SEQ ID NO: 1780578 - RNA, 19 nt, Homo sapiens
  misc_RNA (1)...(19): siRNA sense strand
gcaaagugcguccagcaaa

SEQ ID NO: 1780579 - RNA, 19 nt, Homo sapiens
  misc_RNA (1)...(19): siRNA sense strand
gaagaggaagacccaaauu

SEQ ID NO: 1780580 - RNA, 19 nt, Homo sapiens
  misc_RNA (1)...(19): siRNA sense strand
aaagguauguagcuaguga

SEQ ID NO: 1780581 - RNA, 19 nt, Homo sapiens
  misc_RNA (1)...(19): siRNA sense strand
ggaagacuuguguggaaua

SEQ ID NO: 1780582 - RNA, 19 nt, Homo sapiens
  misc_RNA (1)...(19): siRNA sense strand
agacuacuaugcuuuguau

SEQ ID NO: 1780583 - RNA, 19 nt, Homo sapiens
  misc_RNA (1)...(19): siRNA sense strand
gcaaugaagccagcugaaa

SEQ ID NO: 1780584 - RNA, 19 nt, Homo sapiens
  misc_RNA (1)...(19): siRNA sense strand
gcagcaaggguuccaguuu

SEQ ID NO: 1780585 - RNA, 19 nt, Homo sapiens
  misc_RNA (1)...(19): siRNA sense strand
gaacuuggagacuuucaug

SEQ ID NO: 1780586 - RNA, 19 nt, Homo sapiens
  misc_RNA (1)...(19): siRNA sense strand
gagccaaucagacaugaaa

SEQ ID NO: 1780587 - RNA, 19 nt, Homo sapiens
  misc_RNA (1)...(19): siRNA sense strand
gcaaagcagcuaacuuaca

SEQ ID NO: 1780588 - RNA, 19 nt, Homo sapiens
  misc_RNA (1)...(19): siRNA sense strand
guacagcguugaugguauc

SEQ ID NO: 1780589 - RNA, 19 nt, Homo sapiens
  misc_RNA (1)...(19): siRNA sense strand
cagcaaggguuccaguuuc

SEQ ID NO: 1780590 - RNA, 19 nt, Homo sapiens
  misc_RNA (1)...(19): siRNA sense strand
caaagcagcuaacuuacac

SEQ ID NO: 1780591 - RNA, 19 nt, Homo sapiens
  misc_RNA (1)...(19): siRNA sense strand
gguaaucacaugagcauau

SEQ ID NO: 1780592 - RNA, 19 nt, Homo sapiens
  misc_RNA (1)...(19): siRNA sense strand
agaugaagaugcuuauuuc

SEQ ID NO: 1780593 - RNA, 19 nt, Homo sapiens
  misc_RNA (1)...(19): siRNA sense strand
gcaaggaagcuggauaugu

SEQ ID NO: 1780594 - RNA, 19 nt, Homo sapiens
  misc_RNA (1)...(19): siRNA sense strand
agacaggacuucacuaaaa

SEQ ID NO: 1780595 - RNA, 19 nt, Homo sapiens
  misc_RNA (1)...(19): siRNA sense strand
caaagugcguccagcaaag

SEQ ID NO: 1780596 - RNA, 19 nt, Homo sapiens
  misc_RNA (1)...(19): siRNA sense strand
caucaaacuucaugccaau

SEQ ID NO: 1780597 - RNA, 19 nt, Homo sapiens
  misc_RNA (1)...(19): siRNA sense strand
ugaagagcuugccauuuga

SEQ ID NO: 1780598 - RNA, 19 nt, Homo sapiens
  misc_RNA (1)...(19): siRNA sense strand
gaucaaaguacagcagaaa

SEQ ID NO: 1780599 - RNA, 19 nt, Homo sapiens
  misc_RNA (1)...(19): siRNA sense strand
uuuggaagaugcauuugua

SEQ ID NO: 1780600 - RNA, 19 nt, Homo sapiens
  misc_RNA (1)...(19): siRNA sense strand
ggucagcagguugguauua

SEQ ID NO: 1780601 - RNA, 19 nt, Homo sapiens
  misc_RNA (1)...(19): siRNA sense strand
gaugugcccuauauuccuu

SEQ ID NO: 1780602 - RNA, 19 nt, Homo sapiens
  misc_RNA (1)...(19): siRNA sense strand
aaagaaggauuuggcucua

SEQ ID NO: 1780603 - RNA, 19 nt, Homo sapiens
  misc_RNA (1)...(19): siRNA sense strand
gucagaauuuagaccuuua

SEQ ID NO: 1780604 - RNA, 19 nt, Homo sapiens
  misc_RNA (1)...(19): siRNA sense strand
ccaaggaauaucagaauga

SEQ ID NO: 1780605 - RNA, 19 nt, Homo sapiens
  misc_RNA (1)...(19): siRNA sense strand
gaagcuauagccaggacua

SEQ ID NO: 1780606 - RNA, 19 nt, Homo sapiens
  misc_RNA (1)...(19): siRNA sense strand
ugaagaagaugaagaugcu

SEQ ID NO: 1780607 - RNA, 19 nt, Homo sapiens
  misc_RNA (1)...(19): siRNA sense strand
aaucagaacuuggagacuu

SEQ ID NO: 1780608 - RNA, 19 nt, Homo sapiens
  misc_RNA (1)...(19): siRNA sense strand
ggaucaaaguacagcagaa

SEQ ID NO: 1780609 - RNA, 19 nt, Homo sapiens
  misc_RNA (1)...(19): siRNA sense strand
gaagagcuugccauuugaa

SEQ ID NO: 1780610 - RNA, 19 nt, Homo sapiens
  misc_RNA (1)...(19): siRNA sense strand
guauguagcuagugaaucc

SEQ ID NO: 1780611 - RNA, 19 nt, Homo sapiens
  misc_RNA (1)...(19): siRNA sense strand
ggaguugccagcaguucua

SEQ ID NO: 1780612 - RNA, 19 nt, Homo sapiens
  misc_RNA (1)...(19): siRNA sense strand
cuacaucagucccaaagca

SEQ ID NO: 1780613 - RNA, 19 nt, Homo sapiens
  misc_RNA (1)...(19): siRNA sense strand
cagcaguucuaauggauca

SEQ ID NO: 1780614 - RNA, 19 nt, Homo sapiens
  misc_RNA (1)...(19): siRNA sense strand
gguaggagcaacaucaaug

SEQ ID NO: 1780615 - RNA, 19 nt, Homo sapiens
  misc_RNA (1)...(19): siRNA sense strand
ggaaacauuacccaucuca

SEQ ID NO: 1780616 - RNA, 19 nt, Homo sapiens
  misc_RNA (1)...(19): siRNA sense strand
gcacaaacucgguacuuac

SEQ ID NO: 1780617 - RNA, 19 nt, Homo sapiens
  misc_RNA (1)...(19): siRNA sense strand
agaggaagacccaaauuug

SEQ ID NO: 1780618 - RNA, 19 nt, Homo sapiens
  misc_RNA (1)...(19): siRNA sense strand
gaucccacauugcuacauc

SEQ ID NO: 1780619 - RNA, 19 nt, Homo sapiens
  misc_RNA (1)...(19): siRNA sense strand
ggaggaggaauucugcauu

SEQ ID NO: 1780620 - RNA, 19 nt, Homo sapiens
  misc_RNA (1)...(19): siRNA sense strand
ggaagagcccaaaucaaag

SEQ ID NO: 1780621 - RNA, 19 nt, Homo sapiens
  misc_RNA (1)...(19): siRNA sense strand
guccugcucucagucauaa

SEQ ID NO: 1780622 - RNA, 19 nt, Homo sapiens
  misc_RNA (1)...(19): siRNA sense strand
cagcguugaugguaucuca

SEQ ID NO: 1780623 - RNA, 19 nt, Homo sapiens
  misc_RNA (1)...(19): siRNA sense strand
gaagaugaagaugcuuauu

SEQ ID NO: 1780624 - RNA, 19 nt, Homo sapiens
  misc_RNA (1)...(19): siRNA sense strand
ucuaauggaucaaaguaca

SEQ ID NO: 1780625 - RNA, 19 nt, Homo sapiens
  misc_RNA (1)...(19): siRNA sense strand
gcugaaagaagcccaagga

SEQ ID NO: 1780626 - RNA, 19 nt, Homo sapiens
  misc_RNA (1)...(19): siRNA sense strand
gcaguuccucuuucccuuu

SEQ ID NO: 1780627 - RNA, 19 nt, Homo sapiens
  misc_RNA (1)...(19): siRNA sense strand
gaggugacauuugcaacug

SEQ ID NO: 1780628 - RNA, 19 nt, Homo sapiens
  misc_RNA (1)...(19): siRNA sense strand
gaagacuuguguggaauac

SEQ ID NO: 1780629 - RNA, 19 nt, Homo sapiens
  misc_RNA (1)...(19): siRNA sense strand
ugaaagaagcccaaggaau

SEQ ID NO: 1780630 - RNA, 19 nt, Homo sapiens
  misc_RNA (1)...(19): siRNA sense strand
ggucacccauggccagaau

SEQ ID NO: 1780631 - RNA, 19 nt, Homo sapiens
  misc_RNA (1)...(19): siRNA sense strand
aaaccagacuacuaugcuu

SEQ ID NO: 1780632 - RNA, 19 nt, Homo sapiens
  misc_RNA (1)...(19): siRNA sense strand
guucuaauggaucaaagua

SEQ ID NO: 1780633 - RNA, 19 nt, Homo sapiens
  misc_RNA (1)...(19): siRNA sense strand
uaucucacaucuuacaauc

SEQ ID NO: 1780634 - RNA, 19 nt, Homo sapiens
  misc_RNA (1)...(19): siRNA sense strand
caaacuucaugccaauauc

SEQ ID NO: 1780635 - RNA, 19 nt, Homo sapiens
  misc_RNA (1)...(19): siRNA sense strand
aagaagaugaagaugcuua

SEQ ID NO: 1780636 - RNA, 19 nt, Homo sapiens
  misc_RNA (1)...(19): siRNA sense strand
agaaagguauguagcuagu

SEQ ID NO: 1780637 - RNA, 19 nt, Homo sapiens
  misc_RNA (1)...(19): siRNA sense strand
aagaggaagacccaaauuu

SEQ ID NO: 1780638 - RNA, 19 nt, Homo sapiens
  misc_RNA (1)...(19): siRNA sense strand
guagagcccacugcaauga

SEQ ID NO: 1780639 - RNA, 19 nt, Homo sapiens
  misc_RNA (1)...(19): siRNA sense strand
cauauauucuggccucaca

SEQ ID NO: 1780640 - RNA, 19 nt, Homo sapiens
  misc_RNA (1)...(19): siRNA sense strand
uauauggacccugucuuua

SEQ ID NO: 1780641 - RNA, 19 nt, Homo sapiens
  misc_RNA (1)...(19): siRNA sense strand
cuggaagacuuguguggaa

SEQ ID NO: 1780642 - RNA, 19 nt, Homo sapiens
  misc_RNA (1)...(19): siRNA sense strand
caacacaccaacugcugaa

SEQ ID NO: 1780643 - RNA, 19 nt, Homo sapiens
  misc_RNA (1)...(19): siRNA sense strand
gaagagcuuucagcaagac

SEQ ID NO: 1780644 - RNA, 19 nt, Homo sapiens
  misc_RNA (1)...(19): siRNA sense strand
gcuguaaguuuucugguaa

SEQ ID NO: 1780645 - RNA, 19 nt, Homo sapiens
  misc_RNA (1)...(19): siRNA sense strand
ggaggaauucugcauugga

SEQ ID NO: 1780646 - RNA, 19 nt, Homo sapiens
  misc_RNA (1)...(19): siRNA sense strand
ccaauuagagcagaggaaa

SEQ ID NO: 1780647 - RNA, 19 nt, Homo sapiens
  misc_RNA (1)...(19): siRNA sense strand
aaggaaacauuacccaucu

SEQ ID NO: 1780648 - RNA, 19 nt, Homo sapiens
  misc_RNA (1)...(19): siRNA sense strand
ggcaagaucaugcacuuuc

SEQ ID NO: 1780649 - RNA, 19 nt, Homo sapiens
  misc_RNA (1)...(19): siRNA sense strand
caaugaagccagcugaaag

SEQ ID NO: 1780650 - RNA, 19 nt, Homo sapiens
  misc_RNA (1)...(19): siRNA sense strand
cuaagcuccuuccaaacaa

SEQ ID NO: 1780651 - RNA, 19 nt, Homo sapiens
  misc_RNA (1)...(19): siRNA sense strand
uuauauggacccugucuuu

SEQ ID NO: 1780652 - RNA, 19 nt, Homo sapiens
  misc_RNA (1)...(19): siRNA sense strand
gaaagaagcccaaggaaua

SEQ ID NO: 1780653 - RNA, 19 nt, Homo sapiens
  misc_RNA (1)...(19): siRNA sense strand
caaggaagcuggauaugua

SEQ ID NO: 1780654 - RNA, 19 nt, Homo sapiens
  misc_RNA (1)...(19): siRNA sense strand
caacugagcuggagcauuc

SEQ ID NO: 1780655 - RNA, 19 nt, Homo sapiens
  misc_RNA (1)...(19): siRNA sense strand
gaagaugcauuuguaugua

SEQ ID NO: 1780656 - RNA, 19 nt, Homo sapiens
  misc_RNA (1)...(19): siRNA sense strand
cagcaaagcagcuaacuua

SEQ ID NO: 1780657 - RNA, 19 nt, Homo sapiens
  misc_RNA (1)...(19): siRNA sense strand
ggaauaccaugcuuucuuc

SEQ ID NO: 1780658 - RNA, 19 nt, Homo sapiens
  misc_RNA (1)...(19): siRNA sense strand
gcagaaagguauguagcua

SEQ ID NO: 1780659 - RNA, 19 nt, Homo sapiens
  misc_RNA (1)...(19): siRNA sense strand
gcagaccuguuuacggaua

SEQ ID NO: 1780660 - RNA, 19 nt, Homo sapiens
  misc_RNA (1)...(19): siRNA sense strand
cugaagagcuugccauuug

SEQ ID NO: 1780661 - RNA, 19 nt, Homo sapiens
  misc_RNA (1)...(19): siRNA sense strand
guaaucacaugagcauaua

SEQ ID NO: 1780662 - RNA, 19 nt, Homo sapiens
  misc_RNA (1)...(19): siRNA sense strand
gaggaggaauucugcauug

SEQ ID NO: 1780663 - RNA, 19 nt, Homo sapiens
  misc_RNA (1)...(19): siRNA sense strand
ucucuaagcuccuuccaaa

SEQ ID NO: 1780664 - RNA, 19 nt, Homo sapiens
  misc_RNA (1)...(19): siRNA sense strand
ggcacaaacucgguacuua

SEQ ID NO: 1780665 - RNA, 19 nt, Homo sapiens
  misc_RNA (1)...(19): siRNA sense strand
caaaacaaguggaagauuu

SEQ ID NO: 1780666 - RNA, 19 nt, Homo sapiens
  misc_RNA (1)...(19): siRNA sense strand
cggaagagcccaaaucaaa

SEQ ID NO: 1780667 - RNA, 19 nt, Homo sapiens
  misc_RNA (1)...(19): siRNA sense strand
ggaagcaucuggcacaaac

SEQ ID NO: 1780668 - RNA, 19 nt, Homo sapiens
  misc_RNA (1)...(19): siRNA sense strand
acacggaugugcccuauau

SEQ ID NO: 1780669 - RNA, 19 nt, Homo sapiens
  misc_RNA (1)...(19): siRNA sense strand
acacugagcccaauccuaa

SEQ ID NO: 1780670 - RNA, 19 nt, Homo sapiens
  misc_RNA (1)...(19): siRNA sense strand
caaggaauaucagaaugaa

SEQ ID NO: 1780671 - RNA, 19 nt, Homo sapiens
  misc_RNA (1)...(19): siRNA sense strand
gaagaugcuuauuucaaca

SEQ ID NO: 1780672 - RNA, 19 nt, Homo sapiens
  misc_RNA (1)...(19): siRNA sense strand
gcaagaucaugcacuuuca

SEQ ID NO: 1780673 - RNA, 19 nt, Homo sapiens
  misc_RNA (1)...(19): siRNA sense strand
ucauaaagcagaccuguuu

SEQ ID NO: 1780674 - RNA, 19 nt, Homo sapiens
  misc_RNA (1)...(19): siRNA sense strand
ggaagaugcauuuguaugu

SEQ ID NO: 1780675 - RNA, 19 nt, Homo sapiens
  misc_RNA (1)...(19): siRNA sense strand
acaguuagaugaagaagau

SEQ ID NO: 1780676 - RNA, 19 nt, Homo sapiens
  misc_RNA (1)...(19): siRNA sense strand
gagaguaggaggaggaauu

SEQ ID NO: 1780677 - RNA, 19 nt, Homo sapiens
  misc_RNA (1)...(19): siRNA sense strand
caauguaggucuagaagag

SEQ ID NO: 1780678 - RNA, 19 nt, Homo sapiens
  misc_RNA (1)...(19): siRNA sense strand
gcaaagugcguccagcaaa

SEQ ID NO: 1780679 - RNA, 19 nt, Homo sapiens
  misc_RNA (1)...(19): siRNA sense strand
gaagaggaagacccaaauu

SEQ ID NO: 1780680 - RNA, 19 nt, Homo sapiens
  misc_RNA (1)...(19): siRNA sense strand
aaagguauguagcuaguga

SEQ ID NO: 1780681 - RNA, 19 nt, Homo sapiens
  misc_RNA (1)...(19): siRNA sense strand
ggaagacuuguguggaaua

SEQ ID NO: 1780682 - RNA, 19 nt, Homo sapiens
  misc_RNA (1)...(19): siRNA sense strand
agacuacuaugcuuuguau

SEQ ID NO: 1780683 - RNA, 19 nt, Homo sapiens
  misc_RNA (1)...(19): siRNA sense strand
gcaaugaagccagcugaaa

SEQ ID NO: 1780684 - RNA, 19 nt, Homo sapiens
  misc_RNA (1)...(19): siRNA sense strand
gcagcaaggguuccaguuu

SEQ ID NO: 1780685 - RNA, 19 nt, Homo sapiens
  misc_RNA (1)...(19): siRNA sense strand
gcaaagcagcuaacuuaca

SEQ ID NO: 1780686 - RNA, 19 nt, Homo sapiens
  misc_RNA (1)...(19): siRNA sense strand
gaacuuggagacuuucaug

SEQ ID NO: 1780687 - RNA, 19 nt, Homo sapiens
  misc_RNA (1)...(19): siRNA sense strand
gagccaaucagacaugaaa

SEQ ID NO: 1780688 - RNA, 19 nt, Homo sapiens
  misc_RNA (1)...(19): siRNA sense strand
cagcaaggguuccaguuuc

SEQ ID NO: 1780689 - RNA, 19 nt, Homo sapiens
  misc_RNA (1)...(19): siRNA sense strand
caaagcagcuaacuuacac

SEQ ID NO: 1780690 - RNA, 19 nt, Homo sapiens
  misc_RNA (1)...(19): siRNA sense strand
gguaaucacaugagcauau

SEQ ID NO: 1780691 - RNA, 19 nt, Homo sapiens
  misc_RNA (1)...(19): siRNA sense strand
agaugaagaugcuuauuuc

SEQ ID NO: 1780692 - RNA, 19 nt, Homo sapiens
  misc_RNA (1)...(19): siRNA sense strand
gcaaggaagcuggauaugu

SEQ ID NO: 1780693 - RNA, 19 nt, Homo sapiens
  misc_RNA (1)...(19): siRNA sense strand
agacaggacuucacuaaaa

SEQ ID NO: 1780694 - RNA, 19 nt, Homo sapiens
  misc_RNA (1)...(19): siRNA sense strand
caaagugcguccagcaaag

SEQ ID NO: 1780695 - RNA, 19 nt, Homo sapiens
  misc_RNA (1)...(19): siRNA sense strand
caucaaacuucaugccaau

SEQ ID NO: 1780696 - RNA, 19 nt, Homo sapiens
  misc_RNA (1)...(19): siRNA sense strand
ugaagagcuugccauuuga

SEQ ID NO: 1780697 - RNA, 19 nt, Homo sapiens
  misc_RNA (1)...(19): siRNA sense strand
gaucaaaguacagcagaaa

SEQ ID NO: 1780698 - RNA, 19 nt, Homo sapiens
  misc_RNA (1)...(19): siRNA sense strand
uuuggaagaugcauuugua

SEQ ID NO: 1780699 - RNA, 19 nt, Homo sapiens
  misc_RNA (1)...(19): siRNA sense strand
ggucagcagguugguauua

SEQ ID NO: 1780700 - RNA, 19 nt, Homo sapiens
  misc_RNA (1)...(19): siRNA sense strand
gaugugcccuauauuccuu

SEQ ID NO: 1780701 - RNA, 19 nt, Homo sapiens
  misc_RNA (1)...(19): siRNA sense strand
ccaaggaauaucagaauga

SEQ ID NO: 1780702 - RNA, 19 nt, Homo sapiens
  misc_RNA (1)...(19): siRNA sense strand
gucagaauuuagaccuuua

SEQ ID NO: 1780703 - RNA, 19 nt, Homo sapiens
  misc_RNA (1)...(19): siRNA sense strand
gaagcuauagccaggacua

SEQ ID NO: 1780704 - RNA, 19 nt, Homo sapiens
  misc_RNA (1)...(19): siRNA sense strand
ugaagaagaugaagaugcu

SEQ ID NO: 1780705 - RNA, 19 nt, Homo sapiens
  misc_RNA (1)...(19): siRNA sense strand
aaucagaacuuggagacuu

SEQ ID NO: 1780706 - RNA, 19 nt, Homo sapiens
  misc_RNA (1)...(19): siRNA sense strand
ggaucaaaguacagcagaa

SEQ ID NO: 1780707 - RNA, 19 nt, Homo sapiens
  misc_RNA (1)...(19): siRNA sense strand
gaagagcuugccauuugaa

SEQ ID NO: 1780708 - RNA, 19 nt, Homo sapiens
  misc_RNA (1)...(19): siRNA sense strand
guauguagcuagugaaucc

SEQ ID NO: 1780709 - RNA, 19 nt, Homo sapiens
  misc_RNA (1)...(19): siRNA sense strand
ggaguugccagcaguucua

SEQ ID NO: 1780710 - RNA, 19 nt, Homo sapiens
  misc_RNA (1)...(19): siRNA sense strand
cuacaucagucccaaagca

SEQ ID NO: 1780711 - RNA, 19 nt, Homo sapiens
  misc_RNA (1)...(19): siRNA sense strand
cagcaguucuaauggauca

SEQ ID NO: 1780712 - RNA, 19 nt, Homo sapiens
  misc_RNA (1)...(19): siRNA sense strand
gguaggagcaacaucaaug

SEQ ID NO: 1780713 - RNA, 19 nt, Homo sapiens
  misc_RNA (1)...(19): siRNA sense strand
gcacaaacucgguacuuac

SEQ ID NO: 1780714 - RNA, 19 nt, Homo sapiens
  misc_RNA (1)...(19): siRNA sense strand
agaggaagacccaaauuug

SEQ ID NO: 1780715 - RNA, 19 nt, Homo sapiens
  misc_RNA (1)...(19): siRNA sense strand
gaucccacauugcuacauc

SEQ ID NO: 1780716 - RNA, 19 nt, Homo sapiens
  misc_RNA (1)...(19): siRNA sense strand
ggaggaggaauucugcauu

SEQ ID NO: 1780717 - RNA, 19 nt, Homo sapiens
  misc_RNA (1)...(19): siRNA sense strand
ggaaacauuacccaucuca

SEQ ID NO: 1780718 - RNA, 19 nt, Homo sapiens
  misc_RNA (1)...(19): siRNA sense strand
ggaagagcccaaaucaaag

SEQ ID NO: 1780719 - RNA, 19 nt, Homo sapiens
  misc_RNA (1)...(19): siRNA sense strand
guccugcucucagucauaa

SEQ ID NO: 1780720 - RNA, 19 nt, Homo sapiens
  misc_RNA (1)...(19): siRNA sense strand
gaagacuuguguggaauac

SEQ ID NO: 1780721 - RNA, 19 nt, Homo sapiens
  misc_RNA (1)...(19): siRNA sense strand
gaagaugaagaugcuuauu

SEQ ID NO: 1780722 - RNA, 19 nt, Homo sapiens
  misc_RNA (1)...(19): siRNA sense strand
ucuaauggaucaaaguaca

SEQ ID NO: 1780723 - RNA, 19 nt, Homo sapiens
  misc_RNA (1)...(19): siRNA sense strand
gcugaaagaagcccaagga

SEQ ID NO: 1780724 - RNA, 19 nt, Homo sapiens
  misc_RNA (1)...(19): siRNA sense strand
gcaguuccucuuucccuuu

SEQ ID NO: 1780725 - RNA, 19 nt, Homo sapiens
  misc_RNA (1)...(19): siRNA sense strand
gaggugacauuugcaacug

SEQ ID NO: 1780726 - RNA, 19 nt, Homo sapiens
  misc_RNA (1)...(19): siRNA sense strand
uaucucacaucuuacaauc

SEQ ID NO: 1780727 - RNA, 19 nt, Homo sapiens
  misc_RNA (1)...(19): siRNA sense strand
ggucacccauggccagaau

SEQ ID NO: 1780728 - RNA, 19 nt, Homo sapiens
  misc_RNA (1)...(19): siRNA sense strand
aaaccagacuacuaugcuu

SEQ ID NO: 1780729 - RNA, 19 nt, Homo sapiens
  misc_RNA (1)...(19): siRNA sense strand
guucuaauggaucaaagua

SEQ ID NO: 1780730 - RNA, 19 nt, Homo sapiens
  misc_RNA (1)...(19): siRNA sense strand
ugaaagaagcccaaggaau

SEQ ID NO: 1780731 - RNA, 19 nt, Homo sapiens
  misc_RNA (1)...(19): siRNA sense strand
caaacuucaugccaauauc

SEQ ID NO: 1780732 - RNA, 19 nt, Homo sapiens
  misc_RNA (1)...(19): siRNA sense strand
aagaagaugaagaugcuua

SEQ ID NO: 1780733 - RNA, 19 nt, Homo sapiens
  misc_RNA (1)...(19): siRNA sense strand
agaaagguauguagcuagu

SEQ ID NO: 1780734 - RNA, 19 nt, Homo sapiens
  misc_RNA (1)...(19): siRNA sense strand
aagaggaagacccaaauuu

SEQ ID NO: 1780735 - RNA, 19 nt, Homo sapiens
  misc_RNA (1)...(19): siRNA sense strand
guagagcccacugcaauga

SEQ ID NO: 1780736 - RNA, 19 nt, Homo sapiens
  misc_RNA (1)...(19): siRNA sense strand
cauauauucuggccucaca

SEQ ID NO: 1780737 - RNA, 19 nt, Homo sapiens
  misc_RNA (1)...(19): siRNA sense strand
uauauggacccugucuuua

SEQ ID NO: 1780738 - RNA, 19 nt, Homo sapiens
  misc_RNA (1)...(19): siRNA sense strand
cuggaagacuuguguggaa

SEQ ID NO: 1780739 - RNA, 19 nt, Homo sapiens
  misc_RNA (1)...(19): siRNA sense strand
caacacaccaacugcugaa

SEQ ID NO: 1780740 - RNA, 19 nt, Homo sapiens
  misc_RNA (1)...(19): siRNA sense strand
gaagagcuuucagcaagac

SEQ ID NO: 1780741 - RNA, 19 nt, Homo sapiens
  misc_RNA (1)...(19): siRNA sense strand
gcuguaaguuuucugguaa

SEQ ID NO: 1780742 - RNA, 19 nt, Homo sapiens
  misc_RNA (1)...(19): siRNA sense strand
ggaggaauucugcauugga

SEQ ID NO: 1780743 - RNA, 19 nt, Homo sapiens
  misc_RNA (1)...(19): siRNA sense strand
ccaauuagagcagaggaaa

SEQ ID NO: 1780744 - RNA, 19 nt, Homo sapiens
  misc_RNA (1)...(19): siRNA sense strand
gcuaaaauccgcaaguuga

SEQ ID NO: 1780745 - RNA, 19 nt, Homo sapiens
  misc_RNA (1)...(19): siRNA sense strand
ggcaagaucaugcacuuuc

SEQ ID NO: 1780746 - RNA, 19 nt, Homo sapiens
  misc_RNA (1)...(19): siRNA sense strand
caaugaagccagcugaaag

SEQ ID NO: 1780747 - RNA, 19 nt, Homo sapiens
  misc_RNA (1)...(19): siRNA sense strand
cuaagcuccuuccaaacaa

SEQ ID NO: 1780748 - RNA, 19 nt, Homo sapiens
  misc_RNA (1)...(19): siRNA sense strand
uuauauggacccugucuuu

SEQ ID NO: 1780749 - RNA, 19 nt, Homo sapiens
  misc_RNA (1)...(19): siRNA sense strand
aaggaaacauuacccaucu

SEQ ID NO: 1780750 - RNA, 19 nt, Homo sapiens
  misc_RNA (1)...(19): siRNA sense strand
caugcuuucuucaggcuuu

SEQ ID NO: 1780751 - RNA, 19 nt, Homo sapiens
  misc_RNA (1)...(19): siRNA sense strand
aggaauaucagaaugaaga

SEQ ID NO: 1780752 - RNA, 19 nt, Homo sapiens
  misc_RNA (1)...(19): siRNA sense strand
ggaagacgaaggcaauuca

SEQ ID NO: 1780753 - RNA, 19 nt, Homo sapiens
  misc_RNA (1)...(19): siRNA sense strand
cgagaccaccucagaguaa

SEQ ID NO: 1780754 - RNA, 19 nt, Homo sapiens
  misc_RNA (1)...(19): siRNA sense strand
gagaccaccucagaguaaa

SEQ ID NO: 1780755 - RNA, 19 nt, Homo sapiens
  misc_RNA (1)...(19): siRNA sense strand
ggaacucggccaagggaaa

SEQ ID NO: 1780756 - RNA, 19 nt, Homo sapiens
  misc_RNA (1)...(19): siRNA sense strand
agucggcacuggacgagua

SEQ ID NO: 1780757 - RNA, 19 nt, Homo sapiens
  misc_RNA (1)...(19): siRNA sense strand
ccaagaccaagaagaagaa

SEQ ID NO: 1780758 - RNA, 19 nt, Homo sapiens
  misc_RNA (1)...(19): siRNA sense strand
gccaagaccaagaagaaga

SEQ ID NO: 1780759 - RNA, 19 nt, Homo sapiens
  misc_RNA (1)...(19): siRNA sense strand
gagaggggcuccggugaaa

SEQ ID NO: 1780760 - RNA, 19 nt, Homo sapiens
  misc_RNA (1)...(19): siRNA sense strand
agggaaaggugcccaaguc

SEQ ID NO: 1780761 - RNA, 19 nt, Homo sapiens
  misc_RNA (1)...(19): siRNA sense strand
gaacucggccaagggaaag

SEQ ID NO: 1780762 - RNA, 19 nt, Homo sapiens
  misc_RNA (1)...(19): siRNA sense strand
uggccaagaccaagaagaa

SEQ ID NO: 1780763 - RNA, 19 nt, Homo sapiens
  misc_RNA (1)...(19): siRNA sense strand
gcaccguggcugagucugu

SEQ ID NO: 1780764 - RNA, 19 nt, Homo sapiens
  misc_RNA (1)...(19): siRNA sense strand
gcaauucaggcccagaaac

SEQ ID NO: 1780765 - RNA, 19 nt, Homo sapiens
  misc_RNA (1)...(19): siRNA sense strand
aggaauacuucggcagcua

SEQ ID NO: 1780766 - RNA, 19 nt, Homo sapiens
  misc_RNA (1)...(19): siRNA sense strand
caauucaggcccagaaacu

SEQ ID NO: 1780767 - RNA, 19 nt, Homo sapiens
  misc_RNA (1)...(19): siRNA sense strand
ucgagaccaccucagagua

SEQ ID NO: 1780768 - RNA, 19 nt, Homo sapiens
  misc_RNA (1)...(19): siRNA sense strand
ggaagacgaaggcaauuca

SEQ ID NO: 1780769 - RNA, 19 nt, Homo sapiens
  misc_RNA (1)...(19): siRNA sense strand
cgagaccaccucagaguaa

SEQ ID NO: 1780770 - RNA, 19 nt, Homo sapiens
  misc_RNA (1)...(19): siRNA sense strand
gagaccaccucagaguaaa

SEQ ID NO: 1780771 - RNA, 19 nt, Homo sapiens
  misc_RNA (1)...(19): siRNA sense strand
ggaacucggccaagggaaa

SEQ ID NO: 1780772 - RNA, 19 nt, Homo sapiens
  misc_RNA (1)...(19): siRNA sense strand
agucggcacuggacgagua

SEQ ID NO: 1780773 - RNA, 19 nt, Homo sapiens
  misc_RNA (1)...(19): siRNA sense strand
ccaagaccaagaagaagaa

SEQ ID NO: 1780774 - RNA, 19 nt, Homo sapiens
  misc_RNA (1)...(19): siRNA sense strand
gccaagaccaagaagaaga

SEQ ID NO: 1780775 - RNA, 19 nt, Homo sapiens
  misc_RNA (1)...(19): siRNA sense strand
gagaggggcuccggugaaa

SEQ ID NO: 1780776 - RNA, 19 nt, Homo sapiens
  misc_RNA (1)...(19): siRNA sense strand
agggaaaggugcccaaguc

SEQ ID NO: 1780777 - RNA, 19 nt, Homo sapiens
  misc_RNA (1)...(19): siRNA sense strand
gaacucggccaagggaaag

SEQ ID NO: 1780778 - RNA, 19 nt, Homo sapiens
  misc_RNA (1)...(19): siRNA sense strand
uggccaagaccaagaagaa

SEQ ID NO: 1780779 - RNA, 19 nt, Homo sapiens
  misc_RNA (1)...(19): siRNA sense strand
gcaccguggcugagucugu

SEQ ID NO: 1780780 - RNA, 19 nt, Homo sapiens
  misc_RNA (1)...(19): siRNA sense strand
gcaauucaggcccagaaac

SEQ ID NO: 1780781 - RNA, 19 nt, Homo sapiens
  misc_RNA (1)...(19): siRNA sense strand
aggaauacuucggcagcua

SEQ ID NO: 1780782 - RNA, 19 nt, Homo sapiens
  misc_RNA (1)...(19): siRNA sense strand
caauucaggcccagaaacu

SEQ ID NO: 1780783 - RNA, 19 nt, Homo sapiens
  misc_RNA (1)...(19): siRNA sense strand
ucgagaccaccucagagua

SEQ ID NO: 1780784 - RNA, 19 nt, Homo sapiens
  misc_RNA (1)...(19): siRNA sense strand
cagcagauuugggaagaaa

SEQ ID NO: 1780785 - RNA, 19 nt, Homo sapiens
  misc_RNA (1)...(19): siRNA sense strand
caguaacccuuucaccaaa

SEQ ID NO: 1780786 - RNA, 19 nt, Homo sapiens
  misc_RNA (1)...(19): siRNA sense strand
gcagcagauuugggaagaa

SEQ ID NO: 1780787 - RNA, 19 nt, Homo sapiens
  misc_RNA (1)...(19): siRNA sense strand
acaguaacccuuucaccaa

SEQ ID NO: 1780788 - RNA, 19 nt, Homo sapiens
  misc_RNA (1)...(19): siRNA sense strand
ucacucacaguaacccuuu

SEQ ID NO: 1780789 - RNA, 19 nt, Homo sapiens
  misc_RNA (1)...(19): siRNA sense strand
uaccaugacuuucccuuuu

SEQ ID NO: 1780790 - RNA, 19 nt, Homo sapiens
  misc_RNA (1)...(19): siRNA sense strand
gggacucacucacaguaac

SEQ ID NO: 1780791 - RNA, 19 nt, Homo sapiens
  misc_RNA (1)...(19): siRNA sense strand
uugaucagcuccacauggu

SEQ ID NO: 1780792 - RNA, 19 nt, Homo sapiens
  misc_RNA (1)...(19): siRNA sense strand
gggaaggccuuuagacuua

SEQ ID NO: 1780793 - RNA, 19 nt, Homo sapiens
  misc_RNA (1)...(19): siRNA sense strand
gggaagaacuuuaguaaug

SEQ ID NO: 1780794 - RNA, 19 nt, Homo sapiens
  misc_RNA (1)...(19): siRNA sense strand
caacauagcagaauccaua

SEQ ID NO: 1780795 - RNA, 19 nt, Homo sapiens
  misc_RNA (1)...(19): siRNA sense strand
caacagauguaaagaaugu

SEQ ID NO: 1780796 - RNA, 19 nt, Homo sapiens
  misc_RNA (1)...(19): siRNA sense strand
caucagagauugcauguug

SEQ ID NO: 1780797 - RNA, 19 nt, Homo sapiens
  misc_RNA (1)...(19): siRNA sense strand
ggagaaacccuaugaaugu

SEQ ID NO: 1780798 - RNA, 19 nt, Homo sapiens
  misc_RNA (1)...(19): siRNA sense strand
ggagaaacccuaugaaugu

SEQ ID NO: 1780799 - RNA, 19 nt, Homo sapiens
  misc_RNA (1)...(19): siRNA sense strand
gagaaacccuauaaauaug

SEQ ID NO: 1780800 - RNA, 19 nt, Homo sapiens
  misc_RNA (1)...(19): siRNA sense strand
gugagaaacccuauaaaua

SEQ ID NO: 1780801 - RNA, 19 nt, Homo sapiens
  misc_RNA (1)...(19): siRNA sense strand
gggaagaccuuuagauaca

SEQ ID NO: 1780802 - RNA, 19 nt, Homo sapiens
  misc_RNA (1)...(19): siRNA sense strand
caacaucagcgaauucaua

SEQ ID NO: 1780803 - RNA, 19 nt, Homo sapiens
  misc_RNA (1)...(19): siRNA sense strand
gggaaggccuuuagcacua

SEQ ID NO: 1780804 - RNA, 19 nt, Homo sapiens
  misc_RNA (1)...(19): siRNA sense strand
gagaaacccuaugaaugua

SEQ ID NO: 1780805 - RNA, 19 nt, Homo sapiens
  misc_RNA (1)...(19): siRNA sense strand
gagaaacccuaugaaugua

SEQ ID NO: 1780806 - RNA, 19 nt, Homo sapiens
  misc_RNA (1)...(19): siRNA sense strand
gagaaacccuaugaaugua

SEQ ID NO: 1780807 - RNA, 19 nt, Homo sapiens
  misc_RNA (1)...(19): siRNA sense strand
guaaagcccuaugaaugua

SEQ ID NO: 1780808 - RNA, 19 nt, Homo sapiens
  misc_RNA (1)...(19): siRNA sense strand
gagaaacccuuuaaaugca

SEQ ID NO: 1780809 - RNA, 19 nt, Homo sapiens
  misc_RNA (1)...(19): siRNA sense strand
gaaagaauacauaguagug

SEQ ID NO: 1780810 - RNA, 19 nt, Homo sapiens
  misc_RNA (1)...(19): siRNA sense strand
gaaaugcccaccucugaaa

SEQ ID NO: 1780811 - RNA, 19 nt, Homo sapiens
  misc_RNA (1)...(19): siRNA sense strand
gagaagcccuaugaaugua

SEQ ID NO: 1780812 - RNA, 19 nt, Homo sapiens
  misc_RNA (1)...(19): siRNA sense strand
gcgaauucaugcagagaua

SEQ ID NO: 1780813 - RNA, 19 nt, Homo sapiens
  misc_RNA (1)...(19): siRNA sense strand
acaaucggcuguaaagaaa

SEQ ID NO: 1780814 - RNA, 19 nt, Homo sapiens
  misc_RNA (1)...(19): siRNA sense strand
agaagccacucaaauguaa

SEQ ID NO: 1780815 - RNA, 19 nt, Homo sapiens
  misc_RNA (1)...(19): siRNA sense strand
cgagaaacccuaugaaugu

SEQ ID NO: 1780816 - RNA, 19 nt, Homo sapiens
  misc_RNA (1)...(19): siRNA sense strand
gaagaacuuuaguaaugga

SEQ ID NO: 1780817 - RNA, 19 nt, Homo sapiens
  misc_RNA (1)...(19): siRNA sense strand
gagaaacccuaugagugua

SEQ ID NO: 1780818 - RNA, 19 nt, Homo sapiens
  misc_RNA (1)...(19): siRNA sense strand
gagaagccacucaaaugua

SEQ ID NO: 1780819 - RNA, 19 nt, Homo sapiens
  misc_RNA (1)...(19): siRNA sense strand
ggaagaacuuuaguaaugg

SEQ ID NO: 1780820 - RNA, 19 nt, Homo sapiens
  misc_RNA (1)...(19): siRNA sense strand
gguacacacuggugagaaa

SEQ ID NO: 1780821 - RNA, 19 nt, Homo sapiens
  misc_RNA (1)...(19): siRNA sense strand
gcgagaagcccuaugaaug

SEQ ID NO: 1780822 - RNA, 19 nt, Homo sapiens
  misc_RNA (1)...(19): siRNA sense strand
gcacaucagcgaauucaug

SEQ ID NO: 1780823 - RNA, 19 nt, Homo sapiens
  misc_RNA (1)...(19): siRNA sense strand
cgacaucagaguauucaua

SEQ ID NO: 1780824 - RNA, 19 nt, Homo sapiens
  misc_RNA (1)...(19): siRNA sense strand
ggaaggccuuuagacuuaa

SEQ ID NO: 1780825 - RNA, 19 nt, Homo sapiens
  misc_RNA (1)...(19): siRNA sense strand
gacaucaacucaccauaca

SEQ ID NO: 1780826 - RNA, 19 nt, Homo sapiens
  misc_RNA (1)...(19): siRNA sense strand
gugagaaacccuuuaaaug

SEQ ID NO: 1780827 - RNA, 19 nt, Homo sapiens
  misc_RNA (1)...(19): siRNA sense strand
caauguggaaagacuauua

SEQ ID NO: 1780828 - RNA, 19 nt, Homo sapiens
  misc_RNA (1)...(19): siRNA sense strand
gaaugugggaagaacuuua

SEQ ID NO: 1780829 - RNA, 19 nt, Homo sapiens
  misc_RNA (1)...(19): siRNA sense strand
gggagaaacccuaugaaug

SEQ ID NO: 1780830 - RNA, 19 nt, Homo sapiens
  misc_RNA (1)...(19): siRNA sense strand
gggagaaacccuaugaaug

SEQ ID NO: 1780831 - RNA, 19 nt, Homo sapiens
  misc_RNA (1)...(19): siRNA sense strand
gcgagaaacccuaugaaug

SEQ ID NO: 1780832 - RNA, 19 nt, Homo sapiens
  misc_RNA (1)...(19): siRNA sense strand
gcuaucaacuuacaguaca

SEQ ID NO: 1780833 - RNA, 19 nt, Homo sapiens
  misc_RNA (1)...(19): siRNA sense strand
gugggaagaccuuuagaua

SEQ ID NO: 1780834 - RNA, 19 nt, Homo sapiens
  misc_RNA (1)...(19): siRNA sense strand
gcagaauccauacugguaa

SEQ ID NO: 1780835 - RNA, 19 nt, Homo sapiens
  misc_RNA (1)...(19): siRNA sense strand
ggugagaaacccuauaaau

SEQ ID NO: 1780836 - RNA, 19 nt, Homo sapiens
  misc_RNA (1)...(19): siRNA sense strand
guuggaagaugauacaauc

SEQ ID NO: 1780837 - RNA, 19 nt, Homo sapiens
  misc_RNA (1)...(19): siRNA sense strand
ggugagaaacccuuuaaau

SEQ ID NO: 1780838 - RNA, 19 nt, Homo sapiens
  misc_RNA (1)...(19): siRNA sense strand
ugagaaaccuuuugaaugu

SEQ ID NO: 1780839 - RNA, 19 nt, Homo sapiens
  misc_RNA (1)...(19): siRNA sense strand
cagcaucaaagaauucaua

SEQ ID NO: 1780840 - RNA, 19 nt, Homo sapiens
  misc_RNA (1)...(19): siRNA sense strand
ggagagaaacccuaugagu

SEQ ID NO: 1780841 - RNA, 19 nt, Homo sapiens
  misc_RNA (1)...(19): siRNA sense strand
ggcaaggccuuuaguacug

SEQ ID NO: 1780842 - RNA, 19 nt, Homo sapiens
  misc_RNA (1)...(19): siRNA sense strand
ugagaaaccuuuugaaugu

SEQ ID NO: 1780843 - RNA, 19 nt, Homo sapiens
  misc_RNA (1)...(19): siRNA sense strand
ccacucaaauguaagcaau

SEQ ID NO: 1780844 - RNA, 19 nt, Homo sapiens
  misc_RNA (1)...(19): siRNA sense strand
caacucaccauacaucaga

SEQ ID NO: 1780845 - RNA, 19 nt, Homo sapiens
  misc_RNA (1)...(19): siRNA sense strand
cgagaagcccuaugaaugu

SEQ ID NO: 1780846 - RNA, 19 nt, Homo sapiens
  misc_RNA (1)...(19): siRNA sense strand
ggacaucaacucaccauac

SEQ ID NO: 1780847 - RNA, 19 nt, Homo sapiens
  misc_RNA (1)...(19): siRNA sense strand
gaaacccuuuaaaugcaaa

SEQ ID NO: 1780848 - RNA, 19 nt, Homo sapiens
  misc_RNA (1)...(19): siRNA sense strand
cagcuuaccguacaucaaa

SEQ ID NO: 1780849 - RNA, 19 nt, Homo sapiens
  misc_RNA (1)...(19): siRNA sense strand
caccauacaucagagauug

SEQ ID NO: 1780850 - RNA, 19 nt, Homo sapiens
  misc_RNA (1)...(19): siRNA sense strand
gaacuuuaguaauggacau

SEQ ID NO: 1780851 - RNA, 19 nt, Homo sapiens
  misc_RNA (1)...(19): siRNA sense strand
uaagaagcccuaugagugu

SEQ ID NO: 1780852 - RNA, 19 nt, Homo sapiens
  misc_RNA (1)...(19): siRNA sense strand
guacaucaaaggguucaua

SEQ ID NO: 1780853 - RNA, 19 nt, Homo sapiens
  misc_RNA (1)...(19): siRNA sense strand
gaaacccuaugaauguaag

SEQ ID NO: 1780854 - RNA, 19 nt, Homo sapiens
  misc_RNA (1)...(19): siRNA sense strand
gaaacccuaugaauguaag

SEQ ID NO: 1780855 - RNA, 19 nt, Homo sapiens
  misc_RNA (1)...(19): siRNA sense strand
uuucauaccugguucaaca

SEQ ID NO: 1780856 - RNA, 19 nt, Homo sapiens
  misc_RNA (1)...(19): siRNA sense strand
ugagaaacccuuuaaaugc

SEQ ID NO: 1780857 - RNA, 19 nt, Homo sapiens
  misc_RNA (1)...(19): siRNA sense strand
caucaaagaauucauacug

SEQ ID NO: 1780858 - RNA, 19 nt, Homo sapiens
  misc_RNA (1)...(19): siRNA sense strand
cccaacagauguaaagaau

SEQ ID NO: 1780859 - RNA, 19 nt, Homo sapiens
  misc_RNA (1)...(19): siRNA sense strand
gaauucaugcagagauaaa

SEQ ID NO: 1780860 - RNA, 19 nt, Homo sapiens
  misc_RNA (1)...(19): siRNA sense strand
gauguaaagcccuaugaau

SEQ ID NO: 1780861 - RNA, 19 nt, Homo sapiens
  misc_RNA (1)...(19): siRNA sense strand
gaagaccuuuagauacagu

SEQ ID NO: 1780862 - RNA, 19 nt, Homo sapiens
  misc_RNA (1)...(19): siRNA sense strand
uaaggaauguggaaagacu

SEQ ID NO: 1780863 - RNA, 19 nt, Homo sapiens
  misc_RNA (1)...(19): siRNA sense strand
gugggaagaacuuuaguaa

SEQ ID NO: 1780864 - RNA, 19 nt, Homo sapiens
  misc_RNA (1)...(19): siRNA sense strand
caacuuauuggacaucaga

SEQ ID NO: 1780865 - RNA, 19 nt, Homo sapiens
  misc_RNA (1)...(19): siRNA sense strand
agagaaacccuaugagugu

SEQ ID NO: 1780866 - RNA, 19 nt, Homo sapiens
  misc_RNA (1)...(19): siRNA sense strand
gccaucagcuuaccguaca

SEQ ID NO: 1780867 - RNA, 19 nt, Homo sapiens
  misc_RNA (1)...(19): siRNA sense strand
gggaagaaaccauaugagu

SEQ ID NO: 1780868 - RNA, 19 nt, Homo sapiens
  misc_RNA (1)...(19): siRNA sense strand
caucagagaauucauacug

SEQ ID NO: 1780869 - RNA, 19 nt, Homo sapiens
  misc_RNA (1)...(19): siRNA sense strand
ucuaguauauggaaagcuu

SEQ ID NO: 1780870 - RNA, 19 nt, Homo sapiens
  misc_RNA (1)...(19): siRNA sense strand
gaacaucagcggguacaca

SEQ ID NO: 1780871 - RNA, 19 nt, Homo sapiens
  misc_RNA (1)...(19): siRNA sense strand
gaaggccuuuagacuuaau

SEQ ID NO: 1780872 - RNA, 19 nt, Homo sapiens
  misc_RNA (1)...(19): siRNA sense strand
agucgugccucauaucuug

SEQ ID NO: 1780873 - RNA, 19 nt, Homo sapiens
  misc_RNA (1)...(19): siRNA sense strand
uaaagaaugugggaagaac

SEQ ID NO: 1780874 - RNA, 19 nt, Homo sapiens
  misc_RNA (1)...(19): siRNA sense strand
uuaaagugcaucugagaaa

SEQ ID NO: 1780875 - RNA, 19 nt, Homo sapiens
  misc_RNA (1)...(19): siRNA sense strand
ggcaaggccuucaguucug

SEQ ID NO: 1780876 - RNA, 19 nt, Homo sapiens
  misc_RNA (1)...(19): siRNA sense strand
gguaagaagcccuaugagu

SEQ ID NO: 1780877 - RNA, 19 nt, Homo sapiens
  misc_RNA (1)...(19): siRNA sense strand
caucaaaggguucauacug

SEQ ID NO: 1780878 - RNA, 19 nt, Homo sapiens
  misc_RNA (1)...(19): siRNA sense strand
acagaaaccacgugaaugu

SEQ ID NO: 1780879 - RNA, 19 nt, Homo sapiens
  misc_RNA (1)...(19): siRNA sense strand
ggaaggccuuuagcacuag

SEQ ID NO: 1780880 - RNA, 19 nt, Homo sapiens
  misc_RNA (1)...(19): siRNA sense strand
gaauguaaggaauguggaa

SEQ ID NO: 1780881 - RNA, 19 nt, Homo sapiens
  misc_RNA (1)...(19): siRNA sense strand
gaaacccuaugaauguaac

SEQ ID NO: 1780882 - RNA, 19 nt, Homo sapiens
  misc_RNA (1)...(19): siRNA sense strand
gaauguaaggaauguggaa

SEQ ID NO: 1780883 - RNA, 19 nt, Homo sapiens
  misc_RNA (1)...(19): siRNA sense strand
agacagaaaccacgugaau

SEQ ID NO: 1780884 - RNA, 19 nt, Homo sapiens
  misc_RNA (1)...(19): siRNA sense strand
guaaagaaugugggaagaa

SEQ ID NO: 1780885 - RNA, 19 nt, Homo sapiens
  misc_RNA (1)...(19): siRNA sense strand
uguaaagcccuaugaaugu

SEQ ID NO: 1780886 - RNA, 19 nt, Homo sapiens
  misc_RNA (1)...(19): siRNA sense strand
agauacaguucagcccuua

SEQ ID NO: 1780887 - RNA, 19 nt, Homo sapiens
  misc_RNA (1)...(19): siRNA sense strand
aagcaucagagaauucaua

SEQ ID NO: 1780888 - RNA, 19 nt, Homo sapiens
  misc_RNA (1)...(19): siRNA sense strand
aagaaaugcccaccucuga

SEQ ID NO: 1780889 - RNA, 19 nt, Homo sapiens
  misc_RNA (1)...(19): siRNA sense strand
gcaguuggaagaugauaca

SEQ ID NO: 1780890 - RNA, 19 nt, Homo sapiens
  misc_RNA (1)...(19): siRNA sense strand
uguaaggaauguggaaaga

SEQ ID NO: 1780891 - RNA, 19 nt, Homo sapiens
  misc_RNA (1)...(19): siRNA sense strand
caucagaggauccauacug

SEQ ID NO: 1780892 - RNA, 19 nt, Homo sapiens
  misc_RNA (1)...(19): siRNA sense strand
gggaaggccuuuagacuua

SEQ ID NO: 1780893 - RNA, 19 nt, Homo sapiens
  misc_RNA (1)...(19): siRNA sense strand
gggaagaacuuuaguaaug

SEQ ID NO: 1780894 - RNA, 19 nt, Homo sapiens
  misc_RNA (1)...(19): siRNA sense strand
caacauagcagaauccaua

SEQ ID NO: 1780895 - RNA, 19 nt, Homo sapiens
  misc_RNA (1)...(19): siRNA sense strand
caacagauguaaagaaugu

SEQ ID NO: 1780896 - RNA, 19 nt, Homo sapiens
  misc_RNA (1)...(19): siRNA sense strand
guacagagaugugauguug

SEQ ID NO: 1780897 - RNA, 19 nt, Homo sapiens
  misc_RNA (1)...(19): siRNA sense strand
caucagagauugcauguug

SEQ ID NO: 1780898 - RNA, 19 nt, Homo sapiens
  misc_RNA (1)...(19): siRNA sense strand
ggagaaacccuaugaaugu

SEQ ID NO: 1780899 - RNA, 19 nt, Homo sapiens
  misc_RNA (1)...(19): siRNA sense strand
ggagaaacccuaugaaugu

SEQ ID NO: 1780900 - RNA, 19 nt, Homo sapiens
  misc_RNA (1)...(19): siRNA sense strand
gagaaacccuauaaauaug

SEQ ID NO: 1780901 - RNA, 19 nt, Homo sapiens
  misc_RNA (1)...(19): siRNA sense strand
ggucuauucucaucuuaua

SEQ ID NO: 1780902 - RNA, 19 nt, Homo sapiens
  misc_RNA (1)...(19): siRNA sense strand
gugagaaacccuauaaaua

SEQ ID NO: 1780903 - RNA, 19 nt, Homo sapiens
  misc_RNA (1)...(19): siRNA sense strand
gggaagaccuuuagauaca

SEQ ID NO: 1780904 - RNA, 19 nt, Homo sapiens
  misc_RNA (1)...(19): siRNA sense strand
caacaucagcgaauucaua

SEQ ID NO: 1780905 - RNA, 19 nt, Homo sapiens
  misc_RNA (1)...(19): siRNA sense strand
gggaaggccuuuagcacua

SEQ ID NO: 1780906 - RNA, 19 nt, Homo sapiens
  misc_RNA (1)...(19): siRNA sense strand
gagaaacccuaugaaugua

SEQ ID NO: 1780907 - RNA, 19 nt, Homo sapiens
  misc_RNA (1)...(19): siRNA sense strand
gagaaacccuaugaaugua

SEQ ID NO: 1780908 - RNA, 19 nt, Homo sapiens
  misc_RNA (1)...(19): siRNA sense strand
gagaaacccuaugaaugua

SEQ ID NO: 1780909 - RNA, 19 nt, Homo sapiens
  misc_RNA (1)...(19): siRNA sense strand
guaaagcccuaugaaugua

SEQ ID NO: 1780910 - RNA, 19 nt, Homo sapiens
  misc_RNA (1)...(19): siRNA sense strand
gagaaacccuuuaaaugca

SEQ ID NO: 1780911 - RNA, 19 nt, Homo sapiens
  misc_RNA (1)...(19): siRNA sense strand
gaaaugcccaccucugaaa

SEQ ID NO: 1780912 - RNA, 19 nt, Homo sapiens
  misc_RNA (1)...(19): siRNA sense strand
gagaagcccuaugaaugua

SEQ ID NO: 1780913 - RNA, 19 nt, Homo sapiens
  misc_RNA (1)...(19): siRNA sense strand
gcgaauucaugcagagaua

SEQ ID NO: 1780914 - RNA, 19 nt, Homo sapiens
  misc_RNA (1)...(19): siRNA sense strand
gaaagaauacauaguagug

SEQ ID NO: 1780915 - RNA, 19 nt, Homo sapiens
  misc_RNA (1)...(19): siRNA sense strand
acaaucggcuguaaagaaa

SEQ ID NO: 1780916 - RNA, 19 nt, Homo sapiens
  misc_RNA (1)...(19): siRNA sense strand
agaagccacucaaauguaa

SEQ ID NO: 1780917 - RNA, 19 nt, Homo sapiens
  misc_RNA (1)...(19): siRNA sense strand
cgagaaacccuaugaaugu

SEQ ID NO: 1780918 - RNA, 19 nt, Homo sapiens
  misc_RNA (1)...(19): siRNA sense strand
gaagaacuuuaguaaugga

SEQ ID NO: 1780919 - RNA, 19 nt, Homo sapiens
  misc_RNA (1)...(19): siRNA sense strand
gagaaacccuaugagugua

SEQ ID NO: 1780920 - RNA, 19 nt, Homo sapiens
  misc_RNA (1)...(19): siRNA sense strand
gagaagccacucaaaugua

SEQ ID NO: 1780921 - RNA, 19 nt, Homo sapiens
  misc_RNA (1)...(19): siRNA sense strand
gagaugugauguuggagaa

SEQ ID NO: 1780922 - RNA, 19 nt, Homo sapiens
  misc_RNA (1)...(19): siRNA sense strand
ggaagaacuuuaguaaugg

SEQ ID NO: 1780923 - RNA, 19 nt, Homo sapiens
  misc_RNA (1)...(19): siRNA sense strand
gguacacacuggugagaaa

SEQ ID NO: 1780924 - RNA, 19 nt, Homo sapiens
  misc_RNA (1)...(19): siRNA sense strand
gcgagaagcccuaugaaug

SEQ ID NO: 1780925 - RNA, 19 nt, Homo sapiens
  misc_RNA (1)...(19): siRNA sense strand
gcacaucagcgaauucaug

SEQ ID NO: 1780926 - RNA, 19 nt, Homo sapiens
  misc_RNA (1)...(19): siRNA sense strand
cgacaucagaguauucaua

SEQ ID NO: 1780927 - RNA, 19 nt, Homo sapiens
  misc_RNA (1)...(19): siRNA sense strand
ggaaggccuuuagacuuaa

SEQ ID NO: 1780928 - RNA, 19 nt, Homo sapiens
  misc_RNA (1)...(19): siRNA sense strand
gcaggucuauucucaucuu

SEQ ID NO: 1780929 - RNA, 19 nt, Homo sapiens
  misc_RNA (1)...(19): siRNA sense strand
gacaucaacucaccauaca

SEQ ID NO: 1780930 - RNA, 19 nt, Homo sapiens
  misc_RNA (1)...(19): siRNA sense strand
gugagaaacccuuuaaaug

SEQ ID NO: 1780931 - RNA, 19 nt, Homo sapiens
  misc_RNA (1)...(19): siRNA sense strand
caauguggaaagacuauua

SEQ ID NO: 1780932 - RNA, 19 nt, Homo sapiens
  misc_RNA (1)...(19): siRNA sense strand
gaaugugggaagaacuuua

SEQ ID NO: 1780933 - RNA, 19 nt, Homo sapiens
  misc_RNA (1)...(19): siRNA sense strand
gggagaaacccuaugaaug

SEQ ID NO: 1780934 - RNA, 19 nt, Homo sapiens
  misc_RNA (1)...(19): siRNA sense strand
gggagaaacccuaugaaug

SEQ ID NO: 1780935 - RNA, 19 nt, Homo sapiens
  misc_RNA (1)...(19): siRNA sense strand
gcgagaaacccuaugaaug

SEQ ID NO: 1780936 - RNA, 19 nt, Homo sapiens
  misc_RNA (1)...(19): siRNA sense strand
gcuaucaacuuacaguaca

SEQ ID NO: 1780937 - RNA, 19 nt, Homo sapiens
  misc_RNA (1)...(19): siRNA sense strand
gugggaagaccuuuagaua

SEQ ID NO: 1780938 - RNA, 19 nt, Homo sapiens
  misc_RNA (1)...(19): siRNA sense strand
gcagaauccauacugguaa

SEQ ID NO: 1780939 - RNA, 19 nt, Homo sapiens
  misc_RNA (1)...(19): siRNA sense strand
guuggaagaugauacaauc

SEQ ID NO: 1780940 - RNA, 19 nt, Homo sapiens
  misc_RNA (1)...(19): siRNA sense strand
ggugagaaacccuuuaaau

SEQ ID NO: 1780941 - RNA, 19 nt, Homo sapiens
  misc_RNA (1)...(19): siRNA sense strand
ugagaaaccuuuugaaugu

SEQ ID NO: 1780942 - RNA, 19 nt, Homo sapiens
  misc_RNA (1)...(19): siRNA sense strand
cagcaucaaagaauucaua

SEQ ID NO: 1780943 - RNA, 19 nt, Homo sapiens
  misc_RNA (1)...(19): siRNA sense strand
ggagagaaacccuaugagu

SEQ ID NO: 1780944 - RNA, 19 nt, Homo sapiens
  misc_RNA (1)...(19): siRNA sense strand
ggcaaggccuuuaguacug

SEQ ID NO: 1780945 - RNA, 19 nt, Homo sapiens
  misc_RNA (1)...(19): siRNA sense strand
ugagaaaccuuuugaaugu

SEQ ID NO: 1780946 - RNA, 19 nt, Homo sapiens
  misc_RNA (1)...(19): siRNA sense strand
ccacucaaauguaagcaau

SEQ ID NO: 1780947 - RNA, 19 nt, Homo sapiens
  misc_RNA (1)...(19): siRNA sense strand
ggugagaaacccuauaaau

SEQ ID NO: 1780948 - RNA, 19 nt, Homo sapiens
  misc_RNA (1)...(19): siRNA sense strand
caacucaccauacaucaga

SEQ ID NO: 1780949 - RNA, 19 nt, Homo sapiens
  misc_RNA (1)...(19): siRNA sense strand
cgagaagcccuaugaaugu

SEQ ID NO: 1780950 - RNA, 19 nt, Homo sapiens
  misc_RNA (1)...(19): siRNA sense strand
ggacaucaacucaccauac

SEQ ID NO: 1780951 - RNA, 19 nt, Homo sapiens
  misc_RNA (1)...(19): siRNA sense strand
gaaacccuuuaaaugcaaa

SEQ ID NO: 1780952 - RNA, 19 nt, Homo sapiens
  misc_RNA (1)...(19): siRNA sense strand
acagagaugugauguugga

SEQ ID NO: 1780953 - RNA, 19 nt, Homo sapiens
  misc_RNA (1)...(19): siRNA sense strand
cagcuuaccguacaucaaa

SEQ ID NO: 1780954 - RNA, 19 nt, Homo sapiens
  misc_RNA (1)...(19): siRNA sense strand
caccauacaucagagauug

SEQ ID NO: 1780955 - RNA, 19 nt, Homo sapiens
  misc_RNA (1)...(19): siRNA sense strand
gaacuuuaguaauggacau

SEQ ID NO: 1780956 - RNA, 19 nt, Homo sapiens
  misc_RNA (1)...(19): siRNA sense strand
uaagaagcccuaugagugu

SEQ ID NO: 1780957 - RNA, 19 nt, Homo sapiens
  misc_RNA (1)...(19): siRNA sense strand
guacaucaaaggguucaua

SEQ ID NO: 1780958 - RNA, 19 nt, Homo sapiens
  misc_RNA (1)...(19): siRNA sense strand
gaaacccuaugaauguaag

SEQ ID NO: 1780959 - RNA, 19 nt, Homo sapiens
  misc_RNA (1)...(19): siRNA sense strand
gaaacccuaugaauguaag

SEQ ID NO: 1780960 - RNA, 19 nt, Homo sapiens
  misc_RNA (1)...(19): siRNA sense strand
cccaacagauguaaagaau

SEQ ID NO: 1780961 - RNA, 19 nt, Homo sapiens
  misc_RNA (1)...(19): siRNA sense strand
ugagaaacccuuuaaaugc

SEQ ID NO: 1780962 - RNA, 19 nt, Homo sapiens
  misc_RNA (1)...(19): siRNA sense strand
caucaaagaauucauacug

SEQ ID NO: 1780963 - RNA, 19 nt, Homo sapiens
  misc_RNA (1)...(19): siRNA sense strand
gaauucaugcagagauaaa

SEQ ID NO: 1780964 - RNA, 19 nt, Homo sapiens
  misc_RNA (1)...(19): siRNA sense strand
uuucauaccugguucaaca

SEQ ID NO: 1780965 - RNA, 19 nt, Homo sapiens
  misc_RNA (1)...(19): siRNA sense strand
gauguaaagcccuaugaau

SEQ ID NO: 1780966 - RNA, 19 nt, Homo sapiens
  misc_RNA (1)...(19): siRNA sense strand
gaagaccuuuagauacagu

SEQ ID NO: 1780967 - RNA, 19 nt, Homo sapiens
  misc_RNA (1)...(19): siRNA sense strand
uaaggaauguggaaagacu

SEQ ID NO: 1780968 - RNA, 19 nt, Homo sapiens
  misc_RNA (1)...(19): siRNA sense strand
gugggaagaacuuuaguaa

SEQ ID NO: 1780969 - RNA, 19 nt, Homo sapiens
  misc_RNA (1)...(19): siRNA sense strand
gaauuuaugcugguaggaa

SEQ ID NO: 1780970 - RNA, 19 nt, Homo sapiens
  misc_RNA (1)...(19): siRNA sense strand
caacuuauuggacaucaga

SEQ ID NO: 1780971 - RNA, 19 nt, Homo sapiens
  misc_RNA (1)...(19): siRNA sense strand
agagaaacccuaugagugu

SEQ ID NO: 1780972 - RNA, 19 nt, Homo sapiens
  misc_RNA (1)...(19): siRNA sense strand
gccaucagcuuaccguaca

SEQ ID NO: 1780973 - RNA, 19 nt, Homo sapiens
  misc_RNA (1)...(19): siRNA sense strand
gggaagaaaccauaugagu

SEQ ID NO: 1780974 - RNA, 19 nt, Homo sapiens
  misc_RNA (1)...(19): siRNA sense strand
caucagagaauucauacug

SEQ ID NO: 1780975 - RNA, 19 nt, Homo sapiens
  misc_RNA (1)...(19): siRNA sense strand
ucuaguauauggaaagcuu

SEQ ID NO: 1780976 - RNA, 19 nt, Homo sapiens
  misc_RNA (1)...(19): siRNA sense strand
gaacaucagcggguacaca

SEQ ID NO: 1780977 - RNA, 19 nt, Homo sapiens
  misc_RNA (1)...(19): siRNA sense strand
gaaggccuuuagacuuaau

SEQ ID NO: 1780978 - RNA, 19 nt, Homo sapiens
  misc_RNA (1)...(19): siRNA sense strand
agucgugccucauaucuug

SEQ ID NO: 1780979 - RNA, 19 nt, Homo sapiens
  misc_RNA (1)...(19): siRNA sense strand
acagaaaccacgugaaugu

SEQ ID NO: 1780980 - RNA, 19 nt, Homo sapiens
  misc_RNA (1)...(19): siRNA sense strand
uuaaagugcaucugagaaa

SEQ ID NO: 1780981 - RNA, 19 nt, Homo sapiens
  misc_RNA (1)...(19): siRNA sense strand
ggcaaggccuucaguucug

SEQ ID NO: 1780982 - RNA, 19 nt, Homo sapiens
  misc_RNA (1)...(19): siRNA sense strand
gguaagaagcccuaugagu

SEQ ID NO: 1780983 - RNA, 19 nt, Homo sapiens
  misc_RNA (1)...(19): siRNA sense strand
caucaaaggguucauacug

SEQ ID NO: 1780984 - RNA, 19 nt, Homo sapiens
  misc_RNA (1)...(19): siRNA sense strand
ggaaggccuuuagcacuag

SEQ ID NO: 1780985 - RNA, 19 nt, Homo sapiens
  misc_RNA (1)...(19): siRNA sense strand
uaaagaaugugggaagaac

SEQ ID NO: 1780986 - RNA, 19 nt, Homo sapiens
  misc_RNA (1)...(19): siRNA sense strand
agacagaaaccacgugaau

SEQ ID NO: 1780987 - RNA, 19 nt, Homo sapiens
  misc_RNA (1)...(19): siRNA sense strand
gaacaucggggaauuuaug

SEQ ID NO: 1780988 - RNA, 19 nt, Homo sapiens
  misc_RNA (1)...(19): siRNA sense strand
gaaacccuaugaauguaac

SEQ ID NO: 1780989 - RNA, 19 nt, Homo sapiens
  misc_RNA (1)...(19): siRNA sense strand
gaauguaaggaauguggaa

SEQ ID NO: 1780990 - RNA, 19 nt, Homo sapiens
  misc_RNA (1)...(19): siRNA sense strand
gaauguaaggaauguggaa

SEQ ID NO: 1780991 - RNA, 19 nt, Homo sapiens
  misc_RNA (1)...(19): siRNA sense strand
guaaagaaugugggaagaa

SEQ ID NO: 1780992 - RNA, 19 nt, Homo sapiens
  misc_RNA (1)...(19): siRNA sense strand
caaaagaucugcaaaauca

SEQ ID NO: 1780993 - RNA, 19 nt, Homo sapiens
  misc_RNA (1)...(19): siRNA sense strand
ucaggaugcuuggauauua

SEQ ID NO: 1780994 - RNA, 19 nt, Homo sapiens
  misc_RNA (1)...(19): siRNA sense strand
ggagucaucccucagauuu

SEQ ID NO: 1780995 - RNA, 19 nt, Homo sapiens
  misc_RNA (1)...(19): siRNA sense strand
ggacgaggccgaaucaaug

SEQ ID NO: 1780996 - RNA, 19 nt, Homo sapiens
  misc_RNA (1)...(19): siRNA sense strand
ugaagucugucaccaauga

SEQ ID NO: 1780997 - RNA, 19 nt, Homo sapiens
  misc_RNA (1)...(19): siRNA sense strand
caacaugguggacaucaua

SEQ ID NO: 1780998 - RNA, 19 nt, Homo sapiens
  misc_RNA (1)...(19): siRNA sense strand
cagaguacaucgagaaguu

SEQ ID NO: 1780999 - RNA, 19 nt, Homo sapiens
  misc_RNA (1)...(19): siRNA sense strand
caggaugcuuggauauuaa

SEQ ID NO: 1781000 - RNA, 19 nt, Homo sapiens
  misc_RNA (1)...(19): siRNA sense strand
ggacaccuccuaccuguuc

SEQ ID NO: 1781001 - RNA, 19 nt, Homo sapiens
  misc_RNA (1)...(19): siRNA sense strand
ucaaagggcaugagaaugu

SEQ ID NO: 1781002 - RNA, 19 nt, Homo sapiens
  misc_RNA (1)...(19): siRNA sense strand
guugaugccuuguguaauc

SEQ ID NO: 1781003 - RNA, 19 nt, Homo sapiens
  misc_RNA (1)...(19): siRNA sense strand
uaacagacuucacguucau

SEQ ID NO: 1781004 - RNA, 19 nt, Homo sapiens
  misc_RNA (1)...(19): siRNA sense strand
ugaggcaacuguacccaaa

SEQ ID NO: 1781005 - RNA, 19 nt, Homo sapiens
  misc_RNA (1)...(19): siRNA sense strand
gcacaagcgaggaaagcua

SEQ ID NO: 1781006 - RNA, 19 nt, Homo sapiens
  misc_RNA (1)...(19): siRNA sense strand
ggagaaaacaugcaaauau

SEQ ID NO: 1781007 - RNA, 19 nt, Homo sapiens
  misc_RNA (1)...(19): siRNA sense strand
gaaaggggcucguuuuguc

SEQ ID NO: 1781008 - RNA, 19 nt, Homo sapiens
  misc_RNA (1)...(19): siRNA sense strand
caucauacacucuguuguu

SEQ ID NO: 1781009 - RNA, 19 nt, Homo sapiens
  misc_RNA (1)...(19): siRNA sense strand
guacaacguccuuggagaa

SEQ ID NO: 1781010 - RNA, 19 nt, Homo sapiens
  misc_RNA (1)...(19): siRNA sense strand
ggccaccucuguuaacgaa

SEQ ID NO: 1781011 - RNA, 19 nt, Homo sapiens
  misc_RNA (1)...(19): siRNA sense strand
gcugugaccuggaugucuu

SEQ ID NO: 1781012 - RNA, 19 nt, Homo sapiens
  misc_RNA (1)...(19): siRNA sense strand
ugggaggacuguuggaauu

SEQ ID NO: 1781013 - RNA, 19 nt, Homo sapiens
  misc_RNA (1)...(19): siRNA sense strand
gcuuggauauuaauucauc

SEQ ID NO: 1781014 - RNA, 19 nt, Homo sapiens
  misc_RNA (1)...(19): siRNA sense strand
ugugaugcauucaauauuc

SEQ ID NO: 1781015 - RNA, 19 nt, Homo sapiens
  misc_RNA (1)...(19): siRNA sense strand
ggaggugccuaugauguca

SEQ ID NO: 1781016 - RNA, 19 nt, Homo sapiens
  misc_RNA (1)...(19): siRNA sense strand
ucacagucaucaccaggaa

SEQ ID NO: 1781017 - RNA, 19 nt, Homo sapiens
  misc_RNA (1)...(19): siRNA sense strand
aaccaaagccuacaacaug

SEQ ID NO: 1781018 - RNA, 19 nt, Homo sapiens
  misc_RNA (1)...(19): siRNA sense strand
ccaagcuucucuacgcauu

SEQ ID NO: 1781019 - RNA, 19 nt, Homo sapiens
  misc_RNA (1)...(19): siRNA sense strand
ugaugucccuggcuuucua

SEQ ID NO: 1781020 - RNA, 19 nt, Homo sapiens
  misc_RNA (1)...(19): siRNA sense strand
ggaggacuguuggaauugu

SEQ ID NO: 1781021 - RNA, 19 nt, Homo sapiens
  misc_RNA (1)...(19): siRNA sense strand
gacuucacguucaugguaa

SEQ ID NO: 1781022 - RNA, 19 nt, Homo sapiens
  misc_RNA (1)...(19): siRNA sense strand
gagaucaugcccaauuaug

SEQ ID NO: 1781023 - RNA, 19 nt, Homo sapiens
  misc_RNA (1)...(19): siRNA sense strand
uugagaucaugcccaauua

SEQ ID NO: 1781024 - RNA, 19 nt, Homo sapiens
  misc_RNA (1)...(19): siRNA sense strand
gcccugauguugugaaguc

SEQ ID NO: 1781025 - RNA, 19 nt, Homo sapiens
  misc_RNA (1)...(19): siRNA sense strand
gaaguuugccaacccuuuc

SEQ ID NO: 1781026 - RNA, 19 nt, Homo sapiens
  misc_RNA (1)...(19): siRNA sense strand
caaagggcaugagaaugug

SEQ ID NO: 1781027 - RNA, 19 nt, Homo sapiens
  misc_RNA (1)...(19): siRNA sense strand
cauacacucuguuguugau

SEQ ID NO: 1781028 - RNA, 19 nt, Homo sapiens
  misc_RNA (1)...(19): siRNA sense strand
ccaauuaugccaagaacau

SEQ ID NO: 1781029 - RNA, 19 nt, Homo sapiens
  misc_RNA (1)...(19): siRNA sense strand
cuaacagacuucacguuca

SEQ ID NO: 1781030 - RNA, 19 nt, Homo sapiens
  misc_RNA (1)...(19): siRNA sense strand
gcaacuguacccaaaguca

SEQ ID NO: 1781031 - RNA, 19 nt, Homo sapiens
  misc_RNA (1)...(19): siRNA sense strand
gaggacuguuggaauuguu

SEQ ID NO: 1781032 - RNA, 19 nt, Homo sapiens
  misc_RNA (1)...(19): siRNA sense strand
ucacguucaugguaaagga

SEQ ID NO: 1781033 - RNA, 19 nt, Homo sapiens
  misc_RNA (1)...(19): siRNA sense strand
agacuucacguucauggua

SEQ ID NO: 1781034 - RNA, 19 nt, Homo sapiens
  misc_RNA (1)...(19): siRNA sense strand
gggcaaggcucagcguucu

SEQ ID NO: 1781035 - RNA, 19 nt, Homo sapiens
  misc_RNA (1)...(19): siRNA sense strand
uuccugagcuugacacaau

SEQ ID NO: 1781036 - RNA, 19 nt, Homo sapiens
  misc_RNA (1)...(19): siRNA sense strand
aauggaagauugguuuaug

SEQ ID NO: 1781037 - RNA, 19 nt, Homo sapiens
  misc_RNA (1)...(19): siRNA sense strand
ccgcagagauugcagucau

SEQ ID NO: 1781038 - RNA, 19 nt, Homo sapiens
  misc_RNA (1)...(19): siRNA sense strand
ggacaucauacacucuguu

SEQ ID NO: 1781039 - RNA, 19 nt, Homo sapiens
  misc_RNA (1)...(19): siRNA sense strand
caaccaaagccuacaacau

SEQ ID NO: 1781040 - RNA, 19 nt, Homo sapiens
  misc_RNA (1)...(19): siRNA sense strand
auauuccacucaucacuuu

SEQ ID NO: 1781041 - RNA, 19 nt, Homo sapiens
  misc_RNA (1)...(19): siRNA sense strand
acacaauugucccuuugga

SEQ ID NO: 1781042 - RNA, 19 nt, Homo sapiens
  misc_RNA (1)...(19): siRNA sense strand
aaagggcgcuguggagauc

SEQ ID NO: 1781043 - RNA, 19 nt, Homo sapiens
  misc_RNA (1)...(19): siRNA sense strand
guugagagcgacauguuug

SEQ ID NO: 1781044 - RNA, 19 nt, Homo sapiens
  misc_RNA (1)...(19): siRNA sense strand
cuauggaggugccuaugau

SEQ ID NO: 1781045 - RNA, 19 nt, Homo sapiens
  misc_RNA (1)...(19): siRNA sense strand
gacccuggcagcuuuguug

SEQ ID NO: 1781046 - RNA, 19 nt, Homo sapiens
  misc_RNA (1)...(19): siRNA sense strand
cacaagcgaggaaagcuaa

SEQ ID NO: 1781047 - RNA, 19 nt, Homo sapiens
  misc_RNA (1)...(19): siRNA sense strand
ccuggcagcuuuguugaga

SEQ ID NO: 1781048 - RNA, 19 nt, Homo sapiens
  misc_RNA (1)...(19): siRNA sense strand
uacacucuguuguugauga

SEQ ID NO: 1781049 - RNA, 19 nt, Homo sapiens
  misc_RNA (1)...(19): siRNA sense strand
gacaucauacacucuguug

SEQ ID NO: 1781050 - RNA, 19 nt, Homo sapiens
  misc_RNA (1)...(19): siRNA sense strand
gccucaggaugcuuggaua

SEQ ID NO: 1781051 - RNA, 19 nt, Homo sapiens
  misc_RNA (1)...(19): siRNA sense strand
acaauugucccuuuggaau

SEQ ID NO: 1781052 - RNA, 19 nt, Homo sapiens
  misc_RNA (1)...(19): siRNA sense strand
acaugcaaauauuccauug

SEQ ID NO: 1781053 - RNA, 19 nt, Homo sapiens
  misc_RNA (1)...(19): siRNA sense strand
aagcuucucuacgcauuug

SEQ ID NO: 1781054 - RNA, 19 nt, Homo sapiens
  misc_RNA (1)...(19): siRNA sense strand
caaagggcgcuguggagau

SEQ ID NO: 1781055 - RNA, 19 nt, Homo sapiens
  misc_RNA (1)...(19): siRNA sense strand
ugguuuaugucuucaguca

SEQ ID NO: 1781056 - RNA, 19 nt, Homo sapiens
  misc_RNA (1)...(19): siRNA sense strand
gacaucauccaaccuucuu

SEQ ID NO: 1781057 - RNA, 19 nt, Homo sapiens
  misc_RNA (1)...(19): siRNA sense strand
gaguacaucgagaaguuug

SEQ ID NO: 1781058 - RNA, 19 nt, Homo sapiens
  misc_RNA (1)...(19): siRNA sense strand
ugauguugaugccuugugu

SEQ ID NO: 1781059 - RNA, 19 nt, Homo sapiens
  misc_RNA (1)...(19): siRNA sense strand
ucacuggcccugauguugu

SEQ ID NO: 1781060 - RNA, 19 nt, Homo sapiens
  misc_RNA (1)...(19): siRNA sense strand
uggcuaugcagacaucuuu

SEQ ID NO: 1781061 - RNA, 19 nt, Homo sapiens
  misc_RNA (1)...(19): siRNA sense strand
gaugcuuggauauuaauuc

SEQ ID NO: 1781062 - RNA, 19 nt, Homo sapiens
  misc_RNA (1)...(19): siRNA sense strand
gaaugaaugggaggacugu

SEQ ID NO: 1781063 - RNA, 19 nt, Homo sapiens
  misc_RNA (1)...(19): siRNA sense strand
uccgggauuucuucaacua

SEQ ID NO: 1781064 - RNA, 19 nt, Homo sapiens
  misc_RNA (1)...(19): siRNA sense strand
gcgcagcacaagcgaggaa

SEQ ID NO: 1781065 - RNA, 19 nt, Homo sapiens
  misc_RNA (1)...(19): siRNA sense strand
ugcgaggguuuguggauga

SEQ ID NO: 1781066 - RNA, 19 nt, Homo sapiens
  misc_RNA (1)...(19): siRNA sense strand
cuucaaagggcaugagaau

SEQ ID NO: 1781067 - RNA, 19 nt, Homo sapiens
  misc_RNA (1)...(19): siRNA sense strand
caugagcucuaagcaccuu

SEQ ID NO: 1781068 - RNA, 19 nt, Homo sapiens
  misc_RNA (1)...(19): siRNA sense strand
ggaagauugguuuaugucu

SEQ ID NO: 1781069 - RNA, 19 nt, Homo sapiens
  misc_RNA (1)...(19): siRNA sense strand
gagcgacauguuuguggaa

SEQ ID NO: 1781070 - RNA, 19 nt, Homo sapiens
  misc_RNA (1)...(19): siRNA sense strand
guuaacgaacgcaucgaaa

SEQ ID NO: 1781071 - RNA, 19 nt, Homo sapiens
  misc_RNA (1)...(19): siRNA sense strand
uuugagaucaugcccaauu

SEQ ID NO: 1781072 - RNA, 19 nt, Homo sapiens
  misc_RNA (1)...(19): siRNA sense strand
gccaggccaccucuguuaa

SEQ ID NO: 1781073 - RNA, 19 nt, Homo sapiens
  misc_RNA (1)...(19): siRNA sense strand
uaacagccagggagaggau

SEQ ID NO: 1781074 - RNA, 19 nt, Homo sapiens
  misc_RNA (1)...(19): siRNA sense strand
agacaucuuucugaggaau

SEQ ID NO: 1781075 - RNA, 19 nt, Homo sapiens
  misc_RNA (1)...(19): siRNA sense strand
guauugacgcgcagcacaa

SEQ ID NO: 1781076 - RNA, 19 nt, Homo sapiens
  misc_RNA (1)...(19): siRNA sense strand
gaggguuuguggaugacau

SEQ ID NO: 1781077 - RNA, 19 nt, Homo sapiens
  misc_RNA (1)...(19): siRNA sense strand
gauguugaugccuugugua

SEQ ID NO: 1781078 - RNA, 19 nt, Homo sapiens
  misc_RNA (1)...(19): siRNA sense strand
agccaggccaccucuguua

SEQ ID NO: 1781079 - RNA, 19 nt, Homo sapiens
  misc_RNA (1)...(19): siRNA sense strand
aauugucccuuuggaauca

SEQ ID NO: 1781080 - RNA, 19 nt, Homo sapiens
  misc_RNA (1)...(19): siRNA sense strand
aaucugcugugaccuggau

SEQ ID NO: 1781081 - RNA, 19 nt, Homo sapiens
  misc_RNA (1)...(19): siRNA sense strand
gggaggacuguuggaauug

SEQ ID NO: 1781082 - RNA, 19 nt, Homo sapiens
  misc_RNA (1)...(19): siRNA sense strand
caauugucccuuuggaauc

SEQ ID NO: 1781083 - RNA, 19 nt, Homo sapiens
  misc_RNA (1)...(19): siRNA sense strand
agaaguuugccaacccuuu

SEQ ID NO: 1781084 - RNA, 19 nt, Homo sapiens
  misc_RNA (1)...(19): siRNA sense strand
ccuauggaggugccuauga

SEQ ID NO: 1781085 - RNA, 19 nt, Homo sapiens
  misc_RNA (1)...(19): siRNA sense strand
guacccaaagucacaguca

SEQ ID NO: 1781086 - RNA, 19 nt, Homo sapiens
  misc_RNA (1)...(19): siRNA sense strand
caagcuucucuacgcauuu

SEQ ID NO: 1781087 - RNA, 19 nt, Homo sapiens
  misc_RNA (1)...(19): siRNA sense strand
ucugugaugcauucaauau

SEQ ID NO: 1781088 - RNA, 19 nt, Homo sapiens
  misc_RNA (1)...(19): siRNA sense strand
ccagggagaggaucagucu

SEQ ID NO: 1781089 - RNA, 19 nt, Homo sapiens
  misc_RNA (1)...(19): siRNA sense strand
gcccaauuaugccaagaac

SEQ ID NO: 1781090 - RNA, 19 nt, Homo sapiens
  misc_RNA (1)...(19): siRNA sense strand
ugagaucaugcccaauuau

SEQ ID NO: 1781091 - RNA, 19 nt, Homo sapiens
  misc_RNA (1)...(19): siRNA sense strand
gcauucaauauuccacuca

SEQ ID NO: 1781092 - RNA, 19 nt, Homo sapiens
  misc_RNA (1)...(19): siRNA sense strand
gcaccacgcugacgauguu

SEQ ID NO: 1781093 - RNA, 19 nt, Homo sapiens
  misc_RNA (1)...(19): siRNA sense strand
ggagcuggcagucaguaaa

SEQ ID NO: 1781094 - RNA, 19 nt, Homo sapiens
  misc_RNA (1)...(19): siRNA sense strand
gggcaucgagcgccucaaa

SEQ ID NO: 1781095 - RNA, 19 nt, Homo sapiens
  misc_RNA (1)...(19): siRNA sense strand
acaacagacugcccacuca

SEQ ID NO: 1781096 - RNA, 19 nt, Homo sapiens
  misc_RNA (1)...(19): siRNA sense strand
ccacucagaccccaucuua

SEQ ID NO: 1781097 - RNA, 19 nt, Homo sapiens
  misc_RNA (1)...(19): siRNA sense strand
caucuggcauugcacuugu

SEQ ID NO: 1781098 - RNA, 19 nt, Homo sapiens
  misc_RNA (1)...(19): siRNA sense strand
ucgagcgccucaaacgaaa

SEQ ID NO: 1781099 - RNA, 19 nt, Homo sapiens
  misc_RNA (1)...(19): siRNA sense strand
gagcgccucaaacgaaaga

SEQ ID NO: 1781100 - RNA, 19 nt, Homo sapiens
  misc_RNA (1)...(19): siRNA sense strand
gcacuuguggaaggaaaga

SEQ ID NO: 1781101 - RNA, 19 nt, Homo sapiens
  misc_RNA (1)...(19): siRNA sense strand
gagcuggcagucaguaaag

SEQ ID NO: 1781102 - RNA, 19 nt, Homo sapiens
  misc_RNA (1)...(19): siRNA sense strand
gggcccugcuugcuguguu

SEQ ID NO: 1781103 - RNA, 19 nt, Homo sapiens
  misc_RNA (1)...(19): siRNA sense strand
ugaccugggccacaacaga

SEQ ID NO: 1781104 - RNA, 19 nt, Homo sapiens
  misc_RNA (1)...(19): siRNA sense strand
ggugguggguggagaacac

SEQ ID NO: 1781105 - RNA, 19 nt, Homo sapiens
  misc_RNA (1)...(19): siRNA sense strand
cccaucaucuggcauugca

SEQ ID NO: 1781106 - RNA, 19 nt, Homo sapiens
  misc_RNA (1)...(19): siRNA sense strand
uggcauugcacuuguggaa

SEQ ID NO: 1781107 - RNA, 19 nt, Homo sapiens
  misc_RNA (1)...(19): siRNA sense strand
gaacuuagccuuaaugaaa

SEQ ID NO: 1781108 - RNA, 19 nt, Homo sapiens
  misc_RNA (1)...(19): siRNA sense strand
gcucaacccuuuaaauuua

SEQ ID NO: 1781109 - RNA, 19 nt, Homo sapiens
  misc_RNA (1)...(19): siRNA sense strand
ggcauuaugucauguauua

SEQ ID NO: 1781110 - RNA, 19 nt, Homo sapiens
  misc_RNA (1)...(19): siRNA sense strand
ccaaagaacuuagccuuaa

SEQ ID NO: 1781111 - RNA, 19 nt, Homo sapiens
  misc_RNA (1)...(19): siRNA sense strand
gaacagggauaacuacauc

SEQ ID NO: 1781112 - RNA, 19 nt, Homo sapiens
  misc_RNA (1)...(19): siRNA sense strand
gaacagcaauguggaaguu

SEQ ID NO: 1781113 - RNA, 19 nt, Homo sapiens
  misc_RNA (1)...(19): siRNA sense strand
gaacugaacgccaucauug

SEQ ID NO: 1781114 - RNA, 19 nt, Homo sapiens
  misc_RNA (1)...(19): siRNA sense strand
gcauacuccuuccauguua

SEQ ID NO: 1781115 - RNA, 19 nt, Homo sapiens
  misc_RNA (1)...(19): siRNA sense strand
ugacagcgauggugagaaa

SEQ ID NO: 1781116 - RNA, 19 nt, Homo sapiens
  misc_RNA (1)...(19): siRNA sense strand
ucaagaggcugaaugcuau

SEQ ID NO: 1781117 - RNA, 19 nt, Homo sapiens
  misc_RNA (1)...(19): siRNA sense strand
gugagaaacucgccaguga

SEQ ID NO: 1781118 - RNA, 19 nt, Homo sapiens
  misc_RNA (1)...(19): siRNA sense strand
gauaagaaggccacaguuu

SEQ ID NO: 1781119 - RNA, 19 nt, Homo sapiens
  misc_RNA (1)...(19): siRNA sense strand
ugacaaugaucaccaaaga

SEQ ID NO: 1781120 - RNA, 19 nt, Homo sapiens
  misc_RNA (1)...(19): siRNA sense strand
ggcaguaccuuguccauau

SEQ ID NO: 1781121 - RNA, 19 nt, Homo sapiens
  misc_RNA (1)...(19): siRNA sense strand
ucaccaagccagacaaaua

SEQ ID NO: 1781122 - RNA, 19 nt, Homo sapiens
  misc_RNA (1)...(19): siRNA sense strand
gcagaaaacugaagaaaag

SEQ ID NO: 1781123 - RNA, 19 nt, Homo sapiens
  misc_RNA (1)...(19): siRNA sense strand
uaaggaagaguuucaguuu

SEQ ID NO: 1781124 - RNA, 19 nt, Homo sapiens
  misc_RNA (1)...(19): siRNA sense strand
ggagccagcuguauugaca

SEQ ID NO: 1781125 - RNA, 19 nt, Homo sapiens
  misc_RNA (1)...(19): siRNA sense strand
gugcacaagucauuccuuu

SEQ ID NO: 1781126 - RNA, 19 nt, Homo sapiens
  misc_RNA (1)...(19): siRNA sense strand
ggccacaguuuaugaaguu

SEQ ID NO: 1781127 - RNA, 19 nt, Homo sapiens
  misc_RNA (1)...(19): siRNA sense strand
gccaguacuuuguccauuu

SEQ ID NO: 1781128 - RNA, 19 nt, Homo sapiens
  misc_RNA (1)...(19): siRNA sense strand
gaagaagcaccaugacaau

SEQ ID NO: 1781129 - RNA, 19 nt, Homo sapiens
  misc_RNA (1)...(19): siRNA sense strand
caaagaacuuagccuuaau

SEQ ID NO: 1781130 - RNA, 19 nt, Homo sapiens
  misc_RNA (1)...(19): siRNA sense strand
gaaauguccuauggguuga

SEQ ID NO: 1781131 - RNA, 19 nt, Homo sapiens
  misc_RNA (1)...(19): siRNA sense strand
ggaaauugcagcucguuau

SEQ ID NO: 1781132 - RNA, 19 nt, Homo sapiens
  misc_RNA (1)...(19): siRNA sense strand
gcagacuacuccucagaga

SEQ ID NO: 1781133 - RNA, 19 nt, Homo sapiens
  misc_RNA (1)...(19): siRNA sense strand
ggaggucagucccaucuuc

SEQ ID NO: 1781134 - RNA, 19 nt, Homo sapiens
  misc_RNA (1)...(19): siRNA sense strand
gagaauggccuagacaaga

SEQ ID NO: 1781135 - RNA, 19 nt, Homo sapiens
  misc_RNA (1)...(19): siRNA sense strand
agacacgccugcucaagaa

SEQ ID NO: 1781136 - RNA, 19 nt, Homo sapiens
  misc_RNA (1)...(19): siRNA sense strand
uaagaaggccacaguuuau

SEQ ID NO: 1781137 - RNA, 19 nt, Homo sapiens
  misc_RNA (1)...(19): siRNA sense strand
gauggucgcacccuaauug

SEQ ID NO: 1781138 - RNA, 19 nt, Homo sapiens
  misc_RNA (1)...(19): siRNA sense strand
auaagaaggccacaguuua

SEQ ID NO: 1781139 - RNA, 19 nt, Homo sapiens
  misc_RNA (1)...(19): siRNA sense strand
gaaauugcagcucguuaug

SEQ ID NO: 1781140 - RNA, 19 nt, Homo sapiens
  misc_RNA (1)...(19): siRNA sense strand
gaagcaccaugacaaugau

SEQ ID NO: 1781141 - RNA, 19 nt, Homo sapiens
  misc_RNA (1)...(19): siRNA sense strand
uaacucuacucccggauug

SEQ ID NO: 1781142 - RNA, 19 nt, Homo sapiens
  misc_RNA (1)...(19): siRNA sense strand
caagaaagaugccccgauu

SEQ ID NO: 1781143 - RNA, 19 nt, Homo sapiens
  misc_RNA (1)...(19): siRNA sense strand
gucugaagcuggaauguga

SEQ ID NO: 1781144 - RNA, 19 nt, Homo sapiens
  misc_RNA (1)...(19): siRNA sense strand
gaagcuggaaugugagaaa

SEQ ID NO: 1781145 - RNA, 19 nt, Homo sapiens
  misc_RNA (1)...(19): siRNA sense strand
gagaaacucgccagugaga

SEQ ID NO: 1781146 - RNA, 19 nt, Homo sapiens
  misc_RNA (1)...(19): siRNA sense strand
gcagcggcauuaugucaug

SEQ ID NO: 1781147 - RNA, 19 nt, Homo sapiens
  misc_RNA (1)...(19): siRNA sense strand
ggucgcacccuaauuguug

SEQ ID NO: 1781148 - RNA, 19 nt, Homo sapiens
  misc_RNA (1)...(19): siRNA sense strand
caccaggaguugacccuuu

SEQ ID NO: 1781149 - RNA, 19 nt, Homo sapiens
  misc_RNA (1)...(19): siRNA sense strand
gcucaaguuugcccauugu

SEQ ID NO: 1781150 - RNA, 19 nt, Homo sapiens
  misc_RNA (1)...(19): siRNA sense strand
ccaguacuuuguccauuug

SEQ ID NO: 1781151 - RNA, 19 nt, Homo sapiens
  misc_RNA (1)...(19): siRNA sense strand
gaaacucgccagugagaag

SEQ ID NO: 1781152 - RNA, 19 nt, Homo sapiens
  misc_RNA (1)...(19): siRNA sense strand
gaaggccacaguuuaugaa

SEQ ID NO: 1781153 - RNA, 19 nt, Homo sapiens
  misc_RNA (1)...(19): siRNA sense strand
ccaaugaggauccaucuuc

SEQ ID NO: 1781154 - RNA, 19 nt, Homo sapiens
  misc_RNA (1)...(19): siRNA sense strand
gcaguaccuuguccauauc

SEQ ID NO: 1781155 - RNA, 19 nt, Homo sapiens
  misc_RNA (1)...(19): siRNA sense strand
gugcuuagcugugacaucu

SEQ ID NO: 1781156 - RNA, 19 nt, Homo sapiens
  misc_RNA (1)...(19): siRNA sense strand
gauggagccagcuguauug

SEQ ID NO: 1781157 - RNA, 19 nt, Homo sapiens
  misc_RNA (1)...(19): siRNA sense strand
agucccaucuuccaauuaa

SEQ ID NO: 1781158 - RNA, 19 nt, Homo sapiens
  misc_RNA (1)...(19): siRNA sense strand
caucggugcuuagcuguga

SEQ ID NO: 1781159 - RNA, 19 nt, Homo sapiens
  misc_RNA (1)...(19): siRNA sense strand
uagcgcagauggucagaug

SEQ ID NO: 1781160 - RNA, 19 nt, Homo sapiens
  misc_RNA (1)...(19): siRNA sense strand
gugaucggauuaaggaaga

SEQ ID NO: 1781161 - RNA, 19 nt, Homo sapiens
  misc_RNA (1)...(19): siRNA sense strand
gucaagaggcugaaugcua

SEQ ID NO: 1781162 - RNA, 19 nt, Homo sapiens
  misc_RNA (1)...(19): siRNA sense strand
cuacuacucccgucucaaa

SEQ ID NO: 1781163 - RNA, 19 nt, Homo sapiens
  misc_RNA (1)...(19): siRNA sense strand
agaagcaccaugacaauga

SEQ ID NO: 1781164 - RNA, 19 nt, Homo sapiens
  misc_RNA (1)...(19): siRNA sense strand
caacuacaucuucaugaga

SEQ ID NO: 1781165 - RNA, 19 nt, Homo sapiens
  misc_RNA (1)...(19): siRNA sense strand
ggagaacagcaauguggaa

SEQ ID NO: 1781166 - RNA, 19 nt, Homo sapiens
  misc_RNA (1)...(19): siRNA sense strand
ggacaggugguuuggacaa

SEQ ID NO: 1781167 - RNA, 19 nt, Homo sapiens
  misc_RNA (1)...(19): siRNA sense strand
gcaguacucccuccuccaa

SEQ ID NO: 1781168 - RNA, 19 nt, Homo sapiens
  misc_RNA (1)...(19): siRNA sense strand
acaaugaucaccaaagaga

SEQ ID NO: 1781169 - RNA, 19 nt, Homo sapiens
  misc_RNA (1)...(19): siRNA sense strand
gcccagcauuuaucacaug

SEQ ID NO: 1781170 - RNA, 19 nt, Homo sapiens
  misc_RNA (1)...(19): siRNA sense strand
ccaacuacaucuucaugag

SEQ ID NO: 1781171 - RNA, 19 nt, Homo sapiens
  misc_RNA (1)...(19): siRNA sense strand
cgagggagcccagcacauu

SEQ ID NO: 1781172 - RNA, 19 nt, Homo sapiens
  misc_RNA (1)...(19): siRNA sense strand
agaagaagcaccaugacaa

SEQ ID NO: 1781173 - RNA, 19 nt, Homo sapiens
  misc_RNA (1)...(19): siRNA sense strand
gagaagaagcaccaugaca

SEQ ID NO: 1781174 - RNA, 19 nt, Homo sapiens
  misc_RNA (1)...(19): siRNA sense strand
gaggcugaaugcuaucugu

SEQ ID NO: 1781175 - RNA, 19 nt, Homo sapiens
  misc_RNA (1)...(19): siRNA sense strand
agacaaauaccaacuacau

SEQ ID NO: 1781176 - RNA, 19 nt, Homo sapiens
  misc_RNA (1)...(19): siRNA sense strand
ccagcuguauugacauuuc

SEQ ID NO: 1781177 - RNA, 19 nt, Homo sapiens
  misc_RNA (1)...(19): siRNA sense strand
ugguugacguuuccaauga

SEQ ID NO: 1781178 - RNA, 19 nt, Homo sapiens
  misc_RNA (1)...(19): siRNA sense strand
ucagucccaucuuccaauu

SEQ ID NO: 1781179 - RNA, 19 nt, Homo sapiens
  misc_RNA (1)...(19): siRNA sense strand
ccagacaaauaccaacuac

SEQ ID NO: 1781180 - RNA, 19 nt, Homo sapiens
  misc_RNA (1)...(19): siRNA sense strand
gcucaauaccacagucuga

SEQ ID NO: 1781181 - RNA, 19 nt, Homo sapiens
  misc_RNA (1)...(19): siRNA sense strand
ggauuaaggaagaguuuca

SEQ ID NO: 1781182 - RNA, 19 nt, Homo sapiens
  misc_RNA (1)...(19): siRNA sense strand
gagagaauggccuagacaa

SEQ ID NO: 1781183 - RNA, 19 nt, Homo sapiens
  misc_RNA (1)...(19): siRNA sense strand
cugcucaacccuuuaaauu

SEQ ID NO: 1781184 - RNA, 19 nt, Homo sapiens
  misc_RNA (1)...(19): siRNA sense strand
caaauaccaacuacaucuu

SEQ ID NO: 1781185 - RNA, 19 nt, Homo sapiens
  misc_RNA (1)...(19): siRNA sense strand
gcacaagucauuccuuucc

SEQ ID NO: 1781186 - RNA, 19 nt, Homo sapiens
  misc_RNA (1)...(19): siRNA sense strand
cagcucgacugucugaaca

SEQ ID NO: 1781187 - RNA, 19 nt, Homo sapiens
  misc_RNA (1)...(19): siRNA sense strand
ccuuuggccucaagccuaa

SEQ ID NO: 1781188 - RNA, 19 nt, Homo sapiens
  misc_RNA (1)...(19): siRNA sense strand
cagccucuauugcaucuuc

SEQ ID NO: 1781189 - RNA, 19 nt, Homo sapiens
  misc_RNA (1)...(19): siRNA sense strand
gaauauagaaaugcacaag

SEQ ID NO: 1781190 - RNA, 19 nt, Homo sapiens
  misc_RNA (1)...(19): siRNA sense strand
cgacuucaccucccagauc

SEQ ID NO: 1781191 - RNA, 19 nt, Homo sapiens
  misc_RNA (1)...(19): siRNA sense strand
guccauauccaacuccauu

SEQ ID NO: 1781192 - RNA, 19 nt, Homo sapiens
  misc_RNA (1)...(19): siRNA sense strand
ccaugacaaugaucaccaa

SEQ ID NO: 1781193 - RNA, 19 nt, Homo sapiens
  misc_RNA (1)...(19): siRNA sense strand
gcauuuaucacauggacau

SEQ ID NO: 1781194 - RNA, 19 nt, Homo sapiens
  misc_RNA (1)...(19): siRNA sense strand
uccaaagaacuuagccuua

SEQ ID NO: 1781195 - RNA, 19 nt, Homo sapiens
  misc_RNA (1)...(19): siRNA sense strand
ggauaagaaggccacaguu

SEQ ID NO: 1781196 - RNA, 19 nt, Homo sapiens
  misc_RNA (1)...(19): siRNA sense strand
guauauuccaguccaaaga

SEQ ID NO: 1781197 - RNA, 19 nt, Homo sapiens
  misc_RNA (1)...(19): siRNA sense strand
gcugugugcugucgcucaa

SEQ ID NO: 1781198 - RNA, 19 nt, Homo sapiens
  misc_RNA (1)...(19): siRNA sense strand
caagagcaccagcaacaag

SEQ ID NO: 1781199 - RNA, 19 nt, Homo sapiens
  misc_RNA (1)...(19): siRNA sense strand
auauagaaaugcacaagca

SEQ ID NO: 1781200 - RNA, 19 nt, Homo sapiens
  misc_RNA (1)...(19): siRNA sense strand
gaauccucaucggugcuua

SEQ ID NO: 1781201 - RNA, 19 nt, Homo sapiens
  misc_RNA (1)...(19): siRNA sense strand
ggauggagaacagcaaugu

SEQ ID NO: 1781202 - RNA, 19 nt, Homo sapiens
  misc_RNA (1)...(19): siRNA sense strand
gucaaggucugggacauca

SEQ ID NO: 1781203 - RNA, 19 nt, Homo sapiens
  misc_RNA (1)...(19): siRNA sense strand
ucagccugcucaacccuuu

SEQ ID NO: 1781204 - RNA, 19 nt, Homo sapiens
  misc_RNA (1)...(19): siRNA sense strand
cagcauacuccuuccaugu

SEQ ID NO: 1781205 - RNA, 19 nt, Homo sapiens
  misc_RNA (1)...(19): siRNA sense strand
cagaaacuccgcagacuac

SEQ ID NO: 1781206 - RNA, 19 nt, Homo sapiens
  misc_RNA (1)...(19): siRNA sense strand
agaaggccacaguuuauga

SEQ ID NO: 1781207 - RNA, 19 nt, Homo sapiens
  misc_RNA (1)...(19): siRNA sense strand
gaacuuagccuuaaugaaa

SEQ ID NO: 1781208 - RNA, 19 nt, Homo sapiens
  misc_RNA (1)...(19): siRNA sense strand
gcucaacccuuuaaauuua

SEQ ID NO: 1781209 - RNA, 19 nt, Homo sapiens
  misc_RNA (1)...(19): siRNA sense strand
ggcauuaugucauguauua

SEQ ID NO: 1781210 - RNA, 19 nt, Homo sapiens
  misc_RNA (1)...(19): siRNA sense strand
ccaaagaacuuagccuuaa

SEQ ID NO: 1781211 - RNA, 19 nt, Homo sapiens
  misc_RNA (1)...(19): siRNA sense strand
gaacagggauaacuacauc

SEQ ID NO: 1781212 - RNA, 19 nt, Homo sapiens
  misc_RNA (1)...(19): siRNA sense strand
gaacagcaauguggaaguu

SEQ ID NO: 1781213 - RNA, 19 nt, Homo sapiens
  misc_RNA (1)...(19): siRNA sense strand
gaacugaacgccaucauug

SEQ ID NO: 1781214 - RNA, 19 nt, Homo sapiens
  misc_RNA (1)...(19): siRNA sense strand
gcauacuccuuccauguua

SEQ ID NO: 1781215 - RNA, 19 nt, Homo sapiens
  misc_RNA (1)...(19): siRNA sense strand
ugacagcgauggugagaaa

SEQ ID NO: 1781216 - RNA, 19 nt, Homo sapiens
  misc_RNA (1)...(19): siRNA sense strand
ucaagaggcugaaugcuau

SEQ ID NO: 1781217 - RNA, 19 nt, Homo sapiens
  misc_RNA (1)...(19): siRNA sense strand
gugagaaacucgccaguga

SEQ ID NO: 1781218 - RNA, 19 nt, Homo sapiens
  misc_RNA (1)...(19): siRNA sense strand
gauaagaaggccacaguuu

SEQ ID NO: 1781219 - RNA, 19 nt, Homo sapiens
  misc_RNA (1)...(19): siRNA sense strand
ugacaaugaucaccaaaga

SEQ ID NO: 1781220 - RNA, 19 nt, Homo sapiens
  misc_RNA (1)...(19): siRNA sense strand
ggcaguaccuuguccauau

SEQ ID NO: 1781221 - RNA, 19 nt, Homo sapiens
  misc_RNA (1)...(19): siRNA sense strand
ucaccaagccagacaaaua

SEQ ID NO: 1781222 - RNA, 19 nt, Homo sapiens
  misc_RNA (1)...(19): siRNA sense strand
gcagaaaacugaagaaaag

SEQ ID NO: 1781223 - RNA, 19 nt, Homo sapiens
  misc_RNA (1)...(19): siRNA sense strand
uaaggaagaguuucaguuu

SEQ ID NO: 1781224 - RNA, 19 nt, Homo sapiens
  misc_RNA (1)...(19): siRNA sense strand
ggagccagcuguauugaca

SEQ ID NO: 1781225 - RNA, 19 nt, Homo sapiens
  misc_RNA (1)...(19): siRNA sense strand
gugcacaagucauuccuuu

SEQ ID NO: 1781226 - RNA, 19 nt, Homo sapiens
  misc_RNA (1)...(19): siRNA sense strand
ggccacaguuuaugaaguu

SEQ ID NO: 1781227 - RNA, 19 nt, Homo sapiens
  misc_RNA (1)...(19): siRNA sense strand
gccaguacuuuguccauuu

SEQ ID NO: 1781228 - RNA, 19 nt, Homo sapiens
  misc_RNA (1)...(19): siRNA sense strand
gaagaagcaccaugacaau

SEQ ID NO: 1781229 - RNA, 19 nt, Homo sapiens
  misc_RNA (1)...(19): siRNA sense strand
caaagaacuuagccuuaau

SEQ ID NO: 1781230 - RNA, 19 nt, Homo sapiens
  misc_RNA (1)...(19): siRNA sense strand
gaaauguccuauggguuga

SEQ ID NO: 1781231 - RNA, 19 nt, Homo sapiens
  misc_RNA (1)...(19): siRNA sense strand
ggaaauugcagcucguuau

SEQ ID NO: 1781232 - RNA, 19 nt, Homo sapiens
  misc_RNA (1)...(19): siRNA sense strand
gcagacuacuccucagaga

SEQ ID NO: 1781233 - RNA, 19 nt, Homo sapiens
  misc_RNA (1)...(19): siRNA sense strand
ggaggucagucccaucuuc

SEQ ID NO: 1781234 - RNA, 19 nt, Homo sapiens
  misc_RNA (1)...(19): siRNA sense strand
gagaauggccuagacaaga

SEQ ID NO: 1781235 - RNA, 19 nt, Homo sapiens
  misc_RNA (1)...(19): siRNA sense strand
agacacgccugcucaagaa

SEQ ID NO: 1781236 - RNA, 19 nt, Homo sapiens
  misc_RNA (1)...(19): siRNA sense strand
uaagaaggccacaguuuau

SEQ ID NO: 1781237 - RNA, 19 nt, Homo sapiens
  misc_RNA (1)...(19): siRNA sense strand
gauggucgcacccuaauug

SEQ ID NO: 1781238 - RNA, 19 nt, Homo sapiens
  misc_RNA (1)...(19): siRNA sense strand
auaagaaggccacaguuua

SEQ ID NO: 1781239 - RNA, 19 nt, Homo sapiens
  misc_RNA (1)...(19): siRNA sense strand
gaaauugcagcucguuaug

SEQ ID NO: 1781240 - RNA, 19 nt, Homo sapiens
  misc_RNA (1)...(19): siRNA sense strand
gaagcaccaugacaaugau

SEQ ID NO: 1781241 - RNA, 19 nt, Homo sapiens
  misc_RNA (1)...(19): siRNA sense strand
uaacucuacucccggauug

SEQ ID NO: 1781242 - RNA, 19 nt, Homo sapiens
  misc_RNA (1)...(19): siRNA sense strand
caagaaagaugccccgauu

SEQ ID NO: 1781243 - RNA, 19 nt, Homo sapiens
  misc_RNA (1)...(19): siRNA sense strand
gucugaagcuggaauguga

SEQ ID NO: 1781244 - RNA, 19 nt, Homo sapiens
  misc_RNA (1)...(19): siRNA sense strand
gaagcuggaaugugagaaa

SEQ ID NO: 1781245 - RNA, 19 nt, Homo sapiens
  misc_RNA (1)...(19): siRNA sense strand
gagaaacucgccagugaga

SEQ ID NO: 1781246 - RNA, 19 nt, Homo sapiens
  misc_RNA (1)...(19): siRNA sense strand
gcagcggcauuaugucaug

SEQ ID NO: 1781247 - RNA, 19 nt, Homo sapiens
  misc_RNA (1)...(19): siRNA sense strand
ggucgcacccuaauuguug

SEQ ID NO: 1781248 - RNA, 19 nt, Homo sapiens
  misc_RNA (1)...(19): siRNA sense strand
caccaggaguugacccuuu

SEQ ID NO: 1781249 - RNA, 19 nt, Homo sapiens
  misc_RNA (1)...(19): siRNA sense strand
gcucaaguuugcccauugu

SEQ ID NO: 1781250 - RNA, 19 nt, Homo sapiens
  misc_RNA (1)...(19): siRNA sense strand
ccaguacuuuguccauuug

SEQ ID NO: 1781251 - RNA, 19 nt, Homo sapiens
  misc_RNA (1)...(19): siRNA sense strand
gaaacucgccagugagaag

SEQ ID NO: 1781252 - RNA, 19 nt, Homo sapiens
  misc_RNA (1)...(19): siRNA sense strand
gaaggccacaguuuaugaa

SEQ ID NO: 1781253 - RNA, 19 nt, Homo sapiens
  misc_RNA (1)...(19): siRNA sense strand
ccaaugaggauccaucuuc

SEQ ID NO: 1781254 - RNA, 19 nt, Homo sapiens
  misc_RNA (1)...(19): siRNA sense strand
gcaguaccuuguccauauc

SEQ ID NO: 1781255 - RNA, 19 nt, Homo sapiens
  misc_RNA (1)...(19): siRNA sense strand
gugcuuagcugugacaucu

SEQ ID NO: 1781256 - RNA, 19 nt, Homo sapiens
  misc_RNA (1)...(19): siRNA sense strand
gauggagccagcuguauug

SEQ ID NO: 1781257 - RNA, 19 nt, Homo sapiens
  misc_RNA (1)...(19): siRNA sense strand
agucccaucuuccaauuaa

SEQ ID NO: 1781258 - RNA, 19 nt, Homo sapiens
  misc_RNA (1)...(19): siRNA sense strand
caucggugcuuagcuguga

SEQ ID NO: 1781259 - RNA, 19 nt, Homo sapiens
  misc_RNA (1)...(19): siRNA sense strand
uagcgcagauggucagaug

SEQ ID NO: 1781260 - RNA, 19 nt, Homo sapiens
  misc_RNA (1)...(19): siRNA sense strand
gugaucggauuaaggaaga

SEQ ID NO: 1781261 - RNA, 19 nt, Homo sapiens
  misc_RNA (1)...(19): siRNA sense strand
gucaagaggcugaaugcua

SEQ ID NO: 1781262 - RNA, 19 nt, Homo sapiens
  misc_RNA (1)...(19): siRNA sense strand
cuacuacucccgucucaaa

SEQ ID NO: 1781263 - RNA, 19 nt, Homo sapiens
  misc_RNA (1)...(19): siRNA sense strand
agaagcaccaugacaauga

SEQ ID NO: 1781264 - RNA, 19 nt, Homo sapiens
  misc_RNA (1)...(19): siRNA sense strand
caacuacaucuucaugaga

SEQ ID NO: 1781265 - RNA, 19 nt, Homo sapiens
  misc_RNA (1)...(19): siRNA sense strand
ggagaacagcaauguggaa

SEQ ID NO: 1781266 - RNA, 19 nt, Homo sapiens
  misc_RNA (1)...(19): siRNA sense strand
ggacaggugguuuggacaa

SEQ ID NO: 1781267 - RNA, 19 nt, Homo sapiens
  misc_RNA (1)...(19): siRNA sense strand
gcaguacucccuccuccaa

SEQ ID NO: 1781268 - RNA, 19 nt, Homo sapiens
  misc_RNA (1)...(19): siRNA sense strand
acaaugaucaccaaagaga

SEQ ID NO: 1781269 - RNA, 19 nt, Homo sapiens
  misc_RNA (1)...(19): siRNA sense strand
gcccagcauuuaucacaug

SEQ ID NO: 1781270 - RNA, 19 nt, Homo sapiens
  misc_RNA (1)...(19): siRNA sense strand
ccaacuacaucuucaugag

SEQ ID NO: 1781271 - RNA, 19 nt, Homo sapiens
  misc_RNA (1)...(19): siRNA sense strand
cgagggagcccagcacauu

SEQ ID NO: 1781272 - RNA, 19 nt, Homo sapiens
  misc_RNA (1)...(19): siRNA sense strand
agaagaagcaccaugacaa

SEQ ID NO: 1781273 - RNA, 19 nt, Homo sapiens
  misc_RNA (1)...(19): siRNA sense strand
gagaagaagcaccaugaca

SEQ ID NO: 1781274 - RNA, 19 nt, Homo sapiens
  misc_RNA (1)...(19): siRNA sense strand
gaggcugaaugcuaucugu

SEQ ID NO: 1781275 - RNA, 19 nt, Homo sapiens
  misc_RNA (1)...(19): siRNA sense strand
agacaaauaccaacuacau

SEQ ID NO: 1781276 - RNA, 19 nt, Homo sapiens
  misc_RNA (1)...(19): siRNA sense strand
ccagcuguauugacauuuc

SEQ ID NO: 1781277 - RNA, 19 nt, Homo sapiens
  misc_RNA (1)...(19): siRNA sense strand
ugguugacguuuccaauga

SEQ ID NO: 1781278 - RNA, 19 nt, Homo sapiens
  misc_RNA (1)...(19): siRNA sense strand
ucagucccaucuuccaauu

SEQ ID NO: 1781279 - RNA, 19 nt, Homo sapiens
  misc_RNA (1)...(19): siRNA sense strand
ccagacaaauaccaacuac

SEQ ID NO: 1781280 - RNA, 19 nt, Homo sapiens
  misc_RNA (1)...(19): siRNA sense strand
gcucaauaccacagucuga

SEQ ID NO: 1781281 - RNA, 19 nt, Homo sapiens
  misc_RNA (1)...(19): siRNA sense strand
ggauuaaggaagaguuuca

SEQ ID NO: 1781282 - RNA, 19 nt, Homo sapiens
  misc_RNA (1)...(19): siRNA sense strand
gagagaauggccuagacaa

SEQ ID NO: 1781283 - RNA, 19 nt, Homo sapiens
  misc_RNA (1)...(19): siRNA sense strand
cugcucaacccuuuaaauu

SEQ ID NO: 1781284 - RNA, 19 nt, Homo sapiens
  misc_RNA (1)...(19): siRNA sense strand
caaauaccaacuacaucuu

SEQ ID NO: 1781285 - RNA, 19 nt, Homo sapiens
  misc_RNA (1)...(19): siRNA sense strand
gcacaagucauuccuuucc

SEQ ID NO: 1781286 - RNA, 19 nt, Homo sapiens
  misc_RNA (1)...(19): siRNA sense strand
cagcucgacugucugaaca

SEQ ID NO: 1781287 - RNA, 19 nt, Homo sapiens
  misc_RNA (1)...(19): siRNA sense strand
ccuuuggccucaagccuaa

SEQ ID NO: 1781288 - RNA, 19 nt, Homo sapiens
  misc_RNA (1)...(19): siRNA sense strand
cagccucuauugcaucuuc

SEQ ID NO: 1781289 - RNA, 19 nt, Homo sapiens
  misc_RNA (1)...(19): siRNA sense strand
gaauauagaaaugcacaag

SEQ ID NO: 1781290 - RNA, 19 nt, Homo sapiens
  misc_RNA (1)...(19): siRNA sense strand
cgacuucaccucccagauc

SEQ ID NO: 1781291 - RNA, 19 nt, Homo sapiens
  misc_RNA (1)...(19): siRNA sense strand
guccauauccaacuccauu

SEQ ID NO: 1781292 - RNA, 19 nt, Homo sapiens
  misc_RNA (1)...(19): siRNA sense strand
ccaugacaaugaucaccaa

SEQ ID NO: 1781293 - RNA, 19 nt, Homo sapiens
  misc_RNA (1)...(19): siRNA sense strand
gcauuuaucacauggacau

SEQ ID NO: 1781294 - RNA, 19 nt, Homo sapiens
  misc_RNA (1)...(19): siRNA sense strand
uccaaagaacuuagccuua

SEQ ID NO: 1781295 - RNA, 19 nt, Homo sapiens
  misc_RNA (1)...(19): siRNA sense strand
ggauaagaaggccacaguu

SEQ ID NO: 1781296 - RNA, 19 nt, Homo sapiens
  misc_RNA (1)...(19): siRNA sense strand
guauauuccaguccaaaga

SEQ ID NO: 1781297 - RNA, 19 nt, Homo sapiens
  misc_RNA (1)...(19): siRNA sense strand
gcugugugcugucgcucaa

SEQ ID NO: 1781298 - RNA, 19 nt, Homo sapiens
  misc_RNA (1)...(19): siRNA sense strand
caagagcaccagcaacaag

SEQ ID NO: 1781299 - RNA, 19 nt, Homo sapiens
  misc_RNA (1)...(19): siRNA sense strand
auauagaaaugcacaagca

SEQ ID NO: 1781300 - RNA, 19 nt, Homo sapiens
  misc_RNA (1)...(19): siRNA sense strand
gaauccucaucggugcuua

SEQ ID NO: 1781301 - RNA, 19 nt, Homo sapiens
  misc_RNA (1)...(19): siRNA sense strand
ggauggagaacagcaaugu

SEQ ID NO: 1781302 - RNA, 19 nt, Homo sapiens
  misc_RNA (1)...(19): siRNA sense strand
gucaaggucugggacauca

SEQ ID NO: 1781303 - RNA, 19 nt, Homo sapiens
  misc_RNA (1)...(19): siRNA sense strand
ucagccugcucaacccuuu

SEQ ID NO: 1781304 - RNA, 19 nt, Homo sapiens
  misc_RNA (1)...(19): siRNA sense strand
cagcauacuccuuccaugu

SEQ ID NO: 1781305 - RNA, 19 nt, Homo sapiens
  misc_RNA (1)...(19): siRNA sense strand
cagaaacuccgcagacuac

SEQ ID NO: 1781306 - RNA, 19 nt, Homo sapiens
  misc_RNA (1)...(19): siRNA sense strand
agaaggccacaguuuauga

SEQ ID NO: 1781307 - RNA, 19 nt, Homo sapiens
  misc_RNA (1)...(19): siRNA sense strand
gcacaggacaguuuaauga

SEQ ID NO: 1781308 - RNA, 19 nt, Homo sapiens
  misc_RNA (1)...(19): siRNA sense strand
gaaguacaacaucugauua

SEQ ID NO: 1781309 - RNA, 19 nt, Homo sapiens
  misc_RNA (1)...(19): siRNA sense strand
gagaagaggaugaauauuc

SEQ ID NO: 1781310 - RNA, 19 nt, Homo sapiens
  misc_RNA (1)...(19): siRNA sense strand
gaacauggccugggaagga

SEQ ID NO: 1781311 - RNA, 19 nt, Homo sapiens
  misc_RNA (1)...(19): siRNA sense strand
gagagaagaggaugaauau

SEQ ID NO: 1781312 - RNA, 19 nt, Homo sapiens
  misc_RNA (1)...(19): siRNA sense strand
ggaaggaugguuucuugua

SEQ ID NO: 1781313 - RNA, 19 nt, Homo sapiens
  misc_RNA (1)...(19): siRNA sense strand
caacagaaguacaacaucu

SEQ ID NO: 1781314 - RNA, 19 nt, Homo sapiens
  misc_RNA (1)...(19): siRNA sense strand
ggaggugguuugaugaaau

SEQ ID NO: 1781315 - RNA, 19 nt, Homo sapiens
  misc_RNA (1)...(19): siRNA sense strand
gaaggaugguuucuuguac

SEQ ID NO: 1781316 - RNA, 19 nt, Homo sapiens
  misc_RNA (1)...(19): siRNA sense strand
caaccagccaggaguguua

SEQ ID NO: 1781317 - RNA, 19 nt, Homo sapiens
  misc_RNA (1)...(19): siRNA sense strand
caucacagguuauccaaca

SEQ ID NO: 1781318 - RNA, 19 nt, Homo sapiens
  misc_RNA (1)...(19): siRNA sense strand
aagaaaccaucaagucauu

SEQ ID NO: 1781319 - RNA, 19 nt, Homo sapiens
  misc_RNA (1)...(19): siRNA sense strand
gaccagccauccaucuuug

SEQ ID NO: 1781320 - RNA, 19 nt, Homo sapiens
  misc_RNA (1)...(19): siRNA sense strand
ugagagaagaggaugaaua

SEQ ID NO: 1781321 - RNA, 19 nt, Homo sapiens
  misc_RNA (1)...(19): siRNA sense strand
gugguuugaugaaaucuuu

SEQ ID NO: 1781322 - RNA, 19 nt, Homo sapiens
  misc_RNA (1)...(19): siRNA sense strand
uagaaccagugccucauuu

SEQ ID NO: 1781323 - RNA, 19 nt, Homo sapiens
  misc_RNA (1)...(19): siRNA sense strand
ugaaaucuuuacucugcua

SEQ ID NO: 1781324 - RNA, 19 nt, Homo sapiens
  misc_RNA (1)...(19): siRNA sense strand
cagcagcuuuggaaaucua

SEQ ID NO: 1781325 - RNA, 19 nt, Homo sapiens
  misc_RNA (1)...(19): siRNA sense strand
aaucaaaucccacccacua

SEQ ID NO: 1781326 - RNA, 19 nt, Homo sapiens
  misc_RNA (1)...(19): siRNA sense strand
gaugguuucuuguacaaca

SEQ ID NO: 1781327 - RNA, 19 nt, Homo sapiens
  misc_RNA (1)...(19): siRNA sense strand
caacauuaucugucuagaa

SEQ ID NO: 1781328 - RNA, 19 nt, Homo sapiens
  misc_RNA (1)...(19): siRNA sense strand
ugggaaggaugguuucuug

SEQ ID NO: 1781329 - RNA, 19 nt, Homo sapiens
  misc_RNA (1)...(19): siRNA sense strand
gaggugguuugaugaaauc

SEQ ID NO: 1781330 - RNA, 19 nt, Homo sapiens
  misc_RNA (1)...(19): siRNA sense strand
ucaagaaaccaucaaguca

SEQ ID NO: 1781331 - RNA, 19 nt, Homo sapiens
  misc_RNA (1)...(19): siRNA sense strand
guacaacaacuucgauaca

SEQ ID NO: 1781332 - RNA, 19 nt, Homo sapiens
  misc_RNA (1)...(19): siRNA sense strand
gaagaggaugaauauucua

SEQ ID NO: 1781333 - RNA, 19 nt, Homo sapiens
  misc_RNA (1)...(19): siRNA sense strand
cagcuuuggaaaucuauua

SEQ ID NO: 1781334 - RNA, 19 nt, Homo sapiens
  misc_RNA (1)...(19): siRNA sense strand
gcacggggcucacuucaca

SEQ ID NO: 1781335 - RNA, 19 nt, Homo sapiens
  misc_RNA (1)...(19): siRNA sense strand
cuguacaccuagacuauaa

SEQ ID NO: 1781336 - RNA, 19 nt, Homo sapiens
  misc_RNA (1)...(19): siRNA sense strand
gacccgcucuucagcaugu

SEQ ID NO: 1781337 - RNA, 19 nt, Homo sapiens
  misc_RNA (1)...(19): siRNA sense strand
guacucaucugaaaaucaa

SEQ ID NO: 1781338 - RNA, 19 nt, Homo sapiens
  misc_RNA (1)...(19): siRNA sense strand
gguagcacaggacaguuua

SEQ ID NO: 1781339 - RNA, 19 nt, Homo sapiens
  misc_RNA (1)...(19): siRNA sense strand
gcuguguguuucauuaugu

SEQ ID NO: 1781340 - RNA, 19 nt, Homo sapiens
  misc_RNA (1)...(19): siRNA sense strand
caacaucugauuaaacucu

SEQ ID NO: 1781341 - RNA, 19 nt, Homo sapiens
  misc_RNA (1)...(19): siRNA sense strand
gaguguuagugagaagaua

SEQ ID NO: 1781342 - RNA, 19 nt, Homo sapiens
  misc_RNA (1)...(19): siRNA sense strand
agaaguacaacaucugauu

SEQ ID NO: 1781343 - RNA, 19 nt, Homo sapiens
  misc_RNA (1)...(19): siRNA sense strand
gcagugagacccgcucuuc

SEQ ID NO: 1781344 - RNA, 19 nt, Homo sapiens
  misc_RNA (1)...(19): siRNA sense strand
ccagcaacauuaucugucu

SEQ ID NO: 1781345 - RNA, 19 nt, Homo sapiens
  misc_RNA (1)...(19): siRNA sense strand
caagaaaccaucaagucau

SEQ ID NO: 1781346 - RNA, 19 nt, Homo sapiens
  misc_RNA (1)...(19): siRNA sense strand
gagacccgcucuucagcau

SEQ ID NO: 1781347 - RNA, 19 nt, Homo sapiens
  misc_RNA (1)...(19): siRNA sense strand
guacaacaucugauuaaac

SEQ ID NO: 1781348 - RNA, 19 nt, Homo sapiens
  misc_RNA (1)...(19): siRNA sense strand
ggugaaugauacuguucuu

SEQ ID NO: 1781349 - RNA, 19 nt, Homo sapiens
  misc_RNA (1)...(19): siRNA sense strand
ccuggcagccuacccauuu

SEQ ID NO: 1781350 - RNA, 19 nt, Homo sapiens
  misc_RNA (1)...(19): siRNA sense strand
cagcaacauuaucugucua

SEQ ID NO: 1781351 - RNA, 19 nt, Homo sapiens
  misc_RNA (1)...(19): siRNA sense strand
aacauuaucugucuagaac

SEQ ID NO: 1781352 - RNA, 19 nt, Homo sapiens
  misc_RNA (1)...(19): siRNA sense strand
guaaaacccgggugaauga

SEQ ID NO: 1781353 - RNA, 19 nt, Homo sapiens
  misc_RNA (1)...(19): siRNA sense strand
gcaacauuaucugucuaga

SEQ ID NO: 1781354 - RNA, 19 nt, Homo sapiens
  misc_RNA (1)...(19): siRNA sense strand
ccaggaguguuagugagaa

SEQ ID NO: 1781355 - RNA, 19 nt, Homo sapiens
  misc_RNA (1)...(19): siRNA sense strand
ugaccagccauccaucuuu

SEQ ID NO: 1781356 - RNA, 19 nt, Homo sapiens
  misc_RNA (1)...(19): siRNA sense strand
ucaaaucccacccacuaug

SEQ ID NO: 1781357 - RNA, 19 nt, Homo sapiens
  misc_RNA (1)...(19): siRNA sense strand
gacuauaacucugauucuc

SEQ ID NO: 1781358 - RNA, 19 nt, Homo sapiens
  misc_RNA (1)...(19): siRNA sense strand
acaacaacuucgauacauc

SEQ ID NO: 1781359 - RNA, 19 nt, Homo sapiens
  misc_RNA (1)...(19): siRNA sense strand
acaggacaguuuaaugaca

SEQ ID NO: 1781360 - RNA, 19 nt, Homo sapiens
  misc_RNA (1)...(19): siRNA sense strand
gcugguuucuagccugaga

SEQ ID NO: 1781361 - RNA, 19 nt, Homo sapiens
  misc_RNA (1)...(19): siRNA sense strand
uacaacaacuucgauacau

SEQ ID NO: 1781362 - RNA, 19 nt, Homo sapiens
  misc_RNA (1)...(19): siRNA sense strand
caccaagcuugucccauca

SEQ ID NO: 1781363 - RNA, 19 nt, Homo sapiens
  misc_RNA (1)...(19): siRNA sense strand
cacccacuauggcuucuug

SEQ ID NO: 1781364 - RNA, 19 nt, Homo sapiens
  misc_RNA (1)...(19): siRNA sense strand
aaacccgggugaaugauac

SEQ ID NO: 1781365 - RNA, 19 nt, Homo sapiens
  misc_RNA (1)...(19): siRNA sense strand
gaggcuggcuggaguucag

SEQ ID NO: 1781366 - RNA, 19 nt, Homo sapiens
  misc_RNA (1)...(19): siRNA sense strand
ugaaagugaagcuggagaa

SEQ ID NO: 1781367 - RNA, 19 nt, Homo sapiens
  misc_RNA (1)...(19): siRNA sense strand
ggcuuaaagagaauuguaa

SEQ ID NO: 1781368 - RNA, 19 nt, Homo sapiens
  misc_RNA (1)...(19): siRNA sense strand
caaaucccacccacuaugg

SEQ ID NO: 1781369 - RNA, 19 nt, Homo sapiens
  misc_RNA (1)...(19): siRNA sense strand
cugcuucuguggccgauga

SEQ ID NO: 1781370 - RNA, 19 nt, Homo sapiens
  misc_RNA (1)...(19): siRNA sense strand
gaaagugaagcuggagaag

SEQ ID NO: 1781371 - RNA, 19 nt, Homo sapiens
  misc_RNA (1)...(19): siRNA sense strand
cacagguuauccaacagaa

SEQ ID NO: 1781372 - RNA, 19 nt, Homo sapiens
  misc_RNA (1)...(19): siRNA sense strand
gaaaaucaagaaaccauca

SEQ ID NO: 1781373 - RNA, 19 nt, Homo sapiens
  misc_RNA (1)...(19): siRNA sense strand
gcagccuacccauuuguga

SEQ ID NO: 1781374 - RNA, 19 nt, Homo sapiens
  misc_RNA (1)...(19): siRNA sense strand
cauuaucugucuagaacca

SEQ ID NO: 1781375 - RNA, 19 nt, Homo sapiens
  misc_RNA (1)...(19): siRNA sense strand
cuugucccaucacagguua

SEQ ID NO: 1781376 - RNA, 19 nt, Homo sapiens
  misc_RNA (1)...(19): siRNA sense strand
acaccuagacuauaacucu

SEQ ID NO: 1781377 - RNA, 19 nt, Homo sapiens
  misc_RNA (1)...(19): siRNA sense strand
uucgauacauccuaggaaa

SEQ ID NO: 1781378 - RNA, 19 nt, Homo sapiens
  misc_RNA (1)...(19): siRNA sense strand
cggcuuaaagagaauugua

SEQ ID NO: 1781379 - RNA, 19 nt, Homo sapiens
  misc_RNA (1)...(19): siRNA sense strand
guucuucuucccuaucuga

SEQ ID NO: 1781380 - RNA, 19 nt, Homo sapiens
  misc_RNA (1)...(19): siRNA sense strand
gcaaccagccaggaguguu

SEQ ID NO: 1781381 - RNA, 19 nt, Homo sapiens
  misc_RNA (1)...(19): siRNA sense strand
ugacaguucaggauauaca

SEQ ID NO: 1781382 - RNA, 19 nt, Homo sapiens
  misc_RNA (1)...(19): siRNA sense strand
ggccugggaaggaugguuu

SEQ ID NO: 1781383 - RNA, 19 nt, Homo sapiens
  misc_RNA (1)...(19): siRNA sense strand
gcagcagcuuuggaaaucu

SEQ ID NO: 1781384 - RNA, 19 nt, Homo sapiens
  misc_RNA (1)...(19): siRNA sense strand
ucacagguuauccaacaga

SEQ ID NO: 1781385 - RNA, 19 nt, Homo sapiens
  misc_RNA (1)...(19): siRNA sense strand
accgcuguguguuucauua

SEQ ID NO: 1781386 - RNA, 19 nt, Homo sapiens
  misc_RNA (1)...(19): siRNA sense strand
uggaggugguuugaugaaa

SEQ ID NO: 1781387 - RNA, 19 nt, Homo sapiens
  misc_RNA (1)...(19): siRNA sense strand
gccaggaguguuagugaga

SEQ ID NO: 1781388 - RNA, 19 nt, Homo sapiens
  misc_RNA (1)...(19): siRNA sense strand
aaggaugguuucuuguaca

SEQ ID NO: 1781389 - RNA, 19 nt, Homo sapiens
  misc_RNA (1)...(19): siRNA sense strand
cuagaaccagugccucauu

SEQ ID NO: 1781390 - RNA, 19 nt, Homo sapiens
  misc_RNA (1)...(19): siRNA sense strand
gagcacaaaccagcuaagg

SEQ ID NO: 1781391 - RNA, 19 nt, Homo sapiens
  misc_RNA (1)...(19): siRNA sense strand
cagguuauccaacagaagu

SEQ ID NO: 1781392 - RNA, 19 nt, Homo sapiens
  misc_RNA (1)...(19): siRNA sense strand
ccaagcuugucccaucaca

SEQ ID NO: 1781393 - RNA, 19 nt, Homo sapiens
  misc_RNA (1)...(19): siRNA sense strand
ccgggugaaugauacuguu

SEQ ID NO: 1781394 - RNA, 19 nt, Homo sapiens
  misc_RNA (1)...(19): siRNA sense strand
ggaguguuagugagaagau

SEQ ID NO: 1781395 - RNA, 19 nt, Homo sapiens
  misc_RNA (1)...(19): siRNA sense strand
cagccaggaguguuaguga

SEQ ID NO: 1781396 - RNA, 19 nt, Homo sapiens
  misc_RNA (1)...(19): siRNA sense strand
ccagcuaaggccagcauga

SEQ ID NO: 1781397 - RNA, 19 nt, Homo sapiens
  misc_RNA (1)...(19): siRNA sense strand
gggacacucacaagucuca

SEQ ID NO: 1781398 - RNA, 19 nt, Homo sapiens
  misc_RNA (1)...(19): siRNA sense strand
uggugguacucaucugaaa

SEQ ID NO: 1781399 - RNA, 19 nt, Homo sapiens
  misc_RNA (1)...(19): siRNA sense strand
aggaugguuucuuguacaa

SEQ ID NO: 1781400 - RNA, 19 nt, Homo sapiens
  misc_RNA (1)...(19): siRNA sense strand
cagccuacccauuugugaa

SEQ ID NO: 1781401 - RNA, 19 nt, Homo sapiens
  misc_RNA (1)...(19): siRNA sense strand
cuucuucccuaucugaaag

SEQ ID NO: 1781402 - RNA, 19 nt, Homo sapiens
  misc_RNA (1)...(19): siRNA sense strand
ccuguacaccuagacuaua

SEQ ID NO: 1781403 - RNA, 19 nt, Homo sapiens
  misc_RNA (1)...(19): siRNA sense strand
uuguggaggugguuugaug

SEQ ID NO: 1781404 - RNA, 19 nt, Homo sapiens
  misc_RNA (1)...(19): siRNA sense strand
guagcacaggacaguuuaa

SEQ ID NO: 1781405 - RNA, 19 nt, Homo sapiens
  misc_RNA (1)...(19): siRNA sense strand
uucccuaucugaaagugaa

SEQ ID NO: 1781406 - RNA, 19 nt, Homo sapiens
  misc_RNA (1)...(19): siRNA sense strand
uagacuauaacucugauuc

SEQ ID NO: 1781407 - RNA, 19 nt, Homo sapiens
  misc_RNA (1)...(19): siRNA sense strand
gaaggaggcugcaaauguu

SEQ ID NO: 1781408 - RNA, 19 nt, Homo sapiens
  misc_RNA (1)...(19): siRNA sense strand
ucaaggaacugauuucuga

SEQ ID NO: 1781409 - RNA, 19 nt, Homo sapiens
  misc_RNA (1)...(19): siRNA sense strand
gaaggucccuguaauuguu

SEQ ID NO: 1781410 - RNA, 19 nt, Homo sapiens
  misc_RNA (1)...(19): siRNA sense strand
gggccaaccucuucuauga

SEQ ID NO: 1781411 - RNA, 19 nt, Homo sapiens
  misc_RNA (1)...(19): siRNA sense strand
ggaaacaaagcaucugaua

SEQ ID NO: 1781412 - RNA, 19 nt, Homo sapiens
  misc_RNA (1)...(19): siRNA sense strand
gaaacaaagcaucugauaa

SEQ ID NO: 1781413 - RNA, 19 nt, Homo sapiens
  misc_RNA (1)...(19): siRNA sense strand
cagaagaccucuccuggaa

SEQ ID NO: 1781414 - RNA, 19 nt, Homo sapiens
  misc_RNA (1)...(19): siRNA sense strand
aaagaacgcuggugcagaa

SEQ ID NO: 1781415 - RNA, 19 nt, Homo sapiens
  misc_RNA (1)...(19): siRNA sense strand
gaaggagcgugaaagaaga

SEQ ID NO: 1781416 - RNA, 19 nt, Homo sapiens
  misc_RNA (1)...(19): siRNA sense strand
ugaagaagguggccgauau

SEQ ID NO: 1781417 - RNA, 19 nt, Homo sapiens
  misc_RNA (1)...(19): siRNA sense strand
ggaguacgcugaagaaggu

SEQ ID NO: 1781418 - RNA, 19 nt, Homo sapiens
  misc_RNA (1)...(19): siRNA sense strand
gaagcucucugcacaggaa

SEQ ID NO: 1781419 - RNA, 19 nt, Homo sapiens
  misc_RNA (1)...(19): siRNA sense strand
gaaaccaguugccaucuuc

SEQ ID NO: 1781420 - RNA, 19 nt, Homo sapiens
  misc_RNA (1)...(19): siRNA sense strand
gaacagggcaccuugaauc

SEQ ID NO: 1781421 - RNA, 19 nt, Homo sapiens
  misc_RNA (1)...(19): siRNA sense strand
gugaacagcuggccauaga

SEQ ID NO: 1781422 - RNA, 19 nt, Homo sapiens
  misc_RNA (1)...(19): siRNA sense strand
gaccauggcuguaguaaaa

SEQ ID NO: 1781423 - RNA, 19 nt, Homo sapiens
  misc_RNA (1)...(19): siRNA sense strand
ggagaaggucccuguaauu

SEQ ID NO: 1781424 - RNA, 19 nt, Homo sapiens
  misc_RNA (1)...(19): siRNA sense strand
ggaaggagcgugaaagaag

SEQ ID NO: 1781425 - RNA, 19 nt, Homo sapiens
  misc_RNA (1)...(19): siRNA sense strand
ccaaaggcaucaccauugu

SEQ ID NO: 1781426 - RNA, 19 nt, Homo sapiens
  misc_RNA (1)...(19): siRNA sense strand
uaaagccaaugucagguuu

SEQ ID NO: 1781427 - RNA, 19 nt, Homo sapiens
  misc_RNA (1)...(19): siRNA sense strand
gagaaggucccuguaauug

SEQ ID NO: 1781428 - RNA, 19 nt, Homo sapiens
  misc_RNA (1)...(19): siRNA sense strand
ccacagagccuccaaggau

SEQ ID NO: 1781429 - RNA, 19 nt, Homo sapiens
  misc_RNA (1)...(19): siRNA sense strand
ccaaggaguuguuuaaagg

SEQ ID NO: 1781430 - RNA, 19 nt, Homo sapiens
  misc_RNA (1)...(19): siRNA sense strand
ggaggcugauaaaggguua

SEQ ID NO: 1781431 - RNA, 19 nt, Homo sapiens
  misc_RNA (1)...(19): siRNA sense strand
gcugaaggccucugaaaga

SEQ ID NO: 1781432 - RNA, 19 nt, Homo sapiens
  misc_RNA (1)...(19): siRNA sense strand
gcaauucaaggaacugauu

SEQ ID NO: 1781433 - RNA, 19 nt, Homo sapiens
  misc_RNA (1)...(19): siRNA sense strand
gaaaaucccuaugcuauca

SEQ ID NO: 1781434 - RNA, 19 nt, Homo sapiens
  misc_RNA (1)...(19): siRNA sense strand
caaauguuguggucaagug

SEQ ID NO: 1781435 - RNA, 19 nt, Homo sapiens
  misc_RNA (1)...(19): siRNA sense strand
gaggagaaggucccuguaa

SEQ ID NO: 1781436 - RNA, 19 nt, Homo sapiens
  misc_RNA (1)...(19): siRNA sense strand
gaacgcuggugcagaacga

SEQ ID NO: 1781437 - RNA, 19 nt, Homo sapiens
  misc_RNA (1)...(19): siRNA sense strand
gccaaccucuucuaugaug

SEQ ID NO: 1781438 - RNA, 19 nt, Homo sapiens
  misc_RNA (1)...(19): siRNA sense strand
ugaaggaggcugcaaaugu

SEQ ID NO: 1781439 - RNA, 19 nt, Homo sapiens
  misc_RNA (1)...(19): siRNA sense strand
ccguggagcuggaacauga

SEQ ID NO: 1781440 - RNA, 19 nt, Homo sapiens
  misc_RNA (1)...(19): siRNA sense strand
uguagucucuccucucauu

SEQ ID NO: 1781441 - RNA, 19 nt, Homo sapiens
  misc_RNA (1)...(19): siRNA sense strand
gaaagaagaggcccagaac

SEQ ID NO: 1781442 - RNA, 19 nt, Homo sapiens
  misc_RNA (1)...(19): siRNA sense strand
gcaaagaccccaagauaga

SEQ ID NO: 1781443 - RNA, 19 nt, Homo sapiens
  misc_RNA (1)...(19): siRNA sense strand
ccacuaucauggccuuuga

SEQ ID NO: 1781444 - RNA, 19 nt, Homo sapiens
  misc_RNA (1)...(19): siRNA sense strand
uagcaaaacuccaggaaaa

SEQ ID NO: 1781445 - RNA, 19 nt, Homo sapiens
  misc_RNA (1)...(19): siRNA sense strand
ggaauauugccaagucuau

SEQ ID NO: 1781446 - RNA, 19 nt, Homo sapiens
  misc_RNA (1)...(19): siRNA sense strand
ccagagagccagccucaga

SEQ ID NO: 1781447 - RNA, 19 nt, Homo sapiens
  misc_RNA (1)...(19): siRNA sense strand
ggaaugaccgggaccaagu

SEQ ID NO: 1781448 - RNA, 19 nt, Homo sapiens
  misc_RNA (1)...(19): siRNA sense strand
ggacuagagaggcuuguga

SEQ ID NO: 1781449 - RNA, 19 nt, Homo sapiens
  misc_RNA (1)...(19): siRNA sense strand
cuacaaggagggcaaguuu

SEQ ID NO: 1781450 - RNA, 19 nt, Homo sapiens
  misc_RNA (1)...(19): siRNA sense strand
caacacguaccgcugauga

SEQ ID NO: 1781451 - RNA, 19 nt, Homo sapiens
  misc_RNA (1)...(19): siRNA sense strand
gccaaaggcaucaccauug

SEQ ID NO: 1781452 - RNA, 19 nt, Homo sapiens
  misc_RNA (1)...(19): siRNA sense strand
ggaguggaaccucuucuau

SEQ ID NO: 1781453 - RNA, 19 nt, Homo sapiens
  misc_RNA (1)...(19): siRNA sense strand
agaccaagauucuguacau

SEQ ID NO: 1781454 - RNA, 19 nt, Homo sapiens
  misc_RNA (1)...(19): siRNA sense strand
aguggaaccucuucuauca

SEQ ID NO: 1781455 - RNA, 19 nt, Homo sapiens
  misc_RNA (1)...(19): siRNA sense strand
gaaaagagaggaaacaaag

SEQ ID NO: 1781456 - RNA, 19 nt, Homo sapiens
  misc_RNA (1)...(19): siRNA sense strand
ccaccagccucccaugugu

SEQ ID NO: 1781457 - RNA, 19 nt, Homo sapiens
  misc_RNA (1)...(19): siRNA sense strand
gggcaaagaccccaagaua

SEQ ID NO: 1781458 - RNA, 19 nt, Homo sapiens
  misc_RNA (1)...(19): siRNA sense strand
gaggaaacaaagcaucuga

SEQ ID NO: 1781459 - RNA, 19 nt, Homo sapiens
  misc_RNA (1)...(19): siRNA sense strand
uggaaccucuucuaucaga

SEQ ID NO: 1781460 - RNA, 19 nt, Homo sapiens
  misc_RNA (1)...(19): siRNA sense strand
ucagcucccugcucuguug

SEQ ID NO: 1781461 - RNA, 19 nt, Homo sapiens
  misc_RNA (1)...(19): siRNA sense strand
ucuaugaugugcaauucaa

SEQ ID NO: 1781462 - RNA, 19 nt, Homo sapiens
  misc_RNA (1)...(19): siRNA sense strand
ucucuccucucauugcuuu

SEQ ID NO: 1781463 - RNA, 19 nt, Homo sapiens
  misc_RNA (1)...(19): siRNA sense strand
gggaguggauaaagccaau

SEQ ID NO: 1781464 - RNA, 19 nt, Homo sapiens
  misc_RNA (1)...(19): siRNA sense strand
uagagaggcuugugaacag

SEQ ID NO: 1781465 - RNA, 19 nt, Homo sapiens
  misc_RNA (1)...(19): siRNA sense strand
gagaaaagccccagaccaa

SEQ ID NO: 1781466 - RNA, 19 nt, Homo sapiens
  misc_RNA (1)...(19): siRNA sense strand
gaagaagguggccgauauc

SEQ ID NO: 1781467 - RNA, 19 nt, Homo sapiens
  misc_RNA (1)...(19): siRNA sense strand
gcuggaacaugagacauuc

SEQ ID NO: 1781468 - RNA, 19 nt, Homo sapiens
  misc_RNA (1)...(19): siRNA sense strand
gcagagaugaggcccacaa

SEQ ID NO: 1781469 - RNA, 19 nt, Homo sapiens
  misc_RNA (1)...(19): siRNA sense strand
cagcagguaugacgaaggu

SEQ ID NO: 1781470 - RNA, 19 nt, Homo sapiens
  misc_RNA (1)...(19): siRNA sense strand
ccuggugccgucucuauua

SEQ ID NO: 1781471 - RNA, 19 nt, Homo sapiens
  misc_RNA (1)...(19): siRNA sense strand
gagcagcaaccgccaguca

SEQ ID NO: 1781472 - RNA, 19 nt, Homo sapiens
  misc_RNA (1)...(19): siRNA sense strand
ugacuggcauggccugugu

SEQ ID NO: 1781473 - RNA, 19 nt, Homo sapiens
  misc_RNA (1)...(19): siRNA sense strand
ugaaagaagaggcccagaa

SEQ ID NO: 1781474 - RNA, 19 nt, Homo sapiens
  misc_RNA (1)...(19): siRNA sense strand
ggaggcagcgcucacuaug

SEQ ID NO: 1781475 - RNA, 19 nt, Homo sapiens
  misc_RNA (1)...(19): siRNA sense strand
ccuguggccuccuggauga

SEQ ID NO: 1781476 - RNA, 19 nt, Homo sapiens
  misc_RNA (1)...(19): siRNA sense strand
caaaggcaucaccauugua

SEQ ID NO: 1781477 - RNA, 19 nt, Homo sapiens
  misc_RNA (1)...(19): siRNA sense strand
cugaaggccucugaaagaa

SEQ ID NO: 1781478 - RNA, 19 nt, Homo sapiens
  misc_RNA (1)...(19): siRNA sense strand
ggccaaaggcaucaccauu

SEQ ID NO: 1781479 - RNA, 19 nt, Homo sapiens
  misc_RNA (1)...(19): siRNA sense strand
cgucguagcugaggucaag

SEQ ID NO: 1781480 - RNA, 19 nt, Homo sapiens
  misc_RNA (1)...(19): siRNA sense strand
gacaggaggcugauaaagg

SEQ ID NO: 1781481 - RNA, 19 nt, Homo sapiens
  misc_RNA (1)...(19): siRNA sense strand
gaaaagccccagaccaaga

SEQ ID NO: 1781482 - RNA, 19 nt, Homo sapiens
  misc_RNA (1)...(19): siRNA sense strand
gcgaacagggcaccuugaa

SEQ ID NO: 1781483 - RNA, 19 nt, Homo sapiens
  misc_RNA (1)...(19): siRNA sense strand
caagaaacagcagcuccua

SEQ ID NO: 1781484 - RNA, 19 nt, Homo sapiens
  misc_RNA (1)...(19): siRNA sense strand
gggcugaaggccucugaaa

SEQ ID NO: 1781485 - RNA, 19 nt, Homo sapiens
  misc_RNA (1)...(19): siRNA sense strand
cccgccaccugcugucuua

SEQ ID NO: 1781486 - RNA, 19 nt, Homo sapiens
  misc_RNA (1)...(19): siRNA sense strand
uguaauuguugcaaccauu

SEQ ID NO: 1781487 - RNA, 19 nt, Homo sapiens
  misc_RNA (1)...(19): siRNA sense strand
agaaaccaguugccaucuu

SEQ ID NO: 1781488 - RNA, 19 nt, Homo sapiens
  misc_RNA (1)...(19): siRNA sense strand
ccucuucuaugaugugcaa

SEQ ID NO: 1781489 - RNA, 19 nt, Homo sapiens
  misc_RNA (1)...(19): siRNA sense strand
cugcaaauguuguggucaa

SEQ ID NO: 1781490 - RNA, 19 nt, Homo sapiens
  misc_RNA (1)...(19): siRNA sense strand
cgccaaggcuuaccaugca

SEQ ID NO: 1781491 - RNA, 19 nt, Homo sapiens
  misc_RNA (1)...(19): siRNA sense strand
ggaggagaaggucccugua

SEQ ID NO: 1781492 - RNA, 19 nt, Homo sapiens
  misc_RNA (1)...(19): siRNA sense strand
ucaagugccucaccccuuu

SEQ ID NO: 1781493 - RNA, 19 nt, Homo sapiens
  misc_RNA (1)...(19): siRNA sense strand
gggaguggaaccucuucua

SEQ ID NO: 1781494 - RNA, 19 nt, Homo sapiens
  misc_RNA (1)...(19): siRNA sense strand
ggaaaagagaggaaacaaa

SEQ ID NO: 1781495 - RNA, 19 nt, Homo sapiens
  misc_RNA (1)...(19): siRNA sense strand
gaucaggaaggaaguagca

SEQ ID NO: 1781496 - RNA, 19 nt, Homo sapiens
  misc_RNA (1)...(19): siRNA sense strand
aggagaaggucccuguaau

SEQ ID NO: 1781497 - RNA, 19 nt, Homo sapiens
  misc_RNA (1)...(19): siRNA sense strand
gagaggaaacaaagcaucu

SEQ ID NO: 1781498 - RNA, 19 nt, Homo sapiens
  misc_RNA (1)...(19): siRNA sense strand
gaauauugccaagucuaug

SEQ ID NO: 1781499 - RNA, 19 nt, Homo sapiens
  misc_RNA (1)...(19): siRNA sense strand
ucagguuugucgcccauug

SEQ ID NO: 1781500 - RNA, 19 nt, Homo sapiens
  misc_RNA (1)...(19): siRNA sense strand
ggaugggaguggauaaagc

SEQ ID NO: 1781501 - RNA, 19 nt, Homo sapiens
  misc_RNA (1)...(19): siRNA sense strand
cuaaagguacgaguaaguu

SEQ ID NO: 1781502 - RNA, 19 nt, Homo sapiens
  misc_RNA (1)...(19): siRNA sense strand
ucuuuggguuugacucuuu

SEQ ID NO: 1781503 - RNA, 19 nt, Homo sapiens
  misc_RNA (1)...(19): siRNA sense strand
gaccaagauucuguacauc

SEQ ID NO: 1781504 - RNA, 19 nt, Homo sapiens
  misc_RNA (1)...(19): siRNA sense strand
ggaaggaaguagcaaaacu

SEQ ID NO: 1781505 - RNA, 19 nt, Homo sapiens
  misc_RNA (1)...(19): siRNA sense strand
uccaaggaguuguuuaaag

SEQ ID NO: 1781506 - RNA, 19 nt, Homo sapiens
  misc_RNA (1)...(19): siRNA sense strand
gaguggaaccucuucuauc

SEQ ID NO: 1781507 - RNA, 19 nt, Homo sapiens
  misc_RNA (1)...(19): siRNA sense strand
uguaugagcugaacaagga

SEQ ID NO: 1781508 - RNA, 19 nt, Homo sapiens
  misc_RNA (1)...(19): siRNA sense strand
ggaaccaggagaaccguuu

SEQ ID NO: 1781509 - RNA, 19 nt, Homo sapiens
  misc_RNA (1)...(19): siRNA sense strand
gagccaaggccaucaagga

SEQ ID NO: 1781510 - RNA, 19 nt, Homo sapiens
  misc_RNA (1)...(19): siRNA sense strand
cgacauggaaccaggagaa

SEQ ID NO: 1781511 - RNA, 19 nt, Homo sapiens
  misc_RNA (1)...(19): siRNA sense strand
gggaggagcagguaagauc

SEQ ID NO: 1781512 - RNA, 19 nt, Homo sapiens
  misc_RNA (1)...(19): siRNA sense strand
gagcagguaagaucuugga

SEQ ID NO: 1781513 - RNA, 19 nt, Homo sapiens
  misc_RNA (1)...(19): siRNA sense strand
ucaaggaugccaagaugga

SEQ ID NO: 1781514 - RNA, 19 nt, Homo sapiens
  misc_RNA (1)...(19): siRNA sense strand
ggcaagcgagugcucauug

SEQ ID NO: 1781515 - RNA, 19 nt, Homo sapiens
  misc_RNA (1)...(19): siRNA sense strand
augccaagauggaguuuga

SEQ ID NO: 1781516 - RNA, 19 nt, Homo sapiens
  misc_RNA (1)...(19): siRNA sense strand
gaugcagagcugagugaaa

SEQ ID NO: 1781517 - RNA, 19 nt, Homo sapiens
  misc_RNA (1)...(19): siRNA sense strand
gaaccaggagaaccguuuc

SEQ ID NO: 1781518 - RNA, 19 nt, Homo sapiens
  misc_RNA (1)...(19): siRNA sense strand
uacuacaacuccauuagca

SEQ ID NO: 1781519 - RNA, 19 nt, Homo sapiens
  misc_RNA (1)...(19): siRNA sense strand
gaggagcagguaagaucuu

SEQ ID NO: 1781520 - RNA, 19 nt, Homo sapiens
  misc_RNA (1)...(19): siRNA sense strand
acaacuccauuagcaagga

SEQ ID NO: 1781521 - RNA, 19 nt, Homo sapiens
  misc_RNA (1)...(19): siRNA sense strand
ggaggagcagguaagaucu

SEQ ID NO: 1781522 - RNA, 19 nt, Homo sapiens
  misc_RNA (1)...(19): siRNA sense strand
gcaccuggaagggauguca

SEQ ID NO: 1781523 - RNA, 19 nt, Homo sapiens
  misc_RNA (1)...(19): siRNA sense strand
gagccucaaggacaccauu

SEQ ID NO: 1781524 - RNA, 19 nt, Homo sapiens
  misc_RNA (1)...(19): siRNA sense strand
ccagggcaaggccaaguga

SEQ ID NO: 1781525 - RNA, 19 nt, Homo sapiens
  misc_RNA (1)...(19): siRNA sense strand
gagcagaagcggccaagaa

SEQ ID NO: 1781526 - RNA, 19 nt, Homo sapiens
  misc_RNA (1)...(19): siRNA sense strand
agaaugcgcugaacgguau

SEQ ID NO: 1781527 - RNA, 19 nt, Homo sapiens
  misc_RNA (1)...(19): siRNA sense strand
gcugaacgguauucgcuuu

SEQ ID NO: 1781528 - RNA, 19 nt, Homo sapiens
  misc_RNA (1)...(19): siRNA sense strand
gaaguaccgucaguucugu

SEQ ID NO: 1781529 - RNA, 19 nt, Homo sapiens
  misc_RNA (1)...(19): siRNA sense strand
gaacgguauucgcuuugau

SEQ ID NO: 1781530 - RNA, 19 nt, Homo sapiens
  misc_RNA (1)...(19): siRNA sense strand
gcugguacccuuccucuga

SEQ ID NO: 1781531 - RNA, 19 nt, Homo sapiens
  misc_RNA (1)...(19): siRNA sense strand
ggaaguaccgucaguucug

SEQ ID NO: 1781532 - RNA, 19 nt, Homo sapiens
  misc_RNA (1)...(19): siRNA sense strand
ggacauuaaacccagagaa

SEQ ID NO: 1781533 - RNA, 19 nt, Homo sapiens
  misc_RNA (1)...(19): siRNA sense strand
gcuaauggcaacuccaaau

SEQ ID NO: 1781534 - RNA, 19 nt, Homo sapiens
  misc_RNA (1)...(19): siRNA sense strand
gaggagguccggacacugu

SEQ ID NO: 1781535 - RNA, 19 nt, Homo sapiens
  misc_RNA (1)...(19): siRNA sense strand
ggauggaaguaccgucagu

SEQ ID NO: 1781536 - RNA, 19 nt, Homo sapiens
  misc_RNA (1)...(19): siRNA sense strand
acaccaagauggccaagag

SEQ ID NO: 1781537 - RNA, 19 nt, Homo sapiens
  misc_RNA (1)...(19): siRNA sense strand
gcagaagcggccaagaaug

SEQ ID NO: 1781538 - RNA, 19 nt, Homo sapiens
  misc_RNA (1)...(19): siRNA sense strand
gccaagagcaagcuaaugg

SEQ ID NO: 1781539 - RNA, 19 nt, Homo sapiens
  misc_RNA (1)...(19): siRNA sense strand
ugaacgguauucgcuuuga

SEQ ID NO: 1781540 - RNA, 19 nt, Homo sapiens
  misc_RNA (1)...(19): siRNA sense strand
ggagguccggacacuguuu

SEQ ID NO: 1781541 - RNA, 19 nt, Homo sapiens
  misc_RNA (1)...(19): siRNA sense strand
gaucaagcucacugcaaga

SEQ ID NO: 1781542 - RNA, 19 nt, Homo sapiens
  misc_RNA (1)...(19): siRNA sense strand
ccaaagccaacaccaagau

SEQ ID NO: 1781543 - RNA, 19 nt, Homo sapiens
  misc_RNA (1)...(19): siRNA sense strand
ccuaggagcacacuucauc

SEQ ID NO: 1781544 - RNA, 19 nt, Homo sapiens
  misc_RNA (1)...(19): siRNA sense strand
cagaagcggccaagaaugc

SEQ ID NO: 1781545 - RNA, 19 nt, Homo sapiens
  misc_RNA (1)...(19): siRNA sense strand
gacauuaaacccagagaac

SEQ ID NO: 1781546 - RNA, 19 nt, Homo sapiens
  misc_RNA (1)...(19): siRNA sense strand
caaagccaacaccaagaug

SEQ ID NO: 1781547 - RNA, 19 nt, Homo sapiens
  misc_RNA (1)...(19): siRNA sense strand
ccaagauggccaagagcaa

SEQ ID NO: 1781548 - RNA, 19 nt, Homo sapiens
  misc_RNA (1)...(19): siRNA sense strand
gcguucaccuacccaacug

SEQ ID NO: 1781549 - RNA, 19 nt, Homo sapiens
  misc_RNA (1)...(19): siRNA sense strand
gccaaagccaacaccaaga

SEQ ID NO: 1781550 - RNA, 19 nt, Homo sapiens
  misc_RNA (1)...(19): siRNA sense strand
cggccucccuguggacauu

SEQ ID NO: 1781551 - RNA, 19 nt, Homo sapiens
  misc_RNA (1)...(19): siRNA sense strand
acgcucaggugcgcuggua

SEQ ID NO: 1781552 - RNA, 19 nt, Homo sapiens
  misc_RNA (1)...(19): siRNA sense strand
gauggaaguaccgucaguu

SEQ ID NO: 1781553 - RNA, 19 nt, Homo sapiens
  misc_RNA (1)...(19): siRNA sense strand
caacuccaaaucccagcaa

SEQ ID NO: 1781554 - RNA, 19 nt, Homo sapiens
  misc_RNA (1)...(19): siRNA sense strand
ugacaccacccagcaagga

SEQ ID NO: 1781555 - RNA, 19 nt, Homo sapiens
  misc_RNA (1)...(19): siRNA sense strand
gaaggacaauuuaaggaua

SEQ ID NO: 1781556 - RNA, 19 nt, Homo sapiens
  misc_RNA (1)...(19): siRNA sense strand
ggacuagaauggaguggua

SEQ ID NO: 1781557 - RNA, 19 nt, Homo sapiens
  misc_RNA (1)...(19): siRNA sense strand
gaaauuaaagcuucacaug

SEQ ID NO: 1781558 - RNA, 19 nt, Homo sapiens
  misc_RNA (1)...(19): siRNA sense strand
agaauggagugguaacuuu

SEQ ID NO: 1781559 - RNA, 19 nt, Homo sapiens
  misc_RNA (1)...(19): siRNA sense strand
cuccagaccugaaauuaaa

SEQ ID NO: 1781560 - RNA, 19 nt, Homo sapiens
  misc_RNA (1)...(19): siRNA sense strand
ggacuuacacauucccaaa

SEQ ID NO: 1781561 - RNA, 19 nt, Homo sapiens
  misc_RNA (1)...(19): siRNA sense strand
gaaggggaauauacugaua

SEQ ID NO: 1781562 - RNA, 19 nt, Homo sapiens
  misc_RNA (1)...(19): siRNA sense strand
ggagugguaacuuucauuu

SEQ ID NO: 1781563 - RNA, 19 nt, Homo sapiens
  misc_RNA (1)...(19): siRNA sense strand
gcuccagaccugaaauuaa

SEQ ID NO: 1781564 - RNA, 19 nt, Homo sapiens
  misc_RNA (1)...(19): siRNA sense strand
uuggaagacuugagcauuu

SEQ ID NO: 1781565 - RNA, 19 nt, Homo sapiens
  misc_RNA (1)...(19): siRNA sense strand
gggcaaaguauacuggaaa

SEQ ID NO: 1781566 - RNA, 19 nt, Homo sapiens
  misc_RNA (1)...(19): siRNA sense strand
ggcaaaguauacuggaaau

SEQ ID NO: 1781567 - RNA, 19 nt, Homo sapiens
  misc_RNA (1)...(19): siRNA sense strand
gaauggagugguaacuuuc

SEQ ID NO: 1781568 - RNA, 19 nt, Homo sapiens
  misc_RNA (1)...(19): siRNA sense strand
gcaaaguauacuggaaauu

SEQ ID NO: 1781569 - RNA, 19 nt, Homo sapiens
  misc_RNA (1)...(19): siRNA sense strand
ugaaggacaauuuaaggau

SEQ ID NO: 1781570 - RNA, 19 nt, Homo sapiens
  misc_RNA (1)...(19): siRNA sense strand
ccaaauggggcaaaguaua

SEQ ID NO: 1781571 - RNA, 19 nt, Homo sapiens
  misc_RNA (1)...(19): siRNA sense strand
gauauccaaggacuagaau

SEQ ID NO: 1781572 - RNA, 19 nt, Homo sapiens
  misc_RNA (1)...(19): siRNA sense strand
agcaguauaugaaggacaa

SEQ ID NO: 1781573 - RNA, 19 nt, Homo sapiens
  misc_RNA (1)...(19): siRNA sense strand
ugauauccaaggacuagaa

SEQ ID NO: 1781574 - RNA, 19 nt, Homo sapiens
  misc_RNA (1)...(19): siRNA sense strand
uauccaaggacuagaaugg

SEQ ID NO: 1781575 - RNA, 19 nt, Homo sapiens
  misc_RNA (1)...(19): siRNA sense strand
uagaauggagugguaacuu

SEQ ID NO: 1781576 - RNA, 19 nt, Homo sapiens
  misc_RNA (1)...(19): siRNA sense strand
ucagucagauccuguauua

SEQ ID NO: 1781577 - RNA, 19 nt, Homo sapiens
  misc_RNA (1)...(19): siRNA sense strand
gaacugacuuacaauuaug

SEQ ID NO: 1781578 - RNA, 19 nt, Homo sapiens
  misc_RNA (1)...(19): siRNA sense strand
gaagcaaauuguuggauga

SEQ ID NO: 1781579 - RNA, 19 nt, Homo sapiens
  misc_RNA (1)...(19): siRNA sense strand
gaaagaguugccagacuua

SEQ ID NO: 1781580 - RNA, 19 nt, Homo sapiens
  misc_RNA (1)...(19): siRNA sense strand
gcaaugacuuuaugggaau

SEQ ID NO: 1781581 - RNA, 19 nt, Homo sapiens
  misc_RNA (1)...(19): siRNA sense strand
gaaucacgcucgcuucuag

SEQ ID NO: 1781582 - RNA, 19 nt, Homo sapiens
  misc_RNA (1)...(19): siRNA sense strand
ucgcagaacugacuuacaa

SEQ ID NO: 1781583 - RNA, 19 nt, Homo sapiens
  misc_RNA (1)...(19): siRNA sense strand
acccaaagcuucagguuaa

SEQ ID NO: 1781584 - RNA, 19 nt, Homo sapiens
  misc_RNA (1)...(19): siRNA sense strand
ggauauaaguucuauuugc

SEQ ID NO: 1781585 - RNA, 19 nt, Homo sapiens
  misc_RNA (1)...(19): siRNA sense strand
cagaacugacuuacaauua

SEQ ID NO: 1781586 - RNA, 19 nt, Homo sapiens
  misc_RNA (1)...(19): siRNA sense strand
gaacuacugguguaaucua

SEQ ID NO: 1781587 - RNA, 19 nt, Homo sapiens
  misc_RNA (1)...(19): siRNA sense strand
ggaugaagcauuucgagaa

SEQ ID NO: 1781588 - RNA, 19 nt, Homo sapiens
  misc_RNA (1)...(19): siRNA sense strand
gaugcaaugucagcagaua

SEQ ID NO: 1781589 - RNA, 19 nt, Homo sapiens
  misc_RNA (1)...(19): siRNA sense strand
agaaagaguugccagacuu

SEQ ID NO: 1781590 - RNA, 19 nt, Homo sapiens
  misc_RNA (1)...(19): siRNA sense strand
ggacaugaaauuugcuuug

SEQ ID NO: 1781591 - RNA, 19 nt, Homo sapiens
  misc_RNA (1)...(19): siRNA sense strand
gcagaacugacuuacaauu

SEQ ID NO: 1781592 - RNA, 19 nt, Homo sapiens
  misc_RNA (1)...(19): siRNA sense strand
cugcaaagcugccuguaau

SEQ ID NO: 1781593 - RNA, 19 nt, Homo sapiens
  misc_RNA (1)...(19): siRNA sense strand
caaacacaauaaacccaaa

SEQ ID NO: 1781594 - RNA, 19 nt, Homo sapiens
  misc_RNA (1)...(19): siRNA sense strand
gaugggaaauggaguaaaa

SEQ ID NO: 1781595 - RNA, 19 nt, Homo sapiens
  misc_RNA (1)...(19): siRNA sense strand
gacaugaaauuugcuuugu

SEQ ID NO: 1781596 - RNA, 19 nt, Homo sapiens
  misc_RNA (1)...(19): siRNA sense strand
agucagauccuguauuaaa

SEQ ID NO: 1781597 - RNA, 19 nt, Homo sapiens
  misc_RNA (1)...(19): siRNA sense strand
gauuugggccugaggauga

SEQ ID NO: 1781598 - RNA, 19 nt, Homo sapiens
  misc_RNA (1)...(19): siRNA sense strand
gguguaaucuacugggaau

SEQ ID NO: 1781599 - RNA, 19 nt, Homo sapiens
  misc_RNA (1)...(19): siRNA sense strand
gaaauggaguaaaacaaug

SEQ ID NO: 1781600 - RNA, 19 nt, Homo sapiens
  misc_RNA (1)...(19): siRNA sense strand
gcucugcacuucguauuca

SEQ ID NO: 1781601 - RNA, 19 nt, Homo sapiens
  misc_RNA (1)...(19): siRNA sense strand
gggaggauauaaguucuau

SEQ ID NO: 1781602 - RNA, 19 nt, Homo sapiens
  misc_RNA (1)...(19): siRNA sense strand
acuacaagcuuggcaauga

SEQ ID NO: 1781603 - RNA, 19 nt, Homo sapiens
  misc_RNA (1)...(19): siRNA sense strand
ggccugaggaugaucauuu

SEQ ID NO: 1781604 - RNA, 19 nt, Homo sapiens
  misc_RNA (1)...(19): siRNA sense strand
gaugaagcauuucgagaac

SEQ ID NO: 1781605 - RNA, 19 nt, Homo sapiens
  misc_RNA (1)...(19): siRNA sense strand
gcaugaggaauuugaagaa

SEQ ID NO: 1781606 - RNA, 19 nt, Homo sapiens
  misc_RNA (1)...(19): siRNA sense strand
ugacggacaugaaauuugc

SEQ ID NO: 1781607 - RNA, 19 nt, Homo sapiens
  misc_RNA (1)...(19): siRNA sense strand
ugaagcauuucgagaacuu

SEQ ID NO: 1781608 - RNA, 19 nt, Homo sapiens
  misc_RNA (1)...(19): siRNA sense strand
guaaaacaauggugggauu

SEQ ID NO: 1781609 - RNA, 19 nt, Homo sapiens
  misc_RNA (1)...(19): siRNA sense strand
caauaaacccaaagcuuca

SEQ ID NO: 1781610 - RNA, 19 nt, Homo sapiens
  misc_RNA (1)...(19): siRNA sense strand
ggaaguugcagaagguguu

SEQ ID NO: 1781611 - RNA, 19 nt, Homo sapiens
  misc_RNA (1)...(19): siRNA sense strand
guaaucuacugggaaugaa

SEQ ID NO: 1781612 - RNA, 19 nt, Homo sapiens
  misc_RNA (1)...(19): siRNA sense strand
gacggaaguugcagaaggu

SEQ ID NO: 1781613 - RNA, 19 nt, Homo sapiens
  misc_RNA (1)...(19): siRNA sense strand
agacuuagaagacuugaug

SEQ ID NO: 1781614 - RNA, 19 nt, Homo sapiens
  misc_RNA (1)...(19): siRNA sense strand
gcaaagcugccuguaaugg

SEQ ID NO: 1781615 - RNA, 19 nt, Homo sapiens
  misc_RNA (1)...(19): siRNA sense strand
ugaagguucugcggcauga

SEQ ID NO: 1781616 - RNA, 19 nt, Homo sapiens
  misc_RNA (1)...(19): siRNA sense strand
ggaaucacgcucgcuucua

SEQ ID NO: 1781617 - RNA, 19 nt, Homo sapiens
  misc_RNA (1)...(19): siRNA sense strand
gcuuggcaaugacuuuaug

SEQ ID NO: 1781618 - RNA, 19 nt, Homo sapiens
  misc_RNA (1)...(19): siRNA sense strand
gcugcaaagcugccuguaa

SEQ ID NO: 1781619 - RNA, 19 nt, Homo sapiens
  misc_RNA (1)...(19): siRNA sense strand
ggaaauggaguaaaacaau

SEQ ID NO: 1781620 - RNA, 19 nt, Homo sapiens
  misc_RNA (1)...(19): siRNA sense strand
gaaguugcagaagguguuu

SEQ ID NO: 1781621 - RNA, 19 nt, Homo sapiens
  misc_RNA (1)...(19): siRNA sense strand
aaacaauggugggauuugg

SEQ ID NO: 1781622 - RNA, 19 nt, Homo sapiens
  misc_RNA (1)...(19): siRNA sense strand
cagaaagaguugccagacu

SEQ ID NO: 1781623 - RNA, 19 nt, Homo sapiens
  misc_RNA (1)...(19): siRNA sense strand
cacaauaaacccaaagcuu

SEQ ID NO: 1781624 - RNA, 19 nt, Homo sapiens
  misc_RNA (1)...(19): siRNA sense strand
uugcugggcuaugcugaua

SEQ ID NO: 1781625 - RNA, 19 nt, Homo sapiens
  misc_RNA (1)...(19): siRNA sense strand
guuggaugaugcaauguca

SEQ ID NO: 1781626 - RNA, 19 nt, Homo sapiens
  misc_RNA (1)...(19): siRNA sense strand
ccagagggaagcaaauugu

SEQ ID NO: 1781627 - RNA, 19 nt, Homo sapiens
  misc_RNA (1)...(19): siRNA sense strand
aaagggagaaccagaagau

SEQ ID NO: 1781628 - RNA, 19 nt, Homo sapiens
  misc_RNA (1)...(19): siRNA sense strand
uguaaugggccuuaugaug

SEQ ID NO: 1781629 - RNA, 19 nt, Homo sapiens
  misc_RNA (1)...(19): siRNA sense strand
caguacagguggucauucu

SEQ ID NO: 1781630 - RNA, 19 nt, Homo sapiens
  misc_RNA (1)...(19): siRNA sense strand
cuacugguguaaucuacug

SEQ ID NO: 1781631 - RNA, 19 nt, Homo sapiens
  misc_RNA (1)...(19): siRNA sense strand
gagcucugcacuucguauu

SEQ ID NO: 1781632 - RNA, 19 nt, Homo sapiens
  misc_RNA (1)...(19): siRNA sense strand
ugaagaaggcugcaaagcu

SEQ ID NO: 1781633 - RNA, 19 nt, Homo sapiens
  misc_RNA (1)...(19): siRNA sense strand
caagcuuggcaaugacuuu

SEQ ID NO: 1781634 - RNA, 19 nt, Homo sapiens
  misc_RNA (1)...(19): siRNA sense strand
cuuagaagacuugaugaaa

SEQ ID NO: 1781635 - RNA, 19 nt, Homo sapiens
  misc_RNA (1)...(19): siRNA sense strand
gacccugacggacaugaaa

SEQ ID NO: 1781636 - RNA, 19 nt, Homo sapiens
  misc_RNA (1)...(19): siRNA sense strand
cgucggagacuacaagcuu

SEQ ID NO: 1781637 - RNA, 19 nt, Homo sapiens
  misc_RNA (1)...(19): siRNA sense strand
caugaggaauuugaagaag

SEQ ID NO: 1781638 - RNA, 19 nt, Homo sapiens
  misc_RNA (1)...(19): siRNA sense strand
agaguugccagacuuagaa

SEQ ID NO: 1781639 - RNA, 19 nt, Homo sapiens
  misc_RNA (1)...(19): siRNA sense strand
gcugauaaccaguguaagc

SEQ ID NO: 1781640 - RNA, 19 nt, Homo sapiens
  misc_RNA (1)...(19): siRNA sense strand
gggcuuugcugggcuaugc

SEQ ID NO: 1781641 - RNA, 19 nt, Homo sapiens
  misc_RNA (1)...(19): siRNA sense strand
ggcaugaggaauuugaaga

SEQ ID NO: 1781642 - RNA, 19 nt, Homo sapiens
  misc_RNA (1)...(19): siRNA sense strand
ccuguaaugggccuuauga

SEQ ID NO: 1781643 - RNA, 19 nt, Homo sapiens
  misc_RNA (1)...(19): siRNA sense strand
uaugaugggaaauggagua

SEQ ID NO: 1781644 - RNA, 19 nt, Homo sapiens
  misc_RNA (1)...(19): siRNA sense strand
uguaaucuacugggaauga

SEQ ID NO: 1781645 - RNA, 19 nt, Homo sapiens
  misc_RNA (1)...(19): siRNA sense strand
agagggaagcaaauuguug

SEQ ID NO: 1781646 - RNA, 19 nt, Homo sapiens
  misc_RNA (1)...(19): siRNA sense strand
gaagcauuucgagaacuuu

SEQ ID NO: 1781647 - RNA, 19 nt, Homo sapiens
  misc_RNA (1)...(19): siRNA sense strand
aagcuuggcaaugacuuua

SEQ ID NO: 1781648 - RNA, 19 nt, Homo sapiens
  misc_RNA (1)...(19): siRNA sense strand
ugcaaugucagcagauaaa

SEQ ID NO: 1781649 - RNA, 19 nt, Homo sapiens
  misc_RNA (1)...(19): siRNA sense strand
gcugggcuaugcugauaac

SEQ ID NO: 1781650 - RNA, 19 nt, Homo sapiens
  misc_RNA (1)...(19): siRNA sense strand
cuacugggaaugaaaauuu

SEQ ID NO: 1781651 - RNA, 19 nt, Homo sapiens
  misc_RNA (1)...(19): siRNA sense strand
gucagauccuguauuaaaa

SEQ ID NO: 1781652 - RNA, 19 nt, Homo sapiens
  misc_RNA (1)...(19): siRNA sense strand
ggauccagagggaagcaaa

SEQ ID NO: 1781653 - RNA, 19 nt, Homo sapiens
  misc_RNA (1)...(19): siRNA sense strand
ugucggggaugaagcauuu

SEQ ID NO: 1781654 - RNA, 19 nt, Homo sapiens
  misc_RNA (1)...(19): siRNA sense strand
uagaagacuugaugaaaag

SEQ ID NO: 1781655 - RNA, 19 nt, Homo sapiens
  misc_RNA (1)...(19): siRNA sense strand
agcagugucugaucuucaa

SEQ ID NO: 1781656 - RNA, 19 nt, Homo sapiens
  misc_RNA (1)...(19): siRNA sense strand
uugaacuacugguguaauc

SEQ ID NO: 1781657 - RNA, 19 nt, Homo sapiens
  misc_RNA (1)...(19): siRNA sense strand
ugucugaucuucaaaaguc

SEQ ID NO: 1781658 - RNA, 19 nt, Homo sapiens
  misc_RNA (1)...(19): siRNA sense strand
cagagggaagcaaauuguu

SEQ ID NO: 1781659 - RNA, 19 nt, Homo sapiens
  misc_RNA (1)...(19): siRNA sense strand
acaugaaauuugcuuuguc

SEQ ID NO: 1781660 - RNA, 19 nt, Homo sapiens
  misc_RNA (1)...(19): siRNA sense strand
uccuugaacuacuggugua

SEQ ID NO: 1781661 - RNA, 19 nt, Homo sapiens
  misc_RNA (1)...(19): siRNA sense strand
caaaaguccuugaacuacu

SEQ ID NO: 1781662 - RNA, 19 nt, Homo sapiens
  misc_RNA (1)...(19): siRNA sense strand
cuacaagcuuggcaaugac

SEQ ID NO: 1781663 - RNA, 19 nt, Homo sapiens
  misc_RNA (1)...(19): siRNA sense strand
gauccagagggaagcaaau

SEQ ID NO: 1781664 - RNA, 19 nt, Homo sapiens
  misc_RNA (1)...(19): siRNA sense strand
gggaaucacgcucgcuucu

SEQ ID NO: 1781665 - RNA, 19 nt, Homo sapiens
  misc_RNA (1)...(19): siRNA sense strand
ggaagaagaucaaacuaca

SEQ ID NO: 1781666 - RNA, 19 nt, Homo sapiens
  misc_RNA (1)...(19): siRNA sense strand
gaggacaacuucaacaaca

SEQ ID NO: 1781667 - RNA, 19 nt, Homo sapiens
  misc_RNA (1)...(19): siRNA sense strand
caagagcgguucaagacaa

SEQ ID NO: 1781668 - RNA, 19 nt, Homo sapiens
  misc_RNA (1)...(19): siRNA sense strand
guacugaccugaaaacuug

SEQ ID NO: 1781669 - RNA, 19 nt, Homo sapiens
  misc_RNA (1)...(19): siRNA sense strand
agaaggagcaggccgauaa

SEQ ID NO: 1781670 - RNA, 19 nt, Homo sapiens
  misc_RNA (1)...(19): siRNA sense strand
gcaacaagccucccaguac

SEQ ID NO: 1781671 - RNA, 19 nt, Homo sapiens
  misc_RNA (1)...(19): siRNA sense strand
ggagcaggccgauaaguug

SEQ ID NO: 1781672 - RNA, 19 nt, Homo sapiens
  misc_RNA (1)...(19): siRNA sense strand
caacaagccucccaguacu

SEQ ID NO: 1781673 - RNA, 19 nt, Homo sapiens
  misc_RNA (1)...(19): siRNA sense strand
agaggaaggugcagaagga

SEQ ID NO: 1781674 - RNA, 19 nt, Homo sapiens
  misc_RNA (1)...(19): siRNA sense strand
caauaacuacugccuacua

SEQ ID NO: 1781675 - RNA, 19 nt, Homo sapiens
  misc_RNA (1)...(19): siRNA sense strand
gaagaagaucaaacuacaa

SEQ ID NO: 1781676 - RNA, 19 nt, Homo sapiens
  misc_RNA (1)...(19): siRNA sense strand
ucacggaugagaaaucuuu

SEQ ID NO: 1781677 - RNA, 19 nt, Homo sapiens
  misc_RNA (1)...(19): siRNA sense strand
gaagaucaaacuacaaguc

SEQ ID NO: 1781678 - RNA, 19 nt, Homo sapiens
  misc_RNA (1)...(19): siRNA sense strand
gagcgguucaagacaauaa

SEQ ID NO: 1781679 - RNA, 19 nt, Homo sapiens
  misc_RNA (1)...(19): siRNA sense strand
gcauuauccuaguauacga

SEQ ID NO: 1781680 - RNA, 19 nt, Homo sapiens
  misc_RNA (1)...(19): siRNA sense strand
ucgagaauauucagaacug

SEQ ID NO: 1781681 - RNA, 19 nt, Homo sapiens
  misc_RNA (1)...(19): siRNA sense strand
acaagaagaacaccaacaa

SEQ ID NO: 1781682 - RNA, 19 nt, Homo sapiens
  misc_RNA (1)...(19): siRNA sense strand
uuucgaaacuagugcuaaa

SEQ ID NO: 1781683 - RNA, 19 nt, Homo sapiens
  misc_RNA (1)...(19): siRNA sense strand
acacuuacaucuccaccau

SEQ ID NO: 1781684 - RNA, 19 nt, Homo sapiens
  misc_RNA (1)...(19): siRNA sense strand
caugggcauuauccuagua

SEQ ID NO: 1781685 - RNA, 19 nt, Homo sapiens
  misc_RNA (1)...(19): siRNA sense strand
gcuaaauccaguaugaaug

SEQ ID NO: 1781686 - RNA, 19 nt, Homo sapiens
  misc_RNA (1)...(19): siRNA sense strand
cuaaauccaguaugaaugu

SEQ ID NO: 1781687 - RNA, 19 nt, Homo sapiens
  misc_RNA (1)...(19): siRNA sense strand
agugcuaaauccaguauga

SEQ ID NO: 1781688 - RNA, 19 nt, Homo sapiens
  misc_RNA (1)...(19): siRNA sense strand
agaagaacaccaacaagug

SEQ ID NO: 1781689 - RNA, 19 nt, Homo sapiens
  misc_RNA (1)...(19): siRNA sense strand
gggaagaagaucaaacuac

SEQ ID NO: 1781690 - RNA, 19 nt, Homo sapiens
  misc_RNA (1)...(19): siRNA sense strand
gcagaggacaacuucaaca

SEQ ID NO: 1781691 - RNA, 19 nt, Homo sapiens
  misc_RNA (1)...(19): siRNA sense strand
gaaacuagugcuaaaucca

SEQ ID NO: 1781692 - RNA, 19 nt, Homo sapiens
  misc_RNA (1)...(19): siRNA sense strand
ccaagaggaaggugcagaa

SEQ ID NO: 1781693 - RNA, 19 nt, Homo sapiens
  misc_RNA (1)...(19): siRNA sense strand
ucccaguacugaccugaaa

SEQ ID NO: 1781694 - RNA, 19 nt, Homo sapiens
  misc_RNA (1)...(19): siRNA sense strand
gaauguggaugaggcuuuu

SEQ ID NO: 1781695 - RNA, 19 nt, Homo sapiens
  misc_RNA (1)...(19): siRNA sense strand
ugaaaagcaucaaggagaa

SEQ ID NO: 1781696 - RNA, 19 nt, Homo sapiens
  misc_RNA (1)...(19): siRNA sense strand
acgaccaccucuucaaguu

SEQ ID NO: 1781697 - RNA, 19 nt, Homo sapiens
  misc_RNA (1)...(19): siRNA sense strand
gccaagagcgguucaagac

SEQ ID NO: 1781698 - RNA, 19 nt, Homo sapiens
  misc_RNA (1)...(19): siRNA sense strand
cagaggacaacuucaacaa

SEQ ID NO: 1781699 - RNA, 19 nt, Homo sapiens
  misc_RNA (1)...(19): siRNA sense strand
aagaagaacaccaacaagu

SEQ ID NO: 1781700 - RNA, 19 nt, Homo sapiens
  misc_RNA (1)...(19): siRNA sense strand
ccaguaugaauguggauga

SEQ ID NO: 1781701 - RNA, 19 nt, Homo sapiens
  misc_RNA (1)...(19): siRNA sense strand
caagaagaacaccaacaag

SEQ ID NO: 1781702 - RNA, 19 nt, Homo sapiens
  misc_RNA (1)...(19): siRNA sense strand
ugaauguggaugaggcuuu

SEQ ID NO: 1781703 - RNA, 19 nt, Homo sapiens
  misc_RNA (1)...(19): siRNA sense strand
ugucugaucauucgcuuug

SEQ ID NO: 1781704 - RNA, 19 nt, Homo sapiens
  misc_RNA (1)...(19): siRNA sense strand
gaaggagcaggccgauaag

SEQ ID NO: 1781705 - RNA, 19 nt, Homo sapiens
  misc_RNA (1)...(19): siRNA sense strand
guggagccaugggcauuau

SEQ ID NO: 1781706 - RNA, 19 nt, Homo sapiens
  misc_RNA (1)...(19): siRNA sense strand
ggccaagagcgguucaaga

SEQ ID NO: 1781707 - RNA, 19 nt, Homo sapiens
  misc_RNA (1)...(19): siRNA sense strand
aauaacuacugccuacuac

SEQ ID NO: 1781708 - RNA, 19 nt, Homo sapiens
  misc_RNA (1)...(19): siRNA sense strand
gacaagaagaacaccaaca

SEQ ID NO: 1781709 - RNA, 19 nt, Homo sapiens
  misc_RNA (1)...(19): siRNA sense strand
ggaggccggagaucaggaa

SEQ ID NO: 1781710 - RNA, 19 nt, Homo sapiens
  misc_RNA (1)...(19): siRNA sense strand
cgaaacuagugcuaaaucc

SEQ ID NO: 1781711 - RNA, 19 nt, Homo sapiens
  misc_RNA (1)...(19): siRNA sense strand
acaacuucaacaacacuua

SEQ ID NO: 1781712 - RNA, 19 nt, Homo sapiens
  misc_RNA (1)...(19): siRNA sense strand
uaaauccaguaugaaugug

SEQ ID NO: 1781713 - RNA, 19 nt, Homo sapiens
  misc_RNA (1)...(19): siRNA sense strand
ggacaacuucaacaacacu

SEQ ID NO: 1781714 - RNA, 19 nt, Homo sapiens
  misc_RNA (1)...(19): siRNA sense strand
caucuccaccaucggaauu

SEQ ID NO: 1781715 - RNA, 19 nt, Homo sapiens
  misc_RNA (1)...(19): siRNA sense strand
caacuucaacaacacuuac

SEQ ID NO: 1781716 - RNA, 19 nt, Homo sapiens
  misc_RNA (1)...(19): siRNA sense strand
aagaagaucaaacuacaag

SEQ ID NO: 1781717 - RNA, 19 nt, Homo sapiens
  misc_RNA (1)...(19): siRNA sense strand
acauggaggccaagaggaa

SEQ ID NO: 1781718 - RNA, 19 nt, Homo sapiens
  misc_RNA (1)...(19): siRNA sense strand
aagagcgguucaagacaau

SEQ ID NO: 1781719 - RNA, 19 nt, Homo sapiens
  misc_RNA (1)...(19): siRNA sense strand
cgaccaccucuucaaguug

SEQ ID NO: 1781720 - RNA, 19 nt, Homo sapiens
  misc_RNA (1)...(19): siRNA sense strand
ccaugggcauuauccuagu

SEQ ID NO: 1781721 - RNA, 19 nt, Homo sapiens
  misc_RNA (1)...(19): siRNA sense strand
gggcauuauccuaguauac

SEQ ID NO: 1781722 - RNA, 19 nt, Homo sapiens
  misc_RNA (1)...(19): siRNA sense strand
gugacaagaagaacaccaa

SEQ ID NO: 1781723 - RNA, 19 nt, Homo sapiens
  misc_RNA (1)...(19): siRNA sense strand
gcaauggccuacaaggaaa

SEQ ID NO: 1781724 - RNA, 19 nt, Homo sapiens
  misc_RNA (1)...(19): siRNA sense strand
gaacaaggaacuccagguu

SEQ ID NO: 1781725 - RNA, 19 nt, Homo sapiens
  misc_RNA (1)...(19): siRNA sense strand
acaaggaacuccagguuga

SEQ ID NO: 1781726 - RNA, 19 nt, Homo sapiens
  misc_RNA (1)...(19): siRNA sense strand
aaacagcaauggccuacaa

SEQ ID NO: 1781727 - RNA, 19 nt, Homo sapiens
  misc_RNA (1)...(19): siRNA sense strand
caacaucuauacuuacgau

SEQ ID NO: 1781728 - RNA, 19 nt, Homo sapiens
  misc_RNA (1)...(19): siRNA sense strand
gaacuuuagcuucuccaaa

SEQ ID NO: 1781729 - RNA, 19 nt, Homo sapiens
  misc_RNA (1)...(19): siRNA sense strand
ugaaacaauuggcagagaa

SEQ ID NO: 1781730 - RNA, 19 nt, Homo sapiens
  misc_RNA (1)...(19): siRNA sense strand
ugaaggagcuguccaugcu

SEQ ID NO: 1781731 - RNA, 19 nt, Homo sapiens
  misc_RNA (1)...(19): siRNA sense strand
gaagugaagcaaaucaaca

SEQ ID NO: 1781732 - RNA, 19 nt, Homo sapiens
  misc_RNA (1)...(19): siRNA sense strand
aacaacaacuucagcaaga

SEQ ID NO: 1781733 - RNA, 19 nt, Homo sapiens
  misc_RNA (1)...(19): siRNA sense strand
ucacugaucugcucuugcu

SEQ ID NO: 1781734 - RNA, 19 nt, Homo sapiens
  misc_RNA (1)...(19): siRNA sense strand
gaaccucgcaacaucaaca

SEQ ID NO: 1781735 - RNA, 19 nt, Homo sapiens
  misc_RNA (1)...(19): siRNA sense strand
gcagaggaaagaagaaagu

SEQ ID NO: 1781736 - RNA, 19 nt, Homo sapiens
  misc_RNA (1)...(19): siRNA sense strand
gaaaagcugauccugaaaa

SEQ ID NO: 1781737 - RNA, 19 nt, Homo sapiens
  misc_RNA (1)...(19): siRNA sense strand
cccaggugcugaaacaauu

SEQ ID NO: 1781738 - RNA, 19 nt, Homo sapiens
  misc_RNA (1)...(19): siRNA sense strand
gauauggaagugaagcaaa

SEQ ID NO: 1781739 - RNA, 19 nt, Homo sapiens
  misc_RNA (1)...(19): siRNA sense strand
gccaccaucuccuaucuca

SEQ ID NO: 1781740 - RNA, 19 nt, Homo sapiens
  misc_RNA (1)...(19): siRNA sense strand
gaggagaacaacaacuuca

SEQ ID NO: 1781741 - RNA, 19 nt, Homo sapiens
  misc_RNA (1)...(19): siRNA sense strand
caccaucuccuaucucaga

SEQ ID NO: 1781742 - RNA, 19 nt, Homo sapiens
  misc_RNA (1)...(19): siRNA sense strand
caacaacuucagcaagaug

SEQ ID NO: 1781743 - RNA, 19 nt, Homo sapiens
  misc_RNA (1)...(19): siRNA sense strand
ugaagcaaaucaacaaacg

SEQ ID NO: 1781744 - RNA, 19 nt, Homo sapiens
  misc_RNA (1)...(19): siRNA sense strand
gaaacaauuggcagagaag

SEQ ID NO: 1781745 - RNA, 19 nt, Homo sapiens
  misc_RNA (1)...(19): siRNA sense strand
gaggagauccagaagaaac

SEQ ID NO: 1781746 - RNA, 19 nt, Homo sapiens
  misc_RNA (1)...(19): siRNA sense strand
acgaugauauggaagugaa

SEQ ID NO: 1781747 - RNA, 19 nt, Homo sapiens
  misc_RNA (1)...(19): siRNA sense strand
agaaggcuuuggaggagaa

SEQ ID NO: 1781748 - RNA, 19 nt, Homo sapiens
  misc_RNA (1)...(19): siRNA sense strand
gaucugcucuugcuuuuac

SEQ ID NO: 1781749 - RNA, 19 nt, Homo sapiens
  misc_RNA (1)...(19): siRNA sense strand
ggaggagaacaacaacuuc

SEQ ID NO: 1781750 - RNA, 19 nt, Homo sapiens
  misc_RNA (1)...(19): siRNA sense strand
caacaucaacaucuauacu

SEQ ID NO: 1781751 - RNA, 19 nt, Homo sapiens
  misc_RNA (1)...(19): siRNA sense strand
acuggaggcugcagaggaa

SEQ ID NO: 1781752 - RNA, 19 nt, Homo sapiens
  misc_RNA (1)...(19): siRNA sense strand
uacuuacgaugauauggaa

SEQ ID NO: 1781753 - RNA, 19 nt, Homo sapiens
  misc_RNA (1)...(19): siRNA sense strand
cagcaauggccuacaagga

SEQ ID NO: 1781754 - RNA, 19 nt, Homo sapiens
  misc_RNA (1)...(19): siRNA sense strand
ggaacacgagcgagaaguc

SEQ ID NO: 1781755 - RNA, 19 nt, Homo sapiens
  misc_RNA (1)...(19): siRNA sense strand
ggaagugaagcaaaucaac

SEQ ID NO: 1781756 - RNA, 19 nt, Homo sapiens
  misc_RNA (1)...(19): siRNA sense strand
auauggaagugaagcaaau

SEQ ID NO: 1781757 - RNA, 19 nt, Homo sapiens
  misc_RNA (1)...(19): siRNA sense strand
ggaggagauccagaagaaa

SEQ ID NO: 1781758 - RNA, 19 nt, Homo sapiens
  misc_RNA (1)...(19): siRNA sense strand
gaagccaccaucuccuauc

SEQ ID NO: 1781759 - RNA, 19 nt, Homo sapiens
  misc_RNA (1)...(19): siRNA sense strand
agcaauggccuacaaggaa

SEQ ID NO: 1781760 - RNA, 19 nt, Homo sapiens
  misc_RNA (1)...(19): siRNA sense strand
gaacuccagguugaacugu

SEQ ID NO: 1781761 - RNA, 19 nt, Homo sapiens
  misc_RNA (1)...(19): siRNA sense strand
gagggaacacgagcgagaa

SEQ ID NO: 1781762 - RNA, 19 nt, Homo sapiens
  misc_RNA (1)...(19): siRNA sense strand
cugaaacaauuggcagaga

SEQ ID NO: 1781763 - RNA, 19 nt, Homo sapiens
  misc_RNA (1)...(19): siRNA sense strand
cgcaacaucaacaucuaua

SEQ ID NO: 1781764 - RNA, 19 nt, Homo sapiens
  misc_RNA (1)...(19): siRNA sense strand
gcccaggugcugaaacaau

SEQ ID NO: 1781765 - RNA, 19 nt, Homo sapiens
  misc_RNA (1)...(19): siRNA sense strand
cccggaaccucgcaacauc

SEQ ID NO: 1781766 - RNA, 19 nt, Homo sapiens
  misc_RNA (1)...(19): siRNA sense strand
uggaggagaacaacaacuu

SEQ ID NO: 1781767 - RNA, 19 nt, Homo sapiens
  misc_RNA (1)...(19): siRNA sense strand
ggaacuccagguugaacug

SEQ ID NO: 1781768 - RNA, 19 nt, Homo sapiens
  misc_RNA (1)...(19): siRNA sense strand
caaggaacuccagguugaa

SEQ ID NO: 1781769 - RNA, 19 nt, Homo sapiens
  misc_RNA (1)...(19): siRNA sense strand
ggaaaaccgugaggcuaau

SEQ ID NO: 1781770 - RNA, 19 nt, Homo sapiens
  misc_RNA (1)...(19): siRNA sense strand
gcaacaucaacaucuauac

SEQ ID NO: 1781771 - RNA, 19 nt, Homo sapiens
  misc_RNA (1)...(19): siRNA sense strand
gcaagauggcggaggaaaa

SEQ ID NO: 1781772 - RNA, 19 nt, Homo sapiens
  misc_RNA (1)...(19): siRNA sense strand
gaagcaaaucaacaaacgu

SEQ ID NO: 1781773 - RNA, 19 nt, Homo sapiens
  misc_RNA (1)...(19): siRNA sense strand
acaacaacuucagcaagau

SEQ ID NO: 1781774 - RNA, 19 nt, Homo sapiens
  misc_RNA (1)...(19): siRNA sense strand
ccacgaacuuuagcuucuc

SEQ ID NO: 1781775 - RNA, 19 nt, Homo sapiens
  misc_RNA (1)...(19): siRNA sense strand
gaucuugaagccaccaucu

SEQ ID NO: 1781776 - RNA, 19 nt, Homo sapiens
  misc_RNA (1)...(19): siRNA sense strand
uauugaacgucugcaggaa

SEQ ID NO: 1781777 - RNA, 19 nt, Homo sapiens
  misc_RNA (1)...(19): siRNA sense strand
cccacgaacuuuagcuucu

SEQ ID NO: 1781778 - RNA, 19 nt, Homo sapiens
  misc_RNA (1)...(19): siRNA sense strand
ggaggcugcagaggaaaga

SEQ ID NO: 1781779 - RNA, 19 nt, Homo sapiens
  misc_RNA (1)...(19): siRNA sense strand
gaaagacugugguuuguua

SEQ ID NO: 1781780 - RNA, 19 nt, Homo sapiens
  misc_RNA (1)...(19): siRNA sense strand
gaaguuaucucuaauccuu

SEQ ID NO: 1781781 - RNA, 19 nt, Homo sapiens
  misc_RNA (1)...(19): siRNA sense strand
gaagacacguugggaaaua

SEQ ID NO: 1781782 - RNA, 19 nt, Homo sapiens
  misc_RNA (1)...(19): siRNA sense strand
gggauaaguuggaccauua

SEQ ID NO: 1781783 - RNA, 19 nt, Homo sapiens
  misc_RNA (1)...(19): siRNA sense strand
caaaguagaucuagacaga

SEQ ID NO: 1781784 - RNA, 19 nt, Homo sapiens
  misc_RNA (1)...(19): siRNA sense strand
gaacacauaugguauucaa

SEQ ID NO: 1781785 - RNA, 19 nt, Homo sapiens
  misc_RNA (1)...(19): siRNA sense strand
caacauugcugcuguauca

SEQ ID NO: 1781786 - RNA, 19 nt, Homo sapiens
  misc_RNA (1)...(19): siRNA sense strand
ggaauucucuacugcuaua

SEQ ID NO: 1781787 - RNA, 19 nt, Homo sapiens
  misc_RNA (1)...(19): siRNA sense strand
gaaagaggaagcaaauaua

SEQ ID NO: 1781788 - RNA, 19 nt, Homo sapiens
  misc_RNA (1)...(19): siRNA sense strand
caacaugucuucacucugu

SEQ ID NO: 1781789 - RNA, 19 nt, Homo sapiens
  misc_RNA (1)...(19): siRNA sense strand
gagaugaguugcuuuccua

SEQ ID NO: 1781790 - RNA, 19 nt, Homo sapiens
  misc_RNA (1)...(19): siRNA sense strand
gaacuggucauccauauug

SEQ ID NO: 1781791 - RNA, 19 nt, Homo sapiens
  misc_RNA (1)...(19): siRNA sense strand
gaauuucucucuccuuguu

SEQ ID NO: 1781792 - RNA, 19 nt, Homo sapiens
  misc_RNA (1)...(19): siRNA sense strand
ggaaagaggaagcaaauau

SEQ ID NO: 1781793 - RNA, 19 nt, Homo sapiens
  misc_RNA (1)...(19): siRNA sense strand
gaugacccgugucugauua

SEQ ID NO: 1781794 - RNA, 19 nt, Homo sapiens
  misc_RNA (1)...(19): siRNA sense strand
gcugauagaugacauaaag

SEQ ID NO: 1781795 - RNA, 19 nt, Homo sapiens
  misc_RNA (1)...(19): siRNA sense strand
gaaugugaauuucccauau

SEQ ID NO: 1781796 - RNA, 19 nt, Homo sapiens
  misc_RNA (1)...(19): siRNA sense strand
acagaucguuguagaguua

SEQ ID NO: 1781797 - RNA, 19 nt, Homo sapiens
  misc_RNA (1)...(19): siRNA sense strand
caaccaacccugucagaua

SEQ ID NO: 1781798 - RNA, 19 nt, Homo sapiens
  misc_RNA (1)...(19): siRNA sense strand
gcagaaagccaaagacuuc

SEQ ID NO: 1781799 - RNA, 19 nt, Homo sapiens
  misc_RNA (1)...(19): siRNA sense strand
gauaagguccagcaguuua

SEQ ID NO: 1781800 - RNA, 19 nt, Homo sapiens
  misc_RNA (1)...(19): siRNA sense strand
ggacaagcacuuuauauca

SEQ ID NO: 1781801 - RNA, 19 nt, Homo sapiens
  misc_RNA (1)...(19): siRNA sense strand
cagcugacuuuguagaaua

SEQ ID NO: 1781802 - RNA, 19 nt, Homo sapiens
  misc_RNA (1)...(19): siRNA sense strand
gcuagaauuucaagacaaa

SEQ ID NO: 1781803 - RNA, 19 nt, Homo sapiens
  misc_RNA (1)...(19): siRNA sense strand
ucaaacuccucaacaagua

SEQ ID NO: 1781804 - RNA, 19 nt, Homo sapiens
  misc_RNA (1)...(19): siRNA sense strand
gaggaauucucuacugcua

SEQ ID NO: 1781805 - RNA, 19 nt, Homo sapiens
  misc_RNA (1)...(19): siRNA sense strand
caaaggcggugaugaaucu

SEQ ID NO: 1781806 - RNA, 19 nt, Homo sapiens
  misc_RNA (1)...(19): siRNA sense strand
ggacaaacccacccacgaa

SEQ ID NO: 1781807 - RNA, 19 nt, Homo sapiens
  misc_RNA (1)...(19): siRNA sense strand
gaaacucucugggauaagu

SEQ ID NO: 1781808 - RNA, 19 nt, Homo sapiens
  misc_RNA (1)...(19): siRNA sense strand
ggaccauuauuacagaauu

SEQ ID NO: 1781809 - RNA, 19 nt, Homo sapiens
  misc_RNA (1)...(19): siRNA sense strand
ucagauaaaugcaguguca

SEQ ID NO: 1781810 - RNA, 19 nt, Homo sapiens
  misc_RNA (1)...(19): siRNA sense strand
gaagacaauauaagaggua

SEQ ID NO: 1781811 - RNA, 19 nt, Homo sapiens
  misc_RNA (1)...(19): siRNA sense strand
caacuugauuuccuacgaa

SEQ ID NO: 1781812 - RNA, 19 nt, Homo sapiens
  misc_RNA (1)...(19): siRNA sense strand
caucaguuauccugcauuu

SEQ ID NO: 1781813 - RNA, 19 nt, Homo sapiens
  misc_RNA (1)...(19): siRNA sense strand
gauaugaccauguaugaga

SEQ ID NO: 1781814 - RNA, 19 nt, Homo sapiens
  misc_RNA (1)...(19): siRNA sense strand
gacaagcacuuuauaucau

SEQ ID NO: 1781815 - RNA, 19 nt, Homo sapiens
  misc_RNA (1)...(19): siRNA sense strand
gaaaaugacuugguaguuc

SEQ ID NO: 1781816 - RNA, 19 nt, Homo sapiens
  misc_RNA (1)...(19): siRNA sense strand
gaacaggcgucagaucgau

SEQ ID NO: 1781817 - RNA, 19 nt, Homo sapiens
  misc_RNA (1)...(19): siRNA sense strand
ccucaggacuccagauuau

SEQ ID NO: 1781818 - RNA, 19 nt, Homo sapiens
  misc_RNA (1)...(19): siRNA sense strand
gagcuagaauuucaagaca

SEQ ID NO: 1781819 - RNA, 19 nt, Homo sapiens
  misc_RNA (1)...(19): siRNA sense strand
caagccagcugaaauuaag

SEQ ID NO: 1781820 - RNA, 19 nt, Homo sapiens
  misc_RNA (1)...(19): siRNA sense strand
gaagaagaaguuaucucua

SEQ ID NO: 1781821 - RNA, 19 nt, Homo sapiens
  misc_RNA (1)...(19): siRNA sense strand
gaagguaccguuucugauc

SEQ ID NO: 1781822 - RNA, 19 nt, Homo sapiens
  misc_RNA (1)...(19): siRNA sense strand
gauauccuguuguaccaaa

SEQ ID NO: 1781823 - RNA, 19 nt, Homo sapiens
  misc_RNA (1)...(19): siRNA sense strand
cuaagcaaguacaggaaua

SEQ ID NO: 1781824 - RNA, 19 nt, Homo sapiens
  misc_RNA (1)...(19): siRNA sense strand
caagaucacauaauacaga

SEQ ID NO: 1781825 - RNA, 19 nt, Homo sapiens
  misc_RNA (1)...(19): siRNA sense strand
ugacaaaggcggugaugaa

SEQ ID NO: 1781826 - RNA, 19 nt, Homo sapiens
  misc_RNA (1)...(19): siRNA sense strand
cauauuggcuggaucaucu

SEQ ID NO: 1781827 - RNA, 19 nt, Homo sapiens
  misc_RNA (1)...(19): siRNA sense strand
ucaaagauuuaucgcauuc

SEQ ID NO: 1781828 - RNA, 19 nt, Homo sapiens
  misc_RNA (1)...(19): siRNA sense strand
aaacguuucuugagagaug

SEQ ID NO: 1781829 - RNA, 19 nt, Homo sapiens
  misc_RNA (1)...(19): siRNA sense strand
ggucaaagaagcauuuaau

SEQ ID NO: 1781830 - RNA, 19 nt, Homo sapiens
  misc_RNA (1)...(19): siRNA sense strand
uccaagaccugauaaugaa

SEQ ID NO: 1781831 - RNA, 19 nt, Homo sapiens
  misc_RNA (1)...(19): siRNA sense strand
ggacuuguaucagcuguca

SEQ ID NO: 1781832 - RNA, 19 nt, Homo sapiens
  misc_RNA (1)...(19): siRNA sense strand
gcuauuugauggcauugaa

SEQ ID NO: 1781833 - RNA, 19 nt, Homo sapiens
  misc_RNA (1)...(19): siRNA sense strand
caacagaugcuacuacaag

SEQ ID NO: 1781834 - RNA, 19 nt, Homo sapiens
  misc_RNA (1)...(19): siRNA sense strand
gagaaucaagaucacauaa

SEQ ID NO: 1781835 - RNA, 19 nt, Homo sapiens
  misc_RNA (1)...(19): siRNA sense strand
gaagucaagccaaacaaug

SEQ ID NO: 1781836 - RNA, 19 nt, Homo sapiens
  misc_RNA (1)...(19): siRNA sense strand
gagagagucuauagaagag

SEQ ID NO: 1781837 - RNA, 19 nt, Homo sapiens
  misc_RNA (1)...(19): siRNA sense strand
uuacagaauugucaaguca

SEQ ID NO: 1781838 - RNA, 19 nt, Homo sapiens
  misc_RNA (1)...(19): siRNA sense strand
ccgauaagguccagcaguu

SEQ ID NO: 1781839 - RNA, 19 nt, Homo sapiens
  misc_RNA (1)...(19): siRNA sense strand
cauaugguauucaaacuca

SEQ ID NO: 1781840 - RNA, 19 nt, Homo sapiens
  misc_RNA (1)...(19): siRNA sense strand
ggauuuaaacguuucuuga

SEQ ID NO: 1781841 - RNA, 19 nt, Homo sapiens
  misc_RNA (1)...(19): siRNA sense strand
gaugaggucucuuuuauuc

SEQ ID NO: 1781842 - RNA, 19 nt, Homo sapiens
  misc_RNA (1)...(19): siRNA sense strand
guauagaacaucauuggaa

SEQ ID NO: 1781843 - RNA, 19 nt, Homo sapiens
  misc_RNA (1)...(19): siRNA sense strand
ggaacuagaaccucccaaa

SEQ ID NO: 1781844 - RNA, 19 nt, Homo sapiens
  misc_RNA (1)...(19): siRNA sense strand
guagaacccauucagauau

SEQ ID NO: 1781845 - RNA, 19 nt, Homo sapiens
  misc_RNA (1)...(19): siRNA sense strand
gcagcuggguaucaaugaa

SEQ ID NO: 1781846 - RNA, 19 nt, Homo sapiens
  misc_RNA (1)...(19): siRNA sense strand
gcauacaggcgaauugaug

SEQ ID NO: 1781847 - RNA, 19 nt, Homo sapiens
  misc_RNA (1)...(19): siRNA sense strand
ggaacaugcagcuauuuga

SEQ ID NO: 1781848 - RNA, 19 nt, Homo sapiens
  misc_RNA (1)...(19): siRNA sense strand
caagaacuggucauccaua

SEQ ID NO: 1781849 - RNA, 19 nt, Homo sapiens
  misc_RNA (1)...(19): siRNA sense strand
uaaagaaugcgcugcaguu

SEQ ID NO: 1781850 - RNA, 19 nt, Homo sapiens
  misc_RNA (1)...(19): siRNA sense strand
cuacaagccagcugaaauu

SEQ ID NO: 1781851 - RNA, 19 nt, Homo sapiens
  misc_RNA (1)...(19): siRNA sense strand
gcgaauugaugaugacaag

SEQ ID NO: 1781852 - RNA, 19 nt, Homo sapiens
  misc_RNA (1)...(19): siRNA sense strand
guacaugggaaacagguaa

SEQ ID NO: 1781853 - RNA, 19 nt, Homo sapiens
  misc_RNA (1)...(19): siRNA sense strand
uagacagacuggucaaaga

SEQ ID NO: 1781854 - RNA, 19 nt, Homo sapiens
  misc_RNA (1)...(19): siRNA sense strand
gaccauuauuacagaauug

SEQ ID NO: 1781855 - RNA, 19 nt, Homo sapiens
  misc_RNA (1)...(19): siRNA sense strand
ccauuguacuggaaagaaa

SEQ ID NO: 1781856 - RNA, 19 nt, Homo sapiens
  misc_RNA (1)...(19): siRNA sense strand
gaagaaguuaucucuaauc

SEQ ID NO: 1781857 - RNA, 19 nt, Homo sapiens
  misc_RNA (1)...(19): siRNA sense strand
gcauacaggagaugaguug

SEQ ID NO: 1781858 - RNA, 19 nt, Homo sapiens
  misc_RNA (1)...(19): siRNA sense strand
acagacagaucguuguaga

SEQ ID NO: 1781859 - RNA, 19 nt, Homo sapiens
  misc_RNA (1)...(19): siRNA sense strand
ccuaagugauuucuacaug

SEQ ID NO: 1781860 - RNA, 19 nt, Homo sapiens
  misc_RNA (1)...(19): siRNA sense strand
cgaccuaagugauuucuac

SEQ ID NO: 1781861 - RNA, 19 nt, Homo sapiens
  misc_RNA (1)...(19): siRNA sense strand
uaagcuauuugauggcauu

SEQ ID NO: 1781862 - RNA, 19 nt, Homo sapiens
  misc_RNA (1)...(19): siRNA sense strand
ugaggaauauggucaucuu

SEQ ID NO: 1781863 - RNA, 19 nt, Homo sapiens
  misc_RNA (1)...(19): siRNA sense strand
ggaucucgaugcucacaau

SEQ ID NO: 1781864 - RNA, 19 nt, Homo sapiens
  misc_RNA (1)...(19): siRNA sense strand
ccauguaugagaugaauuu

SEQ ID NO: 1781865 - RNA, 19 nt, Homo sapiens
  misc_RNA (1)...(19): siRNA sense strand
aaccaacccugucagauau

SEQ ID NO: 1781866 - RNA, 19 nt, Homo sapiens
  misc_RNA (1)...(19): siRNA sense strand
caaacccacccacgaaauu

SEQ ID NO: 1781867 - RNA, 19 nt, Homo sapiens
  misc_RNA (1)...(19): siRNA sense strand
ggaauauggucaucuucag

SEQ ID NO: 1781868 - RNA, 19 nt, Homo sapiens
  misc_RNA (1)...(19): siRNA sense strand
aaggagaagucaagccaaa

SEQ ID NO: 1781869 - RNA, 19 nt, Homo sapiens
  misc_RNA (1)...(19): siRNA sense strand
agaggaacaugcagcuauu

SEQ ID NO: 1781870 - RNA, 19 nt, Homo sapiens
  misc_RNA (1)...(19): siRNA sense strand
gaucagagucggcuaaagg

SEQ ID NO: 1781871 - RNA, 19 nt, Homo sapiens
  misc_RNA (1)...(19): siRNA sense strand
gaccauguaugagaugaau

SEQ ID NO: 1781872 - RNA, 19 nt, Homo sapiens
  misc_RNA (1)...(19): siRNA sense strand
uaucagcugucaccuagug

SEQ ID NO: 1781873 - RNA, 19 nt, Homo sapiens
  misc_RNA (1)...(19): siRNA sense strand
ugagagagucuauagaaga

SEQ ID NO: 1781874 - RNA, 19 nt, Homo sapiens
  misc_RNA (1)...(19): siRNA sense strand
agaacaacuugauuuccua

SEQ ID NO: 1781875 - RNA, 19 nt, Homo sapiens
  misc_RNA (1)...(19): siRNA sense strand
cauuugcccuggaugauga

SEQ ID NO: 1781876 - RNA, 19 nt, Homo sapiens
  misc_RNA (1)...(19): siRNA sense strand
gaauauggucaucuucaga

SEQ ID NO: 1781877 - RNA, 19 nt, Homo sapiens
  misc_RNA (1)...(19): siRNA sense strand
ggguaucaaugaaaaguua

SEQ ID NO: 1781878 - RNA, 19 nt, Homo sapiens
  misc_RNA (1)...(19): siRNA sense strand
gaccgaguguggcagauuc

SEQ ID NO: 1781879 - RNA, 19 nt, Homo sapiens
  misc_RNA (1)...(19): siRNA sense strand
gggagacucugcugcuaua

SEQ ID NO: 1781880 - RNA, 19 nt, Homo sapiens
  misc_RNA (1)...(19): siRNA sense strand
gcgagaagcuucgagaguu

SEQ ID NO: 1781881 - RNA, 19 nt, Homo sapiens
  misc_RNA (1)...(19): siRNA sense strand
gaccaagaaugcacuguug

SEQ ID NO: 1781882 - RNA, 19 nt, Homo sapiens
  misc_RNA (1)...(19): siRNA sense strand
cgccagagauccuuaaaug

SEQ ID NO: 1781883 - RNA, 19 nt, Homo sapiens
  misc_RNA (1)...(19): siRNA sense strand
gaagguggcccucucugaa

SEQ ID NO: 1781884 - RNA, 19 nt, Homo sapiens
  misc_RNA (1)...(19): siRNA sense strand
agggagagcuguuugacua

SEQ ID NO: 1781885 - RNA, 19 nt, Homo sapiens
  misc_RNA (1)...(19): siRNA sense strand
gaucugaagcccgagaaua

SEQ ID NO: 1781886 - RNA, 19 nt, Homo sapiens
  misc_RNA (1)...(19): siRNA sense strand
gauccgacuuucagauuuc

SEQ ID NO: 1781887 - RNA, 19 nt, Homo sapiens
  misc_RNA (1)...(19): siRNA sense strand
ccaaagaguuuuaccagaa

SEQ ID NO: 1781888 - RNA, 19 nt, Homo sapiens
  misc_RNA (1)...(19): siRNA sense strand
cgagaagcuucgagaguug

SEQ ID NO: 1781889 - RNA, 19 nt, Homo sapiens
  misc_RNA (1)...(19): siRNA sense strand
gagggagacucugcugcua

SEQ ID NO: 1781890 - RNA, 19 nt, Homo sapiens
  misc_RNA (1)...(19): siRNA sense strand
ggaagggagagcuguuuga

SEQ ID NO: 1781891 - RNA, 19 nt, Homo sapiens
  misc_RNA (1)...(19): siRNA sense strand
ucuccuagaugacaauaug

SEQ ID NO: 1781892 - RNA, 19 nt, Homo sapiens
  misc_RNA (1)...(19): siRNA sense strand
gaguuugcggugaagauua

SEQ ID NO: 1781893 - RNA, 19 nt, Homo sapiens
  misc_RNA (1)...(19): siRNA sense strand
ggagagcuguuugacuauc

SEQ ID NO: 1781894 - RNA, 19 nt, Homo sapiens
  misc_RNA (1)...(19): siRNA sense strand
ucauguuccugguguuuga

SEQ ID NO: 1781895 - RNA, 19 nt, Homo sapiens
  misc_RNA (1)...(19): siRNA sense strand
ggaaaccagguccaucaug

SEQ ID NO: 1781896 - RNA, 19 nt, Homo sapiens
  misc_RNA (1)...(19): siRNA sense strand
ccuaagcacccaucgugua

SEQ ID NO: 1781897 - RNA, 19 nt, Homo sapiens
  misc_RNA (1)...(19): siRNA sense strand
ggcggcagauccugauguu

SEQ ID NO: 1781898 - RNA, 19 nt, Homo sapiens
  misc_RNA (1)...(19): siRNA sense strand
caucaucacccucaucgau

SEQ ID NO: 1781899 - RNA, 19 nt, Homo sapiens
  misc_RNA (1)...(19): siRNA sense strand
guacggccacugaccaaga

SEQ ID NO: 1781900 - RNA, 19 nt, Homo sapiens
  misc_RNA (1)...(19): siRNA sense strand
gagagcuguuugacuaucu

SEQ ID NO: 1781901 - RNA, 19 nt, Homo sapiens
  misc_RNA (1)...(19): siRNA sense strand
cagauccgacuuucagauu

SEQ ID NO: 1781902 - RNA, 19 nt, Homo sapiens
  misc_RNA (1)...(19): siRNA sense strand
gaucauggagggccaguac

SEQ ID NO: 1781903 - RNA, 19 nt, Homo sapiens
  misc_RNA (1)...(19): siRNA sense strand
ccagagauccuuaaaugcu

SEQ ID NO: 1781904 - RNA, 19 nt, Homo sapiens
  misc_RNA (1)...(19): siRNA sense strand
agauccgacuuucagauuu

SEQ ID NO: 1781905 - RNA, 19 nt, Homo sapiens
  misc_RNA (1)...(19): siRNA sense strand
gaagccacacggcgagaga

SEQ ID NO: 1781906 - RNA, 19 nt, Homo sapiens
  misc_RNA (1)...(19): siRNA sense strand
gcagauccgacuuucagau

SEQ ID NO: 1781907 - RNA, 19 nt, Homo sapiens
  misc_RNA (1)...(19): siRNA sense strand
gccaguaccaguucaguuc

SEQ ID NO: 1781908 - RNA, 19 nt, Homo sapiens
  misc_RNA (1)...(19): siRNA sense strand
cggugaagauuauggaagu

SEQ ID NO: 1781909 - RNA, 19 nt, Homo sapiens
  misc_RNA (1)...(19): siRNA sense strand
uuaaaugcuccauggauga

SEQ ID NO: 1781910 - RNA, 19 nt, Homo sapiens
  misc_RNA (1)...(19): siRNA sense strand
ucaucacccucaucgauuc

SEQ ID NO: 1781911 - RNA, 19 nt, Homo sapiens
  misc_RNA (1)...(19): siRNA sense strand
gccacgaguuugcggugaa

SEQ ID NO: 1781912 - RNA, 19 nt, Homo sapiens
  misc_RNA (1)...(19): siRNA sense strand
agacucugcugcuauaacu

SEQ ID NO: 1781913 - RNA, 19 nt, Homo sapiens
  misc_RNA (1)...(19): siRNA sense strand
uaaaugcuccauggaugaa

SEQ ID NO: 1781914 - RNA, 19 nt, Homo sapiens
  misc_RNA (1)...(19): siRNA sense strand
gaagauuauggaagugaca

SEQ ID NO: 1781915 - RNA, 19 nt, Homo sapiens
  misc_RNA (1)...(19): siRNA sense strand
caucguguacggccacuga

SEQ ID NO: 1781916 - RNA, 19 nt, Homo sapiens
  misc_RNA (1)...(19): siRNA sense strand
cggcagauccugauguuac

SEQ ID NO: 1781917 - RNA, 19 nt, Homo sapiens
  misc_RNA (1)...(19): siRNA sense strand
caucaugggcccugaagag

SEQ ID NO: 1781918 - RNA, 19 nt, Homo sapiens
  misc_RNA (1)...(19): siRNA sense strand
gagcuacuggccacgaguu

SEQ ID NO: 1781919 - RNA, 19 nt, Homo sapiens
  misc_RNA (1)...(19): siRNA sense strand
cgagucuucuagcuucaug

SEQ ID NO: 1781920 - RNA, 19 nt, Homo sapiens
  misc_RNA (1)...(19): siRNA sense strand
gcaccucaucgacaacugu

SEQ ID NO: 1781921 - RNA, 19 nt, Homo sapiens
  misc_RNA (1)...(19): siRNA sense strand
ggacgaguggcccuaagca

SEQ ID NO: 1781922 - RNA, 19 nt, Homo sapiens
  misc_RNA (1)...(19): siRNA sense strand
ggagggccaguaccaguuc

SEQ ID NO: 1781923 - RNA, 19 nt, Homo sapiens
  misc_RNA (1)...(19): siRNA sense strand
gcggaagggagagcuguuu

SEQ ID NO: 1781924 - RNA, 19 nt, Homo sapiens
  misc_RNA (1)...(19): siRNA sense strand
gcgagagacacacauccuu

SEQ ID NO: 1781925 - RNA, 19 nt, Homo sapiens
  misc_RNA (1)...(19): siRNA sense strand
ugaccaagaaugcacuguu

SEQ ID NO: 1781926 - RNA, 19 nt, Homo sapiens
  misc_RNA (1)...(19): siRNA sense strand
uacggccacugaccaagaa

SEQ ID NO: 1781927 - RNA, 19 nt, Homo sapiens
  misc_RNA (1)...(19): siRNA sense strand
caacauugugcaucgagau

SEQ ID NO: 1781928 - RNA, 19 nt, Homo sapiens
  misc_RNA (1)...(19): siRNA sense strand
agaaguacgacccuaagga

SEQ ID NO: 1781929 - RNA, 19 nt, Homo sapiens
  misc_RNA (1)...(19): siRNA sense strand
aaggaaaccagguccauca

SEQ ID NO: 1781930 - RNA, 19 nt, Homo sapiens
  misc_RNA (1)...(19): siRNA sense strand
auccugauguuacgcauga

SEQ ID NO: 1781931 - RNA, 19 nt, Homo sapiens
  misc_RNA (1)...(19): siRNA sense strand
aauaugcagauccgacuuu

SEQ ID NO: 1781932 - RNA, 19 nt, Homo sapiens
  misc_RNA (1)...(19): siRNA sense strand
ggaugaggccgugcuugug

SEQ ID NO: 1781933 - RNA, 19 nt, Homo sapiens
  misc_RNA (1)...(19): siRNA sense strand
aguuugcggugaagauuau

SEQ ID NO: 1781934 - RNA, 19 nt, Homo sapiens
  misc_RNA (1)...(19): siRNA sense strand
cagcugagcaggcccuaca

SEQ ID NO: 1781935 - RNA, 19 nt, Homo sapiens
  misc_RNA (1)...(19): siRNA sense strand
gaaacccacccaggcuaug

SEQ ID NO: 1781936 - RNA, 19 nt, Homo sapiens
  misc_RNA (1)...(19): siRNA sense strand
cuuggaaccuggcgagaag

SEQ ID NO: 1781937 - RNA, 19 nt, Homo sapiens
  misc_RNA (1)...(19): siRNA sense strand
gugaagauuauggaaguga

SEQ ID NO: 1781938 - RNA, 19 nt, Homo sapiens
  misc_RNA (1)...(19): siRNA sense strand
agaagguggcccucucuga

SEQ ID NO: 1781939 - RNA, 19 nt, Homo sapiens
  misc_RNA (1)...(19): siRNA sense strand
ggugaagauuauggaagug

SEQ ID NO: 1781940 - RNA, 19 nt, Homo sapiens
  misc_RNA (1)...(19): siRNA sense strand
gaagggagagcuguuugac

SEQ ID NO: 1781941 - RNA, 19 nt, Homo sapiens
  misc_RNA (1)...(19): siRNA sense strand
uacgggcacuggguaaaga

SEQ ID NO: 1781942 - RNA, 19 nt, Homo sapiens
  misc_RNA (1)...(19): siRNA sense strand
ugaaacccacccaggcuau

SEQ ID NO: 1781943 - RNA, 19 nt, Homo sapiens
  misc_RNA (1)...(19): siRNA sense strand
aagguggcccucucugaaa

SEQ ID NO: 1781944 - RNA, 19 nt, Homo sapiens
  misc_RNA (1)...(19): siRNA sense strand
cgaguuugcggugaagauu

SEQ ID NO: 1781945 - RNA, 19 nt, Homo sapiens
  misc_RNA (1)...(19): siRNA sense strand
ucacccucaucgauuccua

SEQ ID NO: 1781946 - RNA, 19 nt, Homo sapiens
  misc_RNA (1)...(19): siRNA sense strand
caaagaguuuuaccagaag

SEQ ID NO: 1781947 - RNA, 19 nt, Homo sapiens
  misc_RNA (1)...(19): siRNA sense strand
ccacacggcgagagacaca

SEQ ID NO: 1781948 - RNA, 19 nt, Homo sapiens
  misc_RNA (1)...(19): siRNA sense strand
ccaagaaugcacuguugag

SEQ ID NO: 1781949 - RNA, 19 nt, Homo sapiens
  misc_RNA (1)...(19): siRNA sense strand
guuccagcacugucaaaga

SEQ ID NO: 1781950 - RNA, 19 nt, Homo sapiens
  misc_RNA (1)...(19): siRNA sense strand
cggguucuccugccacuug

SEQ ID NO: 1781951 - RNA, 19 nt, Homo sapiens
  misc_RNA (1)...(19): siRNA sense strand
uagaugacaauaugcagau

SEQ ID NO: 1781952 - RNA, 19 nt, Homo sapiens
  misc_RNA (1)...(19): siRNA sense strand
caugcggucucugcuggaa

SEQ ID NO: 1781953 - RNA, 19 nt, Homo sapiens
  misc_RNA (1)...(19): siRNA sense strand
gggagagcuguuugacuau

SEQ ID NO: 1781954 - RNA, 19 nt, Homo sapiens
  misc_RNA (1)...(19): siRNA sense strand
ggaaauggaugauaaccaa

SEQ ID NO: 1781955 - RNA, 19 nt, Homo sapiens
  misc_RNA (1)...(19): siRNA sense strand
guauggaaauggaugauaa

SEQ ID NO: 1781956 - RNA, 19 nt, Homo sapiens
  misc_RNA (1)...(19): siRNA sense strand
caucaucucugcucucuug

SEQ ID NO: 1781957 - RNA, 19 nt, Homo sapiens
  misc_RNA (1)...(19): siRNA sense strand
gaucuaggcugguuugucu

SEQ ID NO: 1781958 - RNA, 19 nt, Homo sapiens
  misc_RNA (1)...(19): siRNA sense strand
caaaguaugcuucauguau

SEQ ID NO: 1781959 - RNA, 19 nt, Homo sapiens
  misc_RNA (1)...(19): siRNA sense strand
gacuguggcuagccuguua

SEQ ID NO: 1781960 - RNA, 19 nt, Homo sapiens
  misc_RNA (1)...(19): siRNA sense strand
gaaaccagauacgcucaaa

SEQ ID NO: 1781961 - RNA, 19 nt, Homo sapiens
  misc_RNA (1)...(19): siRNA sense strand
gagcuuaugaccaauguaa

SEQ ID NO: 1781962 - RNA, 19 nt, Homo sapiens
  misc_RNA (1)...(19): siRNA sense strand
ggaaaccugugugugauug

SEQ ID NO: 1781963 - RNA, 19 nt, Homo sapiens
  misc_RNA (1)...(19): siRNA sense strand
gaguuuaugucgauguuug

SEQ ID NO: 1781964 - RNA, 19 nt, Homo sapiens
  misc_RNA (1)...(19): siRNA sense strand
gcauuuggccuuccauuau

SEQ ID NO: 1781965 - RNA, 19 nt, Homo sapiens
  misc_RNA (1)...(19): siRNA sense strand
gaacaugaagaucaagaga

SEQ ID NO: 1781966 - RNA, 19 nt, Homo sapiens
  misc_RNA (1)...(19): siRNA sense strand
ucacaaugcuuggaaagga

SEQ ID NO: 1781967 - RNA, 19 nt, Homo sapiens
  misc_RNA (1)...(19): siRNA sense strand
aaaguaugcuucauguaug

SEQ ID NO: 1781968 - RNA, 19 nt, Homo sapiens
  misc_RNA (1)...(19): siRNA sense strand
cuugaaagguguauggaaa

SEQ ID NO: 1781969 - RNA, 19 nt, Homo sapiens
  misc_RNA (1)...(19): siRNA sense strand
gaacuaagacucaaaaucu

SEQ ID NO: 1781970 - RNA, 19 nt, Homo sapiens
  misc_RNA (1)...(19): siRNA sense strand
gccaaaguaugcuucaugu

SEQ ID NO: 1781971 - RNA, 19 nt, Homo sapiens
  misc_RNA (1)...(19): siRNA sense strand
cuggagagcuuaugaccaa

SEQ ID NO: 1781972 - RNA, 19 nt, Homo sapiens
  misc_RNA (1)...(19): siRNA sense strand
cauuuggccuuccauuauu

SEQ ID NO: 1781973 - RNA, 19 nt, Homo sapiens
  misc_RNA (1)...(19): siRNA sense strand
cagagggucuuccugacaa

SEQ ID NO: 1781974 - RNA, 19 nt, Homo sapiens
  misc_RNA (1)...(19): siRNA sense strand
ggaaaugugccucguggau

SEQ ID NO: 1781975 - RNA, 19 nt, Homo sapiens
  misc_RNA (1)...(19): siRNA sense strand
uuaugucgauguuugguaa

SEQ ID NO: 1781976 - RNA, 19 nt, Homo sapiens
  misc_RNA (1)...(19): siRNA sense strand
aaaggaaagccauccauga

SEQ ID NO: 1781977 - RNA, 19 nt, Homo sapiens
  misc_RNA (1)...(19): siRNA sense strand
ugaaagguguauggaaaug

SEQ ID NO: 1781978 - RNA, 19 nt, Homo sapiens
  misc_RNA (1)...(19): siRNA sense strand
gagagcuuaugaccaaugu

SEQ ID NO: 1781979 - RNA, 19 nt, Homo sapiens
  misc_RNA (1)...(19): siRNA sense strand
ggcauuuggccuuccauua

SEQ ID NO: 1781980 - RNA, 19 nt, Homo sapiens
  misc_RNA (1)...(19): siRNA sense strand
ucaugaagguguggaaaug

SEQ ID NO: 1781981 - RNA, 19 nt, Homo sapiens
  misc_RNA (1)...(19): siRNA sense strand
gccaagagccugacaaucg

SEQ ID NO: 1781982 - RNA, 19 nt, Homo sapiens
  misc_RNA (1)...(19): siRNA sense strand
caucaggcaucaugaaggu

SEQ ID NO: 1781983 - RNA, 19 nt, Homo sapiens
  misc_RNA (1)...(19): siRNA sense strand
gcaagugaguauccacaac

SEQ ID NO: 1781984 - RNA, 19 nt, Homo sapiens
  misc_RNA (1)...(19): siRNA sense strand
gcucaaagcaagucacagu

SEQ ID NO: 1781985 - RNA, 19 nt, Homo sapiens
  misc_RNA (1)...(19): siRNA sense strand
gaaauggaugauaaccaaa

SEQ ID NO: 1781986 - RNA, 19 nt, Homo sapiens
  misc_RNA (1)...(19): siRNA sense strand
aaagguguauggaaaugga

SEQ ID NO: 1781987 - RNA, 19 nt, Homo sapiens
  misc_RNA (1)...(19): siRNA sense strand
acaugaagaucaagagaca

SEQ ID NO: 1781988 - RNA, 19 nt, Homo sapiens
  misc_RNA (1)...(19): siRNA sense strand
aaaugugccucguggaugu

SEQ ID NO: 1781989 - RNA, 19 nt, Homo sapiens
  misc_RNA (1)...(19): siRNA sense strand
ccagauacgcucaaagcaa

SEQ ID NO: 1781990 - RNA, 19 nt, Homo sapiens
  misc_RNA (1)...(19): siRNA sense strand
gugggaaaccuguguguga

SEQ ID NO: 1781991 - RNA, 19 nt, Homo sapiens
  misc_RNA (1)...(19): siRNA sense strand
cugaagaguuuaugucgau

SEQ ID NO: 1781992 - RNA, 19 nt, Homo sapiens
  misc_RNA (1)...(19): siRNA sense strand
ccaagagccugacaaucgu

SEQ ID NO: 1781993 - RNA, 19 nt, Homo sapiens
  misc_RNA (1)...(19): siRNA sense strand
ucauagcccugucucaagu

SEQ ID NO: 1781994 - RNA, 19 nt, Homo sapiens
  misc_RNA (1)...(19): siRNA sense strand
cacaaugcuuggaaaggaa

SEQ ID NO: 1781995 - RNA, 19 nt, Homo sapiens
  misc_RNA (1)...(19): siRNA sense strand
caucaucccggcucucuug

SEQ ID NO: 1781996 - RNA, 19 nt, Homo sapiens
  misc_RNA (1)...(19): siRNA sense strand
gagcauugccaucaucucu

SEQ ID NO: 1781997 - RNA, 19 nt, Homo sapiens
  misc_RNA (1)...(19): siRNA sense strand
uagcuuggcuguggguaug

SEQ ID NO: 1781998 - RNA, 19 nt, Homo sapiens
  misc_RNA (1)...(19): siRNA sense strand
aaacugagaaggcagagau

SEQ ID NO: 1781999 - RNA, 19 nt, Homo sapiens
  misc_RNA (1)...(19): siRNA sense strand
caagugacccagccaagca

SEQ ID NO: 1782000 - RNA, 19 nt, Homo sapiens
  misc_RNA (1)...(19): siRNA sense strand
gcugagcauugccaucauc

SEQ ID NO: 1782001 - RNA, 19 nt, Homo sapiens
  misc_RNA (1)...(19): siRNA sense strand
ggagagcuuaugaccaaug

SEQ ID NO: 1782002 - RNA, 19 nt, Homo sapiens
  misc_RNA (1)...(19): siRNA sense strand
cugccggaaugguucuuua

SEQ ID NO: 1782003 - RNA, 19 nt, Homo sapiens
  misc_RNA (1)...(19): siRNA sense strand
ggaaaggaaagccauccau

SEQ ID NO: 1782004 - RNA, 19 nt, Homo sapiens
  misc_RNA (1)...(19): siRNA sense strand
caugauccacucccugauu

SEQ ID NO: 1782005 - RNA, 19 nt, Homo sapiens
  misc_RNA (1)...(19): siRNA sense strand
gaagaguuuaugucgaugu

SEQ ID NO: 1782006 - RNA, 19 nt, Homo sapiens
  misc_RNA (1)...(19): siRNA sense strand
ggccaaaguaugcuucaug

SEQ ID NO: 1782007 - RNA, 19 nt, Homo sapiens
  misc_RNA (1)...(19): siRNA sense strand
ccaaaguaugcuucaugua

SEQ ID NO: 1782008 - RNA, 19 nt, Homo sapiens
  misc_RNA (1)...(19): siRNA sense strand
cagccaagcaagugaguau

SEQ ID NO: 1782009 - RNA, 19 nt, Homo sapiens
  misc_RNA (1)...(19): siRNA sense strand
uuccaucucuucagcaaau

SEQ ID NO: 1782010 - RNA, 19 nt, Homo sapiens
  misc_RNA (1)...(19): siRNA sense strand
gggaaaccugugugugauu

SEQ ID NO: 1782011 - RNA, 19 nt, Homo sapiens
  misc_RNA (1)...(19): siRNA sense strand
aagugaguauccacaacua

SEQ ID NO: 1782012 - RNA, 19 nt, Homo sapiens
  misc_RNA (1)...(19): siRNA sense strand
agcuguggcugaagaguuu

SEQ ID NO: 1782013 - RNA, 19 nt, Homo sapiens
  misc_RNA (1)...(19): siRNA sense strand
aagaguuuaugucgauguu

SEQ ID NO: 1782014 - RNA, 19 nt, Homo sapiens
  misc_RNA (1)...(19): siRNA sense strand
aacaccagcuggcaacuca

SEQ ID NO: 1782015 - RNA, 19 nt, Homo sapiens
  misc_RNA (1)...(19): siRNA sense strand
ggaaggcuugaaaggugua

SEQ ID NO: 1782016 - RNA, 19 nt, Homo sapiens
  misc_RNA (1)...(19): siRNA sense strand
caagguuccaucuccagaa

SEQ ID NO: 1782017 - RNA, 19 nt, Homo sapiens
  misc_RNA (1)...(19): siRNA sense strand
ucccauccuuccugacgua

SEQ ID NO: 1782018 - RNA, 19 nt, Homo sapiens
  misc_RNA (1)...(19): siRNA sense strand
ccggaaugguucuuuagca

SEQ ID NO: 1782019 - RNA, 19 nt, Homo sapiens
  misc_RNA (1)...(19): siRNA sense strand
gggaacaugaagaucaaga

SEQ ID NO: 1782020 - RNA, 19 nt, Homo sapiens
  misc_RNA (1)...(19): siRNA sense strand
gcaccaucaggcaucauga

SEQ ID NO: 1782021 - RNA, 19 nt, Homo sapiens
  misc_RNA (1)...(19): siRNA sense strand
aaggaaagccauccaugau

SEQ ID NO: 1782022 - RNA, 19 nt, Homo sapiens
  misc_RNA (1)...(19): siRNA sense strand
ugacugguuuauccacaca

SEQ ID NO: 1782023 - RNA, 19 nt, Homo sapiens
  misc_RNA (1)...(19): siRNA sense strand
cugggaacaugaagaucaa

SEQ ID NO: 1782024 - RNA, 19 nt, Homo sapiens
  misc_RNA (1)...(19): siRNA sense strand
gaaagguguauggaaaugg

SEQ ID NO: 1782025 - RNA, 19 nt, Homo sapiens
  misc_RNA (1)...(19): siRNA sense strand
gccaucaucucugcucucu

SEQ ID NO: 1782026 - RNA, 19 nt, Homo sapiens
  misc_RNA (1)...(19): siRNA sense strand
aagguuccaucuccagaau

SEQ ID NO: 1782027 - RNA, 19 nt, Homo sapiens
  misc_RNA (1)...(19): siRNA sense strand
ggcagagauucccauccuu

SEQ ID NO: 1782028 - RNA, 19 nt, Homo sapiens
  misc_RNA (1)...(19): siRNA sense strand
gcaaagggaaaacugagaa

SEQ ID NO: 1782029 - RNA, 19 nt, Homo sapiens
  misc_RNA (1)...(19): siRNA sense strand
cagcauccauaccagaaaa

SEQ ID NO: 1782030 - RNA, 19 nt, Homo sapiens
  misc_RNA (1)...(19): siRNA sense strand
ggacuggagaaccaucauc

SEQ ID NO: 1782031 - RNA, 19 nt, Homo sapiens
  misc_RNA (1)...(19): siRNA sense strand
ggaacaugaagaucaagag

SEQ ID NO: 1782032 - RNA, 19 nt, Homo sapiens
  misc_RNA (1)...(19): siRNA sense strand
ugauuggcauccuccuuca

SEQ ID NO: 1782033 - RNA, 19 nt, Homo sapiens
  misc_RNA (1)...(19): siRNA sense strand
caagugaguauccacaacu

SEQ ID NO: 1782034 - RNA, 19 nt, Homo sapiens
  misc_RNA (1)...(19): siRNA sense strand
ccugggaacaugaagauca

SEQ ID NO: 1782035 - RNA, 19 nt, Homo sapiens
  misc_RNA (1)...(19): siRNA sense strand
cauccuuccugacguagag

SEQ ID NO: 1782036 - RNA, 19 nt, Homo sapiens
  misc_RNA (1)...(19): siRNA sense strand
gcuugaaagguguauggaa

SEQ ID NO: 1782037 - RNA, 19 nt, Homo sapiens
  misc_RNA (1)...(19): siRNA sense strand
uucagcaaauccucucauu

SEQ ID NO: 1782038 - RNA, 19 nt, Homo sapiens
  misc_RNA (1)...(19): siRNA sense strand
ggcauccuccuucacaaug

SEQ ID NO: 1782039 - RNA, 19 nt, Homo sapiens
  misc_RNA (1)...(19): siRNA sense strand
ggacuguggcuagccuguu

SEQ ID NO: 1782040 - RNA, 19 nt, Homo sapiens
  misc_RNA (1)...(19): siRNA sense strand
gugaguauccacaacuaca

SEQ ID NO: 1782041 - RNA, 19 nt, Homo sapiens
  misc_RNA (1)...(19): siRNA sense strand
cagccaagagccugacaau

SEQ ID NO: 1782042 - RNA, 19 nt, Homo sapiens
  misc_RNA (1)...(19): siRNA sense strand
acaggacaaugacccuauc

SEQ ID NO: 1782043 - RNA, 19 nt, Homo sapiens
  misc_RNA (1)...(19): siRNA sense strand
gggucuuccugacaagguu

SEQ ID NO: 1782044 - RNA, 19 nt, Homo sapiens
  misc_RNA (1)...(19): siRNA sense strand
cgaggaacuaagacucaaa

SEQ ID NO: 1782045 - RNA, 19 nt, Homo sapiens
  misc_RNA (1)...(19): siRNA sense strand
ugggaaaccugugugugau

SEQ ID NO: 1782046 - RNA, 19 nt, Homo sapiens
  misc_RNA (1)...(19): siRNA sense strand
ccaagcaagugaguaucca

SEQ ID NO: 1782047 - RNA, 19 nt, Homo sapiens
  misc_RNA (1)...(19): siRNA sense strand
ggaaauggaugauaaccaa

SEQ ID NO: 1782048 - RNA, 19 nt, Homo sapiens
  misc_RNA (1)...(19): siRNA sense strand
guauggaaauggaugauaa

SEQ ID NO: 1782049 - RNA, 19 nt, Homo sapiens
  misc_RNA (1)...(19): siRNA sense strand
caucaucucugcucucuug

SEQ ID NO: 1782050 - RNA, 19 nt, Homo sapiens
  misc_RNA (1)...(19): siRNA sense strand
gaucuaggcugguuugucu

SEQ ID NO: 1782051 - RNA, 19 nt, Homo sapiens
  misc_RNA (1)...(19): siRNA sense strand
caaaguaugcuucauguau

SEQ ID NO: 1782052 - RNA, 19 nt, Homo sapiens
  misc_RNA (1)...(19): siRNA sense strand
gacuguggcuagccuguua

SEQ ID NO: 1782053 - RNA, 19 nt, Homo sapiens
  misc_RNA (1)...(19): siRNA sense strand
gaaaccagauacgcucaaa

SEQ ID NO: 1782054 - RNA, 19 nt, Homo sapiens
  misc_RNA (1)...(19): siRNA sense strand
gagcuuaugaccaauguaa

SEQ ID NO: 1782055 - RNA, 19 nt, Homo sapiens
  misc_RNA (1)...(19): siRNA sense strand
ggaaaccugugugugauug

SEQ ID NO: 1782056 - RNA, 19 nt, Homo sapiens
  misc_RNA (1)...(19): siRNA sense strand
gaguuuaugucgauguuug

SEQ ID NO: 1782057 - RNA, 19 nt, Homo sapiens
  misc_RNA (1)...(19): siRNA sense strand
gcauuuggccuuccauuau

SEQ ID NO: 1782058 - RNA, 19 nt, Homo sapiens
  misc_RNA (1)...(19): siRNA sense strand
gaacaugaagaucaagaga

SEQ ID NO: 1782059 - RNA, 19 nt, Homo sapiens
  misc_RNA (1)...(19): siRNA sense strand
ucacaaugcuuggaaagga

SEQ ID NO: 1782060 - RNA, 19 nt, Homo sapiens
  misc_RNA (1)...(19): siRNA sense strand
aaaguaugcuucauguaug

SEQ ID NO: 1782061 - RNA, 19 nt, Homo sapiens
  misc_RNA (1)...(19): siRNA sense strand
cuugaaagguguauggaaa

SEQ ID NO: 1782062 - RNA, 19 nt, Homo sapiens
  misc_RNA (1)...(19): siRNA sense strand
gaacuaagacucaaaaucu

SEQ ID NO: 1782063 - RNA, 19 nt, Homo sapiens
  misc_RNA (1)...(19): siRNA sense strand
gccaaaguaugcuucaugu

SEQ ID NO: 1782064 - RNA, 19 nt, Homo sapiens
  misc_RNA (1)...(19): siRNA sense strand
cuggagagcuuaugaccaa

SEQ ID NO: 1782065 - RNA, 19 nt, Homo sapiens
  misc_RNA (1)...(19): siRNA sense strand
cauuuggccuuccauuauu

SEQ ID NO: 1782066 - RNA, 19 nt, Homo sapiens
  misc_RNA (1)...(19): siRNA sense strand
cagagggucuuccugacaa

SEQ ID NO: 1782067 - RNA, 19 nt, Homo sapiens
  misc_RNA (1)...(19): siRNA sense strand
ggaaaugugccucguggau

SEQ ID NO: 1782068 - RNA, 19 nt, Homo sapiens
  misc_RNA (1)...(19): siRNA sense strand
uuaugucgauguuugguaa

SEQ ID NO: 1782069 - RNA, 19 nt, Homo sapiens
  misc_RNA (1)...(19): siRNA sense strand
aaaggaaagccauccauga

SEQ ID NO: 1782070 - RNA, 19 nt, Homo sapiens
  misc_RNA (1)...(19): siRNA sense strand
ugaaagguguauggaaaug

SEQ ID NO: 1782071 - RNA, 19 nt, Homo sapiens
  misc_RNA (1)...(19): siRNA sense strand
gagagcuuaugaccaaugu

SEQ ID NO: 1782072 - RNA, 19 nt, Homo sapiens
  misc_RNA (1)...(19): siRNA sense strand
ggcauuuggccuuccauua

SEQ ID NO: 1782073 - RNA, 19 nt, Homo sapiens
  misc_RNA (1)...(19): siRNA sense strand
ucaugaagguguggaaaug

SEQ ID NO: 1782074 - RNA, 19 nt, Homo sapiens
  misc_RNA (1)...(19): siRNA sense strand
gccaagagccugacaaucg

SEQ ID NO: 1782075 - RNA, 19 nt, Homo sapiens
  misc_RNA (1)...(19): siRNA sense strand
caucaggcaucaugaaggu

SEQ ID NO: 1782076 - RNA, 19 nt, Homo sapiens
  misc_RNA (1)...(19): siRNA sense strand
gcaagugaguauccacaac

SEQ ID NO: 1782077 - RNA, 19 nt, Homo sapiens
  misc_RNA (1)...(19): siRNA sense strand
gcucaaagcaagucacagu

SEQ ID NO: 1782078 - RNA, 19 nt, Homo sapiens
  misc_RNA (1)...(19): siRNA sense strand
gaaauggaugauaaccaaa

SEQ ID NO: 1782079 - RNA, 19 nt, Homo sapiens
  misc_RNA (1)...(19): siRNA sense strand
aaagguguauggaaaugga

SEQ ID NO: 1782080 - RNA, 19 nt, Homo sapiens
  misc_RNA (1)...(19): siRNA sense strand
acaugaagaucaagagaca

SEQ ID NO: 1782081 - RNA, 19 nt, Homo sapiens
  misc_RNA (1)...(19): siRNA sense strand
aaaugugccucguggaugu

SEQ ID NO: 1782082 - RNA, 19 nt, Homo sapiens
  misc_RNA (1)...(19): siRNA sense strand
ccagauacgcucaaagcaa

SEQ ID NO: 1782083 - RNA, 19 nt, Homo sapiens
  misc_RNA (1)...(19): siRNA sense strand
gugggaaaccuguguguga

SEQ ID NO: 1782084 - RNA, 19 nt, Homo sapiens
  misc_RNA (1)...(19): siRNA sense strand
cugaagaguuuaugucgau

SEQ ID NO: 1782085 - RNA, 19 nt, Homo sapiens
  misc_RNA (1)...(19): siRNA sense strand
ccaagagccugacaaucgu

SEQ ID NO: 1782086 - RNA, 19 nt, Homo sapiens
  misc_RNA (1)...(19): siRNA sense strand
ucauagcccugucucaagu

SEQ ID NO: 1782087 - RNA, 19 nt, Homo sapiens
  misc_RNA (1)...(19): siRNA sense strand
cacaaugcuuggaaaggaa

SEQ ID NO: 1782088 - RNA, 19 nt, Homo sapiens
  misc_RNA (1)...(19): siRNA sense strand
caucaucccggcucucuug

SEQ ID NO: 1782089 - RNA, 19 nt, Homo sapiens
  misc_RNA (1)...(19): siRNA sense strand
gagcauugccaucaucucu

SEQ ID NO: 1782090 - RNA, 19 nt, Homo sapiens
  misc_RNA (1)...(19): siRNA sense strand
uagcuuggcuguggguaug

SEQ ID NO: 1782091 - RNA, 19 nt, Homo sapiens
  misc_RNA (1)...(19): siRNA sense strand
aaacugagaaggcagagau

SEQ ID NO: 1782092 - RNA, 19 nt, Homo sapiens
  misc_RNA (1)...(19): siRNA sense strand
caagugacccagccaagca

SEQ ID NO: 1782093 - RNA, 19 nt, Homo sapiens
  misc_RNA (1)...(19): siRNA sense strand
gcugagcauugccaucauc

SEQ ID NO: 1782094 - RNA, 19 nt, Homo sapiens
  misc_RNA (1)...(19): siRNA sense strand
ggagagcuuaugaccaaug

SEQ ID NO: 1782095 - RNA, 19 nt, Homo sapiens
  misc_RNA (1)...(19): siRNA sense strand
cugccggaaugguucuuua

SEQ ID NO: 1782096 - RNA, 19 nt, Homo sapiens
  misc_RNA (1)...(19): siRNA sense strand
ggaaaggaaagccauccau

SEQ ID NO: 1782097 - RNA, 19 nt, Homo sapiens
  misc_RNA (1)...(19): siRNA sense strand
caugauccacucccugauu

SEQ ID NO: 1782098 - RNA, 19 nt, Homo sapiens
  misc_RNA (1)...(19): siRNA sense strand
gaagaguuuaugucgaugu

SEQ ID NO: 1782099 - RNA, 19 nt, Homo sapiens
  misc_RNA (1)...(19): siRNA sense strand
ggccaaaguaugcuucaug

SEQ ID NO: 1782100 - RNA, 19 nt, Homo sapiens
  misc_RNA (1)...(19): siRNA sense strand
ccaaaguaugcuucaugua

SEQ ID NO: 1782101 - RNA, 19 nt, Homo sapiens
  misc_RNA (1)...(19): siRNA sense strand
cagccaagcaagugaguau

SEQ ID NO: 1782102 - RNA, 19 nt, Homo sapiens
  misc_RNA (1)...(19): siRNA sense strand
uuccaucucuucagcaaau

SEQ ID NO: 1782103 - RNA, 19 nt, Homo sapiens
  misc_RNA (1)...(19): siRNA sense strand
gggaaaccugugugugauu

SEQ ID NO: 1782104 - RNA, 19 nt, Homo sapiens
  misc_RNA (1)...(19): siRNA sense strand
aagugaguauccacaacua

SEQ ID NO: 1782105 - RNA, 19 nt, Homo sapiens
  misc_RNA (1)...(19): siRNA sense strand
agcuguggcugaagaguuu

SEQ ID NO: 1782106 - RNA, 19 nt, Homo sapiens
  misc_RNA (1)...(19): siRNA sense strand
aagaguuuaugucgauguu

SEQ ID NO: 1782107 - RNA, 19 nt, Homo sapiens
  misc_RNA (1)...(19): siRNA sense strand
aacaccagcuggcaacuca

SEQ ID NO: 1782108 - RNA, 19 nt, Homo sapiens
  misc_RNA (1)...(19): siRNA sense strand
ggaaggcuugaaaggugua

SEQ ID NO: 1782109 - RNA, 19 nt, Homo sapiens
  misc_RNA (1)...(19): siRNA sense strand
caagguuccaucuccagaa

SEQ ID NO: 1782110 - RNA, 19 nt, Homo sapiens
  misc_RNA (1)...(19): siRNA sense strand
ucccauccuuccugacgua

SEQ ID NO: 1782111 - RNA, 19 nt, Homo sapiens
  misc_RNA (1)...(19): siRNA sense strand
ccggaaugguucuuuagca

SEQ ID NO: 1782112 - RNA, 19 nt, Homo sapiens
  misc_RNA (1)...(19): siRNA sense strand
gggaacaugaagaucaaga

SEQ ID NO: 1782113 - RNA, 19 nt, Homo sapiens
  misc_RNA (1)...(19): siRNA sense strand
gcaccaucaggcaucauga

SEQ ID NO: 1782114 - RNA, 19 nt, Homo sapiens
  misc_RNA (1)...(19): siRNA sense strand
aaggaaagccauccaugau

SEQ ID NO: 1782115 - RNA, 19 nt, Homo sapiens
  misc_RNA (1)...(19): siRNA sense strand
ugacugguuuauccacaca

SEQ ID NO: 1782116 - RNA, 19 nt, Homo sapiens
  misc_RNA (1)...(19): siRNA sense strand
cugggaacaugaagaucaa

SEQ ID NO: 1782117 - RNA, 19 nt, Homo sapiens
  misc_RNA (1)...(19): siRNA sense strand
gaaagguguauggaaaugg

SEQ ID NO: 1782118 - RNA, 19 nt, Homo sapiens
  misc_RNA (1)...(19): siRNA sense strand
gccaucaucucugcucucu

SEQ ID NO: 1782119 - RNA, 19 nt, Homo sapiens
  misc_RNA (1)...(19): siRNA sense strand
aagguuccaucuccagaau

SEQ ID NO: 1782120 - RNA, 19 nt, Homo sapiens
  misc_RNA (1)...(19): siRNA sense strand
ggcagagauucccauccuu

SEQ ID NO: 1782121 - RNA, 19 nt, Homo sapiens
  misc_RNA (1)...(19): siRNA sense strand
gcaaagggaaaacugagaa

SEQ ID NO: 1782122 - RNA, 19 nt, Homo sapiens
  misc_RNA (1)...(19): siRNA sense strand
cagcauccauaccagaaaa

SEQ ID NO: 1782123 - RNA, 19 nt, Homo sapiens
  misc_RNA (1)...(19): siRNA sense strand
ggacuggagaaccaucauc

SEQ ID NO: 1782124 - RNA, 19 nt, Homo sapiens
  misc_RNA (1)...(19): siRNA sense strand
ggaacaugaagaucaagag

SEQ ID NO: 1782125 - RNA, 19 nt, Homo sapiens
  misc_RNA (1)...(19): siRNA sense strand
ugauuggcauccuccuuca

SEQ ID NO: 1782126 - RNA, 19 nt, Homo sapiens
  misc_RNA (1)...(19): siRNA sense strand
caagugaguauccacaacu

SEQ ID NO: 1782127 - RNA, 19 nt, Homo sapiens
  misc_RNA (1)...(19): siRNA sense strand
ccugggaacaugaagauca

SEQ ID NO: 1782128 - RNA, 19 nt, Homo sapiens
  misc_RNA (1)...(19): siRNA sense strand
cauccuuccugacguagag

SEQ ID NO: 1782129 - RNA, 19 nt, Homo sapiens
  misc_RNA (1)...(19): siRNA sense strand
gcuugaaagguguauggaa

SEQ ID NO: 1782130 - RNA, 19 nt, Homo sapiens
  misc_RNA (1)...(19): siRNA sense strand
uucagcaaauccucucauu

SEQ ID NO: 1782131 - RNA, 19 nt, Homo sapiens
  misc_RNA (1)...(19): siRNA sense strand
ggcauccuccuucacaaug

SEQ ID NO: 1782132 - RNA, 19 nt, Homo sapiens
  misc_RNA (1)...(19): siRNA sense strand
ggacuguggcuagccuguu

SEQ ID NO: 1782133 - RNA, 19 nt, Homo sapiens
  misc_RNA (1)...(19): siRNA sense strand
gugaguauccacaacuaca

SEQ ID NO: 1782134 - RNA, 19 nt, Homo sapiens
  misc_RNA (1)...(19): siRNA sense strand
cagccaagagccugacaau

SEQ ID NO: 1782135 - RNA, 19 nt, Homo sapiens
  misc_RNA (1)...(19): siRNA sense strand
acaggacaaugacccuauc

SEQ ID NO: 1782136 - RNA, 19 nt, Homo sapiens
  misc_RNA (1)...(19): siRNA sense strand
gggucuuccugacaagguu

SEQ ID NO: 1782137 - RNA, 19 nt, Homo sapiens
  misc_RNA (1)...(19): siRNA sense strand
cgaggaacuaagacucaaa

SEQ ID NO: 1782138 - RNA, 19 nt, Homo sapiens
  misc_RNA (1)...(19): siRNA sense strand
ugggaaaccugugugugau

SEQ ID NO: 1782139 - RNA, 19 nt, Homo sapiens
  misc_RNA (1)...(19): siRNA sense strand
ccaagcaagugaguaucca

SEQ ID NO: 1782140 - RNA, 19 nt, Homo sapiens
  misc_RNA (1)...(19): siRNA sense strand
ggagaacgcugccuacuuu

SEQ ID NO: 1782141 - RNA, 19 nt, Homo sapiens
  misc_RNA (1)...(19): siRNA sense strand
gcaaggagaugucagugua

SEQ ID NO: 1782142 - RNA, 19 nt, Homo sapiens
  misc_RNA (1)...(19): siRNA sense strand
gcaagacggugaccauuug

SEQ ID NO: 1782143 - RNA, 19 nt, Homo sapiens
  misc_RNA (1)...(19): siRNA sense strand
gcacaucagugaccuguau

SEQ ID NO: 1782144 - RNA, 19 nt, Homo sapiens
  misc_RNA (1)...(19): siRNA sense strand
gcagaucucucucuuccaa

SEQ ID NO: 1782145 - RNA, 19 nt, Homo sapiens
  misc_RNA (1)...(19): siRNA sense strand
gagcuaauguggcugaaug

SEQ ID NO: 1782146 - RNA, 19 nt, Homo sapiens
  misc_RNA (1)...(19): siRNA sense strand
ggaagcagaucaccaugga

SEQ ID NO: 1782147 - RNA, 19 nt, Homo sapiens
  misc_RNA (1)...(19): siRNA sense strand
gcacucaucuugcgugaca

SEQ ID NO: 1782148 - RNA, 19 nt, Homo sapiens
  misc_RNA (1)...(19): siRNA sense strand
ccacgcagguguacacuga

SEQ ID NO: 1782149 - RNA, 19 nt, Homo sapiens
  misc_RNA (1)...(19): siRNA sense strand
ucagugaccuguaugaaga

SEQ ID NO: 1782150 - RNA, 19 nt, Homo sapiens
  misc_RNA (1)...(19): siRNA sense strand
caaagacccugcccaaugg

SEQ ID NO: 1782151 - RNA, 19 nt, Homo sapiens
  misc_RNA (1)...(19): siRNA sense strand
cagagaagaugcucaagga

SEQ ID NO: 1782152 - RNA, 19 nt, Homo sapiens
  misc_RNA (1)...(19): siRNA sense strand
uaauguggcugaaugagaa

SEQ ID NO: 1782153 - RNA, 19 nt, Homo sapiens
  misc_RNA (1)...(19): siRNA sense strand
ggaacagggugcacaggaa

SEQ ID NO: 1782154 - RNA, 19 nt, Homo sapiens
  misc_RNA (1)...(19): siRNA sense strand
aggaacagcugaacgagua

SEQ ID NO: 1782155 - RNA, 19 nt, Homo sapiens
  misc_RNA (1)...(19): siRNA sense strand
acaaugcccugaagaaaga

SEQ ID NO: 1782156 - RNA, 19 nt, Homo sapiens
  misc_RNA (1)...(19): siRNA sense strand
ggacaaucauucugcacuu

SEQ ID NO: 1782157 - RNA, 19 nt, Homo sapiens
  misc_RNA (1)...(19): siRNA sense strand
ggaggaggcugagaagaug

SEQ ID NO: 1782158 - RNA, 19 nt, Homo sapiens
  misc_RNA (1)...(19): siRNA sense strand
gcaaggaggccgagcaaga

SEQ ID NO: 1782159 - RNA, 19 nt, Homo sapiens
  misc_RNA (1)...(19): siRNA sense strand
gaaccgcgcacucaucuug

SEQ ID NO: 1782160 - RNA, 19 nt, Homo sapiens
  misc_RNA (1)...(19): siRNA sense strand
cuaccaggcucucaagaaa

SEQ ID NO: 1782161 - RNA, 19 nt, Homo sapiens
  misc_RNA (1)...(19): siRNA sense strand
ggcagaagcugaguaucua

SEQ ID NO: 1782162 - RNA, 19 nt, Homo sapiens
  misc_RNA (1)...(19): siRNA sense strand
gacgagaaguccaucauca

SEQ ID NO: 1782163 - RNA, 19 nt, Homo sapiens
  misc_RNA (1)...(19): siRNA sense strand
ugaccaagcugcagaugga

SEQ ID NO: 1782164 - RNA, 19 nt, Homo sapiens
  misc_RNA (1)...(19): siRNA sense strand
ggagaagcauaagaaauuc

SEQ ID NO: 1782165 - RNA, 19 nt, Homo sapiens
  misc_RNA (1)...(19): siRNA sense strand
ccaaggaggccgacaagaa

SEQ ID NO: 1782166 - RNA, 19 nt, Homo sapiens
  misc_RNA (1)...(19): siRNA sense strand
cagagaagcugcgcaagga

SEQ ID NO: 1782167 - RNA, 19 nt, Homo sapiens
  misc_RNA (1)...(19): siRNA sense strand
ggagcuggcugaacaagag

SEQ ID NO: 1782168 - RNA, 19 nt, Homo sapiens
  misc_RNA (1)...(19): siRNA sense strand
ggccucaucuggacaauca

SEQ ID NO: 1782169 - RNA, 19 nt, Homo sapiens
  misc_RNA (1)...(19): siRNA sense strand
gcaagacgacggucaagga

SEQ ID NO: 1782170 - RNA, 19 nt, Homo sapiens
  misc_RNA (1)...(19): siRNA sense strand
agaagaugcucaaggagaa

SEQ ID NO: 1782171 - RNA, 19 nt, Homo sapiens
  misc_RNA (1)...(19): siRNA sense strand
gagaaggucaucaagauuc

SEQ ID NO: 1782172 - RNA, 19 nt, Homo sapiens
  misc_RNA (1)...(19): siRNA sense strand
ccaagugggucaacaagca

SEQ ID NO: 1782173 - RNA, 19 nt, Homo sapiens
  misc_RNA (1)...(19): siRNA sense strand
ucgaggaggucaccaagaa

SEQ ID NO: 1782174 - RNA, 19 nt, Homo sapiens
  misc_RNA (1)...(19): siRNA sense strand
uggagaagcauaagaaauu

SEQ ID NO: 1782175 - RNA, 19 nt, Homo sapiens
  misc_RNA (1)...(19): siRNA sense strand
ggaggaggcugaggcacaa

SEQ ID NO: 1782176 - RNA, 19 nt, Homo sapiens
  misc_RNA (1)...(19): siRNA sense strand
aacaagagcuggagaagca

SEQ ID NO: 1782177 - RNA, 19 nt, Homo sapiens
  misc_RNA (1)...(19): siRNA sense strand
ggaggaggcugugcguaug

SEQ ID NO: 1782178 - RNA, 19 nt, Homo sapiens
  misc_RNA (1)...(19): siRNA sense strand
gaagcugaguaucuacaau

SEQ ID NO: 1782179 - RNA, 19 nt, Homo sapiens
  misc_RNA (1)...(19): siRNA sense strand
augagaagcugaguguuua

SEQ ID NO: 1782180 - RNA, 19 nt, Homo sapiens
  misc_RNA (1)...(19): siRNA sense strand
gggaagacgugcgccacua

SEQ ID NO: 1782181 - RNA, 19 nt, Homo sapiens
  misc_RNA (1)...(19): siRNA sense strand
uggagaagaucaucaagau

SEQ ID NO: 1782182 - RNA, 19 nt, Homo sapiens
  misc_RNA (1)...(19): siRNA sense strand
caacaugaccgccaagaag

SEQ ID NO: 1782183 - RNA, 19 nt, Homo sapiens
  misc_RNA (1)...(19): siRNA sense strand
ggaaccagcgccuguaugu

SEQ ID NO: 1782184 - RNA, 19 nt, Homo sapiens
  misc_RNA (1)...(19): siRNA sense strand
ggagaaggucaucaagauu

SEQ ID NO: 1782185 - RNA, 19 nt, Homo sapiens
  misc_RNA (1)...(19): siRNA sense strand
guacaagggccaccucuca

SEQ ID NO: 1782186 - RNA, 19 nt, Homo sapiens
  misc_RNA (1)...(19): siRNA sense strand
agaaguccaucaucaccua

SEQ ID NO: 1782187 - RNA, 19 nt, Homo sapiens
  misc_RNA (1)...(19): siRNA sense strand
acaaagacccugcccaaug

SEQ ID NO: 1782188 - RNA, 19 nt, Homo sapiens
  misc_RNA (1)...(19): siRNA sense strand
uggagaaggucaucaagau

SEQ ID NO: 1782189 - RNA, 19 nt, Homo sapiens
  misc_RNA (1)...(19): siRNA sense strand
cugcaucgcuggugucuuc

SEQ ID NO: 1782190 - RNA, 19 nt, Homo sapiens
  misc_RNA (1)...(19): siRNA sense strand
gaggaugcguuuccacaag

SEQ ID NO: 1782191 - RNA, 19 nt, Homo sapiens
  misc_RNA (1)...(19): siRNA sense strand
caagaagggcauuugaaga

SEQ ID NO: 1782192 - RNA, 19 nt, Homo sapiens
  misc_RNA (1)...(19): siRNA sense strand
gggaucgugugcagaagaa

SEQ ID NO: 1782193 - RNA, 19 nt, Homo sapiens
  misc_RNA (1)...(19): siRNA sense strand
ucaucgagaucauugagaa

SEQ ID NO: 1782194 - RNA, 19 nt, Homo sapiens
  misc_RNA (1)...(19): siRNA sense strand
aggagaagguguccaucua

SEQ ID NO: 1782195 - RNA, 19 nt, Homo sapiens
  misc_RNA (1)...(19): siRNA sense strand
ucgcagggcuguugcugaa

SEQ ID NO: 1782196 - RNA, 19 nt, Homo sapiens
  misc_RNA (1)...(19): siRNA sense strand
gcaccaguccaucgaagaa

SEQ ID NO: 1782197 - RNA, 19 nt, Homo sapiens
  misc_RNA (1)...(19): siRNA sense strand
ccaagggcaucuaccaauc

SEQ ID NO: 1782198 - RNA, 19 nt, Homo sapiens
  misc_RNA (1)...(19): siRNA sense strand
gggacacacugcccuggaa

SEQ ID NO: 1782199 - RNA, 19 nt, Homo sapiens
  misc_RNA (1)...(19): siRNA sense strand
gaggagcgcgugcagaaga

SEQ ID NO: 1782200 - RNA, 19 nt, Homo sapiens
  misc_RNA (1)...(19): siRNA sense strand
gcaaagcuuccucucugaa

SEQ ID NO: 1782201 - RNA, 19 nt, Homo sapiens
  misc_RNA (1)...(19): siRNA sense strand
agaagggccugauccugaa

SEQ ID NO: 1782202 - RNA, 19 nt, Homo sapiens
  misc_RNA (1)...(19): siRNA sense strand
gacaagaagggcauuugaa

SEQ ID NO: 1782203 - RNA, 19 nt, Homo sapiens
  misc_RNA (1)...(19): siRNA sense strand
uccacaagcugcagaaugu

SEQ ID NO: 1782204 - RNA, 19 nt, Homo sapiens
  misc_RNA (1)...(19): siRNA sense strand
uaccucaccugcccuaaga

SEQ ID NO: 1782205 - RNA, 19 nt, Homo sapiens
  misc_RNA (1)...(19): siRNA sense strand
gcaccaagaccaagauguc

SEQ ID NO: 1782206 - RNA, 19 nt, Homo sapiens
  misc_RNA (1)...(19): siRNA sense strand
ggcaagacggugaccauuu

SEQ ID NO: 1782207 - RNA, 19 nt, Homo sapiens
  misc_RNA (1)...(19): siRNA sense strand
ccaaugagaagcugagugu

SEQ ID NO: 1782208 - RNA, 19 nt, Homo sapiens
  misc_RNA (1)...(19): siRNA sense strand
caaagcuuccucucugaaa

SEQ ID NO: 1782209 - RNA, 19 nt, Homo sapiens
  misc_RNA (1)...(19): siRNA sense strand
uggagaagcucaagaccau

SEQ ID NO: 1782210 - RNA, 19 nt, Homo sapiens
  misc_RNA (1)...(19): siRNA sense strand
ggaggugacugugcacaag

SEQ ID NO: 1782211 - RNA, 19 nt, Homo sapiens
  misc_RNA (1)...(19): siRNA sense strand
ucaacgccaucaaggacua

SEQ ID NO: 1782212 - RNA, 19 nt, Homo sapiens
  misc_RNA (1)...(19): siRNA sense strand
guggcuaccucaacaagga

SEQ ID NO: 1782213 - RNA, 19 nt, Homo sapiens
  misc_RNA (1)...(19): siRNA sense strand
gcagagcgucucccuguuc

SEQ ID NO: 1782214 - RNA, 19 nt, Homo sapiens
  misc_RNA (1)...(19): siRNA sense strand
gggcagaagcugaguaucu

SEQ ID NO: 1782215 - RNA, 19 nt, Homo sapiens
  misc_RNA (1)...(19): siRNA sense strand
aaugagaagcugaguguuu

SEQ ID NO: 1782216 - RNA, 19 nt, Homo sapiens
  misc_RNA (1)...(19): siRNA sense strand
caacaagcaccucaucaag

SEQ ID NO: 1782217 - RNA, 19 nt, Homo sapiens
  misc_RNA (1)...(19): siRNA sense strand
aggcacaccugaaggagaa

SEQ ID NO: 1782218 - RNA, 19 nt, Homo sapiens
  misc_RNA (1)...(19): siRNA sense strand
agaccaagcucaagaucuc

SEQ ID NO: 1782219 - RNA, 19 nt, Homo sapiens
  misc_RNA (1)...(19): siRNA sense strand
acaagggccugguggacaa

SEQ ID NO: 1782220 - RNA, 19 nt, Homo sapiens
  misc_RNA (1)...(19): siRNA sense strand
cagcguggcuaccucaaca

SEQ ID NO: 1782221 - RNA, 19 nt, Homo sapiens
  misc_RNA (1)...(19): siRNA sense strand
gggagcuggucuacacuga

SEQ ID NO: 1782222 - RNA, 19 nt, Homo sapiens
  misc_RNA (1)...(19): siRNA sense strand
ggaagcaggcggaggagau

SEQ ID NO: 1782223 - RNA, 19 nt, Homo sapiens
  misc_RNA (1)...(19): siRNA sense strand
cugaagaugucuccaaugg

SEQ ID NO: 1782224 - RNA, 19 nt, Homo sapiens
  misc_RNA (1)...(19): siRNA sense strand
gagaagcucaagaccauca

SEQ ID NO: 1782225 - RNA, 19 nt, Homo sapiens
  misc_RNA (1)...(19): siRNA sense strand
gcugcagaauguccagauu

SEQ ID NO: 1782226 - RNA, 19 nt, Homo sapiens
  misc_RNA (1)...(19): siRNA sense strand
aggaacggcucucggugua

SEQ ID NO: 1782227 - RNA, 19 nt, Homo sapiens
  misc_RNA (1)...(19): siRNA sense strand
caucaacucggaauacuuc

SEQ ID NO: 1782228 - RNA, 19 nt, Homo sapiens
  misc_RNA (1)...(19): siRNA sense strand
ucacguaccugcagcuacu

SEQ ID NO: 1782229 - RNA, 19 nt, Homo sapiens
  misc_RNA (1)...(19): siRNA sense strand
ccacuaaggagcuaaugug

SEQ ID NO: 1782230 - RNA, 19 nt, Homo sapiens
  misc_RNA (1)...(19): siRNA sense strand
cggaagacguccuccaagu

SEQ ID NO: 1782231 - RNA, 19 nt, Homo sapiens
  misc_RNA (1)...(19): siRNA sense strand
ucaccuaccugcagcugau

SEQ ID NO: 1782232 - RNA, 19 nt, Homo sapiens
  misc_RNA (1)...(19): siRNA sense strand
ggcagacacugagcaucua

SEQ ID NO: 1782233 - RNA, 19 nt, Homo sapiens
  misc_RNA (1)...(19): siRNA sense strand
ucaagauucucauuaccau

SEQ ID NO: 1782234 - RNA, 19 nt, Homo sapiens
  misc_RNA (1)...(19): siRNA sense strand
gagcuggucuacacugacu

SEQ ID NO: 1782235 - RNA, 19 nt, Homo sapiens
  misc_RNA (1)...(19): siRNA sense strand
aggcggagcugcagagcaa

SEQ ID NO: 1782236 - RNA, 19 nt, Homo sapiens
  misc_RNA (1)...(19): siRNA sense strand
cggagacgcuggagaaggu

SEQ ID NO: 1782237 - RNA, 19 nt, Homo sapiens
  misc_RNA (1)...(19): siRNA sense strand
cucaagaucuccuauaagg

SEQ ID NO: 1782238 - RNA, 19 nt, Homo sapiens
  misc_RNA (1)...(19): siRNA sense strand
gaagaagggcuggcucuac

SEQ ID NO: 1782239 - RNA, 19 nt, Homo sapiens
  misc_RNA (1)...(19): siRNA sense strand
accggaaccugguggauaa

SEQ ID NO: 1782240 - RNA, 19 nt, Homo sapiens
  misc_RNA (1)...(19): siRNA sense strand
gaagaagacuguauguuug

SEQ ID NO: 1782241 - RNA, 19 nt, Homo sapiens
  misc_RNA (1)...(19): siRNA sense strand
acaagaaccugaagaagaa

SEQ ID NO: 1782242 - RNA, 19 nt, Homo sapiens
  misc_RNA (1)...(19): siRNA sense strand
gaauccagaugccgauaaa

SEQ ID NO: 1782243 - RNA, 19 nt, Homo sapiens
  misc_RNA (1)...(19): siRNA sense strand
gaccaugucuggacuggaa

SEQ ID NO: 1782244 - RNA, 19 nt, Homo sapiens
  misc_RNA (1)...(19): siRNA sense strand
caagaaaacuuuacgacua

SEQ ID NO: 1782245 - RNA, 19 nt, Homo sapiens
  misc_RNA (1)...(19): siRNA sense strand
gcaagucagucuuagaaca

SEQ ID NO: 1782246 - RNA, 19 nt, Homo sapiens
  misc_RNA (1)...(19): siRNA sense strand
ggagugaugagaaauaauu

SEQ ID NO: 1782247 - RNA, 19 nt, Homo sapiens
  misc_RNA (1)...(19): siRNA sense strand
gcuaugaguuucugaaugg

SEQ ID NO: 1782248 - RNA, 19 nt, Homo sapiens
  misc_RNA (1)...(19): siRNA sense strand
gaacaagguuuggaaugca

SEQ ID NO: 1782249 - RNA, 19 nt, Homo sapiens
  misc_RNA (1)...(19): siRNA sense strand
gcagggcauuccaauauca

SEQ ID NO: 1782250 - RNA, 19 nt, Homo sapiens
  misc_RNA (1)...(19): siRNA sense strand
caaacaagaaccugaagaa

SEQ ID NO: 1782251 - RNA, 19 nt, Homo sapiens
  misc_RNA (1)...(19): siRNA sense strand
gauauugccuugcuaaagc

SEQ ID NO: 1782252 - RNA, 19 nt, Homo sapiens
  misc_RNA (1)...(19): siRNA sense strand
ccgaagaaauguccuggaa

SEQ ID NO: 1782253 - RNA, 19 nt, Homo sapiens
  misc_RNA (1)...(19): siRNA sense strand
gcucauggauacauuccuu

SEQ ID NO: 1782254 - RNA, 19 nt, Homo sapiens
  misc_RNA (1)...(19): siRNA sense strand
gaaguccuccauaaucauu

SEQ ID NO: 1782255 - RNA, 19 nt, Homo sapiens
  misc_RNA (1)...(19): siRNA sense strand
cagagggacuggaggagaa

SEQ ID NO: 1782256 - RNA, 19 nt, Homo sapiens
  misc_RNA (1)...(19): siRNA sense strand
aagaagaauuacugucgua

SEQ ID NO: 1782257 - RNA, 19 nt, Homo sapiens
  misc_RNA (1)...(19): siRNA sense strand
gauacauuccuuccaaauu

SEQ ID NO: 1782258 - RNA, 19 nt, Homo sapiens
  misc_RNA (1)...(19): siRNA sense strand
gagaacuacugcaggaauc

SEQ ID NO: 1782259 - RNA, 19 nt, Homo sapiens
  misc_RNA (1)...(19): siRNA sense strand
gagggagugaugagaaaua

SEQ ID NO: 1782260 - RNA, 19 nt, Homo sapiens
  misc_RNA (1)...(19): siRNA sense strand
gagaauaaagugugcaauc

SEQ ID NO: 1782261 - RNA, 19 nt, Homo sapiens
  misc_RNA (1)...(19): siRNA sense strand
gcauuccaauaucacagua

SEQ ID NO: 1782262 - RNA, 19 nt, Homo sapiens
  misc_RNA (1)...(19): siRNA sense strand
aacaagcgcugggaacuuu

SEQ ID NO: 1782263 - RNA, 19 nt, Homo sapiens
  misc_RNA (1)...(19): siRNA sense strand
ccaaauuuccaaacaagaa

SEQ ID NO: 1782264 - RNA, 19 nt, Homo sapiens
  misc_RNA (1)...(19): siRNA sense strand
gcgacauucuugaguguga

SEQ ID NO: 1782265 - RNA, 19 nt, Homo sapiens
  misc_RNA (1)...(19): siRNA sense strand
gcaagagggcgaccacugu

SEQ ID NO: 1782266 - RNA, 19 nt, Homo sapiens
  misc_RNA (1)...(19): siRNA sense strand
guaagauaccguccuguga

SEQ ID NO: 1782267 - RNA, 19 nt, Homo sapiens
  misc_RNA (1)...(19): siRNA sense strand
cgagaaggacaaauacauu

SEQ ID NO: 1782268 - RNA, 19 nt, Homo sapiens
  misc_RNA (1)...(19): siRNA sense strand
ggagaaacccaagguacuu

SEQ ID NO: 1782269 - RNA, 19 nt, Homo sapiens
  misc_RNA (1)...(19): siRNA sense strand
ggaauccagaugccgauaa

SEQ ID NO: 1782270 - RNA, 19 nt, Homo sapiens
  misc_RNA (1)...(19): siRNA sense strand
gaaaagauauugccuugcu

SEQ ID NO: 1782271 - RNA, 19 nt, Homo sapiens
  misc_RNA (1)...(19): siRNA sense strand
uaacccugauggugaugua

SEQ ID NO: 1782272 - RNA, 19 nt, Homo sapiens
  misc_RNA (1)...(19): siRNA sense strand
gcaggaauccagacaacga

SEQ ID NO: 1782273 - RNA, 19 nt, Homo sapiens
  misc_RNA (1)...(19): siRNA sense strand
ccagaaaacuacccaaaug

SEQ ID NO: 1782274 - RNA, 19 nt, Homo sapiens
  misc_RNA (1)...(19): siRNA sense strand
gggaacaggugaaaacuau

SEQ ID NO: 1782275 - RNA, 19 nt, Homo sapiens
  misc_RNA (1)...(19): siRNA sense strand
gcaagacugggaauggaaa

SEQ ID NO: 1782276 - RNA, 19 nt, Homo sapiens
  misc_RNA (1)...(19): siRNA sense strand
gaccgaauguuucaucacu

SEQ ID NO: 1782277 - RNA, 19 nt, Homo sapiens
  misc_RNA (1)...(19): siRNA sense strand
ugucuaggcuguucuugga

SEQ ID NO: 1782278 - RNA, 19 nt, Homo sapiens
  misc_RNA (1)...(19): siRNA sense strand
cauaacaggacaccagaaa

SEQ ID NO: 1782279 - RNA, 19 nt, Homo sapiens
  misc_RNA (1)...(19): siRNA sense strand
gagaaacccaagguacuuu

SEQ ID NO: 1782280 - RNA, 19 nt, Homo sapiens
  misc_RNA (1)...(19): siRNA sense strand
ucccugugauugagaauaa

SEQ ID NO: 1782281 - RNA, 19 nt, Homo sapiens
  misc_RNA (1)...(19): siRNA sense strand
caagucagucuuagaacaa

SEQ ID NO: 1782282 - RNA, 19 nt, Homo sapiens
  misc_RNA (1)...(19): siRNA sense strand
aaagaaaguguaucucuca

SEQ ID NO: 1782283 - RNA, 19 nt, Homo sapiens
  misc_RNA (1)...(19): siRNA sense strand
aaagauauugccuugcuaa

SEQ ID NO: 1782284 - RNA, 19 nt, Homo sapiens
  misc_RNA (1)...(19): siRNA sense strand
ggagaacuacugcaggaau

SEQ ID NO: 1782285 - RNA, 19 nt, Homo sapiens
  misc_RNA (1)...(19): siRNA sense strand
ccuagauucucaccugcua

SEQ ID NO: 1782286 - RNA, 19 nt, Homo sapiens
  misc_RNA (1)...(19): siRNA sense strand
ggaguacugcaaccugaaa

SEQ ID NO: 1782287 - RNA, 19 nt, Homo sapiens
  misc_RNA (1)...(19): siRNA sense strand
caacaccuccaccaucuuc

SEQ ID NO: 1782288 - RNA, 19 nt, Homo sapiens
  misc_RNA (1)...(19): siRNA sense strand
aacaagaaccugaagaaga

SEQ ID NO: 1782289 - RNA, 19 nt, Homo sapiens
  misc_RNA (1)...(19): siRNA sense strand
cacaacaccuccaccaucu

SEQ ID NO: 1782290 - RNA, 19 nt, Homo sapiens
  misc_RNA (1)...(19): siRNA sense strand
gaaaacuacugccgcaauc

SEQ ID NO: 1782291 - RNA, 19 nt, Homo sapiens
  misc_RNA (1)...(19): siRNA sense strand
caaaguaaucccagcuugu

SEQ ID NO: 1782292 - RNA, 19 nt, Homo sapiens
  misc_RNA (1)...(19): siRNA sense strand
gugcaagacugggaaugga

SEQ ID NO: 1782293 - RNA, 19 nt, Homo sapiens
  misc_RNA (1)...(19): siRNA sense strand
gcccacacgcucauggaua

SEQ ID NO: 1782294 - RNA, 19 nt, Homo sapiens
  misc_RNA (1)...(19): siRNA sense strand
aaaggccccugguguuuua

SEQ ID NO: 1782295 - RNA, 19 nt, Homo sapiens
  misc_RNA (1)...(19): siRNA sense strand
gaaaagaaaguguaucucu

SEQ ID NO: 1782296 - RNA, 19 nt, Homo sapiens
  misc_RNA (1)...(19): siRNA sense strand
cuggaugacuaugugaaua

SEQ ID NO: 1782297 - RNA, 19 nt, Homo sapiens
  misc_RNA (1)...(19): siRNA sense strand
agaagaaugugcagcaaaa

SEQ ID NO: 1782298 - RNA, 19 nt, Homo sapiens
  misc_RNA (1)...(19): siRNA sense strand
guucguguuucaagguuug

SEQ ID NO: 1782299 - RNA, 19 nt, Homo sapiens
  misc_RNA (1)...(19): siRNA sense strand
cugcagggcauuccaauau

SEQ ID NO: 1782300 - RNA, 19 nt, Homo sapiens
  misc_RNA (1)...(19): siRNA sense strand
gaaaagagauaugacuacu

SEQ ID NO: 1782301 - RNA, 19 nt, Homo sapiens
  misc_RNA (1)...(19): siRNA sense strand
gugcaaucgcuaugaguuu

SEQ ID NO: 1782302 - RNA, 19 nt, Homo sapiens
  misc_RNA (1)...(19): siRNA sense strand
ccacaggaaagaaguguca

SEQ ID NO: 1782303 - RNA, 19 nt, Homo sapiens
  misc_RNA (1)...(19): siRNA sense strand
gugggaguacuguaagaua

SEQ ID NO: 1782304 - RNA, 19 nt, Homo sapiens
  misc_RNA (1)...(19): siRNA sense strand
caacaagcgcugggaacuu

SEQ ID NO: 1782305 - RNA, 19 nt, Homo sapiens
  misc_RNA (1)...(19): siRNA sense strand
gagcugcggccuugguguu

SEQ ID NO: 1782306 - RNA, 19 nt, Homo sapiens
  misc_RNA (1)...(19): siRNA sense strand
ggauacauuccuuccaaau

SEQ ID NO: 1782307 - RNA, 19 nt, Homo sapiens
  misc_RNA (1)...(19): siRNA sense strand
gggcccuggugcuauacua

SEQ ID NO: 1782308 - RNA, 19 nt, Homo sapiens
  misc_RNA (1)...(19): siRNA sense strand
agggagugaugagaaauaa

SEQ ID NO: 1782309 - RNA, 19 nt, Homo sapiens
  misc_RNA (1)...(19): siRNA sense strand
guccugccgucaucacuga

SEQ ID NO: 1782310 - RNA, 19 nt, Homo sapiens
  misc_RNA (1)...(19): siRNA sense strand
caagagggcgaccacuguu

SEQ ID NO: 1782311 - RNA, 19 nt, Homo sapiens
  misc_RNA (1)...(19): siRNA sense strand
caaaugcuggccugacaau

SEQ ID NO: 1782312 - RNA, 19 nt, Homo sapiens
  misc_RNA (1)...(19): siRNA sense strand
agaauaaagugugcaaucg

SEQ ID NO: 1782313 - RNA, 19 nt, Homo sapiens
  misc_RNA (1)...(19): siRNA sense strand
ccaagaagugaaucucgaa

SEQ ID NO: 1782314 - RNA, 19 nt, Homo sapiens
  misc_RNA (1)...(19): siRNA sense strand
caaguggagccgaagaaau

SEQ ID NO: 1782315 - RNA, 19 nt, Homo sapiens
  misc_RNA (1)...(19): siRNA sense strand
gcgggaauguggcuguuac

SEQ ID NO: 1782316 - RNA, 19 nt, Homo sapiens
  misc_RNA (1)...(19): siRNA sense strand
ccaauccaccgaacucugu

SEQ ID NO: 1782317 - RNA, 19 nt, Homo sapiens
  misc_RNA (1)...(19): siRNA sense strand
uggcaagucagucuuagaa

SEQ ID NO: 1782318 - RNA, 19 nt, Homo sapiens
  misc_RNA (1)...(19): siRNA sense strand
aaguggagccgaagaaaug

SEQ ID NO: 1782319 - RNA, 19 nt, Homo sapiens
  misc_RNA (1)...(19): siRNA sense strand
gguggucccuggugcuaca

SEQ ID NO: 1782320 - RNA, 19 nt, Homo sapiens
  misc_RNA (1)...(19): siRNA sense strand
gacuguauguuugggaaug

SEQ ID NO: 1782321 - RNA, 19 nt, Homo sapiens
  misc_RNA (1)...(19): siRNA sense strand
ggacugcuaccauggugau

SEQ ID NO: 1782322 - RNA, 19 nt, Homo sapiens
  misc_RNA (1)...(19): siRNA sense strand
cuauacuacugauccagaa

SEQ ID NO: 1782323 - RNA, 19 nt, Homo sapiens
  misc_RNA (1)...(19): siRNA sense strand
uaaagugugcaaucgcuau

SEQ ID NO: 1782324 - RNA, 19 nt, Homo sapiens
  misc_RNA (1)...(19): siRNA sense strand
gaagcccagcucccuguga

SEQ ID NO: 1782325 - RNA, 19 nt, Homo sapiens
  misc_RNA (1)...(19): siRNA sense strand
agaacaagguuuggaaugc

SEQ ID NO: 1782326 - RNA, 19 nt, Homo sapiens
  misc_RNA (1)...(19): siRNA sense strand
agaaccugaagaagaauua

SEQ ID NO: 1782327 - RNA, 19 nt, Homo sapiens
  misc_RNA (1)...(19): siRNA sense strand
acacgcucauggauacauu

SEQ ID NO: 1782328 - RNA, 19 nt, Homo sapiens
  misc_RNA (1)...(19): siRNA sense strand
uugagggagugaugagaaa

SEQ ID NO: 1782329 - RNA, 19 nt, Homo sapiens
  misc_RNA (1)...(19): siRNA sense strand
gaccggaccgaauguuuca

SEQ ID NO: 1782330 - RNA, 19 nt, Homo sapiens
  misc_RNA (1)...(19): siRNA sense strand
agaagugucuaggcuguuc

SEQ ID NO: 1782331 - RNA, 19 nt, Homo sapiens
  misc_RNA (1)...(19): siRNA sense strand
gauaaaggccccugguguu

SEQ ID NO: 1782332 - RNA, 19 nt, Homo sapiens
  misc_RNA (1)...(19): siRNA sense strand
aaugcuggccugacaauga

SEQ ID NO: 1782333 - RNA, 19 nt, Homo sapiens
  misc_RNA (1)...(19): siRNA sense strand
cccaaaugcuggccugaca

SEQ ID NO: 1782334 - RNA, 19 nt, Homo sapiens
  misc_RNA (1)...(19): siRNA sense strand
ccaaacaagaaccugaaga

SEQ ID NO: 1782335 - RNA, 19 nt, Homo sapiens
  misc_RNA (1)...(19): siRNA sense strand
ccaaggccuucauccuaca

SEQ ID NO: 1782336 - RNA, 19 nt, Homo sapiens
  misc_RNA (1)...(19): siRNA sense strand
agaaaacuaugacggcaaa

SEQ ID NO: 1782337 - RNA, 19 nt, Homo sapiens
  misc_RNA (1)...(19): siRNA sense strand
acacgacaaauccaagaaa

SEQ ID NO: 1782338 - RNA, 19 nt, Homo sapiens
  misc_RNA (1)...(19): siRNA sense strand
uacauuccuuccaaauuuc

SEQ ID NO: 1782339 - RNA, 19 nt, Homo sapiens
  misc_RNA (1)...(19): siRNA sense strand
guuucaagguuuguuacuu

SEQ ID NO: 1782340 - RNA, 19 nt, Homo sapiens
  misc_RNA (1)...(19): siRNA sense strand
gggcaaauguuguuuacua

SEQ ID NO: 1782341 - RNA, 19 nt, Homo sapiens
  misc_RNA (1)...(19): siRNA sense strand
cauauuggcucaugaaauu

SEQ ID NO: 1782342 - RNA, 19 nt, Homo sapiens
  misc_RNA (1)...(19): siRNA sense strand
gaagcuggcucugaagaua

SEQ ID NO: 1782343 - RNA, 19 nt, Homo sapiens
  misc_RNA (1)...(19): siRNA sense strand
gcacgggaauuaagaauca

SEQ ID NO: 1782344 - RNA, 19 nt, Homo sapiens
  misc_RNA (1)...(19): siRNA sense strand
ugacacaguuuaucucuuu

SEQ ID NO: 1782345 - RNA, 19 nt, Homo sapiens
  misc_RNA (1)...(19): siRNA sense strand
gcacucagaaaucgacuua

SEQ ID NO: 1782346 - RNA, 19 nt, Homo sapiens
  misc_RNA (1)...(19): siRNA sense strand
agauaagccuggaggaaua

SEQ ID NO: 1782347 - RNA, 19 nt, Homo sapiens
  misc_RNA (1)...(19): siRNA sense strand
agacaacgaugacacaguu

SEQ ID NO: 1782348 - RNA, 19 nt, Homo sapiens
  misc_RNA (1)...(19): siRNA sense strand
gaaacauacuugaacuuac

SEQ ID NO: 1782349 - RNA, 19 nt, Homo sapiens
  misc_RNA (1)...(19): siRNA sense strand
uggauacacugguggauaa

SEQ ID NO: 1782350 - RNA, 19 nt, Homo sapiens
  misc_RNA (1)...(19): siRNA sense strand
acucagaaaucgacuuaaa

SEQ ID NO: 1782351 - RNA, 19 nt, Homo sapiens
  misc_RNA (1)...(19): siRNA sense strand
ccacagagccuuguauugu

SEQ ID NO: 1782352 - RNA, 19 nt, Homo sapiens
  misc_RNA (1)...(19): siRNA sense strand
gaacuuacacugggcaaau

SEQ ID NO: 1782353 - RNA, 19 nt, Homo sapiens
  misc_RNA (1)...(19): siRNA sense strand
auacacugguggauaauuu

SEQ ID NO: 1782354 - RNA, 19 nt, Homo sapiens
  misc_RNA (1)...(19): siRNA sense strand
ccacacugccaccugauua

SEQ ID NO: 1782355 - RNA, 19 nt, Homo sapiens
  misc_RNA (1)...(19): siRNA sense strand
cuacagugacuacaguuua

SEQ ID NO: 1782356 - RNA, 19 nt, Homo sapiens
  misc_RNA (1)...(19): siRNA sense strand
cuacuucucugauccuuuc

SEQ ID NO: 1782357 - RNA, 19 nt, Homo sapiens
  misc_RNA (1)...(19): siRNA sense strand
cagcaaaugggaucaauau

SEQ ID NO: 1782358 - RNA, 19 nt, Homo sapiens
  misc_RNA (1)...(19): siRNA sense strand
aagaaucagucguggguuu

SEQ ID NO: 1782359 - RNA, 19 nt, Homo sapiens
  misc_RNA (1)...(19): siRNA sense strand
gaaguucuguagccucagu

SEQ ID NO: 1782360 - RNA, 19 nt, Homo sapiens
  misc_RNA (1)...(19): siRNA sense strand
caaugggucuguucuccaa

SEQ ID NO: 1782361 - RNA, 19 nt, Homo sapiens
  misc_RNA (1)...(19): siRNA sense strand
gcacauuucuaugccacaa

SEQ ID NO: 1782362 - RNA, 19 nt, Homo sapiens
  misc_RNA (1)...(19): siRNA sense strand
caucagcacuuucauagac

SEQ ID NO: 1782363 - RNA, 19 nt, Homo sapiens
  misc_RNA (1)...(19): siRNA sense strand
gaggaauacuaaugaugga

SEQ ID NO: 1782364 - RNA, 19 nt, Homo sapiens
  misc_RNA (1)...(19): siRNA sense strand
gcucauaggcacuuuauac

SEQ ID NO: 1782365 - RNA, 19 nt, Homo sapiens
  misc_RNA (1)...(19): siRNA sense strand
uaaagccuccagagaagua

SEQ ID NO: 1782366 - RNA, 19 nt, Homo sapiens
  misc_RNA (1)...(19): siRNA sense strand
caguuuaucucuuuguugu

SEQ ID NO: 1782367 - RNA, 19 nt, Homo sapiens
  misc_RNA (1)...(19): siRNA sense strand
gaagguacuugagcuggau

SEQ ID NO: 1782368 - RNA, 19 nt, Homo sapiens
  misc_RNA (1)...(19): siRNA sense strand
ucucugauccuuucuuaaa

SEQ ID NO: 1782369 - RNA, 19 nt, Homo sapiens
  misc_RNA (1)...(19): siRNA sense strand
ccacaaaugaccacuacuu

SEQ ID NO: 1782370 - RNA, 19 nt, Homo sapiens
  misc_RNA (1)...(19): siRNA sense strand
uuacuacaguccaaaugaa

SEQ ID NO: 1782371 - RNA, 19 nt, Homo sapiens
  misc_RNA (1)...(19): siRNA sense strand
gaauugaagcuggcucuga

SEQ ID NO: 1782372 - RNA, 19 nt, Homo sapiens
  misc_RNA (1)...(19): siRNA sense strand
ggacaucuggguagucugu

SEQ ID NO: 1782373 - RNA, 19 nt, Homo sapiens
  misc_RNA (1)...(19): siRNA sense strand
gcacuuucauagacaacga

SEQ ID NO: 1782374 - RNA, 19 nt, Homo sapiens
  misc_RNA (1)...(19): siRNA sense strand
ccacauggcaucagcacuu

SEQ ID NO: 1782375 - RNA, 19 nt, Homo sapiens
  misc_RNA (1)...(19): siRNA sense strand
gguuugauuuggccucauu

SEQ ID NO: 1782376 - RNA, 19 nt, Homo sapiens
  misc_RNA (1)...(19): siRNA sense strand
acagagccuuguauuguga

SEQ ID NO: 1782377 - RNA, 19 nt, Homo sapiens
  misc_RNA (1)...(19): siRNA sense strand
aguagaaucuguagaccuu

SEQ ID NO: 1782378 - RNA, 19 nt, Homo sapiens
  misc_RNA (1)...(19): siRNA sense strand
gguagucugucauccuaau

SEQ ID NO: 1782379 - RNA, 19 nt, Homo sapiens
  misc_RNA (1)...(19): siRNA sense strand
gcagaaggauuugauucag

SEQ ID NO: 1782380 - RNA, 19 nt, Homo sapiens
  misc_RNA (1)...(19): siRNA sense strand
ugacauacuucccaauggu

SEQ ID NO: 1782381 - RNA, 19 nt, Homo sapiens
  misc_RNA (1)...(19): siRNA sense strand
caaauguuguuuacuacag

SEQ ID NO: 1782382 - RNA, 19 nt, Homo sapiens
  misc_RNA (1)...(19): siRNA sense strand
cuucucugauccuuucuua

SEQ ID NO: 1782383 - RNA, 19 nt, Homo sapiens
  misc_RNA (1)...(19): siRNA sense strand
ugaaaacagucaaacauga

SEQ ID NO: 1782384 - RNA, 19 nt, Homo sapiens
  misc_RNA (1)...(19): siRNA sense strand
gaauacuaaugauggaucu

SEQ ID NO: 1782385 - RNA, 19 nt, Homo sapiens
  misc_RNA (1)...(19): siRNA sense strand
ccacagcuuugcaccagau

SEQ ID NO: 1782386 - RNA, 19 nt, Homo sapiens
  misc_RNA (1)...(19): siRNA sense strand
caagaauacaguggaaauu

SEQ ID NO: 1782387 - RNA, 19 nt, Homo sapiens
  misc_RNA (1)...(19): siRNA sense strand
aauugaagcuggcucugaa

SEQ ID NO: 1782388 - RNA, 19 nt, Homo sapiens
  misc_RNA (1)...(19): siRNA sense strand
gagcuucuuccaaguguga

SEQ ID NO: 1782389 - RNA, 19 nt, Homo sapiens
  misc_RNA (1)...(19): siRNA sense strand
uacagugacuacaguuuau

SEQ ID NO: 1782390 - RNA, 19 nt, Homo sapiens
  misc_RNA (1)...(19): siRNA sense strand
gaccacuacuucucugauc

SEQ ID NO: 1782391 - RNA, 19 nt, Homo sapiens
  misc_RNA (1)...(19): siRNA sense strand
caacgaugacacaguuuau

SEQ ID NO: 1782392 - RNA, 19 nt, Homo sapiens
  misc_RNA (1)...(19): siRNA sense strand
aaacaugagcuucuuccaa

SEQ ID NO: 1782393 - RNA, 19 nt, Homo sapiens
  misc_RNA (1)...(19): siRNA sense strand
caaaugaccacuacuucuc

SEQ ID NO: 1782394 - RNA, 19 nt, Homo sapiens
  misc_RNA (1)...(19): siRNA sense strand
ccaccugauuaaaggaauu

SEQ ID NO: 1782395 - RNA, 19 nt, Homo sapiens
  misc_RNA (1)...(19): siRNA sense strand
gcugacauauuggcucaug

SEQ ID NO: 1782396 - RNA, 19 nt, Homo sapiens
  misc_RNA (1)...(19): siRNA sense strand
acaacgaugacacaguuua

SEQ ID NO: 1782397 - RNA, 19 nt, Homo sapiens
  misc_RNA (1)...(19): siRNA sense strand
gaugggaagcugcucauag

SEQ ID NO: 1782398 - RNA, 19 nt, Homo sapiens
  misc_RNA (1)...(19): siRNA sense strand
uggguagucugucauccua

SEQ ID NO: 1782399 - RNA, 19 nt, Homo sapiens
  misc_RNA (1)...(19): siRNA sense strand
guaaaccacccagaauuca

SEQ ID NO: 1782400 - RNA, 19 nt, Homo sapiens
  misc_RNA (1)...(19): siRNA sense strand
ugacauauuggcucaugaa

SEQ ID NO: 1782401 - RNA, 19 nt, Homo sapiens
  misc_RNA (1)...(19): siRNA sense strand
gcaaauguuguuuacuaca

SEQ ID NO: 1782402 - RNA, 19 nt, Homo sapiens
  misc_RNA (1)...(19): siRNA sense strand
caccugaugauaaguauau

SEQ ID NO: 1782403 - RNA, 19 nt, Homo sapiens
  misc_RNA (1)...(19): siRNA sense strand
cuuaaagccuccagagaag

SEQ ID NO: 1782404 - RNA, 19 nt, Homo sapiens
  misc_RNA (1)...(19): siRNA sense strand
cacauggcaucagcacuuu

SEQ ID NO: 1782405 - RNA, 19 nt, Homo sapiens
  misc_RNA (1)...(19): siRNA sense strand
agugguagcagaaggauuu

SEQ ID NO: 1782406 - RNA, 19 nt, Homo sapiens
  misc_RNA (1)...(19): siRNA sense strand
ggcaaauguuguuuacuac

SEQ ID NO: 1782407 - RNA, 19 nt, Homo sapiens
  misc_RNA (1)...(19): siRNA sense strand
ucaagaauacaguggaaau

SEQ ID NO: 1782408 - RNA, 19 nt, Homo sapiens
  misc_RNA (1)...(19): siRNA sense strand
ugauuuggccucauucaau

SEQ ID NO: 1782409 - RNA, 19 nt, Homo sapiens
  misc_RNA (1)...(19): siRNA sense strand
cugaagauauugacauacu

SEQ ID NO: 1782410 - RNA, 19 nt, Homo sapiens
  misc_RNA (1)...(19): siRNA sense strand
cucugaagauauugacaua

SEQ ID NO: 1782411 - RNA, 19 nt, Homo sapiens
  misc_RNA (1)...(19): siRNA sense strand
ugacaucacagcuguugga

SEQ ID NO: 1782412 - RNA, 19 nt, Homo sapiens
  misc_RNA (1)...(19): siRNA sense strand
ccaagggcacgggaauuaa

SEQ ID NO: 1782413 - RNA, 19 nt, Homo sapiens
  misc_RNA (1)...(19): siRNA sense strand
uaaagugguagcagaagga

SEQ ID NO: 1782414 - RNA, 19 nt, Homo sapiens
  misc_RNA (1)...(19): siRNA sense strand
caguccaaaugaaguuaaa

SEQ ID NO: 1782415 - RNA, 19 nt, Homo sapiens
  misc_RNA (1)...(19): siRNA sense strand
cagauaagccuggaggaau

SEQ ID NO: 1782416 - RNA, 19 nt, Homo sapiens
  misc_RNA (1)...(19): siRNA sense strand
ggcaucagcacuuucauag

SEQ ID NO: 1782417 - RNA, 19 nt, Homo sapiens
  misc_RNA (1)...(19): siRNA sense strand
cacaguuuaucucuuuguu

SEQ ID NO: 1782418 - RNA, 19 nt, Homo sapiens
  misc_RNA (1)...(19): siRNA sense strand
ugagaagccuacagugacu

SEQ ID NO: 1782419 - RNA, 19 nt, Homo sapiens
  misc_RNA (1)...(19): siRNA sense strand
uggcaucagcacuuucaua

SEQ ID NO: 1782420 - RNA, 19 nt, Homo sapiens
  misc_RNA (1)...(19): siRNA sense strand
cuuguauugugaacucuaa

SEQ ID NO: 1782421 - RNA, 19 nt, Homo sapiens
  misc_RNA (1)...(19): siRNA sense strand
uauuucaccugaugauaag

SEQ ID NO: 1782422 - RNA, 19 nt, Homo sapiens
  misc_RNA (1)...(19): siRNA sense strand
acuuaaagccuccagagaa

SEQ ID NO: 1782423 - RNA, 19 nt, Homo sapiens
  misc_RNA (1)...(19): siRNA sense strand
uguaaaccacccagaauuc

SEQ ID NO: 1782424 - RNA, 19 nt, Homo sapiens
  misc_RNA (1)...(19): siRNA sense strand
aaaauucucuguugcaucu

SEQ ID NO: 1782425 - RNA, 19 nt, Homo sapiens
  misc_RNA (1)...(19): siRNA sense strand
accaagggcacgggaauua

SEQ ID NO: 1782426 - RNA, 19 nt, Homo sapiens
  misc_RNA (1)...(19): siRNA sense strand
gauacacugguggauaauu

SEQ ID NO: 1782427 - RNA, 19 nt, Homo sapiens
  misc_RNA (1)...(19): siRNA sense strand
ucagcaaaugggaucaaua

SEQ ID NO: 1782428 - RNA, 19 nt, Homo sapiens
  misc_RNA (1)...(19): siRNA sense strand
ccuggaggaauacuaauga

SEQ ID NO: 1782429 - RNA, 19 nt, Homo sapiens
  misc_RNA (1)...(19): siRNA sense strand
uaaaccacccagaauucaa

SEQ ID NO: 1782430 - RNA, 19 nt, Homo sapiens
  misc_RNA (1)...(19): siRNA sense strand
gacacaguuuaucucuuug

SEQ ID NO: 1782431 - RNA, 19 nt, Homo sapiens
  misc_RNA (1)...(19): siRNA sense strand
gaugacacaguuuaucucu

SEQ ID NO: 1782432 - RNA, 19 nt, Homo sapiens
  misc_RNA (1)...(19): siRNA sense strand
gaaucagucguggguuuga

SEQ ID NO: 1782433 - RNA, 19 nt, Homo sapiens
  misc_RNA (1)...(19): siRNA sense strand
gcaucagcacuuucauaga

SEQ ID NO: 1782434 - RNA, 19 nt, Homo sapiens
  misc_RNA (1)...(19): siRNA sense strand
guagcagaaggauuugauu

SEQ ID NO: 1782435 - RNA, 19 nt, Homo sapiens
  misc_RNA (1)...(19): siRNA sense strand
ucccaggacuccacagcuu

SEQ ID NO: 1782436 - RNA, 19 nt, Homo sapiens
  misc_RNA (1)...(19): siRNA sense strand
acacugggcaaauguuguu

SEQ ID NO: 1782437 - RNA, 19 nt, Homo sapiens
  misc_RNA (1)...(19): siRNA sense strand
agucaaacaugagcuucuu

SEQ ID NO: 1782438 - RNA, 19 nt, Homo sapiens
  misc_RNA (1)...(19): siRNA sense strand
gguagcagaaggauuugau

SEQ ID NO: 1782439 - RNA, 19 nt, Homo sapiens
  misc_RNA (1)...(19): siRNA sense strand
uagcagaaggauuugauuc

SEQ ID NO: 1782440 - RNA, 19 nt, Homo sapiens
  misc_RNA (1)...(19): siRNA sense strand
gaacugggcucgcaccauu

SEQ ID NO: 1782441 - RNA, 19 nt, Homo sapiens
  misc_RNA (1)...(19): siRNA sense strand
gccaaacaauucaaacaaa

SEQ ID NO: 1782442 - RNA, 19 nt, Homo sapiens
  misc_RNA (1)...(19): siRNA sense strand
gcaccgaacccgucuauca

SEQ ID NO: 1782443 - RNA, 19 nt, Homo sapiens
  misc_RNA (1)...(19): siRNA sense strand
ccaaacaauucaaacaaag

SEQ ID NO: 1782444 - RNA, 19 nt, Homo sapiens
  misc_RNA (1)...(19): siRNA sense strand
agacacaucuugccaugau

SEQ ID NO: 1782445 - RNA, 19 nt, Homo sapiens
  misc_RNA (1)...(19): siRNA sense strand
gugcgugucugguucugua

SEQ ID NO: 1782446 - RNA, 19 nt, Homo sapiens
  misc_RNA (1)...(19): siRNA sense strand
ggccacagcugccucgaau

SEQ ID NO: 1782447 - RNA, 19 nt, Homo sapiens
  misc_RNA (1)...(19): siRNA sense strand
gcaagaagcggaccuccau

SEQ ID NO: 1782448 - RNA, 19 nt, Homo sapiens
  misc_RNA (1)...(19): siRNA sense strand
ggagacgcauuuccucaag

SEQ ID NO: 1782449 - RNA, 19 nt, Homo sapiens
  misc_RNA (1)...(19): siRNA sense strand
acacguagcccaccacuca

SEQ ID NO: 1782450 - RNA, 19 nt, Homo sapiens
  misc_RNA (1)...(19): siRNA sense strand
gggaucagcagccgcauga

SEQ ID NO: 1782451 - RNA, 19 nt, Homo sapiens
  misc_RNA (1)...(19): siRNA sense strand
gcaacugggugcgaucauc

SEQ ID NO: 1782452 - RNA, 19 nt, Homo sapiens
  misc_RNA (1)...(19): siRNA sense strand
gaccagcauugacaagauc

SEQ ID NO: 1782453 - RNA, 19 nt, Homo sapiens
  misc_RNA (1)...(19): siRNA sense strand
cgaccagcauugacaagau

SEQ ID NO: 1782454 - RNA, 19 nt, Homo sapiens
  misc_RNA (1)...(19): siRNA sense strand
cugaugaguuggaacaguu

SEQ ID NO: 1782455 - RNA, 19 nt, Homo sapiens
  misc_RNA (1)...(19): siRNA sense strand
ccgcaacccucagaaacuu

SEQ ID NO: 1782456 - RNA, 19 nt, Homo sapiens
  misc_RNA (1)...(19): siRNA sense strand
acaaagaagaaucaaguug

SEQ ID NO: 1782457 - RNA, 19 nt, Homo sapiens
  misc_RNA (1)...(19): siRNA sense strand
acaguucgccaaacaauuc

SEQ ID NO: 1782458 - RNA, 19 nt, Homo sapiens
  misc_RNA (1)...(19): siRNA sense strand
agacgcauuuccucaagug

SEQ ID NO: 1782459 - RNA, 19 nt, Homo sapiens
  misc_RNA (1)...(19): siRNA sense strand
ugggcacacuguaugguaa

SEQ ID NO: 1782460 - RNA, 19 nt, Homo sapiens
  misc_RNA (1)...(19): siRNA sense strand
gagacgcauuuccucaagu

SEQ ID NO: 1782461 - RNA, 19 nt, Homo sapiens
  misc_RNA (1)...(19): siRNA sense strand
guucuguaaucgaagacaa

SEQ ID NO: 1782462 - RNA, 19 nt, Homo sapiens
  misc_RNA (1)...(19): siRNA sense strand
gcgcugggcacacuguaug

SEQ ID NO: 1782463 - RNA, 19 nt, Homo sapiens
  misc_RNA (1)...(19): siRNA sense strand
ugggugcgaucauccauca

SEQ ID NO: 1782464 - RNA, 19 nt, Homo sapiens
  misc_RNA (1)...(19): siRNA sense strand
gcagccgcaugagguuuau

SEQ ID NO: 1782465 - RNA, 19 nt, Homo sapiens
  misc_RNA (1)...(19): siRNA sense strand
ccuacagcauucucaguuc

SEQ ID NO: 1782466 - RNA, 19 nt, Homo sapiens
  misc_RNA (1)...(19): siRNA sense strand
ucaccgcucgccacacgua

SEQ ID NO: 1782467 - RNA, 19 nt, Homo sapiens
  misc_RNA (1)...(19): siRNA sense strand
caaacaaagaagaaucaag

SEQ ID NO: 1782468 - RNA, 19 nt, Homo sapiens
  misc_RNA (1)...(19): siRNA sense strand
cgccaaacaauucaaacaa

SEQ ID NO: 1782469 - RNA, 19 nt, Homo sapiens
  misc_RNA (1)...(19): siRNA sense strand
agaaucaaguugggcuuca

SEQ ID NO: 1782470 - RNA, 19 nt, Homo sapiens
  misc_RNA (1)...(19): siRNA sense strand
gcgcgaagaccugcaacug

SEQ ID NO: 1782471 - RNA, 19 nt, Homo sapiens
  misc_RNA (1)...(19): siRNA sense strand
ggcagacagccuccaguug

SEQ ID NO: 1782472 - RNA, 19 nt, Homo sapiens
  misc_RNA (1)...(19): siRNA sense strand
gccaaccccucaacgugua

SEQ ID NO: 1782473 - RNA, 19 nt, Homo sapiens
  misc_RNA (1)...(19): siRNA sense strand
ccucgaaucccuacagcau

SEQ ID NO: 1782474 - RNA, 19 nt, Homo sapiens
  misc_RNA (1)...(19): siRNA sense strand
ggcaugagguggccaagga

SEQ ID NO: 1782475 - RNA, 19 nt, Homo sapiens
  misc_RNA (1)...(19): siRNA sense strand
caaggaugcugugucugua

SEQ ID NO: 1782476 - RNA, 19 nt, Homo sapiens
  misc_RNA (1)...(19): siRNA sense strand
gcuugugggucccuucuug

SEQ ID NO: 1782477 - RNA, 19 nt, Homo sapiens
  misc_RNA (1)...(19): siRNA sense strand
ggccaaggaugcugugucu

SEQ ID NO: 1782478 - RNA, 19 nt, Homo sapiens
  misc_RNA (1)...(19): siRNA sense strand
agaucgcucugcucaaauu

SEQ ID NO: 1782479 - RNA, 19 nt, Homo sapiens
  misc_RNA (1)...(19): siRNA sense strand
uaccaugguuaaacaguga

SEQ ID NO: 1782480 - RNA, 19 nt, Homo sapiens
  misc_RNA (1)...(19): siRNA sense strand
ccaaggaugcugugucugu

SEQ ID NO: 1782481 - RNA, 19 nt, Homo sapiens
  misc_RNA (1)...(19): siRNA sense strand
gaguuccgccugaugauga

SEQ ID NO: 1782482 - RNA, 19 nt, Homo sapiens
  misc_RNA (1)...(19): siRNA sense strand
cagguaccaugguuaaaca

SEQ ID NO: 1782483 - RNA, 19 nt, Homo sapiens
  misc_RNA (1)...(19): siRNA sense strand
ugaggcagguaccaugguu

SEQ ID NO: 1782484 - RNA, 19 nt, Homo sapiens
  misc_RNA (1)...(19): siRNA sense strand
gagggugaauccagagaac

SEQ ID NO: 1782485 - RNA, 19 nt, Homo sapiens
  misc_RNA (1)...(19): siRNA sense strand
ugaacgggcagaggaagua

SEQ ID NO: 1782486 - RNA, 19 nt, Homo sapiens
  misc_RNA (1)...(19): siRNA sense strand
gcagguaccaugguuaaac

SEQ ID NO: 1782487 - RNA, 19 nt, Homo sapiens
  misc_RNA (1)...(19): siRNA sense strand
gcuggcaccgcuucuggua

SEQ ID NO: 1782488 - RNA, 19 nt, Homo sapiens
  misc_RNA (1)...(19): siRNA sense strand
agugugagcugagcguuga

SEQ ID NO: 1782489 - RNA, 19 nt, Homo sapiens
  misc_RNA (1)...(19): siRNA sense strand
auugugagcugugguguga

SEQ ID NO: 1782490 - RNA, 19 nt, Homo sapiens
  misc_RNA (1)...(19): siRNA sense strand
gaggcagguaccaugguua

SEQ ID NO: 1782491 - RNA, 19 nt, Homo sapiens
  misc_RNA (1)...(19): siRNA sense strand
gggcuacccugcaguugcu

SEQ ID NO: 1782492 - RNA, 19 nt, Homo sapiens
  misc_RNA (1)...(19): siRNA sense strand
ugugagcuguggugugaga

SEQ ID NO: 1782493 - RNA, 19 nt, Homo sapiens
  misc_RNA (1)...(19): siRNA sense strand
gaacgggcagaggaaguau

SEQ ID NO: 1782494 - RNA, 19 nt, Homo sapiens
  misc_RNA (1)...(19): siRNA sense strand
gcucaagccagaccugaag

SEQ ID NO: 1782495 - RNA, 19 nt, Homo sapiens
  misc_RNA (1)...(19): siRNA sense strand
gcagcaccgagaaguguga

SEQ ID NO: 1782496 - RNA, 19 nt, Homo sapiens
  misc_RNA (1)...(19): siRNA sense strand
gggugaauccagagaacaa

SEQ ID NO: 1782497 - RNA, 19 nt, Homo sapiens
  misc_RNA (1)...(19): siRNA sense strand
aguccaagcgggauuguga

SEQ ID NO: 1782498 - RNA, 19 nt, Homo sapiens
  misc_RNA (1)...(19): siRNA sense strand
ggacaaguuaggguuccaa

SEQ ID NO: 1782499 - RNA, 19 nt, Homo sapiens
  misc_RNA (1)...(19): siRNA sense strand
gagagggugaauccagaga

SEQ ID NO: 1782500 - RNA, 19 nt, Homo sapiens
  misc_RNA (1)...(19): siRNA sense strand
aggcagguaccaugguuaa

SEQ ID NO: 1782501 - RNA, 19 nt, Homo sapiens
  misc_RNA (1)...(19): siRNA sense strand
gaaaggaacucagaacaaa

SEQ ID NO: 1782502 - RNA, 19 nt, Homo sapiens
  misc_RNA (1)...(19): siRNA sense strand
ggaaauaaauccacaguuc

SEQ ID NO: 1782503 - RNA, 19 nt, Homo sapiens
  misc_RNA (1)...(19): siRNA sense strand
cagaaggacucacugauua

SEQ ID NO: 1782504 - RNA, 19 nt, Homo sapiens
  misc_RNA (1)...(19): siRNA sense strand
caucagaaaugcugguuua

SEQ ID NO: 1782505 - RNA, 19 nt, Homo sapiens
  misc_RNA (1)...(19): siRNA sense strand
gagaauaguuacacugaaa

SEQ ID NO: 1782506 - RNA, 19 nt, Homo sapiens
  misc_RNA (1)...(19): siRNA sense strand
gauauucucuccaguaguu

SEQ ID NO: 1782507 - RNA, 19 nt, Homo sapiens
  misc_RNA (1)...(19): siRNA sense strand
caaagaaacuguucaaacu

SEQ ID NO: 1782508 - RNA, 19 nt, Homo sapiens
  misc_RNA (1)...(19): siRNA sense strand
ugaaagagacccaugaaua

SEQ ID NO: 1782509 - RNA, 19 nt, Homo sapiens
  misc_RNA (1)...(19): siRNA sense strand
aaagaagucucuagugaaa

SEQ ID NO: 1782510 - RNA, 19 nt, Homo sapiens
  misc_RNA (1)...(19): siRNA sense strand
aaacacagaucuacaguuc

SEQ ID NO: 1782511 - RNA, 19 nt, Homo sapiens
  misc_RNA (1)...(19): siRNA sense strand
gaaagagacccaugaauac

SEQ ID NO: 1782512 - RNA, 19 nt, Homo sapiens
  misc_RNA (1)...(19): siRNA sense strand
guauuuagcugcagagcaa

SEQ ID NO: 1782513 - RNA, 19 nt, Homo sapiens
  misc_RNA (1)...(19): siRNA sense strand
ugucagauguuuccaauga

SEQ ID NO: 1782514 - RNA, 19 nt, Homo sapiens
  misc_RNA (1)...(19): siRNA sense strand
gaucaaauaccacuagaga

SEQ ID NO: 1782515 - RNA, 19 nt, Homo sapiens
  misc_RNA (1)...(19): siRNA sense strand
gcaaauccuggcuccauua

SEQ ID NO: 1782516 - RNA, 19 nt, Homo sapiens
  misc_RNA (1)...(19): siRNA sense strand
uaacacacaaccaccauua

SEQ ID NO: 1782517 - RNA, 19 nt, Homo sapiens
  misc_RNA (1)...(19): siRNA sense strand
ucaaggaacugaaacaaag

SEQ ID NO: 1782518 - RNA, 19 nt, Homo sapiens
  misc_RNA (1)...(19): siRNA sense strand
gcuguaauccucuauguuu

SEQ ID NO: 1782519 - RNA, 19 nt, Homo sapiens
  misc_RNA (1)...(19): siRNA sense strand
ggaaaaggauuuagcagaa

SEQ ID NO: 1782520 - RNA, 19 nt, Homo sapiens
  misc_RNA (1)...(19): siRNA sense strand
gcacaugucaguggucaua

SEQ ID NO: 1782521 - RNA, 19 nt, Homo sapiens
  misc_RNA (1)...(19): siRNA sense strand
cagccuaaauccuaucuuu

SEQ ID NO: 1782522 - RNA, 19 nt, Homo sapiens
  misc_RNA (1)...(19): siRNA sense strand
uggaagaucugaaggcaaa

SEQ ID NO: 1782523 - RNA, 19 nt, Homo sapiens
  misc_RNA (1)...(19): siRNA sense strand
cagaaaugcugguuuauac

SEQ ID NO: 1782524 - RNA, 19 nt, Homo sapiens
  misc_RNA (1)...(19): siRNA sense strand
aauccuaucuuugccauua

SEQ ID NO: 1782525 - RNA, 19 nt, Homo sapiens
  misc_RNA (1)...(19): siRNA sense strand
uaaaagaagucucuaguga

SEQ ID NO: 1782526 - RNA, 19 nt, Homo sapiens
  misc_RNA (1)...(19): siRNA sense strand
caacugaguggcugcguua

SEQ ID NO: 1782527 - RNA, 19 nt, Homo sapiens
  misc_RNA (1)...(19): siRNA sense strand
caugaauacugguuccaua

SEQ ID NO: 1782528 - RNA, 19 nt, Homo sapiens
  misc_RNA (1)...(19): siRNA sense strand
gaagagaauacuaaagaug

SEQ ID NO: 1782529 - RNA, 19 nt, Homo sapiens
  misc_RNA (1)...(19): siRNA sense strand
gaaaugcugguuuauacaa

SEQ ID NO: 1782530 - RNA, 19 nt, Homo sapiens
  misc_RNA (1)...(19): siRNA sense strand
gugacaagcaguacuauaa

SEQ ID NO: 1782531 - RNA, 19 nt, Homo sapiens
  misc_RNA (1)...(19): siRNA sense strand
gaugauauucucuccagua

SEQ ID NO: 1782532 - RNA, 19 nt, Homo sapiens
  misc_RNA (1)...(19): siRNA sense strand
acacagaucuacaguucuu

SEQ ID NO: 1782533 - RNA, 19 nt, Homo sapiens
  misc_RNA (1)...(19): siRNA sense strand
ccagaaagugcaaauaauu

SEQ ID NO: 1782534 - RNA, 19 nt, Homo sapiens
  misc_RNA (1)...(19): siRNA sense strand
cccauuagcagaucaaaua

SEQ ID NO: 1782535 - RNA, 19 nt, Homo sapiens
  misc_RNA (1)...(19): siRNA sense strand
caaagaagcacaugucagu

SEQ ID NO: 1782536 - RNA, 19 nt, Homo sapiens
  misc_RNA (1)...(19): siRNA sense strand
ugggaccacuuucagauua

SEQ ID NO: 1782537 - RNA, 19 nt, Homo sapiens
  misc_RNA (1)...(19): siRNA sense strand
ucaacaaucuucaccaaca

SEQ ID NO: 1782538 - RNA, 19 nt, Homo sapiens
  misc_RNA (1)...(19): siRNA sense strand
cagauuaucccgugaaaga

SEQ ID NO: 1782539 - RNA, 19 nt, Homo sapiens
  misc_RNA (1)...(19): siRNA sense strand
gcccaaaucagaauccaua

SEQ ID NO: 1782540 - RNA, 19 nt, Homo sapiens
  misc_RNA (1)...(19): siRNA sense strand
gcagagcaauuauuagacu

SEQ ID NO: 1782541 - RNA, 19 nt, Homo sapiens
  misc_RNA (1)...(19): siRNA sense strand
gugaagagaauacuaaaga

SEQ ID NO: 1782542 - RNA, 19 nt, Homo sapiens
  misc_RNA (1)...(19): siRNA sense strand
gaauccauauccuuaagug

SEQ ID NO: 1782543 - RNA, 19 nt, Homo sapiens
  misc_RNA (1)...(19): siRNA sense strand
gaacugaaacaaagggaau

SEQ ID NO: 1782544 - RNA, 19 nt, Homo sapiens
  misc_RNA (1)...(19): siRNA sense strand
gaacacaaagaaagaagug

SEQ ID NO: 1782545 - RNA, 19 nt, Homo sapiens
  misc_RNA (1)...(19): siRNA sense strand
gaaacugagcauuuagaaa

SEQ ID NO: 1782546 - RNA, 19 nt, Homo sapiens
  misc_RNA (1)...(19): siRNA sense strand
gaaacucgcugcaaaaugg

SEQ ID NO: 1782547 - RNA, 19 nt, Homo sapiens
  misc_RNA (1)...(19): siRNA sense strand
caaccaccauuaccauuca

SEQ ID NO: 1782548 - RNA, 19 nt, Homo sapiens
  misc_RNA (1)...(19): siRNA sense strand
gcuaagaaaggaaacugua

SEQ ID NO: 1782549 - RNA, 19 nt, Homo sapiens
  misc_RNA (1)...(19): siRNA sense strand
gacaacauucacauucuua

SEQ ID NO: 1782550 - RNA, 19 nt, Homo sapiens
  misc_RNA (1)...(19): siRNA sense strand
gaaucaggcuguuaaaaga

SEQ ID NO: 1782551 - RNA, 19 nt, Homo sapiens
  misc_RNA (1)...(19): siRNA sense strand
uaaagaugcuaccacuguu

SEQ ID NO: 1782552 - RNA, 19 nt, Homo sapiens
  misc_RNA (1)...(19): siRNA sense strand
cuagagaguguuguuauua

SEQ ID NO: 1782553 - RNA, 19 nt, Homo sapiens
  misc_RNA (1)...(19): siRNA sense strand
cugaguggcugcguuauaa

SEQ ID NO: 1782554 - RNA, 19 nt, Homo sapiens
  misc_RNA (1)...(19): siRNA sense strand
gaucacagaagcuuaguuc

SEQ ID NO: 1782555 - RNA, 19 nt, Homo sapiens
  misc_RNA (1)...(19): siRNA sense strand
acaaucaaaugcaacaaug

SEQ ID NO: 1782556 - RNA, 19 nt, Homo sapiens
  misc_RNA (1)...(19): siRNA sense strand
cuggauagguuaauaagug

SEQ ID NO: 1782557 - RNA, 19 nt, Homo sapiens
  misc_RNA (1)...(19): siRNA sense strand
aaagggaauuugcucgaaa

SEQ ID NO: 1782558 - RNA, 19 nt, Homo sapiens
  misc_RNA (1)...(19): siRNA sense strand
ucaauuuccuauagcugua

SEQ ID NO: 1782559 - RNA, 19 nt, Homo sapiens
  misc_RNA (1)...(19): siRNA sense strand
ucagaaaugcugguuuaua

SEQ ID NO: 1782560 - RNA, 19 nt, Homo sapiens
  misc_RNA (1)...(19): siRNA sense strand
gaaauaaauccacaguucu

SEQ ID NO: 1782561 - RNA, 19 nt, Homo sapiens
  misc_RNA (1)...(19): siRNA sense strand
caggaaagaugaaagaaaa

SEQ ID NO: 1782562 - RNA, 19 nt, Homo sapiens
  misc_RNA (1)...(19): siRNA sense strand
gaaaaggauuuagcagaaa

SEQ ID NO: 1782563 - RNA, 19 nt, Homo sapiens
  misc_RNA (1)...(19): siRNA sense strand
ugaaugagacaccaacuga

SEQ ID NO: 1782564 - RNA, 19 nt, Homo sapiens
  misc_RNA (1)...(19): siRNA sense strand
ugaaacacaugagucagaa

SEQ ID NO: 1782565 - RNA, 19 nt, Homo sapiens
  misc_RNA (1)...(19): siRNA sense strand
gcagaagcaggaagacauu

SEQ ID NO: 1782566 - RNA, 19 nt, Homo sapiens
  misc_RNA (1)...(19): siRNA sense strand
uguucaaacucaagagaua

SEQ ID NO: 1782567 - RNA, 19 nt, Homo sapiens
  misc_RNA (1)...(19): siRNA sense strand
caaagaaagcguccgugaa

SEQ ID NO: 1782568 - RNA, 19 nt, Homo sapiens
  misc_RNA (1)...(19): siRNA sense strand
gaguuugacaaucacauua

SEQ ID NO: 1782569 - RNA, 19 nt, Homo sapiens
  misc_RNA (1)...(19): siRNA sense strand
acaauacccugcuugaaca

SEQ ID NO: 1782570 - RNA, 19 nt, Homo sapiens
  misc_RNA (1)...(19): siRNA sense strand
uggugaaacugagcauuua

SEQ ID NO: 1782571 - RNA, 19 nt, Homo sapiens
  misc_RNA (1)...(19): siRNA sense strand
gaacucagaacaaacaaac

SEQ ID NO: 1782572 - RNA, 19 nt, Homo sapiens
  misc_RNA (1)...(19): siRNA sense strand
guagacaacauucacauuc

SEQ ID NO: 1782573 - RNA, 19 nt, Homo sapiens
  misc_RNA (1)...(19): siRNA sense strand
acaggacacucuagaugaa

SEQ ID NO: 1782574 - RNA, 19 nt, Homo sapiens
  misc_RNA (1)...(19): siRNA sense strand
ccacaguucuugacauguc

SEQ ID NO: 1782575 - RNA, 19 nt, Homo sapiens
  misc_RNA (1)...(19): siRNA sense strand
gaagacauaccuguuagug

SEQ ID NO: 1782576 - RNA, 19 nt, Homo sapiens
  misc_RNA (1)...(19): siRNA sense strand
aaugaagacauaccuguua

SEQ ID NO: 1782577 - RNA, 19 nt, Homo sapiens
  misc_RNA (1)...(19): siRNA sense strand
aagaaacuguucaaacuca

SEQ ID NO: 1782578 - RNA, 19 nt, Homo sapiens
  misc_RNA (1)...(19): siRNA sense strand
cgaaauguagcaucuaaau

SEQ ID NO: 1782579 - RNA, 19 nt, Homo sapiens
  misc_RNA (1)...(19): siRNA sense strand
ucaggugccuaauauugaa

SEQ ID NO: 1782580 - RNA, 19 nt, Homo sapiens
  misc_RNA (1)...(19): siRNA sense strand
ccaaugaucccaccacauc

SEQ ID NO: 1782581 - RNA, 19 nt, Homo sapiens
  misc_RNA (1)...(19): siRNA sense strand
cgaaaggaacucagaacaa

SEQ ID NO: 1782582 - RNA, 19 nt, Homo sapiens
  misc_RNA (1)...(19): siRNA sense strand
gaauacugguuccauaaaa

SEQ ID NO: 1782583 - RNA, 19 nt, Homo sapiens
  misc_RNA (1)...(19): siRNA sense strand
gaaagcguccgugaagcua

SEQ ID NO: 1782584 - RNA, 19 nt, Homo sapiens
  misc_RNA (1)...(19): siRNA sense strand
ugacaugucuaaugauugc

SEQ ID NO: 1782585 - RNA, 19 nt, Homo sapiens
  misc_RNA (1)...(19): siRNA sense strand
uguaacagcugagcaaauc

SEQ ID NO: 1782586 - RNA, 19 nt, Homo sapiens
  misc_RNA (1)...(19): siRNA sense strand
gcaucuaaauccaggaaag

SEQ ID NO: 1782587 - RNA, 19 nt, Homo sapiens
  misc_RNA (1)...(19): siRNA sense strand
ggugaauugucagauguuu

SEQ ID NO: 1782588 - RNA, 19 nt, Homo sapiens
  misc_RNA (1)...(19): siRNA sense strand
gacaauucuuccuuaaauc

SEQ ID NO: 1782589 - RNA, 19 nt, Homo sapiens
  misc_RNA (1)...(19): siRNA sense strand
gaacuuacuguuguuggaa

SEQ ID NO: 1782590 - RNA, 19 nt, Homo sapiens
  misc_RNA (1)...(19): siRNA sense strand
gaaauuggaaguagcaaaa

SEQ ID NO: 1782591 - RNA, 19 nt, Homo sapiens
  misc_RNA (1)...(19): siRNA sense strand
ucaaauaccacuagagagu

SEQ ID NO: 1782592 - RNA, 19 nt, Homo sapiens
  misc_RNA (1)...(19): siRNA sense strand
gaaauguagcaucuaaauc

SEQ ID NO: 1782593 - RNA, 19 nt, Homo sapiens
  misc_RNA (1)...(19): siRNA sense strand
gaagaucugaaggcaaauu

SEQ ID NO: 1782594 - RNA, 19 nt, Homo sapiens
  misc_RNA (1)...(19): siRNA sense strand
caaggaaagaugaaugaga

SEQ ID NO: 1782595 - RNA, 19 nt, Homo sapiens
  misc_RNA (1)...(19): siRNA sense strand
gaaaaugaaaccacaagaa

SEQ ID NO: 1782596 - RNA, 19 nt, Homo sapiens
  misc_RNA (1)...(19): siRNA sense strand
aaacaggacacucuagaug

SEQ ID NO: 1782597 - RNA, 19 nt, Homo sapiens
  misc_RNA (1)...(19): siRNA sense strand
aaagaaagcguccgugaag

SEQ ID NO: 1782598 - RNA, 19 nt, Homo sapiens
  misc_RNA (1)...(19): siRNA sense strand
gacaauacccugcuugaac

SEQ ID NO: 1782599 - RNA, 19 nt, Homo sapiens
  misc_RNA (1)...(19): siRNA sense strand
ggagaaaaccaaagaauca

SEQ ID NO: 1782600 - RNA, 19 nt, Homo sapiens
  misc_RNA (1)...(19): siRNA sense strand
caaaagcucuggaagaucu

SEQ ID NO: 1782601 - RNA, 19 nt, Homo sapiens
  misc_RNA (1)...(19): siRNA sense strand
gaaaggaacucagaacaaa

SEQ ID NO: 1782602 - RNA, 19 nt, Homo sapiens
  misc_RNA (1)...(19): siRNA sense strand
ggaaauaaauccacaguuc

SEQ ID NO: 1782603 - RNA, 19 nt, Homo sapiens
  misc_RNA (1)...(19): siRNA sense strand
cagaaggacucacugauua

SEQ ID NO: 1782604 - RNA, 19 nt, Homo sapiens
  misc_RNA (1)...(19): siRNA sense strand
caucagaaaugcugguuua

SEQ ID NO: 1782605 - RNA, 19 nt, Homo sapiens
  misc_RNA (1)...(19): siRNA sense strand
gagaauaguuacacugaaa

SEQ ID NO: 1782606 - RNA, 19 nt, Homo sapiens
  misc_RNA (1)...(19): siRNA sense strand
gauauucucuccaguaguu

SEQ ID NO: 1782607 - RNA, 19 nt, Homo sapiens
  misc_RNA (1)...(19): siRNA sense strand
caaagaaacuguucaaacu

SEQ ID NO: 1782608 - RNA, 19 nt, Homo sapiens
  misc_RNA (1)...(19): siRNA sense strand
ugaaagagacccaugaaua

SEQ ID NO: 1782609 - RNA, 19 nt, Homo sapiens
  misc_RNA (1)...(19): siRNA sense strand
aaagaagucucuagugaaa

SEQ ID NO: 1782610 - RNA, 19 nt, Homo sapiens
  misc_RNA (1)...(19): siRNA sense strand
aaacacagaucuacaguuc

SEQ ID NO: 1782611 - RNA, 19 nt, Homo sapiens
  misc_RNA (1)...(19): siRNA sense strand
gaaagagacccaugaauac

SEQ ID NO: 1782612 - RNA, 19 nt, Homo sapiens
  misc_RNA (1)...(19): siRNA sense strand
guauuuagcugcagagcaa

SEQ ID NO: 1782613 - RNA, 19 nt, Homo sapiens
  misc_RNA (1)...(19): siRNA sense strand
ugucagauguuuccaauga

SEQ ID NO: 1782614 - RNA, 19 nt, Homo sapiens
  misc_RNA (1)...(19): siRNA sense strand
gaucaaauaccacuagaga

SEQ ID NO: 1782615 - RNA, 19 nt, Homo sapiens
  misc_RNA (1)...(19): siRNA sense strand
gcaaauccuggcuccauua

SEQ ID NO: 1782616 - RNA, 19 nt, Homo sapiens
  misc_RNA (1)...(19): siRNA sense strand
uaacacacaaccaccauua

SEQ ID NO: 1782617 - RNA, 19 nt, Homo sapiens
  misc_RNA (1)...(19): siRNA sense strand
ucaaggaacugaaacaaag

SEQ ID NO: 1782618 - RNA, 19 nt, Homo sapiens
  misc_RNA (1)...(19): siRNA sense strand
gcuguaauccucuauguuu

SEQ ID NO: 1782619 - RNA, 19 nt, Homo sapiens
  misc_RNA (1)...(19): siRNA sense strand
ggaaaaggauuuagcagaa

SEQ ID NO: 1782620 - RNA, 19 nt, Homo sapiens
  misc_RNA (1)...(19): siRNA sense strand
gcacaugucaguggucaua

SEQ ID NO: 1782621 - RNA, 19 nt, Homo sapiens
  misc_RNA (1)...(19): siRNA sense strand
cagccuaaauccuaucuuu

SEQ ID NO: 1782622 - RNA, 19 nt, Homo sapiens
  misc_RNA (1)...(19): siRNA sense strand
uggaagaucugaaggcaaa

SEQ ID NO: 1782623 - RNA, 19 nt, Homo sapiens
  misc_RNA (1)...(19): siRNA sense strand
cagaaaugcugguuuauac

SEQ ID NO: 1782624 - RNA, 19 nt, Homo sapiens
  misc_RNA (1)...(19): siRNA sense strand
aauccuaucuuugccauua

SEQ ID NO: 1782625 - RNA, 19 nt, Homo sapiens
  misc_RNA (1)...(19): siRNA sense strand
uaaaagaagucucuaguga

SEQ ID NO: 1782626 - RNA, 19 nt, Homo sapiens
  misc_RNA (1)...(19): siRNA sense strand
caacugaguggcugcguua

SEQ ID NO: 1782627 - RNA, 19 nt, Homo sapiens
  misc_RNA (1)...(19): siRNA sense strand
caugaauacugguuccaua

SEQ ID NO: 1782628 - RNA, 19 nt, Homo sapiens
  misc_RNA (1)...(19): siRNA sense strand
gaagagaauacuaaagaug

SEQ ID NO: 1782629 - RNA, 19 nt, Homo sapiens
  misc_RNA (1)...(19): siRNA sense strand
gaaaugcugguuuauacaa

SEQ ID NO: 1782630 - RNA, 19 nt, Homo sapiens
  misc_RNA (1)...(19): siRNA sense strand
gugacaagcaguacuauaa

SEQ ID NO: 1782631 - RNA, 19 nt, Homo sapiens
  misc_RNA (1)...(19): siRNA sense strand
gaugauauucucuccagua

SEQ ID NO: 1782632 - RNA, 19 nt, Homo sapiens
  misc_RNA (1)...(19): siRNA sense strand
acacagaucuacaguucuu

SEQ ID NO: 1782633 - RNA, 19 nt, Homo sapiens
  misc_RNA (1)...(19): siRNA sense strand
ccagaaagugcaaauaauu

SEQ ID NO: 1782634 - RNA, 19 nt, Homo sapiens
  misc_RNA (1)...(19): siRNA sense strand
cccauuagcagaucaaaua

SEQ ID NO: 1782635 - RNA, 19 nt, Homo sapiens
  misc_RNA (1)...(19): siRNA sense strand
caaagaagcacaugucagu

SEQ ID NO: 1782636 - RNA, 19 nt, Homo sapiens
  misc_RNA (1)...(19): siRNA sense strand
ugggaccacuuucagauua

SEQ ID NO: 1782637 - RNA, 19 nt, Homo sapiens
  misc_RNA (1)...(19): siRNA sense strand
ucaacaaucuucaccaaca

SEQ ID NO: 1782638 - RNA, 19 nt, Homo sapiens
  misc_RNA (1)...(19): siRNA sense strand
cagauuaucccgugaaaga

SEQ ID NO: 1782639 - RNA, 19 nt, Homo sapiens
  misc_RNA (1)...(19): siRNA sense strand
gcccaaaucagaauccaua

SEQ ID NO: 1782640 - RNA, 19 nt, Homo sapiens
  misc_RNA (1)...(19): siRNA sense strand
gcagagcaauuauuagacu

SEQ ID NO: 1782641 - RNA, 19 nt, Homo sapiens
  misc_RNA (1)...(19): siRNA sense strand
gugaagagaauacuaaaga

SEQ ID NO: 1782642 - RNA, 19 nt, Homo sapiens
  misc_RNA (1)...(19): siRNA sense strand
gaauccauauccuuaagug

SEQ ID NO: 1782643 - RNA, 19 nt, Homo sapiens
  misc_RNA (1)...(19): siRNA sense strand
gaacugaaacaaagggaau

SEQ ID NO: 1782644 - RNA, 19 nt, Homo sapiens
  misc_RNA (1)...(19): siRNA sense strand
gaacacaaagaaagaagug

SEQ ID NO: 1782645 - RNA, 19 nt, Homo sapiens
  misc_RNA (1)...(19): siRNA sense strand
gaaacugagcauuuagaaa

SEQ ID NO: 1782646 - RNA, 19 nt, Homo sapiens
  misc_RNA (1)...(19): siRNA sense strand
gaaacucgcugcaaaaugg

SEQ ID NO: 1782647 - RNA, 19 nt, Homo sapiens
  misc_RNA (1)...(19): siRNA sense strand
caaccaccauuaccauuca

SEQ ID NO: 1782648 - RNA, 19 nt, Homo sapiens
  misc_RNA (1)...(19): siRNA sense strand
gcuaagaaaggaaacugua

SEQ ID NO: 1782649 - RNA, 19 nt, Homo sapiens
  misc_RNA (1)...(19): siRNA sense strand
gacaacauucacauucuua

SEQ ID NO: 1782650 - RNA, 19 nt, Homo sapiens
  misc_RNA (1)...(19): siRNA sense strand
gaaucaggcuguuaaaaga

SEQ ID NO: 1782651 - RNA, 19 nt, Homo sapiens
  misc_RNA (1)...(19): siRNA sense strand
uaaagaugcuaccacuguu

SEQ ID NO: 1782652 - RNA, 19 nt, Homo sapiens
  misc_RNA (1)...(19): siRNA sense strand
cuagagaguguuguuauua

SEQ ID NO: 1782653 - RNA, 19 nt, Homo sapiens
  misc_RNA (1)...(19): siRNA sense strand
cugaguggcugcguuauaa

SEQ ID NO: 1782654 - RNA, 19 nt, Homo sapiens
  misc_RNA (1)...(19): siRNA sense strand
gaucacagaagcuuaguuc

SEQ ID NO: 1782655 - RNA, 19 nt, Homo sapiens
  misc_RNA (1)...(19): siRNA sense strand
acaaucaaaugcaacaaug

SEQ ID NO: 1782656 - RNA, 19 nt, Homo sapiens
  misc_RNA (1)...(19): siRNA sense strand
cuggauagguuaauaagug

SEQ ID NO: 1782657 - RNA, 19 nt, Homo sapiens
  misc_RNA (1)...(19): siRNA sense strand
aaagggaauuugcucgaaa

SEQ ID NO: 1782658 - RNA, 19 nt, Homo sapiens
  misc_RNA (1)...(19): siRNA sense strand
ucaauuuccuauagcugua

SEQ ID NO: 1782659 - RNA, 19 nt, Homo sapiens
  misc_RNA (1)...(19): siRNA sense strand
ucagaaaugcugguuuaua

SEQ ID NO: 1782660 - RNA, 19 nt, Homo sapiens
  misc_RNA (1)...(19): siRNA sense strand
gaaauaaauccacaguucu

SEQ ID NO: 1782661 - RNA, 19 nt, Homo sapiens
  misc_RNA (1)...(19): siRNA sense strand
caggaaagaugaaagaaaa

SEQ ID NO: 1782662 - RNA, 19 nt, Homo sapiens
  misc_RNA (1)...(19): siRNA sense strand
gaaaaggauuuagcagaaa

SEQ ID NO: 1782663 - RNA, 19 nt, Homo sapiens
  misc_RNA (1)...(19): siRNA sense strand
ugaaugagacaccaacuga

SEQ ID NO: 1782664 - RNA, 19 nt, Homo sapiens
  misc_RNA (1)...(19): siRNA sense strand
ugaaacacaugagucagaa

SEQ ID NO: 1782665 - RNA, 19 nt, Homo sapiens
  misc_RNA (1)...(19): siRNA sense strand
gcagaagcaggaagacauu

SEQ ID NO: 1782666 - RNA, 19 nt, Homo sapiens
  misc_RNA (1)...(19): siRNA sense strand
uguucaaacucaagagaua

SEQ ID NO: 1782667 - RNA, 19 nt, Homo sapiens
  misc_RNA (1)...(19): siRNA sense strand
caaagaaagcguccgugaa

SEQ ID NO: 1782668 - RNA, 19 nt, Homo sapiens
  misc_RNA (1)...(19): siRNA sense strand
gaguuugacaaucacauua

SEQ ID NO: 1782669 - RNA, 19 nt, Homo sapiens
  misc_RNA (1)...(19): siRNA sense strand
acaauacccugcuugaaca

SEQ ID NO: 1782670 - RNA, 19 nt, Homo sapiens
  misc_RNA (1)...(19): siRNA sense strand
uggugaaacugagcauuua

SEQ ID NO: 1782671 - RNA, 19 nt, Homo sapiens
  misc_RNA (1)...(19): siRNA sense strand
gaacucagaacaaacaaac

SEQ ID NO: 1782672 - RNA, 19 nt, Homo sapiens
  misc_RNA (1)...(19): siRNA sense strand
guagacaacauucacauuc

SEQ ID NO: 1782673 - RNA, 19 nt, Homo sapiens
  misc_RNA (1)...(19): siRNA sense strand
acaggacacucuagaugaa

SEQ ID NO: 1782674 - RNA, 19 nt, Homo sapiens
  misc_RNA (1)...(19): siRNA sense strand
ccacaguucuugacauguc

SEQ ID NO: 1782675 - RNA, 19 nt, Homo sapiens
  misc_RNA (1)...(19): siRNA sense strand
gaagacauaccuguuagug

SEQ ID NO: 1782676 - RNA, 19 nt, Homo sapiens
  misc_RNA (1)...(19): siRNA sense strand
aaugaagacauaccuguua

SEQ ID NO: 1782677 - RNA, 19 nt, Homo sapiens
  misc_RNA (1)...(19): siRNA sense strand
aagaaacuguucaaacuca

SEQ ID NO: 1782678 - RNA, 19 nt, Homo sapiens
  misc_RNA (1)...(19): siRNA sense strand
cgaaauguagcaucuaaau

SEQ ID NO: 1782679 - RNA, 19 nt, Homo sapiens
  misc_RNA (1)...(19): siRNA sense strand
ucaggugccuaauauugaa

SEQ ID NO: 1782680 - RNA, 19 nt, Homo sapiens
  misc_RNA (1)...(19): siRNA sense strand
ccaaugaucccaccacauc

SEQ ID NO: 1782681 - RNA, 19 nt, Homo sapiens
  misc_RNA (1)...(19): siRNA sense strand
cgaaaggaacucagaacaa

SEQ ID NO: 1782682 - RNA, 19 nt, Homo sapiens
  misc_RNA (1)...(19): siRNA sense strand
gaauacugguuccauaaaa

SEQ ID NO: 1782683 - RNA, 19 nt, Homo sapiens
  misc_RNA (1)...(19): siRNA sense strand
gaaagcguccgugaagcua

SEQ ID NO: 1782684 - RNA, 19 nt, Homo sapiens
  misc_RNA (1)...(19): siRNA sense strand
ugacaugucuaaugauugc

SEQ ID NO: 1782685 - RNA, 19 nt, Homo sapiens
  misc_RNA (1)...(19): siRNA sense strand
uguaacagcugagcaaauc

SEQ ID NO: 1782686 - RNA, 19 nt, Homo sapiens
  misc_RNA (1)...(19): siRNA sense strand
gcaucuaaauccaggaaag

SEQ ID NO: 1782687 - RNA, 19 nt, Homo sapiens
  misc_RNA (1)...(19): siRNA sense strand
ggugaauugucagauguuu

SEQ ID NO: 1782688 - RNA, 19 nt, Homo sapiens
  misc_RNA (1)...(19): siRNA sense strand
gacaauucuuccuuaaauc

SEQ ID NO: 1782689 - RNA, 19 nt, Homo sapiens
  misc_RNA (1)...(19): siRNA sense strand
gaacuuacuguuguuggaa

SEQ ID NO: 1782690 - RNA, 19 nt, Homo sapiens
  misc_RNA (1)...(19): siRNA sense strand
gaaauuggaaguagcaaaa

SEQ ID NO: 1782691 - RNA, 19 nt, Homo sapiens
  misc_RNA (1)...(19): siRNA sense strand
ucaaauaccacuagagagu

SEQ ID NO: 1782692 - RNA, 19 nt, Homo sapiens
  misc_RNA (1)...(19): siRNA sense strand
gaaauguagcaucuaaauc

SEQ ID NO: 1782693 - RNA, 19 nt, Homo sapiens
  misc_RNA (1)...(19): siRNA sense strand
gaagaucugaaggcaaauu

SEQ ID NO: 1782694 - RNA, 19 nt, Homo sapiens
  misc_RNA (1)...(19): siRNA sense strand
caaggaaagaugaaugaga

SEQ ID NO: 1782695 - RNA, 19 nt, Homo sapiens
  misc_RNA (1)...(19): siRNA sense strand
gaaaaugaaaccacaagaa

SEQ ID NO: 1782696 - RNA, 19 nt, Homo sapiens
  misc_RNA (1)...(19): siRNA sense strand
aaacaggacacucuagaug

SEQ ID NO: 1782697 - RNA, 19 nt, Homo sapiens
  misc_RNA (1)...(19): siRNA sense strand
aaagaaagcguccgugaag

SEQ ID NO: 1782698 - RNA, 19 nt, Homo sapiens
  misc_RNA (1)...(19): siRNA sense strand
gacaauacccugcuugaac

SEQ ID NO: 1782699 - RNA, 19 nt, Homo sapiens
  misc_RNA (1)...(19): siRNA sense strand
ggagaaaaccaaagaauca

SEQ ID NO: 1782700 - RNA, 19 nt, Homo sapiens
  misc_RNA (1)...(19): siRNA sense strand
caaaagcucuggaagaucu

SEQ ID NO: 1782701 - RNA, 19 nt, Homo sapiens
  misc_RNA (1)...(19): siRNA sense strand
ggucugagcuuugaaacua

SEQ ID NO: 1782702 - RNA, 19 nt, Homo sapiens
  misc_RNA (1)...(19): siRNA sense strand
aaagagagcuguuucuaga

SEQ ID NO: 1782703 - RNA, 19 nt, Homo sapiens
  misc_RNA (1)...(19): siRNA sense strand
gacaacagcaaucaaauua

SEQ ID NO: 1782704 - RNA, 19 nt, Homo sapiens
  misc_RNA (1)...(19): siRNA sense strand
caacagcaaucaaauuaug

SEQ ID NO: 1782705 - RNA, 19 nt, Homo sapiens
  misc_RNA (1)...(19): siRNA sense strand
ggugggaacuauaaugauu

SEQ ID NO: 1782706 - RNA, 19 nt, Homo sapiens
  misc_RNA (1)...(19): siRNA sense strand
ggacaacagcaaucaaauu

SEQ ID NO: 1782707 - RNA, 19 nt, Homo sapiens
  misc_RNA (1)...(19): siRNA sense strand
gauaugaugguuacaauga

SEQ ID NO: 1782708 - RNA, 19 nt, Homo sapiens
  misc_RNA (1)...(19): siRNA sense strand
gcauaauugugaagugaaa

SEQ ID NO: 1782709 - RNA, 19 nt, Homo sapiens
  misc_RNA (1)...(19): siRNA sense strand
ggagguggaucuggcaauu

SEQ ID NO: 1782710 - RNA, 19 nt, Homo sapiens
  misc_RNA (1)...(19): siRNA sense strand
gaugauaguuuacgagaac

SEQ ID NO: 1782711 - RNA, 19 nt, Homo sapiens
  misc_RNA (1)...(19): siRNA sense strand
guucagaaauaccacacua

SEQ ID NO: 1782712 - RNA, 19 nt, Homo sapiens
  misc_RNA (1)...(19): siRNA sense strand
gggcauaauugugaaguga

SEQ ID NO: 1782713 - RNA, 19 nt, Homo sapiens
  misc_RNA (1)...(19): siRNA sense strand
gaagacaggcagaguggaa

SEQ ID NO: 1782714 - RNA, 19 nt, Homo sapiens
  misc_RNA (1)...(19): siRNA sense strand
cagcagagguaguuaugga

SEQ ID NO: 1782715 - RNA, 19 nt, Homo sapiens
  misc_RNA (1)...(19): siRNA sense strand
caaaggaaccagagcaguu

SEQ ID NO: 1782716 - RNA, 19 nt, Homo sapiens
  misc_RNA (1)...(19): siRNA sense strand
ggaagugguggauauggua

SEQ ID NO: 1782717 - RNA, 19 nt, Homo sapiens
  misc_RNA (1)...(19): siRNA sense strand
gaaccaaagagagcuguuu

SEQ ID NO: 1782718 - RNA, 19 nt, Homo sapiens
  misc_RNA (1)...(19): siRNA sense strand
gguccugguuauaguagua

SEQ ID NO: 1782719 - RNA, 19 nt, Homo sapiens
  misc_RNA (1)...(19): siRNA sense strand
gguggaaacuuugguggaa

SEQ ID NO: 1782720 - RNA, 19 nt, Homo sapiens
  misc_RNA (1)...(19): siRNA sense strand
uagagaggauucuguaaag

SEQ ID NO: 1782721 - RNA, 19 nt, Homo sapiens
  misc_RNA (1)...(19): siRNA sense strand
gauugaaaccauagaaguu

SEQ ID NO: 1782722 - RNA, 19 nt, Homo sapiens
  misc_RNA (1)...(19): siRNA sense strand
gaaauuauaguggacaaca

SEQ ID NO: 1782723 - RNA, 19 nt, Homo sapiens
  misc_RNA (1)...(19): siRNA sense strand
ccaaagagagcuguuucua

SEQ ID NO: 1782724 - RNA, 19 nt, Homo sapiens
  misc_RNA (1)...(19): siRNA sense strand
gaugguggauauaauggau

SEQ ID NO: 1782725 - RNA, 19 nt, Homo sapiens
  misc_RNA (1)...(19): siRNA sense strand
gagaggauuugcuuuugua

SEQ ID NO: 1782726 - RNA, 19 nt, Homo sapiens
  misc_RNA (1)...(19): siRNA sense strand
agagagcuguuucuagaga

SEQ ID NO: 1782727 - RNA, 19 nt, Homo sapiens
  misc_RNA (1)...(19): siRNA sense strand
ggagggccaugauccaaag

SEQ ID NO: 1782728 - RNA, 19 nt, Homo sapiens
  misc_RNA (1)...(19): siRNA sense strand
uuaaugggcauaauuguga

SEQ ID NO: 1782729 - RNA, 19 nt, Homo sapiens
  misc_RNA (1)...(19): siRNA sense strand
caaagagagcuguuucuag

SEQ ID NO: 1782730 - RNA, 19 nt, Homo sapiens
  misc_RNA (1)...(19): siRNA sense strand
gaggugaugguggauauaa

SEQ ID NO: 1782731 - RNA, 19 nt, Homo sapiens
  misc_RNA (1)...(19): siRNA sense strand
aaccagagcaguugagaaa

SEQ ID NO: 1782732 - RNA, 19 nt, Homo sapiens
  misc_RNA (1)...(19): siRNA sense strand
cuagagaggauucuguaaa

SEQ ID NO: 1782733 - RNA, 19 nt, Homo sapiens
  misc_RNA (1)...(19): siRNA sense strand
ggagguggaggauaugaug

SEQ ID NO: 1782734 - RNA, 19 nt, Homo sapiens
  misc_RNA (1)...(19): siRNA sense strand
gacuuauucuuguguugaa

SEQ ID NO: 1782735 - RNA, 19 nt, Homo sapiens
  misc_RNA (1)...(19): siRNA sense strand
gaaccagagcaguugagaa

SEQ ID NO: 1782736 - RNA, 19 nt, Homo sapiens
  misc_RNA (1)...(19): siRNA sense strand
agagguggaugcagcaaug

SEQ ID NO: 1782737 - RNA, 19 nt, Homo sapiens
  misc_RNA (1)...(19): siRNA sense strand
caagguugaugggcgugua

SEQ ID NO: 1782738 - RNA, 19 nt, Homo sapiens
  misc_RNA (1)...(19): siRNA sense strand
gcuuugaaacuacagauga

SEQ ID NO: 1782739 - RNA, 19 nt, Homo sapiens
  misc_RNA (1)...(19): siRNA sense strand
caagauugaaaccauagaa

SEQ ID NO: 1782740 - RNA, 19 nt, Homo sapiens
  misc_RNA (1)...(19): siRNA sense strand
ggugguggcagcagaggua

SEQ ID NO: 1782741 - RNA, 19 nt, Homo sapiens
  misc_RNA (1)...(19): siRNA sense strand
gggccaugauccaaaggaa

SEQ ID NO: 1782742 - RNA, 19 nt, Homo sapiens
  misc_RNA (1)...(19): siRNA sense strand
uugagagacuacuuugaaa

SEQ ID NO: 1782743 - RNA, 19 nt, Homo sapiens
  misc_RNA (1)...(19): siRNA sense strand
ggugaugguggauauaaug

SEQ ID NO: 1782744 - RNA, 19 nt, Homo sapiens
  misc_RNA (1)...(19): siRNA sense strand
guggacaacagcaaucaaa

SEQ ID NO: 1782745 - RNA, 19 nt, Homo sapiens
  misc_RNA (1)...(19): siRNA sense strand
gaggauaugaugguuacaa

SEQ ID NO: 1782746 - RNA, 19 nt, Homo sapiens
  misc_RNA (1)...(19): siRNA sense strand
ugguggauauaauggauuu

SEQ ID NO: 1782747 - RNA, 19 nt, Homo sapiens
  misc_RNA (1)...(19): siRNA sense strand
uggaaacuuugguggaaga

SEQ ID NO: 1782748 - RNA, 19 nt, Homo sapiens
  misc_RNA (1)...(19): siRNA sense strand
ccaaggugguggauauggu

SEQ ID NO: 1782749 - RNA, 19 nt, Homo sapiens
  misc_RNA (1)...(19): siRNA sense strand
cagauugugugguaaugag

SEQ ID NO: 1782750 - RNA, 19 nt, Homo sapiens
  misc_RNA (1)...(19): siRNA sense strand
guggugggaacuauaauga

SEQ ID NO: 1782751 - RNA, 19 nt, Homo sapiens
  misc_RNA (1)...(19): siRNA sense strand
ugguggagguggaggauau

SEQ ID NO: 1782752 - RNA, 19 nt, Homo sapiens
  misc_RNA (1)...(19): siRNA sense strand
uaaugggcauaauugugaa

SEQ ID NO: 1782753 - RNA, 19 nt, Homo sapiens
  misc_RNA (1)...(19): siRNA sense strand
ggaggugguggagguaauu

SEQ ID NO: 1782754 - RNA, 19 nt, Homo sapiens
  misc_RNA (1)...(19): siRNA sense strand
gauaguuuacgagaacauu

SEQ ID NO: 1782755 - RNA, 19 nt, Homo sapiens
  misc_RNA (1)...(19): siRNA sense strand
ggauaugaugguuacaaug

SEQ ID NO: 1782756 - RNA, 19 nt, Homo sapiens
  misc_RNA (1)...(19): siRNA sense strand
gagguggaucuggcaauuu

SEQ ID NO: 1782757 - RNA, 19 nt, Homo sapiens
  misc_RNA (1)...(19): siRNA sense strand
acaaugaaggaggaaauuu

SEQ ID NO: 1782758 - RNA, 19 nt, Homo sapiens
  misc_RNA (1)...(19): siRNA sense strand
gguggaggauaugaugguu

SEQ ID NO: 1782759 - RNA, 19 nt, Homo sapiens
  misc_RNA (1)...(19): siRNA sense strand
ugaugggcguguaguggaa

SEQ ID NO: 1782760 - RNA, 19 nt, Homo sapiens
  misc_RNA (1)...(19): siRNA sense strand
gugggaacuauaaugauuu

SEQ ID NO: 1782761 - RNA, 19 nt, Homo sapiens
  misc_RNA (1)...(19): siRNA sense strand
gaggugaugguggcaacua

SEQ ID NO: 1782762 - RNA, 19 nt, Homo sapiens
  misc_RNA (1)...(19): siRNA sense strand
uaauggauuuggaggugau

SEQ ID NO: 1782763 - RNA, 19 nt, Homo sapiens
  misc_RNA (1)...(19): siRNA sense strand
ggaggugaugguggauaua

SEQ ID NO: 1782764 - RNA, 19 nt, Homo sapiens
  misc_RNA (1)...(19): siRNA sense strand
aaaggaaccagagcaguug

SEQ ID NO: 1782765 - RNA, 19 nt, Homo sapiens
  misc_RNA (1)...(19): siRNA sense strand
uuugagagacuacuuugaa

SEQ ID NO: 1782766 - RNA, 19 nt, Homo sapiens
  misc_RNA (1)...(19): siRNA sense strand
gaugaucaugauacaguug

SEQ ID NO: 1782767 - RNA, 19 nt, Homo sapiens
  misc_RNA (1)...(19): siRNA sense strand
caaugaaggaggaaauuuu

SEQ ID NO: 1782768 - RNA, 19 nt, Homo sapiens
  misc_RNA (1)...(19): siRNA sense strand
uaugaugguuacaaugaag

SEQ ID NO: 1782769 - RNA, 19 nt, Homo sapiens
  misc_RNA (1)...(19): siRNA sense strand
uggccgugguggaaacuuu

SEQ ID NO: 1782770 - RNA, 19 nt, Homo sapiens
  misc_RNA (1)...(19): siRNA sense strand
ugacuuauucuuguguuga

SEQ ID NO: 1782771 - RNA, 19 nt, Homo sapiens
  misc_RNA (1)...(19): siRNA sense strand
gugguggugggaacuauaa

SEQ ID NO: 1782772 - RNA, 19 nt, Homo sapiens
  misc_RNA (1)...(19): siRNA sense strand
aggauaugaugguuacaau

SEQ ID NO: 1782773 - RNA, 19 nt, Homo sapiens
  misc_RNA (1)...(19): siRNA sense strand
uggaggauaugaugguuac

SEQ ID NO: 1782774 - RNA, 19 nt, Homo sapiens
  misc_RNA (1)...(19): siRNA sense strand
gaggaggugaugguggaua

SEQ ID NO: 1782775 - RNA, 19 nt, Homo sapiens
  misc_RNA (1)...(19): siRNA sense strand
ggaaccagagcaguugaga

SEQ ID NO: 1782776 - RNA, 19 nt, Homo sapiens
  misc_RNA (1)...(19): siRNA sense strand
gcaagauugaaaccauaga

SEQ ID NO: 1782777 - RNA, 19 nt, Homo sapiens
  misc_RNA (1)...(19): siRNA sense strand
gugcccaucuaacagugaa

SEQ ID NO: 1782778 - RNA, 19 nt, Homo sapiens
  misc_RNA (1)...(19): siRNA sense strand
gaggagggccaugauccaa

SEQ ID NO: 1782779 - RNA, 19 nt, Homo sapiens
  misc_RNA (1)...(19): siRNA sense strand
ugguggaagugguggauau

SEQ ID NO: 1782780 - RNA, 19 nt, Homo sapiens
  misc_RNA (1)...(19): siRNA sense strand
guggaggauaugaugguua

SEQ ID NO: 1782781 - RNA, 19 nt, Homo sapiens
  misc_RNA (1)...(19): siRNA sense strand
ggugguccugguuauagua

SEQ ID NO: 1782782 - RNA, 19 nt, Homo sapiens
  misc_RNA (1)...(19): siRNA sense strand
gcuuugguuuugugacuua

SEQ ID NO: 1782783 - RNA, 19 nt, Homo sapiens
  misc_RNA (1)...(19): siRNA sense strand
aggaggugaugguggauau

SEQ ID NO: 1782784 - RNA, 19 nt, Homo sapiens
  misc_RNA (1)...(19): siRNA sense strand
ggugguggugggaacuaua

SEQ ID NO: 1782785 - RNA, 19 nt, Homo sapiens
  misc_RNA (1)...(19): siRNA sense strand
gugacuuauucuuguguug

SEQ ID NO: 1782786 - RNA, 19 nt, Homo sapiens
  misc_RNA (1)...(19): siRNA sense strand
gguggucugagcuuugaaa

SEQ ID NO: 1782787 - RNA, 19 nt, Homo sapiens
  misc_RNA (1)...(19): siRNA sense strand
agaugauaguuuacgagaa

SEQ ID NO: 1782788 - RNA, 19 nt, Homo sapiens
  misc_RNA (1)...(19): siRNA sense strand
gauaugguagcagaagguu

SEQ ID NO: 1782789 - RNA, 19 nt, Homo sapiens
  misc_RNA (1)...(19): siRNA sense strand
ggauaugguagcagaaggu

SEQ ID NO: 1782790 - RNA, 19 nt, Homo sapiens
  misc_RNA (1)...(19): siRNA sense strand
gguggcagcagagguaguu

SEQ ID NO: 1782791 - RNA, 19 nt, Homo sapiens
  misc_RNA (1)...(19): siRNA sense strand
uuggugguauuaaagaaga

SEQ ID NO: 1782792 - RNA, 19 nt, Homo sapiens
  misc_RNA (1)...(19): siRNA sense strand
gguggugggaacuauaaug

SEQ ID NO: 1782793 - RNA, 19 nt, Homo sapiens
  misc_RNA (1)...(19): siRNA sense strand
accaggauauggaaaccaa

SEQ ID NO: 1782794 - RNA, 19 nt, Homo sapiens
  misc_RNA (1)...(19): siRNA sense strand
uggauauaauggauuugga

SEQ ID NO: 1782795 - RNA, 19 nt, Homo sapiens
  misc_RNA (1)...(19): siRNA sense strand
ggaggagggccaugaucca

SEQ ID NO: 1782796 - RNA, 19 nt, Homo sapiens
  misc_RNA (1)...(19): siRNA sense strand
ggcguguaguggaaccaaa

SEQ ID NO: 1782797 - RNA, 19 nt, Homo sapiens
  misc_RNA (1)...(19): siRNA sense strand
acgagaacauuuugagaaa

SEQ ID NO: 1782798 - RNA, 19 nt, Homo sapiens
  misc_RNA (1)...(19): siRNA sense strand
ggcagcagagguaguuaug

SEQ ID NO: 1782799 - RNA, 19 nt, Homo sapiens
  misc_RNA (1)...(19): siRNA sense strand
gaggugguggagguaauuu

SEQ ID NO: 1782800 - RNA, 19 nt, Homo sapiens
  misc_RNA (1)...(19): siRNA sense strand
uggaaauuauaguggacaa

SEQ ID NO: 1782801 - RNA, 19 nt, Homo sapiens
  misc_RNA (1)...(19): siRNA sense strand
ggucugagcuuugaaacua

SEQ ID NO: 1782802 - RNA, 19 nt, Homo sapiens
  misc_RNA (1)...(19): siRNA sense strand
aaagagagcuguuucuaga

SEQ ID NO: 1782803 - RNA, 19 nt, Homo sapiens
  misc_RNA (1)...(19): siRNA sense strand
gacaacagcaaucaaauua

SEQ ID NO: 1782804 - RNA, 19 nt, Homo sapiens
  misc_RNA (1)...(19): siRNA sense strand
caacagcaaucaaauuaug

SEQ ID NO: 1782805 - RNA, 19 nt, Homo sapiens
  misc_RNA (1)...(19): siRNA sense strand
ggugggaacuauaaugauu

SEQ ID NO: 1782806 - RNA, 19 nt, Homo sapiens
  misc_RNA (1)...(19): siRNA sense strand
ggacaacagcaaucaaauu

SEQ ID NO: 1782807 - RNA, 19 nt, Homo sapiens
  misc_RNA (1)...(19): siRNA sense strand
gauaugaugguuacaauga

SEQ ID NO: 1782808 - RNA, 19 nt, Homo sapiens
  misc_RNA (1)...(19): siRNA sense strand
gcauaauugugaagugaaa

SEQ ID NO: 1782809 - RNA, 19 nt, Homo sapiens
  misc_RNA (1)...(19): siRNA sense strand
ggagguggaucuggcaauu

SEQ ID NO: 1782810 - RNA, 19 nt, Homo sapiens
  misc_RNA (1)...(19): siRNA sense strand
gaugauaguuuacgagaac

SEQ ID NO: 1782811 - RNA, 19 nt, Homo sapiens
  misc_RNA (1)...(19): siRNA sense strand
guucagaaauaccacacua

SEQ ID NO: 1782812 - RNA, 19 nt, Homo sapiens
  misc_RNA (1)...(19): siRNA sense strand
gggcauaauugugaaguga

SEQ ID NO: 1782813 - RNA, 19 nt, Homo sapiens
  misc_RNA (1)...(19): siRNA sense strand
gaagacaggcagaguggaa

SEQ ID NO: 1782814 - RNA, 19 nt, Homo sapiens
  misc_RNA (1)...(19): siRNA sense strand
cagcagagguaguuaugga

SEQ ID NO: 1782815 - RNA, 19 nt, Homo sapiens
  misc_RNA (1)...(19): siRNA sense strand
caaaggaaccagagcaguu

SEQ ID NO: 1782816 - RNA, 19 nt, Homo sapiens
  misc_RNA (1)...(19): siRNA sense strand
ggaagugguggauauggua

SEQ ID NO: 1782817 - RNA, 19 nt, Homo sapiens
  misc_RNA (1)...(19): siRNA sense strand
gaaccaaagagagcuguuu

SEQ ID NO: 1782818 - RNA, 19 nt, Homo sapiens
  misc_RNA (1)...(19): siRNA sense strand
gguccugguuauaguagua

SEQ ID NO: 1782819 - RNA, 19 nt, Homo sapiens
  misc_RNA (1)...(19): siRNA sense strand
gguggaaacuuugguggaa

SEQ ID NO: 1782820 - RNA, 19 nt, Homo sapiens
  misc_RNA (1)...(19): siRNA sense strand
uagagaggauucuguaaag

SEQ ID NO: 1782821 - RNA, 19 nt, Homo sapiens
  misc_RNA (1)...(19): siRNA sense strand
gauugaaaccauagaaguu

SEQ ID NO: 1782822 - RNA, 19 nt, Homo sapiens
  misc_RNA (1)...(19): siRNA sense strand
gaaauuauaguggacaaca

SEQ ID NO: 1782823 - RNA, 19 nt, Homo sapiens
  misc_RNA (1)...(19): siRNA sense strand
ccaaagagagcuguuucua

SEQ ID NO: 1782824 - RNA, 19 nt, Homo sapiens
  misc_RNA (1)...(19): siRNA sense strand
gaugguggauauaauggau

SEQ ID NO: 1782825 - RNA, 19 nt, Homo sapiens
  misc_RNA (1)...(19): siRNA sense strand
gagaggauuugcuuuugua

SEQ ID NO: 1782826 - RNA, 19 nt, Homo sapiens
  misc_RNA (1)...(19): siRNA sense strand
agagagcuguuucuagaga

SEQ ID NO: 1782827 - RNA, 19 nt, Homo sapiens
  misc_RNA (1)...(19): siRNA sense strand
ggagggccaugauccaaag

SEQ ID NO: 1782828 - RNA, 19 nt, Homo sapiens
  misc_RNA (1)...(19): siRNA sense strand
uuaaugggcauaauuguga

SEQ ID NO: 1782829 - RNA, 19 nt, Homo sapiens
  misc_RNA (1)...(19): siRNA sense strand
caaagagagcuguuucuag

SEQ ID NO: 1782830 - RNA, 19 nt, Homo sapiens
  misc_RNA (1)...(19): siRNA sense strand
gaggugaugguggauauaa

SEQ ID NO: 1782831 - RNA, 19 nt, Homo sapiens
  misc_RNA (1)...(19): siRNA sense strand
aaccagagcaguugagaaa

SEQ ID NO: 1782832 - RNA, 19 nt, Homo sapiens
  misc_RNA (1)...(19): siRNA sense strand
cuagagaggauucuguaaa

SEQ ID NO: 1782833 - RNA, 19 nt, Homo sapiens
  misc_RNA (1)...(19): siRNA sense strand
ggagguggaggauaugaug

SEQ ID NO: 1782834 - RNA, 19 nt, Homo sapiens
  misc_RNA (1)...(19): siRNA sense strand
gacuuauucuuguguugaa

SEQ ID NO: 1782835 - RNA, 19 nt, Homo sapiens
  misc_RNA (1)...(19): siRNA sense strand
gaaccagagcaguugagaa

SEQ ID NO: 1782836 - RNA, 19 nt, Homo sapiens
  misc_RNA (1)...(19): siRNA sense strand
agagguggaugcagcaaug

SEQ ID NO: 1782837 - RNA, 19 nt, Homo sapiens
  misc_RNA (1)...(19): siRNA sense strand
caagguugaugggcgugua

SEQ ID NO: 1782838 - RNA, 19 nt, Homo sapiens
  misc_RNA (1)...(19): siRNA sense strand
gcuuugaaacuacagauga

SEQ ID NO: 1782839 - RNA, 19 nt, Homo sapiens
  misc_RNA (1)...(19): siRNA sense strand
caagauugaaaccauagaa

SEQ ID NO: 1782840 - RNA, 19 nt, Homo sapiens
  misc_RNA (1)...(19): siRNA sense strand
ggugguggcagcagaggua

SEQ ID NO: 1782841 - RNA, 19 nt, Homo sapiens
  misc_RNA (1)...(19): siRNA sense strand
gggccaugauccaaaggaa

SEQ ID NO: 1782842 - RNA, 19 nt, Homo sapiens
  misc_RNA (1)...(19): siRNA sense strand
uugagagacuacuuugaaa

SEQ ID NO: 1782843 - RNA, 19 nt, Homo sapiens
  misc_RNA (1)...(19): siRNA sense strand
ggugaugguggauauaaug

SEQ ID NO: 1782844 - RNA, 19 nt, Homo sapiens
  misc_RNA (1)...(19): siRNA sense strand
guggacaacagcaaucaaa

SEQ ID NO: 1782845 - RNA, 19 nt, Homo sapiens
  misc_RNA (1)...(19): siRNA sense strand
gaggauaugaugguuacaa

SEQ ID NO: 1782846 - RNA, 19 nt, Homo sapiens
  misc_RNA (1)...(19): siRNA sense strand
ugguggauauaauggauuu

SEQ ID NO: 1782847 - RNA, 19 nt, Homo sapiens
  misc_RNA (1)...(19): siRNA sense strand
uggaaacuuugguggaaga

SEQ ID NO: 1782848 - RNA, 19 nt, Homo sapiens
  misc_RNA (1)...(19): siRNA sense strand
ccaaggugguggauauggu

SEQ ID NO: 1782849 - RNA, 19 nt, Homo sapiens
  misc_RNA (1)...(19): siRNA sense strand
cagauugugugguaaugag

SEQ ID NO: 1782850 - RNA, 19 nt, Homo sapiens
  misc_RNA (1)...(19): siRNA sense strand
guggugggaacuauaauga

SEQ ID NO: 1782851 - RNA, 19 nt, Homo sapiens
  misc_RNA (1)...(19): siRNA sense strand
ugguggagguggaggauau

SEQ ID NO: 1782852 - RNA, 19 nt, Homo sapiens
  misc_RNA (1)...(19): siRNA sense strand
uaaugggcauaauugugaa

SEQ ID NO: 1782853 - RNA, 19 nt, Homo sapiens
  misc_RNA (1)...(19): siRNA sense strand
ggaggugguggagguaauu

SEQ ID NO: 1782854 - RNA, 19 nt, Homo sapiens
  misc_RNA (1)...(19): siRNA sense strand
gauaguuuacgagaacauu

SEQ ID NO: 1782855 - RNA, 19 nt, Homo sapiens
  misc_RNA (1)...(19): siRNA sense strand
ggauaugaugguuacaaug

SEQ ID NO: 1782856 - RNA, 19 nt, Homo sapiens
  misc_RNA (1)...(19): siRNA sense strand
gagguggaucuggcaauuu

SEQ ID NO: 1782857 - RNA, 19 nt, Homo sapiens
  misc_RNA (1)...(19): siRNA sense strand
acaaugaaggaggaaauuu

SEQ ID NO: 1782858 - RNA, 19 nt, Homo sapiens
  misc_RNA (1)...(19): siRNA sense strand
gguggaggauaugaugguu

SEQ ID NO: 1782859 - RNA, 19 nt, Homo sapiens
  misc_RNA (1)...(19): siRNA sense strand
ugaugggcguguaguggaa

SEQ ID NO: 1782860 - RNA, 19 nt, Homo sapiens
  misc_RNA (1)...(19): siRNA sense strand
gugggaacuauaaugauuu

SEQ ID NO: 1782861 - RNA, 19 nt, Homo sapiens
  misc_RNA (1)...(19): siRNA sense strand
gaggugaugguggcaacua

SEQ ID NO: 1782862 - RNA, 19 nt, Homo sapiens
  misc_RNA (1)...(19): siRNA sense strand
uaauggauuuggaggugau

SEQ ID NO: 1782863 - RNA, 19 nt, Homo sapiens
  misc_RNA (1)...(19): siRNA sense strand
ggaggugaugguggauaua

SEQ ID NO: 1782864 - RNA, 19 nt, Homo sapiens
  misc_RNA (1)...(19): siRNA sense strand
aaaggaaccagagcaguug

SEQ ID NO: 1782865 - RNA, 19 nt, Homo sapiens
  misc_RNA (1)...(19): siRNA sense strand
uuugagagacuacuuugaa

SEQ ID NO: 1782866 - RNA, 19 nt, Homo sapiens
  misc_RNA (1)...(19): siRNA sense strand
gaugaucaugauacaguug

SEQ ID NO: 1782867 - RNA, 19 nt, Homo sapiens
  misc_RNA (1)...(19): siRNA sense strand
caaugaaggaggaaauuuu

SEQ ID NO: 1782868 - RNA, 19 nt, Homo sapiens
  misc_RNA (1)...(19): siRNA sense strand
uaugaugguuacaaugaag

SEQ ID NO: 1782869 - RNA, 19 nt, Homo sapiens
  misc_RNA (1)...(19): siRNA sense strand
uggccgugguggaaacuuu

SEQ ID NO: 1782870 - RNA, 19 nt, Homo sapiens
  misc_RNA (1)...(19): siRNA sense strand
ugacuuauucuuguguuga

SEQ ID NO: 1782871 - RNA, 19 nt, Homo sapiens
  misc_RNA (1)...(19): siRNA sense strand
gugguggugggaacuauaa

SEQ ID NO: 1782872 - RNA, 19 nt, Homo sapiens
  misc_RNA (1)...(19): siRNA sense strand
aggauaugaugguuacaau

SEQ ID NO: 1782873 - RNA, 19 nt, Homo sapiens
  misc_RNA (1)...(19): siRNA sense strand
uggaggauaugaugguuac

SEQ ID NO: 1782874 - RNA, 19 nt, Homo sapiens
  misc_RNA (1)...(19): siRNA sense strand
gaggaggugaugguggaua

SEQ ID NO: 1782875 - RNA, 19 nt, Homo sapiens
  misc_RNA (1)...(19): siRNA sense strand
ggaaccagagcaguugaga

SEQ ID NO: 1782876 - RNA, 19 nt, Homo sapiens
  misc_RNA (1)...(19): siRNA sense strand
gcaagauugaaaccauaga

SEQ ID NO: 1782877 - RNA, 19 nt, Homo sapiens
  misc_RNA (1)...(19): siRNA sense strand
gugcccaucuaacagugaa

SEQ ID NO: 1782878 - RNA, 19 nt, Homo sapiens
  misc_RNA (1)...(19): siRNA sense strand
gaggagggccaugauccaa

SEQ ID NO: 1782879 - RNA, 19 nt, Homo sapiens
  misc_RNA (1)...(19): siRNA sense strand
ugguggaagugguggauau

SEQ ID NO: 1782880 - RNA, 19 nt, Homo sapiens
  misc_RNA (1)...(19): siRNA sense strand
guggaggauaugaugguua

SEQ ID NO: 1782881 - RNA, 19 nt, Homo sapiens
  misc_RNA (1)...(19): siRNA sense strand
ggugguccugguuauagua

SEQ ID NO: 1782882 - RNA, 19 nt, Homo sapiens
  misc_RNA (1)...(19): siRNA sense strand
gcuuugguuuugugacuua

SEQ ID NO: 1782883 - RNA, 19 nt, Homo sapiens
  misc_RNA (1)...(19): siRNA sense strand
aggaggugaugguggauau

SEQ ID NO: 1782884 - RNA, 19 nt, Homo sapiens
  misc_RNA (1)...(19): siRNA sense strand
ggugguggugggaacuaua

SEQ ID NO: 1782885 - RNA, 19 nt, Homo sapiens
  misc_RNA (1)...(19): siRNA sense strand
gugacuuauucuuguguug

SEQ ID NO: 1782886 - RNA, 19 nt, Homo sapiens
  misc_RNA (1)...(19): siRNA sense strand
gguggucugagcuuugaaa

SEQ ID NO: 1782887 - RNA, 19 nt, Homo sapiens
  misc_RNA (1)...(19): siRNA sense strand
agaugauaguuuacgagaa

SEQ ID NO: 1782888 - RNA, 19 nt, Homo sapiens
  misc_RNA (1)...(19): siRNA sense strand
gauaugguagcagaagguu

SEQ ID NO: 1782889 - RNA, 19 nt, Homo sapiens
  misc_RNA (1)...(19): siRNA sense strand
ggauaugguagcagaaggu

SEQ ID NO: 1782890 - RNA, 19 nt, Homo sapiens
  misc_RNA (1)...(19): siRNA sense strand
gguggcagcagagguaguu

SEQ ID NO: 1782891 - RNA, 19 nt, Homo sapiens
  misc_RNA (1)...(19): siRNA sense strand
uuggugguauuaaagaaga

SEQ ID NO: 1782892 - RNA, 19 nt, Homo sapiens
  misc_RNA (1)...(19): siRNA sense strand
gguggugggaacuauaaug

SEQ ID NO: 1782893 - RNA, 19 nt, Homo sapiens
  misc_RNA (1)...(19): siRNA sense strand
accaggauauggaaaccaa

SEQ ID NO: 1782894 - RNA, 19 nt, Homo sapiens
  misc_RNA (1)...(19): siRNA sense strand
uggauauaauggauuugga

SEQ ID NO: 1782895 - RNA, 19 nt, Homo sapiens
  misc_RNA (1)...(19): siRNA sense strand
ggaggagggccaugaucca

SEQ ID NO: 1782896 - RNA, 19 nt, Homo sapiens
  misc_RNA (1)...(19): siRNA sense strand
ggcguguaguggaaccaaa

SEQ ID NO: 1782897 - RNA, 19 nt, Homo sapiens
  misc_RNA (1)...(19): siRNA sense strand
acgagaacauuuugagaaa

SEQ ID NO: 1782898 - RNA, 19 nt, Homo sapiens
  misc_RNA (1)...(19): siRNA sense strand
ggcagcagagguaguuaug

SEQ ID NO: 1782899 - RNA, 19 nt, Homo sapiens
  misc_RNA (1)...(19): siRNA sense strand
gaggugguggagguaauuu

SEQ ID NO: 1782900 - RNA, 19 nt, Homo sapiens
  misc_RNA (1)...(19): siRNA sense strand
uggaaauuauaguggacaa

SEQ ID NO: 1782901 - RNA, 19 nt, Homo sapiens
  misc_RNA (1)...(19): siRNA sense strand
gaagagagcugccgaagag

SEQ ID NO: 1782902 - RNA, 19 nt, Homo sapiens
  misc_RNA (1)...(19): siRNA sense strand
ggaaagagcgaaagaaaga

SEQ ID NO: 1782903 - RNA, 19 nt, Homo sapiens
  misc_RNA (1)...(19): siRNA sense strand
ccaaggaccugaaggagaa

SEQ ID NO: 1782904 - RNA, 19 nt, Homo sapiens
  misc_RNA (1)...(19): siRNA sense strand
ggaagaagaagaugaggaa

SEQ ID NO: 1782905 - RNA, 19 nt, Homo sapiens
  misc_RNA (1)...(19): siRNA sense strand
agaagaagaugaggaagaa

SEQ ID NO: 1782906 - RNA, 19 nt, Homo sapiens
  misc_RNA (1)...(19): siRNA sense strand
ggaagaagaagaagaggau

SEQ ID NO: 1782907 - RNA, 19 nt, Homo sapiens
  misc_RNA (1)...(19): siRNA sense strand
agaagaaacugccgaggau

SEQ ID NO: 1782908 - RNA, 19 nt, Homo sapiens
  misc_RNA (1)...(19): siRNA sense strand
ggagaaggcaagccggaaa

SEQ ID NO: 1782909 - RNA, 19 nt, Homo sapiens
  misc_RNA (1)...(19): siRNA sense strand
gaacggggcugaggaggaa

SEQ ID NO: 1782910 - RNA, 19 nt, Homo sapiens
  misc_RNA (1)...(19): siRNA sense strand
ugaaggagaagaaggagaa

SEQ ID NO: 1782911 - RNA, 19 nt, Homo sapiens
  misc_RNA (1)...(19): siRNA sense strand
ccaaacggcagaagacaga

SEQ ID NO: 1782912 - RNA, 19 nt, Homo sapiens
  misc_RNA (1)...(19): siRNA sense strand
ggaggaagaagaagaaacu

SEQ ID NO: 1782913 - RNA, 19 nt, Homo sapiens
  misc_RNA (1)...(19): siRNA sense strand
aggagaagguggaggagaa

SEQ ID NO: 1782914 - RNA, 19 nt, Homo sapiens
  misc_RNA (1)...(19): siRNA sense strand
agaagaagaggaugaugaa

SEQ ID NO: 1782915 - RNA, 19 nt, Homo sapiens
  misc_RNA (1)...(19): siRNA sense strand
gaaagagcgaaagaaagaa

SEQ ID NO: 1782916 - RNA, 19 nt, Homo sapiens
  misc_RNA (1)...(19): siRNA sense strand
gggcugaggaggaagaaga

SEQ ID NO: 1782917 - RNA, 19 nt, Homo sapiens
  misc_RNA (1)...(19): siRNA sense strand
ccggaaagagcgaaagaaa

SEQ ID NO: 1782918 - RNA, 19 nt, Homo sapiens
  misc_RNA (1)...(19): siRNA sense strand
aagaagaagaggaugauga

SEQ ID NO: 1782919 - RNA, 19 nt, Homo sapiens
  misc_RNA (1)...(19): siRNA sense strand
ugaggaggaagaagaagaa

SEQ ID NO: 1782920 - RNA, 19 nt, Homo sapiens
  misc_RNA (1)...(19): siRNA sense strand
gaagaagaagaggaugaug

SEQ ID NO: 1782921 - RNA, 19 nt, Homo sapiens
  misc_RNA (1)...(19): siRNA sense strand
aagaagaagaugaggaaga

SEQ ID NO: 1782922 - RNA, 19 nt, Homo sapiens
  misc_RNA (1)...(19): siRNA sense strand
gaucccaaacggcagaaga

SEQ ID NO: 1782923 - RNA, 19 nt, Homo sapiens
  misc_RNA (1)...(19): siRNA sense strand
aagaagaugaggaagaaga

SEQ ID NO: 1782924 - RNA, 19 nt, Homo sapiens
  misc_RNA (1)...(19): siRNA sense strand
ugaagagagcugccgaaga

SEQ ID NO: 1782925 - RNA, 19 nt, Homo sapiens
  misc_RNA (1)...(19): siRNA sense strand
aagaagaagaagaggauga

SEQ ID NO: 1782926 - RNA, 19 nt, Homo sapiens
  misc_RNA (1)...(19): siRNA sense strand
gcgccaaggaccugaagga

SEQ ID NO: 1782927 - RNA, 19 nt, Homo sapiens
  misc_RNA (1)...(19): siRNA sense strand
agaagaugaggaagaagaa

SEQ ID NO: 1782928 - RNA, 19 nt, Homo sapiens
  misc_RNA (1)...(19): siRNA sense strand
ugaggaagaagaagaagag

SEQ ID NO: 1782929 - RNA, 19 nt, Homo sapiens
  misc_RNA (1)...(19): siRNA sense strand
gagaaggcaagccggaaag

SEQ ID NO: 1782930 - RNA, 19 nt, Homo sapiens
  misc_RNA (1)...(19): siRNA sense strand
ggauggagaggaggaagau

SEQ ID NO: 1782931 - RNA, 19 nt, Homo sapiens
  misc_RNA (1)...(19): siRNA sense strand
aaacggcagaagacagaaa

SEQ ID NO: 1782932 - RNA, 19 nt, Homo sapiens
  misc_RNA (1)...(19): siRNA sense strand
gaaggcaagccggaaagag

SEQ ID NO: 1782933 - RNA, 19 nt, Homo sapiens
  misc_RNA (1)...(19): siRNA sense strand
gaagaugaggaagaagaag

SEQ ID NO: 1782934 - RNA, 19 nt, Homo sapiens
  misc_RNA (1)...(19): siRNA sense strand
gaagaagaggaugaugaag

SEQ ID NO: 1782935 - RNA, 19 nt, Homo sapiens
  misc_RNA (1)...(19): siRNA sense strand
aagaugaggaagaagaaga

SEQ ID NO: 1782936 - RNA, 19 nt, Homo sapiens
  misc_RNA (1)...(19): siRNA sense strand
gaggaggaagaagaagaaa

SEQ ID NO: 1782937 - RNA, 19 nt, Homo sapiens
  misc_RNA (1)...(19): siRNA sense strand
ucaacaugcucaucaagua

SEQ ID NO: 1782938 - RNA, 19 nt, Homo sapiens
  misc_RNA (1)...(19): siRNA sense strand
ggacgaggagugcuucuuu

SEQ ID NO: 1782939 - RNA, 19 nt, Homo sapiens
  misc_RNA (1)...(19): siRNA sense strand
gacgaggagugcuucuuug

SEQ ID NO: 1782940 - RNA, 19 nt, Homo sapiens
  misc_RNA (1)...(19): siRNA sense strand
ggacgacuucuucaacaug

SEQ ID NO: 1782941 - RNA, 19 nt, Homo sapiens
  misc_RNA (1)...(19): siRNA sense strand
gugcuucuuugaccuguug

SEQ ID NO: 1782942 - RNA, 19 nt, Homo sapiens
  misc_RNA (1)...(19): siRNA sense strand
gcgaaucacccacagcaau

SEQ ID NO: 1782943 - RNA, 19 nt, Homo sapiens
  misc_RNA (1)...(19): siRNA sense strand
ggacuucuucagccucauu

SEQ ID NO: 1782944 - RNA, 19 nt, Homo sapiens
  misc_RNA (1)...(19): siRNA sense strand
ggaauucuucgaccucauc

SEQ ID NO: 1782945 - RNA, 19 nt, Homo sapiens
  misc_RNA (1)...(19): siRNA sense strand
cgaaucacccacagcaaug

SEQ ID NO: 1782946 - RNA, 19 nt, Homo sapiens
  misc_RNA (1)...(19): siRNA sense strand
gggacgacuucuucaacau

SEQ ID NO: 1782947 - RNA, 19 nt, Homo sapiens
  misc_RNA (1)...(19): siRNA sense strand
ucuuugaccuguugaccaa

SEQ ID NO: 1782948 - RNA, 19 nt, Homo sapiens
  misc_RNA (1)...(19): siRNA sense strand
caacaugcucaucaaguac

SEQ ID NO: 1782949 - RNA, 19 nt, Homo sapiens
  misc_RNA (1)...(19): siRNA sense strand
ccagaccgaggaauucuuc

SEQ ID NO: 1782950 - RNA, 19 nt, Homo sapiens
  misc_RNA (1)...(19): siRNA sense strand
uucagagggugcaggcuaa

SEQ ID NO: 1782951 - RNA, 19 nt, Homo sapiens
  misc_RNA (1)...(19): siRNA sense strand
ucaacaugcucaucaagua

SEQ ID NO: 1782952 - RNA, 19 nt, Homo sapiens
  misc_RNA (1)...(19): siRNA sense strand
ggacgaggagugcuucuuu

SEQ ID NO: 1782953 - RNA, 19 nt, Homo sapiens
  misc_RNA (1)...(19): siRNA sense strand
gacgaggagugcuucuuug

SEQ ID NO: 1782954 - RNA, 19 nt, Homo sapiens
  misc_RNA (1)...(19): siRNA sense strand
ggacgacuucuucaacaug

SEQ ID NO: 1782955 - RNA, 19 nt, Homo sapiens
  misc_RNA (1)...(19): siRNA sense strand
gugcuucuuugaccuguug

SEQ ID NO: 1782956 - RNA, 19 nt, Homo sapiens
  misc_RNA (1)...(19): siRNA sense strand
gcgaaucacccacagcaau

SEQ ID NO: 1782957 - RNA, 19 nt, Homo sapiens
  misc_RNA (1)...(19): siRNA sense strand
ggacuucuucagccucauu

SEQ ID NO: 1782958 - RNA, 19 nt, Homo sapiens
  misc_RNA (1)...(19): siRNA sense strand
ggaauucuucgaccucauc

SEQ ID NO: 1782959 - RNA, 19 nt, Homo sapiens
  misc_RNA (1)...(19): siRNA sense strand
cgaaucacccacagcaaug

SEQ ID NO: 1782960 - RNA, 19 nt, Homo sapiens
  misc_RNA (1)...(19): siRNA sense strand
gggacgacuucuucaacau

SEQ ID NO: 1782961 - RNA, 19 nt, Homo sapiens
  misc_RNA (1)...(19): siRNA sense strand
ucuuugaccuguugaccaa

SEQ ID NO: 1782962 - RNA, 19 nt, Homo sapiens
  misc_RNA (1)...(19): siRNA sense strand
caacaugcucaucaaguac

SEQ ID NO: 1782963 - RNA, 19 nt, Homo sapiens
  misc_RNA (1)...(19): siRNA sense strand
ccagaccgaggaauucuuc

SEQ ID NO: 1782964 - RNA, 19 nt, Homo sapiens
  misc_RNA (1)...(19): siRNA sense strand
uucagagggugcaggcuaa

SEQ ID NO: 1782965 - RNA, 19 nt, Homo sapiens
  misc_RNA (1)...(19): siRNA sense strand
gaagggcgcuggaagguau

SEQ ID NO: 1782966 - RNA, 19 nt, Homo sapiens
  misc_RNA (1)...(19): siRNA sense strand
gcaaacccaucguuccaua

SEQ ID NO: 1782967 - RNA, 19 nt, Homo sapiens
  misc_RNA (1)...(19): siRNA sense strand
gcugggagguuccugguua

SEQ ID NO: 1782968 - RNA, 19 nt, Homo sapiens
  misc_RNA (1)...(19): siRNA sense strand
guuaaugacuguauagaga

SEQ ID NO: 1782969 - RNA, 19 nt, Homo sapiens
  misc_RNA (1)...(19): siRNA sense strand
gaaacccaccugacuagua

SEQ ID NO: 1782970 - RNA, 19 nt, Homo sapiens
  misc_RNA (1)...(19): siRNA sense strand
ggagguuccugguuacaga

SEQ ID NO: 1782971 - RNA, 19 nt, Homo sapiens
  misc_RNA (1)...(19): siRNA sense strand
ggaccuugcuccugguuuc

SEQ ID NO: 1782972 - RNA, 19 nt, Homo sapiens
  misc_RNA (1)...(19): siRNA sense strand
caaagagccugaugagacu

SEQ ID NO: 1782973 - RNA, 19 nt, Homo sapiens
  misc_RNA (1)...(19): siRNA sense strand
ccagggauuuggacauuug

SEQ ID NO: 1782974 - RNA, 19 nt, Homo sapiens
  misc_RNA (1)...(19): siRNA sense strand
gcuaguggcugugucuuau

SEQ ID NO: 1782975 - RNA, 19 nt, Homo sapiens
  misc_RNA (1)...(19): siRNA sense strand
cagcuucagugcucaguga

SEQ ID NO: 1782976 - RNA, 19 nt, Homo sapiens
  misc_RNA (1)...(19): siRNA sense strand
aaacccaccugacuaguag

SEQ ID NO: 1782977 - RNA, 19 nt, Homo sapiens
  misc_RNA (1)...(19): siRNA sense strand
ugagggaguugcuguuaau

SEQ ID NO: 1782978 - RNA, 19 nt, Homo sapiens
  misc_RNA (1)...(19): siRNA sense strand
gacauuuggugccaucuuc

SEQ ID NO: 1782979 - RNA, 19 nt, Homo sapiens
  misc_RNA (1)...(19): siRNA sense strand
guggaggucuagagauguu

SEQ ID NO: 1782980 - RNA, 19 nt, Homo sapiens
  misc_RNA (1)...(19): siRNA sense strand
ucucugccguggaguguuu

SEQ ID NO: 1782981 - RNA, 19 nt, Homo sapiens
  misc_RNA (1)...(19): siRNA sense strand
gaggcugaccacguuauua

SEQ ID NO: 1782982 - RNA, 19 nt, Homo sapiens
  misc_RNA (1)...(19): siRNA sense strand
gagcuuggcuuggauucag

SEQ ID NO: 1782983 - RNA, 19 nt, Homo sapiens
  misc_RNA (1)...(19): siRNA sense strand
gcuacacaauuaggacuga

SEQ ID NO: 1782984 - RNA, 19 nt, Homo sapiens
  misc_RNA (1)...(19): siRNA sense strand
uggcuuggauucagaagug

SEQ ID NO: 1782985 - RNA, 19 nt, Homo sapiens
  misc_RNA (1)...(19): siRNA sense strand
cuaauggugcuaucuuuga

SEQ ID NO: 1782986 - RNA, 19 nt, Homo sapiens
  misc_RNA (1)...(19): siRNA sense strand
aaucguguaugacucaguu

SEQ ID NO: 1782987 - RNA, 19 nt, Homo sapiens
  misc_RNA (1)...(19): siRNA sense strand
aacccaucguuccauauua

SEQ ID NO: 1782988 - RNA, 19 nt, Homo sapiens
  misc_RNA (1)...(19): siRNA sense strand
gggaguugcuguuaaugac

SEQ ID NO: 1782989 - RNA, 19 nt, Homo sapiens
  misc_RNA (1)...(19): siRNA sense strand
agagucagcuaggcaauuc

SEQ ID NO: 1782990 - RNA, 19 nt, Homo sapiens
  misc_RNA (1)...(19): siRNA sense strand
ucuggaggcugaccacguu

SEQ ID NO: 1782991 - RNA, 19 nt, Homo sapiens
  misc_RNA (1)...(19): siRNA sense strand
gcuggaagguaucucuaag

SEQ ID NO: 1782992 - RNA, 19 nt, Homo sapiens
  misc_RNA (1)...(19): siRNA sense strand
gagcaaacccaucguucca

SEQ ID NO: 1782993 - RNA, 19 nt, Homo sapiens
  misc_RNA (1)...(19): siRNA sense strand
aaacccaucguuccauauu

SEQ ID NO: 1782994 - RNA, 19 nt, Homo sapiens
  misc_RNA (1)...(19): siRNA sense strand
uaugagggaguugcuguua

SEQ ID NO: 1782995 - RNA, 19 nt, Homo sapiens
  misc_RNA (1)...(19): siRNA sense strand
ggaggcugaccacguuauu

SEQ ID NO: 1782996 - RNA, 19 nt, Homo sapiens
  misc_RNA (1)...(19): siRNA sense strand
gggaaucguguaugacuca

SEQ ID NO: 1782997 - RNA, 19 nt, Homo sapiens
  misc_RNA (1)...(19): siRNA sense strand
ggacauuuggugccaucuu

SEQ ID NO: 1782998 - RNA, 19 nt, Homo sapiens
  misc_RNA (1)...(19): siRNA sense strand
ggcuaguggcugugucuua

SEQ ID NO: 1782999 - RNA, 19 nt, Homo sapiens
  misc_RNA (1)...(19): siRNA sense strand
cccuaauggugcuaucuuu

SEQ ID NO: 1783000 - RNA, 19 nt, Homo sapiens
  misc_RNA (1)...(19): siRNA sense strand
gggcaaagagccugaugag

SEQ ID NO: 1783001 - RNA, 19 nt, Homo sapiens
  misc_RNA (1)...(19): siRNA sense strand
aauuaggacugaaggagau

SEQ ID NO: 1783002 - RNA, 19 nt, Homo sapiens
  misc_RNA (1)...(19): siRNA sense strand
uuucugagcuuggcuugga

SEQ ID NO: 1783003 - RNA, 19 nt, Homo sapiens
  misc_RNA (1)...(19): siRNA sense strand
gccagacucagcacucauu

SEQ ID NO: 1783004 - RNA, 19 nt, Homo sapiens
  misc_RNA (1)...(19): siRNA sense strand
ucguggaggucuagagaug

SEQ ID NO: 1783005 - RNA, 19 nt, Homo sapiens
  misc_RNA (1)...(19): siRNA sense strand
ccacguuauuagugccauu

SEQ ID NO: 1783006 - RNA, 19 nt, Homo sapiens
  misc_RNA (1)...(19): siRNA sense strand
uaaugacuguauagagagu

SEQ ID NO: 1783007 - RNA, 19 nt, Homo sapiens
  misc_RNA (1)...(19): siRNA sense strand
cauauuacugggccuguug

SEQ ID NO: 1783008 - RNA, 19 nt, Homo sapiens
  misc_RNA (1)...(19): siRNA sense strand
ggccucagagugacuguga

SEQ ID NO: 1783009 - RNA, 19 nt, Homo sapiens
  misc_RNA (1)...(19): siRNA sense strand
gcugaccacguuauuagug

SEQ ID NO: 1783010 - RNA, 19 nt, Homo sapiens
  misc_RNA (1)...(19): siRNA sense strand
cagccagacucagcacuca

SEQ ID NO: 1783011 - RNA, 19 nt, Homo sapiens
  misc_RNA (1)...(19): siRNA sense strand
uaauggugcuaucuuugag

SEQ ID NO: 1783012 - RNA, 19 nt, Homo sapiens
  misc_RNA (1)...(19): siRNA sense strand
gucuguagcuguggugaau

SEQ ID NO: 1783013 - RNA, 19 nt, Homo sapiens
  misc_RNA (1)...(19): siRNA sense strand
gaaucugcaguaccaagga

SEQ ID NO: 1783014 - RNA, 19 nt, Homo sapiens
  misc_RNA (1)...(19): siRNA sense strand
guguaugacucaguugcuu

SEQ ID NO: 1783015 - RNA, 19 nt, Homo sapiens
  misc_RNA (1)...(19): siRNA sense strand
ccauauuacugggccuguu

SEQ ID NO: 1783016 - RNA, 19 nt, Homo sapiens
  misc_RNA (1)...(19): siRNA sense strand
augagggaguugcuguuaa

SEQ ID NO: 1783017 - RNA, 19 nt, Homo sapiens
  misc_RNA (1)...(19): siRNA sense strand
cuugaaacccaccugacua

SEQ ID NO: 1783018 - RNA, 19 nt, Homo sapiens
  misc_RNA (1)...(19): siRNA sense strand
guggcugugucuuaucuca

SEQ ID NO: 1783019 - RNA, 19 nt, Homo sapiens
  misc_RNA (1)...(19): siRNA sense strand
cagcugcccagaacagguu

SEQ ID NO: 1783020 - RNA, 19 nt, Homo sapiens
  misc_RNA (1)...(19): siRNA sense strand
gcugagcaaacccaucguu

SEQ ID NO: 1783021 - RNA, 19 nt, Homo sapiens
  misc_RNA (1)...(19): siRNA sense strand
ccuaauggugcuaucuuug

SEQ ID NO: 1783022 - RNA, 19 nt, Homo sapiens
  misc_RNA (1)...(19): siRNA sense strand
caaacccaucguuccauau

SEQ ID NO: 1783023 - RNA, 19 nt, Homo sapiens
  misc_RNA (1)...(19): siRNA sense strand
guaccaaggagcccaucug

SEQ ID NO: 1783024 - RNA, 19 nt, Homo sapiens
  misc_RNA (1)...(19): siRNA sense strand
ucaguguccugggcacaga

SEQ ID NO: 1783025 - RNA, 19 nt, Homo sapiens
  misc_RNA (1)...(19): siRNA sense strand
uaucucaggagcuguuuca

SEQ ID NO: 1783026 - RNA, 19 nt, Homo sapiens
  misc_RNA (1)...(19): siRNA sense strand
guaugacucaguugcuuuc

SEQ ID NO: 1783027 - RNA, 19 nt, Homo sapiens
  misc_RNA (1)...(19): siRNA sense strand
gcgcuggaagguaucucua

SEQ ID NO: 1783028 - RNA, 19 nt, Homo sapiens
  misc_RNA (1)...(19): siRNA sense strand
ccacugcuugguccaucua

SEQ ID NO: 1783029 - RNA, 19 nt, Homo sapiens
  misc_RNA (1)...(19): siRNA sense strand
cuacacaauuaggacugaa

SEQ ID NO: 1783030 - RNA, 19 nt, Homo sapiens
  misc_RNA (1)...(19): siRNA sense strand
ggagacagcuguugcaauc

SEQ ID NO: 1783031 - RNA, 19 nt, Homo sapiens
  misc_RNA (1)...(19): siRNA sense strand
ugaaauuccucaaugauuc

SEQ ID NO: 1783032 - RNA, 19 nt, Homo sapiens
  misc_RNA (1)...(19): siRNA sense strand
uaaaggaaauggacaaugc

SEQ ID NO: 1783033 - RNA, 19 nt, Homo sapiens
  misc_RNA (1)...(19): siRNA sense strand
gaacagcuucuucuugaau

SEQ ID NO: 1783034 - RNA, 19 nt, Homo sapiens
  misc_RNA (1)...(19): siRNA sense strand
ggacaaugcaggacagcua

SEQ ID NO: 1783035 - RNA, 19 nt, Homo sapiens
  misc_RNA (1)...(19): siRNA sense strand
ucaaugaguccuacaagaa

SEQ ID NO: 1783036 - RNA, 19 nt, Homo sapiens
  misc_RNA (1)...(19): siRNA sense strand
caaugaguccuacaagaaa

SEQ ID NO: 1783037 - RNA, 19 nt, Homo sapiens
  misc_RNA (1)...(19): siRNA sense strand
ugauggcccugaagaaguu

SEQ ID NO: 1783038 - RNA, 19 nt, Homo sapiens
  misc_RNA (1)...(19): siRNA sense strand
ugaagaaguuugugauggu

SEQ ID NO: 1783039 - RNA, 19 nt, Homo sapiens
  misc_RNA (1)...(19): siRNA sense strand
cauaaaggaggauguguau

SEQ ID NO: 1783040 - RNA, 19 nt, Homo sapiens
  misc_RNA (1)...(19): siRNA sense strand
gugaaauuccucaaugauu

SEQ ID NO: 1783041 - RNA, 19 nt, Homo sapiens
  misc_RNA (1)...(19): siRNA sense strand
ggaauuuacgucuuaucuu

SEQ ID NO: 1783042 - RNA, 19 nt, Homo sapiens
  misc_RNA (1)...(19): siRNA sense strand
caucauaccauuccuugga

SEQ ID NO: 1783043 - RNA, 19 nt, Homo sapiens
  misc_RNA (1)...(19): siRNA sense strand
ccauaaaggaggaugugua

SEQ ID NO: 1783044 - RNA, 19 nt, Homo sapiens
  misc_RNA (1)...(19): siRNA sense strand
gcucagagaugcccuucac

SEQ ID NO: 1783045 - RNA, 19 nt, Homo sapiens
  misc_RNA (1)...(19): siRNA sense strand
caggacagcuaguguuucu

SEQ ID NO: 1783046 - RNA, 19 nt, Homo sapiens
  misc_RNA (1)...(19): siRNA sense strand
gucaggcacuugcuaagga

SEQ ID NO: 1783047 - RNA, 19 nt, Homo sapiens
  misc_RNA (1)...(19): siRNA sense strand
cuacaaugcuaugggauuc

SEQ ID NO: 1783048 - RNA, 19 nt, Homo sapiens
  misc_RNA (1)...(19): siRNA sense strand
aaugucaauucccaaguaa

SEQ ID NO: 1783049 - RNA, 19 nt, Homo sapiens
  misc_RNA (1)...(19): siRNA sense strand
uaaaggaggauguguaucg

SEQ ID NO: 1783050 - RNA, 19 nt, Homo sapiens
  misc_RNA (1)...(19): siRNA sense strand
cuccaaaguuguucaggaa

SEQ ID NO: 1783051 - RNA, 19 nt, Homo sapiens
  misc_RNA (1)...(19): siRNA sense strand
ugcuaaggauccuaaauug

SEQ ID NO: 1783052 - RNA, 19 nt, Homo sapiens
  misc_RNA (1)...(19): siRNA sense strand
ccaaguaacaacagugugu

SEQ ID NO: 1783053 - RNA, 19 nt, Homo sapiens
  misc_RNA (1)...(19): siRNA sense strand
cuaaggauccuaaauugca

SEQ ID NO: 1783054 - RNA, 19 nt, Homo sapiens
  misc_RNA (1)...(19): siRNA sense strand
gaagaaaauaccuggaauu

SEQ ID NO: 1783055 - RNA, 19 nt, Homo sapiens
  misc_RNA (1)...(19): siRNA sense strand
gggaccaucuucaguuguc

SEQ ID NO: 1783056 - RNA, 19 nt, Homo sapiens
  misc_RNA (1)...(19): siRNA sense strand
gcuacaaugcuaugggauu

SEQ ID NO: 1783057 - RNA, 19 nt, Homo sapiens
  misc_RNA (1)...(19): siRNA sense strand
gcaaggcuacaaugcuaug

SEQ ID NO: 1783058 - RNA, 19 nt, Homo sapiens
  misc_RNA (1)...(19): siRNA sense strand
cagggaggccaauuucuga

SEQ ID NO: 1783059 - RNA, 19 nt, Homo sapiens
  misc_RNA (1)...(19): siRNA sense strand
uggugaaauuccucaauga

SEQ ID NO: 1783060 - RNA, 19 nt, Homo sapiens
  misc_RNA (1)...(19): siRNA sense strand
agaccucccuguacacaca

SEQ ID NO: 1783061 - RNA, 19 nt, Homo sapiens
  misc_RNA (1)...(19): siRNA sense strand
uugcuaaggauccuaaauu

SEQ ID NO: 1783062 - RNA, 19 nt, Homo sapiens
  misc_RNA (1)...(19): siRNA sense strand
caaccacagcaucuucuug

SEQ ID NO: 1783063 - RNA, 19 nt, Homo sapiens
  misc_RNA (1)...(19): siRNA sense strand
agaaguuugugauggugaa

SEQ ID NO: 1783064 - RNA, 19 nt, Homo sapiens
  misc_RNA (1)...(19): siRNA sense strand
gggcaguggcucagagaug

SEQ ID NO: 1783065 - RNA, 19 nt, Homo sapiens
  misc_RNA (1)...(19): siRNA sense strand
ggugaaauuccucaaugau

SEQ ID NO: 1783066 - RNA, 19 nt, Homo sapiens
  misc_RNA (1)...(19): siRNA sense strand
cuucuuggcagauauaaau

SEQ ID NO: 1783067 - RNA, 19 nt, Homo sapiens
  misc_RNA (1)...(19): siRNA sense strand
ccagggaggccaauuucug

SEQ ID NO: 1783068 - RNA, 19 nt, Homo sapiens
  misc_RNA (1)...(19): siRNA sense strand
gagaagaaaauaccuggaa

SEQ ID NO: 1783069 - RNA, 19 nt, Homo sapiens
  misc_RNA (1)...(19): siRNA sense strand
accuggaauuuacgucuua

SEQ ID NO: 1783070 - RNA, 19 nt, Homo sapiens
  misc_RNA (1)...(19): siRNA sense strand
ucugugacuucauccgaaa

SEQ ID NO: 1783071 - RNA, 19 nt, Homo sapiens
  misc_RNA (1)...(19): siRNA sense strand
gauggugaaauuccucaau

SEQ ID NO: 1783072 - RNA, 19 nt, Homo sapiens
  misc_RNA (1)...(19): siRNA sense strand
gcaaccacagcaucuucuu

SEQ ID NO: 1783073 - RNA, 19 nt, Homo sapiens
  misc_RNA (1)...(19): siRNA sense strand
aguuugugauggugaaauu

SEQ ID NO: 1783074 - RNA, 19 nt, Homo sapiens
  misc_RNA (1)...(19): siRNA sense strand
ugucaauucccaaguaaca

SEQ ID NO: 1783075 - RNA, 19 nt, Homo sapiens
  misc_RNA (1)...(19): siRNA sense strand
ccacaucauaccauuccuu

SEQ ID NO: 1783076 - RNA, 19 nt, Homo sapiens
  misc_RNA (1)...(19): siRNA sense strand
gauucggagugguuuggau

SEQ ID NO: 1783077 - RNA, 19 nt, Homo sapiens
  misc_RNA (1)...(19): siRNA sense strand
gcccugaagaaguuuguga

SEQ ID NO: 1783078 - RNA, 19 nt, Homo sapiens
  misc_RNA (1)...(19): siRNA sense strand
cagcuguugcaaucccuua

SEQ ID NO: 1783079 - RNA, 19 nt, Homo sapiens
  misc_RNA (1)...(19): siRNA sense strand
ucaggcacuugcuaaggau

SEQ ID NO: 1783080 - RNA, 19 nt, Homo sapiens
  misc_RNA (1)...(19): siRNA sense strand
auggugaaauuccucaaug

SEQ ID NO: 1783081 - RNA, 19 nt, Homo sapiens
  misc_RNA (1)...(19): siRNA sense strand
gggcguacuccaaaguugu

SEQ ID NO: 1783082 - RNA, 19 nt, Homo sapiens
  misc_RNA (1)...(19): siRNA sense strand
uaccuggaauuuacgucuu

SEQ ID NO: 1783083 - RNA, 19 nt, Homo sapiens
  misc_RNA (1)...(19): siRNA sense strand
gaaauuccucaaugauucc

SEQ ID NO: 1783084 - RNA, 19 nt, Homo sapiens
  misc_RNA (1)...(19): siRNA sense strand
gggagacagcuguugcaau

SEQ ID NO: 1783085 - RNA, 19 nt, Homo sapiens
  misc_RNA (1)...(19): siRNA sense strand
gaaguuugugauggugaaa

SEQ ID NO: 1783086 - RNA, 19 nt, Homo sapiens
  misc_RNA (1)...(19): siRNA sense strand
ugauggaggacguggagaa

SEQ ID NO: 1783087 - RNA, 19 nt, Homo sapiens
  misc_RNA (1)...(19): siRNA sense strand
gcaggacagcuaguguuuc

SEQ ID NO: 1783088 - RNA, 19 nt, Homo sapiens
  misc_RNA (1)...(19): siRNA sense strand
gcuaaaggaaauggacaau

SEQ ID NO: 1783089 - RNA, 19 nt, Homo sapiens
  misc_RNA (1)...(19): siRNA sense strand
cggagugguuuggauuuua

SEQ ID NO: 1783090 - RNA, 19 nt, Homo sapiens
  misc_RNA (1)...(19): siRNA sense strand
guaucaaugaguccuacaa

SEQ ID NO: 1783091 - RNA, 19 nt, Homo sapiens
  misc_RNA (1)...(19): siRNA sense strand
ucaggaacgccucgugcaa

SEQ ID NO: 1783092 - RNA, 19 nt, Homo sapiens
  misc_RNA (1)...(19): siRNA sense strand
gcaaggagcuucuggaaua

SEQ ID NO: 1783093 - RNA, 19 nt, Homo sapiens
  misc_RNA (1)...(19): siRNA sense strand
gcaaagaucccucaaauau

SEQ ID NO: 1783094 - RNA, 19 nt, Homo sapiens
  misc_RNA (1)...(19): siRNA sense strand
gcauggaagugaauauuaa

SEQ ID NO: 1783095 - RNA, 19 nt, Homo sapiens
  misc_RNA (1)...(19): siRNA sense strand
guaaagauguggaugaaug

SEQ ID NO: 1783096 - RNA, 19 nt, Homo sapiens
  misc_RNA (1)...(19): siRNA sense strand
gaagaacugugcaauaaag

SEQ ID NO: 1783097 - RNA, 19 nt, Homo sapiens
  misc_RNA (1)...(19): siRNA sense strand
gaacauacauccaaaauca

SEQ ID NO: 1783098 - RNA, 19 nt, Homo sapiens
  misc_RNA (1)...(19): siRNA sense strand
gaacaugugugcucagcuu

SEQ ID NO: 1783099 - RNA, 19 nt, Homo sapiens
  misc_RNA (1)...(19): siRNA sense strand
gaagaaaggauucaaacuu

SEQ ID NO: 1783100 - RNA, 19 nt, Homo sapiens
  misc_RNA (1)...(19): siRNA sense strand
gaagccauuucuaaacaua

SEQ ID NO: 1783101 - RNA, 19 nt, Homo sapiens
  misc_RNA (1)...(19): siRNA sense strand
gcacgucagucaacuaaug

SEQ ID NO: 1783102 - RNA, 19 nt, Homo sapiens
  misc_RNA (1)...(19): siRNA sense strand
uauaugagcugcaaagaug

SEQ ID NO: 1783103 - RNA, 19 nt, Homo sapiens
  misc_RNA (1)...(19): siRNA sense strand
auacgaagcuggaauuuga

SEQ ID NO: 1783104 - RNA, 19 nt, Homo sapiens
  misc_RNA (1)...(19): siRNA sense strand
caaugaagauggauauaug

SEQ ID NO: 1783105 - RNA, 19 nt, Homo sapiens
  misc_RNA (1)...(19): siRNA sense strand
gaaaauggauugcuggaaa

SEQ ID NO: 1783106 - RNA, 19 nt, Homo sapiens
  misc_RNA (1)...(19): siRNA sense strand
ucgaagaacugugcaauaa

SEQ ID NO: 1783107 - RNA, 19 nt, Homo sapiens
  misc_RNA (1)...(19): siRNA sense strand
gagaagggcuccuacuauc

SEQ ID NO: 1783108 - RNA, 19 nt, Homo sapiens
  misc_RNA (1)...(19): siRNA sense strand
gcagucaaauuugugauaa

SEQ ID NO: 1783109 - RNA, 19 nt, Homo sapiens
  misc_RNA (1)...(19): siRNA sense strand
gcaacaggcuucacaaguc

SEQ ID NO: 1783110 - RNA, 19 nt, Homo sapiens
  misc_RNA (1)...(19): siRNA sense strand
gaaugaacauacauccaaa

SEQ ID NO: 1783111 - RNA, 19 nt, Homo sapiens
  misc_RNA (1)...(19): siRNA sense strand
gaaaccaucucccaugaag

SEQ ID NO: 1783112 - RNA, 19 nt, Homo sapiens
  misc_RNA (1)...(19): siRNA sense strand
caaagaucccucaaauaua

SEQ ID NO: 1783113 - RNA, 19 nt, Homo sapiens
  misc_RNA (1)...(19): siRNA sense strand
uaaagaagcugugauggau

SEQ ID NO: 1783114 - RNA, 19 nt, Homo sapiens
  misc_RNA (1)...(19): siRNA sense strand
ucaacaaucucaucuggaa

SEQ ID NO: 1783115 - RNA, 19 nt, Homo sapiens
  misc_RNA (1)...(19): siRNA sense strand
aagaaaggauucaaacuug

SEQ ID NO: 1783116 - RNA, 19 nt, Homo sapiens
  misc_RNA (1)...(19): siRNA sense strand
guaaaugugaccuugaaua

SEQ ID NO: 1783117 - RNA, 19 nt, Homo sapiens
  misc_RNA (1)...(19): siRNA sense strand
ggagguugcagucaaauuu

SEQ ID NO: 1783118 - RNA, 19 nt, Homo sapiens
  misc_RNA (1)...(19): siRNA sense strand
gaacucauuaaaccgauua

SEQ ID NO: 1783119 - RNA, 19 nt, Homo sapiens
  misc_RNA (1)...(19): siRNA sense strand
cuaagaagcugugucaaug

SEQ ID NO: 1783120 - RNA, 19 nt, Homo sapiens
  misc_RNA (1)...(19): siRNA sense strand
gcugaggguuggcauguaa

SEQ ID NO: 1783121 - RNA, 19 nt, Homo sapiens
  misc_RNA (1)...(19): siRNA sense strand
aggcaaaccuucugucaaa

SEQ ID NO: 1783122 - RNA, 19 nt, Homo sapiens
  misc_RNA (1)...(19): siRNA sense strand
ggaaagugaacucauuaaa

SEQ ID NO: 1783123 - RNA, 19 nt, Homo sapiens
  misc_RNA (1)...(19): siRNA sense strand
gaauuuagagucaacagaa

SEQ ID NO: 1783124 - RNA, 19 nt, Homo sapiens
  misc_RNA (1)...(19): siRNA sense strand
uauuagagcucacucaugu

SEQ ID NO: 1783125 - RNA, 19 nt, Homo sapiens
  misc_RNA (1)...(19): siRNA sense strand
gauuaacccucgucuagau

SEQ ID NO: 1783126 - RNA, 19 nt, Homo sapiens
  misc_RNA (1)...(19): siRNA sense strand
acaaagcaaugaaagcaaa

SEQ ID NO: 1783127 - RNA, 19 nt, Homo sapiens
  misc_RNA (1)...(19): siRNA sense strand
aaugugaccuugaauauuc

SEQ ID NO: 1783128 - RNA, 19 nt, Homo sapiens
  misc_RNA (1)...(19): siRNA sense strand
cuagauggauguauacgaa

SEQ ID NO: 1783129 - RNA, 19 nt, Homo sapiens
  misc_RNA (1)...(19): siRNA sense strand
ggaugaagccauuucuaaa

SEQ ID NO: 1783130 - RNA, 19 nt, Homo sapiens
  misc_RNA (1)...(19): siRNA sense strand
caaacaggguaaucuugaa

SEQ ID NO: 1783131 - RNA, 19 nt, Homo sapiens
  misc_RNA (1)...(19): siRNA sense strand
ggaggugauguuauuaaua

SEQ ID NO: 1783132 - RNA, 19 nt, Homo sapiens
  misc_RNA (1)...(19): siRNA sense strand
gugaagauauagaugaaug

SEQ ID NO: 1783133 - RNA, 19 nt, Homo sapiens
  misc_RNA (1)...(19): siRNA sense strand
gaaagauuguaaagaugug

SEQ ID NO: 1783134 - RNA, 19 nt, Homo sapiens
  misc_RNA (1)...(19): siRNA sense strand
gauaauacaccuggaaguu

SEQ ID NO: 1783135 - RNA, 19 nt, Homo sapiens
  misc_RNA (1)...(19): siRNA sense strand
uagaaaccaucucccauga

SEQ ID NO: 1783136 - RNA, 19 nt, Homo sapiens
  misc_RNA (1)...(19): siRNA sense strand
gaaagugaacucauuaaac

SEQ ID NO: 1783137 - RNA, 19 nt, Homo sapiens
  misc_RNA (1)...(19): siRNA sense strand
aaguucagcuuaagaauga

SEQ ID NO: 1783138 - RNA, 19 nt, Homo sapiens
  misc_RNA (1)...(19): siRNA sense strand
gaaguucagcuuaagaaug

SEQ ID NO: 1783139 - RNA, 19 nt, Homo sapiens
  misc_RNA (1)...(19): siRNA sense strand
cagaaggcgugauacugua

SEQ ID NO: 1783140 - RNA, 19 nt, Homo sapiens
  misc_RNA (1)...(19): siRNA sense strand
gcaaugaagauggauauau

SEQ ID NO: 1783141 - RNA, 19 nt, Homo sapiens
  misc_RNA (1)...(19): siRNA sense strand
gcaaauucuuuacuugaag

SEQ ID NO: 1783142 - RNA, 19 nt, Homo sapiens
  misc_RNA (1)...(19): siRNA sense strand
caaggagcuucuggaauaa

SEQ ID NO: 1783143 - RNA, 19 nt, Homo sapiens
  misc_RNA (1)...(19): siRNA sense strand
aauaagcauugccugguua

SEQ ID NO: 1783144 - RNA, 19 nt, Homo sapiens
  misc_RNA (1)...(19): siRNA sense strand
ugaaagagaaugcaucgaa

SEQ ID NO: 1783145 - RNA, 19 nt, Homo sapiens
  misc_RNA (1)...(19): siRNA sense strand
gaagaguugugagguuguu

SEQ ID NO: 1783146 - RNA, 19 nt, Homo sapiens
  misc_RNA (1)...(19): siRNA sense strand
cccgaaggcuacagauaua

SEQ ID NO: 1783147 - RNA, 19 nt, Homo sapiens
  misc_RNA (1)...(19): siRNA sense strand
guggaagaauuagaacaua

SEQ ID NO: 1783148 - RNA, 19 nt, Homo sapiens
  misc_RNA (1)...(19): siRNA sense strand
gagaaugcaucgaagaacu

SEQ ID NO: 1783149 - RNA, 19 nt, Homo sapiens
  misc_RNA (1)...(19): siRNA sense strand
ggaagugaauauuaauggu

SEQ ID NO: 1783150 - RNA, 19 nt, Homo sapiens
  misc_RNA (1)...(19): siRNA sense strand
guggaugaaugcucuuuga

SEQ ID NO: 1783151 - RNA, 19 nt, Homo sapiens
  misc_RNA (1)...(19): siRNA sense strand
ggaucuggaugaagccauu

SEQ ID NO: 1783152 - RNA, 19 nt, Homo sapiens
  misc_RNA (1)...(19): siRNA sense strand
ggacaaagcaaugaaagca

SEQ ID NO: 1783153 - RNA, 19 nt, Homo sapiens
  misc_RNA (1)...(19): siRNA sense strand
ucagaagaguugugagguu

SEQ ID NO: 1783154 - RNA, 19 nt, Homo sapiens
  misc_RNA (1)...(19): siRNA sense strand
ccuugaaccuugacacaaa

SEQ ID NO: 1783155 - RNA, 19 nt, Homo sapiens
  misc_RNA (1)...(19): siRNA sense strand
caucuggaauuuagaguca

SEQ ID NO: 1783156 - RNA, 19 nt, Homo sapiens
  misc_RNA (1)...(19): siRNA sense strand
gaugaaugcucugagaaca

SEQ ID NO: 1783157 - RNA, 19 nt, Homo sapiens
  misc_RNA (1)...(19): siRNA sense strand
ccaaacaggguaaucuuga

SEQ ID NO: 1783158 - RNA, 19 nt, Homo sapiens
  misc_RNA (1)...(19): siRNA sense strand
gcugugauggauauaaaua

SEQ ID NO: 1783159 - RNA, 19 nt, Homo sapiens
  misc_RNA (1)...(19): siRNA sense strand
aagaagcugugauggauau

SEQ ID NO: 1783160 - RNA, 19 nt, Homo sapiens
  misc_RNA (1)...(19): siRNA sense strand
ggagaaaagugugaauuug

SEQ ID NO: 1783161 - RNA, 19 nt, Homo sapiens
  misc_RNA (1)...(19): siRNA sense strand
gaauauuaaugguguacag

SEQ ID NO: 1783162 - RNA, 19 nt, Homo sapiens
  misc_RNA (1)...(19): siRNA sense strand
aaucucaucuggaauuuag

SEQ ID NO: 1783163 - RNA, 19 nt, Homo sapiens
  misc_RNA (1)...(19): siRNA sense strand
gauacaggcccuaagucua

SEQ ID NO: 1783164 - RNA, 19 nt, Homo sapiens
  misc_RNA (1)...(19): siRNA sense strand
ugaaugcucugagaacaug

SEQ ID NO: 1783165 - RNA, 19 nt, Homo sapiens
  misc_RNA (1)...(19): siRNA sense strand
gaagcuggaauuugaugaa

SEQ ID NO: 1783166 - RNA, 19 nt, Homo sapiens
  misc_RNA (1)...(19): siRNA sense strand
ggaagcgucgugcaaauuc

SEQ ID NO: 1783167 - RNA, 19 nt, Homo sapiens
  misc_RNA (1)...(19): siRNA sense strand
ucagucaacuaaugcuuau

SEQ ID NO: 1783168 - RNA, 19 nt, Homo sapiens
  misc_RNA (1)...(19): siRNA sense strand
aaauaagcauugccugguu

SEQ ID NO: 1783169 - RNA, 19 nt, Homo sapiens
  misc_RNA (1)...(19): siRNA sense strand
aaagugaacucauuaaacc

SEQ ID NO: 1783170 - RNA, 19 nt, Homo sapiens
  misc_RNA (1)...(19): siRNA sense strand
gcucagcuuugugucaauu

SEQ ID NO: 1783171 - RNA, 19 nt, Homo sapiens
  misc_RNA (1)...(19): siRNA sense strand
uaauacaccuggaaguuac

SEQ ID NO: 1783172 - RNA, 19 nt, Homo sapiens
  misc_RNA (1)...(19): siRNA sense strand
ucaaaucaaagucuuguga

SEQ ID NO: 1783173 - RNA, 19 nt, Homo sapiens
  misc_RNA (1)...(19): siRNA sense strand
gugaaugccuuuuauaaug

SEQ ID NO: 1783174 - RNA, 19 nt, Homo sapiens
  misc_RNA (1)...(19): siRNA sense strand
gaauauggugucuguggaa

SEQ ID NO: 1783175 - RNA, 19 nt, Homo sapiens
  misc_RNA (1)...(19): siRNA sense strand
gaaccuugacacaaaguau

SEQ ID NO: 1783176 - RNA, 19 nt, Homo sapiens
  misc_RNA (1)...(19): siRNA sense strand
guugugagguuguuucagu

SEQ ID NO: 1783177 - RNA, 19 nt, Homo sapiens
  misc_RNA (1)...(19): siRNA sense strand
gaacugugcaauaaagaag

SEQ ID NO: 1783178 - RNA, 19 nt, Homo sapiens
  misc_RNA (1)...(19): siRNA sense strand
guggaaagugaacucauua

SEQ ID NO: 1783179 - RNA, 19 nt, Homo sapiens
  misc_RNA (1)...(19): siRNA sense strand
aagcugugauggauauaaa

SEQ ID NO: 1783180 - RNA, 19 nt, Homo sapiens
  misc_RNA (1)...(19): siRNA sense strand
gaagcugugauggauauaa

SEQ ID NO: 1783181 - RNA, 19 nt, Homo sapiens
  misc_RNA (1)...(19): siRNA sense strand
guaguccucugccaugcaa

SEQ ID NO: 1783182 - RNA, 19 nt, Homo sapiens
  misc_RNA (1)...(19): siRNA sense strand
ccagggaggucuuugaaaa

SEQ ID NO: 1783183 - RNA, 19 nt, Homo sapiens
  misc_RNA (1)...(19): siRNA sense strand
uaacaacacagugcccuuu

SEQ ID NO: 1783184 - RNA, 19 nt, Homo sapiens
  misc_RNA (1)...(19): siRNA sense strand
uauggaauauggugucugu

SEQ ID NO: 1783185 - RNA, 19 nt, Homo sapiens
  misc_RNA (1)...(19): siRNA sense strand
augcaaagaucccucaaau

SEQ ID NO: 1783186 - RNA, 19 nt, Homo sapiens
  misc_RNA (1)...(19): siRNA sense strand
gcuuaagaaugaacauaca

SEQ ID NO: 1783187 - RNA, 19 nt, Homo sapiens
  misc_RNA (1)...(19): siRNA sense strand
auaauacaccuggaaguua

SEQ ID NO: 1783188 - RNA, 19 nt, Homo sapiens
  misc_RNA (1)...(19): siRNA sense strand
ccggacauaugauucagaa

SEQ ID NO: 1783189 - RNA, 19 nt, Homo sapiens
  misc_RNA (1)...(19): siRNA sense strand
uggaugaagccauuucuaa

SEQ ID NO: 1783190 - RNA, 19 nt, Homo sapiens
  misc_RNA (1)...(19): siRNA sense strand
uauuaaugguguacaguug

SEQ ID NO: 1783191 - RNA, 19 nt, Homo sapiens
  misc_RNA (1)...(19): siRNA sense strand
ggaagaauuagaacauagu

SEQ ID NO: 1783192 - RNA, 19 nt, Homo sapiens
  misc_RNA (1)...(19): siRNA sense strand
ucaaauuucucaccaauga

SEQ ID NO: 1783193 - RNA, 19 nt, Homo sapiens
  misc_RNA (1)...(19): siRNA sense strand
gcugugaccuucuuccuuu

SEQ ID NO: 1783194 - RNA, 19 nt, Homo sapiens
  misc_RNA (1)...(19): siRNA sense strand
ggacuacauuuaugacuuc

SEQ ID NO: 1783195 - RNA, 19 nt, Homo sapiens
  misc_RNA (1)...(19): siRNA sense strand
cagcgagugugucaaauuu

SEQ ID NO: 1783196 - RNA, 19 nt, Homo sapiens
  misc_RNA (1)...(19): siRNA sense strand
gggaagcccaggaaagaua

SEQ ID NO: 1783197 - RNA, 19 nt, Homo sapiens
  misc_RNA (1)...(19): siRNA sense strand
gcaaucauauacuguuucu

SEQ ID NO: 1783198 - RNA, 19 nt, Homo sapiens
  misc_RNA (1)...(19): siRNA sense strand
aagcugagaucaagaaauc

SEQ ID NO: 1783199 - RNA, 19 nt, Homo sapiens
  misc_RNA (1)...(19): siRNA sense strand
gcagaggccagccagcaua

SEQ ID NO: 1783200 - RNA, 19 nt, Homo sapiens
  misc_RNA (1)...(19): siRNA sense strand
gcaacuacauccacaugca

SEQ ID NO: 1783201 - RNA, 19 nt, Homo sapiens
  misc_RNA (1)...(19): siRNA sense strand
cgucaugacuaaagaggaa

SEQ ID NO: 1783202 - RNA, 19 nt, Homo sapiens
  misc_RNA (1)...(19): siRNA sense strand
ccacuacauugucuucaug

SEQ ID NO: 1783203 - RNA, 19 nt, Homo sapiens
  misc_RNA (1)...(19): siRNA sense strand
gguacaagcugagaucaag

SEQ ID NO: 1783204 - RNA, 19 nt, Homo sapiens
  misc_RNA (1)...(19): siRNA sense strand
ggaagcccaggaaagauaa

SEQ ID NO: 1783205 - RNA, 19 nt, Homo sapiens
  misc_RNA (1)...(19): siRNA sense strand
gggaagcucuacccugagu

SEQ ID NO: 1783206 - RNA, 19 nt, Homo sapiens
  misc_RNA (1)...(19): siRNA sense strand
caaggacgcugugcucuac

SEQ ID NO: 1783207 - RNA, 19 nt, Homo sapiens
  misc_RNA (1)...(19): siRNA sense strand
cauauacuguuucugcaau

SEQ ID NO: 1783208 - RNA, 19 nt, Homo sapiens
  misc_RNA (1)...(19): siRNA sense strand
gcgagugugucaaauuucu

SEQ ID NO: 1783209 - RNA, 19 nt, Homo sapiens
  misc_RNA (1)...(19): siRNA sense strand
acuaugagaugcucuucaa

SEQ ID NO: 1783210 - RNA, 19 nt, Homo sapiens
  misc_RNA (1)...(19): siRNA sense strand
cuacagcgagugugucaaa

SEQ ID NO: 1783211 - RNA, 19 nt, Homo sapiens
  misc_RNA (1)...(19): siRNA sense strand
ugucaaauuucucaccaau

SEQ ID NO: 1783212 - RNA, 19 nt, Homo sapiens
  misc_RNA (1)...(19): siRNA sense strand
ucgcaaucauauacuguuu

SEQ ID NO: 1783213 - RNA, 19 nt, Homo sapiens
  misc_RNA (1)...(19): siRNA sense strand
gagcuacccuggccaacac

SEQ ID NO: 1783214 - RNA, 19 nt, Homo sapiens
  misc_RNA (1)...(19): siRNA sense strand
caccguagcugugcucauc

SEQ ID NO: 1783215 - RNA, 19 nt, Homo sapiens
  misc_RNA (1)...(19): siRNA sense strand
gcacagccucaucuucaug

SEQ ID NO: 1783216 - RNA, 19 nt, Homo sapiens
  misc_RNA (1)...(19): siRNA sense strand
cggacuacauuuaugacuu

SEQ ID NO: 1783217 - RNA, 19 nt, Homo sapiens
  misc_RNA (1)...(19): siRNA sense strand
ccagaugcacuaugagaug

SEQ ID NO: 1783218 - RNA, 19 nt, Homo sapiens
  misc_RNA (1)...(19): siRNA sense strand
uucauccucuucaucaaua

SEQ ID NO: 1783219 - RNA, 19 nt, Homo sapiens
  misc_RNA (1)...(19): siRNA sense strand
cagggaagcccaggaaaga

SEQ ID NO: 1783220 - RNA, 19 nt, Homo sapiens
  misc_RNA (1)...(19): siRNA sense strand
gcacugcacgcgcaacuac

SEQ ID NO: 1783221 - RNA, 19 nt, Homo sapiens
  misc_RNA (1)...(19): siRNA sense strand
ggacgugggccaacuacag

SEQ ID NO: 1783222 - RNA, 19 nt, Homo sapiens
  misc_RNA (1)...(19): siRNA sense strand
gaagagugggagacaguca

SEQ ID NO: 1783223 - RNA, 19 nt, Homo sapiens
  misc_RNA (1)...(19): siRNA sense strand
gacuugagcuccgggaaca

SEQ ID NO: 1783224 - RNA, 19 nt, Homo sapiens
  misc_RNA (1)...(19): siRNA sense strand
cuucauggccuucuucuca

SEQ ID NO: 1783225 - RNA, 19 nt, Homo sapiens
  misc_RNA (1)...(19): siRNA sense strand
gcucaggcccagugcgaaa

SEQ ID NO: 1783226 - RNA, 19 nt, Homo sapiens
  misc_RNA (1)...(19): siRNA sense strand
gcucauccuggccuacuuu

SEQ ID NO: 1783227 - RNA, 19 nt, Homo sapiens
  misc_RNA (1)...(19): siRNA sense strand
ucaaggacgcugugcucua

SEQ ID NO: 1783228 - RNA, 19 nt, Homo sapiens
  misc_RNA (1)...(19): siRNA sense strand
gaggccagccagcauaaug

SEQ ID NO: 1783229 - RNA, 19 nt, Homo sapiens
  misc_RNA (1)...(19): siRNA sense strand
accggaagcugcucaaauc

SEQ ID NO: 1783230 - RNA, 19 nt, Homo sapiens
  misc_RNA (1)...(19): siRNA sense strand
caacuucauccucuucauc

SEQ ID NO: 1783231 - RNA, 19 nt, Homo sapiens
  misc_RNA (1)...(19): siRNA sense strand
cauaauggaaucagacaag

SEQ ID NO: 1783232 - RNA, 19 nt, Homo sapiens
  misc_RNA (1)...(19): siRNA sense strand
uuucugcaauggcgaggua

SEQ ID NO: 1783233 - RNA, 19 nt, Homo sapiens
  misc_RNA (1)...(19): siRNA sense strand
aaguccagaugcacuauga

SEQ ID NO: 1783234 - RNA, 19 nt, Homo sapiens
  misc_RNA (1)...(19): siRNA sense strand
ccauugugcucaacuucau

SEQ ID NO: 1783235 - RNA, 19 nt, Homo sapiens
  misc_RNA (1)...(19): siRNA sense strand
ccagcauaauggaaucaga

SEQ ID NO: 1783236 - RNA, 19 nt, Homo sapiens
  misc_RNA (1)...(19): siRNA sense strand
caucagggaagcccaggaa

SEQ ID NO: 1783237 - RNA, 19 nt, Homo sapiens
  misc_RNA (1)...(19): siRNA sense strand
ucaacuccuuccagggauu

SEQ ID NO: 1783238 - RNA, 19 nt, Homo sapiens
  misc_RNA (1)...(19): siRNA sense strand
gcgcaacuacauccacaug

SEQ ID NO: 1783239 - RNA, 19 nt, Homo sapiens
  misc_RNA (1)...(19): siRNA sense strand
gacuaaagaggaacagauc

SEQ ID NO: 1783240 - RNA, 19 nt, Homo sapiens
  misc_RNA (1)...(19): siRNA sense strand
caccaacuacuacuggauu

SEQ ID NO: 1783241 - RNA, 19 nt, Homo sapiens
  misc_RNA (1)...(19): siRNA sense strand
cagaggccagccagcauaa

SEQ ID NO: 1783242 - RNA, 19 nt, Homo sapiens
  misc_RNA (1)...(19): siRNA sense strand
ugacuaaagaggaacagau

SEQ ID NO: 1783243 - RNA, 19 nt, Homo sapiens
  misc_RNA (1)...(19): siRNA sense strand
gaagcucuacccugagucu

SEQ ID NO: 1783244 - RNA, 19 nt, Homo sapiens
  misc_RNA (1)...(19): siRNA sense strand
gaccuucuuccuuuacuuc

SEQ ID NO: 1783245 - RNA, 19 nt, Homo sapiens
  misc_RNA (1)...(19): siRNA sense strand
guacaagcugagaucaaga

SEQ ID NO: 1783246 - RNA, 19 nt, Homo sapiens
  misc_RNA (1)...(19): siRNA sense strand
gugaacgggagguguuuga

SEQ ID NO: 1783247 - RNA, 19 nt, Homo sapiens
  misc_RNA (1)...(19): siRNA sense strand
caacuccuuccagggauuu

SEQ ID NO: 1783248 - RNA, 19 nt, Homo sapiens
  misc_RNA (1)...(19): siRNA sense strand
cagggacgcucuggcaagu

SEQ ID NO: 1783249 - RNA, 19 nt, Homo sapiens
  misc_RNA (1)...(19): siRNA sense strand
cugcacagccucaucuuca

SEQ ID NO: 1783250 - RNA, 19 nt, Homo sapiens
  misc_RNA (1)...(19): siRNA sense strand
gcaggguggcugugaccuu

SEQ ID NO: 1783251 - RNA, 19 nt, Homo sapiens
  misc_RNA (1)...(19): siRNA sense strand
ccuguccggacuacauuua

SEQ ID NO: 1783252 - RNA, 19 nt, Homo sapiens
  misc_RNA (1)...(19): siRNA sense strand
ggacacuggcacuggacuu

SEQ ID NO: 1783253 - RNA, 19 nt, Homo sapiens
  misc_RNA (1)...(19): siRNA sense strand
gcugguggaugcagaugac

SEQ ID NO: 1783254 - RNA, 19 nt, Homo sapiens
  misc_RNA (1)...(19): siRNA sense strand
cauccuggccuccauugug

SEQ ID NO: 1783255 - RNA, 19 nt, Homo sapiens
  misc_RNA (1)...(19): siRNA sense strand
uguccggacuacauuuaug

SEQ ID NO: 1783256 - RNA, 19 nt, Homo sapiens
  misc_RNA (1)...(19): siRNA sense strand
ccaacuacagcgagugugu

SEQ ID NO: 1783257 - RNA, 19 nt, Homo sapiens
  misc_RNA (1)...(19): siRNA sense strand
gcaaguccagaugcacuau

SEQ ID NO: 1783258 - RNA, 19 nt, Homo sapiens
  misc_RNA (1)...(19): siRNA sense strand
ggcaaguccagaugcacua

SEQ ID NO: 1783259 - RNA, 19 nt, Homo sapiens
  misc_RNA (1)...(19): siRNA sense strand
gcucaacuucauccucuuc

SEQ ID NO: 1783260 - RNA, 19 nt, Homo sapiens
  misc_RNA (1)...(19): siRNA sense strand
ucauggccuucuucucaga

SEQ ID NO: 1783261 - RNA, 19 nt, Homo sapiens
  misc_RNA (1)...(19): siRNA sense strand
ugaccuucuuccuuuacuu

SEQ ID NO: 1783262 - RNA, 19 nt, Homo sapiens
  misc_RNA (1)...(19): siRNA sense strand
acagcgagugugucaaauu

SEQ ID NO: 1783263 - RNA, 19 nt, Homo sapiens
  misc_RNA (1)...(19): siRNA sense strand
guccggacuacauuuauga

SEQ ID NO: 1783264 - RNA, 19 nt, Homo sapiens
  misc_RNA (1)...(19): siRNA sense strand
gugggagacagucauguga

SEQ ID NO: 1783265 - RNA, 19 nt, Homo sapiens
  misc_RNA (1)...(19): siRNA sense strand
uacaagcugagaucaagaa

SEQ ID NO: 1783266 - RNA, 19 nt, Homo sapiens
  misc_RNA (1)...(19): siRNA sense strand
guccagaugcacuaugaga

SEQ ID NO: 1783267 - RNA, 19 nt, Homo sapiens
  misc_RNA (1)...(19): siRNA sense strand
gagugugucaaauuucuca

SEQ ID NO: 1783268 - RNA, 19 nt, Homo sapiens
  misc_RNA (1)...(19): siRNA sense strand
gugacacacggcagcagua

SEQ ID NO: 1783269 - RNA, 19 nt, Homo sapiens
  misc_RNA (1)...(19): siRNA sense strand
ggguggcugugaccuucuu

SEQ ID NO: 1783270 - RNA, 19 nt, Homo sapiens
  misc_RNA (1)...(19): siRNA sense strand
gaccgccugggcaugauuu

SEQ ID NO: 1783271 - RNA, 19 nt, Homo sapiens
  misc_RNA (1)...(19): siRNA sense strand
cugugaccuucuuccuuua

SEQ ID NO: 1783272 - RNA, 19 nt, Homo sapiens
  misc_RNA (1)...(19): siRNA sense strand
gcauaauggaaucagacaa

SEQ ID NO: 1783273 - RNA, 19 nt, Homo sapiens
  misc_RNA (1)...(19): siRNA sense strand
cacuggacuucaagcgaaa

SEQ ID NO: 1783274 - RNA, 19 nt, Homo sapiens
  misc_RNA (1)...(19): siRNA sense strand
caagcugagaucaagaaau

SEQ ID NO: 1783275 - RNA, 19 nt, Homo sapiens
  misc_RNA (1)...(19): siRNA sense strand
cgagguacaagcugagauc

SEQ ID NO: 1783276 - RNA, 19 nt, Homo sapiens
  misc_RNA (1)...(19): siRNA sense strand
ccagccagcauaauggaau

SEQ ID NO: 1783277 - RNA, 19 nt, Homo sapiens
  misc_RNA (1)...(19): siRNA sense strand
caacuacuacuggauucug

SEQ ID NO: 1783278 - RNA, 19 nt, Homo sapiens
  misc_RNA (1)...(19): siRNA sense strand
gaagaacgaugcuaugauu

SEQ ID NO: 1783279 - RNA, 19 nt, Homo sapiens
  misc_RNA (1)...(19): siRNA sense strand
gaaauuaggugggcugauu

SEQ ID NO: 1783280 - RNA, 19 nt, Homo sapiens
  misc_RNA (1)...(19): siRNA sense strand
gaacuucucuggcaugguu

SEQ ID NO: 1783281 - RNA, 19 nt, Homo sapiens
  misc_RNA (1)...(19): siRNA sense strand
uaggugggcugauuaauuu

SEQ ID NO: 1783282 - RNA, 19 nt, Homo sapiens
  misc_RNA (1)...(19): siRNA sense strand
gaaguuggcuuugaauaca

SEQ ID NO: 1783283 - RNA, 19 nt, Homo sapiens
  misc_RNA (1)...(19): siRNA sense strand
gcaaacagagugcuaagaa

SEQ ID NO: 1783284 - RNA, 19 nt, Homo sapiens
  misc_RNA (1)...(19): siRNA sense strand
aaacagagugcuaagaaua

SEQ ID NO: 1783285 - RNA, 19 nt, Homo sapiens
  misc_RNA (1)...(19): siRNA sense strand
gcacagaaguacacagucu

SEQ ID NO: 1783286 - RNA, 19 nt, Homo sapiens
  misc_RNA (1)...(19): siRNA sense strand
gauaucagccacccaguaa

SEQ ID NO: 1783287 - RNA, 19 nt, Homo sapiens
  misc_RNA (1)...(19): siRNA sense strand
gaacgaugcuaugauuugu

SEQ ID NO: 1783288 - RNA, 19 nt, Homo sapiens
  misc_RNA (1)...(19): siRNA sense strand
gcuaugauuuguuucgaaa

SEQ ID NO: 1783289 - RNA, 19 nt, Homo sapiens
  misc_RNA (1)...(19): siRNA sense strand
gaacgucuccuagguauuc

SEQ ID NO: 1783290 - RNA, 19 nt, Homo sapiens
  misc_RNA (1)...(19): siRNA sense strand
gaaucgagaugucagaagu

SEQ ID NO: 1783291 - RNA, 19 nt, Homo sapiens
  misc_RNA (1)...(19): siRNA sense strand
caccaugccucacaccaua

SEQ ID NO: 1783292 - RNA, 19 nt, Homo sapiens
  misc_RNA (1)...(19): siRNA sense strand
caaagaaugcgcucuaugu

SEQ ID NO: 1783293 - RNA, 19 nt, Homo sapiens
  misc_RNA (1)...(19): siRNA sense strand
ccaguuggaugcacuugaa

SEQ ID NO: 1783294 - RNA, 19 nt, Homo sapiens
  misc_RNA (1)...(19): siRNA sense strand
caaacagagugcuaagaau

SEQ ID NO: 1783295 - RNA, 19 nt, Homo sapiens
  misc_RNA (1)...(19): siRNA sense strand
gcuguuagcucgcuuugag

SEQ ID NO: 1783296 - RNA, 19 nt, Homo sapiens
  misc_RNA (1)...(19): siRNA sense strand
cuaguuuggucccaguuua

SEQ ID NO: 1783297 - RNA, 19 nt, Homo sapiens
  misc_RNA (1)...(19): siRNA sense strand
aagccaagcugucuucaug

SEQ ID NO: 1783298 - RNA, 19 nt, Homo sapiens
  misc_RNA (1)...(19): siRNA sense strand
gaaaucaggaaucgagaug

SEQ ID NO: 1783299 - RNA, 19 nt, Homo sapiens
  misc_RNA (1)...(19): siRNA sense strand
cauaggaugugagcauauu

SEQ ID NO: 1783300 - RNA, 19 nt, Homo sapiens
  misc_RNA (1)...(19): siRNA sense strand
cagaacgucuccuagguau

SEQ ID NO: 1783301 - RNA, 19 nt, Homo sapiens
  misc_RNA (1)...(19): siRNA sense strand
ucagugcuuucauggauuu

SEQ ID NO: 1783302 - RNA, 19 nt, Homo sapiens
  misc_RNA (1)...(19): siRNA sense strand
uggaugcacuugaacuaaa

SEQ ID NO: 1783303 - RNA, 19 nt, Homo sapiens
  misc_RNA (1)...(19): siRNA sense strand
guacuuuacuuguccuaag

SEQ ID NO: 1783304 - RNA, 19 nt, Homo sapiens
  misc_RNA (1)...(19): siRNA sense strand
gacagaacgucuccuaggu

SEQ ID NO: 1783305 - RNA, 19 nt, Homo sapiens
  misc_RNA (1)...(19): siRNA sense strand
acgaugcuaugauuuguuu

SEQ ID NO: 1783306 - RNA, 19 nt, Homo sapiens
  misc_RNA (1)...(19): siRNA sense strand
cgagaugucagaaguaaau

SEQ ID NO: 1783307 - RNA, 19 nt, Homo sapiens
  misc_RNA (1)...(19): siRNA sense strand
ucaagcagugugugaauuu

SEQ ID NO: 1783308 - RNA, 19 nt, Homo sapiens
  misc_RNA (1)...(19): siRNA sense strand
gcaaagaaugcgcucuaug

SEQ ID NO: 1783309 - RNA, 19 nt, Homo sapiens
  misc_RNA (1)...(19): siRNA sense strand
gugcuuucauggauuuaaa

SEQ ID NO: 1783310 - RNA, 19 nt, Homo sapiens
  misc_RNA (1)...(19): siRNA sense strand
gugagcauauuuucuguua

SEQ ID NO: 1783311 - RNA, 19 nt, Homo sapiens
  misc_RNA (1)...(19): siRNA sense strand
ccaguuuacucagugcuuu

SEQ ID NO: 1783312 - RNA, 19 nt, Homo sapiens
  misc_RNA (1)...(19): siRNA sense strand
gcaccuaauagugacaaua

SEQ ID NO: 1783313 - RNA, 19 nt, Homo sapiens
  misc_RNA (1)...(19): siRNA sense strand
auuuaaaccugggcuguua

SEQ ID NO: 1783314 - RNA, 19 nt, Homo sapiens
  misc_RNA (1)...(19): siRNA sense strand
ggcuuugaauacaugaaua
